United States Patent Application Publication US 2026/0103690 A1 - sequence listing, part 86

SEQ ID NO: 424844 - protein, 438 aa, unidentified
MSNKVIFNLDELFISVGIDVGADFSWMSIALPNQQFVGKPYKILHNSIDSLTTAVSKIKEAEELYSLESRIFLESTGIYHYPLFCYLRDKGFNCSVINPIITKNSTNINIRKVHNDRFDSKKAALVGLKSDLKVSLMPSDLALNCRNLCREYYDLMDNRSAYVNKLQGELRMAFPQYLGIFSKVTINTSLTLLETYTSPSAFLEADKQEIIDIIKSTARFGLTYAQNKYNAIIQAATDANQFGYIIDSNIKRIRLYISFIRKYDEEINSILESLHELVDANEDADFVKQIHLIETFKGAGFLSAVSIMGEIGDFSAFSKPKQLFAYFGLDPAVKQSGKFEGTKVQMSKRGSAIARRVIHMLTLQSISIFRNGEAKNPVLREYYLKKCDSKPKLVAMGAVSHKVCNMIFAILRDNKPFKIIAPQEHIKQYNAAKCDIAA

SEQ ID NO: 424845 - protein, 343 aa, unidentified
MDHFAGLDVSVKETSVCIVDDTGRIVREVKVASEPEALLPVLTSDTYHFKRIGLEAGPLSQWLFSALAEAGLPVICVETRHMRAVLQAQINKTDRNDARGMAQMMRAGLYRPVHVKTLRSQKLRMLLTHRKLLQSKAVAIENDLRGTLRNFGLKVGVVGKVRFEARIRELVENLPDLAVLVEPMLIVRRVLREQIGILHRRLLAIVRDDDVCRRLMTIPGVGPVVALTYRATVDVPARFKNSKAVGAVLGLTPSKYQSGEINRSGAISKCGDEMMRVMLYEAAQVMLTRTNKWSWLKAWAMKIARHRGMKKAIVALARRLAVIMHRIWVDGTEFQWTREAAVA

SEQ ID NO: 424846 - protein, 408 aa, unidentified
MNTLYVGIDVSSKSNVVYLMLPNGDKHSNFSVANSHEGSTLLVKKIYSALTSHSLDTVLIGLEATSVYGDNLVYFLREDATLAPFNRKIHVLNPKQVKKFHDTYNDLPKNDYVDSFVIADCLRFGRINKEVYMGEYRYKALQNLTRARFFAVQNLVKEKQRFMNVLFKKYSTMTQEKVFSDAFSTTALAVYDEFESAEALANMDLHELTDFIIEKGKNRFPDPDAVAKAIQKAARSSYRLPKTVNDSVNQVLSISITSMKALESQIKEFDKAIKALMELLPNVLISIPGIGPVYSAGIMAEIGDINRFDNQASLAKYAGLAWKQHQSGGFEAEVTRLIPLGNRFLKYYLCEAAFSLVRCDKEYSDFYHLKYKEVNRCQHKRALALTARKFVRLVFRLLKDNRLYCPAK

SEQ ID NO: 424847 - protein, 408 aa, unidentified
MQVTFGIDVSKSTSTVCELIGESKNELTITNDHSGFIQLLKELSAFSKHPQIIFEATGVYSRRLQAFLEDYDYDYVIINPLKAKKEMDLGLRHNKTDKTDAYHLALIQRLHHHPVNHLQSQTYKQLNSLSHFYDQLTSDLVMAKNRLHQALQSTFPEIETLFCSAKGKNYWQILLHYPHCDLVRKNDKKQIINWLVQLKGVGFKHAQKTADKLITLAYKAYPVVSCDSVEVEQVQYYAHRLLSLSEYREKIIERMVQLAKSLPNHDLENLESIPGFAQTTAVRVLSELGNLRRFSNPNKINAFIGIDPGRYQSGEMDSNLSITKHGNAVARKLLYRAIGQIDNASKTNPCHIADYYESKKLSSQTKGFKKIAIASIHKLIRTIYALIINDQLYDYNVATHNQKDFSRN

SEQ ID NO: 424848 - protein, 318 aa, unidentified
MHARTHRVHWVDVSQTELVISMSPERAPYDVANNATSIAGWLDQVPSHALIGMESTGRYHSVLAHLASQAGLQVYVLNARDVFFYARALGSRAKTDRVDSKIIARYLAEHHARLHRWQPGNSLQQRLQDLLLRRAQVVMHRSALNQIMTGVDARDLDASQLQVAFDGFLTAIDARVQELIASDAQLASGCKRLRTITGIGPQTSALLASLFSRLQFANADAVVAYSGLDPRPNDSGTKRGRRRLSKKGPPLLRRQMYLAGLTASHSKALKPLYQSLRAKGFATTEAFVIIGRKLLRVAFAVWKGIESFDPVRLWPKPA

SEQ ID NO: 424849 - protein, 341 aa, unidentified
MEKCFVGLDVSKEETSICVCNQSGDVLSTARVVTDPDAILRALSKQTGAMQCVVLETGRMANWLYNQLCDRGLPMVCIDARQAHAVLSQMHNKTDANDAAMLAELARTGFYKKVEVKSRGAQERRALLKAREVALKSRVNVENTIRGLLASFGLRLPKHLSTYEQRVRALLRDQQVLSGIVLPLLELRTAALRQAAALTKELARYAKEDDACQRLMTIPGVGPVSAVTYVATIDDPRRFPKSRSVGAYLGLTSRRYQSGDMDYGGRISKRGDAMLRSTLYEAASSLLNRVKPGKGSGLQSWARALKARTSHKKAVVALARKLAVLMHAIWTNGTTFQTKEA

SEQ ID NO: 424850 - protein, 407 aa, unidentified
MRRYIGLDLHKAYVHGYVWQEGTDNKGRHLRFPSDRDGWAKFIKAHVDRDTWIAIEATGSAFHVHDILAPYAGKVVVVNSHQLKRYGDGRHSDKLDAERLAHMLALGTVKPVWVPPEEVRALRSLLYYRQRLVGERTRTINRARAILREAGFNIPRSLDPWRVVREKNLELSRTQLVILHSLGRQREHLENEIDNVTGMVYWSLADNNTARRLISLPGVGPIVAAALIAHIGDAKRFKRAKQVVRYAGLDASIHQSGEQDRRGRISKNGPPLLRSLLVQAASQIVRTGNGPLAAFYQRKVKQIGTKRAIVALARKLLVAAWRLMQSERLAHEVNLSAYRRALRELERVPSSKEVLMEAALSPRKRTQPGSTNPVQNTRAQRVGLPCKTVALFPTNNQRRSRLDFHHR

SEQ ID NO: 424851 - protein, 403 aa, unidentified
MNNVTENTKVIYVGIDVHKDTNSFCAYDSREDKLFAEHKSSSKFENTLHYLKNLQKSVGKDAVFLIGYEAGPTGYGLCRKLQKEGFACVIIAPSTIAKAPGQKVKTDRMDARLLAKTLAFKTYSPVCLPSEKLEAIKEYTRVRTAKITMLKKAKQNLLSFLLRMGLPYPQSGHYWTQAHMAWLRTVNFADKWLQESFEEYHAEVITLMDKVQRIEAKILELCKDDEVREKIDALVCISGISYVSAISIVAEIGDFSRFSKAKSFVSFIGLCPGEDSSGNRVRHTAITKAGNSRVRSLLVECAGSLRMHSVVTAKSVRVKERQKNASAAIVSYADKCTLRLRKRMLYLSQKGLPYNLVTTAGARELACFVWGMMNLVDNRKTDLNKIDEGEFSDIQKTVEEFSA

SEQ ID NO: 424852 - protein, 452 aa, unidentified
MEQQSISMAIVNPHAGGIDVGSRSHWVAVGQKEEDIREFGVFNDDLFDMADWLEQRKVTTLAMESTGTYWQNLYAVLLSRGFKVILCNGKFTKNIQGKKTDVKDCQWIQKLHSLGLLSSSFLPDGETEQLRTYCRHRANLIYSAASMSKKMQKYLRLLNLRLDVVVKDICGLTGLAIIHAVCEGEADPHKLAALRHANCRKSEAEIARALQSNGRKDYLFALKQELETYQYLQIKIQECDKEIAELLENIIENDENKKQHYTDPKPHKRINKNTPKNIDLNLKGYQMLEGTDMLAIEGMSHATVLSLISEVGVKGIRSFPSAKHFTSWLRLAPNNKVSGGKILSSKVPKGSNRLKIALRQAANAIGNLKESTPLRDFFMRINFRKGRTSAISATARKLAVIIWNMVVKGVPYNNPSGYLFLDQKRKLGLVKRIKNQIDKFGLTNEELGFTIN

SEQ ID NO: 424853 - protein, 346 aa, unidentified
MILGVDTHLDIHVGAVISQAGKQLGTHIIQTNQTGYLELLDWDRSFGLLERAGIEGTGTYGAALTRYLIKNGIYVVEVNRPDRSKRRLEGKSDPLDAENAARTVLSGSSKAIPKMQSGACEALRIISVARRSAIKARTQAINQLRALLVSAPQDVRDKLWKSKPHECVTACINSEVSEYSPLRIALCSTLRSLAKRWKALTEELNKLDESLDKLTRKDASNLRSQFGVGPQTAATLLAVAGDNPERLKNEAALASLCGVNPLPASSGKTVRHRLNRGGSREANNALWTIALVRMRSDPRTRIYVDRRTGEGLSTKEILRCLKRYIVRELYPLILSDLAYANRPLLT

SEQ ID NO: 424854 - protein, 393 aa, unidentified
MCAVFGINVSKTSSEVAILVNGEKVHGYTMPNDIVGFSRLLEDLKTVSNLVIIFESTGAYSRRLQAFLEENSYDYTRLNPLEAKKQLDGLRVRKTDKIDAEKLASSQFVLNRKPIYVQEKVYQNLHDLSRFYQNLTEDIVRTKNRLHKVLQVAFPEIEILLSTPTGEQYWNLVSIFPTKHWVLESSEVELKEIVRQSTSKRISENRVANLAEKLVGLAKQSYSAISKTSPMIEEVKYNAQELIRLTNRREKVLEQLIELAKPLPEYEFLLSILGIAETTATSVIGELGDIRRFQSANQINAFIGIDLRHYESGDFLGQEHITKRGNPYARKILYKCIHNIASASHTNPCHIADFYEKRKRQYLQQILMQFLQYIVSFRQCITLLRLTNFTITL

SEQ ID NO: 424855 - protein, 405 aa, unidentified
MGMVFVGHDWAEAHHDVYVEDGQGKRLAKARLPEGMEGVAGFHALVAPFVEEPSEVVVATETDRGLFVGALVAAGYTVLAVNPMSTSRYRERHSTSGAKSDPGDARVLAELARTDRHNHRPIAGDSDLAEAVKVLARAHQGLVWSRQRQLNQLRSTLREFYPAALAAFDELGSGDALAVLAIAPTPALGRRLSLSKIASALRRGGRQRRIEERAAEIQQALRSPQLEAPTVLADALGASATALVAVIVEVTTQISRLEAELAERFEQHPDAKIIRSLPGLGMILGARVLGEFGDDPNRYADAKSRKNYAGTSPITKASGTRKVVLARYARNRHLADACYLWAFSALTKSPGARAFYDERRAARDTHHRALRALGNRLVGILHGCLRHGTPYDEQTAWGHRHQQAA

SEQ ID NO: 424856 - protein, 376 aa, unidentified
MALDRDGKKLYDKALPNDETKMQAVIEKLATHGTILFVVDQPATIRALPVAVAQAAGVTVGYLPGLAMRRIADLHPGEAKTDARDAAIIAEAARTMPHTLRSIQVADEQVAELSMLCGFDDDLAKQVTATSNRLRGLLTQIRPALERVLGPRLDHPAVLDLIRTWPTPKSLRTAGRKRIATRLRKLAPRMYQRLADEVFIALDAQTVVVVGTNAAAVVLPQLAGILADLRASRETLYAQVEALVEAHPLHVALSSIPAVGIRTEARILTEVVGKDFATAGHLASYAGLSPVTWRSGSSIRGDHSSRRGNKVLKRALFLSAFAALKDPLSRAYYDRKRGQGKRHNQALIALARRRCDVLYAMLRDGTLYEKKSPAAA

SEQ ID NO: 424857 - protein, 321 aa, unidentified
MQPNHVFIGVDVSAATLCCATYGSAAVRDLENSVSAIKKWLAQLPASTSIAVESTGRFHRRLVELAYAAGHQVFVLNAKDVHFFARSMSGRGKTDRRDAGVIARFLAQHHDALHPWTPVPERLQRLRELLRCRSGLANRRASLQLMFQDVADLQLEALALDRQLEALICRIDERMAALVAEDAQMSERQALLLSIAGIGVQGATMLSCLFSQIPFKTSDSVVAYSGLDPRPRESGTMVGRRRLSKRGPPGLRKLLFMCAMGACNSKVFKPMYQTLKAKGFKTTQALVILARKLLRIAWSVWKTQVAFDASRLGSACVLKKA

SEQ ID NO: 424858 - protein, 413 aa, unidentified
MTQEAFAWFAGVDWGSESHYACIVDAEGFIAGEREFPHSGAGLAALGDWLLLTAGEAGAVAVAIEVPHGPVVDALIDRGFALYAINPKQLDRLRDRFSVAGAKDDRRDAYVAADGVRTDRRRFRRLQVADPRLTELRAWSRLAEELQGERVRLTNRMHHQLWRYFPQMLKLTDDLAAGWLLDLWALAPTPSKACRLRKPTIERLLKQHHIRRLDAEAVLSILREPAIKVADGVAEAASIHLRSLIARSRVVNRELREAEHKLDEICTAIAETDAASGECLQRQDIMILRSMPGVGRINLAVLLSEGSGPLSSRDYPALRTLCGAAPVTRRSGKSHIVLMRYAAHVRLRNAVYHWARFATQHDPKCRARYAALGARGHSHGRALRGVADRLLALACVLLQRQTPFDPHFARAAT

SEQ ID NO: 424859 - protein, 412 aa, unidentified
MQTLVERGCGWDVHQATVVACLLVMQKDGRIQKQTRTFGTTTRELVGLRDWLRAEGCTHLARESTGVYGKPVYAVLEGALEIVVANAQHVNKVPGRKTDVKDAEWLADLLCHGLLRPSFVPPPPIRQLRDLTRYRRKLVQSQAAERNRLLKLLESANIKLASVATDGFGVSGRLMLRALIEGQASPKEMAQLAKNKLRNKIPELELALEGRIEEHHRFLLKLQLDRLESVEKPIEVLQQHIQQKLQPYTAKLALLDEIPGVDCILAAVIIAELGVDMSVFESVSQLASWAGVCSGNNESAGKRKSSRIPKGNVYLKTALVEAAHSAAKTKGTYLRDKFYRLKARRGYKRAAVAIAHKILVAIYHMLSQQVSYNDLGDLYLDNLNKHHLTRNLVHRLERLGYAVTLTLQDKAA

SEQ ID NO: 424860 - protein, 313 aa, unidentified
MKQSFVGIDVSKNMLDVHVLPEGVSYSFAYEPQKVKALIRKLKQLKPALIVMEATGGYEISLAVQLSAAKLNMAVVNPRQVRDYARAIGKLAKTDKVDAYVIARFAQDVKPEAREQLTLKELQLKELVMRRQQLIDMRTAEKNRLTRAYTPQVLQEMQEHISDLNSRIKAIDEQLHNDIKGNPSWNQKLEIIASVPGIGDNTAHSILFCLPELGKLNRRQIAALVGVAPMNRDSGMMRGKRSIVGGRAVVRKVLHMPTLSAVTRWNKRLKTFYCHLRDQGKKHSVALTASMRKLIIMLNVMVKNNQVYDPKIC

SEQ ID NO: 424861 - protein, 406 aa, unidentified
MSAPGQVTVWVGLDVGKESHFADVLADDGERLFSRAVANDQADIEKLLDRAAGHGTPGLVIDQPGSIAQLVLAVAARRGTPVAYVPGLVMRRAADLYPGEAKADRRGAYIIADTGRTRRKQVHWLGLSSDELLAQLRVLNGYDIGLAVGVTRLSSRLRDALTSIAPGLERALGDRLHQAGVRDLLAKYPALTALRAAGRAKIAKVTGKRSPRLAGKAADAVMAAVAAQDVTVPAEAATGRVIAGLAAGLGRLHARRDALTAEIEEAFLARPFGEILASMPGIGPRAGARILAEIGNGSGFATGSKLAAYAGLAPAGRQSGTSLNAATRSRRGNHRLKNAMFLAAFAALRDPESKAYYDRKRAEGKKHNAALICLARRRCNVILAMLRDRKPYQPRTTATPGLADAA

SEQ ID NO: 424862 - protein, 313 aa, unidentified
MIIPLRYVGIDVSKQYLDIFDEALGVPERIANAPQAITQIAARWRCDVLVVFEATGVYDLELREALGRAGIRFARINPARARDFARASGRLAKTDPIDARMLAAFGRVMQPATEQAVNPARNALARLAKRRDQLVLMRAQEKNRRSEADDRALAERISRLIEVLDSEIAEIEADIKELIKAEPEITDEARLMRSLPGVGPVACMQLIAKMPELGRVGAKQIAALAGLAPFNVDSGAFRGKRKIAGGRKRVRDALYMAALNAVRRADPFKAFYERLRQAGKPAKLALIAVARKLLTVLNAMMRDRKPYLQPEPT

SEQ ID NO: 424863 - protein, 346 aa, unidentified
MKITTIGIDLAKALFQIHGVDEHGKVVLRTQLKRKDMAKYFANLEPCLIGMEACGSAHYWARKLEGYGHTIKLMAPQFVKPYVKTNKNDIADAEAICEAVSRPNMRYVSVKTVEQQAILSVHRARQGFVKARTAQSNQIRGLLSEFGIVIPQGIRSIMNQMPEILEDGENGLPGMMRTLLERLMENLKEMNRQVEELEKQIVLWHRENEASRRLAEISGIGPITASAIVATVGKAKEFKSGRQLAAWMGLVPRQHSSGGKQNLLGISKRGDTYLRTLLIHGARAVIRFAVNKAKPESWLRKLMTRRNKNVAAVALANKNARIVWALLANNQTFHPDHIPATIVAKM

SEQ ID NO: 424864 - protein, 369 aa, unidentified
MKKIVKYIGLDVHKNSIAIAIAEDGQKRDVNFYGVIKNDMDQLHKFLRKQISQGIEPRCVYEAGPCGYNIYRSLKDKGIDCVVIAPSLIPKKSGDRIKTDRRDAESLAKLHRAEELTAVYVPSMEDEALRDLVRARDDSVNMLKRAKQQLGAFLLRHNVCFSGKSKWSKAYFNWLTDISMPHPAQQITLQEYIDMVQDGKKRVERISEQIKQLAEQTQLNELNKSLQSLRGVSQIVSAVALSELGDLTRFESPGRLMAYLGLVPTQHNSGDKKRPGRITKTGNGHVRRALIEAAQAYRLPARKSRAIAKRNEGLPQEICKIAWQAQVRLCGRYKRMVFRGKNSNLVKTAVARELAGFMWAIAHAIPKTA

SEQ ID NO: 424865 - protein, 369 aa, unidentified
MEKDTIYVALDDSKRKLVIAILRPGATEPQEQEIPKDPPHIQRLFRRLRREGPVQACYEAGVSGYDLYRQITACDVTCQVIAPALTPRRPGQRIKTDRRDARKLVRLLRAGELTAIHVPDEAEEATRDLVRCREAVRRDVVRWRHRLLKLLDRHGRLWVAEKNWTQRHWTWIRAQHFELAALQRAFEATVFALEQALARQAALDQEIEALAATAPYRDPVGWLRCFRGIGTLSAMVLLAEIVDFQRFRRPRELMAYLGLVPSEYSSGETQRRGGLTKAGNTHARRVLIEAAWHYRHRPTVGRALASRSQAQPDEVVGQAWRAQQRLHRRYRHLIAHGKRPPVAVAAIARELVGFLWAAMTRREARAHVA

SEQ ID NO: 424866 - protein, 343 aa, unidentified
MDHFAGLDVSVKDTSVCIVDDTGRIVREVKVASEPDALLTLLRNQTYRFKRIGLEAGPLSQWLFSALGEANLPVICVETRHMRAVLKAQINKTDRNDARGMAQMMRVGLYRPVHVKTLRSQKLRMLLTHRKLLQSKAIAIENDLRGTLRNFGLKVGIAGRTKFEARIEELVEDVPDLAVLVEPLLVVRRVLREQIAVLHRRLLTIVRDDEVCRRLMTIPGVGSVVALTYRATVDVPARFRKSKSVGAVFGLTCARDQSGERDRPGAISRCGDEMMRAMLYEAAQSMLVRSTRWSWLKAWAMQIAKRRGMKRAIVALARRLAVIMHRIWVDGTEFRWTREAAAA

SEQ ID NO: 424867 - protein, 340 aa, unidentified
MKDTVIGVDLAKNIFQVHGASRAGEVMFRKKLRRQQFMQFMATQPPALVVLEACGSAHYWARELAGAGHEVRLIAPQYVKPFVKRQKNDAADAEAIVIAARQPEMRFVEPRTEAQQARGVLFRARQRLVHQRTELVNALRAVLYEFGLVVPQGIAHIRHIEAMLDEAVLPEAVKQECLDLLRQISEQSVRIDVRTKKIRMLAQESENTCRLQSMPGVGPLTALAIEAFAPDLQSFRRGRDFAAWLGLVPRQFSSGGKERLGKISKAGQADIRRLLIMGAMTQVNWASRKAPAPGSWLARMLTRKPRMLVAIALANRMARAIWAMATKQEDYRDPALSVAA

SEQ ID NO: 424868 - protein, 353 aa, unidentified
MSDLAEEREVILGVDTHLDVHVAVLIDVLGRVVATTSVPTTALGYEQLIEWACGFGRLTRAGIEGTGTYGAALARRVQEHGVPVLEINRPDRSRRRLRGKNDPTDAENAARAVLAGEANAIPKAQSGVVEAMRAVSMARRSAVKAKTQAINQLRALLVTAPESIRATLWKVKPEQCVAGCARLQSLGDTPLLKALTSTLRLLARRWMSLAKEVHQLDAALEELTKRAGRRLLARFGVGPQTAATLLVTAGDNPDRLRSEAALAALCGASPLEASSGKTTRHRLNRGGDRAANNALWTIAMVRMRSDPRTRAYVARRTAEGLSTKEIQRCLKRYIVRELYPLILADLAESSRPT

SEQ ID NO: 424869 - protein, 403 aa, unidentified
MNAVGIDVSKGKSMVTILRPFGEIVSSPFEIKHTSSDIHSLIKLIHSIEGESRVVMEHTGRYYEVLAHQLSAADLFVSAVNPKLVKDFNNDSLRKIKSDKADSVKIARYALDKWQSLEPYSITDELRAQLKVMNRQFHFYVKQKTAMKNNLIGLIDQTYPNANTYFNSPTRSDGSQKWVDFVSTYWHVDCIRKMSLNAFVEHYQNWCKRKKYAFNKSKAEEIYTKTKELVPVFPKNEITKHIIRQAIDQLNSTSVTVETIRTLMNETASKLPEYSIVMQFKGIGPSLGPQLMAEIGDVTRFTHKGALTAFAGVDPGVNESGSYAQKSVPTSKRGSSNLRKTLFQVMDVLIKTMPQDDPVYQFMDRKRTQGKPYYVYMTAGANKFLRIYYGRVKEYLSVLPDPS

SEQ ID NO: 424870 - protein, 371 aa, unidentified
MTIPTTTTTPNATATTTAPAGLILAIDLGKYKSVACRYAGPDAVTFESFTTDRSRLRKLLEQARPAVVVIEACLLAGWVHDLCAELGLACRVANTASDAWKFKHLKRKTDRDDALRLAQLQALGQLPAVCLPPPPTRQWRALIAYRQTLVGRRVAVQNRIRALFVAQGLPAPRGAAAWAKAGLKGLAAQARPLAECGADELWRGLLHSALAEYRHLVGLLDGAEGRLDELAKQDQGVQLLETAPGVGPRTAEAIVAHLHQPERFTSGKQVSAYVGLVPKQFQSGATDRRGRITRRGPALLRKLLVECAWVMLRYNGWARAVYLRLTHGGKARKKQAIVALARKLLVRCWAMLRDQKPWRDQTPQPAAVTPT

SEQ ID NO: 424871 - protein, 329 aa, unidentified
MFQVHGVDVDGAVMIRKRISRAKVLEFFAALTPCLVGIEACPTAHYWSRELQALGHTVRLMPPSYVKAYLKRSKNDANDAAAICEAVTRPSMRFVPTKSEQQQSALMLHRSRQLLVRQRTMLSNAIRGHMAELGVISAKGRNGTAELLEIIAKDEDDRIPGVARLSLTVLARQYAAITTEVGNIEKHIHALHRSCEESRRLAEIPGVGPIVATALIAEVGDWTAFSSGRSLAAWIGLVPRQHSTGGKDRLGRISKQGNRHLRWLLVAGAMAVIRYARQHGTKRLWLVRLMGRRPVKVAAVALANKIARMAWAMMVRGERFNEPKLQSAA

SEQ ID NO: 424872 - protein, 422 aa, unidentified
MKVFHIKDFAALIAIYWADRKHDICEHNSQTNTQQLSVISSKPKAINDWANNLKVRYKGQLVAVACELKKGPLIYALSKFEHIVLFPINPSTVAKYRKAFSHSGAKDDPSDAVVQLDILTLHMNKLSVITPDSSTVRMLSQLVEYRRKLVQERVDLTNRITTALKNYYPHVLDWFKEKDTRIFCDFITRWPSLKLVKKARKQTLIDFFNKHNARYSEVNEKRIQEIKQAEPLTNDVAIIAPNALLIECLLPQLKQLMHSIESFDSEIKTLYNKHADKFIFESLPGAGPQLAPRLLAAMGSNRERYQSAEEIQKYAGIAPVTERSGKQEWIHWRYSCTKFLRQTFVEWAGQSVRYSFWAKAYYCQQEGKGKPHNTIIRALAFKWIRILFRCWKTRTAYDESRYLQALKSKGSPLLKYAVESNF

SEQ ID NO: 424873 - protein, 344 aa, unidentified
MVTTRFVGLDIHKKTISFCIRQADGTILQEGTLVASSQALDDWLPRVPQPWIAGMEATMFTGWVYDHLRKYSPQVKVAHPAMLKAISAGKKKNDRVDAQKISDLLRCNYFSECYMASREIRDRRRVLRYRNLLVRQSVQMKNRIGSMFMETGISYNKQKLHRRRYFNHLLEDQANAMPSSMPELLRLSRLTIDALGRMNKQLLEALRTDQALAARVQRLMAIPGVGPVLSVTWALEMGNIARFPSVKDAVSHCGLGGAEQSSGGKTQRSPISKQRNKHLQTTLIEAAKVAPRWNPELAVVYEREKRKGNRNRGTLAVARKIVAYLLAVDRGERDFEQKSVTARI

SEQ ID NO: 424874 - protein, 424 aa, unidentified
MNPQPEAEFAAFVGIDWADTKHDICLRPADSDKAEFAVLPHRSDAIEQWACSLRRRFQGRPVAVCLEIAKGPLVYALQKYDFLVLFPLNPATLAKYREAFTPSHAKADPSDAEIALELLLCHRDKLKALNPQSASMRTLERLVEQRRRLVGDRNRITNRLTAALKQYYPEVLNCFEEKDTLLFCDFLAHWPTPSDAKRARQATLAAFFRHHHVRSAGLIEERLRVMKSATPLTEDVAVITPNRLLVQALVEQLRVALHAIARFDAEISTVSQTLPDYPLFSALPGAGAVLAPRLLVAFGEQRQRYASAAEFQKYTGIAPVTESSGKKHWVHWRLRCSTFMRQTFVEWAAETIPRSFWAGAYYRQQRAKGSSRQAALRALAFKWIRILYRCWQTRTPYDESTYLNALKRRGSPLLTSIGGTAKNT

SEQ ID NO: 424875 - protein, 416 aa, unidentified
MSLALPPAEFFVGVDWAAEVHAVCVINIEGKVLSQFTVAHSADGIALLLRRLAKFGEPIDIPIGIERRDGRLVDLLLEAGHPVVPVSPNAIKTWREGEVLSGAKSDAAAAAVIAEYLRLRRHRLTAAAPYSAETKAVRTVVRTRDDLVQMRVAAVNQLAALLDAYWPGATAIFADLESKIALEFLSRYPTPTAAAHLGEKRIAGFCAARGYSGKRSAAELLTRLRAAPAGTTEPHLTVALHDAVLALVGVVKAVNTAIKDLDKSVAARLGEHPDGKIFTSLPRSGQINAAQMLAEWGDCRQAYEAPDSIAALAGCTPVTKASGKHKAVHFRWACNKRFRVAITTFADNSRHASPWAAKIYNDARTAGKDHPHAVRILARAWIRVIWRSWHNNTPYDPTRHGAAQPLSAHSSVNLAA

SEQ ID NO: 424876 - protein, 346 aa, unidentified
MLYVGLDLSRKRLDFCLLDELGERVEVGAVPPDVDGLRGFAARVGRFGESVRAAIESMNGARFVRDQLELAGWTVEIADAAKVKGLAPLACKTDRIDAWVLAELCRRDLVPAIWLPNPRVRAERERARFRLHLVRHRSSLKQRVHAVLLAHGQPCPVSDLFGVRGRRLLERLALPEPWAGTVAATLRLIDDLDREIAACERELQRLGADHPYVPLLRTIPGIGWVLAYTIAAEIGDINRFASPRKLAGYTGLCPRVYQSGDSDRRGPLAKQGPKYLRWALIEATSHACRHPAYRARYQRTKQRLGKQRGTKVAQVDLARRLAEAIWYMLSRNQPFAPKGATNPLAA

SEQ ID NO: 424877 - protein, 368 aa, unidentified
MKKSITFIGLDVHKNSIDVAIADAGRNAEVRHYGTIGGGLDDLDRLVKKLVSQDKELHFVYEAGPCGYDIFRSLTGKGFDCAVVSPAHIPKSPADRVKTDRRDALTLARLHRAGELTYVFVPRADDEAMRDLTRAREDAVKAQRVARQQLGGMLLRLGFRYPGKNWSLQHFRWLADRKMPTPAQQVVFQEYINAINETTARVERLTQQIESLVPSWRMAPVVDALQGLRGVSIIVAATMIAEIGDLTRFEHPRKLMAYLGLIPSEHSSGEKRRQGGITKTGNGHARKVLVEAGQAYSHPARVTRFLLKRQEGLSQEVRELAWKCQVRLCARFRRLMAKGKNRNTVVTAIARELAAFMWAIASKTPIAV

SEQ ID NO: 424878 - protein, 457 aa, unidentified
MLIIRVSKILIILKLKGDDKKVKTETHPKTQYIYVGVDSHKLTHTATIINCFNEKLGTITFKNNYKGFASLIELANRVGNNTPVIYGLEDTKQYGYLLKNFLMKKGLIVKHINASETAAERRKYPVSVKNDNLDSACIAKVTLDNFDRLQDAQDDEIYWTLKQFTVMRETLTKNVARFKYKLHNQLMFNYPNYYDLFSDITCKSAIRFWEKYPSPDLLKNVTDEELFNFFKEDSNSLWTSRINKIIENVRKIDLNNFVYQENRNVIIKMITKQIKENILMREDIEWEMIKIYDIIGKKLHTFPGIDKILASYILAEIGNINRFANSSKLAKYAGIAPIEYSSGNTSKSYGNKFGNRKLNMRIYMIAFCCLGRGSSTFPLNPIFSEYYLKKISQGKTKHQALICVMRRIISIIFNILKNDTEYKTPTLLLEECKTKFLKRQQEQEDTAEKIMKKICKK

SEQ ID NO: 424879 - protein, 313 aa, unidentified
MENREFVGIDVSGEYLDLHVYPAGYTCRVTNDQCGMKELLKKLSGYDVTLIVVEATGGLQRECAAFLASAGYEVSVANPRQVRDFARALGLLAKTDRIDAYVIARFGEAIKPESRITVETQRDSLSDLLVRRRQLIRMINMEQNRLKRLKVEKMAQRVKAHTVWLRNECRAVDEALDTAIEQHPAWQRISRLLQSVPGVGPVVTRTLIAGLPELGKLSRRRIASLVGVAPINRDSGMMKGKRTTWGGRADIRSVLYMAALVASKCNPVIRDYYESLLARGKLPKVALTACMRKLLIMLNAMVRDNQPWTVRGA

SEQ ID NO: 424880 - protein, 345 aa, unidentified
MNAAGIDVSSSKSTVAVLRPFGEVVKLPFDVRHSAEELASLAKQLKSIEGETRVVMEHTGRYYESIAKVLHEAGLYISAVNPLLIMEYGNNSLRKVKTDKADAMKIAKYALDNWSKLRDYTPMDTIRYDLKTMNRQFQMAIKQKTATANNLIALQEQSFPGIRKLFDSPVRSDGTQKWVDFTHDFWHVDCVRSGSLNTFTERYRKWCKRNRYQFSTEKAAEVYALAKSAVVLVQKTSVTKTLVQAAADQLTAISRSVETYRSEMDKLTSQLPEYSVVMEMYGVGESLGPQLMAEIGDVRRFERKQSLVAFAGIDPAPRGSAARCISCGIFLSMCRRKRRKPLSRY

SEQ ID NO: 424881 - protein, 364 aa, unidentified
MNTTTVGVDLAKYLFAVCQLDHTGAVTLRRELRREAFVAWLAQLPAGTIVAMEACSGAHHWARRCREHALQPRLMAAQFVTPFRKSRGSKNDRNDAEAIATAARQGNMRFVAIKTVEQQARLAWHCVREGYKTEHLAVMNRLRGVLAEFGIVIAPSAIALKRALASILECKNLPGEFIELIADLRDHWQQIQSRLHDCDARIEAHARADERSQRLRALTGVGPLSADAMVASVGTGGDFKNGRQLAAWLGLVPRQHSSGGRERLGRISRSGDAYLRTLLIQGARSSVQVAHKVPTEKATPEQIWIRQLATRIPFGKLLVAIANKHARQIWAMLARDDSYDPDAWLRHPMVQRNASRKNTLARAA

SEQ ID NO: 424882 - protein, 397 aa, unidentified
MIAVGIDVSKSKSTVAILDSYGTVLATPFNMAHTQPEMNALVSRLKAFDEPVTILLEYTGHYHYPVLKKLQDEGLPVCVVNPYQMKKYGDVEIHKAKTDKKDALRIATYALEKSYRLVPYSAMEQKYEDLKFLSRQYQQRISMVAGFKVQLINLLDQTMPGITKILALKSRDPEKCALLLFIKRYKSFDEIQRIGKTRFLSTYATLMKKTPDRYAPKKGLEIYELARDSITTRGEDPYIWSAQDQCVDLLATAQNAADEIITQMQNIAETIPEYKVLRAMNGVGDRLGPVILAEIGDIRRFHSGKALNSFAGNDAPPYQSGQFESRNRHISKRGSSALRKACFEVMQALKLTKPQDDPVYQFILKKEQEGKPYNVAKMAGVNKFLRIYYARAMELYR

SEQ ID NO: 424883 - protein, 341 aa, unidentified
MQTTTIGLDIAKNVFQVHGIDAAEKVVVRKQLRRGQVMKFFASLQPCLVGMEACATAHYWARELTKLGHEVRLMPARDVKAYVKRNKNDAADAEAICEAVRRPTMRFVRAKSAEQQGALMQHRTRDVLIRQRTQVINALRAHLAELGIVAAQGHEGLKQLLKIIADEKDARLPIDARASLIVLAAQIQALHTMIGSIERRLLLQHRANEASQRLESVPGIGTIGASAIAATVTDPNAFRSGRDFAAWIGLVPRQDSTGGKQKLGPISKQGDRYLRRILVVGAHSVLRLARQNPEKYPWLTQLLARRPFKVVAIALANKMARVAWALLARGGTYRVPALAAA

SEQ ID NO: 424884 - protein, 482 aa, unidentified
MAKQKMSTFERLKHGNLNRKQRRELKRRLNSEDPGLQVIHTDAAGIDIGNESHFVAVPPDRDATPIREFGSWTADLHKMVDWLKQCGITSVALQSTGVYWIPVVEVLEQAGFEVYLVNARGTKNLPGRKTDVQECEWIRKLHTYGLLSNSFRPAEEIRAVRTIWRQRDRWVQESARAVQHMQKALTTMNVQLANTISDISGVTGQAIVRAIVAGIRDPWQLAELRDARIAASKEEIAHSLEGHWREDVLFELRQSVEAYDFFQKQMTTCDQELHKYMAAIENREVPSKQDLPKDTKPLASKKRSRRSKTRRKNEPGFALAAELERIMGVDLTQIDGIDVMTAQVIFTEVGPDFSAFPDENHFASWLTLAPQRDISGGKVIRHVPTAGRNRVANALRMAAQSLSRSNSYLGARYRRLRARLDGPVAVKAMARYLASLVYRMVTRGQAYVDRGAAYYEAKRKERERIALERKAANLGLKLVPAA

SEQ ID NO: 424885 - protein, 404 aa, unidentified
MSLPPLRGEGGAKRRMRGCLHKFAARDVRAERTPCKSKSRLSAIVAAAVTDGSPQTPRSLQAVGERGAPSVSPLNPNSRLGRKVRSPIRQGRVTMDIIAVGIDVSKDRLDVAVHPGGEAFVVERNGAGLEQLTARLKQLAPTIVALEATGGFETIAAAAVGGAGLPIVVVNPAQVRAFAKALGQRAKTDPIDASVIAHFAAATRPEPRPLPDEATRFLSDLVTRRRQIVDMIGAERQREKRATSQHLRKSITRLIKALEKELVSVDTDIDDAVRSSPAWREAEDLLASVPGVGPIIARTLMAELPELGRLNRKQIAALAGLAPYTRQSGQWRGKSFIGGGRQAVRTVLFMGAMTARRHNPVLKAFFERLVANGKPKLVALIAVARKLLTILNVMIRTKTPWQPA

SEQ ID NO: 424886 - protein, 370 aa, unidentified
MGNRSMFVGLDVHKETIDVSIADGARQGEVRHYGVIASDLEPLDKVVRALRAPSRTLHFVYEAGPCGFGIYRHLTSRGEDCVVVSPSMIPKRSGDRVKTDRRDSQMLARLHRAGELRAIYVPDDTDEAMRDLVRAREDAVVVGTQAKYRLKAFLLRQGRRYPGREGWTLPYRRWLTDLSFPSAAQHIALQEYRDAIAETEQRIERLTEQLRQLAPTWRWAPVVAALQALRGVSFLTAVALVAELGDLTRFQHPRELMAYLGLVPSEHSSGPSVRRGAITKAGNPHVRRLLAESAWAYQGIPRIGRQHAYRQEALPKVVCDIAWKAQLRLTTRFRRLVARGKAKPKVATAIARELSGFVWAIAREVSPTPR

SEQ ID NO: 424887 - protein, 400 aa, unidentified
MLLFFEVITMIFVGIDVAKDTHYAAVSDNSGAVLVKPFAFQNNAEGFCLLLKKLSEFDRSKLLIGLESTGIYSENLICFLYESGFRLAVINPIQTATLRKTAIRKTKTDKVDTMLIIKSLMVNSYRLYSQRDADSLKLRTLCRFRQNLKKSKARLKIQLAGYVNLVFPEFGKFFKSGIHIAASYALLKKYSSPKEIAALRTSTLCTLLSKASHGRFGKDTAEALKSLALSSVGVKNPYISIQIAQTIAQIELLEQQIKDLNSAIEEAMESINSVLMTVPGIGAVNAACILGEIGDIKRFSKPCKLLAYAGLDPTVRQSGQFTAKSTRMSKRGSALLRFALINSAWQLTLNDTTFKAYYDLKRSQGLNHYGALGHVAHKLTRVIFKLLTSDTPFNPAKLVA

SEQ ID NO: 424888 - protein, 357 aa, unidentified
MKIVGCDLHARQQTIAMVDTETGEFVERALSHEGNALREFYGALEGPVVVGIEATGAMQWFLELLQELGIQCRVGHPAKIRAKETRKQKHDRRDARLILELLIEDRFPEIWMPSIEERDLRTLLRDRHQWVKMRARLQHTLQAIALNHALRRGHALWSQAGQNTLQALPLPPYTSQRRTELLSLYEQLQQRIQELDKEVEALARQRLQARRLLTHPGVGAVTALATDVFLGDPSRFDTANQVASYIGMIPCEHTSGKRQRLGKLTKQGNSLLRYLWTEAGMHAVRKDPELQRFYRRKLIQKGMGKARIAAARKLGIRLWIMMRDQIDYEQFCRRGRLRQKGKAHAGMPDFNSGPAMQ

SEQ ID NO: 424889 - protein, 319 aa, unidentified
MTSLTYLGLDIAKHALELSPHPQLKTRLYANDPAGCQQLLEDLGGLNPPLQLICEATGGYERLVLQNLHQANIAVTCMNPKRVRDFARAKGRLAKTDRLDALILAQYGQQLQPAATQPPGPAQQRLAALVRHRVQLVSSMSDERRRQEHQTDPFICRQSRQLLRAQEKLLRATEEEIRAAIQADPEMKTRFERLCQIKSVGPCTAWILLSELPELGSLQRGQAAALAGVAPYNQDSGPCRGQRRIAHGRPLLRRGLYMAALVAARRNPILQTVYDRLIAKGKRPKQALVALMRKLVELANHMLKSPDWKLSESAASSEP

SEQ ID NO: 424890 - protein, 378 aa, unidentified
MPSENTVHIAIELSFSSWLVAARLTGAKKSRLHRIEGGDTGALLALIAELRSRALTQLGGAAEVACCFEAGRDGFWLYRLLTAHGILVYVLEPTSILVNRRSRRAKTDRLDAEGMLRVLAAWLGGDRQVCSMVRVPTPEEEDGKRPHRERERLVQEKLRIENRIEALLFTQGIRARPSLRSWERELTELRTGDGRTLPPLLRAELDRLRRRLVLILEMIRELEAERAAALAAAPDEAMAQKITSLQRVRGIGANFSAVLVREVLYRSFANRRQLASYVGVAPMPFQSGGMDRDRSISRAGNPRARTTLIQLAWLWLRYQPGSALATWFRERVGTLQGRTRRIAIVALARKLLIALWRYVEAGVLPAGVEIRTGTVPAA

SEQ ID NO: 424891 - protein, 316 aa, unidentified
MTSSEVFVGVDVSKARLDVALSSACEVVGFANDEAGVADLVRRVKLADPTLVVLEATGALGRLLVAELMAAGLPVAVVNPRQVRDFSKSTGQFAKTDALDARLLARFAQAVRPAQRPLPDEAAQVFADQLARRRQVVDMLAVEKTRLKQATYRDVRKSIKEHVQWLERRVRAADEALRHSVEQSPVWQAKRDLLTEVKGIGDITMLTLIACLPELGTLSGKKIAALVGVAPLNRDSGTLRGRRTVWGGRAHVRTVFYMATLTAIRFNPAIASFYQRLRAAGKMKKVAIVACMRKFLTILNAMLRDQKPFEMTRHLT

SEQ ID NO: 424892 - protein, 339 aa, unidentified
MSEHNLISVDLAKNVFQLCGMTDRMKMVFSRQLKRNDLARFMGTQKPVEVVMEACYSSHYWGRCFEAMGHQVRLLPAQHVAPFVRGNKSDHNDAVAIAEAAHRPNILPVPIKTLEQSDIQSLHRMRERYVAHRTGLINQTRGLLSEYGVVAPQGHRAFTRLLREVSQPEYEDLSACLKEQLNSIADEYQYQSQRISEITRTLSDIAHHHPLCRILLSIPGIGPINATAIYSAIGNGSQFKNGREFAVWLGLTPKQSSSGDKMSSGGITKRGNRYLRKQLVHGARAVLSRSKNKSDRLSRWAQQLAGRRGVAKASVALAARIARLSWTLLQKQEPYQARD

SEQ ID NO: 424893 - protein, 362 aa, unidentified
MEVAGNAVGLDLGKKTYEMCLIALNGKVTRTGGKTDFSGIENLCKKLKKDDVVAMEACNLAFRIERAIREKIGCRVIILNPGRLAIIFMSTRKTDKEDSMKLAKYLRSHEEDEMPIVTPPSDEEWARRKLLSEYRSLKSLRTKEINRLHAIFEHNGYTQFARKDMCVPKNRENIIPLLKGYEKEEAERLIERLILLEKQIELLYQKINEETKTDEKVQRLMTVPGIGPITALSYVAYIGDVNRFENAHQVSNFIGFVPKVDRSCTINRLGHITKQGNSLLRSLLVQAAWSATRSKSGGALRDKYNYMAVTRGIGKGKSIVTVARKMGELLYTLLKNNQNYEPRSFITSDAYISKLAEEALVS

SEQ ID NO: 424894 - protein, 483 aa, unidentified
MAKRKMSTFERLSKGEMNRKQRRELGRKVAADDPGLTVENPNAGGIDVGNESHFVAVPPDRDADPVREFGCWTEALVQMAEWLTACGVDTVAMQATGVYWIGMYDILEQHDIRVVLVNAQHTKNVPGRKSDVQECQWLRKLHTYGLVRDSFRLPEQIESVRTIWRLRSRLVQEAAGSIQHMQKALTKMNIQLANVISDISGVSGQAIIAGILQGERDLYQLADRKDYRVRASREEIARSLEGNYREEVLFELQQAVDSYHFTHRQMQECDRKLEGYLAQLPTRLLGAPAQPEDVAADPAKKKMKKEARKARGNEPRLDMKAELKRICGVDLTSIDGISVMTAQTILAEVGADLSGFQNEHHFSSWLGLTPSKDISGGRTVRRGKKKVKNRLAGALRMAATSLLESDSYLGARYRYLRRRLPTHKSAVKAMAHYLARLVYRMLTKGEAWVDRGAAQFERRSRERELASLTARARANGFQLIPLA

SEQ ID NO: 424895 - protein, 454 aa, unidentified
MAQSKRSSAMPCIHPNAAGIDIGSRFHVAAVPLDRTEEPVKTFNSFTGDLHAMAHWLKSCRIETIAMESTSVYWIPAFEILESYGFEVFLVNAREAKNVPGRKTDINDAQWLQKLHQFGLLRASFQPTENIAELRAYLRQRERLLDYKASHIQHMQKAMMQMNIQLHHVVSTITGRTGIEIVRAIVAGQHNPDELVKFRDIRCHNSVEVMKAALTGNYKAEHLFALTQALELFDIYTEKIESCDRIIALVLQRLQQLTPDPQQTMPKAKHQECNKNAPSFDVRAALFNFMGKDLTRIHGLGSYLALKLVAECGTDMSRWPTSKHFTSWLCLAPGNKISGGKVLSSRTRRTASRATALLRLAATTIGKSDTALGAFYRRLSSRTGKAKAVTATARKIATLFYNTLRYGMEYVDKGADYYESQYRDRVLVNLRRRAEAFGFTLQEKVLTDINIEVS

SEQ ID NO: 424896 - protein, 452 aa, unidentified
MDQQLGKSNGLSLERIEPNAAGIDVGATEIFVAVPPDRDRQPVRSFKTFTDDLRQMAAWLVQCGITTVAMESTGVYWIPPHEVLEEAGIRVCLVNSKHVKHVPGRKSDVSDCQWLQYLHSVGLLRASFRPESEIRAIRALSRHRSSLIEIASVHVQHMHKALTQMNLQIHHVLSDITGLSGMAIIEAIVAGERSPVRLAALCNQRVRSDQETVIKSLVGNYRSEHLFTLKQSLTAYKHYQELIADCDREIERLMRLLNGKIDPPPSSPATPPDPRFQKRSKNQFRFDMGSELNRVFGVDLTTIPGISGLTAHTLLAEIGPDLSRFANVAAFASWLALCPANKKSGGKVLSSRTRQTNSRASHALRIAAQTLARSKSHLGNFYRRMRARLGGPQAITATAHKLARIIYHLITTGQHYDETVFVREDQKQAQRQEKRLRKQAKSLGFQLIPIAA

SEQ ID NO: 424897 - protein, 428 aa, unidentified
MNERERIRLEDFRQLKKEIRGSKDHLIVGIDIAKDKHKAFFGTATGQTLLKRLVFENTALGFERLLIQTEAIKVQHGLTKVVFGLEPTANYHKPLAEFLIKGGHQVVLVSAVAVNKNRELLDGRWDKHDTKDSANVADLISQGKCLYYDYPSSRLRDLRSLLSLKRRVKKQEHGVKVRIRNHLLAHYFPEFDRYFAKGSREGLAIVKWCLHPSMIAGMEYAEFTQLVAPHIKTLGQEKRLKSVWELAGDSIGCDGGEALNFEAKLMVKDLEGIRDALRAVDERIEAICLHFPEYRYLLSIPGFGPDVSSKVLGAIGNPFRFTSGKQVLKLTGYDLSAHRSGKSSDSAVPVISKRGKASLRYALYQAAFVASTSNRHFIAYYTDKLRGRQREKGIKTKMRVKLAAKMMIIAWTLMKNKEPFDPEYLKRD

SEQ ID NO: 424898 - protein, 347 aa, unidentified
MRFYTGQHRYYCGIDLHARSMYLCILDHEGKVVLHRNIPARPEPFLSAVAPYREDIVVAVECIFTWCRLADLCAREGITFILGHALYMKAIHGGKAKNDKIDSRKIAGLLRSGMIPQAYAYPAEMRATRDLLRRRTYLVRRRADLLSHIQNTNSQCNLPEFGRKIAYQAHRAGVVEQFTDPCVRKSIELDLELIDLLDKQIWGLESFLLRTANRHDPNALHLLRTVHGIGKVLSLVILYEIQDIRRFPRVQDFVSYARLVKCARESAGKRYGTSGKKIGNVHLKWAFSEAAVLFLRANPEGLKYKQRLERKHGKSKALSILAHKLGRAVYYILLREKAFDMKKFLSS

SEQ ID NO: 424899 - protein, 380 aa, unidentified
MDVHSSNFTLCSFEPGYGFEADKIFGQTQIKEDIFNSTVKYINKLKSMRPDVDVVCGYEAGGLGYNLHRKLKAKEIESVILAPTTMAVARNSSKKKNDYRDAITIAKCLASSAYKAVYIPDEKDEDVRDFIRMRDDHKTALKQIKQQLNAFCLRHGHHYDKPKWTGLHLNWLRKLELSKVQRETVEEYLATYEALTSKIAALDVRIEDIASEERYSEKVNKLKCIKGIKTHIALSFVCEIGDFNRFKSADKFSGFIGLVPGECSSGNTERMLGITKAGNRHLRRLVVEISNTYRRGAVGRKSVALRERQKDMPKDVVAYADKATNRCQRKYQRMMFKGKNSNQAVAAVARELCCFIWGMMTGNYSRTAQAEASVYRSELD

SEQ ID NO: 424900 - protein, 447 aa, unidentified
MGARMSDLAVLDPRAAFVDVGSEKMHVSIAGGSPAVFGTVTSQLHALRDYLAEHQVRSVAMEATGVYWLPLYGVLEAAGMEVVMVDGRQTRNLPGRKTDMKDCQWGATLHAHGLLRAGFVPPANIRRLQDYLRLRGDHIAAAAGHVQHMQKALERMNIKLHEVISSLTGASGLAVIRAILAGERDPQVLLGLCDIRIRNVKAERVVESLRGDWAEEHLFALAQAVQSWDHYQGLIAACDRQIAVVLRQMPDAKAPPSAASTKTGKPRTRPGVNAPDIADLREILARICDAKDLTTLPAHSEYSVLQLIGEVGTDLTKWRTEKHFTSWLGLAPGTAQSGKRKASVKRRRNRAGQIFCVMARALARSKHVALGGFYRRMAARRGGLVANKALARKLATLFWRVMVKGLDFVETGVAQYQAKVLQTKHRILHRLARQLGQKIVPNPVAVV

SEQ ID NO: 424901 - protein, 412 aa, unidentified
MRLFAGDDWAEDHHDVEVMNEAGKVLARRRLPEGAAGMAQFHGLIGQFLPEDDPDAAEVVIGIETDRGPWVAALAAAGYTVFPVNPLQASRYRERHGVSGAKSDAGDAHMLADMVRTDSHQLRAAAGDSPEAAGVKVLARTHKTLIWDRTRQVQRLRAQLREYFPAALEAFEDLDAADTLELLGKAPDPARAAKLTRAQVSAALKRARRRDIPDKATAILAALRSEQLGQPEALTLAYAATVRSLIAVIAALNEQVKALQGQVEEHFGRHPDAEVYLSQPGMGKVLGARVLGEFGDDPGRYRDGKARRNYAATSPITRASGKKKVVAARFIHNDRLVDALSAQAFAALKASPGARAFYDDLRAREIEHNDALRRLANRLVGILHGCLKTGSLYDEATAWGHRQNLPQSSVAA

SEQ ID NO: 424902 - protein, 353 aa, unidentified
MRRPKDKLIAGLDLHSNNVMIGVINQDGKRVAHRKLGCDLSEVVGFLKPLKPQLQSMAVESTFNWYWLVDGLRAQGYSIDLANPAKIAQYSGMKHVDDKDDAFHLADLQRLNILPKAHVYDPELRPVRDLLRRRTNLVHQHTALLLSFSSLYTRTTGQKLDLGEAKKMEPKEAPKLYEHPANQLIAQVQAEHIQALAKSIRRVEKAVLACAREIPLYERLLTIPGIGRILGLTITMEVGDVKRFQTDGDFASYCRMVDAKRLSNGKCKGANNQKCGNKYLAWSFVEAANFARRYDEQCRRWYDRKAAKTSKVIATKALGCKLAKAAWHVMAGPCDYDEKRMFPELANQPMKTS

SEQ ID NO: 424903 - protein, 437 aa, unidentified
MAMRVEIEAEPAAVEGRERCAGLDVHRSTIVVCVTSPVGGGRLKKVWNEFPTTSAGLVRLAEWLAELEVSHVAMEATGVYWMPVYAALEKAGVFDLTLVNAHHAKALRKRKTDIKDAQWLAYLVRHDLVNKSFVPAQPFRDLRELTRYRRKLVEAQASERRRLIKLLESADIKLAGVISDIFGVSGRAILCALIAGGQSPFDMAKLARGQLRRKRPQIIDAVSVEVSEHRRAILAMQLARVEAAEADIAKIDEMIAHHLEPYQEFVERLVSIAGIDWIIAAIVIAEIGTDLSSFPTVQHFAAWIGVCPGNNESAGKRKPIGARKGNPYLVTALCNAATSAARTRGSFFKATYHRIKSHRGGGRAALAVAHKIAIAIYYMFTRKTSFRDLGEHHHEARHAQRSVNRYLRGLKRLGYTVILQPQTAPTPQQTQAIANPA

SEQ ID NO: 424904 - protein, 296 aa, unidentified
MAKIEFDELMSVGIDIGKDTFHLVGFDPSGQRVIRQQIKRLALVATFEKLPRCIVGMEACLSARFVSRTLRKMGFEPRIIPAIYVKPFNKGQKNDYNDAEAIAEAALRPNLKAVSEKTQDQLDLQALHRVRSRLVSRRTATINQIRAFLMEQGITVRKGLRALKNSFETILDERKDEISRRMRSILIGLYGDWMWMDDRIDKVSAEIEEISRTEENCRNVMTIPGIGPMISTAMVAAVGEGEAFDRGRDFAAWVGLVPRQYSTGGRTILGRISKRGSRYLRMLFVQAAKVIMMRPH

SEQ ID NO: 424905 - protein, 447 aa, unidentified
MTKFKEHGKSFAAHIGLDWADKKHFWTMQTADGKRSRGELKHTPEAIDAWAAELAERFGGRPVAITLEQARGALIAILSKYAHLHLFVVDPSRLNHYRKSVSPSGAKSDPVDGDLILDFQLKHPELLRCLEPDTVETRSLQFLTEQRRDLVNQHTGQVQIFNSWLKQVFPQILEWFDDVSTPLVGDLLKRWPELAKLKKARPETLLQFFHDHNCRSVERNQQRLEAIRTAVTATHDAALLKAANLMIQTSIQLLATLRTAIEQFECQIQAVFATHPDRFIVESFPGAGPALEPRLIAALGTDRSRFQSAADMACCFGIAPVTESSGNARWVHWRWACSKFVRQTFHEWAACTVRQEGWARDHYERQRAKGKGHHAAVRSVAYKWIRILYRCWRDRVPYSEQRYLEALRTHGAAKGKSAANAAEPSIGLPAVQWKNCGGFSKPTKFSS

SEQ ID NO: 424906 - protein, 390 aa, unidentified
MIYFGIDIGKFNHQAIATDDKGVALCQSFSFPNSNEGFALFIKTATAFMGKDAICIGMEATGHYWLNLYFALLDLGMELHVVNPIQTEAMRNMNIRKTKTDSVDCRYIADVIRMGNYSDVVIGDEDVCELRQLCRYRFHLVDTIGAIKNQIIGLLDRVFPEFHTLFSNVFGVTSLELLKKYTTPEQILNVKTTTLANLLSKASRGRFKEKKAKEVKEVAKLSVGLKSANTAFVFQLRQMIMQIAFSESQLKELEQKISEYYDKCECFLTTIDGIGNTLGAAIFAEIGDISRFDSPKKLVAFAGIDPTVRQSGNFVGTHNSMSKRGSVYLRRAVWNAATVAAQKNPILSEFYQKKRNEGKDYMTSIGAVSRKLCYIIFAVLRDKKPYFPIA

SEQ ID NO: 424907 - protein, 314 aa, unidentified
MSPAIFVGMDVSQETVDVAVQPGTAFQIANDEQGITGAVERPRALQPTLIVLEATGGLEVPLAGALAAVGLPAVVINPRQVRDFARATGQLAKTDRLDAQILVRFADAIRPPVRPVPDEQTQALAALVARRRQLIEMLTAEKNRLRLAARPIQKRVQAHVTWLEKELESTTADLTTTMRESPVWREQEEVLRSVPGVGPVLTTTLFANLPELGTLTRKEVAALAGVAPFPRDSGTLKGRRVIWGGRAHVRAALYMAALVATRRNPVIRTFYQRLCQAGKAKKLALTACMRKLLTILNAMVKSRTPWRVAVTQPA

SEQ ID NO: 424908 - protein, 387 aa, unidentified
MSKKIVAPAYVAAMARAEADPASARFWVGLDIGFKSTAVCVVDVDGAVVHQVSMKSHATEIGRYLRRNFKSHVTLIGMETGGLSPHLAGKLREQGFQVAVLDALQVHRVLSVKRNKTDTNDARGIAEITRSGRDYLTEVYVKSNLCFEVRASLIMRDRLVKQRRETEAMIRGLVRVYGGRIEPGSDSPATFRERAIDQLCLIADTEGVDLRPRIIPLLDLCERFYIEAGRIERELDLLAASHPVCKRFMEIPGIGTITALSFYSAIEDPTRFRHVDDVAAYLGLTPRVYQSGESLTHGGISKMGNQLTRTHLVGAATVMLANTRSFSTLKDWGMKLSKRVGFNKAKVALARKLAIVMFSLWRDCTHFMAKAADVGPHRDLMRARASA

SEQ ID NO: 424909 - protein, 343 aa, unidentified
METVSTIGLDIAKSVFQVHGVDADGLVVIRRQLKRRYVLAFFEKLPPCLVGIEACASSHHWSRELQALGHSVRLMPPAYVKPYVKRQKNDMADAEAICEAVTRANMRFVPTKTPEQQSGLVLHRTRHLLIRQQTSVINAIRAHLAEFGVIAPGGRKGVEELLRIIADPSDKRVSGVVRACLAALGSQLLSLKKQILDFDRMIMAWHRSDPTSKRLNCIPGVGPLLATALVANVADPKVFRSGRNFSAWIGLVPKQHSSGGRARLGSISKQGDRYLRGLFVAGALAVIRYAKLHGTKYRPWVAALLARRPTKVAAIALANKLARMAWAMMARGERYNYPAGLRV

SEQ ID NO: 424910 - protein, 355 aa, unidentified
MNQDKYIGMDVHQATISVAVMDSSGKLIMECILETKAATILEFIAGLRGTLSLTFEEGTSAAWLHDLLKPHVSHLVVCDPRRNALLKDGSKSDRIDARKLAELLHSNKLHAVYHGEHGLRTLKELGRSYLTITKDLTRVMSRIKALYRSWAIPCSGATVYARRHRAAWLAKILGPGVRLRAERLYQQLDLLQPVRQEARRDLLVESHQHHAVKLLRQIPSIGPIRAALLVALLQTPHRFRTKRQLWAYSGFAVETHDSGEYRFVRGKLVRNRERITVRGLNHNHNHDLKNLFKGAAISASTRPGPLCDFYVARVEKGMRPTMARLTLARKMVAITLTIWKKGVEFDAKPLNRQAA

SEQ ID NO: 424911 - protein, 323 aa, unidentified
MDTLNCLGIDIAKKTFDVGLLRNDKFRNKKFPNNSEGFNQLDAWLLKQGAIRVHACLEATGSYSEALAIHLHQVGHMVSLVKPARIKAFGQTELQRNKTDRADAMLIARFCSKHHPAFWTPAPPEIRELQALVRHLDDLIGTRSQLANRLSDGLQIESVLESLRALTKALDAEIKLTKKKIRELLDRHPGLKADRDLLVTIPGIAEQTAIKLLAEIQHLRDYKHARQAAAYAGLSPQLIDSGTSLKRTRLSKTGNGRVRKALYMPAIVASRYNPVLREFSNRLSQRGKSKMVIIGAVMRKLLHLAFGVLKTRKPFDPNHAIAA

SEQ ID NO: 424912 - protein, 607 aa, unidentified
MSTIASLDRIGVGIDTARYGHRVSFLRPDRKPAAKPLTVMENRAGYQALQDRLNQLHEQQPTAHFHVRIDAAGQYAVNLELFLRGLNLPMTISVGEPKRNKDYQKAHFPKRTTDDTESQAMARFAVVELPNATPAPSTPMILLREVAGRLQSKVKQTTQAINRLHNLLARVFPELATLTEDMSVGWVLKLLDKYPTAERIAQAQIASLEKIPYLSVEQAHAVHQAAKQSVASLRGELAEALVRDHVNQLRLCQKAEQHLHQLLLEAFADLPASPHLQVLTITGIGEATAAALVAKIVDINRFATPNHLVSYFGVFPEESSSGVDKRGRPLPPGTLIMSPKGNDLVRFYLWNAARNAIQHNPAIRALYRRLRAKGKRGDVAFGHCMRKLLHLVYAVWKTDRPFDKEHFPWEGSSDTQPSATTPPSANAGTTPSANEKAVGHKRDLPAEEVVTTADSTLEPASPAVKPASQSAAPRPKVDFACVREHVTMEQVLQHLGYFASLRGRGQQRRGPCPVHSQPTAPERTFSVHLGKNAFQCFHAECAVKGNVLDLWAAIHRLPLYEAALDLAETFQVPRNREEEPVKGTSSPRTATAKTSAPAAATATDGAK

SEQ ID NO: 424913 - protein, 407 aa, unidentified
MLVQHAVPVSPLTVVVAIDVGKNEFAVSVTTAARRRLLKPRLGCPMTAPSVREVVGRISRLLPTGAVVKVGIEAAGHYHLPLLAAAVWPTGWELLELNPAHVTEQRRVLGKRTIKTDVIDLEAMTELLLAGRGLPVTATEVVLVELTAWSAHRTRRIEIRSGLKNQLLGQLDRSFPGLTLALPDVLGTKVGRLVAAEFADPTRLVALGSSRLIRFGATRGVQIRKPIVDKLLAAARDALPMPDAAIARQVLAADLALASDLDRQVAQAEVELARLLPLSPFRTLTSVPGWAVVRAGNYAGALGDPARFSNPRQVYRSAGLNPIQYESAGKRHDTRISREGSVELRRALIDLGMGLWLNEPAATARAVELRARGKKGGVIACAMAHRANRIAFAMVRDQAVYDPSRWT

SEQ ID NO: 424914 - protein, 433 aa, unidentified
MKYVGFDWASQGHDVTVMDEAGRVLDRWAFPHSEAGWVMTLDRLRRQGPQDDAPVIIERTGGLVVDRLLAAGHPVVPVHPTAFFAARPRWGASGAKSDPGDSYKLADYLRTDGHRLRRLRSIDPGLHELQALVRLRDDQVRARTAASNQLTALLDTYWPGPRRLFVSLFSPIALAFLTDYPTPASAAHLGEGRMAAFLRRHAYRGGKSAAELLTRLRTAPVAPAGLPAAPLAALIGAQAELLTTLQQLISDGKRFIATRVAAHPRIQQLAELPGVSTINLAQLLAEVGPILDRVDSAEQAATECGAAPVTRASGKTSGVYFRWAANTRARKAITSFAHNARMQNDWAARLYSRARARGKRNPHATRIVARAWLRVIWACWTSGQPYDPDRHRIRPSSYQPVPPSLPTRRSAGAVKMQPPTRGTILTAPSTGTP

SEQ ID NO: 424915 - protein, 328 aa, unidentified
MNYLGIDVSKEKLDCCLLREASETRRKINRVDNSPTGLASIISIMKKEGIRPDELHVIMEGTGVYHQLAAETLCDAGMTVSIANPAQVKNFGRGIAVRTKNDTKDSFVLARYGALLKPAPWTPPSPAARQLQAYVSREDAIKKDIQREQNRKEKSVIGRAPDDVLASIDETIAFLGTQLKAIRKKIGSHIDRHPDLKDDMTLLTSIPGVGPETGHHILAVVHTHQFRSAEQLAAYLGLVPVERQSGTSLHAQPRLSKAGPTAIRAALYMPAVTALTWNPHIREMKERLAAKGKTPMAIVGAAMRKLVHLCYGVLKTRKRYTSDHAQLA

SEQ ID NO: 424916 - protein, 444 aa, unidentified
MRSIGLDIHRDFCEVAIAEGGRVRAAGRIGTAPADIEAFAGDLRPDDAVTLEATGNALAIARILEPHARVVLANPKATKAATRLRAKTDRIDARTLAQLLASGFLPEVWTGDEATHALRRRVGRRAHLVRQRTKAKNQVHAVLLRNLAGRPPVSDVFGTRGRAWLERLVLPDDERETLEACLRTVDFLDAEVAQIDRALAPLVLGSPDMRRLLTLPGVSATTAATLVGVIGDIARFPTPGRLVAYLGLDPRVSQSGNDPARHGRISKQGASEARHVLVEAAWVATRTAGPLRVFAQRLAARRDWNIAIVAVARKLTVIAWHMLTRGEDYAFARPILVRAKLREIELRAGAPRARGRSIGVAPTAAERQLERELAVQAEVAYQRLVKDWVPGGKRVREPQAGRASHDAERQPARQGSAPTLRFGPASLPHQRDYAPDPEPRQGGT

SEQ ID NO: 424917 - protein, 424 aa, unidentified
MNLTQNDRLKQVTSDTLIVGVDVGSQTHFCRAFDWRGFELSRRVFKFSNTGMGFLTFLRWTEELMNKTEMKKVIVGCEPTGCYWLTFQKFLQDHEIQLVTVNPFTVNRSMELDDNSPEKSDLKDPKTIALLVKDGRYSTSYLPSGVYAEIREASVCRDQIMKQHVRLSNQIQGWLQKFFPEYFECYSDWDSTSGLMLLKEAPLPQDILKIGAGGINQIWRDAKVRAAGLKRAQTLVEAAQNSVGLEAGEAARLEIWILVNDYILKAEQLKRLDEYLEEKIKEVPNVEKLLAIKGVGKSTVIGFIAEVGDIGRFTDPKQIQKLAGLEIVKKSSGKKKGQPRISKRGRRKLRRTMYESARALMNWNPAFQDVFLYYRNRAKNPLGGMQAKIAVACKALRVFYVVLQTGCDFDEEKFRRDIIRPEAA

SEQ ID NO: 424918 - protein, 463 aa, unidentified
MPKAWKSRKKLALKVDVTAGLEALHHHAAGIDVGNAEHYAAVPVGRDPQPVQTFGSFTADLHRLAKWLKACQIETVVMQATGVYWIALYEVLEGYGLQVNVVNAKYTKTLPGRKTDVLECQWLQKLHSFGLLNNSFLPPEEIRVLRTYLRQRENLVAAAGACIQQMQKVLTQMNVQLANVSSDLSGMTGMAILQAILDGQRDPQQLAALADPRVQASRKEIAQSLAGHWREDLLFVLRQVHGLDFTYLESITACDQRIEAHLKTMPAKVDVVAQPLPEARPKDRLPNRKHIPQFGLREELYRITGVDLTRIDGIQVQTAQVFISEVGVDMTRWPTEHHFSSWLGLSPNNQITGGKVIRRGTKKVLNRAATALRLAAQTLHRSQSYLGAKYRRLRAKLGAPKAITAMAHHLARLIYRLLRFGTQYHDKGVEYYERKYRETEMKWLQKQAAKLNMQLIPTGALTK

SEQ ID NO: 424919 - protein, 370 aa, unidentified
MLDTTTFIGLDVHARSIKAVSLDVMTGEVRCATFGYDAGAVAEWVRSVDPRARCVYESGVTGFDLQKRLSGLGVDCVVGAVSKMIKPSADRRRKNDRNDAEFLARMLSVGNVVEVWVPDDECEAARDLTRALEDARDDLSRAKQRLSKFLLRHGLAFDERTPTGRRKGNWTRAHWSWIESIRFAEGADNDVLAYYVDAVRRAAEEKARLEGLVEAEARKPRWRKRVDSLRCLKGVDTASAADLVFEAGEFSRFRNARSFAAWVGLTPSEHSSGESDRRGAITKAGNKHLRKTLVEAAWHYLTCSGRPKDLAKGQAPDRGARRHAAKGVRRLVERREALLARGVHGNKANVATARELACWVWAVGLMAEEA

SEQ ID NO: 424920 - protein, 372 aa, unidentified
MGHHTEAFVGIDTSKSSDAIAIADGGRGGEVRYLGDFPATEAAIRKLLAELAAKYRDLIFCYEAGPTGYGLYRLLKSLGHECLVVAPSLVPKKAGDRVKTNRRDAVSLAKLLRAGELTAVWVPDERHEAMRDLSRARQAVKKDLQGKRQQISSLMLRLGRIYPGKTTWGPAHMKWLMAQKLEHREQRITFEELLDGIRQESERVERLEKAIREAVPEWSLAEVVAALQAMRGIDLIAAVGVLAEIGDLSRFQNPRELMGYLGLVPSESSTGDKVKRGGITKAGNGRARRILVEAAWSYRYPPRVSREKQRKVEAAPRRVREIAWKAQTRLCGRFRSLERKGKRRTVIATAVARELSAFIWAINCELMAHRQA

SEQ ID NO: 424921 - protein, 386 aa, unidentified
MQKLNDLNRSLAALEPDGTLIAVIEMSLSSWLVAGIVPGVERQPLKKLVVDESALLKLLHRWREEAEKAGRRIERIAVAFEAGRDGFWLARWLKARGIEAYVIHASSVAVSREHRRAKTDRLDTELLKRSFLGWLRGERDHCKMVEIPTMKDEDAKRPNREHDSLIGERSRIVNRMKAALVRLGIRGFNPKLKRATTRLDNLRTPEGEPIPPNALAELRRDMERRRLVNNQIRQIEEERLERIEKTPCDGPHVMVRLLARVMGVGIETADMLVHEVLSRNLRDRRAIARYAGLTGSPDESGRKRRQKGLARSGNVRVRRGMIQLAWRFLLHQKNSALTKWFRSRTENARRTRKPMIVALARKLLIALWRLVREGIVPDGVVLRAVQ

SEQ ID NO: 424922 - protein, 339 aa, unidentified
MPLYAGLDLHANSNFLAIVAGDGKRVFKKKLPNDPPQILEALRPYQGDLVGLVVESTYNWYWLVDTLMGEGYKVHLANPSAIQQYAGLKHIDDQHDAFWLAEMLRLGVLPEGYIYPKEERPIRDLLRKRGHLVRLRTSLVISLENIISRNCGVKLRANDVKRLKEDCVQPLLEENEDLALAGGVSKETIDFLTRKIQKIEATILKRIALKESYAGLLHLSGVGKILALTIMLETGPIRRFAKAGNYASYCRKVPSRWTSNGKTKGKGNQKNGNKYLAWAFSEAAEFARRHDAAARAYYQRKRQKTNLMVAHSALAHKLAKAAYYIMRDQVPFVPEKLFG

SEQ ID NO: 424923 - protein, 414 aa, unidentified
MKLFVGIDVSSEELEACFMDPEGDTLETLKVENNLHGASHLRDRIVAAADKLPASEIHIGLEATSVYSWHPAMYLHEDASLQERKTKVFTINPKLINKFREAYADMDKTDRIDAWIIAERLRFGRLTTTIVMQEQYIALQRLTRMRYHLVHNLTREKQYFLQNLFYKCNAFRSEVDSSVFGHAIMEMLSEKFSLDEIADMEVADLADYLKEKGKNRFPDPEHVARCIQKAARASYRLSKVVEDSIDLVLGTSIQAIRSIQSQLKELDKAIERILAGIPGAQCLRSIPGIDRVYAAGILAEIGDIERFSDQAAVAKYAGLTWRKHQSGGFEAEDTKRIRSGNRFLRYYLVEAANSVKNRDPEFGEYYRKKYNEVPKHQHKRALVLTARKLVRLVDALLRNGQLYTPGRKVKPAEH

SEQ ID NO: 424924 - protein, 356 aa, unidentified
MSHKLNSAIAVIGIDIGKNSFHAVGQDQRGEIVLRQKWSRGQVEARLANLSPCLIGMEACVGAHHLSRKLQALGHDARLMPAKYVRPYSKGQKNDFRDAEAIAEAVQRPTMRFVATKTTDQLDLQALHRVRERLVGQRTGIINQIRAFLLERGIAVRQGLRFLRAELPTILAKRSDVLSPRMLRLIEDLAGDWRRLDERIEGVSSEIAALVDQDAACKRLMSVPGIGPIISSAMVAAIGTGDVFSKGRDFGAWLGLVPKQISTGDRTILGKISKRGNRYLRALFVQAAWVVLVKIGPKHWHRYGLETWIAAARKRLHHNVLAIALANKLARIAWAVLHKGRAFECVKTHASASRPA

SEQ ID NO: 424925 - protein, 365 aa, unidentified
MRIVAGVDCHKGSHTIVFLNAVGQVVQQLTIGTTADGYEQALALGDSLGCTEWGIEGAGCYGFAFAVFARAHGATVVEVPGAFTKRHRRNASQRGKSDAQDARAIAEVVLREPGRLPRFFLAGTQRALRLRYDQRDRLVRERTRAVNRLRMAAVLLGVMDLPADLTSAKAARRIVAQVSDLRTAVRLPPAEAAVVDEIEEAAEDILRLNERIARTEKALRPLVRQIAAELLQLHGVSDIVAAGLIGHAGDMRNYRSAPAFAAKCGAAPVPCSSGRNMAMRVNTGGDRQLNRLLHTIAMTQVRSKDHVGRRYYERKRAEGKTNLAALRCLKRVLAGIVYYRLRAAGQVVSRMDAQSESNGTTAMAA

SEQ ID NO: 424926 - protein, 478 aa, unidentified
MQDRRLVGIDLGITSAHTVRVLAGDGGLVCRRKAVPTVESLGEVEQAALAGAAAGTRLEVVVEPTGPAWLPIAVFFAARGHTVYRVSSAKAHDLRRFLRRHAKSNGIDADTLARLPLVDPAGLHPLQLPDAARAALDRRVRACDRLTRQAADHKRRIKGLVRQLLPASPLVGELGQADLAVLERWADPQALVAVGRARLQQVLASASAGQQGAQRAEQWLAAAHAALELYGDHPAIAWQDLAAEVHSEVRLLRATQAELAAHAREREACYRRVDPAALARSLPGLATIGGPALVATMGKASRFATAGKFRCFTGLAPKASETGQTDRKGQPISKAGNRLLRTTLVRAADHARRQDPQLARIYHTQMVQRGKDHLGAVCVVAAHLAERAWTVMDRATPYVICDTDATPVTPAQAKQIIAERWTVPEEVRRRRRHKKGKAPQQVLQGHVHGAQGATRRPSPSSATLGQPPSRVKPTQPQP

SEQ ID NO: 424927 - protein, 343 aa, unidentified
MNTKVLGIDIAKNVFQLHGVDGPGKAVLKKRLSRNQLAAYVANLPECLIVMESCGGANYWARVFQRSGHTVRLISPQFVKPFVKTNKNDANDAEAIVEAASRPSMHFVPIKQVEQQDIQSIHRVRSRVVKNRTALINEIRGLNLEYGITVAPGAARVKRSLCAIIADNINELTPLSRECMQNLYDELVAIEARLKNLDKTIRQLCQQNETCRRILKIPGVGELTATAMVAAVPNANEFNNGRHMSAWLGLVPRQASSGDKRVLLGISKRGDRYLRTLLIHGARSALSHYKNTDNDYGRWLTGKRERLSFNKAAVALANKNARIIWSLLNTGEEFNCNAQMAAT

SEQ ID NO: 424928 - protein, 393 aa, unidentified
MICVGIDVAKDKHDCFILSSEGEVLTDVFTIPNNAEGFDTLLQTIRRCARPEDKIKVGLEATGHYSYNILGFLLNEGLDTYVINPLHTNIYRKSLSLRKTKTDRVDARTIAAMLMSDVDLKSYTDTAYHNEELKSLTRYRFDKVRERAKLKQSVSRLVTILFPELEKLVSTLHMASVYALLSEFPGAKQVSEAHLTHLKAVLYDASKGRYGSDMATTLRDAARCSVGSVMSAKSLELRHTIRLIHELDAEIEDIEAAIQSMMDEIQSPITTIPGMGVRRGAMILAEIGDFSRFDSPDKILAYAGMSPSTYQSRQLSLSGAYSHMEKRGSRYLRYALYNATKYVCLWNPTFAAYLAKKRAEGKHYNVALSHATKKLVRLIYALEKSKRPYSTAA

SEQ ID NO: 424929 - protein, 369 aa, unidentified
MDQHSIVVGLDVHKVSITAAILPPTALRPSDTYTIENNVRAVERLVKRIAGHENAVFVYEAGPCGYALQRQLHRLGCRAAVIAPGLTPVRPGDRVKTDRRDATKLASLYRAGELTEIRVPTGEEEAARDLVRAREDAVADRLRARHRLNKFLLRQGRLYDGKTAWSQKHYVWLRQQRFALGLAQHTFDAYLRGVEEADARLESLEAHVLAVAQWPNYAPLVQALRCLKGVDTLTAITVIVETQDFRRFGHARAYMDFTGLVPSEHSSGERTRRGAITKVGNAHLRRVLVEAAWAYAHRNSSGPTITKRRQGCPTAIVQIARRAQDRLHRRYGRLAHRNKPRPVAIIAVARELAGFVWAIAHHVPSTTMA

SEQ ID NO: 424930 - protein, 402 aa, unidentified
MSTFFAGLDWASRTHSVCIIDERGTVCEQFEVTHDAAGLAQLQRRLIHYGRPAVAIERPSGMVVDTLVEAGFAVVPIHPNVVKATRPRYRSHGAKSDASDAYLLADLLRTDSARFQPLKPQSDAIRALRALVRTRDDLVATRVQLANQLRSLLESFWPGAAAVFAEIDSPIALAFVLRYPTPQAASHLGEKRLARFLAQHSYCGRRSPAELLERLRAAPLGHSGELELEANGELVRALACALQPLLTQIGELSARIEHTVAELADGRIVMSLPRAGRICAAQILAELGDVRERYPCDDQLAAEAGACPVTYQSGKSRSVAFRWACNHRLRRAITCLADNSRRASPWAASRYAAARARGCDHAHAIRILARAWIRVLWRLWTDRCVYDPTQHRAAIAFNPPSG

SEQ ID NO: 424931 - protein, 350 aa, unidentified
MIIIGADYHPGFQQIAFVDTDTGELQERRLEHREGAETFYRGLAQPGRTVRVGMEASGHARWFERLLAELQFELWIGDAAEIRTKRVRKQKTDRQDAQLILQLLLEERFPRVWVPSGENRDLRQLLWHRHRMVQARTRIMNQLQAVALNEGLRCKKRLWRDSGRKQLESFLLAPWASRRRHDLLELLDRLSPTIAELTQAIEQEVEKCPEAQRLRTHPGVGALTALAFVLIIGRTDRFRCGKQIACYLGLVPVEESSGERRRLGHITKQGNSLLRFLLVEAAQVTVRSDQEWRSKFFHLALRRGRKIAKVAMARRLAVRLYWMWRKGWDYEQLKKFGSHAGQPGHRHGVH

SEQ ID NO: 424932 - protein, 346 aa, unidentified
MDVAVGVDSHKSSLAIAVLDDLGRPIGVREFVNDSRGHDAVVKWVAQHGTKLVIGIEGSGNYGAALARRLLEAGEDVREVPAFLSHRERKRSPSRGKSDVHDAVAIARVVARGEALSSPHRTAAFEDLKLLSDHRDQLVRARTQLVNRTHRNLVISHPGYEGLVPKLKSNKNLRDTLKVLRGDRSVRAELIRDRIGEIRRLNDKIAAVEKQMAIKIAESGTSLTQLHGIRFIVAAKILGEIGDPARLRSKSSFAMMSGTAPVEASSGRTKRHRLNRGGNRQLNYALHMMAIARCRGDQDTKIYVARLRSEGKSAKEAMRCLKRQLSNVVFRQLIADLKSSDWQLDT

SEQ ID NO: 424933 - protein, 348 aa, unidentified
MTVYIGVDFHARQQTISYLTTEEGTIQHLVLLHDNPVTVRAFYAQFAGQRVVVGFESSGYAAWFEELLEELGCELWIGHATYIRQFAKRRQKNDRRDADLILELLHTGDFPRIHRYSRTTREMLQQLRYRQRLVKMRTMAMNMLLFMASSRGVSLRTQLQSKRGQAKLQQLALPATLGRQRDELLSLLQTLNEKISTIERWLEQQTKADLAVQRLQTHPGIGLLTSICLRYTLEDAGRFANTRKVSAFAGFDPMQDQSDERNRMGAISKQGSRWLRFYLVEAGQVAIRKDADLQRVYQRIARRGGHAKAKVAVARRLLVRAFIMLRDEIDYAEFQRRGVAARSSRGTA

SEQ ID NO: 424934 - protein, 445 aa, unidentified
MSEPSTTIPSEPEWAALAAIDWADQKNFWRLLPAGSRQSEAGALDNTPEAVEVWAANLQQRFGGRRIAVILEQSRGALVYMLTKYPHLVLFPVHPTTAARYRETFAPSGAKSDPSDTDSLLDLLLRHRERLRPLQPDTAETRLLHFLVEERRQTVDERTRESLRLTDCLKLYFPQVLQWFDDVASPLVGDLLERWPTLEELQRAHPGTLRRFLQEHNCRSQEKNAERIAAMQQAVAATQDQAVREACLLITRSLVAMLATLRAQIAMFDRRIAELVADHPDGALFRSLPGAGGALVPRLIVAFGTQRERYQSAYEMQCYSGIAPVTEASGKSQWVHIRLACPKFLRQTFHEFAASSIQQSEWARAFYEHQRNENQKSHHAAVRSLAFKWVRIIYRCWKDGKPYDEEIYLQSLLRRGSLLGEVLGLTTGVGWKSIAGFQKLSENNT

SEQ ID NO: 424935 - protein, 368 aa, unidentified
MNEVTTRHLGLDVHKATINVALADSGAAPVLYGTIANEPGAVRKLVGQLKRGCKLVAAYEAGPTGYGLHRQLTELGVECVVIAPALIPRRAGDRVKTDNRDAITLARLLRSGDLTPVWVPGQEDEALRDLVRARFDAKDDLRRAQHRLSKFLLRQSIQGPAGTTNWSARYQSWLNTLQLERPASRLVLEDYRATERAARDRIRRLDADLKRCAEQSPRLDLILALQVLRGIAFLSAGSIVAEVGDFRRFPDAPRFMSFTGLTASEYSSGQSRRQGGITHAGNRYLRHILVQAAHNARYTPALDGTVKHRLKGAPADLVELSLRAQTRLHRRYRHLDRRIGRAKAVTAVARELAGFVWAVGQRMEAGGA

SEQ ID NO: 424936 - protein, 389 aa, unidentified
MKIFVGIDIAKLNHFAAAISSDGEIILEPFKFTNDADGFQLLVSKLESFDKNSLIIGLESTAHYGDNLVRYLVTELYQVCVLNPIKTCQMRKNNVRKTKTDKVDTYVIAKTLMMQDNLRFVSFFDLDMMDLKALGRFRQKTIKQRTRLKIQLTTYVDQVFPEIQYFFKSGLHQNAVYALLKEAPSPKEIASMHMTHLANLLKVNSHGHFTKEQAKELRVLAQKSVGANDSAISIQITQTIQQIELLDSQLEKIEAEMTDIMKFNDSVIMTIPGIGYINGGMILGEIGDIHRFSNPNKLLAFAGLDPSVYQSGNFQAKTTRMSKRGSRVLRYALVNAAWNVVRNNATFKAYYDAKRTEGRSHYNALGHCAGKLVRVIWKMLTDEVEFNLE

SEQ ID NO: 424937 - protein, 355 aa, unidentified
MNSEKYIGLDVHQATIVVAVMDSSGKLVMESILETEAATILQFFAGLRGTLSVTFEEGTWSAWLYDLLHPRVKQLVVCNPRKNALLKDGNKSDRIDARKLAELLRGNQLKPVYHGETGVRMLRELSRSYLTIVKDLSRVMNRLKAVYRSWAIPCAGRDVYYRRHRAQWLAKIREAGVRRRAERLYEELDMLQHLRQQARRELLAESRKHAITAKLRQIPYLGPIRAALAVALIQTPHRFRTKRQLWAYSGLALETRTSAEYRFVEGQVRRSKKMLSIRGLNKDHNHDLKGLFKGAATMASVRPGPFQDFYTAALAKGIKPTMARLTLARKIAAITLTLWKKGENFDAEKLKSQAA

SEQ ID NO: 424938 - protein, 394 aa, unidentified
MADVMIGIDPHKSSHTAVAIGLGEEPLGELQVRACPSQAAQLLAWAREWPERAWAIEGAAGLGCLLAQQLVAVGERVRDVPPKLAARVRLLQSGNTSKNDPNDAYSVAVAALRSKAWRPVAAEDHAVVLKIWAKRHRDLARARNQACCRLHAVLCDLVPGGIRREISAGKAARILGQVTPSGPAATARRELAAEFLADLRRLDGQLREVSKKLAAAVRASGTSLTGLFGVGPVIAGTVIGDVRQVFRFPDRGHFASWNGTAPVEVSSGGRKAWRLSLRGNRRVNHAIHMAAISQIRHKRSDGRAFYDKKVAEGKTHKEALRALKRRISDAIYAALVADARQAAAACIKGPGGQPGNHSDSSAAGSHPTHRHFGPATPGPATTLRPAATAAPVPV

SEQ ID NO: 424939 - protein, 402 aa, unidentified
MNCVGIDVSKGKSMIAVMRPFGEVVVSPFEVRHTASELSELARLLKSLDGETRVVMESTGNYHAPVAWLLHDAGLYVSVVNAMLVHDYGNNSLRRGKTDKKDAVKLANYGLDHWLTLPRYVPEEDTRLMLKTCYRQYQQYSKVQTMLKNNLISLLDTAFPDANRLFTSPPRADGSEKWVDFVATFWHCECVCGLSEKAFTAKYQKWCRKHGYNFSEDKALDIYASACGHFGVMPKTDTAKLLVEQAIFQLRATSAALAALKQEMQSLAASLPEYPVVMEMFGVGPALGPQLMAEIGDVRRFHSKKALVAFAGIDAPPYQSGQIDVRSRSISKRGSASLRRTLFLVMGVLLQCAPMDEPVYQFMDKKRSEGKPYRVYMMASANKFLRIYYASVKAYLDSLEHD

SEQ ID NO: 424940 - protein, 345 aa, unidentified
MTEAYDGRQVVGIDLHRRRSVIVRMTGDGRKLETVRITYSAAALRREIAKAGKHPRVVVEATYGWYWAADVLEAAGAEVHLAHPLGVQAYSCRRVKNDQRDAADLADLLRMGRLPEAWIAPPEIRELREITRYRHKLVQARTSVKDQVHAVLAKLGIPVTHTDIFGVHGQAWLDGLRLPQPYAGKVTSLRQLAGELSAEITLLEQVLGDLLAGHEGYAAIRQLPGIGPVLAAVIVAEIGDITRFRKAGQLACWAGLTPRHRESDAKVTRGHISKQGPRILRWALCEAIQHQSAGTRPRQVKDGIIARRGPQARNIAKTAAARELLTLIFYAMRDGRVRRAASPAA

SEQ ID NO: 424941 - protein, 320 aa, unidentified
MSATTERTTYVGIDVSKATLDVAILPTGECFVASNDEAGIEELLGKLAEVPEALVVLEATAGFERPVAAALAASGVALFVVNPRQARDFAKATGQLAKTDALDAFVLARFAEAIRPTPRAIPDAEAREFGEILARRRQIVRMLTAEKNRLGASTSKAVRGRIQAHIRWLEKELARTDRDLDEIIENSPTFKANEALLRSVPGVGPVLCRTLLAELPELGSLSPRELSALVGVAPLNRDSGTLRGRRTVWGGRARVREALYMGALIASRFNPAIREFYERLVAAGKPKKVALVACMRKLLVILNAVMRERTPWRCPHALNS

SEQ ID NO: 424942 - protein, 385 aa, unidentified
MRDKTFVPREYDVFAGLDVDKKSIAATFSGHQGFIRSLSMPYKVEDLLNHVRNHFADQKVAFVYEAGPTGYGLYDGLAAQGYTCLIAAPSMIPRAPGQRVKTNRLDSKALSESLRGGQLKSIHVPSPLYRQLRHLTQLRDTMMSEAVAMKQRIKSLLLFEGIAFPPAPAGSQWSFIVKAKLRKLPCSNTVRFKLDQLLDSLEFDEKQVLKSTKEIRRFCQTDPELSQCIEYMMTVSGVGWIVASQLLARIGDWRELENIRQLGGFLGLVPTEHSTGDKTDRGPITHTGDGRLRSKLIQAAWSAIRKDGELREFFRSVCQRHPRKVASRVAIVAVARKLSVRISVVLMQQRPYEVREKVHSAPLTQEETSPQGTTRRRGEPGEKNS

SEQ ID NO: 424943 - protein, 477 aa, unidentified
MPSKQHQQRKVRKAPRGARKKRQKGMCLEDRPVLEPNAAGIDIGAREIFVAVPPGRDENPVRVCTTFTEDLEQMADWLVGCGITTVALESTGVYWIPLYNILESPGVKACLVNARHMKNVPGRRTDWHECQWLQYLHSVGLLRGAFRPDAEITALRTILRYRQELVQMSSQHVQHMHKALTQMNLQIHPVMDDITGLTGLAIVDAILAGQRDPAELAKLRNWRIQAEEETIRKSLVGNWGEEHLFTLQQSRELYRTYQQQIVKCDQKIEELVGGFEPRVDPQQKPLPPDRKHYRTDKRRARKSGRLDTDFNLRMEAYKLFGVDVTQIPGLETMALPLFGEVGRDMSKWPTADHFASWQGLCPDNDISGGRVLWKGTRRVRNRAGIMFRHAAYSLHHNLTPLGDYLRRMKSRLGPAAAITATAHKIAVIFYTIVKNQLEYDETIWATRDIKRNKRIQNKLERQARQLGYQLVPLKNTA

SEQ ID NO: 424944 - protein, 396 aa, unidentified
MPEIWAGVDIGKEHHHCVVINAEGERLLSRRVLNDETELLELVGDVLAISTDALWAIDLNQGGASLLIGLLLSHDQPMAYLTGLAVHRASATYKGEGKTDAKDAFVIADQARVRRDIGLLRPGDEIAVDLRTLTTRRLDVVFDRTRQINRLRAQLLEIFPALERSLDLVNKGPVMLLTGYQTPTAIRRAGARRIETWLKNRKVRGAATSAKKAVEAAQAQHTALPGEKLAAAMVVRLAKGVMALDEEIAELDALIEARFREHPHAEVIRSLPGMGTKLGAEFIAATGGDMDAFGSADRLAGFAGLAPRPRDSGRVSSNLRRPKRYHRGLLRAMYLSAMVSITSCPASKAYYQRKRNEGKGHKQALLALARRRVNVLWAMIRDGQCYQGSPPVTKAA

SEQ ID NO: 424945 - protein, 314 aa, unidentified
MRNCMGIDVAKQVFDLHSLKTGQDRRMENSTEGIRQCVALCNTLRPELIVMEATGGYELTLAATLQAEGFAVSVVNPRRIRDFARAAGQIAKTDKLDARIIAQFAATMDPMPTERINENTQKLKALVARRSQLVGLHTAESNRLEHADSKAIQRSIAAVLKVIEAQLKTIDRQIKEHIQNTPELRQRSEILDSAPGVGPTTAHMLVTELPELGRLNRRQIAALVGVAPMARDSGTFRGKRMTGGGRKEIRSRLFMPTLAAVRHNPILRAYYTRLIRRGKCKMVALVAVMRKLICILNTMIKNNQLWNPNLIKIS

SEQ ID NO: 424946 - protein, 338 aa, unidentified
MIGVDLAKNIFQLHITTMTGALLSKKKLSRDRFKEFMKSHEPAIVVLEACSSAHYWAETLGDMGHDVKLIAPQYVKPFVKRQKNDAADAEAIVVAAQRPEMRFVAAKTKEQRAKAVLFRSRDRLIHHRTEHVNALRAVLYEYGYVIPQGIASIRRIEDILARPNCDLPDLVCDECRHLLEQISSNTKLINAKTDLIKQLAKQTNMARQLQTIPGIGPMTAMAIDAFAPPMDLFKNGRGLSAWLGLVPRQYSSGGKERLGRVSKAGQADIRRLLIIGAMSRLNWLGRKSIPEESWLGKMLARKPKMLVAIALANKMARTIWAMLTKETDYRDPTISATA

SEQ ID NO: 424947 - protein, 351 aa, unidentified
MAAKKRSVIGGVDTHRDTHHAAVIDSTGGLLGDAEFPATRDGYENLLDWLSSFGQLVAVGVEGTGSYGAGLARHLGSRKIPVVEVDRPDRRTRRTKGKSDPIDAIAAARATLAGTAMGIPKTRTGPVEAIRALRVARQGAVKARTAAINQMRGLVAAAPEALRAELTKLSAAVLVNRCATLTADLSRLHDPEQATAAALAGLARRALALTEEIHALDQQLTPLVRRTAPRTSALFGLGTDVAAQLLTTAGDNPDRLHSEAALAHLCGAAPIPASSGRVRRHRLHRGGDRGANHALHTIALCRLRYDQRTRAYQQRRTTEGLSKQEILRCLKRYIVRDVYTALRADFAALTT

SEQ ID NO: 424948 - protein, 371 aa, unidentified
MEQSSKTLYVGLDVHKDSIAVAYAPDDRGAEVVSLGAIGPRQCDIDKLIRRLESKGAALVFVYEAGPCGYGLYRYLTGKGFACHVVAPSLIPRKAGDRVKTDRRDAMTLARLMRSGDLRAIYVPGVEDEALRDLSRGRDDALQDLKRSKRRLKSFLLRQDIRYEGRATWNPAHLRGLSEVVCPTPPQQIVFQEYLRAVSEQHERRQRMEHELHEAVQGWRLYPMVQAIQALRGLELTSAVIVMTELGDLTRFDNPRQLMSYLGLTPSEYSSGARRHQGGITKAGNSHARRALVEGAWAYRYPAKVSRHLQLRLETLPAEVQAISWKAQVRLCKRYRQLTARGKHVNQVVVAIAREMAAFAWAIARLVPLAS

SEQ ID NO: 424949 - protein, 400 aa, unidentified
MNPVVGLDVAKGESQVQAFLDKKQPYKKSFKVAHTLEGLDSLLDFIREVENVSGERPPIVLESTGHYHTPVVQFFEDMGYLLIIVNPLISYRAKSSNLRKVKTDVIDARHLCELYYKEDLEPYKQRGIQLLNLRNLTRQHENITGLFVQTKLQFQAVLDQVFPEYRGVFGDLHSYVSLLTLQAFPTSEEILDTGKETIAKKIKELCKSRSQKWADSQAEKLMAAAAQNPFQKNLYHSLILSLDMYINMLLEYKKHLSKLEDEIDALAKGIEECKIIQSIPGIGEKIAATIISEIGEIDRFNHPKKLVAFAGIDPSVFESGTFKGTLNRITKRGSSRLRHALYMAVKCAIRDCRKKKTTDEIIPRNKRLREFYDKKREEGKPFKVAVIACAINSYIGFIHF

SEQ ID NO: 424950 - protein, 392 aa, unidentified
MIYIGIDVAKDKHDCFITHSDGEVLSKSFTISNNRKGFDSLFQKIISVSNDLSKVKVGLEATGHYSYNLLGFLLDKGLTTFVINPLHTNLYRKSLSLRKTKTDKVDSRTIATMMMSDMNLKSYSDTSYHNEELKSLTRYRFDKVKERAKLKSSVSRLVCILFPELEKLVPTLHMASVYALLSEFPSASAVASAHLTRLSNLLSESSKGKYGKDTAVMFREVARSSIGSLMPAKSLELKHTIKLIHELTIEIDEIETAIKQIMDEEIQSPILTIPGISYRMGAMIIAEIGDFSRFDSADKILAYAGMSPSTYQSGQLNNCHSHMEKRGSRYLRYALYNATKYVCHWDESFGTYLEKKRSEGKHYNVALSHATKKLVRLIFAMEKSRRAYIPVP

SEQ ID NO: 424951 - protein, 317 aa, unidentified
MTPEIFVGIDVSKAQLDVAVRPTGETWTVPHDDAGLDTLVARLRPLQPTMIVVEATGGWEVRVAGTLAGAGLPVAVINPRQARAFARATGQLAKTDRLDAQVLARFAEAVRPTPRPLPDEAAQELITLLTRRRQLVDMLTAEKNRLGHARGPVRAQIRTHITWLERQVTARDTDITTLIRQSPVWRERDDLLQSTPGVGPVFSTTLVAELPELGTLSRQQIAALVGVAPLNHDSGTRRGTRTCWGGRASVRTVLYMATLVATRCNPVIRACYTRLRAAGKVKKVALVACMRKLLTILNAMLKHRRPWSPVHAEPGMA

SEQ ID NO: 424952 - protein, 424 aa, unidentified
MHLTSLSPWTSTATIACDVSAHKLNLICRELSGPGDAAEWEILNRTEPITSTLRLICERARARGIMQLRVIVEPTGRYHKLLLRIAHSLGLQTALVDAGHVTKMRSVLFGDSGKTDQRDPYAIEAVAAQGRLIADRRHADVYELLRQWGKLYQDAEVALIQAKSRVHNALTLLFPDFDFSTDFLYGPSGQAVVRCFGLDPHRIAELNLSRIYVRLRRQCAIRRSSVTRLLAAARQTVAALAKSRITDLLAHELALAWEDFELATRRREAARAQLETLYDQASIADRFLPEVAGSGISKVAMARLLGETGPLSAYASWRQLLRMGGVNLRERKSGTYVGQTRIARTGRPLFRAIINQMALALVRHDRLYGTYYHHKTGVQKMPGKKAMTAVGRKIVKMIWGWYRSGAAFDRTRVFQCEAQRRHVA

SEQ ID NO: 424953 - protein, 349 aa, unidentified
MVTKLVDYVVGVDTHRDEHTLALVEAATGAVLAQQTVASNGRGYAQALRFAQQQVDAARVWAVEGAGHYGAGLARYLSERGETVLEVGRSPRGERRLSGKDDQLDAVRAARAALRSEPLPRPRSGEHREALRLLLVARRSAVDVRREALVQLRSVIVTAPERLRQELRGLPVQRLLDRCSRLRRSTTPTPDQVAARVVLRTLARRIEAATVEADELEREILVHVRALAPELLDEAGVGPIVAAQLIVAWSHPGRIRSEAAFARLAGVAPLPASSGQTSRHRLSRGGDRQLNRALHTIVLHRRQHDPATRDYIARRIAEGKSRRDATRLLKRYLARHLYRLLQNQEPLLA

SEQ ID NO: 424954 - protein, 340 aa, unidentified
MDNVTTIGLDIAKSVFQVHGVDAVGQVVVRRKLTRGRVLGFFEKLPRCLVGIEACSSSHYWARELTARGHDVRLLPAQYVKPYLKRQKNDAADAEAICEAVTRPTMRFVPVKSPEQQSVMMLHRVRLMLNRQRTQISNALRAHLSEFGVVAPIGRNGIEQLLAVINDENDARIPADARLCLRMLEAQLRVVKEQILENDRRVRASARETELGRRLMEIPGVGPLLASAFVATVADPHAFKSGRCLSAWIGLVPKQNSSGGKEKLGSISKAGNRYLRQLLVVGAMAVIRYAERNGTRRPWLVQLMARRTTKVAAVALANKTARMVWALMTNGERYREPITA

SEQ ID NO: 424955 - protein, 341 aa, unidentified
MAYFAGLDVSVKETRVCIVDDAGKIVREARVASEPDALLQMLTIYRFKRIGLEAGPLSQWLYSVLAEAGLPVICVETRHMRAMLKAQINKTDRNDARGIAQMMRAGLYRPVHVKTLRSQKLRMLLTHRKLLQSKAIAIENDLRATLRNFGLKVGMIGTVKFETRIREPVENLPDLAVLVEPLLIVRRVVREQLGILHRRLLAIVRNDDVCRRLMTVPGVGPVVALTYRVTVDVPARFRNSKAVGAVFGLTPAKYQSGEIDRTGAISRCGDEMMRMMLYEAAQSMLARSTKWSWLKAWAMKVARHRGMKKAIVALARRLAVIMHRVWVDGTEFRWTREVAAA

SEQ ID NO: 424956 - protein, 330 aa, unidentified
MSVFVGVDIAAKTFDLVNRKGGKASKVESFSQSAQGHAKAIKRLQNLKPTLITMEATGIYYFDLAVALVQAGLPVAVINPKSFHHFAKLKLAGSKTDGVDAALLAEYGERIEPSLWTPPDEVRLALRDIGRQINRLTGTRTQAKNRLHALQAKNSTRSLLVEDEQEGIAYLDRRIERLSQAALALIAECETLSRYLTHMCAAKGVGKATALIVLAELCVLPSSLKAPQVSRFAGLDVRLTQSGSSVNRPARLSKAGNAYLRAALYMPAMSAIQHDPRVKAFYDALVSRGKKKIQALCAVMRKYLTGLWACIQTETAFDSAMLFSEEHLKA

SEQ ID NO: 424957 - protein, 422 aa, unidentified
MGQLIIGVDPSRKGNHEICLIGSDLNIIHKQKVKGNQAAIELLKELVALARQGPKPMDILIGIEHTDGTLLEDALQVGAPVYDLAPAKVALHIGSLKCGGDKSDAIDAYGNARYLAAAHPKLEAYQPPSLLVRRARDVSHQLSAIRQQSTKTWQRFWAVADRSAPELKEVLGDSAKTQWFLGMMSDLFPKPRFRHTTAKGFCQCCHKRKSRMKEEELTSILASLKTIHDREMPELLGSQAVTLLTLMREENLWVKKASRLLEQWTEGQVALTVTCLGPKTLIRLLAYIGEDWADIRPAAICAYSGIAPVVHSSGTPPKKDLRRMGPKKRKRHEPRRSHRLACNRDLKTTLCLFAFTTLERSQWARQAYDRFRERGQTHWEALRNLSIKWVRIICAVIRTQKPYDAHYYERNLAARQDPLVAH

SEQ ID NO: 424958 - protein, 372 aa, unidentified
MGHHTEVFVGIDTSKSRNAIAIADGGRGGEVRYLGEFPATEAAIRKLVAKLAAKCCQLTFCYEAGPTGYGLYRLLKSLGHDCLVVAPSLVPKKAGDRVKTNRRDAVSLAKLLRAGELTAVWVPDERHEAMRDLSRARQAVKKDLQGKRQQISSLMLRLGRIYPGKTTWGPAHIRWLMSQKLEHREQRIAFEELLEGIRQESERMERLEDAIREVVPEWSLAEVVAALQAMRGIDLIAAVGVLAEIGDLSRFQNPRELMSYLGLVPTENSTGDKVKRGGITKAGNGRARRILVEAAWSYRYPPRVSRDKQPKVEAAPRRAREIAWKAQTRLCGRFRSLERKGKRRTVIVTAIARELSAFIWAINRELMPSRQA

SEQ ID NO: 424959 - protein, 398 aa, unidentified
MTESSDYESVQVFIGVDVGKDTHHAVAINRSGKRLFDKALPNDENKLRSLISDLKQHGQILLVVDQPATIGALPVVVARSEGVLVGYLPGLAMRRIADLHAGEAKTDARDAAIIAEAARTLPHALRTLKLADEQIAELSMLCGFDDDLAAQTTQASNRIRGLLTQIHPALERVLGPRLDHPAVLDLLQRYPSPEKLASLGEKKLAAQLCKLAPRLGKRLAADIAQALAEQTVVVPGTNAAAVVLPRLALQLITLRKQRDEVALAVEQRVLAHPLYPVLTSMPGVGVRTAARLLTEVACRAFASVAHLAAYAGLAPVTRRSGSSIRGEHPSRRGNKALKRALFLSAFAALRDPLSRAYYTRKMSQGKRHNQALIALARRRCDVLFAMMRDGTFYTPQAS

SEQ ID NO: 424960 - protein, 410 aa, unidentified
MEVLYQRCAGLDVHKKTVVAAVRLVEGNKVVTEVRTFATTTAGLLALSDWLAETGCTHVAMEATGVYWKPVWHVLSDGEIELVLANAAHVKNVPGRKTDVSDAAWLAELLAHGLIRASFVPDGQTQELRALLRTRKQLVRERSRHVQRIHKTLEDANIKLDAELSDVLGKSGRAMLNALVAGETDPVRLAALAHPNVKCSQAQLREALRGRVTSHHRFLLQLHLCQIDRLDAAIATIDQEVEANLVPFRTAVELVRTIPGVSTLSAEVIVSEIGLDMSRFPTAGHLLSWAGLCPRNDQSAGKRRSSRLRKGAQWLKTTLVQCGWAAKNKKGSYLQAQFLRLRSRRGPQKAVCAVAASILTAAYHMLKDGTVYSDLGADHFNRRSKTTHAQRLVNRLEHLGYAVEIKPLAA

SEQ ID NO: 424961 - protein, 418 aa, unidentified
MKPAYKLYVGIDWASQLHEVCVLDSAGEVLARRTIAHRAEGIAELQRWLCELADGQVSEVAVAIEVPRGALVEALEEMGAHVYHVNPKQLDRMRDRYSSSGAKDDRRDALVLADSLRLNERFFRRVHIDDPRIVELREIGRLEAQLTEERTRLSSRLRELLNRFWPALLALSDGDNDCWLWSLLELAPTPAKARRLRLPQLADLLRKHRIRRFDSVKLHATLQQPPLPVSAGTIEAAALHLRLVVEQLRLVERHKRECCRRLDAILEKLCPQTGEEGKPPKHRDVEILCSMPGVGRFVAAAVLGEAGQLITNRDYYQLRSQAGIAPVTRRSGKSTRVSMRRACNHRLRNALHHWSQCSLSLDPRSRALYDRLRQRGHGNARALRSLADRHLRVLMAMLRDQRVYDPQRATPVTAADGA

SEQ ID NO: 424962 - protein, 277 aa, unidentified
MKIVGCDFHPRWQQIAVFDGETGEISEHKLVNGDGEAERFYRALDAPALVGMEACGNSQWFVELLERLGHQVWIGDAAQIRASYVRRQKTDRRDAGHILRLLIEQRFPRLWVPTAEQRDLRQLLIHRHKLVEIRARVKNGLQHLAMNRGLQKRSSLWSVGGRADLEKLFLPGWAARRREDLLQLLGELDGQIGALDQAVERAAAEHPQARLLMTQPGVGPITALAFVLTLGEVSRFEHSGKSGQLSGADSQRAQLGRPAAAGGDQQAGQSLYAPVAG

SEQ ID NO: 424963 - protein, 338 aa, unidentified
MQFVGLDIHLKHINACIRNNAGKIEIQTKFKTEPDAMDRFLVHVDKENSKIVIEACSCWEFVYDYLTDAGYKVILANPSQIEKKKGRKTDKLDAKKLSKLLHADMIPEAYAAPRDVRDQRSLTRLKQSLTELRTEVKNKVNAILIRNGIVHGYSDVFGKAGTQYLRSIDLEIRDKYQIDTYLDTVSNIDKQIIDVTERIEEVEVRNPDIKIVRSHPGFDYYMSLLFIGEIGDNRRFQSYNKLTAYAGLDPSVSQSGEKCYIGHITKKGNKRLRWCLVQAAHVAVMHDSKYAKIFHKISARKNANVAYVAVARKILKTLYYMLKNHSYYRPQSKDRKAS

SEQ ID NO: 424964 - protein, 346 aa, unidentified
MLHAGLDLSRKRLDFCLLDESGEQVEVGAAPPDADGLRSLARRLARHDQPVRAAIESMNGARFVHDQLELAGWQVEIADALKVKGLAPLACKTDRIDAWVLAELSRRDLVPAIWLPDPSVRAERERARFRLHLVRHRSSLKQRVHAVLLAHGKPCPVSDLFGVAGRALLERLALPEPWAGTVAASLRLIDELDLQIATGEAELRRLGADHHYVPLLMTVPGIGWVLAYTIAAEIGDIDRFGSPRKLAGYSGLCPRVYQSGESDRRGPLAKQGPKYLRWALVEAAVHANTHPAYRERYQRTKTRLGKQRGAKVAQVDLARRLAEAIWHMLTRNQPFAPAGATDPLTA

SEQ ID NO: 424965 - protein, 335 aa, unidentified
MKHYAGLDLSMETTQVCIVDENGRKLVSEKVESSPEGLAEMLERNGPIERAVIETGRMSPAICLGLRELGVLVVCIDARQAHQSLKAMKANKTDPHDAAGLAQLARTGFYKEVHVKSPAAHGVRSVISARGHLVEARVRLDNMIRGLCATFGYRPGAGQGKAFLQRIKQAAHIPGLGDAIASLLSVRAELVEQIKEMDRRLRVIASQSQACEILMTIPGVGVQTSAAFAAAVDEAGRFRQSRNAGAYFGLVPRRHQSGELDWTGRITKQGDGTVRKLLYEAANSILTRSRETFALKTWALNIAKRRGLKKARVALARRLAVIMHAMLRDGTLFQA

SEQ ID NO: 424966 - protein, 347 aa, unidentified
MYPFYLGIDLHLKRTYLVLMNTEGEVIDKRRLKNTEMETYISRNVPKETYAVMEATRNWPFFYDLLNKHVDRVELAHAKGVRMIAQAAVKTDQIDASVLAHLARLNFLPIAYAAPKEIRDLRQHLRYREWLIDERRRAKNRIHAVLAGYNLTSPVTDLFGRAGREWLGEMAEKELRPTSRRVVLETLTMIDQLDDQIKELAKDILLPEDLKPKAELLMSMPGIGRLISAVILAEIGDINRFKSPKALCNWAGLTPRVHQSDTTVRHGRISKQGSRYLRTAMVCAAMTASRISPRWYRVYEHLSRRIGRRGARVAVGRRLLTVVYYMLKRDQPYDEDYEQRRLVEQGA

SEQ ID NO: 424967 - protein, 487 aa, unidentified
MDENGGGAGRFVGAFATGDRAEADETAVACDPDRQSGPRCIEVPFFVAPGNGEHAWQCLDYTCGVTVAFTWMEAKMEVIIERCCGLDVHQETVVACVLIGAPGERPRKEIRTFRTMTRDLEALRDWLQELGVTQVGMESTGVYWRPVHAVLEGRFDLIVANARHVRNVPGRKTDVKDAEWIADLVRHGLIAKSFVPPAPQRELRELLRYRRKLVESQTAERNRLLKLLETANIKLASVASDVFGVSGRAMLKALIEGSASPEAMADLARGQLRRKRDDLVLALEGRMEEHHRFLLATQLRRLEAAEQDIAALDHRIEAKLKPYCVQHALLMQIPGVDWVVAAALIAEIGVDMSVFLSVYHLAAWAGVAPGNHESAGKQKSGRARKGNVHLRTMLVGAAISAARTKGSYLKDKYHRLKARRGALRAALAIAHKILVSAYHMLAKNLPYRDLGEAYLDQISQTRTVANLKRRLERLGYNVTLEPKAVPA

SEQ ID NO: 424968 - protein, 410 aa, unidentified
MELLHRRCCGLDVHKETVVACLRLVSNGKVTTEVRTFQTTTADLLHLSEWLAANDCMHVAMEATGVYWKPVWHILDDGEFELVLANAAHVKNVPGRKTDVNDAMWLAELLAHGLIRASFVPDTQTQEMRNLMRTRKQLVREQSSHVLRVQKTLEDANIKLDSVLTDLMGKSGRAMIEALIAGETNPAKLASLADRRAKASHEEFREALRGRVTKPHRFLLRLHLNQIDALDAAIATLDAQVEANLGPFRTAVDLIISIPGIKNLGAHVIVSEIGIDMSRFPSHAHLISWAGICPRNDESAGKRRSNRLRKGAPWLKTTLVQCAWAAVKKKNSYLQAQFYRIKARRGPKKAIMAIAASILTAIYHMLKDGTMYKDLGCNHFDRRSTDQQKQRLVKRLADLGYAVEIKPLAA

SEQ ID NO: 424969 - protein, 404 aa, unidentified
MIFVGVDWAEAHHDVCVLDDHGTVVGRRRVTDGVAGVADLHALVAEHADDPTEVAVGIELDRGLLVGALVAVGYEVYAVNPLASARYRDRHAVSGAKSDRGDAKVLADLVRTDRHNHRRIAGDSDLVEAVKILARGHQSAIWSRQRQLNSLRSALREYYPAALVAFGTDLASGDAVSVLTIAPTPELGRQLSLSKIASALRRGGRQRNVDTRAAEIQVALRSEQLAAPSRLSDAYGVVAHSAVAVIVSLTGEIAVMEEALGEGFDEHPDAKVVRSLPGLGTVLGARVLGEFGDDRTRFANAKCRKNFAGSAPITKASGLSLVVLARHARPRRLADALDQWAFCSLTQSPGARRYYDQLRARNKTHRQALRQVANRWVGILHTCLDRNELYNERLAWGHLTELAA

SEQ ID NO: 424970 - protein, 321 aa, unidentified
MTYIGIDVSKDTFVVAYSPDKNSKTKTFKNTTKGIHEFIRTISKEEHHCVMEATGNYSALLVYLLSEVGVTTSLENPLKVKNFARAMLSTVKTDEIDARMIALYGEKMQPAPYKLRSDAILTLKQKRTVIRQLKKQLIATRNLKGSMEVLPFFDAKCRKSVEKTIAFLEKQIKDLEEDLATLANSEYKKQMDLLTSVKGIGITLAAALIMATGGFTYFDNAKQLTRHLGLSPTYQQSGTSVNFKGHINRNGDSSLRSQLYVAAFASLRCNTECRACYDRLRSNGKPGKVAVIAVANKLIRQAFAVVTQEKPYVDGYVSSKK

SEQ ID NO: 424971 - protein, 287 aa, unidentified
MDECITYIGLDVHKLTIAVALAEGSGRGEVYTHGEISNTPAALTRLSSKLSRNGSVLRFCYEAGPCGYCIQRQLAAAGHDCVVVAPSLIPRKPGDRIKTDRRDAINLAGLHRAGALTAVWIPDPAHEAMRDLVRARLAAVRSLRQARQQLSGFLLRHGCHYNRSAWTLMHRRWLAGLRFEQPAHHIVLEDCIATIEAATARRDRLTAQIEAMLADWTLAPVVHALQALRGLALVAAATVIAELGDLTRFTNPRQLMAYLGLVPSEHSSGGTRRQGGVTKAGNSPPCQ

SEQ ID NO: 424972 - protein, 347 aa, unidentified
MRFYTQQHKHYCGIDLHARTMYLCVLDVGGTVLLSRNIECTPKAFLATVKACRDDLVVAVECMFTWYWLADLCQREGIAFVLGHALYMRAIHGGKAKNDRIDAHKIAALLRGGMIPQAYVYPAQMRATRDLLRRRNHLTRKRAELIAHIQNTVSQYNLPPLDHRIDKRCDRVGLLAHFPDPQVQNSVALDLAMIEQYEVLLPKLERHIRACAKQHDRKSFVLLRSIHGADLILPLVILYEVHDIERFLRVQQFLSYCRLVKPARESAGKIQGHAGAKIGNAHLKWAFGELATTFLRANPPAQRLHERLKAKHGKGKALSVLAAKLARAVYFMLKRGQVFDTTKFYQD

SEQ ID NO: 424973 - protein, 464 aa, unidentified
MAVLNIGVDLGVTTKHHAEVKNGEGIEVCSSVTFAGTKEGFDMVSEHVLQHVNEEAKLRFICEPTSMSWFPLAVYAKRNGHEIMRVKAQKSHDLRKYYSRHSKSDKLDAKALAMMPIVDRESIEEVYLPDKILNALDRRCRQREKISKEIASIKTRIKSLYHWVMPGLTDCFEDPYGERAKAFYKKYTNPFNVKQLGVSRLRRVLEKTGRQQATEGLAERVYEAAIRGCQLYDHCGEYIDFDELQYEVECELQLLESHEKVQKKVDEAINRLYEEAHPTKDIETIPGIGETLGPVFVGIIANSERFSSQSKARGYSGMIPRQKDSGESSKKGLNITKDGPSRYRRALYLASDTGRQWDPQLAKVYYDQMVYKGNCHTQAVCAVSTHLIGRIIRVLKDKRPYELRDLEGKSITKKEAKILIKRELTVSEETRKRTRSRRKTKGYKRNQIRGIAQKQSSRSAPYPS

SEQ ID NO: 424974 - protein, 432 aa, unidentified
MSPLALDVVTKTDKTPVLGRMLSKYVGRKTSSIENGITKARNHSRQRGNIMRVVFGIDVSKASSEVAILVNGEKVHGYTIPNDAIGFNRLLGDLKTVHQPEIVFEATGVYSRRLQAFFEDNSYTYTRLNPLESKKQLDSLRVRKTDKIDAEKLAMSQFILNRKPSYVQEALYQELRDLSRFYQNLTEDIVCAKNRLHKVLQITFPELENILSAPTGEQYWNLVITFPCNSFVLESDDATLTAIIRQSTAKRISEKRVTYLVDKLTKLANQSYCAVKKTSPVIEEVKYYAGELLRLSEHRQGVVEEMVTLAQSLPEYEILLSIPGIAETTATSIIGELGDIRRFHSANQINAFIGIDLRHYESGNFLAKEHITKRGNPYARKILFKCIHNIASASHTNPCHIADFYEKRKRQSQVTSTKPHTIASIHRLSRTM

SEQ ID NO: 424975 - protein, 312 aa, unidentified
MQNKSQNQTRYIGVDVSKQSLDIDLPSPDDHIPNTPEKIGEVLSRLPSDAHLVCESTGGYENALVSAALAAAVPISVVPPQRVRHLALSQGRLAKTDRIDAALLSDYGCKHRPEPLKAPEPARVKLRELLRARAQLLELKQLEASWAEHTPSEPVLRRQASARTKLLDKQLDELERQIRALAKQGESRAQIERMQQVQGVGEVTSWTVWAEMPELGRLEPGKAAGLAGLAPHPRDSGGQRGKRFIQQGRPQVRRVLYMAAITAARCNPVLSVFYQRLRARGKPAKVAIIAVARRLIELLNLMLKNPNFCLGS

SEQ ID NO: 424976 - protein, 386 aa, unidentified
MQKLNDLSRSLIVLEPAVTLIAVIEMSLSSWLVAGIVPGVERQPLKKLAVDESALLKVLHRWREEAEKAGRRIERIVVGFEAGRDGFWLARWLKARSIEAHVIHPASVAVSREHRRAKTDRLDTALLKRAFLGWLRGERDHCKVVAIPTLKDEDAKRPNRERESLVGEQSRIVNRMKAALIRLGIRGFNPKLKRAAGRLDSLRTPEGEPIPPNTLAELRRDMERRRLVSNQIRQIEKARLKHFEQAPNDGPHAMVRLLARVIGVGIETADMLVHEVLSRNMRDRRAIARYAGLTGSPDESGRKRREKGLARSGNGRVRRGMVQLAWRFLTYQKQSALAQWYRARTENALGARKPMIVALARKLLIALWRFVRQGVVPDGLVLRPAQ

SEQ ID NO: 424977 - protein, 316 aa, unidentified
MTDNSMICAGIDVGKSHLDIAIHPDDARLRVTYDTAGLKALDAFLQEHDVSRIGFEASGGYEWRLMVHLRAGKRPAARLQPAQLRFFAKSRLRRAKNDRLDAALIALFTASLEQLPALPDARFDRLAAELTYVEQIEQQIALVKTFAETALSEAVKRRHAREIARLETCRKARLLRLEKTVRDDCDLARRLDLLISIKGIGLRSALCLIIRLPELGHAGRAEIAALAGVAPYDDDSGKHHGRRRIQGGRERLRKSLFMCAFTATRHNPDLASFYARLRSNGKEHLCAVIAVARKLIILANAILIRNTEWTPQYQQN

SEQ ID NO: 424978 - protein, 347 aa, unidentified
MKILALDLGKYKTVGCEYERESGQHRFRATGTTPAALQQLVQEVKPDRVVIEVCNIAGWVCDLLRGMGVEVQVANTSDDAWRWRKVKKKNDRADALKTAQLSAVNQLREVHIPNLEVRQWRALIAFRQQLVRRRGRSKNHIRDLLLSEGQVLPRGGKCWTQLGVARLEALAKPLSACGLHELWRGQLDIELRQLRQVQQEISAAEEKLEAIAASDQRVKLLRTIPGVGARLAEAIVALLDRPERFGHAREVSAYIGMVPKELDSGETVRRGRITKQGSRLLRSLLVEVAWAGLRYNPWVRETYQRISGGKKSRKKIAIVAVGRRLLVRCWAMLRDGTIWRPPVVNAA

SEQ ID NO: 424979 - protein, 452 aa, unidentified
MARKRKKDTKGNNAMLPVMRPDAAGIDIGATEIFVAVPADRATENVRSFPTFTQDLYTLADWLKQCGVKTVAMESTGVYWIPLFQILEDRGMEVCLVNARHVKNVPGRRTDVCDCQWLQFLHSVGLLRASYRPEQEVCAIRSLLRHRESLVQMAATHVHHMQKALDQMNLQLHHVISDITGQTGLAMVEAILAGERNPSVLAKLRHDRIKASEEVIAKSLVGDYRPEHLFTLRQSLAAYHYYEKLLDHCDREIRRCLEEFKPNLPDASQGGSQKAPSRTASTDGVLRSELKRVFGIDLTKIPGIRVGIAQTLFGEIGPDFTKFRSASAFASWMGLCPDNEISGGKVLWVGTRKVKCRAATALRMAAQSLHHSKSALGDFYRRMRAKLGAPKAITAAAHKLAKIIFHLVTMCQEFDDSRFAADQLRYQKRQEAKLRAKAKALGFQLIPLQQAG

SEQ ID NO: 424980 - protein, 420 aa, unidentified
MKKHSKSCRQSEPTTKRAKSRGPVQRDAKEVMAEVLEKLTGRGVLDTRIESGRARKGRRENTVGPNLDRLTVGVDLGDRWSQYCILGLKGETLAEGQLRTTQEDVREFFQALTAARIVIEVGTHSAWVQDVITEWGHEVLVANPRLMEGSKGRKRKSDRIDANKLARLGRVDPQSLYPIRHRSREVRQDLVVLRARDALVSVRTELINTTRGLVKSMGTRLPRCSSPSFAQKVKDAIPVEVREALLPLVQLVETVNDGIARYDQKIEELGREKYGHTTLLRQVKGVGPITSLAYVLTLEDPQRFSSSREVGPYLGLVPKQEDSGDSQPQLGISKAGDRMLRRLLVGSSHYMLGAFGPDTDLRRYGLRLCECGGKNAKKRAVVAVARKLAVLLHHLWVTGDVYEPLHHSGAETRTAQATAA

SEQ ID NO: 424981 - protein, 359 aa, unidentified
METYIGVDYHLSYSYMTVMDQTGRIRARGRVANDREAVEEFLNRSRNGGRRAAVMEATRNWTVMYDLLEELVGEVHLAHPLKVKAIAEARIKTDKIDSEVLAHLLRCDLLPEAHVPGEAARVARNVLRQRMFFVRVRTMVKNRIRGLLDRYPELARSRPCKHLFCKEGLVWLKGVSLKAEDQRLLAEELELYATLERRIERSNGMVQKLAEGDERVKLLQTIPGIAEFFGVLIAHEVDDVSRFSNEKKFFSYIGIVPSTHSSGGRTYHGRLTKQGNKYLRWAFVEAVWPAVRADPELAGYYSRIKVRSGPNPAKIATARRLATTVYRVLSQRRPYYRSRDRSRAALGQPGWTSPKKSHR

SEQ ID NO: 424982 - protein, 344 aa, unidentified
MKNMYYIGLDVHKRTISYCVKDGGGAIYAEGTIPATRFDLDRWMRTLPQPWTAAMEATVFTGWIYDHLQPHAAALKVAHPLMLRAIAAAKKKNDRIDASKICDCLRCDFLPECYMASTAIRERRRTLRYRNLLVRQMVQMKNKIGVLLMEAGVSYNKQRLHKAGYFRELLATNPDIDEGLCSLLRLCRETVVRLQRTESALVRSLERDSLLVERVERLMTIPAVGPITALTWALEVGDAKRFSSIKKAISYCGLCGAEKSSANTVQRTPLSKQRNKHLQTTLIEAAKMAPRNSSELAILYDKEKQKGNVNRATLAVARKLVAYLMAVDRGQRKFQVVETNCIAA

SEQ ID NO: 424983 - protein, 380 aa, unidentified
MNHHTEAFVAFDTSKLRNAVAVAEAGRAGEMRFVGEIDNTGVATAKLVKKLAARYERLTFCYEAGPTGYGLYRQIKSLGHECIVVAPSLIPQKPGDRVKTNRRDALSLAKQLRAGDLTAVWVPDERHEAMRDLSRARGAAVEDLRGKRQQVSSFLLRRGLHYPGKKTWTKAHMVWLASVKLAHVEQRVAFEEMLLAVRQAQERIERLEQAIRDAVADWSLAEVVTALMAMRGLDLISATTLLAEIGNLSRFQTPRELMAYLGLVPSEASTGDTVRRGPITKTGNHRARRILVECSWSYQHAPRVGKKKLEKVAAAPPAVREIAWKAQCRLSARYRALIRKGKPKNVAVTAIAREFAGFIWAVSREVAPAGLRPHSGNSMK

SEQ ID NO: 424984 - protein, 435 aa, unidentified
MEEVEDEPLFCDRVAGIDIGKATVMVTIRVPSEARAKGRQQETREFGTTRRELLALADWLRGWQVERAGMEATSDYWKPVLFTLEQEGFDCLLYQASQVKALPGRPKTDKLDSVWLARITEQGSLAGSFVPPEEIRRLRTHTRYRRKLVQMRTAQKERCEKLLEDAHLKLSSVISDIHGVSGRDMLRAIAAGERNPKVLAQMARGVMRSKIARLEQALDCSFFTGEHAFILTMMLDSIDSLTAQAGVLDARIADMCQPYQRQLEQLDEIPGFGTTTAQDLIAEIGTDMNVFPTAGHLASYARQAPRVKESAGKRKGKNATGRGNPYIGGALGEASISAGRTQTFIGEKYRRLTRRMPKRKAQVAIMRSQLVIAHALLSDPDARYQDLGPDYYERKADIRRRARNHARALERLGYKVTLEAIDPGTGELHLIATAG

SEQ ID NO: 424985 - protein, 341 aa, unidentified
MKEHVASFSRMYADLRVEYVSMLTIPNGPGGFVKLSKWIRKLMDPSMPCQFVLEATGVYHETLACFLTEKGWPVSVVLPNRAKYFSKTLTVKTVNDKVSSQTLAAMGLEKKLDVWLPPDPIYNQLRQLTRERDQLKAESTQIKCQLHAEESGAWPNKSSIKRMNQRLSLIERQVEEVETSIREVVAESPEIDQAVRRMTSIVGVGMLTAVTVLAETNGFNLVRNKKQLVSYAGLDVVERTSGISVRGRSRISHRGNRYLRKCLYFPAMTAARHSNDHKALYNRLISKHGIAMKAAVAVQRKLLVMMYAIWKNGTIYDPNYESKKQQNELGQTRRPALTELA

SEQ ID NO: 424986 - protein, 389 aa, unidentified
MNFIGADLHKKSITLCVMDENLKVLARRTVLSDQPDQLVEFCRQFRPFKVVVEATASYLWFVELLTPLAEEVVLANPNKLRVIAESIKKTDRLDAQVLAEFLARGQIPRAHMPAPRQRQHRALVRHRQYLRQRMTSVRCKIRHVLADYNADRKDLFSAQAGWGYIKGVALSDADAFVIKQLWTEWEEHQARLLKLAGKIKAFVAKAPQHEAEARQIVKSAPGVGEVTAEVVLSEIGDVGRFRNAKTICAYAGLVPGVRQTGGKKSPDLPITKQGSGLLRWALVEAAWRLVRTSPRWSAFFARLRKRKGSKRAIVAVARKLLCVLYAMLKTSSPYKVLGAEPKPPRPAGMTRLRLVRVSAAEPGAAAEAKAPGARKRPARASTAKRTVTT

SEQ ID NO: 424987 - protein, 342 aa, unidentified
MEIDLLGIDLAKRIFQLHGADVRGRAVYRNKVSRAALIDTVRALRPRTIAMEACGSAHHWARCFEQAGFEVRLISPHYVTPFVKTNKNDRNDAEAIVEAASRPSMNFVAVKSVEQQDMQAAHRVRELLVQQRTAIINQARGLLGERGFAIAQSPAAFRKAIPEILIQTEGELTSFCQSLIMRLVQHLRALEEEIAVADGWIRSFMSRSALCQKIAAVPGIGPVTATAIVAAVGRADGFRNGRHLAAWLGLVPRQHSSGGKSQLYGISKRGDRYLRTLLIHGARSVLIRVSGKRDARSRWLQELIARRGYNRACVALANKNARIIQVLLSTEATYKPLPQADS

SEQ ID NO: 424988 - protein, 367 aa, unidentified
MRKHNIARESTATSKRAKRKLTVGIDLGDRSSCYCMLDEQGEVLAEGSLATTKKGFAQVFGSKPRSRVALEVGTHSPWVSRCLADLGHEVIVANARRVRLISDSTRKDDRLDAKTLARLVRIDPELLSPIRHRSAQAQTDVMVIRARAALVEARTMLVNAARGLTKSYGERLGSCGTGQVREELAKSLSEPLQNALKPLLAEVESVSARIREYDEQIEAIGKSRYPETELLKQVHGVGALTALTYVLTVDDPYRFHRSRDAGAYFGLRPRRRESGDSRPQLRITKQGDAYMRKLLVQCAHHILGPFGPDSDLRRWGLELAARGGKNAKKRALVAVARKLAVLLHKLWATGEVYEPLHVRNRSKTVAA

SEQ ID NO: 424989 - protein, 342 aa, unidentified
MKREIYIGVDVSKNWLDLAYYDGIDIDWKSGHIRVDNNKSGYRKISIWLKKLQIAKGSALFCMEYTGLYCYNFRIWLESEGITYGMVNPRKMHRFEPDLGEGEPALDRIKTDEMDSFRIAIYCEKHSRKIKSSPSRLPGPAFFNLKRLLAERRQYVKHSVLYKQQLHDISAYDTEESCKRKQAGLKSLSVLRRQTDIEMRRIIKSDEAIYKNYQLLCSVIGVGLVIAVETIVLTENFTAITDPRKYACYVGIAPGRKESGISIRGGDHVSKKGFKQAKANLSLVALQAIRHDSNIRSYWHRRKADGKHTGVVLNAIKFKMILRMFAVIKRQKPYVEMDAYMK

SEQ ID NO: 424990 - protein, 312 aa, unidentified
MKIAGIDVHKKVLMVVIVDGSAPEEKPTRRRFATMPSQLHQLLIWLQGQGVEEAVMESTAQYWRSVWLELEPHMRLHLAQAFSNRAPRGRKHDFKDAERLVRRQIANELILSFVPNGEQRIWRSMTRMKLQLTRDRVRLQNQMECLLEEMRIKLSIVVSNLLGASGLRILQALAQGETDPKKLAELGDERLQCTEEQLVDALTGRVQPMHREMLSLQLQRLQLIDQQMAQLNGMIAQAMKAHQDAVIRLAEVPGLGVDSAQQIIAEVGAQASTFPSAAELTSWVGTCPGKEESAEQNRRVARRRAINICGEY

SEQ ID NO: 424991 - protein, 321 aa, unidentified
MSQRNSSEVFMGLDVAEAFVDVCVLNAAGESLRRERVERAAGPLRQLAARVPAPARAVLEATGGLEALPAAMLEEAGIETSVENPAKIRHFALSHGWLEKSDRLDARVLAEFARERKPRPRRRPDPRVQALSKVVTRRSQLVRLRAMERSRLRRETDPYCRQSLDTMIRTLSKQIERFEQQMRRRVEACPLLSAAARLLRSAPGVGELTAFALLAWLPELGHFNRRQIAKLVGVAPLVKQSGQWRGHVMTLGGRGRVRSALYLAALSAVRCHGYYRDFYLRLLARGKPKKLALIAVARKLLLTLNHMLASSSLWEDSFLKA

SEQ ID NO: 424992 - protein, 351 aa, unidentified
MDKDVTVVAVDLAKDVFQIAGGDGAGRVLCRQRLGSRLAFTREMGLWRDVVVVMESCATAHYWGRECQRLGLAVRLLPAQHVKAYRRRNKTDAADAEALLEAYRCAQLKPVPVKSETQQLVMTLHGLREGWKASRVARLNALRGHLREYGQTIPLGADKAIAQAPACIERVPVALHGLLHQLLDEIRQLSQRMASAEQQIKAMNQQSTAATHLQQISGIGPLTASAVDACHFKNGRQLAAWLGLTPREYSSGQTRNLGRISKRGDVYVRMLLIHGARSALSAALALRHKSPDKLNRLQRWATVLNDRVGIHKATVAMANKLARICWAMWTHGDDYNAEHDGHCMLQAVVQH

SEQ ID NO: 424993 - protein, 400 aa, unidentified
MSERRDHAWAGIDAGKGHHWAAAVDETGATLWSKKVDNDESAILTAMGEILDLADEVHWAVDISGTSSALLLALLAAHGQQAVYVPGRTVNRMSGAYRGEAKTDARDAYVIAETARNRRDFAAIDVPAQLAADLALLTAHRSDLVADRVRMINRLRDTLTGVFPALERAFDYSSQKGALVLLTGYQTPAAIRGRGRARLTAWLANRSVRGADAVAATALEAAQAQQTALPGENVAAQIVADLAGHILALDDRLKRIDQQIRETFRSHPQAEIIESLPGMGPILGAEFVVAAGDLTAYADAGHLASAAGLVPVPRDSGRRTGNMHRPKRYSRRLRRVFYMSAQTSMMREGPNRDFYLKKRGEGCKHVQAVIALARRRASVLWALLRDNRVFTPELPVAQAA

SEQ ID NO: 424994 - protein, 318 aa, unidentified
MKMADDTTNTAGIDTAKPKLDIAIHGGDAFVVSNNAAGWKLAAVRLKAAGVTRIGIEATGGYERGVVRYLQKEGFTVIVMQPLQVKAFARLHLKRAKTDRIDAVLIAACTHVLKAANKLPLDARFDALADHLTSIEQWEEDIVRLKTRLEHAHDPRLRRIDEADIKRLEKRVDAELLRLQAALCQHEDLAHRFALVESVPSIGARTALSIVIRMPELGQVSREQIAALAGLAPFVRQSGQHRGQAHIGGGRGRVRRAVYAASLAGAFRWNPRLKDMYQRLTARGKSHKQALVACARKLLVFANAVVARGTPWEVRATG

SEQ ID NO: 424995 - protein, 310 aa, unidentified
MTIHPDVVGIDVSKHHLDVFDAALGRGERLANTTEAIASLAGRWAGSGRLVVLEATGHYDQLLRQGLEAAGVAYARVNPTRARDFARAAGFLAKTDAVDARMLAALGGALRPQAAAPGDQVRERLARLHKRRDQLVAMRQQERTRRAEAQDRDLTDDLDDHLAWLDDAIARVDKDIAAFVAEQPALDQASRLVRSIPGVGAVTATTLLALVPELGARSPKALAALAGLAPFNHDSGKLRGTRAIRGGRKRVRDALYMAAVAASRSNSRFKDNYRRLRDAGKPPKLAFIAIARKLLITANAVLRDQQPFRA

SEQ ID NO: 424996 - protein, 408 aa, unidentified
MNPLFVGIDVSSKNNVAYLMKPDGSKHSSFSVQNNLGGAKLLSERIVSALGSMQLERVVIGLEATSIYGDSLVYALREDGRLGRFQRKIHVLNPKQVRKFKEAYSDLPKNDWVDAFVIADHLRFGRINREVYMDDYRYKALQTLTRARFDVIQNLTREKQRFANYLFLKCSGMAQDKDIQNTSATTIALMEHFETVDDLANADLEELTAFITETGRGKFADPDATAKAVRAAAKGSYRLPKTVNETVNQAMAVSIASMRALKGQVKVLDKAIEQQFEIIPNTLTSIPGIGKVYSAGIIAEIGDIHRFDSQASVAKYAGLVWNRSQSGDFEAEHSRMIKSGNRYLRYYLLEAANSVRRCDSEFRRYYDLKFKEVNKYQHKRALALTARKLVRLVFRLLKDNRLYIPPEG

SEQ ID NO: 424997 - protein, 415 aa, unidentified
MKKNNYRTKKVNDINWPQLREQFAGQSLVFAVDVAKEQQFALLSNPELSESVLLQWNQLEQTAELINELKQLNTPITVVMESTSTYGDAMRHQFRQAGFTIHQASAKRVHDAKEVYDGVPSLHDAKAAWLIARLYKEGFTKPWHELDDKERELNAYRQEYELHQSQHERNQNRLEAFLSRHWPEVLPLLALDSVTLESLLIDYGSPEQIAANAGQAANDMRRWGKSCLSLEKIEAVIHSAATTLGQPCIEAERHYLQALAEELRHSRKQAKNAKQALEAVVKTEPGLKEMGLTIGRVTTAILIGLHLDPRHFGCARSYLKALGLNLKEKSSGQDHGKLTLTKRGSALARKYLYFAALRLIKSDPVLSAWYRSKVDPRAKSKTVIAFMRKLAKALWHIARGQRFDARKLVTAAVVN

SEQ ID NO: 424998 - protein, 411 aa, unidentified
MDVFCGIDWAEDHHDIALVNGDGGLLARLRISDDAAGLAALLDLLAGHGDSAEEPIPVAIETPRGLLTACLRATGRPVCPVNPMAVARYRDRHSVSRGKSGKGDALVLANILRTDMHAHRPLPADSELAQAIAVLARAQQDAVWDRTAAHNKLRSCLREYYPGFLAAFAAAKGGITRPEARVILAAAPTPADAARLTLSQLRALLKKAGRSRGIDAEAQRLRDAFRTQQMRQLPRVEQAMGRQALALLRQLDAACTSADDLEHAAIESFNQHPDAGIITSFPGIGALTGARVLAETGDDRSRFTDAKGLKAYAGAAPVTRASGKTKSVTRRHIKNNRLAAAGYIWAFCALTASPGARAHYDRRKDAGDRHAAAQRNLFGRLLGCLHHCLATGQHYDEATAFPAKAAPPAAA

SEQ ID NO: 424999 - protein, 400 aa, unidentified
MRVVFGIDVSKASSEVAILVNGEKVHGYTIPNDAIGFNRLLGDLKTVHQPEIVFEATGVYSRRLQAFFEDNSYTYTRLNPLESKKQLDSLRVRKTDKIDAEKLAMSQFILNRKPSYVQEVLYQELRDLSHFYQNLTGDIFCAKNRLHKVLQITFPELENILSAPTGEQYWNLVITFPCNSFVLESDDATLTAIIRQSTAKRISEKRVTYLVDKLTKLANQSYCAVKKTSPVIEEVKYYAGELLRLSEHRQGVVEEMVTLAQSLPEYEILLSIPGIAETTATSIIGELGDIRRFHSANQINAFIGIDLRHYESGNFLAKEHITKRGNPYARKILFKCIHNIASAGYTNPCHIADFYEKRKRQSQVTSTKPHTIASIHRLIRTMYYLITHNKLYDYTSIQNR

SEQ ID NO: 425000 - protein, 333 aa, unidentified
MATRAFSLFSLCHYFIISISMLYIGIDMSKDTFHAAFDDERVEIFKNTVSGSVAFIEILAQRNYHTNDTVIGTESTGVYHLLLSEHMRKNGWNIKVINPFLTHRMIASTLRKVKTDRLDALAIRKTLMTGVGYTYTDTPDVLALKTLVQECEALSRMRSETKQRVHAHAIREKASAGELHDSFSGVIKLLSYEIREIEEKMGQYLPETQKLLRSIPGIGATSAAALVAHVGNINRFQSPEKLVAYIGLDCRVYQSGTSIHGKGYISKRGNRYLRFVLFNAAFIARQKNPSLKTYFEKKMKEGKHYYSALCAVERKLVHLIWAVWTRGTPFEER

SEQ ID NO: 425001 - protein, 491 aa, unidentified
MVNRSKDLPMLPEEPIYIGVDIGKFKHVAGFLSKTLLERHKHFEHCPAFIFDQSREGFRAFLERIQAYGPLEHCFILMEQTGHYHRPLQHYLLEFDLSVYVIHVQSRELGMLKTDKRDALGLANQLYNQLALGVQVTNKLQVVRRAIPPSEAAAQLKGLMRHRYELVNEATQRKNKLTAICDELFPEFTRIFKNPNLTTALDLRERFPTPQAVATASLIALREVRKRNCPSEAHLVSLQQLAAQSIGVKDVARQRGLVSEQALLIKELRLLQDHLEQLEGEICQIVEQCREGKILLSIPPISLLAAATILATIGHIGNFESAGHLKSYFGWAPQRAQTGVTFDRTRLTSGGSREMKKVMYLVAWNAISRETEWAKLYKRLVPRLCSYDERTQTYKGKGKALGHVIGRLITLIYALLRQDYETLSHLTPGKEPPEPVLYDPELHKHHRAGHYRPIRQEHGSNRMVQVEPQGNVIETNVQPLGAGGSSSILGA

SEQ ID NO: 425002 - protein, 403 aa, unidentified
MLYLGIDLHLKQMTVSLRNEDGDVVLRRQVSTRWPKLAEFREQLRQVAAADEKYVAIVEVCGFHDWLVKWLQQDERCHLVLVVQALGRLATKTDRRDANALSELLWINRERLLRGDRVHGVRTVHQPGEEQLADRRLTAMRERLVRRRTQTLNQIHKILRRHNLEWERPTKTFQTGKVAQWLKTLPLEPMDRLVLNQLLVQWKLWEEQIAKVDTRIGERFLADPDAQLLATIPGVNAFIAVAIACRIAPIARFPHGRSLANFLGLTPGCRSSGETERMGSITKMGSRIVRFLLGQVIVHLQRRDGTVRAWYQRIKRRRGANIARVALMRRTATIMWRMLTTREAWRAGSAAADSAAEEPRQVRPRRARRTVLSALSVSEAASGAASTGSSSLLTGEEVPPCQA

SEQ ID NO: 425003 - protein, 342 aa, unidentified
MMDTMIGVDLAKNVFQLHGASLTGEIKFRKKLTRVQFQKFIAKQPACIIVFEACGGAHYWAHEAQRLGHHAKLIAPQYVKPFVKRQKNDAADAEAIVIAAQRPEMRFVEAKSSEQIARGVVFRARDRLVRQRTEQINALRSVLYEQGRVFSKGTHQIKKIAEYLQQVDNGLLSLVREECDELLASISDLTTRIQAKTLKLKKLSQHSQISRRLQTIPGVGPLTAMAVEAFAPSMDIFRRGRDFGAWLGLVPKQHSSGGKERLGKISKAGQVDIRRLLIIGAMTRIAWAGRKPCEDGSWLDRMLKRKPKMLVAIALANKMARTIWAVLTKEEDYRDPAKIVAA

SEQ ID NO: 425004 - protein, 407 aa, unidentified
MVLFIGDDWAEDHHDVEVQDALGKVLRRARLPEGIAGISGFGELVGRFAGDDSEPSDVLVCIETDRGPWVGALVAAGYRVFGVDPKQAARHREILASSGAKSDKGDAHALADMARTRAGQLREVAADSEVAEALKVVTRAHQTLIWERTRHMLRLRVALRDYFPAALQAYQPLELTSRAVLALLAKAPTPQAAAKLTARQITGLLKGCRDKDAKAAAIQQVLRLEHLGRPDAVTAAYAASVRALVAILTTLNTEITSLEKEVKDHFGRHPDAEVVRSQPGLGEILGARVLAEFGDAAGRYTSAKARKNYAGTSPITRQSGKMRVVAARCVHNDRLVDALHGQASCALLHDEQVRAYYDQLRARDVGHNAALRQVANRLVGILHGCLKHHTTYDQTTAWSHRSSAVAA

SEQ ID NO: 425005 - protein, 342 aa, unidentified
MAEVTIIGIDLAKRVFQLHGAATDGSVVFRKRLSRERLVPFLADLPPCVVAMEACATAHDWGREIEALGHVVRLIPPVYVKPFVKRQKNDAADAEAIAEAAARPTMRFVAVKTREQQARAMLFRTRDLLVRQRTQLINALRGHLAEHGVVAPQGPAHLKRLADVIACDRSPLPPTVRDLGRLFLEQIEALSDRIADLDAKMRVVSAEAETTRRLRTMPGVGPITALAVETFAPPMSVFRRGRDFAAWLGLVPRQHSTGGKQRLGRTSKMGQRDIRRLLIIGAMSVLRSYTRKSPPEGSWLARMLATKPRMLVVIALANKMARGIWAMATKQENYRGPAATSV

SEQ ID NO: 425006 - protein, 339 aa, unidentified
MKIIGCDFHPSYQQIAWVDNETGELQELRLEHEKGEARRFYQALRGQRVRVGMEAVGNAQWFERMLAEMGHELWIGDAAQIRRLVVRQQKTDRRDAQHILALLLDGRFPRLWVPSPEMRDVRQLLRHRQKLVELRRQVKNQLQHLALNQGVQRKRRLWSRAGRAVLEQLPLEGWTARRRDELLAMLDQFEGQVRAWRRPEVRLLMTHPGVGPVVGLAYVLTIGPPERFPRGKQVASYLGLIPREHSSGGRQKLGSLSKQGNTFLRTLLVEAAQTAARGDEELRRDYRRLAARQHKALAKVMVARKLAVRLYWMLREQKPYSPPPVAQMQGRPSHSVVAG

SEQ ID NO: 425007 - protein, 387 aa, unidentified
MIYYVGIDISKYKHDFCIISNTGEIIVENSSFENNKKGFQSFLDQLKPYNKQDVQIAFEATGHYTMNLELFLTNQDYSFMKVNPLVVHQFLKARSLRRTKTDKANSFTMANYLMSIQYKPNSFLLYNIYTLKSLCRSREQLIKERSKFELLLTNELDKSFPEIKPFFNNTISTTLLFILDKYKNVEHISLMKDYDSIRSVSHGKFSYAKFTKLKELAKNSIGFHNENTDLLISTYISIINNFNNNIDPINKQISTIIKELNPRMLTIPGMGEISAAIILSEYGDISNFSSPNKMLAFAGLEPSIIQSGTLEYNGKMVKHGSGHLRYAIMNIAMSILRYLPTFYDFYSKKRSEGKCHRVALSHVCKKLIRVIYTLEKNNIDFDPSLLK

SEQ ID NO: 425008 - protein, 369 aa, unidentified
MTSITYVGMDVHTTNYTLCCYTVEEDQPFALVQVKPECGEILKYLDRVRTQRGIDTQFVCGYEAGCLGYSLFHELTRHNVECVIMAPTTMPVTPGKRVKTDRKDAENISRCLAYHLYKPVHIPTDEDDSIKEYIRMRDDVCAHLKQTKQQIISFCTRHGYQFDGKSYWTQKHLNWLEKLTFENDIYRETLWEYLALYYQLDEKVAVFDARIAEFSHRERYEENVQKLGCFTGIATRTAMSLLVEIGDFNRFKTAQQFSAYLGLVPGESSSGEKQIRTSITKAGNAHVRWLLTESAQHYGRGAIGKKSKRLQERQAGVAPEVVAYADRANERLKRKFYKIMFHSKRNIATTAVARELSCFIWGMMTGNIA

SEQ ID NO: 425009 - protein, 335 aa, unidentified
MDFKVFIGIDVSKETLDFIPTSEGKRLFHEHVSNDNKGIVRLYKRLAKTVDSSPEQWLFCMEHTGVYCNPMLEFAVEKDLAIWLESAAKIKAHHALERGKNDTLDALRIAEYAFAKKDKIKLWEAPRKVIIRLKSLIKLRERLITSKKRLLDPLREEKQFCNKEWVKEHEKLLKPVIAKIEKQTKEVEQEIQQLINEDDDLKRLYGLITSVRGVGQIVAINTLVVTNEFKQITNPKEMACNCGVVPFKYDSGKTIRSRAKVSHRANKTMKVLFHLAAMSAISTKGELRDYYLRKVEEGKNKMAVINAVRNKIIHRIFACVRDQRKYEENYIHSLA

SEQ ID NO: 425010 - protein, 477 aa, unidentified
MNKTQRGDLQQPKAKSKRRRRNKGMCLEDRPVLEPNAAGIDVGAREMFVAVPPGRDEKPVRVFATFTEDLERLTDWLEQCGVTTVAMESTGVYWIPLFEILEQRGIRPCLVNARHMKNVPGRRTDWHECQWLQFLHSVGLLRAAFRPGQDVCAVRTLLRHRNELVAAASQHVQHMHKALTQMNLQIHHVISDITGSTGRAIVDAILAGQRDGAELAKLRDPHIKADTETIRKSLEGNWRPEHLFTLGQSRDLYRIYQQQIVNCDLEIEKMLRDFEPRTDPVEKPLPPDRKQNRAGSKRRKKNGHPHPEFDLRTETYKLFGVDVTQIPGIEENALPLFSEVGRDMSRWPTAGDFISWLALCPDNDISGGKVLWRGARRVRNRAGHLFRLAAFSLHHSPTPLGHYLRRMKAKLGPKGATMATAHKIAVIFYTMVKNQVEYDETLWDTRDAQREKRFEAKLKRQAKQLGYELVPIEPKAA

SEQ ID NO: 425011 - protein, 415 aa, unidentified
MVERCAGLDVHRDNVVATTRVPGQGRRRFEQHTQTFKTTLPGLSELAGWLAEAGVTLVGMEATGIYWRTVFQALEDQFECWLLNAHHLRNVPGRKTDVKDSEWICQLVQHGLVRPSFVPPPEIRRLRDLTRLRTAQSNERTRTIQRLEKVLQDAGIKLSSVASTSYSKSARAMLEALLSGVSDPEQLAELSKGKMRSKIPQLREALQSRFTIEHHGVMVAQLLAHIDTLDTELQHLTERIELETAPHAHTIELLSTIPGVQAKAAQVLIAECGLDMSVFPTVGHFASWAGACPGHHQSAGRRRSGRTRPGPGWLTSQLTECARAAVRTKETYLASHFAQLRGRRGEQKAIGAIRHDLLVAYFHIVRDQVPYRDLGPTWQRKRYSVEHRARRLQRQLEALGYAVTLDKVDPEEQAA

SEQ ID NO: 425012 - protein, 404 aa, unidentified
MKGPIVSIDVSKGKSDYQAFKNLNVKYTGSRSIKHTKEGFDEIVNLVREMEKKLETEVCVVYEATGVYHRVLKKVLEDNNIKQFIINPLLSAKTRKNDSLRCPKTDKLDPKSIAKTYYSHSLHNSHKQETIYHELRELSRYYEDILVHIRKDKVAFRAQLDIVFPGYDTLFDDLYGPVALAVIEKYPHPEMLQKKKINTVSKVIQSKTCHRQAVSDTMADKAIEYSKTIYSGCDKDDIEVLILQRFIKKLNEDMAEAERTIGEMIKLAQELPDFSIIKSIPGIGDNLAARIIAELGDMTRFKKKNELVAFAGLDPRISESGKNDGNHMHITKKGNKRLRCLLYLAVTCSIRLKRDDNSIKDFYIKKKQQSNPMCSKAAKTACASKLVRIIYSMCKTGELYQYNK

SEQ ID NO: 425013 - protein, 408 aa, unidentified
MQVLHERCCGLDVHMKTVVACLLMRGPGGQPNKETRTFSTMTADLLAMADWLEHAGCTHVAMESTGSYWKPVYNLLEDRFQLLLVNAQHLKAVPGRKTDVKDAEWIAQLLRHGLVRGSFVPSRPKRELRELIRYRTSLIRERSAETNRIQKTLEGANIKLAAVAADVVGVSGRAMLEAMITGVDDPRVLASLAHGRMQKKSTALEAALEGRMSGHQRFLLAEQLRHIDDLDATIARLSAEIEERERPFAETAARLKTIPGIGSRTAELILAEIGLDMSVFPSAGHLASWAGLCPGQNESAGKRRSGRTRKGNPWLRGALVEAAQSAGRTKTYLAEQYHRIAARRGKRRAAIAVAHSIIVIVYHVLDSGRPYEDLGYHYFDQRDRQRTSSRLVQRLSALGYTVTLEPAA

SEQ ID NO: 425014 - protein, 408 aa, unidentified
MNPLYVGIDVSSKSNVVYLMLPDGSKHSNFSVANSHDGSIQLTKHILSAVTSLSLDTVIIGLEATSVYGDNLVYFLREDASLVPYDRKIHVLNPKQVKKFKDAYNDLPKNDYVDSYVIADCLRFGRINKEVYQGDYRYKALQNLTRARFFAVQNLVKEKQRFINVLFKKYSTMTQEKVFCDTFSTTALAVYEKFNSAEALASMDLQELTDFIMEKWKNRFPDPAAAAKAIQKAARSSYRLPKTVNDSVNQVLSISITSIKALDAQIKEFDKAIKAQMELLPNVLTSIPGIGPVYSAGILAEIGDINRFPSQAQLGKYAGLVWTQNQSGDFESENTRLIRSGNRFLKYYLCEGALSLVRCDTEYSSFYHSKYKEVNRHQHKRALALTARKFVRLVFRLLKDNRLYRAAE

SEQ ID NO: 425015 - protein, 328 aa, unidentified
MQGKVSSERTAMATVYVGIDVCKEWLDIHLHPLGRSFRVTNDTAGLRRLKRELDALDQMPRSALHIVMEATGKWHRAVQRSLHADGFYVSVVDPLRARLFAKACGFLAKTDRLDARLLAIMGEALKPAQTPPQAQALEALQELVNARSAANGERTALSNRMKTAVTAFLRKELTRRLAALDTHIARLDAEIERSIGAEPEMRRRLDILISIPGIGAVTAASLIAGLCELGACSGKQAAMLAGLAPLACESGERAGHRAIRGGRPAPRNAIYMAALSASRHNPDLAHFAERLKKAGKPNKVVLVAVMRKLIVLANTLINKIRIWTPNPP

SEQ ID NO: 425016 - protein, 350 aa, unidentified
MTRYIAFDVHAESTTCVVLSSAGKRLREEVVETSAGALISFLKTISGRKQLVLEEGTQSAWLHEMLSPFVDELVVAIPEKSTGTKNDSRDSWRLAEQLRVGAIQRTVFKRPQELAVLRAAVKTHRVLTSDLVRVKNRLRAVFRSRGISVSQDIYQPSVRSERLSLLPPHLRYQAEMLGKQLDLLEPLRDEAEAHLREEAKGISGVETVATVPGFGLIRAATLVAVTITPNRFRTTRQFWSYAGLALVTRSSSDWVRSERGWQRAEVNQTRGLNMNRHPWLKSVFKGAATTVAAMPKHPLHADYQRLLQQGTKPNRAKLTIARRLASAALAVWRKQEAYDPNKHKSLIVAA

SEQ ID NO: 425017 - protein, 338 aa, unidentified
MAIVMGLDQHRAQITADWLDTDSGEVSRARVAPADRAGVRRFLERFSGRELEVALEATTGWRFVVEELQRVGATVHLAEPAETAARRGNKKRAKNDRADARHLRELVMVGRLPESWIAPDHILDLRARVRLRHSLVAQRGEWQQRIQAVLYHHGFPQRRNLMTDGGREWLAAQALPATAREQVVVAIAMIDALERQLAPIDQQLRSYARRQRGCRALMGQFGVGEMTAVTILAELGDARRFSSSRDAVRYAGLDITVHQSDRRRAPGHLSRQGPPALRWALFEAALCASRSGSPDRDYYRQTAERAGATSAGLAVARKLLKRSYHTLRELGEEALTPA

SEQ ID NO: 425018 - protein, 333 aa, unidentified
MVEGTKGSHHKEGSRKMSKHSMICAGIDTAKHKLDVAIDGSREQLQVPNNADGHRALSAWLRQRRTKRVGIEASGGYERAAVAALRRDRFVVILFQPAEVRSYAKFRRQRAKNDRIDAALIAACAAAAEQIHPAPDPRLASFAVQMTLIDQITDDIAHIKTYRETCPDQRIRNWWTSEIARRKTALRAELKALVAAIRHHPDLAKRLELIVSVQGIGLKTAVAILVRMPEIGRITREQASALVGFAPYDDDSSDRIGVRHIEGGRMRLRTALYNAALSAAFHWNPQLIAIYRRLIAAGKPHKVALVACARKLLIFVNTIVERGTPWVPSTATS

SEQ ID NO: 425019 - protein, 344 aa, unidentified
MTQYAVLDVSQEMTAVCLVDEAGQVIGEAKLPTCPDAIATWLGKRAPNLVRVGLETGPMAVWLWNELHAQGVPIVCLDARHAHGALKVRPNKTDRNDASGLAQIVRTGWFKQAQIKTRSNYEVRALLTARDVLVRIRVKMENEIRGLLRTFGVLFGKATGGFSRRADDIVAGELDVSPTMKRLVEAIVQARAAVLDQIKGLDRQLIATAKVNPIARLFMTAPGVGVITALSVASAFDNAERFKRSSSAGAYLGLTPRRYESGEVSRNGRISKHGSTLTRKHLYEAATTLLTRTVRFSTLKAWGLRLAKVSGFKKARVAVARKLAVVLHAMWKSNTEFRWSEAAT

SEQ ID NO: 425020 - protein, 358 aa, unidentified
MLTQSNKIDFKGHHIYAGFDVHLKSWKVTIMTEKLYHKTFVQPPKPEALHHYLTRNFPGGIYHTAYEAGFCGYWIHNKLKDLGIDSMVVNPADIPTTGKEKVQKDDSRDSIKIARSLRNGDLKPIHVPTISTLEDRGLVRTRATLVKDLTRYKNRIKSFLYFHGIEFPEEFQSSQTHWSNRFNQWLERVELTDTSGTSSLNALLVQSKHMRDAVLGTTQLIRKLAKTERYKTWQDLLRTIPGIGLLTAMIILTEIETMDRFATFDQLCGFVGLVPSTNSSGEKDHIGELTPRGHSVLRSAIIESAWTAARLDPAMNKSYHEYCKRMETNKAIIRIARKLLSRVRFVLKNAQPYQHSVT

SEQ ID NO: 425021 - protein, 330 aa, unidentified
MKITSIGIDLAKTVLQVHGVDAHGKVGLRKQLKRKGVLSFFANLEPCLIGMEACGSAHYWARKFSEFGHTVRLMAPQFVKAYVKTNKSDRNDAEAICEAVGRPNMRFVPVKTAPMQRVLAVHRARQGFVRARTAQAHQIRGLLAEFGIVIPKGIWHIPKRLPEILEDGENGLPGMMRELLRRLGENLKDMDRQVGELEGQIMLWHRDNEPSRKLEAIAGIGPLTASAMVAMLGDAKSFKNARQVPAWLGLVPRHQGTGGKVKLGGISKRGDVYLRTLLIHGARSVIAHIKYHPNHADEWLKKLLTRRSKNVAAVALAAKNAASARAQLSA

SEQ ID NO: 425022 - protein, 339 aa, unidentified
MRIVGGLDVHRAQITYDYVDLRTGEEVRGQIRPATRGEVRAFLATFGRKTAAFALEGTTGWRFIVEELRRAGMEAHLAEPAETRARRGPKRRAKTDRADSRLLRDLLLAGNLPESWIPPDHLADLRTTVRLRRALIAEKGMWLRRMHAQLFHHGLPVPPDLQSKAGREYLEKATLPPAARQVLDIGCLLLDRLEEQLDTIDAKLIPLARRLYGCEVLCRQWGIGPVLAATILAELGDTRRFSSSRQSVRFAGIDVTVEESDGKRTRGHLSRQGSPTLRWALYEAAGGAWRVASPDHNYYLEAKQRLGTKRARLSVARRILRRVHHELAEAGDAAFVDAA

SEQ ID NO: 425023 - protein, 400 aa, unidentified
MAVMIGIDPHKGSHTAVAVIAAEELLGKVRVRACPAQAGQLVAWAAAWPDRTWAVEGASGLGHLLAQQLVAAGERVLDVQPKLAARVRLLHTENTGKSDPTMPCPSRWRHLRSKAQRPMLADDQAMVLKVWAKRHRDLSRARNQVACRLHAVLCDLVPGGIADEITAGRAARILGQITPAGPAAQARCELAAELLADIRHLDAQRREVKKKLATAVKASGTSLTEVFGVGPVIAATVIGDVVTVARFPTRDRFAAYNGTAPVEVSSGEKKIYRLSLRGNRRLNHAIHMAAITQISHAHSQGRAYYQRKLAEGKTCKEALRCLKRRISDAIYARLRADARTKGPGGQLGSHSVSRAAGLTPRAPALRASHSRAQGQPTIPGRTHAAHAAARASARKARRAT

SEQ ID NO: 425024 - protein, 355 aa, unidentified
MSQEKYIGMDVHQATISVAVMDARGKLIMECLLETKAATILECIQGLRGTLALTFEEGTSAAWLHDLLKPHVSRLVVCDPRKNALLKDGNKSDRVDARKLAELLRTNQVKPVYHGKHGTRALKELGRSYLTITKDVTRVMNRIKAVYRSWAIPCAGTSVYAPRHRAEWLAKLLEPGVRIRAEHLYQQLDSLEPVRLEARRQLLLESRKHAAVKLLRQIPSIGPIRAALLVALLQTPHRFRTKRQLWAYSGFAVEIHDSGEYRSVRGKLQRNRERIMVSGLNDNHNKDVKSLFKSAAISASTRPGPLHDFYVTRVESGMRPTMARLTLARKIAAITLTMWKKGVSFDPKQLQRQAA

SEQ ID NO: 425025 - protein, 343 aa, unidentified
MQTITTIGLDIAKSVFQVHGVDAGGQVVIRRQLKRRSVLAFFQKLPPCLVGIEACASSHHWSRELQALGHTVRLMPPAYVKPYVKRQKNDMADAEAICEAVTRANMRFVPTKTPEQQSCLMLHRTRHLFIRQQTAVINSIRAHLAEFGIVAPVGRKGVTELLHVVADPSDKRVSEVARACLAALGSQLLSLKKQILEFDRMILAWHRSNQTSKRLHYIPGVGPMLATALVASIADPSTFRSARNFSAWIGLVPKQHSSGGKDRLGSISKQGDRYLRSLFVAGALAVIRYAKIHGIGHRPWLTALLARKPTKVAAIALANKIARMAWAMMAKGERYKEPIALAR

SEQ ID NO: 425026 - protein, 370 aa, unidentified
MIIIGVDYHPEFQQIAFLDKDTGEFQEKRLSHPEEAEQFYRVLAATSQKVRVGMEASGHARWFERLLAELQFELWIGDAADIQSKRGRKQKTDRQDAEHILKLLLKDDFPRIWVPNGENRDLRQLLWHRHRLVQARTRIMNQLQAVAIHEGLRCKKRLWRAGGRQQLESFLLAPWASRRRHDLLELLDRLSPTIAELNQAIEQETEKNPEARRLRTHPGVRARTALAFVLIVGNAKRFPCGKQVASYLGLVPLEKSSGNRRRLGSHLRRVSEVKTLADKAGSQKEDSGDSVKPEQRQVGDTVYYFVGEQGPYCQLCFHNKRQLILLSPTREFFGGLGRRCGVCGETFFEKVRKQEHVQVRGSGGPNSWME

SEQ ID NO: 425027 - protein, 511 aa, unidentified
MIITEKYCKIAADSPPVSTNPLSRNEVDVPKIVSWNTSPDDGVEVMPTKEYGIGIDCHSRFLEIIVLVKRGSDFFEFCHEVDTGWDSIKEAYTWAIHVLGTCADPPVHLSSPLHYCIESTSTYHLPVLLAWEGSPCVVNPSLAGATKRKTDKLDARLLAIHDLTGIWRPFYVISPDVQDLRVLIGQRDYYSRSATRIGNRINSTILKFGYTIGREGSVVKNDAVRSTVENLISDNPLSVSSGLPSDRIPLSSRNVLREDYRQFDDFSQRISEYTRLIRDKVYEMDWPIRDGKTISGRELVPILMTAPGVGERTAITWLANIVDPTRFPNQKAVAAYCSLDPSLKISAQKVTSTKKRKGNKALHSALCMSASIIIGNHDEFFGRWGYRIYQQTGKWKKATNAVARRLSTALYFMNLNAQPFSYDNYQLTREISVLDMPLDDLEKLNHGFHRYIPILKSIGIFRTKPLVHSYYACELRGCKGLGPRFYTLVKEFIDTQDHYRELYNDLLLAHQ

SEQ ID NO: 425028 - protein, 343 aa, unidentified
MTEAIQQSIGIDVAQKELVCSFAKKNETGEIKIIAHKTFVNSEKGFKELVKWVKKLKEENSTIQFVMEVTGVYHEKAALFLHTNGYDVALVLPNKAMHFQKTLDIKTITDKTSANSLAQMGIEKQLKNWEPPLPVYNLLKQLSRERNQLIEERTGIKNQIHAENAGAWANKGSISRMNKRVVLINNQIKEIEKEMQQVVNTTPELKRKLKFVCSIPGVAFITAIAVIAETKGFHLIKNKRQLVSYAGMDVIVKDSGTSVKSKPRISKRGNKYLRKAVHLPALTAIRHDPKMKNLFVRLVGKHGIKMKAAVAVQRKVLEMIYTLWNKEEMYDNEFEQKQNDQKK

SEQ ID NO: 425029 - protein, 319 aa, unidentified
MTDGPMVGIDVALATLAVGVVPDGRTWEVPYTPEGLDTLVAELRGLAPALVVLEGTGGLQAPAVAAFGMAGLPVVVVNPRQVRDFAKATGQLAKSDAIDALVIARFAAAVRPVVRPLADADTAPFAEIVTRRRQLVEMRRAEEQRLSRLEARRATRRVRTDVADHIAWLTRRLDRLDDELHEAIKASPVWRAQDQLYQSVRGVGPVVAHTLLAELPELGHVSSKVLAALVGVAPFIRESGAWRGRRHIRGGRREVRRVLYLAAMSGVRTNPILTTYYARLCTAGKPKKVALVACAHKLLTILNAMARDQRPWSPTLATV

SEQ ID NO: 425030 - protein, 343 aa, unidentified
MKYKTITIDLAKNIFQVCGVNEHIKPQFNHKLKRNELLDFMRQQSPTVVVMEACYSSHYWGREIAKLGHDTKLIPAQHVTPFVRGNKNDHNDAFAIAEASQRAHIRFVPVKSEHQQEISCLHRIRERLNKNKTALSNQSRGLLSEFGVVFPCGHKALLNGLTSVIDNSQYSHRLQDMVIDMLNEYTTTFKRLKDIEKQLGEFVDASESGKILRSIPGIGVINASALLAAIDKGQAFNNPKEFAVWLGLTPKQHASGNISKMGGITKRGDRYLRKQLIHGARAFVSRAAKSTDPLALWAMKLRATKPFNKVAVAMAHRLARLIWILLTRQECYRAIPTSLEVGA

SEQ ID NO: 425031 - protein, 313 aa, unidentified
MFTLGFDVAKGHHDVALTNKSGELKGRWQIANTTESVTDLLRAVQAKHPKLQVGCEATGSYQLPVLRSCLALGIPCRLLNPLATKQFTKSTIRGRKTDRDDALSIARLVLRGEGNLVTVASCSPARNYVRLATKVQQHIHALKLEQKYLSELTGLPAEAGFSVAITALEQLTTDLRQQATKQVDPTTYQLLTSLVGIGPAIAVSLSAEIGDINRFPGAKQLVAYAGLDPRVRQSGTVLHRNTRLTKRGSAELRHSLFLAANIARQHDPELKSYYSKKRAEGRTYTEATVATARKVANRVFAVLSRGTPYIKST

SEQ ID NO: 425032 - protein, 343 aa, unidentified
MEHTTIAVDLAKSVFQIAISHRAGHVDAERRLTRERFLAFFAQQPPATVVFEACGSAHYWARQLQPLGHTLRLLPAHDVRRYVRRNKTDRTDTKGMLEANRNEEIHPVPVKTIEQQAIASLHRLRSTWLATRTARLNTLRGLLREFGVFIPVGAHHVVPRLRELLGESTDTVPLAVRGTLAAACAELDGLEANMHAVERQLAALARQLPDVTLLQTIPGVGVLTATALVALVGDIRRFRSGRHFASFLGLTPKEDSSAGRRRLGAISKQGDVYVRMLLTHGARSVVWHAKAAAQATALQRWAVHTELRRGRNVAAVAVANKLARIVWAVWVQQRPFAAEHRPG

SEQ ID NO: 425033 - protein, 388 aa, unidentified
MTHLPVPYPVPATPDYDRTLMLAIELSNKSWVLAAQVPGLPRVKAKRTIEPTAEALLTAIQGYRERAKAAGRPVERVIATYEAGWSGFWLARWLATHGIETHVVQPSSVPVDRRARRAKSDGIDAELLLRTLLAWLRGEPRVCSMVPVPDEADEDARRCIRERTELVAERVALVNRIGAVLATLGVDEYNPLLRNRRECLEALRTAQGTSLPPHAHAKISRMLDRLDLVRTQITALEQERDAVLEDEVPDRAGGMIQQLATLRGIGVQSATVLVREAFVREFANGKALGSYAGLCATPYSSGGTEREQGISKAGNRRLRTVMVELAWLWQRYQPGSAEVSWFRERVSGTGARMRKVMVIALARKLLIALWRFATQGVVPEGAVMKPAS

SEQ ID NO: 425034 - protein, 314 aa, unidentified
MTEFTIGVDISKSTLDVFRLEDGALNQFANSPVGFKALIKWLGDLPIKRIVFEPTGSYHRAFEKTFGGTFPMVKVNPLQARRFAQASGTRAKTDAVDARGLAAMGAALNLRPQNPISENERILKDFHVARASLIKERSRLRNRLQTQTIPLLKRQSRARLTQVERQIIELDAAIAAIIGQEEGMARQRDILCSIPGLGPVTSAALLTLLPELGTLDRKKVASLAGLAPFSRQSGRWQGKTFIGGGRKPLRDALYMPALVAAARFNPDLKSKYEQLRAAGKPAKVAIVAVMRKLLETANALIKADRFWAKKTDCA

SEQ ID NO: 425035 - protein, 347 aa, unidentified
MLHAGLDLSRKKVDVCLLSDDGEHLDQLAVPPDADSLRTLARRIEETHHEPVMAVIESMTGARIVHDTLEGEGWAVEIADAQKVKGLAPLACKTDKIDSKVLAVLSHRDLVPAIWLPDPRVREERELARFRLHLVKHKSALKNRIHSTLINFGRPCPVTDLFGVEGRRLLERLKVPEPWRGNISASTLLIDQLEDQIEAINRRLRDGHADHPYIPLLESVPGIRWVLAFTIAAEIGEIERFDSPTKLVGYTGLCPRVNQSGEKDRRGPLTKHGPRYLRWAMLEATMHALRHPAYAERYQRNKRRLGKQRGAKVAQVDIARRLTAAIWHMLSRNEKFAPRGAAFRLAA

SEQ ID NO: 425036 - protein, 414 aa, unidentified
MERLYERCAALDVHKQQVTVCVHVPDQAGVRSELRAEFATMTADLLGLRDWLKGLGVTHVAMEATGVYWKPVYYLLEDDFELLLVNAQHVKNVPGRKTDVKDAQWLCQLLEHGLLRSSFVPPKPIRELRDLTRYRKSLVWERAREANRLQKVLEDANIKLACVASRPLGASGKAMLRELCEGNHDPVALADLAKGKLRAKLPALRQALEGRFRDHHALLVSHLLAHIEYLDETIGSLSAEVEERMRPFERQRELLCTIPGVAERTAEVIIAELGPDMDRFPSHRHAASWAAICPGHDESAGKRRSGKTRKGDSWLRTALIEAAQSAAGRTKDTYLHSQYLRVRRRRGHKKAIVAVAHSILVAAYYILRDEVPYQELGGDYFVRREDQERLTRRLVRQLERLGQSVTLKPALEVR

SEQ ID NO: 425037 - protein, 338 aa, unidentified
MIVIGLDVHKQSVTAVAVDEAGRPLSEKVIPVGSDELLDWAGALDAARLWAVEDCRQLTRWLERQLLAVGEDVVRVPPKLTVPERRAGRTRGKSDPIDALAIARAALREPDLSRPQPGEQASREIKLLVDHRDDLVDQRRRTQQRLRWHLFQLDPTYVVPLRMLGRSSHLERVSRWLARQEQELQVRLARELVTSCRTLNRQVAELDQQLEQRVKETAPRLLELPGCAAVTAAKLLAEIGPIDRFKSDAQLARHSGVAPLEASSGRTQRHRLDRGGNRQLNAALYRIAITQSRYHPPARDYLERKRAEGKSRREALRCLKRLLARTVFNTLKASPALT

SEQ ID NO: 425038 - protein, 356 aa, unidentified
MNEGSWVGLDVHARSVVAGVIDQGSGEVRSLRVPPGKAETVAWLETLPAPVRVVYEAGPTGYGLARACAEAGISCVVAAPSRIRPAADRVKTDRRDAERLARLLRLGEVTLVRVPEPEEEAARDLVRAREDARGDLMRARHRLSKLLLRHGAVYDATAWTRAHDAWLRRQRFQSGPLAIVFDECYGRMLDAKTRRDALDKAIAELAATPPYVDIVDRLVCLRGVSTLTAFALTVELGDWSRFRPESLGPFLGLTPSENSSGERRRQGAITKTGNTHARRLLIEAAWHQRRPQRMSTLLTRRRDGKPPAVQAQADRSARRLHGRWHALEARGKPRSIVVVAVARELAGHCWALATME

SEQ ID NO: 425039 - protein, 348 aa, unidentified
MDLLLERCAGVDIGKDEVVACVRTPGPAGKGRRKLTRTLLSFTAELEAMADWFAAEGVTEVVMEATGSYWKPVWYVLEERGFELKLVNAAHVKILPGRKSDVLDAEWLAELLEHGLLRGSFVPPAVIRELRDLTRYRKRLIQAHTSEVQRIHKTMEDAGIKLDSVASDSVGVSGRLMLQALVDGERDPEVLAELAKGRLRKKIPELRQALRGRFRDHHALLIRLSLKHCAHLESATAELDQRVDALFEANTSEAGVPFERARDRLDTIPGVGQRAAECILAEIGLDMSRFPTAGHLAKWAGVAPGNNITGGKRRSGKTTKGDVWLIDILVQCAWSAARSRDTYLSAQF

SEQ ID NO: 425040 - protein, 264 aa, unidentified
MVVFAALDVSQDQTAVCGIGQDGEMIAEAKVATCPDAFAGWLARWSGQVERVGMETGPLAVWLWNALVARALPIHCRDGRHANGVVKMMPNKTDRHDARGMAQMVRTGGFKAVQIKRHDACVNRALVTARDALVGMPVRLENEIRGVLKTFGVLFGKRVGGFKKRAEEIIAGDLAIAPELFAIFEALIQARHSILERIAALDGHIRKIAKRHKAVQLLMTAPGVGPITAMAVVAAFDDAARFKRSSSAAAHPGLTPGRHDSGTP

SEQ ID NO: 425041 - protein, 358 aa, unidentified
MTTITIEREIKLERASVEAGVTIKLGLDVHAGQITVCRQDGGQVPKPAQRKSWPEFLAWVEALVKGGAKVVSCYEAGPCGYGLHRQLTALGVTNYVVVPQRWDVEGKRVKTDARDALELCQRLDRYVAGNTKAFSVVRVPSPEQEQRRAVGRQRGTLVQERQRCVLRGHGLMLGQGVHAPTGWWEPKFWASFQQELPEWLRAQVQIWQAQAVGLDEQVTRWSLRVEAQSAGQPIPKGIGALTAALLAGEILDWGRFENRRQVASYTGLCPSESSSGLKRRQGGVSKHGNPRVRHQLVEACWRLLLWQPDYPPLKQLRAATGARARKRAVVAAARRLAIDLWRINTGQCPAEKLGLQLR

SEQ ID NO: 425042 - protein, 346 aa, unidentified
MQHYVGLDVSLKQTAVCVVDQTGKIRREGTVASEPEAIADFIAANAPQVVRIGFESGATSTWLWTELKKFGLPVICIDARHAKAALKMQINKSDRNDAVGIARIMQCGWFKEVRVKDLDSHAIRALLSSRALLVELKRDLENQIRGLLKNLGLVIGRCKLNTFTARANELIDGKPALAAAVEPLLKAREAIGWQIADLDRKVLRLARSVPQVRRFMTVPGVGPITALCYLATIDDPARFKRSRSVGAYVGLTTRRYASGETDRTGRISKCGDGMLRSYLYEAANVLLTRVAKWSALKAWGMRIARRKSLSKARVAVARKLAVILHRMWIDGTEFSWSSEGTAMQPA

SEQ ID NO: 425043 - protein, 341 aa, unidentified
METQRHIGIDLHRNQFTCCVRLENGRNYLTDWKLEDLPRFIKKLRPSDEMAVEVTGNTRLFRDAVAPHVARVVAVDPNQFKVISHSVKKTDPNDARNLALYLEKDLLPEVRLKDKTQAQLASLTQTRDTLVKLRTSLKNKINNILSAHGINLEKEALSSEKKLNQVLAMKFDPMIRIELKVIVEQIRSLNQSIAELEKTIADEGSKLEGHKNLTSIKGIGPLSGSILLSVIGDVNDFADEGKLAAYFGIVPRVSNSNQTEHSGRITKRGSKLGRTALVQCALIAQRYSPYLKRYYEKIKTRRGTGKAIIALARKLLGIIYRTLKNKWVCEDFPNFGWAEAA

SEQ ID NO: 425044 - protein, 452 aa, unidentified
MNGGMLEIDAEAGEEQLVERVAAIDVAKASAVVCVRVGHASIAGRRVTRVWEVRSTTNAIIALAEQLAGERIERVVVESTSDYWRPFVYLLEARGLTVWLVNASQVKQVPGRPKTDKLDAVWLAKLNERGMLRPSFVPPAEIRRLRDYTRLRVDLIADRTRQVQRLEKLLEDALIKLSTVASDILGVSARAMLDALIAGERDPEALAELARGRMRGKRAALVEALTGRFDDHHAELAQMLLDEIDALTLKAETLTVRIDQLIAEIPAAHPPAPTADPGGHPRDPGTRPLPVVARLDEITGIGPNAAHVIVAEVGLDMTQFPTPGHLVSWTKLCPRTIQSGPKSRSGKAGKGNPYLRRVLGEAAIAASKTDTFLGERYRRLVRRRGKLKALVAVARSILVIVWHLLADPSSRYRDLGADFYTNHIDRQRKTRQLIRQLEALGHTVTLDTAIAA

SEQ ID NO: 425045 - protein, 350 aa, unidentified
MLIGVDYHPSFQQIAFFAEETGECGERQLNHSHGEAERFYRDLQQRGTRVRVGMEATGYSRWFERLLAELGFELWIGDPAEIKAKRVKKQKTDRKDAQLLLRLMREDNFPRIWVPSPENRDLRQLLWHRHRLVQMRTRIMNQLQALAMNEGRRWKTKLWSEQGRAELEKLALAPWASRRRQELLDLLDRLHPTIEELTVAVEREARKRPEVVRLMTHPGVGPLTALAYVLIIGTPARFHCGKQIGTYVGMIPGEDSSAGKQRLGHISKQGNSLLRFLLVEAAQAAARSNPEWRRRYMHLAMRRHRSIAKVAMGRKLAVRLYWMWRNGCAYSSSLEFGSYVGQLGTGHGVP

SEQ ID NO: 425046 - protein, 467 aa, unidentified
MAKAQKSRSKSKSRAKQNHRAKLKPQDCTLGLQVMHPKAAGIDVGNEEHWVAVPPNLDSEPVRSFGCFTKDLQEMADWLVRIGIETVAMQSTGVYWIALYDILAERGIRVFVVNAADTKNLPGRKTDIQECQWLWKLHSYGLLRNSFRPEEEILVMRTYWRQRQQHIGDASRCIQHMQKALTQMNVQLANVIRDISGTTGQAILRAIVAGERDPQKLAELRDPRVKASEARVAKSLEGNWRAELVFVLRQELESYQTFQTKIAECDQQLHRLYQTMEAKADPKLLPRVPRDKRAHGNIPTGLDLREELYRATGVDLTAVDAINVLTAQTLISEVGFDMSRFATESHFVSFLDLSPRNKISGGKVVGRDKRKTKNRAGLALRLAAGTLLESDTYLGAQYRRLRTKLGAPKARKAMANKLARIIYRMLKYGEKYVDKGKEFYEQKYRQMQIRMLTKRAAELGLQLVQPA

SEQ ID NO: 425047 - protein, 406 aa, unidentified
MPVYLGIDWSQEKHDAAFLNEAGAIIAQLTIPHRPEGFLQLDTTRQRLGVAASECLVGLETAHNLQVDFLWDRGYTQVYVLVPKMVQRSRERYRQSGASSDPSDAFVIADILRTDRNRLQHWFPDSLLTRQIRAKVSLIHHLTESGVRLSNRLQAVLARYYPLALEIFSEPTSQIRLYFLQKYPTPQEAGQLTLETFQDFGRRHRYTRRDILARSFGRLQTRYPEASPEVSQIYRQEAVTLAGLLLELIQARKAAMRELRDVFRQHPDAAVFASLPGTGDLLAPSLLAKFGDDRSRFASPASIQELAGTCPVTKSSGKRRIVVFRRACDRELRQTAVQWARCSLRESAWANAYFESVLPHCRTQSHAFRCLANRWLAIAWKLWQTHERYNEGYHLRQRALRSLPPT

SEQ ID NO: 425048 - protein, 356 aa, unidentified
MKYYTSTTEFNCGIDLHARQMYVCVMDRQGKKLVHCNVKDNDFEFFLKLIEPYKHELTVCCECMFGWYWLADACHQAGLTFVLAHALYLRAIHGGKNKNDRIDSEKITHLLRCNLIPPSHVYPAEKRPLRALLRQRVCYVWRRTELLNRIQSHQLAHNRRPVKCTTRHNRAPWEQQILATESHPLRQLALQNDLAMVRHYDAQIWALETKLVNLAKEHSQRDFTLLLSVPGIGENLGLTILHEIGDIERFPTVKDFLSYCRLVKGTVASAGKIKGLRGSRLGNPYLRWAFGEAAVIAKRDHAVIGPLAQRLEAKMGGHKFKANTVVAIKLARAVYFMLKNKTVFDSDRLVAVLSKN

SEQ ID NO: 425049 - protein, 317 aa, unidentified
MSFVGIDVSKLQLDIAVRPDNKRWSVANVETDIAMVVEVLNELSPGVIIVEATGGLEMPLVAALSQACLPVVVVNPRQVRNFAKAVGRMAKTDRIDAEILAHFGEAVKPVVRLLKDEDTQMLTALVTRRRQVIEMLTAEKNRLGISPKVIHKDIQKHIEWLKRRLEDIDRNLDSAIRKSPVWREKDDLLRSVPGVGQVLSTSLITGLPELGTLSHRKISALVGVAPLNRDSGLFRGKRTVWGGRSYIRAVLYMATLSASRVNPTISVFYRRLIEAGKKPKVALTACMRKLLGILNAIMKNRRPWQADYSTCPALNIA

SEQ ID NO: 425050 - protein, 340 aa, unidentified
MEELYVGLDLHSRNTYTGIMTKDFKRVFGKRLTNDLLVIVGALEPFRNDIQGIVVESTYNWYWLVDGLMDAGYDCLHLANPSAIKQYEGLKHVDDKSDSFWLAHLLSLGILPEGYIYPKEERPVRDLLRKRSFLVKQRTSHIHSLKSMIERNTGERISTRKLTGPDRIDLEQLLKEEYLFLSANASRSNIKFLSHHIKIIEKAVRKKIEIKKGFEFLKTVPGIGDILALTIMLEVGDINRFPKVGDFSSYCRCVSSKWTSNGKSKGKGNTKNGNKYLAWAFVEAAHFAQRFSPTIKRYYQRKSAKRNEIVGRKAIANKLARACYYIMRDKVPFKEEASFC

SEQ ID NO: 425051 - protein, 341 aa, unidentified
MAEYVGLDVSMKETAVSVRRDGKRVWRGKCGSDPQIVAEVIRRRAPAAARVVFETGPLSVWFYHALTAEGLPAICIDARHAKAALDMAPNKTDANDADGLAQLAEVGFFREVRVKGFDSMLARTLVAARNRLVQITTELSNQIRGLMKTFGLLVPAGKGSKFEEHVRGLLEGQAELARIILPVLEAWRGLRRQAAELSRQLIVSARQSQACQILMSIPGVGAVTATSFATAIEDPGNFRKSRSVGAWVGLTTRRYQSGEVDYDGHISRRGDTHLRGLLYEAATVVLTRTSAESSLRSWGLKLKERIGFKRAAVAVARKLAVVMHAMLRSGQLFDRTAGLTA

SEQ ID NO: 425052 - protein, 413 aa, unidentified
MNSHHQLARFAGFDWAKDHHDVVVLDAQGQIIDEFRFEHSIAGWNLWRQKVAAHPGLGVAVETSFGAAVEQLLASGVTVYPVNPMNAKRYRERKCSSGNKMDRHDAWALGDALRVDGHAWRPLAAQDPLVAELRILCRDEVALIGERTALVNQLQQSLHEYYPTALEAFDDWTSPGAWAFVEAFPSAGDLVKAGKRKWDKFLHSHKLYRSQTYQDRIAAFERAAQWHASPATVAAKSLYAVARCKQLRVLQAQLAAYRQRIETLFASHPDSGMFGSLPGAGPKIAPRLLGEIGSDRALYQDTQGLQCMAGTAPVSFQSGQIHKVKIRRACNKHLRHTMHLFADHSRTKCVWAATYYEAQRQRGKTHAQALRCLGQRWLKIIWKMWQTHTSYDPELHSRNQTAHGSWVLSFKPE

SEQ ID NO: 425053 - protein, 424 aa, unidentified
MNTTATTSDAIAFVALIGLDWGRTRHAIALRPAGSQIEPRTLEHSAENLHQWLDELHRRFEGRPIAVAIESSRGAVINALVQRPWITIYPIHPKTSARYREAFAPSGAKDDQPDADLLLALIERHRDRLKPLYRDDDSTRRLDALCRVRRGAVDRRTGLLNTLQSVLLGYFPQALELCGEDLGSALALDLLARWPTLAALQKARAETLRSFYYRHNVRRPEAVEARVQRVAQARALTEDAVVIEVGVVQVQGLVAELRALQKHIGVLDEQIAGVFATHPDAAIFRELPGAGKVLAPRLAAAFGTDRQHFADPESFGRYIGVLPVLERSGGRQWVHWRWTAPKFLRQSFVEWAKETVRYCKWAGAYYDYQKKRGKRPQAIYRSLAVKWIRILWRCWQDRTPYNDARYCAALKDSESPLYALLLAA

SEQ ID NO: 425054 - protein, 372 aa, unidentified
MNYNTVYVGMDVHKESFSLCAYTIEAEKASHYQRTEADYKKVLNYLEFLRTIYGDDANFICGYEAGCLGYTLYHQLTEHHVNCVILAPTTMLEQRRKKRIKTDKRDAEIIAKCLAQHNYSPVHIPTAADEETKEFLRMRDDHKLALKKVKQQILAFCLRHNYRYDGNSHWTAAHIKWLKSLKPEALYKEILDEYLLTYTALSDKLERLDKRIEELASKDEYKESVKKLCCFIGVKTHTALSVLVEVGDFHRFASAQNFASYLGLVPGEDSSGDGQTRLGITKAGNRHVRMLLTEASQCYARGQIGFKSKKLKSRQAGNSPQVIAYADKANERLRRRYYKMVLGKSKKPNVAKTAIARELACFMWGMMTDHVA

SEQ ID NO: 425055 - protein, 341 aa, unidentified
MNAIMIGLDLAKNVFQVHGVDAAGQVVLRRQLRRAQVERFFATLAPCRIGMEACGGAHHWGRVLLRLGHEVRLMPASYVRPYVKRNKTDGRDAEAICEAMQRPSMRFVPVKSVEQQAVLVVHRTRALMVRQRTMAANGLRAACAEFGVVAAQGRQGLHRLMQELAANDGPLPAEARWALSLLAGQWQALDAAIGTLEARIVRLARSDEAARRLMEIPGVGPLGASLITATVADARVFRSGRNFAAWLGLTPRQHASAGKQRSGSISKQGDRTIRSLLILGATARLRQERVRGVKDAWLAELLARRPAKVVAVALAAKAARIIWALLANNQHYRAPVLTRAR

SEQ ID NO: 425056 - protein, 406 aa, unidentified
MKQIVSVGIDVSKGKSTVCAMIHPNTIIKESFEVLHTVEEMSMLADYIGSLDGEIRIVMESTGHYHLPVAQFLYQKGFFVCVENAYIIRQFSRIMLHGAKTDPLDAKKLAKYGLAYWSELKPYKFHPSCYTQLSLLSKQYQTYIKLLIAAKQNVIHLMDEMLPGFKEALDTASSVQFSKVKYVDFAKEFYHVDMIKSMGKEIFRENYKQWCKEKGYRFQSEKADELFHLAEDGIPTLPTEFPSTRLCMEVATEQVSQLGYALEQILSQMQNLAKTLPEYQTIRQMGGMGEKLCVRFIADIGDVRRFHNGKALVAYAGIDAPPYQSGQYTGTKRRISKRGNSALRKTGYEVMKSLKSHPPKTDTRVYDFIIKKENEGKSKKQAKIAGLNKFLQIYYARVMEIYKNIV

SEQ ID NO: 425057 - protein, 346 aa, unidentified
MTIVEGTRSVTGGVDIHLDVHVAAALDDIGGLLGVESFEASSAGNDKVLGWLASVGQVAKVGIEGTGSCGASVARSLRAGDVCVVEVDRPNRQARRRTGKSDPAHAVEAARAALSGRAQGAGKTRDGNVEAIRALVVAKRSAKSTRIKSMNQIRHLGFTAPDELRERLRGVNRDHLGTVAASLRPRADGDLVLTATKTAIRILGRRVLALDQELAAIDNLLRPLVTATAPSLLGVHGVGVDCAAALLVAGGDNPERLRSEAAWAHLCGVAPIPASSGKVTRWRLNRGGDRHANGALWVIVITRMNSDPPTRAYVERRLAEGKSKPEIIRILKRYVAREVFHHLPRG

SEQ ID NO: 425058 - protein, 352 aa, unidentified
MTVTNLARSITGGVDTHLDVHVAAALDDRGALLGVESFATTTDGYKKLLGWLSDFGPVELVGVEGTGSYGAGLTRHLQAEGIRVVEVDRPNRQRRRRKGKSDPQDAISAARAAQSGDAAGEAKSRDGNVESMRVLRVARASARKARTQALNQMRGLISTAPEPIRDELRALNVFHLLERASIYRPGGKRDIVSLTKFTLRMLAKRAIALEAEITEIDAILTPLVKETAPELVAALGLGTDTASTLLVAAGDNPERLRGEAAFAHLCGASPIDASSGKQERHRLNRSGDRQANSALWHIVITRMVYDPRTTEYIERRTTEGLTKKEAVRCLKRYVAREVYSLLPHQKLGLDSP

SEQ ID NO: 425059 - protein, 423 aa, unidentified
MKSPNTQTFTAYVGIDWADTKHDICLQESGSDRREFGCIEHQVQCIDEWAKSLHQRFGGPIAIALELAKGPIVYALQKYDFLVLFPINPLTLAKYREAFKPSRAKDDPSDAELALDLLVRHPERFAPLKPQSVAMRTLISLTERRRELVNDKTRLTNRLTNTLKQYYPQALDWFDQHDTVLFCDFLTRWPTLLQAKRAHQASLKAFFHAHNAHRPKIIAGRLVAIKAAVPLTQDPGVIVPSRLHAMVLVEQLRVALQAIEQFDRHIAELAPTLPDFRLFAGLPGAGPHLAPRLLVAFGEDRERFQRAEELQKYAGIAPVTERSGKKNWVHWRWQCPTFLRQTFVEWAGQTINKSFWAGAYYYQQRAKGSTYQAAVRALAFKWIRILYCCWKNHTLYDETRYLNALKIRQSSLLKNLVPNPQNA

SEQ ID NO: 425060 - protein, 360 aa, unidentified
MKDTKTVYIGVDVSKDSLRFDSENLLVGEVPNTAPKIRAALGKLQKKVGEGNVLHLCLEATGPYGELLVGECHQAKIRVSVLNPAKVRHYAAAIAESAKTDPIDARVIRLFAQARNPHPTPPPSEASVLLRKLILAREALVRSSIELCGTLDSVEGCQAAKSVKKMIAAIKNQVAQLDTQIQETLQSEANLRGLAEALCEIQGVGPTTAAAILAYTPELGTLGRRRAGALAGLAPYIRDSGRFKGKTFISGGRPQVRRALFMSATVARRYNPILKSVYERLIANGKPYKVALTAIMRRLFCYMDAVAAKWLAQHAPTPQPDLAEDDLTPPSSSLPPPHSPLPLPPTSPLFAPQKVLFQDS

SEQ ID NO: 425061 - protein, 403 aa, unidentified
MNAAGIDVSKGKSMVSVMRPLGEVVAKPFTVCHTGSELKELADYLKSLDGETRVIMEHTGRYYEPVAQFLHDAGLYVSAVNPKLIKDYGNNSLRKVKTDKADSKKIAKYGLDNWGELRQYASMDMIRYQLKTLNRQHALYSKMKTAMKNNLIALLDQTYPGVNALFGSPAREDGTQKWVDFAASFWHVDCVRGMSQAAFTERYRKWCKRNRYNFSSDKAAEVYTGAKDQIAMIPKDDLTKRLIRQAIDSLNTVSRTVEQLKAEMLKLASQLPEFPVVMEMHSVGDSLGPQLMAEIGDVTRFAHRGSITAFAGVDPGANQSSEREAKSVRTSKSGPPELRRTLFLVMDGLLKSMPQDDPVYQFMDKKRAEGKPYLVYMTAGANKFLRIYYGRVKEYLASLENAD

SEQ ID NO: 425062 - protein, 409 aa, unidentified
MLFAGDDWAEDHHDVELMDSSGRTLARARVPEGAAGMARLHAMIGEHLGQDGEAEEVRIGIETDRGLWVAALAAAGYTVYGINPLQAARYRERHGVSGAKSDTADAHMLADMVRTDSHQLRPVAGDSARAQAVKVVARTHKTLIWERTRHVQRLRHQLRDYFPAALEAFEDLDAADTLELLARAPDPASAARLSTAQISAALNRARRRHIAAKAAAIRAALRSPQLGQPPAVTAACAAAVRALAAVITTLNEQIKIIEGQVDAHFSQHPDAEIIVSQPGLGPILGARVLAEFGDDPHRYTSGKARKNYAATSPVTRQSGKRKTVMARYVHNDRLRDALDGQAFAALTASPGARAYYDRQRARGLGHRAALRQLANRLVGILHGCLKTRTLYDEQTAWPQHASQEIKTAA

SEQ ID NO: 425063 - protein, 338 aa, unidentified
MALYAGIDLHSNNNVIVIQDEEDNVVGRKRLPNDLKRVCPWLESYRQDLAGIVVEATYNWYWLVDGLMEQGYSVHLANTVAIQQYNGLKYRNDDSDARWLATLLRLGLLPEAHVYPRTERAIRDLLRKRSRFVRQATMNLLSIENLFARNHGQRPSANQIRRLTLEGADAIFEDSNVALAVKSTLSVWDCLTDQIYALEVAIRGQVRLRQSYKKLRTVPGIGEVLALTIMLETGDIGRFDDVGNYVSYARLVGSSHWTNGKRKGSGNTKNGNAFLCWAFMEAANFAIRYEPKIRAYYQRKEAKTKRVIALKAVAHKLARACYHMIKENVAFDITRAFG

SEQ ID NO: 425064 - protein, 343 aa, unidentified
MEKKRYLGIDLHRDCFSCCIRLETGRTYLSRWQLDELGKFVRKLRPSDEVAVEVTGNTRLFYQAVAPHVQRVVVVDANQFRVIAHSVKKTDPNDARNLALYLEKDLLPEVRMKDPQRAQIASLTQTRDTLVKLRTALKNKVNNLVSAQGINLSKESLASEKGLAAVLKFHFDPLVDLELKVIVEQIRSLNRSIAELEETIAREGQKLKGHSNLTSIKGIGKLSGSILLSIIGDVNDFAEEGKLAAYFGIVPRISHSNETEHSGRITKRGTKLGRSTLVQCALIAQRYSPYLKSYYEKIKRRRGTGKAIIALARKFLGIIYRTLKFKWTFADFPNFVLAEETTG

SEQ ID NO: 425065 - protein, 346 aa, unidentified
MNHYAGIDVSLECSSVCVVDASGKILREAKVASEPEALIAWFRSLGFGLERIGLEAGPLSQWLFAAMKAAGLAVELLETRHVRKAFEAMPVKSDRNDARGIAQLMRLGWFRPVHCKSLGAQETRTVLTARKLVQSKLRDVENSLRGILRGFGLKVGPTTERSFCGRIRELVAGHPSLETVTEALLAVHAVLLREFNGFEKQVRRMARSDANAKLLMSTPCVGPVVSLTYASAIDDPARFRSSKQVGAHFGMTPKKYQSGETDYTGRISKIGDASVRTALYEAAHIMLTKPVKGCSELKSWAMRIARRAGMSKAKVALARRLAVIMHRMLVDGTPFDPAHKQVTAAA

SEQ ID NO: 425066 - protein, 387 aa, unidentified
MPASGPRPGQVAIQISLAAIFVSLELSRSTWLITSLVPGGGDKMSKHSVRSGDIAGLLDHFTKLREKAHARAGASFPIIAIQEAGLDGFWVHRVLERAGIESHVVDAASILTSRRRRRAKTDRIDGEALLRTLLAYKRGEPRVCTMVRAPSPEEEDRRRLCRERKTLVAERVAHVNRIKGVLFAQGISGYEPLRSDRRSRLEALRTGDGRPLPPYLRAQIGRELDRLELLLEQLKAVEAERNALLEPANDAAPVAVQALAGLRGIGPEFTAMLWSECLFRSFRNRRQVAAYAGLAPTPWQSGSVQHEQGVSKSGNPRLRSTMVQLAWLWLRHQPTWELSLWFRERVKRNNGRSKKTTIVALARKLLVALWKFSSSGVVIEGAMMKTA

SEQ ID NO: 425067 - protein, 339 aa, unidentified
MYYGAIDLHKNNSVLGIINADGQRLCMRKIPNDLDLIKKALDPFAENLEGIVVESTYNWYWLVDGLQDAGYRVHLANPTAIQQYSGIKHTDDMTDAWWLAELLRTRLLKEGFIYPRAERAVRDLLRKRAHLVKQRTQNILSIQNLICRNTGGRLSANQTKQLTEETVQKFYDKEEERALAINCSLRVIQTLKREITIIEKQAKSKLKLSQPYQVLQSVPGIGELLAMVIMLEAGDISRFPGVGNFSSYCRCVNSVRLSNGKKKGSGNRKNGSKYLSWAFMEAAHYAIRYYPVIRKFYQRKSAKKGMMVAQMAVAHKLARASYYVLRDQVPFEETKCFVH

SEQ ID NO: 425068 - protein, 408 aa, unidentified
MGNKIAGIDVHKKVLMVVVVDAHAPESKPERRRFSTMPGDLRRLSIWLKELGVEEAVMESTAQYWRSVWLELEPHMCLHLAQAFSNRAPRGRKHDFKDAERLVRRLIAKELILSFVPDGDQRIWRNLTRMKLQLIRDRVRLQSQIECLLEEMRIKLSIVVSDLLGSSGLRILHALADGETDAKNLALLGDDRLKCTEEQLVEALTGRSQPMHRQMLALDLERLRLLDEQIGKLNSLIAQAMKPHQDTVIRLAEVPGLGIDSAQQIIAEAGLTASTFSSAAEFASWVGTCPGKEESAEQNSSSRSAKGNKYMRRVLNQAAHAAAMSKGTHFQAVFRRLLPRLGYKSAVWAIAHRLCRLVWKILHEGIRYIEQGIESEPKLLIHRAQHLAKQLRKFGYTVQITTDNRAPA

SEQ ID NO: 425069 - protein, 340 aa, unidentified
MYHYAGIDVSLESSAVCVVDGAGNIVREAKVASEPEALIAWFRLLGPKVERIGLEAGPLSQWLYAALREAGFAVELLETRHVRDAFKAMPVKTDRNDARGIAQLMRLGWFRPVHCKSIEAQETRAVLTARKLLQSKLRDLENSLRGVLRGFGLKVGKTTERTFAARINELVTGHPGLELVARALLEAHAVLLREFKGLDKHTQKLARLHPQAKLLMTTPAVGPIVALTYAAAIDDPKRFRSSKAAGAHFGLTPRKYQSGQTDYTGRISKIGDASVREALYQGAHVMLTKPVKNCSALKSWAMRIARRAGMRKAKVALARKLAVILHRMLADNKPFNPAAI

SEQ ID NO: 425070 - protein, 350 aa, unidentified
MVLLQNVGIDASMKELQVCFTALEMGQTLKIKGTRTFSNSPTGFSALVSWATKKARQTAVRFTMEATGVYYESLAYFLHQRGYYVSVVLPNQSKAFIDSLNLKSKTDKLEAKALAQMGVERQLLRWEPISEQMYQIKRHCRERVMLLEEKTMIANRLHAEEHCAQPNKMVIKRMKQRLKLLGKQVAQVEAELHQLVARDQELAERIANIEQIKGLSFITVVTIIAETNGFALFKNRAQLTSFAGYDIVERQSGSSVKGRTRISKKGNRYIRRALHLPSLSVIRYNENFQQLYERVYERTRIKMKGIVAVQRKLLILIYTLFKKNQTYDPAFIQRNTQQSSRQDTVPAYAG

SEQ ID NO: 425071 - protein, 485 aa, unidentified
MVSIGIITVEAVAGSQAGPHWSFEPAEQSGSDADTYPELLPPWSGSTWSRVFCPSASPGGSPPWRRYTVDTIYSSVAGLDVHLKSIQCAVRCRQETGKLVHQARSFGTMTRDLRALADYLQSLGVTHVAMESTGVLWKPVWNILDGRFTLLLVNPRHIKKLPGRKSDVSDAEWIAQLLQHGLLRGSFVPLRAVRELRDLTRHRAQLAAEHTRVANRIHQVLEDCNIKLDAVASDVLGKSGRAMLQAMLRGQQDAEQLAELALGVLRKKLPQLRLALEGHCTEHHRFLLERLLSHLDYLEEQTARFSTQIAAGLERLLPAAEQQRLDTIPGVNRTTIENVIAEIGPDMTVFPDEHHLCSWTGICPGNEESAGKRLRSRTRKGNRWLRRALAEAAWAASHAKDTYLAAQYRRLAARRGKKRALVAVGHSMLVIIYHVLKNHVEYHELGADFFDRLDPERLRRYLVRRLQHLGYEVALTTKESEQAVA

SEQ ID NO: 425072 - protein, 345 aa, unidentified
MQITTIGLDLAKSVFQVHGVDAEGKVAVRRKLRRAQIRQFFAGLAPCLIGMEACGTAHFWARELMAMGHQVKIMPPSYVKAYVRRGKNDAADAAAICEAVMRPHMRFVPVKTEEQQAALMLHKARELLVRQQTMLINAVRGHMAELGMSAPQGSAKIKDLIAVIQDSKDQSIPALARAALQPLVRQLHTLDEQVETLDREIKAWHTRNETSRRLATIPGIGVLTASAIAATVPDPSFFSSGREFAAWLGLTPRQNSSGGKERLGRISKKGNTYIRRLLVTGATSMLRFARAKTAAGADWVNGLLQRRPARLVTVAMANKTARIAWAVMVRGENFRVPVRPMTEAA

SEQ ID NO: 425073 - protein, 352 aa, unidentified
MNIYFGCDAHKRYSMFASMNERGQTGRPVRVEHTRAMFREFLRGLPPGSPIAIESVGNWYWMIEEMEKAGHEPQLTNARKAKMMMGQMNKTDKLDATGLATLLRNGTLPSVWIPPRNLRDARELPRMRMSLVSVRTMLKNRIHATLAKYMIEIDEVSDVFGMKGRELLKGRVEELPPYTRQSVETQLELLDEVEAHIEEAEKEIREVVKTTPEMRLLMTIPGVGPILAVVLAMEIGDVKRFPGAEHLASYAGTVPRIKSSGGKSFFGKVRPDVNRYLKWALVEAANIVVINQGRWSSRHVVRLYGRIKERKGHAKAVVAVARHLAEAAYWILRRNEAYKEPGTTNSISSTRK

SEQ ID NO: 425074 - protein, 352 aa, unidentified
MTTITTIGLDLAKKVFQVHGVDAEGVVVVARKLRRKEVLAYFAKLPPCLVGMEACGSAHYWAREITKLGHTVKLMPPRYVKAYVKRGKTDAIDAAAICEAVTRPSMSFVPVKGLEQQGLSMLHSARSQLIGQRSQVINAVRGHMSELGIIAERGLLGLAELAAIVRDESDQRLPVLARAALMVLVRHIETISTEIAALDSVLSKENKASELGPRLETIPSVGPVIASALRARVTDPKLFENGRHLSAWIGLVPENDSSGGKVKQKGLSKKGDRYLRSLLVNGAMAVVRQAQKRPDKHPWVTKLLGRMSAKQAAIAIANKTARIAWALMVKGGVYEAGHRAPQYLAQACAAAE

SEQ ID NO: 425075 - protein, 380 aa, unidentified
MKKNTRFVGLDVHAETIAVAVAETSGEVRSLGIIPNKPESVRKLIKRLGPTDTLRVCYEAGPTGYVLYWQLAGMGVHCDVVAPTLVPVKSGDRVKTDRRDAAKLARSYRAGDLTPVWVPDAAHEALRDLVRARESAKKDQLRARHRLQKFLLRHGKRSPDKIKPWTETHLTWVRQEVHFEAPAQQAVLIDYLAEVDHARERIKRLEQYIDEAVELVPAAMRAVIDALQGLRGIAKVSAVTIMAEVGQLSRFARPRQLMGYSGVVSSEDSSGGRIRRGGITKSGNAHLRRIVGEAAWSYRHRPAVIGALRIRQEGLSEEVKEIAWKAQHRLHSRYRRLTAKGKPKQQVVTAVARELLGFIWAIGVQVEATTPVEPRKRPAA

SEQ ID NO: 425076 - protein, 349 aa, unidentified
MIRNKPRGAAVYGVDLGKNVFHIVGTDSAGNVVQRAAFRRDTLIAFFTRADLAVVGMEACPGSQWLARKLQAMGHTVRIVPAQFVKPYVKSNKSDTIDAAAIAEAVTRPAMRFVEVKQPYQVDLQALHRIRDQMVAARTGLICQMRAFCIEYGVAIRQGAGVFKLDLPRVVADEANDLTVTMRHLLTDLFEDFRRLELRIAAISREVEALADRDEVSRRLMTVPGIGPLGATALVAAAGSGRQFKKARDLAAWLGLVPRQHSTGGKTTLLGIGKRGNSYLRRLIVHGARSCVIHLDRSRDRLGAWLNQLLARMHKNKVVVALAAKIARIAWVILNRPGATYERRDPAIV

SEQ ID NO: 425077 - protein, 318 aa, unidentified
MEQIIRIGMDTSKSVFQLHGVNAAERPILRKKLSRSAMVKFFEKAVPTTIAIEACGGSHHWARLLSAQGHEVKLIAPQLAKPYVKRGKNDAADAEALCEAMSRPTMRFVPVKTADQQAALMLVGLRERLIRNRTQLANAIRGFAMEFGIVAATGMCRIEPLLERIAADQSLPALARELFAMHGVEYRNLLAETKAVEEKLVALHRSDECSRRLAEIPSVGPVGASLLMMKTPDPRLFKSGRDFAAWIGLTPKDHSTAGKARPWGDHSCRRRNAEERVGGWSDCSSSTCQSGAQQTYIPMAHRVATEEKAEVGCGGACQ

SEQ ID NO: 425078 - protein, 445 aa, unidentified
MTFRTIGIDLAIRGGHLAQIYDDGRPNGSAIRFRHDQPSLAAFVQTAVMGLRADDHIQAIMEPTGMSWFPVAHHLADAGVTVARVKGKRVKALRRYLSEHAKTDMADAQILAALPSFGGPRLDPVHIPDPRSHALQRLTKQRSRFQNEIADARRRLLDLIRWAPPRLEAVLPDLGTRLSLALLQKWFHPSDVLKARRMTLAKYVAAHAGGNHPRSGPFVETLITGLREAAQYAQNLHGAHIDFSELQFENATEIENILKKIQIVGDLEQHIADLYKHLDPQALLLSIPGVGRHLASTLIGILQNIERFHSEKHLRGFCGLFPRRADSGGVERAGQTLTQGGNNRIKHALYLAADTERKTDPELAELYWRLMTVKGHHHKQALYAVANRIVNRIFSVFKGGKPYEVRDREGNRITLCEAKAIILKRYTVGENIRAGRRSNRIEKTP

SEQ ID NO: 425079 - protein, 343 aa, unidentified
MQTVTTIGLDIAKSVFQVHGADAAGQVVIRRQLKRRYVLAFFQKLPPCLVGIEACASSHHWSRELQALGHTVRLMPPAYVKPYVKRQKNDMADAEAICEAVTRANMRFVPTKTPEQQSGLVLHRTRHLFIRQQTSVINAIRAHLAEFGVTAPVGRNGVEELLNVVGNPNDKRVPEIARRCLLALGAQLRRLKEQILEFDRLIRAWHRSSEMSMRLDDCPGVGPALASALVATVADAKAFRSGRNFSAWIGIVPKQHSSGGKDRLGSISKQGDRYLRSLFVAGALAVIRYAKIHGTKHRPWLAALLARRPTKVAAIALANKIARMAWAIMAKGERYKEPVALAA

SEQ ID NO: 425080 - protein, 413 aa, unidentified
MEVLYARCCGIDVHQRLVVACLSLVEAGLRRKEIRTFGTTTRELISMRNWLIEAGCTHVAMESTGVYWRPIYQRLFGFFELVVANAQHLKAVPGRKTDVKDAEWIADLLQHGLLSPSLVPPQDQQELRQLTRLRLSLTQERSQLVNRIHKLLQEGGIKLTSVLSDVMGVSGRAILEALATGESDPERLASRAHKSVQHKHEALVEALVGDLREHHRFLLRELLTLTQAVDRSIQHVEEEIEQRLRPFEALLERLCQITGVSRHILHVLLAEVGIDMKRFPDAAHLSSWAGVCPGNNESAGKRRTGRTRPGNHYVKVALVQAAHAAAHTQTYLGEQYRRLQHRRGAKRAALAVAHSILVIFYHMMVTGQPYQEKGVEFFQQMDRHQVPDRLIQRLQRLGYQVLAPEMSQGPPAA

SEQ ID NO: 425081 - protein, 369 aa, unidentified
MKKNSKNNKEKARQKALQAKSRKMKLTVGIDLGDEWSHCCFLGEEGEIVEECRVKTTREAVKSRFGELKLAVIALEVGTHSRWVSQMLSEFGHEVIVANARELRAITGSDRKSDRVDAEELARYARVDRRILRPIKHRGEEAQVDLVVLRARAVLVKTRTQIVNSVRGMVKSFGYRMPKCSTERFVKLNNEVPEKLREHLAGLMEVLEHVQKQIEEYDQRVEKLAKEKYPETTVLRQIWGVGEITSVSYVLTIEDKGRFEKSRDVGPYLGLRPRRSQSSESDPELRITKAGDCFLRSLLVECAQRILSKKGPDTALKQFGLRIEARGKKKAKKRAIVAVARKLAVLLHKLWVTGEVYEPFPETTVRKAA

SEQ ID NO: 425082 - protein, 330 aa, unidentified
MKNYEEVVGIDVSKKTLDAYCHQAQVHKVFINDVVGYKRLLKWVLKVTKDSKVFYCFENTGYYSLKLALYLASQSVVYVEESPLKIKRCSGIIKEKTDRIDAILIARYAWLYREELTPSTVKSMSHLELGRLLALRDQLVRNNAGLKGTLKEMKVLLSSSSTDVGCLSLKRSIDYLEKQVKSIETRIKEILASDASMNKNYELLTSLKGVGLVVACQLIYHTGNFTRFASWRAFSSYCGTAPFKHESGTSIHRRKQCHYLGDRKMKSLLSMASVSAIQHDSELRLYYNRKLAEGKDKMLAINNVRNKLIARAFAVVKRGTPYVVLQQHAA

SEQ ID NO: 425083 - protein, 470 aa, unidentified
MPDNNRKESAAKKRQIEGLPVVRRNVAGIDLGSERHWACAPSVDGTAREIADFGATTPELIRLAEWLGARGVKSVAMESTEVYWIAPHEVLEGRGLEVLLVDTRQLARVPGRDKKTDPSDCEWIQRLHSCGLLRGSFRPAEQVCMLRTLERDKANLVAESGDWLRRMQKSLDQMNVRVHRAVSDIDGVTGMAILRAIAGGERDARQLAKLRDPRCRKSEEEIAEQLSGHWREDHLFTLRQALKMYDAIQQRIADYDQEILGRLAAMQREDFRDQPAPQVKNRKKAQAIKKRGEEPMREALFRMSGVDLTAIDAIGVQTVQVVLSEYGPDLSRFPSEKEFVSHATLAPRRPMSGGKPVRKKKRNSASTRVAAALRMAALSLRHSATALGAYYRRIARRVGADVAVFATARKLATLIYRALRWGQPYVDEGAEAYEKRYQEIRMTALKAKAKELGYELLPSVQALVEGEVTG

SEQ ID NO: 425084 - protein, 394 aa, unidentified
MGVVVGIDVAKDFHWVHAIETSESQVLFSRRVDNDPVSIAELVEELGELERPRVGIDVVGGIASLLAAMLLEAGLEVVHVSGLAVNRARQGTVGGEHKSDPRDAGVIADQVRHRRDLRAVDAISDLDAEIRLLVGRRRELVGDQTRRINRLRDLLSSIHPGLERVVDPTQKAGQQLLLRYVTPHEIRRAGRRRLIDWVTRGGRFQARHVQALVDRALAAAQAQTTSVPGEHIAADLIRELAGEAAATRARLAELDDQLIAALERHPDAALIRTLPGMGVVLTAEFIAQAGSIDRFATPDQLAAAAGLAPVLKQSGKVHYLQRAHGGNKALKRVFFQAAFCSLSSPDSKAFYTRKRAERKTHHQAVIALARRRVDVLHAMLRNRQPYELRPAKAA

SEQ ID NO: 425085 - protein, 342 aa, unidentified
MEEVATVGLDIAKSVFQVHGVDAEGRVVVQRKLTRAKLIPFFEKLPRCRVGIEACATAHHWGRRLTDLGHEVKLMPPSYVKPYLKRQKNDAADAEAICEAVTRPSMRFVEVKSPEQQSELVIHRTRMTLMRFRIELSNTIRAHMAEFGLIAAIGRMGLQSLIEIVRDEADERVPASARMCLKLLTDQLDLVNRQALETDRLILASARATEVGQRLMAVPGVGPVLASAIVASVPDPHAFKSGRNLAAWIGLVPKQNSSGGKARLGGITKQGNRYLRQLLVVGALAVIRYAERHGTKRPWLVQLMARRTTKIAAVALANKTARMIWAIMTSGEAYREPQLRAA

SEQ ID NO: 425086 - protein, 433 aa, unidentified
MQDVQDEPLFAERVAGLDIAKAEVEVTLRVPSETTAGRRQQETRTYGTTRRELDSLADWLHCWAVTRAGMEATGDYWKPVFFLLESRGFDCQLYNAGQVKALPGRPKTDRADSIWLAKITERGSVASSFVPPEPVRRLRTHTRYRRHLTQARTAEKQRVEKLLEDGHLKLSSVISDIHGVSGRAMLEALAAGQRDAKALAQLARGTMRGKIRRLEEALDCSFFTAEHAAVLAMMLAAIDCYTAQIEALTARIETLTEPYLRQVEQLDQIDGIGAICAQDIIAEIGADMTLFRTASHLVSWARWSPQVKQSAGKRKGSNATGRGNPYLGAALGEAVICAGRTQSYLGAKYRRLARRMPKKKALVATGNSMLTIVHTLLSDPAARYQDLGADYYEQRMHARRQARNHVRSLERLGYKVTIQALNPDTGEFLTPAG

SEQ ID NO: 425087 - protein, 409 aa, unidentified
MNKVDIAPFEVFCGIDVGKTSNHIIALDRYEDKPLINRKVPQEEAEIRAALEEAGDFGLALVIVDQFGAFGRLVVGVAKSMDIPVAHMSPRRFRQVAETYGEDKFDEKDAFILADASRTTPRNIEFVGNRAESMAEIKVLSSRRDDIVEERTRCYNRLHDFIHQVSPPLEELFSKRKLHNDLEIRLIARYGGPIGFRQAGRARASTWAAELKYHCVDGPKKVEQVFDVLDRQTVMLPGAAVIEEQIRSIASRIIELLDEEKRLNLMIEQRAKMIPEVDLLQSIPGVGPVYAALIAVEIGDIGRFRNSNHLASYAGVAPRKEESGTSVHKRRKRKGGNRRLKNALMQSSQRSVQCDPLARAYYERKRAEGKKHLQALRALARHRVTVIFAMLNEGTFYEPPVEVDKNGRG

SEQ ID NO: 425088 - protein, 409 aa, unidentified
MERLIERVCGLDVHKQTVAACVRVPGSKGTREQHVQTFGTTAAELLALRDWLEAHEVTHVAMESTGVYWKPIYYVLEERFTCLLVNAAHVKQVPGRKTDVQDCVWIAQLLEHGLLRGSFVPPAPIRELRDLTRYRKVLIQDRTREANRLHKLLEDAGIKLASVATDILGVSGRAMLEALVRGTTDPEVLAELARGKLRAKLPALRQALRGRFRPHHAFLVSQLLAHLDYVDETITTLSERIEEVISPFADELARLDTIHGVARRTAEVLIAELGVDMSQFPSDRHLASWAGLCPGNNESAGKHKSGKTRRGNRWLRAALTEAALAAIRTSNSAFTARYRRIMRHRGHKKAVLAVAHAMLVTAYHVLARQTTYQELGADYFDRRHGERVTRRAVQLLERQGYRVTLERAA

SEQ ID NO: 425089 - protein, 379 aa, unidentified
MSTPKPALCEHTTAEGDLFVALELSDKAWRLSCGDGRHRPSQYTVAAGDEATLLARIERARERFGLASTAKVHSCYEAGRDGWWLHRRLRERGIDNVVVDSASIEVNRRARRAKTDRLDADKLLQLLLRYLHGEPRVWSVLREPTPEQEDQRRANRELQRLTRERTAHTNRIGSLLVLHNLRMRGQVGAGPWLRWWAAHREDLAPMLRDEIERELARLELVRSQIKTLEHQAARRVEAGEQPVTAQLMKLCSIGLRGAWYLDKELLGWRRFNNRREVAAAVGLVPTPYSSGDSHVELGINKQGSKRTRTLCIELAWSWLRYQPDSELTRWFNERYRVAGKRSRRVGIVALARRLLIALWRYVQFGEVPAGAHFKPQPTA

SEQ ID NO: 425090 - protein, 436 aa, unidentified
MEEVEDEPLFADRVAGIDIGKKEIMVTIRVPGDSRRGRRRQETREFRAVRKDLLALADWLRTWGVTRVGMEATGDYWKPVYFLLEREGFDCALYHASQVKALPGRPKTDKLDSVWLAKITEQGSLAGSFVPPEDIRRLRTHTRYRRHLVQARTAEKARCEKLLEDAHLKLSSVITDIHGVSGREMLTAIIAGERDPKVLAQMARTRMRAKIRALEEALDCSFFTSQHAFILQMMLANIDHLEDQVKELTAKITELCEPYARQISQLDAIPGFGVITAQDIIAETGVDMTVFPTAGHLCSWARRAPQVRESAGKRKGKNATGRGNPYLGGALGEAAANAGRTQTFLGTKYRRLVRHMPKKKAQGAISRTQLVITYELLSDPDAEYQDLGTDYYERRANIRREVRSHARAIERRGYKVILEPLEPGLDPDILPVTKAS

SEQ ID NO: 425091 - protein, 347 aa, unidentified
MDQYVGLDVSQDETHICVVDRDGNKLWEGSCPSTPEGIGSAIKEHAPNAVKIGLESGHLSTWHWHGLNDMGLPAICIDAYHAHGVLRLQMNKTDKNDAHGLAQIMRCNWYKEVTIKSFENHESRALFRTRSNLVSMRTDVVNQIRGLLKTFGILIKGIAGVSFENRVQEIIDEYAAISAPLQVQLDMLRMIKTKIDELDELVLDHAYACQKCRILMSIPGVGPMTAANFVLAVYDAERFKNSKSVGAYFGLTPRRRQSGDMDYNGRISKRGDRVIRHQLYEAANSILTRVKQPSSLQAWGLRIAKRSGMKKARIAVARKLAVIMHQMLQTDELFCFNPATGERALYA

SEQ ID NO: 425092 - protein, 427 aa, unidentified
MNGNEFNSIDRFRQFKKQIRGSKEHLIVGLDIAKRKHHGFFGDANGRALLKGLIVENSSEGFRHLLTQVRFYMDREGLRQVVFGLEPTSVYHKPLAEHLIEQGHLVVYATNEAIKKNRSLIDGRWDKNDTKDSANVADLVAQGKCQYYDLPEFRLRDLRSLLLFRKRLKKQLHSCRVRIRNNLVAQYFPELDRFWNNAAAENLAIVRWFLDPGSIRQLSCEQFIAKVTTHNGGLRQQRRLHHIWEAAGASIGCRPGPAMALEAELVVEMLQAVQAQLGRVEHAIQKIAEGFEEYDYLKSIPGFGPYVSAVALAAIGNPHRFENRAQLIRLAGFDLSANRSGEKSRTAVPVISKKGKADLRYALYQAALVASSLTSHFRAYYSRLLDGRQREKGIRTKMLVKIAAKMLVIAWTLMKRKEPFNPAHIQA

SEQ ID NO: 425093 - protein, 358 aa, unidentified
MKIIGCDLHARQQTIAMVDTESGEFTGKTLSHEGNALREFYAGLEPPVVVGIEATGAMQWFLELLEELGIECQVGHPAKIRAAETRKQKHDRRDARLLLDLLVMKDRFPKIWMPSIEQRDLRTLLRDRHQWVKIRARLQHTLQAIALNHALRRGPALWSAAGQNALQALPLPPYSSQRRTELLRLYVQLQKRIQGLDKEVDVQARQRPHARRLLTHPGVGAVTALATEVFLGDPNRFATGNQVASYIGMIPCEHSSGKRQRLGKLSKEGNSLLRYLWTEATMHAVGKDPELKRFYRRKLIQKGMGKARIAAARKLGIRLWIMMRDQIDYEEFCRRGTLRQEGKAHAGMPDFNSGPALQ

SEQ ID NO: 425094 - protein, 407 aa, unidentified
MQKYNISFKGQKIFIGIDVHKKNWDVAVAPEVGFVKRHSQKASAKVLIDFLKKHYPDGDYMAVYESGFSGFSTYYALKEVGIDCIVIHAADVPTTQYEEVMKTDRLDSIKLVKSLKAGLLRGIYIREKENLDDRSVIRIRKSIQKELSRYKVMVKHILHNNGVTLPDCFEKPTTHWSGAFMTWLKRDVTLLSSTRNSLDLLIRQVETIRANMLNATRMLRSLSRIERYKHRCELLMTIPGIGVVVAMSILTEIYNVNRFHNEREFAAYLGLIPTSHSSGEKIIHGEKTFRGNKQLGPMIIEAAWSSIAKDPGLGSLYLRYRERMKPQEAIIRIARKLSNILDNFIERLLKKTDKLEGFIFPEFVAFLPNLLKKYNDVRTLRAISSNRSLSDRSVVGSSFQPGIMCRA

SEQ ID NO: 425095 - protein, 315 aa, unidentified
MENQPFVGIDVSSQRLDVDTVPVSQPFSEPNHEDGIASLMKRLKPLNPKIVLLEATGGYEIAVAYALYEAGLPVVITNPKNVRHFAKALGRLAKTDKLDAQILALYAQRVHPPVQPLRDQEQLELANLMTRRRQLQGMIGMEENRRRTCTPKVRSNIDLSLAHLRQLLKDLDRDIQDSIRRTPLWHEKAEILQSVTGIGPKVSAALIADLPELGRLPGNKASALAGLAPMNQDSGKHRGKRMIKGGRPAVRRALYMAALVASRYNPVIKEFYQRLRLAGKPPKVALTACMRKLLVILNAMLKNRTYWNPQLPLAA

SEQ ID NO: 425096 - protein, 384 aa, unidentified
MHQATTLPERTCSRGNCASLFVSLELSRSTWVATALAPGSSKMSKHTLVGGDARKLLDLLARLKSRAEQRIAAPVKVIAIQEVGLDGFWIHRLLEANGVESHVVDPASIAVPRRHRRAKTDAIDGETLLRTLMAWQRGEPRVCAMTVPPSPSEEDRRRITRERAKLLQERIRHTNRIRGLLFGQGITNYNPLHKNRREGLEELRTGDGRSVPAHLKSEILREIDRLELVVRQIGEVEAERDEMLRLAQPSSPAALLMRLKGIGPEFATVLYLEGLFRQFDNRRQLAAYAGLAPSPWKSGSIDHEQGISKTGNPRLRTTMVELAWMWVRYQPASALSCWFRQRVGSKRGRVRRISIVALARKLLIALSRYVSHGEIPAGAIIKAG

SEQ ID NO: 425097 - protein, 343 aa, unidentified
MQVNTIGVDLAKNVFQIHGVDSAGKVVITRQLRRKQVLEFFSKLPGCLVGMEACGTGHHWAREISKLGHTVRLMPPSYVKGYVKRSKSDAADAAAICEAVTRPSMRFVPIKSTDQQALLMLHRTRDLLIRQRTQLINALRAHLAEFGLVAETGREGLAQLGAIITDESNRGSLPAAMKQALQAIVDQLAALELQVGALDRAIHAHHRANDMSCRLETVPGIGVIGATAIASTVSDPSGFKSGRDFAAWIGLVPRQHSTGGKERLGGISKQGDRYLRRLLVIGATAVVRQARLHPQKHPWIMRLLAKKPAKLVAVAVANKMARIAWAIMAKGGHYRAPELAAAA

SEQ ID NO: 425098 - protein, 367 aa, unidentified
MKDSNTVVGLDVHKNSIQIVTADTDGAMEVRHFGRIGGTMDALDRAVRKLASGGSTLRFVYEAGPCGYEIYRHLTGKGFACKVVAPSKTPKKSGDRIKNDRRDAETLARLERAGELTGIYVPREEDEAMRDLTRAREDAVKSLRTARHQLSAFLLRYGKRYPGKGSWTLAHMRWLSDIALPHPSQQIVLQEYITTVRVGTERTARLTDQITKLLPEWRWNPVVQALQALRGVAPIVAVTTIAEIGDLSRFANPRQLMAYLGLVPSEDSSGESTHRGSITKTGNGHVRRVLVEAAHAYGFPARVSRHLLKRQEGLPEPVLAIAWKAQVRLCGRFRRLMARGKLKNKIVTAIARELSGFMWAIAREVKV

SEQ ID NO: 425099 - protein, 422 aa, unidentified
MLEETYDHEQLIARVAALDIGKAELTCCIRVPNPDRPSKRLQEVTTSTTMTRSLLALADRLRELGVTRVVMEATSDYWKSPFYLLEASGFEVWLCNAKDVKHLPGRPKTDKLDAIWLCKVAERQMLRPSFVPPPPIRLLRDLTRYRVDLVRVRTAEKNRVEKLLEDAGIKLSVVASDIFGVSGRDMMAALIAGERDPKRLARLARARLRAKLTALEEAFYGRFSDHHAFLLQTMLARIDQTSADIAAVEARIEQAIAPFAKAAARLDEITGVGRAAAQVIIAEIGVDMARFPTPGHLVSWARFAPGVKESAGKKKGKATTSHGNPYLAHVLGEAAVAASRTNTFLGERYRRIARRRGSKRAVVAVGRSILIICWHLLSDPTVRFHDLGPGFYDSRVDSDRRKRNHIRQLEALGYKVTLQPAA

SEQ ID NO: 425100 - protein, 425 aa, unidentified
MNYKQNEKINQVKESTLVVGIDIGSTTQYARAFDWRGIELGKVFTFSNSREGFESFKAWMQHLQDKYRKSDVIVGIEPTGHYWFDLGAYLEDEGILLVMVNPYAVKQTKELDDNSQSKNDRKDPKVIAKLVTEGRYSAPYTPDGVYADLRIMVANRKRLIREMTQIKNRFARWFAIYFPEYTDVFGDYEAQSSMLLLKKTCTPEAIVELGAEKINQIWRDAKLRAVGMKRATTLCETAKRSIGLKKGSSAAQYEMKLLLEDYEYKKAQLDAVMEEIEKLCRKIPESEQMLAIKGIGVITVAGFLAEVGDVRRFESPRQIQKLAGLSLRENSSGKHKGQTTISKRGRSKLRAVLFNAAIPLIAKNPEFKSLHEYYTTRANNPLKKKQSVIAISCKLIRVFYAILAKGVTYDAQKLISDIHRQPQAA

SEQ ID NO: 425101 - protein, 339 aa, unidentified
MTQTIVGVDIAKNVMQVHWVDPETGEIVNRPVKRAAFLEYFANRHPCLIGMESCSGSQHWARRLIEMGHQVKLMPAKFVKAFNIRNKNDAADARAIWMATRMDSKEVAVKTEAQQAVLALHRMRQQLVKFRTMQINSLRGLLTEYGEVMGVGRTALDRAVVGILERLSGRLPAILIDTLREQWKGLDDLDRQIGQIERRLNEWMKGDQSAKAISVIPGVGLLTATAAVATMGRAKAFKSGREFAAWLGLVPGQTGSGGKIELQGISKRGDTYLRTLLVHGARSIIYRVKEPGPWVAQMKQRRPLNVVIVAMANKLARIIWAMLAHQRPYRKDHESVRPT

SEQ ID NO: 425102 - protein, 345 aa, unidentified
MHYVGVDYHKKSSYVTVMDERGKVVKEAQIANSQEALAAFLDGRAKGASAVLEAGRNWPVMYDWLEELVDEVTLAHPAKVRVIAEAKVKTDRIDSRMLAHLLRADLIPAAYVPGAVTREQRRRLRQRMFLVRLSTMVKNRLHTLVDRHPELSRQAGSYSDLFGKTGRAWLEQVDLPESEENLLRTDLDLLGAIQEHIKASNRWVSQLARKDARAQLLATLPGIGDFFAVLLAVEIDKVSRFSRPQKLAAYAGLVPSTYASGGYTHHGRITKRGNKWIRWACIEAAYPAINQDPELAALYQRLKVAKGANVAKVAVAKRLLIIAYRVLKESRVYRPADEQAALRRR

SEQ ID NO: 425103 - protein, 413 aa, unidentified
MEIVYHICCGIDVHARFLVACLLGDGKQVTRRFSTMTCDLVKLREWLTDNGCEYVAIESTGVYWKPVFNILEGDLKVILVNPEHARALRGRKTDRLDSIRLAELLSVGLLEGSFIPPPHIRRLRELTRYRESLVRTHTAAVNRIQKVIESANIKLAQVASDVMGISGRRMLSALAAGVTDPASMAQLALGKLKHKQAELQQALDGALDTSHRFVLGELLRRVRELEAAQEKVNAQINRAISDPDHPELLKAWELIQTIPGVGHIVAEVVIAEIGVNLRESFPTAGHLASWSGICPGNKRSGGKRFSGKTRRGNRYFRTILVQAAWAATHTKQTYLSAMYRRLVRRMGKKKALVAAAHTLAVMIYHIIDRSKPYLELGADYFDRTQPEKQLRYHVKRLQAMGFKVTLEKAIEMA

SEQ ID NO: 425104 - protein, 450 aa, unidentified
MRAATPDRRNARLIRMRGIVRHDRAILAIDLADTKQVLALCDHDSRVLARRTVRGRAWQLEEALRWGRTAAVEHGFAGVVVGCEPTGHRWRIVAELCDRLELDLVCVQPLLVGRAREQEDLTRDKSDPKDAVLIGRLVAGLRCYLPERTDQVWARLRQLGGRRVQLIIQVGAARQQLRDLLECAWPAVLEAAAEPLDSRTWRAAVQVALARTAGDPATLSRLGEARFARAVTRELARWGAKRRCLRIVRAVWAAATTPQALATGVGSQRPGALERAGLTLDDWHHALGQLAEAEQRMTGVLDSLDLTSLVTTIPGLSAVGAAAILAETGELARFDSARALVKHAGLCPRANESGAFAGTTRISRRGRPALRLAAWRATWGALAHNPVLAARHAHLTGRDHNQLTTAQARTALAAALLRWLWVVVTTRTPWQAAIAAGQLDPRKEVTAPAA

SEQ ID NO: 425105 - protein, 338 aa, unidentified
MNIVFLGIDLAKNVFQLCGLNQAGKPVYTKRTGRKELLQTLANIPACLIGIEASTGAFYWQREFEKLGHKVKVISPQYVKPFVRGQKNDGNDAQAIAVALMQPTMQFVPPKSPEQQDIQALHRARQRIVNHRTATVCQIRGLLLDRGIPIGSAVSRARRAIPLILEDAENGLSSRMRRTIAELYDLFNDLGRRIHFFDKEIETVFRQSEACQRIAKVKGIGPKTATAVVAAIGKGTEFKNGRHFAAWLGLVPRQHSSGDRQVLMNMTKKGDKHLRTLFIHGARAVVRVATNNNDGHMNQWVNQLKERRGFNKTTVAVANKNARIIWSMLRNETGYQVV

SEQ ID NO: 425106 - protein, 353 aa, unidentified
MTNTKYIGMDVHKESISIAVRNAAGKIVMECVIETKASIILQFIDGLRGDLHVTFEEGTWATWLYDLLKPHVGKLVVCDPRKNSRQGNKNDRIDARELSDRLYMNKLSSVYHGGAGVRTLRELARSYLTISKDLARVMSRVKAIYRSWGIPCAGKQVYAPRHRAEWLAKIAEVGVRRRAEFYYQQLDALRPLRQEVRRELLAESKKHPATKLLRQIPAIGPIRAALLIALIQTPQRFRSKRPLWKYSGFGIEMHSSADYRKVQGQLQRSRKQVSVRGLNRDCNHDLKNLFKSAATIASVKPGPFQEFYAALVAKGMRPEMARLTLARKIATIVLIVWKRGVSFEAQYLKPQTA

SEQ ID NO: 425107 - protein, 373 aa, unidentified
MDWGLIHRKGHMTSLATGEFAAYMGLDWANAKHDICLQAASSNQREMTVLEHRPEVIEAWATALLQRFAGGPIAIALELNKGPIVEALRKYDGLVLFPINPMMLARYREAFTPSRAKDDPTDAELQLDLLLRHRDKLKPLAPQSGEMRALSQLVEHRRRLVGDRIRLTNRLTSTLKAYFPHVLEWCPNKETRLFCDFLSQWPTLKAAQLARRRTLERFFLQHQVRGEQRIRERLDAIKSAVPLTTDEGVVMPHALMAQSLVTQLRVVLEAIERFDQAIAERAQHHPDFALFDALPGAGAILASRLLVAFGEQRERYGSAEEIQKYAGIAPVMERSGTQSWVHWRCQCPKFLRQTFVEWAAVSIRYSFWARVYY

SEQ ID NO: 425108 - protein, 391 aa, unidentified
MIYVGIDVAKDKHDCFITNSDGEVLFKAFTITNNLDGFNDLYQKIESVMDDVTKVKVGLEATGHYSYNLLGYLIDKGLPTYVINPLHTNLYRKSLSLRQTKTDKVDARTIASMLMSDVNLKSYSDTSYHNEELKSLTRYRFDKVKERAKLKTSVSRLVCILFPELEKLVPTLHMASVYALLSEFPSAKHVATAHLTRLTNLLSKSSKGRYGKDTAITFRDSARASIGSNMPAKSLELKHTIKLIQELDSEIDEIENEIKIIMDEINSPILSIPGINYRMGAMIIAEIGDFNRFDSPDKILAYAGFSPSTYQSGQLDGAYAHMEKRGSRYLRYALYNATKYVCHWDPTFAAYLAKKRAEGKHYNVAISHAVKKLVRVIYHLEKTKQQYIKAA

SEQ ID NO: 425109 - protein, 436 aa, unidentified
MEQIYQRCCGIDIHKKILVACLIVLTADGHKHKEMRTFRTVTQELLQLLDWLQANNCTHVAMEATGVYWKPLFNLLEGHVQLLVVNAQHIKAVPGRKTDVRDAEWIADLLQHGLLKASFIPPAAQRDLRELTRYRTTLVEERARIVNRLQKTLEDTNLKLGDVVTDILGKSARAILDALLAGQTDPVTLADLARGRLKAKRAELEQALVGTLKPHHRFMLREQLAHIDSLDEAIVRVGAEIAVHMRPLEQAEQRETCADDAVPENQKQALTWAQAIVLLCSIPGISQRAAEGILAEIGIEMNRFPSAKHLASWAGMSPGNRESAGKRLSGKTNKGSPWLRKLLVEAAHAAAHTKNTYLAAQYRRIAARRGAKKAMIAVGHTILVMIFHILNTQKGYEDLGGNSFDEHDRQATEQRLVRRLQKLGYEVELKVAAPAA

SEQ ID NO: 425110 - protein, 389 aa, unidentified
MPAVADRPDAPTAIQTNLAAIFVSLELSRSIWLITSLSPGSAEKMSKHSVRAGDVAALLARVSELKRKASERTGKSFPIVVIQEAGLDGFWLHRVLQSEGIESHVVDPASIATSRRRRRAKTDRIDGEALLRALLAFKRGEPRVCAMVKAPTPEEEDRRRLCRERKVLIAERVRHVNRVKGLLFSQGVSGYEPLRRDRRQRLDELTTGDGRPLPVHLKNQISRELDRLELLLDQIKRAEAERDALLAAQQAAAPGPAGRMLLEFRGIGAEFAAGLWLEALFRHFDNRRQLASYAGLAPTPWQSGSVDREQGVSKAGNPRLRTTLIQLAWLWLRHQPQSALALWFKERVNRNGGRLKKTTIVALARKLLVALWKYVTAGVVIEGAVMKDA

SEQ ID NO: 425111 - protein, 342 aa, unidentified
MYYIGIDVSTKESALCILDAKGKIVRESKLPTDPEIIARFIAATGLAIERVGLESGCTAAWLFAGLQRYGWPVICIDARHAAAALQAGFRNKNDRNDARGASTSTGRSGVWVKSPEAQRQGRLLTARATLQSQLVAIENTIRGLLRQEGIGLTDRRTAFEVAVREAIGDDRLLEAAVHPLLETRNAVLQHRAALDRQILRIVRGDPVCRLLMTARGVGALVSLAFKVAVDDPRRFSRSRDVGAHFGLTPREYSSGEVSYRGRISKMGDPEVRRLLYVAASRMLRRDAALWCPLKVWAVRLAQRVGIRRARVALARKLAVVLHAMWSDGQVFQWRRAEASASA

SEQ ID NO: 425112 - protein, 361 aa, unidentified
MKSTTIIAFDQHAATTVAAVLLPDHRTPALHSLTSDCAAIVRFVERFCRRGAVDCCYEAGPCGFDLQRALAAREIRCDVIAPALIPRRAGDRIKTDRRDAGQLAVLYRAGALTAIHIPTEQEEAARDVLRCREDIKADLLRARHRLSKFLLRHGRRFTGTKKAWSKRHDGWLREQTWPIAALDQTHRAYLRAVDEALARLRSVEEDLRALLTVEPLRPRVERLRCFRGIDDLTALTIAAELGDPRRFASAPRAMAFVGLVPSEHSSGTKQARGAITKTGNTHRRWVLVEAAWHYRHRPFVGAALRRRQQGAPAPIVAHAWTAQERLYRRYHRLRARGKPNQHVITAVARELTGFVWAALVQ

SEQ ID NO: 425113 - protein, 409 aa, unidentified
MHASNTCPLIADHNGTIFVAIELSLKGWLMTLRSPERGRISRYRVNGGDHAGLLKLIEDVRARAARVLGQVPAVVSCYEAGYDGFWLHRLLSAAGVTNLVFDAASVPVEQRGRRAKTDRIDGELLLRTLMAHCRGEPRVVRVARVPSREVEDARRASRERDRLIQERTAHINRIKGLLRTVGLAAGNPRRRDWPRWLAEQRDPEGRAIGAGLRRELEHEHARLLLVGEQVAELEQEGALCEEAATPLAKQKIALQRLKSLGAAFAGTLVGEVFYKDFDNRRQVASYIGLAPSPWQSGGLDREQGISKAGNPRARRAAIEAAWLWLRHQPESALSRWFEQRTAGASKRRRRIAIVAFCAVWAAWEYSNGQAMWATIAAGMAAYGAWVFLVTYKAPAETSAEPGQAPDKKE

SEQ ID NO: 425114 - protein, 408 aa, unidentified
MNTLYVGIDVSSKSNVVYLMLPNGDKHNNFSVANSHEGSTQLVKRILSALTSHSLDTVLIGLEATSVYGDNLVYFLREDATLAPFNRKIHVLNPKQVKKFHDAYNDLPKNDYVDSFVIADCLRFGRINKEVYMGDYRYKALQNLTRARFFAVQNLVKEKQRFMNVLFKKYSTMTQEKVFSDTFSTTALAVYDEFESAEALANMDLHELTDFIIEKGKNRFPDPDAVAKAIQKAARSSYRLPKTVNDSVNQVLSISITSMKALESQIKEFDKAIKAQMELLPNVLISIPGIGPVYSAGIMAEIGDINRFNSQAALAKYAGLAWKQHQSGGFESEVTRLIPSGNRFLKYYLCEAAFSLVRCDKEYSDFYHLKYKEVNRCQHKRALALTARKFVRLVFRLLKDNRLYCPAK

SEQ ID NO: 425115 - protein, 346 aa, unidentified
MEHYAGLDVSLKEISICVVDHDGKAIARGTCPADAEGVAGWFRNRSLTPHRIVHESGMLSIWLQRGMTRLGLPATCIDARKAHKSLSARLNKSDAADAEGLAQLARTNWFTPVHIRSEEADRLRSLIGARERLIRLRKDLEGHIRGVLKTFGIRMTGVGQGRQRQGFRDQLAAAEETDPVLRAIADGFITAHATLCQAADDLDKAVKRKAKAHPVARRLMTIPGVGPVNALSFIALVDDPNRFSRTSDVGAFLGLTPKRHQSGEMDWSGRVSKCGDGAMRGLLFEAASCLIRQVKRFSPLKSWAVRLAGRRGFRKAAVATARKIAVLMLTIWKSGADYQWTKEATA

SEQ ID NO: 425116 - protein, 443 aa, unidentified
MARPGMILIREVADAPVIMGISKPAGLKFPHREVKTVNPLFVGIDVSSKNNVTYLMKPDGSKHSSFSVQNNLGGAKLMSEKIVSALEAMRLSDVVIGLEATSIYGDGLVCALREDGRLGRYQRKIHVLNPKQVRKFKDSYPDLPKNDWVDAFVIADHLRFGRIGKEVYMDDYRYKSLQTLTRARFDVVQNLTREKQHFANYLFLKCSGMAQDKDIANSSATTIALMERFETADKLAYADLDELTRFISETGRNFADPAAKAKAIQAAAKNSYRLPTMVNCSVNQAMAVSIATMRALEKQIKILDKSIEQQFQIIPNTLTSVPGIGKVYSAGIIAEIGDIRRFNSQASVAKYAGLVWTQHQSGDFEAQHTKLIKSGNRYLRYYLLEAANSVRRCDSEFRRYYDLKFKEVNQFQHKRALALTARKLVRLVYRLLMDNRLYIPPEG

SEQ ID NO: 425117 - protein, 337 aa, unidentified
MDYFAGLDISMDETHVCVLDREGMVVRESKAESTAQAVANELAKAPSCRRIVFETGRMAPILFHGLSQLGLPVVCVESRQAYQALKSLATHKTDRNDARGLAHLARTGFFKPVHVKSLPAHAVRSLISARKKLIGQRVTLENQIRGLAVVFGVRLPRALTAAFIDNALRASEGIAGLSAAMRGLIAARTAVMSAVAAIDTDIRRMTGASAACRRLMTIPGVGQLTALAFVAAIDDPSRIRRSRDVGAYLGLVPRRYQSGEIDYVGSISKCGDRRVRTLLYEAANVMLTRYKGQLKLKDWAFAIARRSTMRKARVALARRLAIIMHAMLRDGTEFASA

SEQ ID NO: 425118 - protein, 336 aa, unidentified
MTVRDAHGRKLLSRHIRGGLRPVMDELRKIDRPFSVTYEASTGYGRLHDELSKVAHTVRVAHPGHLRLIPVRQDRPALPGNRTSGFRSKKKSDRVDSDKLSKLDYLGEVPQVHVPPHEVRALRATIKYRSRMVLERTGTKCRIRALLRSHGIDAPRGLWTRAGVEWLRGLKFPDDLEALVRDELVEKLGHQDSLIERVTKALDGRARANPAVGLLMTIPGVGPRTAEAIVAWVDKPARFSSVREVASYFGLVPCLDQSAGAARYGHITKEGPPVVRRLLVEAAHQGARRSARIRAYFERIRGDDPGRKKIAIVATAHYLVRVMAAMLRTGEVWRDE

SEQ ID NO: 425119 - protein, 385 aa, unidentified
MFAARIDSPTAIRTHLGAIFASLELSRSKWVLTSLSPGAGEKMSKHEVTADAVGALLARLAELRRKAEARTGQVFSIIAIQEAGLDGFWLHRVLESEGIESHVVDAASIATSRRRRRTKTDRIDGEALLRALMAYKRGEPRVCSMVRVPTPEAEDRRRVTRERKVLTKERVEHVNRIKGLLFAQGVSGYEPLRRDRRERLAELTTGDGRDLPACLKAQIGRELDRLELILRQIDGVEAARDAMLQAQQGGSAGLVLLCGLKGIGNELAAGLWTEALSRHFDNRRQLGAYSGLVSSHWQSGRIHHDQGISKAGNPRLRTMLIQLAWLWVRHQPDAALTLWFKDQVKQNDGRLKKRTIVALARKLLVALWKYTSHGVVIEGAVLKTA

SEQ ID NO: 425120 - protein, 360 aa, unidentified
MNQHKGGRKIAGVDLGDRDSVICILDDVSGEVLERATIPTSGEAFEEYFARREPMLVALETGTHSPWASRTVTDAGHEVIVANARQLPLIYGAKHKSDPRDGEKLARVARMDVRLLAPVQHRSREQQQALNTIRSRHALVRSRTLLINAARGMVKAFGGRLPKCAANAFGKAAWPFVPSELGLSLQPVFESIGTLTRQIRALEDEIDRLATEAYPQVQLLTQVPGVGNLTALAYLLTLGDPQRFSDSRMVGPYLGLAPGRRQSGDRDQPTRITKAGDENLRWLLVQSANHLLRRDAPDTDLKRHGRKLAKSGSKISKRIAKVAVARKLAVLLHALLVTGEVYEPLRNTHARRRRQPLISA

SEQ ID NO: 425121 - protein, 346 aa, unidentified
MKPDSQIVLGKYFRQCVGIDVSKEKFVACLEMYDIASDVGCNTACIEFKNTKTGFNQLVKWSRKECLKDYPLTFLMEFTGIYHEPLAYHLHKLGMTIFVVVPNKARDFARYEGIRTKTDEMDARSLALLGCYCRKLRPWFPPKPIFKELRQMTRFAVDITKIRTQIVNHIEALNHGQTPQKSVVGFYERFIADIDRRLKENEKNIIAKVDTDKELSETVSRLETIKGVRFLTIVSILAETDGFSMITNRKQLTSYAGLDVVAKQSGPQDPKHRISKAGNARIRAALYWPAITACHYNKQIQLSYGRICERNPNVKMIGVTAAMRRLLLLIYTLWKNGETYDPEKMK

SEQ ID NO: 425122 - protein, 316 aa, unidentified
MSESTVEKFVGIDVSKTALDVCVQPSGQALHVAYDEAGIGRIVECLQEARPALIVMEATGGLEIRLASELASAGWPVAVINPRQARDFAKATGQLAKTDRVDALVLAAFAKAIRPQARPLKDADTRALNDMVSRRRQLIAMRVQETLRLGTAASRPLQKSLNKHIAWLDKQIAEVDGDLSKRLRGSDVWRAKDDLLRAIPGVGAITSLTMLAKCPELGTLNRREIAALAGVAPLANDSGRHRGKRFIWGGRAEVRAVLYMATVSAIRCNDTIKTFAERLKKAGKPPKVVIVACMRKLLTIMNAMLKNNAAWDPKIA

SEQ ID NO: 425123 - protein, 414 aa, unidentified
MESSYRIAGIDVHKKMLAVVVTDLTQGTEFHFERRKFGALDSDLCALAEWLNEQQVREIVMESTAQYWKPVWRHLEPEYKLYLAQAQSNRAPRGRKRDFTDAERLVRRHVAGELILSFVPDPEQRLWRIATRTKNQLTGDRVRLQNQLEALLEDSRIKLGSCVSDLLGLSSRRMLKALAGGERDAAKLAGMAEPELRASQEQLQDALRAAGTLNDLHGQILRLFLERLELIEQQMAQLDQSIAAALHTHQSAVQRLAAVPGYGVDSAQQVIAEIGPQAATFPSPAQLASWVGVCPGREESAEVSKSNRCPKGNRQMRRILAQVAQAAARTKGSIFQGLYRRLLPRLGHGKAIWALAHRLCRLTWKILHQGVEYKELGQQMNPKLVRQRTNKLTRQLRALGYDVQLTVLSPNAQA

SEQ ID NO: 425124 - protein, 317 aa, unidentified
MTNQNVEKFIGMDISKTQIDVAMQGQKKTWAFSNDAEGISKLVTLMKKVRPTLIVVEASGGLEQPVVRALYLEKIPIAIVNPTRVRDFARSTGQLAKTDQLDAKVISRFAQAVRPQVRPLRSAEEEHLDALVTRRRQIVQMLTAEKNRRSTTHPELLTRLQSHIAWLEEERKSLDTAIEDFIQKNAEWKEKATLLRSVPGVGPVTASTLLAELPELGTRNRKQIAALVGVAPINKDSGPKKGKRRVFGGRASVRRTLYMATLVASRSNPVIRTFYERLLASGKEKKVALTACMRKLLVILNSMIGHRRSWQADFASN

SEQ ID NO: 425125 - protein, 339 aa, unidentified
MSVLIGVDPHKRSHQAVAVDRDERRLAELNVRAAKDQTQRLLAWAAQFPDRRWAIESAAGLGYLLSQQLVAAGEEVLDVPATLAARVRVLGSGRSQKNDPNDAFSTAIAALRQRGLRQVRADDHRAILRMLATRHHDLGALRTQAACRLHASLAALIPGGFSGRLSAKRAGSLLRGIRPTEGVTAERKAQASELVADLRRLDAAIAATRKRIEVAVAASKTSVTDVYGVGPVVAAIVVGHAGDVRRFWTRNHFASYNGTAPLEASSGPRKRHRLNPRGNRQLNHAIHMAAVTQIRNDTPGRAYYERKLAEGKTKKEALRALKRRISDAVYRQLLVDTDR

SEQ ID NO: 425126 - protein, 374 aa, unidentified
MVDDTALYVGLDVSKEKIVVDLAEAGRNGEVRYYGEIANRADAVRKFVDKLAGRHERLCFCYEAGPTGYGLYRQLSGLGHECLVVAPSLIPTRPGLQIKTDRRDAVALAALLRAGELSSIWVPDETHEAMRDLCRARETAVSDLRRARQHLLSFLLRHGRVFEGRSHWTKAHRNWLAAQRFDHRAQQITMEEYIRAIEQIEERRERLTQQMLAFLPDWSLNPVVEAIQALRGVAQISALTLVSEIGDFRRFSNPRQFMAWLGLVPKEHSTGASVMRGSITKAGNTRARRMLVEGAWTYRLPARVGQEILKRSEGLPEEIRAIAWKAQVRLCQRYRRMQAGGRPTNIVIVAIARELAAFVWAIATTIPVTPTKAI

SEQ ID NO: 425127 - protein, 324 aa, unidentified
MIDAVLGIDVSKNTFDINLGAGTKARSKSFANSPDGWHHLIAWLGEYKIGQVHACLEATGRHGLGIALALHEAGHVVSIVNPAQIRDFARTKLGRNKTDQVDAVHIREYAELFKPRPWTPPSPAMRRLCELQTIRAGTVAGLTEWKNRRGSGITDDLARSLAETTIQHFTSQLEAVDQAIAETIDNDVELSAKRDLLVSINGVGKALAGIVLAELPGPDILGSSAAAAAYAGLNPQQHQSGISVNRPVRISKIGNAVLRTALYMPALSAMRYNPAVAALVDRLKAQGRLKGKQIVIAAMRKLLVLCFGVLKTGKEFDPAMAMGK

SEQ ID NO: 425128 - protein, 363 aa, unidentified
MLYLGIDQHSKQITVCVRDEAGDVVRRRQVSTRPEKIQAFFEQLTQMDSDFMAIVEVCGFNDWLIDTLKEVKCAEIVLVHPNKPSKRKTDRLDANKLSESLWTNRERFKNGERLNGLRRVYIASKDVLDSRQLTATRKRLGELLTRVKNRIHRILHRHNLMWEYPTKTFPTKAGRKWLAEVSLPRIDRMEMDILLDQWNLFDEQIAQLQGEIEARAQYHQPGEIISDAELLATAPGLSHYSGLALASRIGPIERFARPASLSNFFGITPGCRNSGNAKHRPGSITKEGSSIARFHLGQMVVHVLKQDEFIRKWYRKIKARRGSKIARVAVMRRMTTVIWHMLTHKQPYCFGGLPPRPGIASRL

SEQ ID NO: 425129 - protein, 330 aa, unidentified
MNTTTPVLLALDIGARKHAFASEHDGRRTVGTVANDPQQLRAFLKDLMRPNGTLQVLMEATGIYYLDVALIAEELGAQVSVINPRTAHNFAKALGQRSKTDALDAVMLLDFLKRMPFTPWQAPAKPLLELRHYGRYLVQLTEESTAARNRLHALSSTTSSPAFLRADLKRSIASLERRIERIRAQAMALIKADEWLKMRLDAMLTIIGVAEVSAIALLSELAALPSSLSGRACVSHAGLDPRLHESGTSVHKPVRISRHGNKYLRRALFHPAMAAAQHDPMAAAFRQRLLDKGKKKLQAVVAIMRKLLTAAWALVRNPATYKPEKLYAGA

SEQ ID NO: 425130 - protein, 371 aa, unidentified
MKQQTKSSNITVGLDLGDRRHRFCALDERGEVVEQDSICNDRVSLRKLAGRYHGALGVMEAGAHSPWISRFLEALGWRVVVSNPRKVRAIYQHERKSDQRDALMLARIGRMDLALLYPVRHGTAEAQQDLLRIKLRDSLVRARVAVINSVRFTLKSLGYTVRNPSSERFHKVVMEEVPESVREMITPSAQALAELTARIKMLELEINTLAQLKYPQSAQLQQIPGVGPITALYFVLKIEDPNRFAHVRDVGAYAGLCPRRDQSGESDPQLRISKRGDAYLRRLLVSAAHYILGPFGPQSALRAYGLMLAADGTARAKKRATVAVARKLAVLLLSLWKSQQPYQPFPGACLNGKQEDRRSGTIALHRMEATD

SEQ ID NO: 425131 - protein, 323 aa, unidentified
MIYLGLDVSKDTVDAQIGADLRYTYLKITNDAAGWQLLVDTLRALPDQDVHACCEYTGIYYLGLARAIHAAGYKISVINAYSIKAFAKMMMARAKTDKKDAQLIAQYCQTNKPRAWSPPSGDVADLKALNRRLHQLNKMRTMENNRLQVAEEICAASHRAMLLFIEEQICETRAKLNEMIAACDERRRRQKRLQTIPGIGPVTAAALQALLVDVEKFPTAKHFISYIGLSPVIRESGKSVKGKVRMSKMGDAYIRAVLYMPARSACLRSRAFRDWARKKMQAGKPPKVVYAAMMRRLATFAYYVVRNDEDFKLPPGCGGDAPV

SEQ ID NO: 425132 - protein, 415 aa, unidentified
MCRTRPGPERGRSTVWMVPATLGAVRALAAQLAGQGIEKVTLESTSDYWRIWFYVLEEAGLDVQLVSASQAKQLSGRPKTDKLDAVWLARLTEKGLLRPSFVPPAQIRALRHYTRARTHLTGDRTRCWQRLEKLLEDSLIKISAVASTLNTKSVRDMLQALIAGERDPRVLAGLARGRMKAKHAALAEALAGMFEDHHGELAQLLLDQIAFLDERISQLSARASQQLASIREAWGIDTDGTTGPDAGTGPGPTVLPATARLDEIPGISTEMAATIIAETGLDMTRFPTAGHLVSWAGLCPRPVQSGPRTRQAKGQGSTYLRNTLGQAATGAAKTTTFLGERYRRIARRRGGAKAQVAVARSILVIIWHLLADPTARYTDLGPGYYDTTINKNRKAHSHIRQLQALGYTVTLTQAA

SEQ ID NO: 425133 - protein, 465 aa, unidentified
MSRQHTSSKYQSQSGKTKKRIAAHLEKINLFAAGIDIGSRSHFVAIPEELDDQPIREFNCFTGDLEAMADWLVRCGINTVVMESTGVYWIPAFEILESRGLEVKLVNARHVKNVPGRKSDVLDCQWLQHLHTFGLLRGAFRPDDQMCALRSFMRQRDNLVRYRASHIQHTQKALRQMNLLLDNVVTDITGQTGMTIIRAILSGEHDPQVLASYRDKRCKKSENEIAKSLKGNYRPEHLFALRQSVELYDTYDEKINACDVALEQQLNKFDSAGSPPGSPDSGSSAKRKSRSAPGFDVRSELYRVAGVDLTKIDGIDEKTALKIVSETGLDMSRWSSVKKFTAWLGLCPGTHISGGKVLKRATKRIPSAAACALRMAAFGLMNSRSALGAYCRRMRSRLGAPKAITATAHKLARLYYSMLKHGSDYVDKGQDYYEREYKDRVMKNLKNKASELGFTLVPVEPTMTG

SEQ ID NO: 425134 - protein, 397 aa, unidentified
MYIVGIDIAKRKHEAAVIDGDGAVIIKPFSFTNNCSGYNRLLAMLAKAKLPLDEVSFAMEATGHYWLALFTRLQKEGFRVQVINPVQTNSIRSFYIRQAKTDPRDALLIAEVIRFGHFSESTLHPENIYELRELCRGRHAIVSMQADVKRKVVALLDQVFPEYETAFTNLFGDTSMAILQTCPTPKELSEMPLEELCHLIEVSSHKRFRMAKAQELQVLARNSFGFAMAGDVFSTMIRLYAKHLDFLKQQVREMDRKIAEIMDTLDTPITTITGIGPTLGAYILSEIGDISRFSSAAKLAAYAGIDPTMRQSGEYNGVRNRMSKRGSPYLRHAIWLAASSAVLHDPALKLYFQKKRDEGKPYMASVGHACRKMVSIIYAVMRDNKAYTPYIPNEISA

SEQ ID NO: 425135 - protein, 419 aa, unidentified
MSFKILKNNCCGLDVHKTWIYACIGITDSFKRTEYKQARFSSFTKGLQELCLWLAKYNCIDVCMESTGKYWIPVFNVLEKNNIFVTLSHPKYTKPQKGNKTDRKDAKWICDLYMCGMVKPSFIPPADIRQLRDLVRYRFKLTCMITGEKNRAHNCLTVSNLKLDDVFSDIFGKSSRSITEQILQHPGEVFDIAPFVDSRCKTPIEEIQAAVDGAISHEQAVKLRQCLKHIDELEMHKAEIEREIFRLSQKYESVLDLIRTIPGFDKNPLTAIQVLSEIGADMSVFPTAKNLVSWAGCCPRNDQSSRKIKSTRISRAGSYFKPVLVQIANALIKSKKHPEFTTRYRRIKARRGHKKAIIAICRMILTAIWHILTDLKPYTPEGFLESRPVNKEKVLTISQALNLIKQRGYIIKDDVGPVT

SEQ ID NO: 425136 - protein, 411 aa, unidentified
MLEVKVEKCAGIDVGKKFLAVWVLIGLANQKPVGEVRRFGTSVKELERLRAWLLESGCTEAVMESTGSYWKPVFNILEGSLKIILANAEQVKALRGKKTDPNDSRWLASLLRHGLVQGSFIPPRDIRELRDLTRRRRRLVGDGAAERNRVQKVLEDANVKIGNVLSDVFGTSGQAMLEALLENKRSAAEIAELGHWSLAPKIPQIVEALEGHRMSDDHRFMIRQSLRHMRNIEEMIEELDKEIAVRLKPYQQQMKLACTVPGIKPTAAASILAETGMDMSPEGPFPDCHHLASWGTVCPGNNESAGKRKSGRTRQGNRWLRATLTQTAWAGAADKKSLFQMRYQRLKLRRGGQRAVIAIAHAQLIAIYWALRNGTPYPEQVQRLQEDRREAQIRHHLQRLTKLGYEPNMHG

SEQ ID NO: 425137 - protein, 328 aa, unidentified
MIEQDKYILGIDISKKHFDVALLLPNGKRKNKKFTNNPAGFEILHSWLNKFEVTLMHACLEATSTYGHMLAEYLFDQGYDVSLVNPARIKGFAQSELLRTKTDKQDASLIARFCESVQPALWVPESIKIRELKALVRRLDSLIEMKQQEVNRLDVSNQVVTDDISGHIELLTTRIESLRALIRKHINDDPDLREQKDLLLTIPGIGEKTVATVLSYFAMIERFDNAKQLAAFCGVAPCQRQSGTSLNRRGKMSKVGPSQLRKALFLPAMVALRYNPLMVHLNERLTKAGKPKMVIIGAAMRKLVHMIYGVLTSKTPFNPNMGMKLVAD

SEQ ID NO: 425138 - protein, 338 aa, unidentified
MNRKFYVGIDVSKKTIDVAFIAQSGEQKTEPRWKVFDNTDPGLHQMKTWLNKESVTLDANTIFVIENTGLYHRRLVSFCNKHQIQLCIENGAQVKWSLGIARGKSDKVDSRRLATYALRFADRLKPAAALHEGIQAVKDLITLRNRHITQLSALRSNLKELKLTTDPAAVKELEKIHKPLITATKNTILKIEAALLKKIKSNELTSRQYELLLSIPCIGPVTAAYLIACTNAFTLCETGKQLACYCGVVPFEYQSGISIKGKHRVHKMANKNLKALLHLCAVSSLRYVKELRAYYDRKVEEGKHKMSVINAIRNKLVLRAFAVVKNGKPFVNNCISAA

SEQ ID NO: 425139 - protein, 356 aa, unidentified
MTEAYDGRQVVGMDLHRQRSVLVRMTEDGRKLETVRIENSPRALRGVIARAGENPRVVVEATYGWYWAADVLAAAGAEVHLAHPLGVKAFSYRRVKNDERDCADLADLLRMGRLPEAWIAPAEVRALREVTRYRHKLVQQRTSCKDQVHAVLAKSGVPVTRSDIFGPGGGIWLDGLRLPQPYAGKVASLRALAGVLDGEIARLGQQAEGMLAGDRGYAAIRELPGIGPVLGAVIVAEIGDITRFAKPGQLCSWAGLTPRHHESDTRVIRGHVSKQGSRMLRWALVEAIQHQPAGTRPRDVKDAIIARRGKEARSIAKTAAARELLTLVFYGLRDGEIRCLARRSRTSAKEKLAVPA

SEQ ID NO: 425140 - protein, 345 aa, unidentified
MKIVGCDLHTRYQQIAMLDAETGELVERRLEHESGEARAFYAGLAGPVRVGIEATGHTRWFERMLGELGQELWIGDAAQIRASVVRKQKTDARDAAHLLDLLLSDRFPRIWRPSLEERDLRQLVWHRQKLVWMRNAVGNQLHALAMGEGVCRKKKLFTKKGRVELEGLKLGRWASHRRQELLTMMDQLDASMKELDQAVAEQAEQNQSAMLLMTHPGVGPITSLAFVLTLGPVERFERSKQVVSYLGLNPREHSSGGRQRLGAISKQGNPMMRSLLVEAGHTAARLDSELRQDYQRLKLRRGSGVAKVAIARKLAVRMYWMLRSPASYAQLVRMQGSPRGTLVGQ

SEQ ID NO: 425141 - protein, 391 aa, unidentified
MSQYFVGIDISKYKHDCCIINAADQSIVAKFTIRNDKDGFNELLTSLQSLSTPEDIRIGFESTAHYALNLELFLEKAHHSFMEVNPVLISEYKKSTSLRRTKTDSIDCESIARWLMTIEYKPHSKGFYHAYSLKSLTRLRDRLIRQRSFYLVKITNVLDHTFPEFKPFFQERFSKTALYLLENYGSAEKMAHMNSASYDNLRRISRGKFTPQKFIELKALAASTVGVNNSIFDTELSCLLTLYKEAAKQVSVLETQITELIEEVHPHYMSIPGIGPLSAAVIYAEYGDISNFSSPAQMLAFAGLEPGISESGTESHKGRMVKRGSSQLRYTLMNCALPLIRFDMTFATYYAKKRSEGKPHRVAISHVTKKLVRVIFALEKQNTDFVATSLH

SEQ ID NO: 425142 - protein, 376 aa, unidentified
MKEFNNIYVGLDVHKATIAIAVARGVRGEVTYHGEIANTPSAVRKLVKQLSANGEVLNVCYEAGPCGYGLHRGLTAMGHECEVVAPSLIPRKAGERMKTDRRDALMLARLHRAGELTAVWVPDQEQEAIRDLTRAREDMKAIELKARQRLGAFLLRHGRVYEGKSRWTRAFFRWLETVKFDVPVQQIVLQGYIDTVKEAQRRVSGLEAQMSEALEGWSLGPVAQALMALRGVSLIAAMTTLAELGDITRFDSPRELMGYLGLVPSEHSSGGTRRQGGITRTGNGHVRRVLVEAAWSYRFPARKTYCIERRAEKTSEPVQAIAWQAQKRLCGRYQALIQAGKEKNRVTTAVARELAGFIWAIACESLGKAHGSKALA

SEQ ID NO: 425143 - protein, 411 aa, unidentified
MHYKQQHIYIGVDLHKEHHTAVIIDCWNEKLGDIQFDNKPSAFPKLLKEVEKYKEKGITPVFGLEDVGGFGRALAVYLLEQGQIVKEVNSALSYLERKSYPTTQKSDLWDAECIANIVLSKLNSLPTANPQDIYFTIGQLVTRRNALVKALTALKNQLHIQLSYHYPSYKKFFSQVDGKTALAFWERYPAPHSLNGVSNQDLTSFLLEASSNTCSTKKAKEIKTLIQEDGNTAGDYQEARDFLIQSLVRDITFNKKEISYVESELKQVMGLLDYKLDTMPGIDLVTSSALVAEIGDIHRFPNSNKLARFAGIAPVNFSSGGKGNDKKSKQGNRTLHGLFYNLAVQQVQVSKGSGIPRNPVFYGYYQRKLEEGKTKGQALVSIMRRLVNIVYGMMKNKTPYQMPAHTEEKAS

SEQ ID NO: 425144 - protein, 415 aa, unidentified
MTDQITIPQKRFIGLDVHKHYLIALGVDAELNVVLPAQRVELFRLEAWMKKTLTKQDAVALEMTTNTWEIYDELSPCAHSVTVVHPPHVALITRSQVMNDKMAASILARLLAKGLLVSIWVPPVEVRELRALVAQRSKMTRLATQAKNRLHAILQRHHIVPPEGNLFHADQTEWWCALPVGKLEKINLQSDLDTLRFAETQLTRLASTMNQLAVKDERVTRLIHLPGFGAVVALTVLAAIGEIARFEDAKHLVGYAGLGARIHDSGLTTRTGRITKAGRRDLRAALVEAAQVAANSHPHWRAELARLEPRLGRNKAIIAIARKLLVAVWFVLSKQTTDRFAQPEMVARKLMQFAYKVGKHNRPVNQSAAQFIRQQMDALQIGADLSAIPWGTKKRSIPLPPSALLENKMSDVPNT

SEQ ID NO: 425145 - protein, 362 aa, unidentified
MKKTIRERESEWKEKPDRTVGVDLGDRFSHYCVLNGDGEVMEEGRIRTSEEAFRRHWEAEPRQRIVMETGTHSPWISRLLRGFGHQVIVANARKVRAISENESKNDRQDAEMLARLGYCNPRLLKPIQHRSAERQRDLNLIRARDTLVRARTMLINSMRGLVKSAGGRLPPASSESFATCVSAAVPAELGTSTQPLLRQIAGLTAEIRELDQAIEKLTERYPEIRILRTVPGVGPVISAAYVLTLDGVDAVEHSRSVGAFLGLRPKQSQSGDSDPEHNISKTGNIYLRRLLVQAAQYILGRYGSDSALRRWGLKLAQGGKRTKKRAVVAVARKLAVLLHHLWRTGQNYRPFPEAAVAAGSAA

SEQ ID NO: 425146 - protein, 428 aa, unidentified
MNNEDIFRWKQFCQIKSEIRGSDDYLVVGIDVAKDKHHAFMGTANGKSLLRKLIFENNLNGFRKLLERSDAVSAQNTLCKVVYGLEPTGNYHKPLGAHLIRCGSHVVLVTGKAVKNNRELLDGRWDKNDDKDAANIADLVSRGRCLYYDYPSDSINQLRQLLSLRRRLKKEEHSLRMRIRNNLLAQYFPEFDRFYSACESESLAIIRWCLDPSTISCLEFDEFFSMVTTTRRGIAQKQRLQKIHRLAVESVGCPMGPAAEFEATLLVDKLKYVRRQLKEIAELMEDFCMEFTEYSCLLSIPGFGPYISARVLASIANPWRFDSSNQVIKLAGYDLGANRSGKRSNEAVPVISKRGNGELRYALYQAAHVASSRNPDFIRYYTRMLRGRERERGIKTKMKVKLAAKMLKIAWTLMRKQEVFDPDHLIIE

SEQ ID NO: 425147 - protein, 338 aa, unidentified
MAVKVIGLDTAKHVFQVHGADSSGRAVLKKRLRRNQIADFFANLPKCLVGIEATHGAHYWARVIGSFGHEIRLIAPQFVKPYLKGQKNDARDAAAICEAIGRPEMRFVPQKSIEQQDLQALHRIRSRLIGSRTQLGNQIRGLLAEYGIILPLHLSHVRKQLPELFSEEHPLLTAFSRELFASLYEELCALDQRIQAMEARIQRVFQNNDQCRKIATVEGVGPLIATAMVAAVSDSKVFRNGRQFAAWLGLVPRQHSSGDKQRLLGITKRGDPYLRMLLVHGARSVVYRSAGKTDRRNQWIAEKQRKLGTTKACVAVANKNARIIWALLAKDEPYRVAA

SEQ ID NO: 425148 - protein, 351 aa, unidentified
MSKVYIGIDLAAKCCWGAARDEEGELLNSEKFKTSEKNLVAYVEARGGEATVLLEECDLAGWAQRVLIGHAEKVAVCEPRANLWIHRDAVKTDKIDAAKLADIARLGNYKEVYHTQDERIYELQVAVRAYDRLVARATAQKNQIKAELRGEGVICEGARVFGKRGREEALGMVRSPLLREVIAAEYEYLDFLLRSQAGARGRFVRLGSEIGIVRAWQEIPGVGPVTAARFCACIKCPHRFAKKGQLSRYSRLGVTQHETGGKAIRRQRLDPSGCGALKDVSNKAFRAALRTRGDNLTKRAYARSLAVTGSEDHARLNVQRKILAIMWAMWRDGTAYDDDMDMKNGACGARS

SEQ ID NO: 425149 - protein, 361 aa, unidentified
MSESMALVGLDVHKSRTVAAVLDPVTGELRMQRLRGEPERVVPVFLEELDRPVAAVYEAGPTGFVLARVAEQRELDIRVVAPGSIPRAPGDRVKTDRRDAKRLVRLLAAGELGFVFVPSEADERFRDLVRCLDDVRRDLMRARHRLSKFLLRRGVRFQGKTWTQQHERWLCALHFEDPLSQAVFVDYLCAVQGLGQRRKTLIGVLEGAVPNSSHAETVSRLRCFRSIDTLTAAGLCAEVGDFTRFGKPAMLSGFLGIVPCEYSSDGRRTQGQITKAGPSNARRLLVEAAHNYRHRPRVGEKLKARQAGQDPRVVEIAWRCQRRLHGRWLHLAAKRGKPAGTVAVAVARELAAFCWEAATLN

SEQ ID NO: 425150 - protein, 346 aa, unidentified
MKNNTPKRAVKVLGIDLAKKSFQLHGVDKHGHVVLTKKLTRAKLKAFVAQMPACLIGIEACGGANYWKRVFESYGHTVKMMAPQFVKPYVKSNKNDAIDAEAICEAVQRPSMRFVPSKNIEQQDIQSLHRIRSQVVARRTAQANQIRGLLMEYGIIIPKGIAYVRKEIPGILEDADNELTGLFRSLLSELYDEMVHLDERLEKLEDELKIICRDNVHCQRLLTIPGVGLLSATALVAAIGDISTFKSGRELAAWLGLVPRQHSTGGKPTLLGISKRGDSYLRTLLIHGGRAVVRVSGKYLDKRSLWIGDLEKRRGNNITAVAVANKNARIAWALLTNQTSYQASVN

SEQ ID NO: 425151 - protein, 406 aa, unidentified
MRKEVLAVGCALMVFCGCGKNNAAQHYESGWAAMEKKDYTTAVNEFQQVIDQNSRLAESYRAEGIAYYSEKAYPEAIAAFSRSLNNMDDPDKEFKKDVQFYLAQARMDYGEVDKAGFCGFWIHERLTALGIDNIVVNPADVPTKSSEKLRKSDAVDSGKLARGLRANELKGIYTPDSVSLEMRSLIRLKNSITKDTTRQKNRIKSQLRYLGIGIPQEFLEPFSNWSKRFFAWLKEVETLTPSGRQALDIQIRHWEELRRQKLEMTRALRTLAKTDRFREPLRLIMSIPGFGQATGMAFLSEICDITRFRNAEQLAAYIGMIPMCHSSGEKDGTGDITLRKHAVMRCNLIEAAWVAVRQDPAMNLFFTEQCKRMPKSKAIVKVARKLVNRLYFVLKHQTEYVNSVVS

SEQ ID NO: 425152 - protein, 459 aa, unidentified
MRKKVQNHKKRKQKIAMDQAWPLINPNAAGVDLGSREHWVAVPEGRDAQSVRRFGTFTSDLEELAEWLKKCGVTSVAMEATGVYWIPLFQLLERRGFEVLLVNARQIKNVSGRKSDVLDCQWIQRLHTYGLLGASFRPADPYCVVRSYLRYRDELVAARSTQTQHMQKALQQMNVQLTQVLSDVSGLSGLAIIEAILQGERHPLKLAAMVDRRVKSTQDQIAKALIGDYRAEHLFQLKTAFELYHTYEAKISAADEELVRELGNLPDRVDIKLKPLPAKSHPKAIDENLRTGLYLKLGVDLTAIEGIGALVALTTLTEVGPDLSRFKTEKHFTSWLGLCPDNRISGGKVLSCRTRRVVNRLSDALRLAATTLERSQTALGAYYRRMKAKLGGAEGVTATAHKLARILYRMLTHGDEYVRQGMEEYEKKHQARKLQALQKAAESIGLQLVEKQKVAEAVS

SEQ ID NO: 425153 - protein, 346 aa, unidentified
MSKITRIGLDIAKNIFVLHAVNEHGKTVKRQTLDRSKLLAFFAQTEPCLVGIESCATSQHWAREIAQFGHTVKLMNPKFVVPYRKNGKNDANDAEAICEAVGRPNMRFVPVKSVEQQAVCSLHTSRQFLIVQRTALINHCRGILAEFGIVMPVGADKVCRLLTEKLNQESDMIPVMLRVLMQDHLLDLKRLEERIDSIDKQLAQWAKQNQQAISLQQMRGIGVITATAFASGVCDAKLFNNGRQFAAWLGLVPRQYSSGGKNKLGSITKTGDAYLRTMLTQGARSLVFHSKDKEDNFSLWIQRLIARIGMNKTVIAVAAKQAKIMWAIMAKNIKYQPQRICSPLVA

SEQ ID NO: 425154 - protein, 411 aa, unidentified
MDKVYDKCCGIDVHKKLIVACFRKGSKQELRNFGATTRELLELANWLQNGGCEMVAMESTASYWKPLYNILESSELKAMVVNASHMKAVPGRKTDTKDAEWIAELLQHGLLKASYIPDKQQRELRELVRYRKSLVSERTRELNRLQKMLEGANIKLSGTVSDINCMSARNILEYLLTGEFFDGAKYDEMYKQKIIAHNLKASKEQLIDDLNGVMTPLQRRMMKELLSHLDELNVHINNLEDEIDNFMKPEEKKATQAIQDVTGIGKNSSQAIISVIGTDMSRFPTAGHLAAWAGLCPGNNESAQKRKTGKMRKGNALLRSTLVVCAHSATRNKNSYFYAQFMRISSHRGKKRAYVAVAHSMLIAIYHILKDGVVFKDLGADYYNQFNKERKINAYLKKLKALGWEVPVVAA

SEQ ID NO: 425155 - protein, 374 aa, unidentified
MRKSSKVFVGMDVHKESIDITLAEAGGEVRRWGQIGGDRAALVKAVRKLESLGRELHFVYEAGPCGFWIERLLAACGHTCWVVSPSLIPKKSGERVKTDRRDSEKIARMARAGELEPIYVPDEADEAIRDLVRARDDAIIAQRRARQQLKALLLRNEVRYVGKSSWTAAHRRWIAELKLPQPAQQIAFEEYVDAVEVASNRVERLTRAIERSTEGWRLAPVVAALQALRGMQFVHAVTLIAELGDLSRFETARELMAYLGLVPTENSSGQQRHQGAITKSGNRFARRALIEAAWAYQHPARVTPIIARRQTGLPKSARDTAWKAQLRLCARFRKLCARRLNKNKVVVAIARELAGFVWAIAKEVKITAGPTNNA

SEQ ID NO: 425156 - protein, 429 aa, unidentified
MKIIYPRVCGIDVHKKFIVAVICISESVEPIYLKKRFSTFHNDLIRFREWLIQNDCQNVCMESTGKYYIPVYNVLESHISNIVVANPKWVRAVKGEKDDDKDAKWIADLFKFGIVRSSFIPQKDFRILRELTRYRYKLVNMRSSEKNRFQNALTSGNCKLDMVFTDVFGKSASNIIDLILSDNPYTDEDILSKVHKKCKASPDMILDSVNGTDLTPAQKARIELVNDHIKQLSSNIQKLDKLIDLMIEPYEDYISFLCQIPGVSRNSAIIILSEIGIDMNQFTTSRRITSWAGLTPSSNQSAGKKKSVRISRAGVYLKTCLVEVAHAAVKDKNHSYYANKFNKISKRRGKKRAYIAIARKILVAAYHMLLTGEIWNPADLSEVETPVEQRLKYVKNNLKSDIKQLLDIGLTVEELTLMIQQNANIIATQ

SEQ ID NO: 425157 - protein, 362 aa, unidentified
MKKFTAKNEKVYIGFDISQKKIAVYAVCGDVSCKNEVTIANDRNEISRFLSQFNDPRKVCVVMETGTHSLWMSRFIESLGFEVIVAHARALRLIYAADKKNDALDARHLAELAQLNRNLLHPVKPINEERQRDLVAVKARDLLVRQRTGIINTIRGHLRALGLSDKMLTVDNIASGAADLPESVKPLLTPLFQQLHYLALGIKEYDRQIRQLCKKYPETKLLRQVTGVGEITALTFALLVGNPQHYSSGKRVSSLFGLVPRQDQSGEVDKQLGITKSGNPLMRKLLIQAANYIMGNFGPDCDLRIFGQRIAARGGKIAQRKSKVAVARKLVTVLYALWKNPEISYDPHFKATRKNCNRIQSA

SEQ ID NO: 425158 - protein, 394 aa, unidentified
MKLVGIDVGKNSHHFCVMDKETGEFNVTPSSFSNNKEGFDFLINSLKPYSKKSILLGMEDTGHYHVALLKFLLSNGYTVALINPKTTDLTRKMEGGITKNDKLDTITICDVLDTPERKKQYRITKVDRFDLYEQRQLTRHHHNLKEELNIYCNRLQKSIDLVFPEFNTLFGSKYGVVYMNLLKTFGSAEAIVSTDIRTIRKCFEIKGRGGRISLTAEKLKECAKNSIGISSEVETIQIKHLVSQITLIKEQIAEIDKKIEEFSIKNNSPILSIPGISHFSGTSILAELGDIGNYSKPSRIIKFAGVAPYHYESSQYNAQHTAITKKGSKYLRKTLYQVILPVINNNPVFKKYYRLKISQGKGHRCAQGHCIRKLLRVIYHLLETGQSFDPALLR

SEQ ID NO: 425159 - protein, 445 aa, unidentified
MDLCHRCIALTIKGDSYHSSYFLMSISKLALDASSQDYINKKSVTYPVLKLYFGGVFMYLIGLDISKYKHDCFIATEAGVPLKAFNFENNRLGFDSFLKTLKSLDQSKEIRIGLESTGHYGANLKQFITTSGYTYLEFNPYLTHMFSKALSLRKTKTDKVDAKTISSMLGSVDYKTLHTRFYHINELKQLVRYRHIQMVNRSKTLIEMTNILDRIFPEFKPFFNERLAGTAIFILKKFKSVARISKLSNKDYETIRSYSKGKISYVRVQKLKLLAKSSVGYETQSDLLLLKHSIKHYEDLSITLDSIDEEILSLMKDIPQTLTSIPGVNLISAAMIIAELGDFKNFTNPAQIVSFSGLDTSVNQSGMMETRGHLVKRGSGLLRMTLWQITFSGLRLNPKLYDYYLKKRTEGKHHKVAMVHCVRKMIRVIYYLSVNQLTFDYSQFR

SEQ ID NO: 425160 - protein, 355 aa, unidentified
MTSTKKYVGMDVHKESISIAVMNSVGKIVMECVLETKASMILQFINGLRGDVHVTFEEGTWAAWLYDLLKPYVSEVLVCNPRKNALLKDGSKSDRIDARKLAELLRGNHLKPVYHGEHGLRTLKELARSYLTIPKDVTRVMNRLKALYRSWGIPCAGNKVYTPRHRSEWLGRISEAGVRRRAEHCYQQLDALRLLHQQVRRDLLLESKKHQAWRLLGLIPGIGPIRAALLIALIQTPHRFRTKRQLWTYSGLGLETHDSAQYRVVEGQLQRSKKPVTLRGLNQDHNHDLKDIFKGAATRVSSSGPLHDFYEHLLAQGRKPTMAHLTLARKIAAITLIVWKKEVHFDASYLTSQAA

SEQ ID NO: 425161 - protein, 345 aa, unidentified
MQYKSMKKVFIGIDFSKLKFDAAIYSIDTKAIVSTEVFENEQSGYDDFLKWVKENTHCQKSGMLFCGEHTGYYSCNLSVFIHDSGYNMWLVLGLEMKLSQGIKRTKTDSVDACKIAEYAFRYQDKTVLFQPPTKALDEIRELLSYRERLVETRKVLATSGKEMKRVKNNASCDFIYQDSLEYIQSLGSSIRDCEKRIEVLIKQDISMRTNYKLMSSVVGIGLINSALILIATANFTQFSNARKFGCYCGVVPFEHSSGSSVRGKTRVSKVANKKLKTKLTLAAQNSVRYDPELKEYYQRKISEEKNKWLVLNNVKNKLIHRIFAVVRDGQMYEKQYVHPLKQQAA

SEQ ID NO: 425162 - protein, 339 aa, unidentified
MNRIVVGVDIAKRVFQLHWVEWQTGEIVMLQLKREKFLEHFANRSSCVIGMEACGGSQHWARSLQKLGHEVKLMSASMVKPFVGGNKNDAADARGIWTAMQQPGIKAVAVKSEEQQAVLALHRMREQLVKFRTAQINGLRGLLSEYGEVMPQGRAGIKRDIPGALGRLADRLPAMVIESLREQYARVDALDEQISQIERRLRQWQRQDSASQRIAAIPGVGLLSATAASATMGDAKAFKSGREFAAWLGLVPRQTGTGGRVRLLGISKRGDKYLRTLLIHGARSVLTHSKSPPEWLREIVKRRPKNVAVVAMANKMARTIWALTAHERAYQSGYVNRPA

SEQ ID NO: 425163 - protein, 378 aa, unidentified
MSNCTRYLGLDVHAETITAAIAEGRGRIRSLGKFPNRPDAVRKLLEKLGGDRNLKVCYEAGPTGYALYWQLTKMGVDCEVIAPSLIPKKAGDKVKTDRRDAEKLAQSYQAGDLTPVWVPTPEHEALRDLVRQRAAAKADESRAKHRLVKHLLRRGLREPEESGAWTHPWWRWVQSLKFEHEAQQVAFADCIAEVLHMGERLARLDKAIDRLVESAPPHMRAVIEALQALRGVAKLTAVTIVTEVGTFKRFRRPTEMMGYTGFVPSEYSSGGRESKGRLTRAGNAHLRHVLGEAAWHARHRPWLNLRMKKVLPTLPAGVAEIAWKAQERLHRKFLRMTFCRKPAGKVAAAVARELVGFIWAIGTLVESRLEANTKARVA

SEQ ID NO: 425164 - protein, 459 aa, unidentified
MTRHKHQGNGLPSQLAAVNLHAAGIDIGAQEHWVAVPPGSDTQPVRRFGAWTADLEALADWLRQCEVTTVAMESTGVYWIPLFEVLEARGFAVVLADAREVQRALGRPKTDVQDCQWLQRLHTYGLLAAAFRPPEHICVLRSYLRQRAMLVTYTGQHIQHMQKALTQMNLKLQHVVSDVTSVTGMAILKAILGGERDPVTLAQLRDRHCQHSEAEIARALQGNWRAEHLFTLHQAVELYEFYHRQIAACDRQSETHLQTLPDQSGGKPLAAVPHRAKRRRNEPHFEARLPLFRATGVDLTALEGINDHTALVLLSEIGTDMSRWPTEKHFAAWLGLCPLHKISGGKVLSRKVRPSANRAAVALRLAASCLHHSQSAVGAFFRRLKARVGTPKAVVATAHKLARLVYRLLKYGEAYVAQGIAEYEQTYRERVVQSLARKAKALGYKLLPTTDDALQASSA

SEQ ID NO: 425165 - protein, 419 aa, unidentified
MIHPDAAGIDVGAKEHVVAVPCDRDERPVRTFQAFTPELHELAAWLKRRGVRSVALESTGIYWISLYEVLEQHGFEIRVVNARHVKNVPGRTKTDVLDCQWIQKLHSFGLLNGSFRPDQQIRKLRTYLRLRDNLVVSSTQAVHHMQKALFEMNIQLSNVISDIVGESGLRIIEAIIAGERDPEELAALCGTRIKASRQTVAKSLHGNWDEALLFCLQSALETYRFSQLKIQDCDGYIERHLAEFESRAQLPSSPKDLQAHLHRICGVDLTKIPGIKEQSAQIIISEVGLDMTKWNTEKQFSSFLGLCPNNSISGGKVLRRATRKVYNRAADSLRLCAQSLTHSKSALGAKYRRLRARLGAPKAVVAMAHHLARLVYRMLRYGDKYVEKGIEHYEKKLRQQRIKWLKKEASSLNLQLVVL

SEQ ID NO: 425166 - protein, 328 aa, unidentified
MSYFTGIDVSKEKFDIGWLRDVATGKKKTKVFKNTAQGHQQAADWLLKNIKAKAQEIVIVLEPTGVYHEALLYFLHDCGFKILLVNPGKAKKYAESINIIHKTDKLDAIMLAYYGHAQRSKLMLWQPEAPEVRELKVMIRRLDALEKDLQREHNRQEASQVSLSSDRVIESLKSMIEALAAEIKCLQQDIDNHINRFPELKRNRELLESIKGIGSVMSRELVYLFASKKFKSAKQAAAYMGLIPKLRESGKLKGRTTLSKIGSARIRAKLYMAAVSASMHNPDIKAQKERLLKAGKTKMQALGAAMRKLIQICFGVIKHQTEYRLQLE

SEQ ID NO: 425167 - protein, 343 aa, unidentified
MKLFVGLDVSLEKTAICVISEHGKIVKEAQVASEPEALLRWINDQDGAIAAVGLEAGPLSQWLHRGLSEAGQPVVLMETRQVKGALKAMPIKTDRRDAEGIARLLHLGWFRPVHCKSVSAQEVRAVLSARKAVQQGFITLEMSLRGLLRNFGLKVGTISRGRFEQRIRELAAGNPMLEAATEPMLSARSALRRELAGLERHVRQLAQEDPVCRRLMSMPGIGAVVALTYRSAVDDPDRFTSSKKVGPWVGLTPSRNQSGERDISGGITKAGDVNLRRALCQAATVMMHRGRATWLRTWAAKLARRRGAKRAMVALARRIAVILHRMWKDDINFRFDTPVIHAG

SEQ ID NO: 425168 - protein, 510 aa, unidentified
MANKLLAISRLKPGQVKTFQIRFALRHFAAGCDIDKPVGTYCVLYPTPEGFQAQVQQFANSPSGCKDALAWVLSHAEKHLPPDEKPLFIIESTGCYHQLPLKTFNDATEVVVVNPHRIKAILRADGKDDVKDALTLTKLVLSFDLKNSVLAVGAQKRLRKALRMKRKLIDNRTQVSNRIGSLLTENGLPLPNVVKVMTSSGRAICQAIAQGQTNRDLLMLLWQGKNLPASGLELVVQGQPFLQVLAAFAPTMSKKEVARLKEIYDALFYLPDLDQSLRHLLAQQLRLLEMYDQEIELIEQEVVLAIEAYKIELPGGGQRTAQEMIDLIRTAPVFSEESARMLVAEAGLNFPEIYGNADAFARNFGLTPGNSKSAGKVVGNAMVKGNHYFKPVIVQAATAFLRRQLEQVDNGWFLWLWARRYQQRTDAQHARIAVARKITRSVFFMCRHWQPYDDTQHRRLREDYALQTAKRLANTAKELSAADLVGLDAAAKLKQASFAINQALGPIPFK

SEQ ID NO: 425169 - protein, 398 aa, unidentified
MEVMDAAGRRLSAAKLPEGIAGIARFHAMIAAQLDPDADLDAPAGQVLIGIETDRGPWVQALIAAGYRVYAVNPLQAARYRERLGVSGAKSDPADAHLLADMVRTDSHQLRVVAGDSHLAEAVKVVTRAHKTLIWERTRHTLRLRSTLREYFPAALAAFEDLTDADTLELLAKAPDPVSAARLTTTQIMAALKRARRHHRDRRAGEIQAALRTEQLGQPAVVARAYAVAVRAQVAILGVLNEQINLLQEQVEAHFGQHPDAEIYTSQPGLGQILGARVLAEFGDDPTRYGDTRARKNYAGTSPITRQSGKKKVVLARYVHNDRLLDALGGQAFAALTRSPGARAYYDKQRDRGLGHRAALRQLANRLVGILHGCLKTGTRYDEATAWSHAQQDQQVAA

SEQ ID NO: 425170 - protein, 418 aa, unidentified
MTHPKMRYTYVGVDSHKDTHTAVFLDCFFDKLGAITFPNRPSHFATFLDDAQQYLQDGTTFMFGLEDTASYGRTLTAFLNKNGQPVKHVNSLLVAKERKNQTVTQKTDNIDAECAARVLLSRFSDLPNAVNHDDYWVLRTLVLRRGTIIKNNRILKSQLHTFLTQHYPAYRSYFENIDCKTSLNFFMKYPSPQTLQGVTVEELTPFLELHSKKVFREPKAQQILSTLEDTAVEMQHIRDMAVQSIIRQMQFNQSEQKEVEQALAQVLDGFGTTLTTMRGIDTVSAAQLLSCIGDVNRFASPAKLAKYAGIAPTTYASGKSDMKFANQRGNRELNSLFYNLSLRVTIAASHKRVLMNTYFHDYYHKKLSEGKTKRQSLKCVQRRLVNIIWNMLKYGTDYDNPDKVISVLEIEPTKKPGS

SEQ ID NO: 425171 - protein, 334 aa, unidentified
MSIVSTVGIDLAKNVFSVHGVDARGVVLIRRTVARAKLAQLIAQLPPCLIGMEACSGAHEWARRFAAFGHIAKLMAPKFVTPYRKSGKNDGNDAEAICEAVARPNMRFVPIKSIEQQSELTLHRVRQGFVEERTAMLNRIRGLLAEFGHVLPLRAAEVRRRVPELLEKLPTRVANCVRDLLEHAMRLETKALEYEREIRAHVRTNALAQRAQTRLGIGPLTASALVATIGNAHDFKNGRQFAAWLGLVPRQYSTGGKTRLGHITKRGDPYLRTLLVMGARAVLQGALRLNDPLSRWALALQQRRGYHRACVAIAAKNARIAWALLAKDTLIAAA

SEQ ID NO: 425172 - protein, 399 aa, unidentified
MLHDHPCVGPTAIRTQFGAIFVSLELSRSKWVLTSLSPGNGEKMSQYSLTAGDIGGLLVRFADLERKAKERTGSDYPIITIHEAGLDGFWVHRVLQNEGIESHVVDAASIATSRRRRRAKTDKIDGEALLRALLAFKRGEPRVCAMVVAPSPEAEDRRRICRERQTLIEERIIHVNRIKGLLFAQGISDYAPLRRDRRKRLEGLSTGDGRPLPVHLKAQISRELDRLELLIDQTRSVEAEQEALLAAESKAGIEKVGPEKAGPEEEPRNAVAMLLAVKGIGEHSAAILWSEGLCRQFSNRRQVAAYAGLAATPWRSGAVIHEQGLSKAGNPRLRTLMVQLAWLWLRHQPQSALACWFRARGERGRKGSIVALARKLLVALWKYVAHGVVIEGAAMKPAA

SEQ ID NO: 425173 - protein, 353 aa, unidentified
MTIVENTGTRTHSITAGIDTHADFHVAAAIDHNGGLLGVETFHTTTGGHRDLVRWLAGFGPVDKIGVEGTGSYGAGIARHLTGKGITVVEVDRPNRQARHRAGKSDAVDAISAARAALSGTATGTPKSRDGNIEAIRVLTVARRSAASEWIAIINQIRHVCFTAPEEIRRRFDDLSPIMVARSTAGLKPRKSSGDVVRYTTLMTLRELGQRAMFLHNQRKRLDAQMRPLIRESAPDLLEVYGVGYDVAAKLLIAVGDNPHRIRSEAAWAHLCGVAPIPMSSGKNQRHRLNRGGNRQANSAIYRIMLVRMASHDATRDYIVRRTAEGKTMGEIARMLKRYIAREVYKTLPKTVS

SEQ ID NO: 425174 - protein, 450 aa, unidentified
MSTLDIVVPTPAAAPTSEFAAYIGLDWADQKHFWTMLVDGKKTRGQLDNTPEAIEVWAAELAQRFGGRPVAVALEQSRGAVIAVLSKYAHLALFPVHPNSLANYRKSFSPSGAKSDPVDGDLILDYLVKHPEQLRCLRPDTVETRSLQFLTEERRKLVDAHTATLQSLIHWLKQVFPQIVRWFDDPGAPLVADLLLRWPTLQELKKAQPKTLRKFFHQHNCRSEERTQERLDQILQAVPATDDPALLQTGTLSIQNATRILASMRQGIAEFDRRIAVIYQAHPDRFITESLPGAGPALEPRLIAAAGSLRDRFTSAYNMECCFGIAPVTETSGNSIWIHWRWACSKFIRQTFHEWAACSIRSCDWARAFYDRKRADKKSHHAAVRALAFKWIRIFFRCWRNRVAYSDQHYEEALRTRASQSKPTKTVSKVNSAVEWKSCAGFSRPVKFSS

SEQ ID NO: 425175 - protein, 385 aa, unidentified
MVGCDLHDKTMLLKIAQGREAAETRSVKNTAAGRREMVRMLRERAGTAGGGEVVFAYEASGQGFGLYDELTEAGFTCYVLAPTQIARSTQHRRRKTDEQDAQQILELLRGYVLAGNDLPKIWIPDPQTRDDRQLVRTRLDLSEKQTAVKTQVQSILKGNKQRRPGDSGKGWNAAFRRWLDDLSSADSPLGTGSRMALASLLRQLAWLEEEIKTLDRQVLDLAMTDRYRDMFYELLRLKGVGPLTAMVFLVEIGDLTRFCNRRQIGAYLGLAPSSYESGDRSDCKGRITRQGPSRVRKILCQATWSRVRTDEEEKKAYERIVARNPKHKKIAVVASMRRLAIRMWHRAVDCQARRQKASARARQKGGPPPSTFAVASAPGGLRPSG

SEQ ID NO: 425176 - protein, 367 aa, unidentified
MKKNSSAAAMQSRNISRQTLTIGLDLGDRNSWYCVLDEVGHIQLEQRVRTSAKALQEVFGAMPRSRIALEIGTHSPWISRLLTESGHEVIVANARKVRLIGESRKKDDRLDAQTLARLARIDPALLCPVKHRSAQAQVDLMMIRARAGLVRARTGLVNRARGLAKSYGERLQGCNVRNMNPEKAEGLSSELQRALEPLLSAIEELSERICEYDDRIEALARASYPQAELLKQIKGVGTLIALTFLLTLEDPHRFGKSRDVGGYLGLQPGRRNSGESEPQMHISKEGDPYLRTLLVQGAQHILGPFGIDWDLRRWGLKLAEHGGRNGKKRAIVATARKLAVLLHHLWVSGEVYEPLHNSSRTTVAAGA

SEQ ID NO: 425177 - protein, 354 aa, unidentified
MEVRVRMKVLIGVDPHKASVAVAVVDEVVGELVECATFPQNRAGLRALERWAKRFPERRWAVENAGGLGRHLAQMLSAAGESVVDVAPKLSARVRVLSSFAGNARKNDELDALATALAAWRNKRLPTVASEAGTEVLRLLSERREDLVAERTRGLNRLHGLLRDLVPGGVPGTLSTHRAARIVRGIRPQGVSARVRRRLASDILRDIRTLERKIADLNERIETEVEASATSLTQIFGMGPILAAKIMGTVGNATRFPTKAHFASYCGTAPVEVSSGEVVRHRLSLAGNRGLNNALHMVAICQARSDVRGRAYYRKKIAEGKSRKEALRCLKRRISDAVFKSLMADLEGPSCSAA

SEQ ID NO: 425178 - protein, 339 aa, unidentified
MKFTPVGVDIAKHLMQIHFVDEYTGELIDKQLKRNDFLTFFSNREPCLIGMEACGGAHYWARELRKLGHEVRLLKARFVRAFRMGNKNDVQDARAIWLAVQQPGKSVAIKNEEQQAILSLHRMRYQLVKFRTAQINSLHGLLLEFGETVHKGRTSLDKAMPEVLERLKEKLAPFLLNLLEKQYHRLNEIDEQIEQVEKQLTTWAKQNADCQRIMKIPGVGVLIATAAIATMGDPRAFRSGREFSAYLGLVPKQTGTGGRVKLLGISKRGDTYLRTLFIHGARAATLLTKTPLPWVTELKKRRPVCVVIVGMANKLARTVWALVAHQQEYQKDYVSVRPY

SEQ ID NO: 425179 - protein, 345 aa, unidentified
MQITTVGLDLAKRIFQVHAVDASGDVVVRKALRRSQVLPFFTKLPPCLIGMEACGTSHHWARELTELGHEVRLMPPSYVKPYVKRGKNDAMDAEAICEAVTRPTMRFVVMKSAEQQAALSLHRTRNLLVKQRTQLVNMIRGLLAEFGIDIPEGLERALKLARQIAAKKSTLDVPAMALQILCILCEQVLNTHARLQTIDRSILAQQRTNEVARRLSTIPGIGPIGATALAASVADPGQFRSGREFAAWLGLTPSQNSSGGKDRLGHITKMGDRYLRKLLVIGATSLIRRARHKPEAADPRLLALLARKPARLASVAMANKMARVVWAIMARGETYQARHAPNLAA

SEQ ID NO: 425180 - protein, 360 aa, unidentified
MNSQKYVALDVDSANIVAGVYDGKGTKVMGCCIRTNTSDIRQFFKGLNGSVHVALEEGTQAAWLYDLIRPLVAQVTVCDPRRNRLLQAGNKADRIDVDKLAKLLRLGELQPVYHGEKTIQGLKHLVHGYENLVGDTTRTMNRLKAAFRGQGVTSRGSEFYDNERREEWLTKLEIVGLKTRAGYLYEELNCLQRLRKEAKKAMCQEASKHSAYKLISQIPGIGPVRTAQIIATVGSPHRFRTKRQFWPYCGLGVVTRTSADYEWVGEETRRRKKPAQTRGLNHDFNRTLKGVFKSAALSAVHTNEQFKQYYKRMIDKGIRPEMALLTVARKLAAIVLVIWKKGERFDPERLNQAAQSTGNQ

SEQ ID NO: 425181 - protein, 349 aa, unidentified
MNATTVAVDLAKNVFELAVADAEWRIVERHRLNRARFARFFVHRPPCQVVMEACGSAHHWARRIRAEGHTVRLLPAHYVKPYVGRSKTDRADAAALIEAARSPRIRVVPIKTIEQQQLQALHRLRSQWMSTRQRYLSTLRGILREFGIMIPLGPSVAKAQIGAALAAADSAIPDGLRPELAQMLQEIAPLEEKILSVERQLAALTRTDERVQQLREIPGVGLLTSTALLSTVGDIQRFPSGRHFACWLGLTPSERSSAERRRLGKISKQGDVYCRTLLVHGARSALLAARRAQRAGKPLDRLRRWALNCEQQRGHNKATVALANRLARIVWASWKYQRSFDGNWGNQAA

SEQ ID NO: 425182 - protein, 366 aa, unidentified
MAITHVALDDSKRVIVAGILRADATQPELREIPNDPRQVRRLFERLLREAPVRACYEAGVSGYDLYRQLTALGVDCAVIAPALTPRKPGERVKTDRRDAAKLVRLFRAGELTAIHVPTEAEEGVRDLTRCRDDVRADIVRWRHRVLKLLARHGRVYQAAKNWSQAHWTWIRAQRFDDVPLARTLEASLEALEQALRRRADLDRAIDGLASEPRYRDAVGPLRCFRGINTLSAMILVAEIVAFERFRRPRALMAYLGLVPSEYSSGDRHRRGALTKAGNTHARRVLVEAAWHYRHRPALGPRLARHTADQAPAVVAEAWRAQQRLHRRYRHLVGHGKRPTVAVAAVARELAGFLWAAMTQAPRVRAA

SEQ ID NO: 425183 - protein, 391 aa, unidentified
MDPRCSPPWVFLAHPSDEIAQLSIDLWPPCPLPRFPTPERRETRTMPAKDGLRLNDLRRTEQARPAPGHPDQQGAVTAAKTRRRTPQPPCLVGIEAGMASHYVARELVALGHEVKQVPPAYSKPFRHGHKNDFRDAHAVAEAVERPSTRCVPIKTDGQLDLQALHRVRSRLIGNRTAVINQIRGFLLEHGIPVRQGHHFLRKQLPLILATRTDVLSPRMIRIIGDLMADWKYLDERIERVTDEIEALAHADEGCQQLITVPGIGPIISSAMVAAIGNGAAFCKGRDFAAWLGLVPKQMSTGDRTVLGRITKLGNRYLRMLFIQGARAVLLRPASWVKHSFGSWLTAATRRLHRNVLAVALANKLARIAWTVLAQGRRYEARVEPRVEPAAA

SEQ ID NO: 425184 - protein, 360 aa, unidentified
MQSKGFSFEGQNIFIGIDVHLKQWSVAIMTESGLVEKFSQVSEAVVLSSHLKKKYPLGHYYSVYESGFCGFSVHYSLKTSGINNIVINAADVPGTQKESLHKTDKIDALKLVKALRAGLLHPIYIPQLNTLADRELVRTRETIVKDNVRWKVRIKHFLYRHGIKYPEKFANPGTHWTIRFVQWLEEDVSELIGKNKDALLQQISSYKQARGQLLEITRKIRTMSKSSDYNSKMELLTSIPGIGFHTAITFLTEIGNIERFTNERELASFIGIVPTCHSSGEKENVGTMTFRGNKHLRKKLMESAWKAVHQDTALAACYRKYCKTMDENKAIVRIARKLSNRILTVLKRKTKYVNETNAQH

SEQ ID NO: 425185 - protein, 360 aa, unidentified
MTSMATTAVFVTGGVDTHGHTHHAAVLDCIGRQLGDREFPTSPAGYRALLQWMSGHGVVDRVGVEGTGTYGVGLARHLRVAGVHVVEVDRPDRRARRAQGKSDPLDAYSAARAALSGRASVVPKVRDGKVEAIRAIRVARSSAVKARTQATNQLKALIVTGSPGFRQQLRHLSTPLIITHCARLRPSPDLGDPEQATKTALRRLARRHQQLTEEITEADRELHQLVRAVAPALLDLPGVGPEVAGQVLISIGDNADRLKSEAAFAHLCGAAPIPASSGRTHRHRLNRGGDRSANNALYVVVLGRMRHDARTRAYVQRRTHEGLAKPEIIRCLKRYVAREIYHTLKLATPTKKPEQLLARP

SEQ ID NO: 425186 - protein, 337 aa, unidentified
MKITTIGLDIAKNLFHVVCCNQQGRLIKKKILKRAQVLKFFQSQPPCVVAIESCATSQYWARAIHRYGHQVKLLPAQHVKAFLIGNKNDYNDALAIATAAKQPHIKSVAIKTIEQQDNQAQHKARELAIRQRTALCNQIRGLLAEYGIALRQGVNVLRKNISLLLDDENKQLSGTFKVVLMQLKEQLISLDNSIATFDQLIIQSVKTNPICQRLLTVPGFGAMVSSAYFNEVGNGSSYRRGRDVSASVGVVPKQYSSGGKDVLLGISKRGNKYLRCLLIQGAKAVVSRAKTKDDKLSQWINRLVETRGHNRACVAYANKMARMAWAITVSGEEYSPV

SEQ ID NO: 425187 - protein, 338 aa, unidentified
MEFKNFIGIDISKGTFDYCLIKNGDQASASSGKTSNDPSGLVKLEEFLHKEGLNMEETLFCMEHTGVYCRLLSGYLTENKYHVWLEMPVQIIRSLGLQRGKNDHVDAMRIAEYACLKKDKAVLWQPPREVLLQINDLLTLRERLIESRKSLKQPIKELSEAGFKDAAKLIESRCIHTLKALDKEIEQIDKDLDDIIKKDSNLKKLYKLATSVSGIGKITALTLLYYTNEFTLFIKAKQLACYCGVAPFEHTSGTSIRGRTRVSNFANKRLKRLLHMVAMSTISSDKQLSQYYRRKVGEGKNKMLVINAIRNKILYRLCAVIKRGTPYEKNYHLEYQSA

SEQ ID NO: 425188 - protein, 343 aa, unidentified
MKLSRIGIDLAKNVFQLHGVDHSGKTVWKRRLKRNQWLKAVLDQGEPGCEIGMEACAGAHHWARELESRGYLVKLMAPQFVKPYVKSNKNDANDAEAICEAMSRPHMRFVTVKSIEQQDIQATHRIRSELMTQRTAKSNQIRGLVTEYGLVAPLTLRALRAAIPCWLEEAENGLTDHFRTLLHGVWTDLVTLDDRVLELDQTIQKLANSNEVTRRLQQLRGVGPMVATALVATVGDAQQYHKGRQMAAAIGLTPRQHSSGGKNRLLGISKRGDVYLRSLLVHGARAVVSQAKHRDDRLSRWVIGIAQRRHPNVAAVALANKTARMAWAMLRNETDYDPEFTTS

SEQ ID NO: 425189 - protein, 367 aa, unidentified
MDKSSKAFVGMDVHKESIDWAVAELDGEVRSVGRTGGDLAAVARTVRKLVASGKTLVFVYEAGPCGFVIHRWLKAHGHESWVVSPSLTPKKPGERIKTDTRDAMKLARLARAGELTAIYVPEAADEALRDLVRAREDAVAMQRQTRHRLQALLLRNDIRYVGKTAWTPAHQRWIARLKLPHATQQIAFEEYVQAVQEATTRIARLTAAIQAAVSTWRWQPVVAALQAMRGMQLIHAVRIVAELGDLTRFGTPRAMMGFLGLVPTEHSSGSKRAQGAITKAGNSSARRAMVEAAWAYQHPARITPIIARRQGGVPKSVLDIAWKAQLRLCARFRKLAVRGVNRNKLVVAVARELAGFVWAIGQQVRPV

SEQ ID NO: 425190 - protein, 420 aa, unidentified
MSKRRYGSVEFKRVDWSGLAEGFGGGRAVLAVDVAKEDFVAAVLGPDAGVRVTFKWRHPGQTLEVLECLEGLAGAVALEVVLEPSGTYGDALVGQLRRLGVAVYRVSPKRVHDAAEVYDGVPSLHDAKACELIGRLHLQGVSRVWEALGQERRELNAWLRRLEVSKGRLHAGLNRLEAHLSRHWPEVLGLLELSSVTLSELVAAYGGPAAVAADPVGAEALMRRVGRAGLSEEAIAAVLASAHENLGLPCVAAESDLLQWLAADNNATRRELHAIEQEIQRRVAASAVPARLGNVVGKVSAAVLVAAVGDPQDYPDAASYTKAIGLNLKERSSGKHKGQLKITKRGPAVARFYLYFAALRLIARDPEVRRWYDRQNARPGALKGKTIVTLMRKLAQALWHVGRGATFAVTRLFAPEPRPA

SEQ ID NO: 425191 - protein, 401 aa, unidentified
MNAVGIDVSKGKSMVCVMRPFGEVVLEPFEVLHTAQNLHDLAEKLKALDGETRVVLEATGNYHKPVAFVLHDAGLFVSVVNPVLIHDYDNNSLRRVKTDKKDAVKIANYTLDKWTRLRQYLPEDDTRLALKNCYRQYQQAVTIRTMLKNNLISSLDLTFPDANKLFSSPVKNNGCEKWVDFIGDFWHSECVSSLSANAFAKKYLKWCQKHGYVFTRSKSDEIYACAVNSASLPKSPTSKLLIQQQVAQLKAVSQSVAAFRQEMLRLSQQLPEFDTVMEMYGVGPSLGPQLMAEIGDVRRFSSKKSLIAFAGIEPQPNDSGKVVGNDKGISKVGSAVLRRTLFLIMTVILQTQPQDEPVFQFMNKKRSEGKPYKVYMMASANKFLRIYYAKVKAVMDSERSQ

SEQ ID NO: 425192 - protein, 473 aa, unidentified
MRPRSAIGIDPDAKGIQCSLVRIGEGKPKMKGFLVTQKGLEGFIRWVKSAGDVIIAIEGSNGQSKPIEQALRAEGIVFYSFKPSDVARFRKAVLGQNKNNDIDAESVARYAMALETQGKLNCNKRVWFPDAELQGLTRSHEQKTNQRTAEVNRLWKLLRTVSPDLYLALGGVNPDIEINGNMLQNQGILTLLAEKPDIVEWKTFSGMDFLEAMGGRLYTGRQKLIKELQKVAKTFRPILSSLSLMIEDSVTQILLLKKQLKRIHDMLEQITQDNKAISILRGYKGIATLTASTLIAEIVNIRRFVSNDGLACYAGLGMIDNSTGERSNMVHSSFFNHRLKDALMTAAKNFVHFNPGSHLAGYYRNLVKGGMSVTESRKRVARALVRVFFRVLYSIDENTNTGVTECDDAEREEKRESDMASGQVRSDKNHESNISLSPLKNHDTNCDGKVNNRLAQREGKEPERILKKSAKSS

SEQ ID NO: 425193 - protein, 388 aa, unidentified
MIYCGIDVAKRKHAVSLLDEKGAQVKPVFMIENTRAGFDRLNLELEAVADSPLTVGLEATGHYWLALYEELSQRGHTLIVLNPLQVAAYRRSGVRKVKNDRHDALWIADFIRIANLPATSQNIPVILQMRELSRFRYRLSEQIGDCKRKILTILDRVFPEYEQLFSSVFLKSSRQVLKTAVSAQECADYDLSELSFLLHKTSQGRFGDAQAERLQTAARQSVGIGFLTNAVRVEMGCLLDQIDLLEEQRSQVDQAIEQLMQQIPQYITSIPGIGPVTGAAILSEIGDIQRFDAPEKLVAYAGLDATVYQTGQFEATEAHISKRGSPYLRHAIWQAAMMAAQYDPDLIAFYQTKRQQGKHHNVAIGAVCRKLIARIFIVLKEQRPYIIR

SEQ ID NO: 425194 - protein, 422 aa, unidentified
MLTGTQDNEKIIERVAALDIGKAELACCVRVPDEDRPGRRLQEVATYSTMTRSLLGMADRLACLGVTRVVMEATSDYWKPVFYLLEAAGFDAWLVNAKDVKHLPGRPKTDKLDCIWLCKVAERQMIRPSFVPPPEIRRLRDLTRYRADLVAARTAEKNRVEKLLEDAQIKLSVVASDIFGVSGRDMMAALIAGERNPKVLAQLARRTLRRKISLLEEAFTGYFTGHHAFLLRQMLARVDAITGDIAALDIRIEAMIAPFDGEVAKLDEIPGIRRAAAHAILAETGIDMSRFPTAGHLVSWAKYAPGVKESAGKKKGKNSTGHGNTYLARILGNAAAAAGRTDTFLGERYRRIARRRGATKANVAIGRSILVIVWHLLSDPDARFVDLGSDFYATRTDPDRRMRSHVRQLEALGYTVTLQPAA

SEQ ID NO: 425195 - protein, 386 aa, unidentified
MRPTGNPTHSTAALDYDSTMIGALELSSKKWVFAVQLPGVKKHSRHVVEPNGPALAALIERLKARSEAAGRSIGRVIMTHEAGRDGFWLARFLERRRVEVHVMQSSSLPVDRRARRAKTDVIDVEMLLRTLMAWLRGEPRVCSMVPVPSEADEEARRAHREREDLIGARRSLLNKIDGILATLGIEGYRALRRDRRAQLADLRQPDGAPLPLAALARIERLLDRLELVMAQIKGVEKTRDAVVAKPAAENDNERMIRGLASVRGIGVESATLLVREAFCREFANRRALGAYAGLAGTPFASGGIQREQGTSKDGNRRVRALVVELAWFWLRFQPDSALAKWFRERVGGAKGRVAKIMIVALARKLLIALWRFAKDGVIPEGATMKA

SEQ ID NO: 425196 - protein, 366 aa, unidentified
MKKSLIYVGLDVHKNSIVIAMATGRNRAMVVRTIPNDWATLVRVLAELGASQRLRICYEAGPTGYGLARRLNASGICCIVIAPSRIPREPGQRVKTDRRDARKLADLLRAGLLVEVKIPAAETEAMRDLERARDDAKNAERAVRHQLDKFLLRHGRAWSRTKWTHLHWSWIKQQAFPAEASRRVLSDHIRAVEEATARVERLEKDIEELVETWSLAPLVRALQGLRGVRLITAVILAAELGDMAQFATPRKAMAFLGQVPSEDSSGERRHQGRITRTGNGHARRILTEAAWNYRFQPRPSRAIRKRRESLPPEIVAIAEKAEQRLSRRHRHLVNRGKSPPKAVAAVARELTGFVWAIAREARFQAA

SEQ ID NO: 425197 - protein, 369 aa, unidentified
MNKKAMKKSQDKIQITPKPTPLTPDPIDPCGVEVSAQELIVALNRNGVPQPLQSFPNTPEGHRDIARYLARPGRRVQVCMESTGVYGLDLALLLAKQGGIQVMVANPRAVRHFAQAMMERNKNDRVDAGVLREFAARMPFEPWQPPSPSALHLGALARRLEALTDLCAAEKNRLHATQAAEALPRSIRQDLERSIRFHQRAAERLTREALKILAADPQLQLRFDLLITMPGIAQTSALRILAELVMISSDLDVRQWVAYAGLDPREYSSGTSVHKKVRISKAGNRHLRRALHMPALVAVRHDPHLRAFYEHLLARGKQKMQALVAVARKLLHAIFGMFKHQQAYEGAKVFRLPEGVAAAPSTMTRTEAA

SEQ ID NO: 425198 - protein, 453 aa, unidentified
MGKNKGKATVEQQGLPQVRMNAGGIDIGASEIWVDVGDKDDEPVRRFETFTVDLTRMAEWLKGCGIETVAMEATGVYWIPTFQILERAGIEVFLVNAKQAKNVSGRKTDMLDCQWLRLLHSYGLLPASFRPAADIAVLRSYLRHRQMLIEYAAGHIQHMQKALTQMNVQIHHVIADITGSTGIRIIRAIVAGERDRKRLAAMRDVRTKATQETIAKALEGDYRPEHIFALKQSLELFDTYQKQIQACDEEIAGHLRRMDSKANPDQLPTARREKNKRRNQSTFNVREQAFRISGVDLTEIDGISESAALALIGEIGVDMSRWKTEKHFASWLALCPNNKISGGKTLKRSTRKTANRARDILRLCAQTLMNSRSALGAFSRRMCFRLGKPKGIVATAHKLALLIYRMLTLGTRYVDIGQDRYEQEYKQRALKHLARKAKDFGFQLVPSVQTSVP

SEQ ID NO: 425199 - protein, 343 aa, unidentified
MSNDTRIGVDVAKAVFELAIFDRPGHVTRRERLPRGQFLAFMAQQPKVTVVMEACGSAHHWGRKIQGLGHRVVLLPPHHVRPYICRNKTDRTDAKGILEASRNEEIRPVPVKTVDQQVLTSLHRLRSGWMTERTARLNALRGLLRELGVFIPMGAREVVPFVWSLIEDADSDLPEALRPIFAEACWEIREIEARVKQVERQLEATAEQLPAVEHLRTIPGIGLLIATALVAFIGDIRRFPSGRHLASYLGLTPREYSSGLKRNLGRISKRGDGYLRTLLIHGARSVLVHARKQQPDRLREWANNLAKTHVHNKAAVAVANKLARIVWAVWHHQRPFALIAKAA

SEQ ID NO: 425200 - protein, 338 aa, unidentified
MKVYAGIDLHSSNNYIGIMDQDYKRLFGRRLPNKMNNILKVLEPFKADLGGVIVESTYNWYWLVDGLQENGYTVHLANPSAIKQYEGLKHTDDRWDAFWLAHMKHLNILPEGYIYPKEQRAVRDLLRRRLFFVGHRTANILSLQSTITRNLGIKMSSNDIKKLNMDDAYDLFDSSNLVFMVQNNISTIKHLRKIIKGIEKEVKPQVQLRKEFLMLLTIPGIGIILGLTIMLEVGDIGRFYKVGNYSSYCRCVSSKRLSNGKKKGENNKKNGNKYLAWAYVEAAHFATRYIPRAQKFYQQKMAKTNVAVATKALANKLARASYFIMRDQVPFDGDMLFR

SEQ ID NO: 425201 - protein, 342 aa, unidentified
MFYAALDVSLRSVAICIIDDAGKVRLERSVPSELPDLIRCLQDFGQPIHQVGLEAGNTSQHLAAGLTEVGYDVVCMEARQVSAALSAMRNKTDRHDARGIAQILRSGWYSRVHVKSQESLYTRALLTSRKVMQRKCIDLENEIRGVLKVFGVKLPMRLSRGAFDGAVRDIITGDPGLSHALLPMLEARQMLFETFVRLDRRVRQAAHDDAICRRFMSVPGVGEITALSFKAAVDDPSRFKSSRTVGAHFGLTPRRFQSGEWDNPGRISHAGDADVRATLYAAANAMLMRSIAWSSLKAWGVRLMKTKGRRRAVVAVARKIAVVLHRMWVDGSDFRRGSEAAA

SEQ ID NO: 425202 - protein, 421 aa, unidentified
MKKACTGKVKFVKDSTLIVAVDIGMEMNRGYCTTPDGRDIKPFKFDNSREGMDKLWSMVIASKNSFQCEEIIVGYESTGPYGEPMVHYLMKKPVMLVQVNPMHTKRIKEINDNSPLKTDDKDPRVIADIIRWGHSLSIVIPEGDAAYLRRLNNSRERHVRERTALVNQLQQLVFLLFPEFKKVMKDIKCQTPLYILKKYPTPEDISILDKDVLGAEMKKQSRGKFREQHASMLINFARNTIGIREGVAGLSMDIRHILAQLEMLNALVDEIENEMEMALGRIPYSSKLLSIKGLGVVSVAGIIGEIGDFKKFQTRAEIMKLAGLDLYEISSGKWKGRRKISKRGRSLLRKILYYAGIQTIRKNGILHDYYTRLTDRGMKRMMALVAVSRKLLGIIYAIVRDDSEYLVNFESIKRQVTKKAA

SEQ ID NO: 425203 - protein, 414 aa, unidentified
MSDRIGRVFKIHKDSMICSVDFGKFWFYGYCRSSDGGESKVRRFPNTGQGFRRFEEFVNSFKRQHPCELVVIGFEPTGSFAIPFIYFWHKRDVQLVQINPMHTKRMKEVADNSPNKTDKKDPRVIADVIEMGRSLSVVVPEGVVADLRALIHGRERMCAHRKSMSNQLQDIVFTLFPEFVGIMKGVESKTAWYLLRNCPTPQSLLGAHRSQLLADIRRISRGRIGEERFDELLQAARHSGGLRAGCESLVLQIQQHLSYLEQMSQSIAQLEEAIYARLPEVPGSSILLSIKGLGALTVAAIIGEFADMKAFRTVDAVMKFAGLNLYEVSSGKHQGQRRIAKRGRSVARKYLYFAVLTLIRTNEEYRQLYHSRVHPDTIRNKVVISLCRRLLRTMYSILRNHTQYEQRSIMKEAA

SEQ ID NO: 425204 - protein, 355 aa, unidentified
MNEIKYIGMDVHQTSTSIVVLSASGRVLTSAVVETQGHALVAFLQGQRGKLHLTFEEGTYAAWLYDLLSPYVSRIVVCDPRHNALLKAGSKNDPIDARKLAELLRLNALRPVYHGQNSLRTLKELSRSYTTLVQDSTRVMNRIKALYRSRGIRCAGTKVYSPSCRTSWVDQLKEAGVHQRAQLLYQHLDLLSLLRRQAKCALLAESRKHSVSGILRPVPGLGPVRIAVLLATLQTPFRFRSKRLFWAYVGLGLVTRISAEFTLVNGQLQRSAKAPTIRGLNPNHQRELKEIFKSAASAAVHRPGPWQQFYERRVAAGGKPEMLRLTVARKLAALTLHLWKKGERYDVKHLKSTAV

SEQ ID NO: 425205 - protein, 336 aa, unidentified
MRYIGVDLHTTQITVCYLTDKEEIEIKKYQLSEIEKFVAGLQPTDEVAVEATCNTRWFSEQVKENVSRVVLVNSRQFEVVKNSVKKTDKNDARNLARFLRADLLPEVRAKRQVATSVQSLVNTRTKLVRLKTSLINKIHALFVAGGGKLKKTSLASEKGLEKVLQEKWTTIERIELEIIIEQIRSLKLSIKKLDKAIADESEKLKGFKNLVSISGIGSLSAGILLSVIGEVKDFGTADKLASYFGIVPRIANSNETVNHGRITKRGNKTGRTTLVQCSLAAIKKSEYLKNYYEQVKARRGHGKAKIALARKYLAIIYNTLTNGWVFADFNNFELAE

SEQ ID NO: 425206 - protein, 392 aa, unidentified
MVSRMPCHRWLASERSDDLPGLGCGVARNRTEHSISSGLPAAAFHMGNRLRRFSVFVIGIDPHKGSHSAAVLDQHEQLVGELRVRAGRRQREELVEFASRFEPRCWAIEGASGMGALLAQQLVAVGEMVLDVPPTLSARARLLDAGRIDKTDAHDARAAAVVALRHSKLRTVVLEDHTAVLRLLAKRHHDLVAHRTRAVCRLHSVLCHLVAGGLPRRLSAARAATELRRIHPADAVGIERRGLAGELLAEVRAADRDLTALKARITIAVAASSTTVTEVFGVGPVLGAYLIGYSGDVRRFPTAGHYARYNGTAPIEASSGPRVRHRLNPRGNRQLNHAIHIAAVTQVAHDTPGRAYYLRKQAEGKTKKEALRALKRRISDAVYRQLLADTIR

SEQ ID NO: 425207 - protein, 339 aa, unidentified
MNGMAVGVDIAKQVFQVHYIDQDTGEIVNKPIKRANFLEHFANRARCVVGMEACGGAQHWARQLIQMGHEVRLMPAEFVKAFNIRNKNDAADAKAIWLAVQQPGKPVAVKTEMQQAMLALHRMREQLVKFRTMQINGLRGLLTEYGEVMSRGRAKLDGEIPTVLGRLAERLPAALIDTLREQWNGLTKQDEQIAEIERRMREWKKENSAVKAISEIPGVGLLTATAAVAMMGDAKAFRSGREFAAWAGLVPKQTGSGGKVNLHGISKRGDTYLRTLLIHGARSVLSHAKDPGPWIEQMKKRRPTNVIVVALANKMARTIWAVLAHDRQYQKDYVSVKPV

SEQ ID NO: 425208 - protein, 383 aa, unidentified
MRTVCGLDVHKDSVYLCILSSTGEIYEKKFGVLTTELIEMRDLMLSHHVLEVGMESTSVYWVPIWRVLEPHFKLKLINPYFIKQLPGHKSDIKDAQWIAECMLKDLVNGSFVPPERIQQLRQYDRRIYDLDDEIIRKLAKLDAAVQRCNIRLSNYVSNTDSVSYKAVIDKICEGVTDPNVLVEEIHGRIINHHGKETIIASLTGSITECDIDIMRQLKAEIDLAEQHKQECMDKMLAICENEYSTQLHNLQTIPGVKMRAATSLIAEIGTDMSHFETANHLASWSGLKPRNDQSNKTIKSRRITYGNRYLRRTIIQCSWGASRTKNCFFSRFSYHQTQVRKKNRMKVQVAIARKMLICAWHILKNGVSYKDFNNIIEASVTNG

SEQ ID NO: 425209 - protein, 391 aa, unidentified
MYYIGIDIAKRNHEVSIIDADGKILSKSISIANSQKGLDTFNNYLSSFNVTSENSIIGMESTGHYWLNLYSSLVNLNFNVFVINPIQTNTFRKMYIRKTKNDSKDSYIIAQIMRFGEFSSSSISDENIFAIRQLSRYRSSLVDECSNWKRKVITILDQVFPEYSDLFSDTFGVTSKELLSKYPLPENMLEVSTKELTSLLNKASKGRFGIGKAQEIKEYATKSFGISFAKETFSFQIKQIINQISFIESQLKELEKEITNILKTLNSEITTITGIGDILGASILGEIGDISRFEKASQLVAFAGLDVAINQSGEFTGTEMKITKRGSPYLRRSIWIAATIACFKDPALSVYYKKLIDRGKKHLTAVGAVARKMCNIIFSVLKNKKPYTPNI

SEQ ID NO: 425210 - protein, 311 aa, unidentified
MEHSHFVGIDVSKAHLDVHVLPTGDSFRVSHDDDGLVTLIERLRPVAPVVLVLEATGGYEVTAAATLASAGLPVAVVNPRQIRDFARATGQLAKTDTLDARVIALFAEAVRPAPRPMPDEQARALGELIARRRQLVDMLGAEQNRRRLLHDRRLQRHVDAHIAWLEEALRRLDHDLTTLIRSTPVWRETEDLLRSVPGIGPVTACTLIADLPELGHLDRRRIAALAGLAPFARDSGAFRGRRMIAGGRAHIRRVLYMATLTAIKHNPAIRVFYLRLVAAGRPGKLALTAAMRKLLTVLNAMLRDRRPWQPA

SEQ ID NO: 425211 - protein, 368 aa, unidentified
MKQVTTYVGIDAHKKDLFVAMLIGQQKTPVTWQLANEPQAVRRLVRKVEREAPGPVQVFYEAGPCGYALQRRIATTRVSCDVVAPALIPRKPGERVKTNRRDARKLVELGRAGLLTAVKPPTSEDEAVRDLARARDDAREDLQRCRHRLGKLLLRRGLHFSGRNWTRAHRQWIDGLEWAHAAERAVVNDYRLAIDQTEARLQELDARLAELAETEPYREPVGWLRCFRGIDTLTAMLILAELHDFRRFASAPALMAYLGLVPGEDSSGEKHRRGRITRTGNALVRRVLVETAWHYQHRPSVGVALTRRRKGQPARVIAIADRAQQRLCRRFRKFAAEHKPAPKIAVAIARELAGFLWAALQPVSVLVK

SEQ ID NO: 425212 - protein, 391 aa, unidentified
MIYVGIDVAKDKHDCFITNSEGEVLFQVFTIQNNRNGFDDLFSKIQSISSDASNIKVGLEATGHYSYNLLGYLINKGLHTFVINPLHTNLYRKSLSLRKTKTDKVDARTIAMMLMSDVNLKSYSDTSYHNEELKSLTRYRFDKVQERAQLKQSVSRLVNILFPELEKLVPSLHLASVYTLLSELPSAREIGSCHLTHLTKLLENASKGRYSREKAIEIREAARVSIGSNMPAKSLELRHTLRLIGELDSEITEIESEIKRIMDQLSSPILTIPGIGYRMGAMILAEIGDFSRFDSPDKILAYAGASPSTYQSGQLESSYSHMEKRGSRYLRYALINAAKYVCHWDETFGAYLQKKLSEGKHYNVAITHATKKLVRLIYAIEKSGKPYIKAT

SEQ ID NO: 425213 - protein, 322 aa, unidentified
MREAERRWVGIDVAKATLDVQVRPSDERWTVANDEAGIRTLVEQLRAVAPQQVVLEATGGYELAVVSALAAAALPVVVVNPRQVRDFAKATGRLAKTDRLDAAVLARFAEQVRPEARPLATAEQQELDALLTRRRQLIEMLTAEKNRLGHVFVRGGKQVRKSLKTHIAYLERELRMTDTDLGELVRRSPVWRERDDLLQSAPGVGPVLSRTILAALPELGQLDRKAIAALVGVAPLNRDSGLMRGKRMIFGGRAPVRAALYMGTLTATRCNPVIKAFYQRLVAAGKPKKVALTACMRKLLIILNAMVRQGTRWSPQLAEVTA

SEQ ID NO: 425214 - protein, 321 aa, unidentified
MSRILVGVDVCKDSLDAYARPTGLKQRFDNTPDGIEQLVAWLRTLTPERVVFESTGPYQKAAVGALLAAGLPAVVVNARQVRDFAKGTGQLAKTDTIDAAILAYFGEVVATVVRPLPDKESLEFRDLCDRRGQLVRMLAAEKNHRHAAQGASAKVVKNIDKHIAFLKRQINDLEERMDKIVSASETFKAKDAILQSIVGIGPQVSRTLLVHLPELGQGSRQTITALVGLAPFADDSGTCSRIRHIRGGRAKVRIAMYQAAVAAIRYCPTLKAFYAALKARGKASKVALIAVARKLLVLANALLRDGTRYQPRTNSVCPKIA

SEQ ID NO: 425215 - protein, 343 aa, unidentified
MEHFAGLDVLVNETSVCIVDETGRIVREAKTASEPDALLQVLRKSDYRFKRIGLEAGPLSQWLYNTLAEAGLPVICVETRHMRAVLQAQINKTDRNDARGIAQMMRAGLYRPVHVKTLRSQKLRMLLTHRKLLQSKAIAIENDLRGTLRNFGLKVGMVGTMKFEARIRELVVNLPDLAGLVEPVLLARRVLREQCAILHRRLLAIVRDDEVCRRLMTVPGVGPVVALAYRATVDVPARFRNSKAVGAVFGLTPAKHQSGESDRTGAISRCGDEMIRMMLYEAAQVMLTRSAKWSWLRAWAMQIARHRGMKKAIVALARRMAVILHRIWVDGTEFRWTREVAVA

SEQ ID NO: 425216 - protein, 349 aa, unidentified
MKIIGCDFHPGYQQIALLDLVTGEMVETALSHERKEEVRAFYAGLQGPVRVGIEASGQSQWFERMLAELGHEVWIGDAAKIRASCERKQKTDRRDAELLMRLLAEDRFPRIWVPTAAERDGRQLLLHRHKLVRMRTQVKNQLQALALNQGVQRKRKLWGEAGRKQLESLPLLPWASRRRAELLQLLDQLGASIAELDRAVVEQANARPAAQRLMTHPGVGPITALAFTLTMGPAERFQRGKQIASYLGLIPSEYSSGGRKQRLGHISKQGNPFLRGLLVEAAQSAVRLEPEMRRAYQRLAQRKCRGLAKVAMARKLAVRLYWMLRLQVNYAQLIQGSHAGQPGTFCGRG

SEQ ID NO: 425217 - protein, 347 aa, unidentified
MNTITTVGIDLAKSTFSLHGVDAHGKTVLRKTLSRNKLLPFMAQLPPCLVGMEACSGAHHWAREMQKHGHRIGIMAPRFVAPYRKNEKNDGNDAEAICEAVGRPSMRFVPVKSTEQQAVLTLHRLRSGLVKDRTALINQLRGLLSEFGLVMPVGRYSAQAALPQLLADNENTLPALARRLLADAWARLQAMNEQILAYDREMESLARESEAARRLMTVPGIGAVTATALIASVGDPRQFDNGRQFAAWLGLVPRQYTTGGKIRLGRITKRGDVYLRTLLIHGTRAVLAMLKDRQDRVSCWLRELVDRRGYKRAAVALAAKNARVIWALLVKGTEYERYDLSPMGLAA

SEQ ID NO: 425218 - protein, 346 aa, unidentified
MEYIAMDVHKKYTWARVENEKGDKLYECKLSHSHGTIENFVKRWTGGSAVAVETVGNWYWVVDEIEAGGGKPQLVNARLAKLMMGSVNKSDKLDAKGMNRLQRTGTLPTVWIPPSSVRDARELPRTRMVLSRQRTQLKNRVHATLGKYGYTVEGASDAFGKKGRQIVAELMAKLPPHTDQALRRVLDQLDHVCENLKWIEEKMIEVFVPCPETTWLKTLPGVGDILAVVIWTEIGTIERFSRAEQLASYCGLVARENSSGGKIRFGAVRRDVNVYLKWAFVEAANSSVLNRERCGYDHISRLYERIKTRRGHGKAKVAVARHLSEASFWMLKKGEPYREPMSSTQR

SEQ ID NO: 425219 - protein, 350 aa, unidentified
MEYISIDAHKRYSFVSIESTEGKLCYEARIEHHRGAIREFLNRRLPGSPVAIETVGNWYWIVGEIEEAGMVPRLVHAYRAKMMLASTNKTDRLDARGMNRLQRCGTLPTVWIPPKQVRDERDLFRTRMILAAQRTRLKNRIHATLSKYGLGVEGSSDAFNKKGRKELEKCILLLPDHTRFSVERVLEQLDCTERQIGLLEERMKEVFSPNEEIQLLMTLPGIGLILAVVILNEIGEIGRFGSAGQFASYSGVVPRVKASGGKVRLGQLRSDVNRYLKWAYIEAGNSVAINRAAHPQWYVRQLYERVRARRGHQAAIGAVGRHLAEASYWMLKRHEEYRPPKMGSISSRKG

SEQ ID NO: 425220 - protein, 343 aa, unidentified
MGRSSHPMSTYIGLDVHKDWSFATVLDQTGRVVVQKRLENEHVPSFLENFNVLEIGLEASTHVAPLYRALVGKGFAVEVCHPKKTRYIAEARIKSDRVDSKAIAELVRLDALPKSYMPPPEIAGLRERVRRRAFLVRERAKLMTKIRGLLAYEGVRPPEDFNLFTRKGFDWLRSLGLEPVDCYLRVMEVFNGEIRRLSFELRHMACGDEDVKLLMTIPGLGYYLALLVKAEIGDVNRFKSGDHLCSYAGLVPSTRSSGGVTKRGGITREGSRWLRWAMVEATITHVKCDTAISRSYHRIAERRGRKAALVAIARRLLLSCYRVLKSRRPYEAFPSWSGVYESP

SEQ ID NO: 425221 - protein, 475 aa, unidentified
MVLPFCNTQTMSLHLAEISLAIEPGAHGVLLMDQAGWHMTGKLEGPDNISIVPLPPKCPELNPVENIWQFMRDNWLSNRIFTSHDNIVDLCCEAWNRLIDQPCWGGRPPYGIRMCQSESLDFDRRRPPMEQIIRIGMDTSKHLFQLHGVNAAEQPILRKKLRRKEMIDFFQKLPSTVVAIEACGASHHWARLLGSFGHEVKLIAPQLAKPYVKRGKNDAADAEALCEAMSRPTMRFVPVKTAEQQAALMLVGMRDRLVRSRTQLANAIRGYAAEFGLTTAKGIYKIEPLLERTATDETVPTLARELFALHASEYQQLERQLEDVEAKLLAWHRKNECSRRLAQIPGVGPIGASLLMMKTPAPELFASGRQFAAWLGLTPKDHSTAGKARQGVITRAGDEALRSILVVGATSLLRRVRDGSGKNATPWLLSMLKRKPPKLVAVALANKIARIAWKMMATGETYRKSVVLSELKCTA

SEQ ID NO: 425222 - protein, 393 aa, unidentified
METTIYIGIDVSKDKFDYAAVNTQSTLIKKESLQMNRDGFYELEQLIESFSNVVVGFESTGTYHINLMSFLLSLTENVHLLNPALVKKFAEADSLRKTKTDAVDALVIARFLIYQQHSISAVTEIDSAYLTQLARLRESITRDIGKTKTHLKQMLNIAFPELLKTANVFTDTFLQILEQFPSAKAIRKATKKGIRKTFYNMTKSRGKNPDMNPDQLFELAKESIGTDDESLEMAIQFDIKHLAFLQKHLDEVTSKLIENVNKHFGNELQILKSVKGIGDTTASHFLSEVKDINRFSNAKQLIAYAGTDPSVKQSGTMIKRGKISKRGVSGLRRVGYLITCSVIRHDGVFQDYYLRKREEGMAYRKAVIATWNKLIRVIFAILTKQVKFVPNHG

SEQ ID NO: 425223 - protein, 426 aa, unidentified
MEKVNSVMDNRSEEPQFAAFVGIDWADQEHVWCLQACDSEKREMGRVRNRSEEMEAWIGQLCQRFRNQPIAVAIEKCRGTLILLLSRYEQLHLYPIAPQAAANFRKALHPSGATDDGRDAAALLEMVRQHRNHWQRWSPDTEQTRLIQNLVEERRRLVDQRTQLLNRLTAKLKIYFPQMLEWFDRLDTKLVAALLQRWPTLPQLQKAGTTRLRSFFRKHHCRQVELLERRLQGIRQAVPALEDQAVLQAQVPTVQLITRMLEILNEGIEGLQRRIEQAVTVHQDFPIFDSFPGAGAVLAPRLLAAFGSQRERYRTAAELQNLSGIAPVREQSGRTACIHFRRGCPKFLRQTFHEWAGHSIAFSSWARAYYELQRARGKDHHAAVRALAFKWIRIVFRCWQDRVLYDEQRYAASLVKRNSPLRPLSL

SEQ ID NO: 425224 - protein, 523 aa, unidentified
MARAFRSKKRSSLAPQSIHKPRGVISPRVQAVGPEHFGIVCVDCAKARSKWMLSDFYARVLVPPTEVEHTQACLASMIRDLRTALEQARIRDQIVVIERTGRYHRPIQRAFDQAGFEVRIMHPLTTKQHRQPANPGNKTDDTDLSAMQRGAVNGFGLLEPPADPLSVRLQLLARHRRDLVEKTVALRSQIHEHLHAIMPGYSKCFEDIYDAQIPLWIARRFGSATAILQAGAPELIVQLRRAELRLHQPTLDKIIAWARSAPAAEDESAIHLKILSELDDDRLSKVRAVRAIEAELAGLLVQTPYLLLIGIPGINVVSAAEFAGEMGPIERYPTARAITGRAGLFPSRYQSDRVDYPDGQLVRCANRTLRRAIMMIADNLIKWNDHFRVLATGWQLHGRDARAARVQVAGRFSRIAYQMVAGRKAYRHPCCQQRDYILNKLLRFHTNNDIGYDQLMINLDAAVAQLPRSVYREEAAPLADELDRVLKKRGKGPRPLSEILPVVLAKLGVKPVRSPKSGEAILT

SEQ ID NO: 425225 - protein, 351 aa, unidentified
MQRFIGIDVHGQSCTLVVMGPSGRRLGEHVVETSAKALIERIRSIPGDKYVCMEEGTQSEWLYEVLESHVKQIVVTQPLKRAGSKSDAIDAWALADMHRRDALERTVFKSPKTSTALRQAARGYIAVRRDMVRAKCRLNALYRSRGGNPTGEIYDPDTRNGWLAKLPPAYRTLGELLSEQLDGLCQSHQAAESWLLKEAERIPVARRLATAPGIGPIRAALLVAIVVTPTRFRTSRQFWSYSGLAIVTRSSSDWVRDGRGWTRKLTAQTRGLNRNRQPELKAIFKGAATTVIQQMPNHPLHKDFQRMTDAGIKPNLAKLTLARRIAAATLAMWKHQEDYDPSKQTRAPQSQ

SEQ ID NO: 425226 - protein, 373 aa, unidentified
MPGIKVNPTDFSNQNFYVGLDVHKKSWAVTVRTSGIEVEHFTQPPDAALLSRHLKSRYPGANFFSAYEAGFSGTSAHQLLCEQGIRNCIVHAADIPQTNKELTNKTDIHDSRSLARYLESDLLNSIYIMSVEQQERRALFRQRQAKVKDIRRCVCRLHAMICYFGINIPVEFADKKYISKNFISWLNQVHLLTPQGTDVFQQYVQELTYQRQQLLSISRKLRKAVLQYYSEPYGCLLSIPGIGPVTATALLTETGDLSRFDDLNEFASYLGLIPSEQSSGEKIYGKRIQSRCNKHLRPLLVEAAWIAIRKSPSLLLYYKKHAGMNSKNAIIKVAKKLALICRAVALNKTKYVEYYSNIAVNKRGKLKPLSNSE

SEQ ID NO: 425227 - protein, 346 aa, unidentified
MRYSTTVGVDLAKNVIQVSVVSGSGKERLNRSFTRAKFAEFLGKQKPSLVAFESCASAHYWARAATRHGHEARIIPAKAVAPFRQGHKTDSNDALAVAEAARRPNIKEAPMKTAEQQGLQAIQRSRELLIGECTALSNHLRGILLEFGVAIPQGFASLLRALPEILEDGDNELPDLYRPTLHRMHSRLMELREDIEAMTKEVDVLVKQHPVCKRLTAIEGIGPIGALSLYAVMGSGKAFTKSREFSAYLGLTPRQYSSGGKTNIVGISKKVGNRRLRSILIQGARAYVYRMKEPKSLKDHWLKDLIERAGPNRAAVALANKNVRTAWAIVTQGTEYQRRLQLEMAA

SEQ ID NO: 425228 - protein, 411 aa, unidentified
MHATCGIDWAEDHHDVAVVDSGARLLGKLRISDDAAGFQDLLHLLAEHGDSPDDPIPVAIETSRGLLVACLRASGRRVYAINPMAVARYRDRYAVSRKKSDHQDAVVLANILRTDVSLHRPLPHDSDLVKAIAVLARAQQDAVWDRTRAHNRLRSHLREYYPAILEAFAAKRERLLSREARTILAIAPTPAEAARLTRHRLRTAVIRAGRQRRIEAETDRLLEVFRRTWLRQPALVEQAMGRQTLALLAQLDAACQACDDLASDTEELFLQHPDAEIITSFPGLAVLTGARILAEIGDDRSRFVQAGNLKAYAGSAPVTRESGKSRRVVHRRIKNSRLAATGRHWAFAALTASPGAHAHYNRRRDTGDRYHAALRNLFNRMLGQLHHCLTNHQKFDEAIAFSPSAPLAAAA

SEQ ID NO: 425229 - protein, 376 aa, unidentified
MTETTRPEVSVSEPMVYVAFELSKTTWKLALTSGFGVTPMLRTVPAADFRGVQAAITSARTRFGLPAETPVISCYEAGRDGFWIHRALTQLGIRNRVVDSASIEVNRRARRAKTDRLDALKLVRMLARVCAGERRVWSEVRVPSPGDEAARHVSRERTALVQEQTRLVNQLRGWLTTVGTTLPVRRGRLWWTAVRDWAGQPLSTVLQDRLARADARLRLVADQVAALETQQQVAVTTAAPDTAMARLVRLRGVATTGASVLLDEGLVWRVFRNRRQIGGLLGFAPVPYESGDTQRSQGISRAGNARLQSVAIQLAWSWVRWQPGSVLTRWYRERFGDGKRARRIGIVALARKLLIALWRCATTGQIPAGAVLTPRA

SEQ ID NO: 425230 - protein, 523 aa, unidentified
MSPTLHPIEPQKGDVPTGLSPADQLTLLALGQANLPEITQRRQVFGAVQRFFGLDIHREYMVATAVDRELQAVYGPRRVEWKQFEEWAQKTLCQQDAVVVEMTTNTWEVHDVLTPHVHSITVVHPPHVKLITQMPVMNDKKASESLAILHAAGLLRGVWVPPQAVRDWRCLVAQRHDRVTAATQAKNRLHAILFRHQIEKPKSSLPFSVKRREFWLSLPVSPVEQLAIELDLETIDHAEAQKARLEKVMTATVLADERLPYLVQLPGVSTLGALTILAAIGTIERFPTAKRLVGYAGLGSRVHDSGQKRSTGKITKSGRKDLRHAMVTAASIAAETQAHWKAELARLEPRTGRNKAIVAIARKLLVVVWHVLTKKEADRHANEAQVAAGFVHVAYQHVGARNLPDGMTGPEFARQHLDTLGLGKDLQRVKYGSRNFILPQSSQPGAAPMAQPNGRGQLQNTREAKLKRAEGAARKRAVIEAKRKEAEARMGRLRKTRADKGTHRGPNRITKEKLEQAEVVGKK

SEQ ID NO: 425231 - protein, 420 aa, unidentified
MSFKIFRFNCCGLDVHKTWIYACIGITDSNGRTDYKQARFSSFSKGLQELCDWLAKYHCSEVCMESTGKYWIPVFNVLEKANNSVILAHPKYTKPQKGNKTDRKDAKWICDLFMCEMIKPSFIPSADIRHLRDLVRYRFKLTCMITGEKNRAQNCLTVSNLKLDDVFSDVFGKSSRSITEYMLAHPGELFDVTPFVDGRCKTPVEEIQAAVDGAISPEQAIKLRQCLNHIDELEKHLEEIEREILCLSDKYQAALDLIRTVPGFDKNPMTAIQILSEIGGDMSVFPSAKHLVSWAGCCPRNDQSSKRIKSTRISRAGNYIKPVLVQIANGLLRSKKHPEITSRYKRIKSHRGHKKAIIAICRMLLTAIWHILSDLKPYTAEGFLESRPVNTAKVLTTSQALNLLKQRGYTIKDDIVPAMN

SEQ ID NO: 425232 - protein, 455 aa, unidentified
MEKNTLLKENLCHDISIGCDVHSNNVVCCCLKKMDDGNILQTKERFSTDYKLLPSFAEWCKRYDPGVVVMESTANFWMSPYDVLEQAGLPITIVNPCYVKGMAGHKTDQEDAHWLAQIGMNGSYKQSYIPDQYYRHLQVAERNLSKQIDTLKDYKNRETKCFVTAGYRLSVFSDEFGKFAMMAKDAILEGKTPEEIYSLLSKEKAFRRLKASKQELLEAFHGNMTEPIKHAIESNRRIYTAIEQEIASNKEYILSEVKKSDGEAFQLLQTIPGINELSAATILIEIGGTAKFLENFTKAENFVSWLGLCPGNNDSNSKRTGKKGRHGNKYVRKSFCEVAQASSRTKGTTFRSKFQSLRIRLGVKRSIVAIAHKIAKMVHYVLKHHCAYRDPMIDYKALSCQKNKSRWLKQLAARKDIELVAVNKVTGETINSKDFQKYEQIRRADALKKAVAGII

SEQ ID NO: 425233 - protein, 330 aa, unidentified
MKQYKHFFGVDVSKKTIDVTLSENAALTHRQFSNDSDGMDELMHWLRSLKISFEDTLFCMEATGLYCFALTQFLANNSIDTWIEHAAQIKRSSALERGKNDKVDSKRIVVYATKNLDRLRLWKPAGGTLDKIRHLASLRERLVETKKRLITPIKEFEEAGNTEMAKLLTQSIKGSLGAIEKDLKKIEAKIIDVVNGDENLKQLFKLITSVIGIGFVTAINLIIYTNGFTILRDARKLACYCGVAPFEHSSGSSIKGKTKVHFMANKKLKCNLHMASLGAVKLDADLKAYYERKVAEGKNKMSVLNAVKNKLLSRVVAVVNKGEEYVKKAA

SEQ ID NO: 425234 - protein, 319 aa, unidentified
MTKIILGIDVSKKTLDAALIFDKRTFSKQFKNSAEGFKSLTAWLESLEIEQVHACLEATGTYSEAAALFLHERGHRVSVVNPLRIKGYANANMRRNKTDRLDAQLIASFCQTQEPDEWLPPSAEVKKLQVLMRRIEVLEEMRQAEENRLANSVSEVQPSIERMIALLKEEIRELERQLKEHIDRHPELKRQSELLQTIPGIGKRTANLLLSEIEFDRYDSARSIAAQAGVTPRKRQSGTSLKQTSLSKLGNSRLRKALYFPAIVARQHNEIVKEFAKRLKKRGKTPMQIVCAAMRKLLHIAFGVLKHKRAFDSSLAFSA

SEQ ID NO: 425235 - protein, 337 aa, unidentified
MLIIGCDFHPGFQQVAIFDNQSGEVRELRIGHREEAEQFYRSLSGEGVRVGMEACGHYPWFEQLLESVGIELWMGDAARIRAAAVRKQKTDRRDAAHLLQLLLEDRFPRIWVPSLEERDVRQLLVQRHKQVQARTRIKNQLQALALGQGMQKKRKLWSKAGRAELEKLELLPYAAQRRQRLLTVLQQLEVEIAGLDRQVEEEVKRRPQAMKLRTHPGVGPVTALAMVLTLGPAQRFADGRKLSSYLGLIPSEHSSGGRQQLGRISKQGNPFLRFLLVEAGQTAARYDAELGRFYRRLAIRKHRALAKVAVARKLGVRLYLMLREDWTYAQLCKAVCR

SEQ ID NO: 425236 - protein, 371 aa, unidentified
MKEPITSYVGLDIHKNSVAIAIASAGHSAPRFIGTINPSPAELCKALRRQRCSPQNTLLTYEAGPCGYGWVRYLRKQHWRCEVIAPSRLTRNPAEQRIKTDRRDALLLARELRAGNLTSIVVPDERDEAMRDLSRAREDACAARLRVRLQMKAMLLRHGRDYVRRNSWSQAHERHLSTVRFEHPAQEIAFNEYRAACKEACERVERITTQLRELCENWRMNPLVKALMCLKGLDFVSAVTFVAEIGDLTRFEHPRALMSYLGLVPSEYSSGASRRQGAITKCGNKHARRILVESAWTNRFKAQITRTLEVRQEGQPKVIRDISWKAQLRLSKRWRSLGMGRKLHHNKICIAIARELAGFIWDVGQHVKLKA

SEQ ID NO: 425237 - protein, 388 aa, unidentified
MQTAADHPEAPTAIRHDLGAIFISLELSRSTWLITSLSPGGGEKMSEHSVRGGNVAGLLERFAQLQEKARARTGRTFPIIVIQEAGLDGFWIHRVLQNEGIESHVVDPASVATSRRRRRAKTDRIDGEALLRTLLAYKRGEPRVCAMVKATTPEEEDRRRLCRERKVLTNERVQHVNRIKGLLFGQGVSGYEPLRRNRRQQLNELRTGDGRPLPKHLKTQISRELDRLELLLEQIKAVETERDALLAAQKVALPGPAAMLLDFNGIGPEFTAVLWSEGLFRHFDNRRQVASYAGLAPTPWQSGSVDHEQGVSKAGNPRLRTTLIQLAWLWLRHQPQSALALWFKERVARNGGRHKKTTIVALARKLLVALWKYVTAGVVIEGAVMKTA

SEQ ID NO: 425238 - protein, 446 aa, unidentified
MRLNFPEAMLAHLPGYRPADNAEPVARARRVKRRPREQSAERLNFPEAMLRICPGLYDYSVRKNRPVLSDGGPDAVSGLRLSRLFRRSFAPDRRSFSCDKPDSIMDRLSPVTRICKVGFTMENELHFIGIDVAKAKLDVDILRPDGRHRCKKFDNTLSGHEALVRWLRGHDVNRAHVCMESTSTYMEDAAAHLSDAGYTVSIINPALSKAFAQSEGLRSKTDKVDARMLAHFCREKRPSAWEAPHPTERALKALVLRHQALTEMQTQEKNRRETAPEVQLASIDILLGCLSAELARIEKQIKDLTDNDPDMKRRRKLLNSIPGIGEKTAAVLLAYTGLRLKFGTARQFAAYAGLTPVQHESGSSVMRASRMSKAGPVQLRKALYMPALSALYHTAWGKAFRKRLEESGKRAKVIIGAMMRKLAQVAYGVLKSGKAFDASQHELLIA

SEQ ID NO: 425239 - protein, 309 aa, unidentified
MFVGIDLSKASLDVAFRPEGTSFQLSNDEGGIAECVRRLQGLKPQLVVVEATGGFETALVAAAAIAQLPIVVVNPKQVRHFAKAIGRLAKTDRIDAAVIAHFGEAVRPELRPIESEASERLTALLSRRRQVLEMIVAEKNRLAATREKQVRQRIAYHLHFLKQELGELDEDLDAEVRSSPAWREKDDLLRSVPGVGRVLARTLLAELPELGRLDRKRIAALVGVAPMNNESGSLHGHRRIQGGRAHVRTTLYMAALVASRFNPRLKRFYDSLRASGKTGKVALVACMRKLLIILNALVRSGQRWNAEVA

SEQ ID NO: 425240 - protein, 344 aa, unidentified
MGEVNTIGLDIAKSVFQVHGVDVAGGVLIRKRVGRAKMLEYFGELPPCLVGIEACPSAHHWGRELQALGHTVKLIPPSYVKAYLKRGKNDANDAAAICEAVTRPSMRFVPIKTKEQQTALMLHRTRQLLVRQRTMLSNALRGHLAELGIVSAKGRNGTAELFEIIADGADNRVPAAVRGILDVLARQYGAIGDEITSIDKSIMALHRGCEASRRLAEIPGIGPIGATALVAEIGDWNTFSSGRSLAAWIGLVPKQHTTGGKERLGSITKQGNRYLRWLLVVGAMAVIRYARKHGTEKRPWLGRLMERRPTKVAAVALANKIARMAWAIMVRGERYKEPKLLLAA

SEQ ID NO: 425241 - protein, 461 aa, unidentified
MKIRLGVDVACRAAHQVSCADEHGVMLWVGHRFRTDPDELEALWRKLPPDAAEVMVVMEPTRNAWVALAAWFRRHGATVVMIPPEQSADLRAYYAKHAKTDRLDSKTLARLPLLHPEGLHREDTLGPGEMLKRAVKVRSGLVHRRTTSMARLDALLEILGPAWVAAIGSDMSLTALRFLARYGDPRTVKRLGPARLAEFFRRSSRGAWHHERADAVIEAAETTLRLWGADGLDFDALAADIAVEARLALAVSEEIKELDKRIAHAYERVDPDGIVRSAPGVGRIGAPQIAGRLGEATRFANLPAVRSFAGLVPRQDSSGIAARAGGPTKAGDACLREALFIAADHARKIDPTLAVRYHRLITEGGKHHNSAVCTVAAVLLTRIAACLRAGRPYQLRDTDGTLITEQRGRQIVTDRYTIPAAVRASRRHLTSTTRTSRRNERAQEGVARRSEAPPVPEPACT

SEQ ID NO: 425242 - protein, 356 aa, unidentified
MSRDIKYIGMDVHKEATVIAVLNGSGKLVMESIVETKASSILQFIHGLRGELHVTWEEGTWAAWLYDLLQPQAAQVLVCDPRRNALLKEGNKSDKIDARKLADLLRTGMLRPVYHGEHGLRTLRELGRSYQTISQDLNRVMNRIKALYRGWSIPCAGTQVYAPRYREEWLQKIEHVGVRRRAELLYQQLDGLQRLRRTLRPELLAESRKHIASKLLRQIPCIGPIRAARLIALMQTPHRFRSKRQLWTYSGLGIETRDSAQYRYVHGQLQRTKRPQQIRGLNRNHNHEMKEIFKGAATRASCGVGPLRDFYVALLEKGMKPEMARLTLARKIAAIALTLWKKEERFDTEQLKPQAA

SEQ ID NO: 425243 - protein, 360 aa, unidentified
MPVERTELEFDRPLLFLAARTDTWVFKMPRMTSMGQEKMSNLLSPSAQQVTIGIDISKHHLDVHVHPEGSIQQFTNDRAGHAGLIAWITPRQPARIIFEATGAYHRGLQNALAKAALPGVKINPWQARCFAEATGRRVKTDPVDAAMRARFGATLQPDIPPARDPAVDSLAELLAARRALVKDRTAALNRGKNLTLPLLKRQNQQQLKQIEAQIKAIDREQAVLVAKQQRLKARFDILLSIPGLGAVSVLAMLIDMPELGSMDARQTGSLSGLAPITRQSGSWQGKSFIQGGRAQLRHALYMPALVAIRFNPPLRAKYLALRKAGKPAKVAIVAIMRKLIVMANALLRDNRMWTEEVTGA

SEQ ID NO: 425244 - protein, 431 aa, unidentified
MEISLLERNRPFGWKWKEPVPSWDALSSPSERTQKVQKGRNRPMKKNSKNETMKSKRETKKVAELEAGWTRLDEREANTLVIGIDLGDRTSAYCVRTLGQQIVKEATVATTATAMREAFQGLRRQRVVIETGTHSRWVAQLLELMGHEVIVANARKLKLISENNQKSDKVDARLLSKLGCMDVDWLHPVYQRSQAAHSDLLLARARQALVDARTALINHVRGSVKSFGSRVEKCASERFVEVARGALPEALKPALSGVLATLEEINEQIYGYDCQIKHLCHTKYMEAAKCLLQVNGVGPVTTLTFVLTIENKDRFEQSREVGPYLGLIPKKRQSGQRDPQLGISKEGDEMLRKLLVNCAHHILGAKGQDSDLRRWGLELVRAVERKGKKGARKLAAAAVARKLAVLLHRLWVTGAAYEPLRNRGAQQAPAA

SEQ ID NO: 425245 - protein, 430 aa, unidentified
MSYRIAGLDVHKRMLAVVVSDVEVDGEYQFERRMFGSSPDQLRSLAEWLLEQEVEEAVMESTAQYWKPVWEALERYWKPLRQKREGARRKSGTLHLAQAQSNRGPRGRKKDFRDAERLVKRLVARELTLSFVPDAEQRLWRTVTRRKYQLKRDRVRLQNQLESLLEEAHIKLSSLVSDLLGASARRMLKALAEGETNPGALAALADWKLRATPEQLCDALGACTDLKPIYRRLLKMALEQLQFLEEQIDRLDQELASLLHPHQDAVQRLAEVPGLGVESAQQIIAEVGPTAATFPSAKCLSSWVGACPGDEESAGVNYSHRSPKGNRHMRRVLNQCANAAARTKGSIFEIVYRRSVPRLGHNQTIGAIAHRHCRLIWLILHQAVRYEERGPAVTKQSNQRRTARIIRQLRSLGYRIDPPTPQHANPAQGQ

SEQ ID NO: 425246 - protein, 367 aa, unidentified
MKKVSTRAAAQSRNISQQKLTIGLDLGDRNSWYCVVEEDGQIQREQRVRTNAKALQEDFAAMPRSRIALEIGTHSPWISRLLSELGHEVIVANARKVRLIGESRKKDDRLDAQTLARLARIDPELLYPVKHRSAPAQADLTLIRARAGLVRARTGLVNTARGLAKSYGERLHSCNVRNMNPEKAEGLSPELQAALEPLLNAIESLSERIVEYSERIEQLAQQSYPQVALLKQIKGVGTLIALTFLLTLEDPHRFRKSRDVGCYLGLQPGRRNSGQSEPQLHISKEGDPYLRTLLVQGAQHILGPFGIDCDLRRWGLKLAERGGRNGKKRAIVATARKLAVLLHHLWVSGEAYEPLHNSNQRAMPAAA

SEQ ID NO: 425247 - protein, 356 aa, unidentified
MKHLKCIEKFVQAKAVFCGIDVHAKHWDLCYFCEGEVLEKLVIPGTFDRLKGHTESRYKGASSVHFVYEAGFSGFWLYRRLTALGYKCTITPPSRVPMVNNKVKTDKRDVEKLARFLAGGLLKNVYVPPPSVEMDRQLLRLLGGHKKKMTRVKNQINAVLRLHGLSWDKTDGCRWTKRHVTWIEGLSFDREASRFVLDQYLEEYRFLRARIADLTQRIRKLSRSSDYQKPFVYLISCKGVGLITAMTFLLELGELSRFPDTVQFCGYLGMTPSQHSSGERVRLGHITHEGNSHIRHALIESAWTVIRYDPSLREKYDRLRARGTNGKKAIVAVARSLAVRLRRCLLEETPYAIGTC

SEQ ID NO: 425248 - protein, 357 aa, unidentified
MAIVAHTYTHVIGVDTHARNHAISILACPHGQSVDEAQFPATSAGLARALTWVGRRTGSDLGALWVIEGTGTYGARLARTVAQAGYAVIEAPRMNARAHRSIGKSDPLDARRIAGAALPLVLTQLRTPRADDGVRAAVRVLLASRDHMSTERTATINALTALVRVADLGIDARRPLTATQITTIASWRTRDEALATATARWEATRLAKRVTALDADLKEITKRITNLVRHSPARGLLDQPGIGPVTAAVALTAWSHLGRIRSEAAFASLAGVNPIPASSGNTVRHRINRGGDRRVNRALHMAVVTRMRMDPTTRAYVERRTAQGRTLKEIRRCLKRYLARQIYRHLNTAAEHDLAAA

SEQ ID NO: 425249 - protein, 339 aa, unidentified
MDKRQKDGGFWLGIDVAKQTFDASLACLDAVPSQWSKLPVSRFSMSMSGVADLLAWLQARVPLGECRGVCLESTGVYSQRLVAMLRTQDLPVVSMVNPALPVAFRKSFALHDKCDRVDAAVLALFGVVHQPLANCVDTPLYQRLRQLRRLHEDFTDDIRRWENRLEQCDEPALRRAIQGTLRHLKTKADKVWKQIEQWVQDHDELHRDVELITTIPGIAAKTAIAVLAEAGDLRQWKPNQLVSYAGLFPKVHSSGTSVARKPRLHGGGHKRLRTGLFLPACPAARHHPQFSQWRLQLLERGKAKKAVIAAIMRKLLLLIRSVVVHQRPYDPHFKAKIPA

SEQ ID NO: 425250 - protein, 449 aa, unidentified
MREPQEIEDAEYEQILERVCAIDVAKASGKVCTRVPHPSRPGKRRTRVRDVDATTNAILELGGHLVGEGIEKVTLESTSDYWRIWFYLLEAVGLDVQLVNARDIKNAPGRPKTDKLDSVWQAKLTERGMLRPSFVPPAEIRRLRDYTRLRTDLIRERTRHWQRLEKLLEDALLKVSAVASTLDTKSVRDMLEALIAGERDPKVLAGLARGRMKAKHAELLEALTGKFDDHHGELARMLLDQIDHLTGQTGTLTTRIGELIAVIPAAQGVDADGVTGPGAGTGPDAAVASAMTRLDEIPGISVHGAQVILAEIGLDMTRFPTAGHLVSWAKLCPRTIQSGAKNHSGKAGKGNPYLKGVLGEIAAAAARTDTFLGERYRRIVKRRGKLKALVAVARTILVIIWHLLADPAVRYHDLGAGYYASHTDTGRKTRNHVRQLEALGYTVTLAPAA

SEQ ID NO: 425251 - protein, 346 aa, unidentified
MIIIGCDYHPSWQQICWLNTVTGETEERKLEHASGEAEKFYRALPGPARIGMESTGNCQWFVEQMTKMGHQVWVGDAAKIRACDTRQQKHDRRDAALILKLLVEGRFPRIWMPSSEERDVRQLLIHRHKLVGMRVQVKNELQHLAMNQGITKKRRLWSVAGEKVLCELPLKPWASRRREDLLRLRSLLDEQIALLDEAVRKVAAENEKAQLLMTQPGVGPITAMAFVLTIGDVHRFPRSKQVASYVGLIPREYSSGGHQRFGSISKQGNRFMRMLLVEAAQSVVRYDPQFRNEYLHRCHKKPKGVAKVAAARKLTVRLYWMLKTHTAYPQIARVESSSRVPLASAS

SEQ ID NO: 425252 - protein, 404 aa, unidentified
MKGPIVSIDVSKGKSDYQAFKNLNVKYTGSRSIKHTKEGFDEIVNLVREMEKKLKTEVCVVYEATGVYHRVLKKVLEDNNIKQFIINPLLSAKTRKNDSLRSPKTDKLDPKSIAKTYYSHSLHNSHKPETIYHELRELSRYYEDILVHIRKDKVAFRAQLDIVFPGYDALYDDLYGPVALAVIEKYPHPEMLQKKKINTVSKVIQSKTCHRQAVSDTMADRAIEYSKTIYSGCDKNDIEVLILQRFIKKLNEDMAEAERTIGEMIKLAQELPNFNIIKSIPGIGDNLAARIIAELGDMTRFKKKNELVAFAGLDPRISESGKNDGDHMHITKKGNKRLRCLLYLAVTCSIRLKRDDNSIKDFYIKKKQQSNPMCSKAAKTACASKLVRLIYSMCKTGELYQYNK

SEQ ID NO: 425253 - protein, 423 aa, unidentified
MKVVYPICCGVDVHKTFFVATIITTEGIQPKYQKRRFSTFNNQILAFKAWLLENNCRDVCMESTGKYYVPVYNLLEDSINVTVANPKWVRAVKGCKDDAKDSKWIGDLFRLGLVPGSFIPKKDIRILREYTRYRFKLMSCKSSEKNRYQNVFTVCNVALDAVVSDMFGKSASSITDYIVNSDTFNPEYCVSLLQKSLKKKADEVVDSITGFQMTLSQKHRAKLVREHYNYLENQIQKLDDAIDELAKPFEPYISLLCTNPGIRSLSAIMVLSEIGDDMSQFGSSKRLCSWAGLTPGNNQSAGKKKSVRINRAGVYLKPTLVQIAHAAVKDAKNTYYKTKYERLSKRRGKKRAIIAIARMILTAVYHMLSTGEVWNPRDLDQIDMPLELREKEMQKSIRRAANLLVAQGIVDPNAILIPLSDTA

SEQ ID NO: 425254 - protein, 338 aa, unidentified
MVYGAIDLHMRYSQIRIIDDAGVAQREQRIPTTPERLVQAFASHGPMRILLETGTESEWVARALEAAGHDVIVADPNYAPMYGELTRKVKTDRRDAIALAEANRRGWYRPTHRVSATQRETRQILRVRRLLVSTRSSSVSLIRSLLRQSGYRLASGSCSTVPARVARLAVPANLGDTLAPLCRQVAALTREIAAIDARVAARVADDAVVTRLQSVPGIGPIVATTFRAFVDTVERFDHAGQVSAALGLVPREDSSAERRHRGHITKAGPRELRSLFVQAAWVCWRTPRSATLRAWVERVAARRGKRIAVVALARRLSRILFAIWRDGTTFDAMKLATA

SEQ ID NO: 425255 - protein, 309 aa, unidentified
MTAVGIDVSKAMLDLAFNDAAKVEHFHNTGAGIRRLVQLLRARPGVRIVVEATGGYEEAVLAACAEAGLWIARINPRQARDFARATGQLAKTDNLDARMLADMASVFHARLRRHVPAEPWQAELKCWLRRRRQIVDNIQRHRQQMALTLPAIRSLVKKTLLCQQRELATVDATMKALVQAHTTPALSSTKGLGPVFQSTALALLPELGLLSRQQIAKLVGVAPLNHDSGKSQGKRQIYGGRSEMRVALYMATLSAVRWDPILRAYYQQLRARGKLAKVALVACMRKLLTIVNARRRDELHGVDAIACAA

SEQ ID NO: 425256 - protein, 344 aa, unidentified
MTNIQDKETTREAKPDLFAGIDVGAEELILAVRKNGKPFDPQKFANTPADRSRLVKKLVKLPGIIVCLEATGIYHFDLSLALHDAGVLLMVVNPKASHNFAKVLMKNSKTDVVDANTLAEYAARMDFVAWTRPSDETIALRSFARRINALTDQKAAAKNHLHALTATSETPKAVLKDAKLAITQLEKRIDRLTADARVLIGKHPELKRILALLTGIKGVGETSAIALMGELLLLPPDLSHREWVKFAGLDPRAFDSGKSVHKKTRISKAGNRHIRAALYFPALSAKQHDKHVKAYFQHLMDNGKTPLQGVCAVMRKLLHAIHGMLKNNEPFDNTRFYAIPESIG

SEQ ID NO: 425257 - protein, 399 aa, unidentified
MGQQLWAGVDAGKSEHHCVVIDGDGQRLLSQRVANDETVLLELIQAVITLADGGDVTWAIDLNHGGAALLITLLITHEQRLLYIPGRTVYHASGGYRGDGKTDAKDAAIIADQARMRRDLQPLRAGDEIAVDLRILTARRIDLVADRTRAINRLRAQLLEYFPALERAFDYGHSKAALILLTGYQTPDALRRAGVARLEAWLRKRKAYNATAVAATAIAAANAQHSTVPGQQIAAAMVARLAKEVMALDTEIGDTETMIEDRFRRHRHAEIILSMPGFGVQLGAEFLAATGGDMTTFDSVDRLAGVSGLAPVPRDSGRVSGNLKRPRRYDRRLLRACYLSAQIAIRTDPASRTYYDRKRSEGKTHTQAILALARRRLNVLWAMLRDHAVYQPTTTAAAA

SEQ ID NO: 425258 - protein, 358 aa, unidentified
MQRNKISFKGQKIFIGIDVHKKNWDVAIALEVGAVRRHSQKASAKELFDFLKKHYPDGDYLAVYEAGFSGFSTYYALKEFGIDCIVIHAADVPTTQYEEVMKTDSVDSVKLVRSLKAGLLKGIYIREKENIDDRSVVRIRKAIQRDLTRYKIRVKHILHSNGVILPKRFEKPGSHWSRAFIKWLKEDVTLLSSSRNSLDLLLRQVETIRTTLLESTNLIRRLSQTERYKKNYDLLTTIPGIGVMVSMCILTEVYDVRRFHNEKEFAAYLGLIPTSHSSGDKVVHGEMTFRGNKQLGPMIIEAAWVTVFRDAGLGSLYQRYTERMKSQEAIVRIARKLSNIIFAVLKNETKYVPYQTGK

SEQ ID NO: 425259 - protein, 376 aa, unidentified
MTQIAPHSATVHLAIELSRSAWLVAARLPGVEKPSLHRIEGGDTAALLALVETLRARAAARLGAPVRVACCFEAGRDGFWLHRLLTAEGLAAHVLEPTSILVSRRARRAKTDRLDALGMLRVLAAYLGGDRQVCGMVRVPTPEEEDAKRPHREREELVRERVRLENRIAALLATQGVRERPSLRSWERDLAALRTGDGRPLPPHLRAELDRLRRRLVLTLELIREVEAERDAALAAEPRDAVGRKIAALCRIRGVGANFAAVLAREVFYRAFANRRQLAGYVGLTPVPHQSGEADRDRRISRAGNARARTTLIQLAWLWLRYQPDSAPARWFRDRVGALRGRTRRIAIVAMARKLLIVLWRYAETGLVPEGVEVAA

SEQ ID NO: 425260 - protein, 359 aa, unidentified
MSILADTVDGVIGVDTHRDTLAAAALSPVGGILAQTATRADATGYQELLEFADTQTLRDPARRCWAVEGTGSYGAGLTAFLHTHGERVVEVARPKRPARRTGAKTDAIDAVGAARETLGHQHQTLPRRRGDREALRVLLTTRRHATSGRVAAINQLKALIVGAPEELRAELRGVATKGQIDRCVGLRDRPARPLEHRMTVCALRTTAGRIRALQAEIDDLTAALDPLVASIAPWLVELPGVGPITAAQILVSWSYAGRLRSEAAFAALAGTNPIPASSGQVTRHRLNRSGDRQLNAALHTIALTRLRDDPETRADAARRTTQGKTRRDVKRCLKRSIARQLFKLLERYDQPGVEIIRAA

SEQ ID NO: 425261 - protein, 457 aa, unidentified
MRQRGKRTKGLEEAHPFAGMSQVNINAAGVDIGAEEIVVCVPGEGNTQIVKAFGNYTVDLQNIGKWLCEHQVRTVAMESTGVYWIPLFEELERQGFACLLISSRSLRRVPGRKSDIQDAQWIQTLHSYGLLESSFRPQGELVVLRTLLRHRAQLLEHRAPHIQHMQKALLQMNVQLSQALSDVTGETGLLIIRAIVSGERDPQKLAAQRDRNCKKSAEEIGKALTGTWRTEQLFIIKQSLELYDFYTQQVETCDAEIDRMYTLTRPDWEAGEVPPLSVRKRNSHSKNAPQNTAEIRKHLKRISGVDLSVVDGFGVSIAQTVIMEVGTDMSKFPSEKHFCSWLGLAPKHEISGAKVLKNRTMKTKNRAGQAFRMAAQSVKRADCVFGSLYRRLKSRLDKAQATVATAHAIARVVYRMLKYQVEYETINVEEYEKKYKDQQIKYMKKKAEKLGFQLVPA

SEQ ID NO: 425262 - protein, 316 aa, unidentified
MQSILDLGADVDSRFIVLACAAGSFGPQRIANQRKAILGWLRTVPRGSRLGMESTGGYHELLAELACKAGLHVFVINARDLRRYAEGIGRRAKTDRVDAEVIARYVAREHGELHAYLQPTKAQRELAQLIGRRAKLVQTKDAISQSLRGVPALRADTKRLIAGIDRLIARVESMMQRALQQTPAARDAAEHIETIPGFGTLSSTYLGHAFTRLPYANSDAVVAASGLDPRPDDSGQRKGRRRLSKRGPGEERRLLFNCARSASLTKLWQPYYQAQLAKGLSSTAATVILARKMLRVAFAVYKHGQPFNPALLGDRA

SEQ ID NO: 425263 - protein, 333 aa, unidentified
MLPPNCGTATPYILRNTVGLDISKLTFDATAIVGNAEYSAKFDNDSKGLNQFSDRLKSLGCQNLHICMEATGNYYEEVADYFAQYYSVYVVNPLKISKYAESRFKRTKTGKQDAKLIAQYCRSAQESELVKRQKPTDEQYRLSRMTAAYAQIKSECAAMKNRYHAAKDEEAAKAYAEIIKAMNEQLEVLKEKIKEQTEKPKCKEGVKCLETIPGIGRMTAAVLFHHLTSSKFETSNKFAAFAGLSPQQKESGTSVRGKGKLTKFGNRKLRAVLFMPAMVAYRIRAFPDFIKRLEEKKKPKKVIIAALMRKLAVIAYHVHKKGGDYDPSRYKSA

SEQ ID NO: 425264 - protein, 350 aa, unidentified
MWIIGCDYHPGFQQIAMVDSDTGEVQERRLGHRQEAEQFYRHLKEQGARVRVGMEASGQARWFERLLEELGFELWIGDAAEIRTKRVRKQKTDRQDAQLLLRWMLENRFPRIWVASWENRDLRQLLWHRHRMVQARTRLMNQLQAVALNEGLRRKKGLWREAGRKQLETLALAPWASQRRRDLLELLDRLSPMIAELTEKVEQEASKSPAAQRLATHPGVGPLTALAFVLIIGQAERFGCGNQVASYLGLAPREESSGEQQRLGHISNQGNSLLRFLLVEAAQVTVRSDADWRRKYFHLALRRGRKIAKVAMARRLAVRLYWMWRKGWDYQQWKQFGPHAGRPEPGVGVR

SEQ ID NO: 425265 - protein, 412 aa, unidentified
MDVIVPRPAALDVHKEQVTACVRFPAADGSRAQEVREFKTTVGGLLVLHDWLKAHGVTQVAMEATGVYWKPVWAVLEDSFELMLVNARHVKQVPGRKTDVKDAEWLCQLLEAGLLRASFVPPKPIRQLRNFTRYRKAQIAERQREANRLHKALEDTGIKLDCVATDILGKSGRAMLDALCEGTTDPEVLANLAKGKLRAKIPALREALEGRFEAHHALLVSSILAHLDFLDEQIERLSEAIEEQLRPFQPAVELLRSLGGIETRTAQNILAEIGTDMSVFPTAGHCASWAGQCSGNDQSAGKRRSGRSRKGPKWLDDALKDAAMAAIRTNDSYLQAQYRRLKPRIGHGRALGAVKHSIICACWHMLKNGELYRDLGSDYFRKRDPERQTRRLVAQLERLGHKVTLEALPEAA

SEQ ID NO: 425266 - protein, 362 aa, unidentified
MTFFIGVDLHKTQFTVHVRTDEMAETLKQIRQYKTDKTGYAEFTERIQAYCESGACVKIGVESTGNTRFFKHQVEKAGAEVTVINTLKFKVINESAKKTDKHDAATISEFLAKDMLPESYLCSKETENIRWLLKSRERLVRSIVGQKNEVHALLVSMGLKDEQRSLQSKKGRQKILDVLESNNDYVLEAQSVKLMVEIISQMEAAVKVIEKQLSELTKDDQMVNRLLTIRGCGKITAWTIRAYTEDINRFSSAKKYAAFCGLVPWVSDSNETIRHGKITKRGPQELRVSFVQMVMGIRRCKDTANWRIMQRYDHMKTHKGSGKSIIAAARKLAEIVWAMLSNNNDFDREKMYGKYKPTPLAV

SEQ ID NO: 425267 - protein, 360 aa, unidentified
MNYNVQSKCRKIYVGMDISLLSIEIYVLLNANEGKSFGKIGNTEEEINNFFDGFTDPNDTIVAVLETGTHSTSIARLLKNRGCEVIVANARNLAFIYKSDKKNDKVDAEKLARMAHYDPKLLSPVNIIDEDRQKALVAIKSRDELMKTRTSIINNIRGQLRHLGISDKGYTSEIINQIYEILPEQDKPLFRGLFVSLTAITEQIKYYDKLIEKISETYSETKILQQIKGVGPLTALHFALIIGDPKRFSSQQCASYVGLVPKQDQSGEVDKKLGITKSGNKMQRRYLVQCAQYMLGPFGEDCDIRDWGLRLMQRGGGIAKKKAIIAVARKIAITMLALWKNPDIKYDPHYKNNRKKTKSA

SEQ ID NO: 425268 - protein, 374 aa, unidentified
MKHYSTVYVGMDVHKESFSLCCYTNEKEQAEYSQRVPADYSKVINYVEAMRFHYGDDVLFVCGYEAGCLGYTLYHELTAHNLKCVILAPTTMPVPSGRKKVKTDKRDAALIARCLAHHDYSPVHIPTQKDEQVKEYLRMRDDHKLALKKVKQQINAFCLRHGYHYDGTKSHWTQAHLSWLRTLKVDALYQEILEEYLLTYDYLMGKLVRIDQRIEELASEDEYRENVAELCCFIGIKTQTALSVITETGDFKRFPDAEHYAAYLGLVPGENSSGESQNHLGITKAGNRHLRMLLVEAAQSYSRGQIGHKSKVLANRQSGNSPAVIAYADKANERLRRKYYRMVLKNGKKTNVAKTAVARELACFIWGMMTENIA

SEQ ID NO: 425269 - protein, 341 aa, unidentified
MDKELYFGVDVSKKTLDLAYYDGETIDWKNAHIKVSNDDAGFKKIGSWVAKVGKDFDTFLFCMEYTGLYNQNFRLWLESKEYIYGMVEPRKMHRFEPDLDDDQRSLDRIKTDELDAFRIAIYCEQNHKKILRNPSKLPSPVYFKLKRLLAERKQNTKQSTLYKQQLHDICAYDTDLSVERKKLLLKNMKENLKAIDKEIDSYMQEDANISKNYNLLTSIPGIGRIIALETIVLTENFTAISNPRKYACYIGIAPFKKESGTSVRKKTGVSKKGFSEAKADLSIAVLSAIKNNPSIRDYWIRKRKEKCGGIVLNAVKFKLVLRMFAVIKRGTPYVETDAYKN

SEQ ID NO: 425270 - protein, 339 aa, unidentified
MDHVAIDLGGRESQICVRRPDGTVVEERRVRTSAVPAFLQARPGCRVIVETCSEAFWVADAARAAGHQVRVVPATLAPTLGIGARGIKTDRRDAQVLSEVSCRIDLPSVHIPRPAAREAKTLCGMRDGLVRSRTLLLNTVRGWLRTQGLRLATGAVLSFGARVRTAVGATLPDYVARQLQTIEQLHAAIASADREVRALAEADPIARRLMTVPGVGPVTAVRFVAAIDDPTRFTGAHAVEAYVGLVAGQRSSGDRTRHLGITKAGSPALRWCLVQAAHCAKRTLPAGPLRDWVEGVERRRGRQVAVVALARKLTGILYALWRDTSVYDPLRATAAPTRG

SEQ ID NO: 425271 - protein, 364 aa, unidentified
MKKISTAKIKSQAAKKKVTIGIDLGDRSSRYCLLDEEGVVIIEGSTPTTKAGIAKVFGAMARCRIALEAGGHSPWVSRQLEALGHEVIVANPRNVRLIGESTRKDDRLDARTLARLARIDPMLLSPVRHRGAEAQADLAVIRARRVLVKARTMLINAARGLTKSFGERLRKCGAGQVGPTLAAEVSPEIRAAVLPLLAEVGALNQRIAAYDDQIEQLAKEHYPEVARLKQVKGVGTLIALTFVLTVDDPSRFQRSRDVGCYMGLRPGRRNSGKSEPQLHISKEGDRYMRSLLVQGAHYILGPFGIDCDLRRWGLKMSERGGKSAKKRAVVAVARKLAVLLHKLWVSGAVYDPLRNSHQLVARAA

SEQ ID NO: 425272 - protein, 378 aa, unidentified
MGLVEGNAYIGLLVEESNTLLDWGNMVDVSSEAKSSATGVTNPYRRTEHCDKIHAYRCDKEVGIIGIDISKEHLITSRGRVRRYENSKKGYEEILKMKPCVIVLEPTGVYAIRPSQYFKERGVRVLQVSPNVLSREKEFRGKKTDFYDAEKLENMVDKAKEYDYNPLKELVTLYLFLKDIETKYKNRLKRALFLVSDNDKVSKDRLEKLAKGDFTQEELYQLEYTPIVLEEIKILAKNILETQERLKEVRRMIEGQVPQDHVLLTIPSVGRLAAGIVGDVKRFPKPESFVAYCGLDPVVERSGKAVISRGISKRGNKYLRSLFYFLAMRNYSRNPTLLKFYETHKDRLKGKKLYVALARKLARVVWSVWYNNKPYEPK

SEQ ID NO: 425273 - protein, 325 aa, unidentified
MQTETNYTGIDISKSFFDLAIPFEEKYRHYKFSNDEAGFKALLKVLPQEVHVVMEASGPYYLRLAFFLKAQQIAVSVINPLVIRRFSQMRMSRTKTDKKDAVMIAEYGKTEKPATWKAPEQHVIWLQQREAVLSNLMKERTALLNQLESFTCSGMLDKALKKTLIKALGYKEDLIAQLNKEMEELAGRHYAEMLKALESIPGMGKKTAMALIVVSGGFNRFDDYRKLSSYIGICPRLFESGTSVKGKSRICKMGMSRIRAMLYICSWSAKRYNKACKELYDRLVAKGKAKKLALIAVANKLLKQAFAIATQKTKYNENYSNITCF

SEQ ID NO: 425274 - protein, 424 aa, unidentified
MKVTYQTCCGVDVHKSFLVATIVKTSGGIEPSYQKKRFSTFNNSILEFKQWLLDNDCHDVCMESTGKYWVPVFNLLEDEINVVIANPKWVKAVKGNKDDTKDSKWIGDLFRLGLVKGSYIPCKIVRILREYTRYRYKLVSCRSSEKNRYQNALTVCNVALDSVVSDIFGKSSTSIIDYLLEQSGTSINHEEIASKLLRSLKSKEDAVIESVEGYQMTDAQKYRMRLVRAHMDYITAEIKDVDKMIENMISSNPDFENAVQFLCTIPGVKRDSAVTIISEIGTDMSQFSSSKRLCCWAGLTPGSNESAGKKKSVRITRAGVYLKPALVQCAHAAVKSDKSPYYKKKYESLVKRRGKKRAIIAIARMILTAIYQMLSTGEQWNPSDLYKIDMPEALVEKQKAKAIKQAKKLLQREGILPPDEPLTS

SEQ ID NO: 425275 - protein, 462 aa, unidentified
MPGREERETSDRSTRPIEGLPVIRASVAGIDLGSERHWVCAATRDRSAREVASFGATTAELRRMAEWLKIRQVESVAMESTGVYWIAPHEVLEGQGLQVLLVDTRQLARVPGRDKKTDPTDCEWIQRLHSCGLLRGSFRPKEAVCMLRTLVRDKANLVAESGDWLRRMQKSLDQMNVRVHRAVSDIDGVTGMAILRAIAGGERDAQKLAKFRNARCSKTEQEIAEQLNGHWREDHVFSLQQGLKMYDAVQERIVAYEQEILRRLGEMEADEPPQPTAPPLQNTNKAKAIKKRGQEAKRQALYRMSGVDMTQIDAVGVETVEVVLSEYGPDLSRFPTEKQFVSHVTLAPRVPQSGAKPVKKKKRNSASTRVAAALRMAALSLRHSQTALGSYYRRIAQRCGGDIAVFATARKLATLVYRLLRWGQPYVDEGAAAYENRNRQHRIARLAATAKQLGYQLTPVTA

SEQ ID NO: 425276 - protein, 344 aa, unidentified
MKIATIGLDLAKNVFQVHGVDEHGFAVLRKQLKRNQVAPFFARLEPCLIGIEACGGAHHWAAKLTALGHRVKMMAPQFVKPYVKTNKNDALDAEAISEAVTRPNMRFVPAKSPEQQSVLALHTARESFVHARSAQANQIRGLLIEFGLIVPQGIRHVYKRAPELIEDASNELPGRFRLLIDRLLQHLKELDRQMRELEREIEVWHRGNEVSRRLETIPGIGPITASALVASAGDPSNFKNARQFAAWIGLVPHQNSSGGKTQLLGISKRGDVYLRTLLIHGGRALVQLAKTRADRAGTWLGRLVGRRHHNIAAVAMANKNARLAWALLSTGKAYEPMHAPTAAA

SEQ ID NO: 425277 - protein, 438 aa, unidentified
MSNKVIFNLDDLFISVGIDVGADFSWMSIALPNQQFVGKPYKILHNSIDSLTTAVSKIKEAEELYSLESRIFLESTGIYHYPLFCYLRDKGFNCSVINPIITKNSTNINIRKVHNDRFDSKKAALVGLKPDLKVSLMPSDLALNCRNLCREYYDLMDNRSAYVNKLQGELRMAFPQYLGIFSKVTINTSLTLLETYTSPSAFLEADKQEIIDIIKSTARFGLTYAQNKYNAIIQAATDANQFGYIIDSNIKRIRLYISFIRKYDEEINNILESLHELVDANEDADFVKQIHLIETFKGAGFLSAVSIMGEIGDFSAFSKPKQLFAYFGLDPAVKQSGKFEGTKVQMSKRGSAIARRVIHTLTLQSISISRNGEAKNPVLREYYLKKCDSKPKLVAMGAVSHKVCNMIFAILRDNKPFKIIAPQEHIKQYNAAKCDIAA

SEQ ID NO: 425278 - protein, 378 aa, unidentified
MNAQGTAHGVKDTLSVAQLYMALELSDAKWLVYLGDGRRAPSHYAVQAGDLQRLLEVIGKAKARCGLVGKVLVHSCYEAGRDGFWLHRWLVEQGIENLVVDSASIEVNRRRRRAKTDHLDGAKLLAMLMRYHAGERRVWSVLRVPTPQEEDARRAHRELERLSAERTAHSNRIGSLLVLQGVRAKNIGGRGWQGWLEQHGAELTPCLRAEIERESARLALVKAQIKMIEDRRGEEIKAGLHLQVAQLERLRAIGQASAWLLSKEVFGWRTFRNRREVAGCLGLTPTPYDSGDSQTEQGISKAGNRRARWLLVELAWAWLRYQPNSALSQWFNRRFAPGGKRLRRVGIVALARRLAIALWRYLQHGELPMGAELKACHV

SEQ ID NO: 425279 - protein, 325 aa, unidentified
MINSTKYIGMDVHKESISIAVRNAAGKIVMECVIETKANTILQFFDGLRGDVQVTFEEGTWAAWLYDLLKPHVAKLVVCDPRRNALLQDGNQNDRVDARKLSDLLYMNKLNAVYHGDHGLRTLKELGRSYLTVTRDQSRVMSRIKAIYRSWAIPCSGKQVYASRHRAEWLGKIQEPGVHRRAEWYYQQLDALRTLRQEVRRDLLAESKKHKIWKRLCAIPSIGPIRAAELLSILQTPHRFRTKRQLWTYCGLAVVTSSSADHEVEHGQLRRRKKRKETRGLNENCNHDLKDLFKGAAVVASTKPGPFAEFYAALLGKGMRPEMAS

SEQ ID NO: 425280 - protein, 340 aa, unidentified
MNPPHRFVQQRPKDVFQVHGISANGRVIFNKTVKRAKLLQFFEALPPCVVGMEACGSAHHWGRELGKLGHDVRLMPAGYVKPYVKRGKTDAVDAEAICEAVCRPTMRFVELKTEDQQAILAIHRTRDLVVRQQTQIVNMIRSILREFGHILPTGVGAILTFAKRHLDGDHPDMPELANGILGTLCHQLVGFNTRVVGYTRMIEQHAMMTADARRLMRIPGIGPITASAIIATIGDAKQFRTGRDLAAWLGLTPLNKSSGGKERLGKITKKGDRYIRKLLIVGMTSRALMARKHPERADLWTAKMLAQKPFRLATVAMANKAARIVWAMLTKQQDYRQPGT

SEQ ID NO: 425281 - protein, 338 aa, unidentified
MYYTGIDLHKFTSYLTTIDSDGCIVKQANIKNVNYNFLQYFSDLSGEHQTTVESTCTWYWLNDLLTSINIPLTLAHAKYVKAIAYAKVKTDKVDSHILAQLLRLNFIPQAHKISNENRTLRDALRARLKIVQRCTSVTNSMALLLAKYNLTEPEGLQDIPKLQYEQLSVHASLLKEQMLTLEKSLYPYLIPNEDIQRLLWIPGIGKMNAFTILLEADDINRFADVKNFFSYCRLVPSARNSAGKSKQRSSKDGNRYLKIVFTDAATHAVQYYSEIRKYHNSLLRKKSKQIAKTIIAKEIAEIVFYILKNKTNFNNKFKGVELQHKKSLQWPRVVSPDV

SEQ ID NO: 425282 - protein, 347 aa, unidentified
MLIIGCDFHPGFQQVAIFDNRTGEIQERQLQHRTEAEQFYGALAGQQVLVGMEACGHYPWFERLLAELGIELWFGDAARVRASVVRKQKTDRRDAEHLLDLLRQDRFPRIWVPSLEVRDVRQLLVHRHKQVQARTRTKNQLQAMALSCGVQKKYKLWTKAGRAELEQLPLLPYAAQRRKRLLEALDGLEAEIVELDRRVQDEAGQRPEAVRLMTHPGVGPVTALAMVLTLGPAERFESGKQVGSYFGLIPSEDSSGGKQRLGRISKQGSSFLRFLLVEAGQTAARYDPQLKRFYRRLAVRKNRGVAKVAVARKLATRLYLMLREEWTYAQLCQAVMQVSPSHSVAGE

SEQ ID NO: 425283 - protein, 462 aa, unidentified
MPTRSRSRNAIPATPSIEEGPQPRPATGVGYVGLDVSQDEVVACLLLPDGRETVRRWAVANTQGGAEALAARLAALAGEHHLAGGRIGVEATNLYWWHLACLLKDTPLLSGVAHEVYALNPKLVTGLKKAYTDGGKTDRRDAFFIAERLRIGRLPAPFHVDVLYAPLQRPTRFRAHLAQSLAREKNCFLSFLFLKFSAFGQQDPFGDPFGATSLAVLEHFSTEELVQMPFEDLAEFVQRQGRGRFADLAEVAATLARAARDSYRLGEHAVEPVTLVLGTTMATIRTLHAQIKEVDKTIAREVAALPPERRTIGSVPGLGPVWTASLLAEIGDIHRFGDDAALARYAGLVWNPHESGSFQADDTALSKAGNAYLRYYLVEAANSVRLHCAEYRDFYAAKLAQSPKHAHKRAVVLTARKLVRLVDALLRAGAVYHPQDRKEGHTPPHAARLRPHQRTPLVASAS

SEQ ID NO: 425284 - protein, 326 aa, unidentified
MSRIQGKTVSPQLATEQVYVGIDVSKSRLDVYLHPAGVSHSVTNDKPGLQKLARVLRPYQPELIVLEATGSYHRRAHRHLHDAGLRVAVMNPFRTRKFADMIGQLAKTDAIDARSLALFAAMVTPDAKAPPAPAQVDLAALLVARRQMIQAKGALQNQLSVTEHSLIRQQMRARIKMDERHLTALDVEIRQLLRRESNLKHRFDILTSIPGIGLISAATMIAELDELGQVTAPKIAALVGVAPMNCDSGAMRGQRRIRGGRSSVRNTLYMAAVAAVRSNGDFAAFYNRLRENGKPFKVAITAVIRKLAIAANTLITEDRKWELARP

SEQ ID NO: 425285 - protein, 354 aa, unidentified
MMIIGCDYHPAFQQIAFVDTDTGELQERRLQHREEAEKFYRDLAAQGMKVRVGMEASGQARWFERLLAELNFELWIGDAAEIRTKRVRKQKTDRQDAQLILKLMLKDDFPRIWVPSWENRDLRQLLWHRHRMVQARTRIMNQLQAVALNEGLRCKKRLWREAGREQLEAFRLAPWASRRRRDLLELLDRLNPTITDLTRTIEQEVEKCPEAQRLMTHPGVGPLTALAFVLIIGTAERFQCGKQIASYLGLVPLEESSGNRRRLGHITKQGNALLRFLLVEAAQVSARSIPEWRNKYFHLAMRRGRKIAKVAMARRLAVQMFWMWRKGWDYEQVRKFGSHAGQPGNRDGVKLNTE

SEQ ID NO: 425286 - protein, 433 aa, unidentified
MNQFWVSPYLGGYLMSKSNIARQLAQVQPGTLHAGVDLALEQNVVVVINEKAERLDHFSFPQDRGGYDYFLRRLEGLRQKYQASGVVVVMEPSNYFWKLLARELEEKQITYHLVNAYTVKKHREGDQLDRSKDDRRDAGQIAELSRNGNYTETHLQKGAYEELRQYATLHDQSVQGIQRERQVLWGLVGQVFPELSRVFKNPVGETSRALLVTCASAAIIRQLSIEDFIAQVRAAYAGKRLLVSKLRLAHQLAATSIGVTEGLEAIQLAIQVHLAELQTFQKQLKRVTTAMAACLATLPEAPYLLSVKSLQAVSAAIFLAEVGDPKRYQAAAQWVKLAGIQPAPNNSGKKQRSQTPMSHQGRTRLRTMLFFTCLRMVRVDNHFAQIYAHLQRRQNNPLTKMQALGVLMNKLLHILWALIHNQTFYNSSFGQSI

SEQ ID NO: 425287 - protein, 351 aa, unidentified
MIEQISEGQVVVGVDTHDLNHVAVGVDHLGRRLGNISVATCPAGYREFLGWALGLGDIAAVAMEGTGSYGRGLCRLLQARGIRVVEVARPSRRNRRNRGKADLMDAEAAARSFLGGEVSAEPRGADAPVAMIRSLRVARDALVNQRTQSINQLRALIVTADAELREALTGLSTTQLIDRVARFRVAGLGCPSDASRFSMRQLARHVVDIDTRVAELDDQLTPLVSNRAPELLAVHGVGIEVAGNVLVAWDGARRIRSEAAFASLCGVAPVPASSGKTNRYRLSRGGDRAANRALWRIVLTRMRTDERTREYVARRQAEGKSKREAVRCLKRYVAREIYHVLQRLAPAELAA

SEQ ID NO: 425288 - protein, 411 aa, unidentified
MNKDIVLIADYHDENIEFRRFNEATGQEECFNRPNERDVWLRLLAECQAAAAGQGGRVVLVMESTTGWARMNALVRGQAELVLANVLQMPLPPKAHRRKNDRIDTGRILREYRNGDLPRAFQPRPAWRRLRRLVGLHVDLTRRQTALRNYLNRLLAHETWRERGKGLWSQRGQGGLWLWAQGLPAWDRLVVQQKLDEREEVAERLAQGHRHLKRLAGRWKAARKLDAIHGLGALSAVGIAACIGPVGRFADAEALIAYAGLAPGVRDSDGSRRDGHVGGGGTDKLLRFYLIEATTWARHIPRYRGAYLRMLKRRGKKVARLHLARLLLRSIYAVLRYGREFDPAAPQPKSRPLPSPSGGSPPEGIVGLQSQHNIHNIDTIVNQCHRTTTPDREAGVGRARRRAPAVAPRRP

SEQ ID NO: 425289 - protein, 330 aa, unidentified
MAKHVFQVHGINAAGECVLRKRLRRGQVISFFAELPRCLVGLEACATAHYWARELQAAGHEVRLMPAQYVKAYVKRNKTDAADAEAICEAVRRPTMRFVPIKTAEQQAAVLLHRGRERLVRQRTTLVNALRAHLAEFGVVAPAGLRNVSQLIAIVRDASDGRLPDLARPVLRVLATQVELAQAAVAKVEKELTAWHRSNPLSQRLATIPGIGPIIATAIAAMVVEPSGFASAREFAAWLGLVPRQHSTGGKARLGGISKRGNRYLRRLLINGASANLLRSKATNADPWVIGLRRRRPSLVVAVALANKTARIAWAVMHRQEDYRSLAAAA

SEQ ID NO: 425290 - protein, 433 aa, unidentified
MHDVEDEPLFAERAAGIDIAKAGIEVTIRVPSDARRGARQQETRSFRTTRKDLLALADWLRCWQVTKAGMESTGDYWKPVYFLLESEGFDCVLYHAAQVKALPGRPKTDKLDSVWLAKISERGSLAGSFVPPEEIRRLRTHTRYRRHLTQARTAEKQRAEKLLEDAHLKLSSVISDIHGVSGRAMLEAIIAGQRNPKALAQLARGSMRGKIRQLEEALDCSFLTEEHAAVLKMMLGTIDYYTAQIDELTAKIEALCEPYARQIAQLDAIPGTGVITAQDIIAEIGTDMTVFPTAAHLVSWAKWCPQVAQSGGKRKGANASGRGNAYLSAAIGEAAVSAGRTQTFLGARYRRLNKRMPKKKALVATGNSLLTTCHALLSDPEAAYTDLGADYYERRANIRRQARNHVRGLERLGYKVTIQPIDPGTGELEAAAS

SEQ ID NO: 425291 - protein, 387 aa, unidentified
MPQPNDLSRSLAALDQDSTLVAVIEISQSSWLVGGIVPGVNRQPLKKLAADETALLQLLSRWRDEATKAGRTISRIAVAYEAGRDGFWLARWLRGRGIEAHVIHPTSVAVSREHRRAKTDRLDTELLKRAFLGWLRGEQRHCSMAMIPTLEEEDAKRPNRERENLVSERTRLVNRMKSALARLGIRGFKPHLRKAPERLDTLRTAEGMALPPNTLAELRRDMARLRFVMDQIREIEAARLARLEQHPEQANHAMVRLLARVVGVGIETADMLVHEILSRHLRDRKAVARYAGLTGLPDESGARRREKGLSRAGNARVRRGMIQLAWRFLMFQKDSALAQWYRRQTTDGRGATRKTMIVALARKLLVALWQLVTTGEVPEGVVLRRAA

SEQ ID NO: 425292 - protein, 372 aa, unidentified
MLYAGVDVSKDKVSMAVLTSGGTKLTSGDFDITTEGLKLLELTLKHLKDEISMAIEQTGTYSMPVILYLMERVEGLRIYLVDGLNFNRFIKLEGRKKQDKTDAVSLAEYLRRGLPARLITDKDIKAYGLKVLISQREHLLKVKNQVENRLRQLVETIFPDSKTLSKSVFWSEIRKGRAIPDWKRLTDKAEVLSTILRERKIWLEIVHSLEETEREINAFLRAHYPKDVEILKSFGFSETTIAYFISVYVDIGRFKDVKAFKSYMGLGLRIYQSGKKEKNVVNSYTNKYIRKLLYMYVIQAVREKSNHRRIKEYYLRQVEKSGSKKKAIIKTAGKVIEWVYYCLKHREPFKWEANYETQQEDLSQAYSGQAED

SEQ ID NO: 425293 - protein, 315 aa, unidentified
MVYIGIDVAKDSLVGVLIDRSYRVKEEFVLQNSKDEIEKLLSQFQKRFKKITIGSEATGNYHNVLAFACLERNIPYRLLNPIITKQFTRATVRKRKTDLSDAYVIARLTMQHEGTILTQSLFHQGKPAIRTATKLAQITQMLVLLQQHGEMIGMEKNLLQELQGCQQKLQLSQKVFRDYARSTVDEKLQKLLMTIPGIGETIGTTLIVEIGDIKRFPSGDCLVAFCGLDPKVKQSGGNLHHNTHLTKRGSPNLRRSIYLAASIAQRSDKELKTYFEKKRREGKFYKEATVANARKLLYRVYAVWKRQTPYVIREV

SEQ ID NO: 425294 - protein, 437 aa, unidentified
MSEKKSVELRVSVDVGYRRHSVAIGLPSGEVLEEFEIAHRPEGFAEFFTRIERHQKVRECEVAVAMEGFNGCARPLDAMVRRRGYRLYNINNLKLARFKEIFPGAAKSDRIDARKGLELFQLSDHLPLAKEVLQEVKGTPRENEVLKRLTRRRRRLVDERVRVISNLQTDLQAVCPGLLEITKNAGNQWFLNFLISAPTLPQLARLRPATLRKVPAVGRKYGSLIEDWQKRAHFSEEVEWVSEMIQEDAQRCLDLDEKIKALRAKIKEVAKDSKIAKTLLSIPGFGTICTAELAGEIGTVERFSKEGSLALYIGMSTLDNSSGKYQGSKQPKHVNTRAKAAMMVALDRHRKYVPESQRYYEKKRSEGKKHNQAIRALGRHLCRIIYKLLKEERDYEMRPEKGNTKSKVSPRSLIKTQIRKPKISVKGKNNKIYQQSA

SEQ ID NO: 425295 - protein, 349 aa, unidentified
MVAGEVDYVVGVDTHLDEHVLAVVASPGGAVLAQRAVAANGRGYAQALRFAQRYASGARVWAIEGAGHYGAGLVRHLSEHNEAVLEVGRLPRNERRLRGKDDQLDAVRAARAAFTSEPLALPRSGQRREALRLLLVARRSAVDVRRESLVQLRSVIVTAPDALRDELRGLPVQRLLDRCSRLRRSTGAAPDELATRLVLRSLARRSVAATAEADELEHEILIHVRALAPQLLDEPGVGPIVAAQLIIAWSHPGRVRSEAAFARLAGVAPIPASSGQTTRHRLSRGGDRQLNRALHTVVLHRRQHDPTTQAYIERRVAEGKSRRDATRLLKRYLARHPYRLLQNQEPLMA

SEQ ID NO: 425296 - protein, 346 aa, unidentified
MEHYAGIDVSLELSSVCIVDTKGKIVREAKIASDPDALIAFFKRLGFPVARIGLEAGPLSQWLYAGLAQAGFEAVLLETRHVKAVLSAMTVKTDRKDARGIAQLIRMGWFRSVHCKSLGSQEVRALLVARKQLLGKLGDIELSIRGILRGFGLKMGVVTRRRFEERARELSTGQAMLETVVGAMFVARAALQTEYGKLHKTMLAIVHDDKVCLRLMTVPGVGPVVAITFKTAVDDPARISKSNAVGPLFGLTPKKYQSGETDVTGGITRVGDTMVRTAVYEAANILLSRMTRFSALKRWGMEVAKRRGLKRAKVALARKIGVILHRMWIDGTDFRWTKAERGVAAS

SEQ ID NO: 425297 - protein, 354 aa, unidentified
MIYVGIDIAKLNHFASAISSDGEVLIEPFKFTNDGDGFQMLVSKLDSLDAEPDSIIIGLESTAHYGDNLVRYLVAENFQVCVLNPIKTSTMRKNNIRKTKTDKVDTYIIAKTLMMHDSYRFITFYDLDLMDLKAMGRFYQKTIKQRTRLKIQLTAYVDEVFPELQYFFKSGLHQKSVYALLKEAPTPEAIASMHMTHLASLLVKASHGHFTKEQAKELRVLARKSIGASDSALSIQITHTIAQIELLDSQLNKIHRFSTPGKLLAFAGLDPSVYQSGNFQARRTKMSKRGSKVLRYALINVAHHVVKNNATLKAYYDAKMAEGRTHYNALGHCAGKLVRVIWKMMTYDLEFNLD

SEQ ID NO: 425298 - protein, 418 aa, unidentified
MGRHADAWPTQPFSTSVHRGRARLAPRDMKTPAPHRSEPLYLDKRVINALFLGVWQTDEPWVLRDRAETWVVTPPSKQNPNSCLGQPSPYLQGRVKKRRRRRKGKDSYIGIDVAKAHLDLAVHLEGDPWRVSNDEAGVSAVERHLRELGPALVVLEPTGGLELPLTAALAAAGLPVAVVNPRQVRDFAKATGRLAKTDRLDALVLAHFAHGVRPAPRPLPDAQTRELAALLARRQQLVQMLTAEKNRLATTRPPVRQRVQAHIKWLEQELRAVDGDLSSTIQESPLWRAKDDLLQGVKGIGPVTSITLLADLPELGTLDRRQIAALAGVAPLNRDSGLFRGRRKIWGGRARVRAALYMAASIAQRFNPVIKDFHQRLLKAGKEKKVARTACMRKLLTILNAMIRDQRPWNPGLARQYS

SEQ ID NO: 425299 - protein, 334 aa, unidentified
MGDNDLKKINYFVGVDTSKDELDFAVLKDNVFLIHKECRNEPKEIAALVDELKTFKGFTTGKTLFCIEDTGMYCNPLLSHLKKTKAKIVLELPIRIKRSLGLVRGKNDRIDAIRIAQYASRYKDNLRLLSEKRPVVEMLRELLSLRSRIQSLNDGIKKRLSERARFDKKYINQKSSKLCGRTLAAMKEDLEEIEHEIDSLVENDPNISRLLAIVSSVPNVGRITALHIIVYSNEFKNIRTAKKFACFAGIAPFKIESGKNEGKAKISRIANRKMKSLLHLCAVSALRHPNEFSHYAERKIAEGKHKMKVLNAVRNKIILRVYTCVKEDRVYVKY

SEQ ID NO: 425300 - protein, 412 aa, unidentified
MQVVHGRCCGLDIHKKSVVACVLLTNEQGQVQREIRTFGTMTVDLLTLADWLEHWEITHVAMESTGVYWRPVYNLLEDEIRTLVLVNPQHIKAVPGRKTDVKDAEWLADLLRHGLVQASFIPPAPIRELRELTRHRKALVHQRTQEVNRLEKVLEGANIKLAAVATSMLGKSVRDMLEALLAGEEDVTAMAALARGRMRAKLPALRQALTGRLQAYHHVLLRQILAHLDFLEAAIAQLEGEIEQRLRPYEDAVRLLQTIPGIKDITAATIVAELGVDMAQFPSAKHLASWAAVCPGNKQSGGKRLSGKTRQGNAWLKAVLCEVAWANARHPASYIGAQFRRLTRRRGVYRALIAVAHTLLVIIYHVLKTKQPYHELGADYFDKLDQASLERHHVRRLEQLGYSVTLAPSSVV

SEQ ID NO: 425301 - protein, 431 aa, unidentified
MLRKRAYRATSVKNVNAEAVRKELSSGLVWVGLDIAKEEVLAVVRDEAGKFLRPWKVKQPGAIREFTARLRELAAGRRMVVAMESTGTYGDALRQALTDAGLSVHRVSSKAVGDFAEIFDGVPSAHDGKDAAIVAELAAIGKSTPWPYEADSEAEGNLAAEVSWLDAQQDIAQLWLGRLEGLLARHWPEATRKLKLSSSTLLRALCHYGSPLALAEEPQAAEQLATWGGRFLTGDKIASLVESARETVGVRMTEPDKTWMRRCAGEALQAQGEIRRAKRRLAKMATQDDSIRRQAKVVGAATASVLRATVGKPEDYRCGAAYCKAMGLNLKERSSGKHQGKLKITKRGPSRARRWLYFAALRIVQKHPVRRWFEAKKKRDQDRGRGAVIAVMRKLALAIWAVTVRGEPFELSRLFPGRPWGKTSRGRLATR

SEQ ID NO: 425302 - protein, 364 aa, unidentified
MVYVGVDLHRKSSYVAVLADDGELLASRRIASQPDEFLRVFGELEAEPTGVAFEATYGWGWFADLLLDIGIPAHMAHPLATKAISSARVKNDRVDAKTLAHLLRTNLLPEAWAAPPEVRDARKLARTRVSLARISSRLKCQTHALLADQAIAPPVTDLFGLAGRAFLQEVLLRPIPQARLQANLRLIDLLAPELAQAERELRELFQADPRIPRLTPIPGIGFTTAALIVAEVWDVSRFPSPQHLCSWAGLTPTERSSADHTRRGHISKQGSRWLRWAMVESASRPYLKDPTPRGFRDGIARRRGAKIAKVALARRLLTLCYYALRDEDGCRAFPVPPTRTKRPNRGRARSPQVMASSGTAAVSD

SEQ ID NO: 425303 - protein, 311 aa, unidentified
MEAMIERCVGLDVHQETVVACVLFGPLEKKPKKSIESFSTTTSGLLKLHDWLASLEVTNVVMESTGVYWKPVWNILEDNFQLVLANAKHVKNVPGRKTDVKDSEWLAKLLRSGLIEGNFVPPEDIRDLRDLTRYRKKLINNRTAEQNRIHKILQDANIKLTSVLSNIFGQSGRKILEAIINGEKIEMENLRDMVHWRTKASLEDIAETINGRIRRHHRDMLRYHWDHMAYLEKAIEELEEQIDHCLTPYRKEVELLDTIPGVNKAGAATFIAEMGVDMSVFKSAKHLASWAGVSPGNNESAGKKNEQNNKR

SEQ ID NO: 425304 - protein, 344 aa, unidentified
MEYYAGLDVSLRSCAVCIVDTKGKVVLERELACEVSDISDWLRKFAYPIERVGFEAGTMSQHLFFGLQAEGFDVVCMEARQVNAALSAMRNKTDKNDARGIAQILRTGWFSPVHMKSREAHGMRALLSSRKALLNKTIDLSNEVRGLLKIFGLRLPKTVSHGSFDDIVRPMIQMDDVLIHALIPLLDARVALYQHYLELDRRVKRAACHDEVCMRLMTVPGVGPIAALTFKAAVDDPLRFRSSRTVAAHFGLTPRRYQSGESDNPGRISRAGDRDVRSTLYSAANAMLMRTMAASQLKSWGMRLMRTKGRRRAVVAVARKLAVLLHRMWIENTEFRLEGLEGIR

SEQ ID NO: 425305 - protein, 324 aa, unidentified
MDKINHYCGIDVSKDTIDVKSIQTGHKVYDNNFKGFRKLLKESFPKTHFVMEATGVYHEKLAHFLYNKGCSVSVVNPLVIKRFSQMLLRSTKTDKADSEMIFKYATKNHPDHWKPLAAYIEACKDLNGVLSLLLKQRTALLNKQHSLQSKGCKEAITLRCIKHCIKNLNLRIKLLEDQMEHYIELHEPGLYNRLKTIPGIGKKTAVFLIVITDGFRHFESSKQVSSYLGLSPSILTSGSSIKGQSRITKSGNGHIRNLLFLSSFTACKYNPACKSLFDRITQKGKSKKLALIAVANKLLKQAFAIAKSGESFNPEYVSMHPTMR

SEQ ID NO: 425306 - protein, 355 aa, unidentified
MFGSKTNIITRRIHMKLKVLAIDLAKDFFQLYGINHSGELKLDKKIGRARFAKLIKDLEPTSIYMEACGGAHCWARLFKSYGHAVKLIAPHHVKPYVGHQKNDRNDSKAILEACQRPEAVFVGIKSIWQQDLQVLHRVKDLKSKHQVAIINHIRGLMLEYGVALPKTHIQFIKSAKSAIEDAENGLTEVVRESCFQMYKTYETLSKEITNILKQLEDIGKKYEFTKRVQAEIKGVGPLVATRFMASIGDIDSFSNGRQVSAWIGLVPKQNSTGGRSRLGRITKHGDSDLRKIIVQGARSAVISASRKEYPDEDERKIKRLTEQKGFNVASVATANRNVRRMYAILKKYKHEVCAS

SEQ ID NO: 425307 - protein, 276 aa, unidentified
MAMRVSKSVIGVDVAKIELVTYQADSDLLALIPNEKPAIKRWLKTLPRPAALAVEATNIYHVDLVELAYQAGFDVYIIDGFQLSNYRKGVGGRSKTDASDARLLARFLKNEGECLRPWTPPPAVYGKLQSLLRRRASLIQAKTSLTQSWANDASLKASFAAFLKSIERLDLLVKKKLKDALREAGLLEQVARCQAVEGIGFLTATALVMAYSRGDFNSSDSYIAFLGMDLRVTDSGQKNGRRSLTKRGCSEIRRLLHNAAMSASRTSAWKEFYNHH

SEQ ID NO: 425308 - protein, 350 aa, unidentified
MVVVGADVHKRTHTFVGVDAVGKKLAEKVVRATSSGHHQALRWARERFGAEVVWAIEDCRHLSARLERDLLTAGQQVVRVPPKLMAQTRASARTRGKSDPIDALAVARAYLREPDLPIASHDEVSRELKLLVDRREDLVAQRTSMINRLLWRVHELDPERAPKPRSLDLAKHRNLLWQWLATQPGLVAELARDELADVTRLTEAIDASAKRIGARVAQVAPALLALRGCGELTAAKLVGETAGVTRFKSEAAFARHAGVAPIPVWSGNTAGRVRMTRSGNRQLNAALHRIAITQIRLDGLGQAYYRKRIDAGDSKTEALRCLKRRLARVVFHHLHTDHHNRLQPCQPAAA

SEQ ID NO: 425309 - protein, 312 aa, unidentified
MTRIICGVDISSLSLEARIGPEGAFASFSNNPQGIAALAAFCQAHQVELVAMEATGGYEQQALALLSEQGLPVAILNPRAVRRFADSMGQMEKTDRLDAGMIAWYAQTRHSQPVCLTSASQQQLRALVTRLRQLTEVRTAQMNQSRLVTDPAVLALIEELLAVVARQIRELETSIAALIAQDPLWQHLDRVFRTIKGVADRTVARLMAEMPEIGTLSNKAISKLAGVAPLARDSGKHQGKRAVRGGRASVREILFIVASVVGRHEPDFIVFQQRLSAAGKPRKVIRIALAHKLLVRLNAKARQVRQQLEAAA

SEQ ID NO: 425310 - protein, 356 aa, unidentified
MATEITALPKLFIGIDIHKRNWSVHIRSDISDHKSFTVPADPSVVYAYVGRNFPGYQVSLTYEAGCCGFSAARYFLQLGWEVTVVNPADVPTSNKQYYQKTDTLDCRNLSRQLALGELKAIHIPTDAEDELKSLLRHRAAVTRQMRAAKTHIKSYLLYQGVKIPEEHDNVNWTKAFISWLKGIEWNTVTGRACLESKLRVYEFIHGEYLGLANELRAYCRKHHKKDYYLLKSIPGVGGYLASALLAELGDIRRFSNEASFASYIGLVPMMRNSGSTEKVFGVTPRCKNLLRSYIIEAAWVALRMDPQMQAYYRTHIGKNPKSIIVKIARKLLNRILSVIKTGTPYQINHQKPLAMA

SEQ ID NO: 425311 - protein, 372 aa, unidentified
MHSENIAAYVGLDVHKETLAVAIAAPERLGEVRYYGTINNEAQAVRRLFQKLQGLYGNILSCYEAGPCGFGLYHQLTAMNIKCLVIAPSRIPKSPTDRIKNDHRDAISLARLLRAGELTPVWIPDLTHEAMRDLIRARATAKRDSRVARQRILSMLLRTDKHYAGKHRTWLANQSFSQPSQQIAFQHYCQSLEQIEDRILQLDQEISRLLPEWSLCNLVCQLQALKGVGQLIAITLVAELGDFSRFSNPKQLMAFLGLVPGEYSSGNSIRPRGITKVGNSELRRLLYEAAWSYRTPAKVGAWLIYYRPDSVTQYSKDIAWKAQQRLCSRYRSLTAKGKKSQVAITAVARELTGFMWDIALAAQSSFSQQKQN

SEQ ID NO: 425312 - protein, 328 aa, unidentified
MQAGEGILGIDISKESFDVVLRGTGGEQHRVFSNDQKGFKALVGWAEKQPERVVHICMEATGSYWEGLAEALYQRGYRVSVVNPYQIKRYGDHLLNRNKTDKADASLIAEFCEKDRERLRAWKPFSPEIKALRSMGRRLDELQGMKQQEQNRLKSGVTDLVVIESLQENLKQLDAQIKALWKKIKEHVNQHPDLREKQRLLTSIPGIGKLTAIKLIAEIGEIKDFTSASQLAAYAGLAPKQFQSGSSVHKQTRISKQGRTELRRCLYMPAVVASEHNPIVMDLKRRMLASGHVMMEVIVAAMKKLLHLVYGVLKSGKPFDPDYGNLFC

SEQ ID NO: 425313 - protein, 315 aa, unidentified
MFAGIDVSKDWFDVAWEINGNICCRQFAYTDQGIEQLLEQAPARAIFVMEATGTYHARLALRLYEAARQVSVLNPLVIKRYAQMKLLRVKSDRADAQLIMRYAREHAPALWEPASEQVQELQQAHGWLNDMIVERSRLLNRKHALSFRAKPSAFVLEQMDAQLQQLQQRIRECEQHLEVLVKKSFAQLYERLLSIPSIGPKTALELIIVTDGFTRFEEVKALCAYIGVSPTTLRSGSSVRGSGGIAKLGQARMRQLLYLCTWTAKLYNPACQQLYQRLKAQGKPAKVINIAVAHKLVRQAFAVATKNVFFSAKFA

SEQ ID NO: 425314 - protein, 425 aa, unidentified
MFCVRSPLPRLEVDMETTYNVAGIDVHKKMLAVVVANARETELQFECRRFGTTVSEVQALSAWLKARDVQEAAMESTAQYWRPVWLGLEGQCRLHLAQARSNRGPRGRKTDFRDAKRVVSRLLSGDLILSFVPEAEQRCWRTLTRTKYQLTRDRVRLQSQLESLLEECQIKLSSVVSDLLGASGQRILRAMAKGETDPVRLADLGDKRLRASEGLLVDALSGSVGPLHRRVLSLYLDRLDLIESQVAKLEKMIADGMKAQEDAIVRLAELPGLGVDSAQQIIAEIGPTAAAFPSAAQLASWVGVCPGRQESAGESRSDRSAKGNRSMRRLLDQLAHAAVRKEGTQMQIVFRRLSARMGYNKAIWAIAHRLCRLIWKVLHDKVRYVEHGLAPTPIALKRRRQRLVTQLHKMGYQVLLTPLTPAATT

SEQ ID NO: 425315 - protein, 430 aa, unidentified
MPYRIAGIDVHKKMLAVVASDVEIENEYQFERRMFGSNPEQLRSLAAWLLEQEVEEVVMESTAQYWKPVWEALERYWKPIREKREGARPRSGTLHLAQAQSNRGRRGRKRDFPDAERLVKRLVARELVLSFVPDSQQRLWRTVSRRKYQLTRDRVRLQNQVESLLEEAHIKLSSLVSDLLGVSARRMLKALAEGETDPTALAGLADQHLRATPEQLCDALGACTDLRPVYRRLLKMALEQLQFLEQQIGQLDQEMANLLSQHQNAVERLAEVPGLGVDSAQQIIAEVGPTAATFPSEKCLSSWVGACPGDDESAGVNYNHRSPKGNRHMRRVLNQAANAAVKVKGSIFEIAYRRCVPRLGHNQAIGAIAHRQCRLIWLILHQGVRYEERGPAVSRRSKQARTAKMIRQLRRLGYRIESPTAQEDSAARVP

SEQ ID NO: 425316 - protein, 441 aa, unidentified
MKNEPTQNNNSIPAADPIAAWVGLDWADKKHSLFVRPTDGAATTACELEHKPQALDQFFLQLHQKHPQGRIAVCLEQSRGPVLYALMKYDFVVIYPVNPRCLADFRRAFKVSGAKADPTDADLLSELGCKHHQRLRALVPEDLATRQLRFLVEARRDFVNKRTALANELTATLKSYYPLALEVVGENLEGPMGLEFLRRWPNLAKLQGAKPSVVRAFFYAHNSRSEEKIAARLEAINTAVPLTEDPAIVGSLQLQAAGLARQLAAVQKTVAEYDQQIRVVFEGHSEKWLFEKLPGAGPVLAPRVAAAFGTIRTNLGAALDLLCLSGVAPVKRQSGQQETVHFRFARPKFLHQSLVEFAKCSIGQCDWARLLYEKQITQGKSAYAAIRVVAFKWVRILWRCWKDGQAYDEVKYLRSLKKRGIKLYESLYNALPAETGPVNNS

SEQ ID NO: 425317 - protein, 412 aa, unidentified
MKDLLEISCGLDVHKEKIVACILTGPLGKPTRSEIREFSTLIPDMIALRHWIVSKNCHHVAMESTGIYWMPIYEILEDAFSGDITLLVVNARHMKNVPGKKTDMRDSEWISTLLRAGLLNGSFIPEKRIREFRDLNRYRKSVIRDITSQKNRIEKFLQSSGFRLSSFISDIFGASGRNIILHLIEHGQIDKTALDSCLKTKTRNRIDEILMSVNGTLSEHQKAFLKILMTHYDSLKKHLAEIETSLEEDMAPFALQVEQLNSIYGISTTASCAIIAEIGIDMKPFKTAEHICSWAGLCPGNNESAGKRKSTSVTKGNPYIKSMLCEIAWVIAGKRNTYLSAWYWRIKQKKGAKKAIVALARKLLVIIYTMLKQGTLFDESCFETRRKNCEQKQLSRYIRELEKHGYHVEAQS

SEQ ID NO: 425318 - protein, 458 aa, unidentified
MYRELQPFREALSHGLKASLFPAAAGIDPNKLLETYLERLTMFTGVDVADQTFTSLALDAGREILGSLEECPNEPAGFEHFMAWARDLRDQHGLRIIAIAGETTGIYYWALWDFLREQPDVARVLYNPRTTEHMGEVLSKKVRNELVDALLLAEQLRLGSTPEVLLQDDADLLTARYYSRAARDLAQQINRKKNQLRALLRAYSGPVCQVFPREKLHHPAVYALLQEHVFPADFLHAGAETLTTILTTYCRDIFGPADAEQLLTASRQAITRPIGQEAIRRLVHAHIQDITTFQERKALYLKAGYALIKDRTETELLRTVKGAGVSNTLALVSEVGDAARFASGEHMASFLGLTTSKHISGATLFQSKHITKQGSPNGRYAAVNVAQHLTRWVPRYQKMYQNIKARKPPRKGHFIAMVAVARDFVSNVLYDMWRNQRPFFVEVSDYRSYRQKRSRSSD

SEQ ID NO: 425319 - protein, 345 aa, unidentified
MNKRMSCPQATVFCGVDVSARSLTVAVIAPEEPLARREFSNSASGHKELIVWLNKRQAKVRVSMEATGIYSLDVALALDGAAGIEVAVLNPKLVNRFSQTLRRSKTDAADAAVLAEYSQRMPFTAWRRPAVNVLRLRAMGRHLESLVVEQASGKNRLSVARSSTATPRAVIADLQRAQATLLRRVRKMRREAMKLIEAEAVLADRFQLLVSIPGIAAVSALHILSELMALAPEMTVRQWVAYCGLDPVHQVSGTSLHKPSHISRAGNRHLRRALFMPTLSAARFDPHMHAFYRALRERHKTGLQALVAVARKLLHAIFGMFKTGKPYDGARLFPHSQPALQSVTG

SEQ ID NO: 425320 - protein, 356 aa, unidentified
MDLLQASGEMTVKYYAGIDVSLECSSVCVVDSDGEIVREAKVLSEPDALIEWFAGLGLSTERIGLEAGPLSQWLHAAMAEVGLAVELLETRHVRSAFKTMPVKTDKKDARGIAQLMRLGWFRPVHCKSLPAQEIRAVLTARKILQSKLHDLDMSLRGILRGFGLKVGPTTPRTFAARIRELVEGHPTLETIASSLLKARDALATEFAGFERRLRAMARQNADALRLMTTPGVGVLVAMTFVAAVDAPERFRSSRDVGPHFGLTPKKYQSGETDRSGHISKVGDVGVRTALYEAANVILTRPVKGSDLKSWAQGVAKRAGPRKARVALARKLAVVLHHMLKDGTTFIPHKAVPAKAA

SEQ ID NO: 425321 - protein, 412 aa, unidentified
MDVLVERCAGLDVHRDSVMATVRLPAKRRRQREQHTRGFPSTLGGLQALADWLEGFGVTLVGMEATGIYWRTVFDALEPRFRCWLLNARHLRNVPGRKSDVIDSAWICQLVEHGLVRPSFVPPLEIRRLRDLTRLRKTQIEERTRVIQRLEKVLQDAGIKLTSVASQAYSVSARAILEALLAGVTEPAQLAELARGRMRAKIPQLQEALRGRFDLAHHGVLVGSLLSQLDSLELSIANLDQRIGQQTEPLAELVELVCTIPGVGLRTGQVLVAECGVDMSIFPSAAHLTSWAGICPGTNSSAGKRYSGKTRRGSKWLRQALSESAQAAARSKGTYLASHYAQIRGRRGPHKAIGAIRHDILVAYYHIVRDRLPYRELGPDWLARRYSPEHRARRLLRQIEALGFNVAIEAAA

SEQ ID NO: 425322 - protein, 323 aa, unidentified
MEQAILGIDISKDSFDTALLINGAYKFNTFTNEPDGFHRMTKWLNKLKCGHLHCCMEATGRYADHVAEYLYVSGHSVSVVNPARIKFYANSKLKRNKTDKADAQLIAEYCLREKPSLWSPPPANFKNLQALIRHLDGLMKSRQQERNRLKSGVSTPGVITSLQDCISFYDQQINNIQSQIQNLINNDPELLRRQTLLISIPGIGKLTAAKLLGEVRDISAFQSARQLAAYAGLTPKNMLSGSSVRKKTVISKTGNAHLRKLLFMPGITARNWNPIISPFCDRLSQNGLSPMEVICASMRKLLHLVYGILKSGKPFDPNYLENA

SEQ ID NO: 425323 - protein, 346 aa, unidentified
MIIVGCDFHPSWQQVAIFEAATGEIVERKLVNGNGEAEEFYRHLPAGSLVGMESCGNSQWFVELMEQLGHEVWIGDAAQIRASYVRRQKTDRRDAGHILKLLLEGRFPRLWRPDGEERDLRQLLIHRHRLVQIRTRVKNGLQHLAMNRGMQKKSKLWSAAGQRAFLQLPLPGWAGCRRQDLLALLGQLDQRIKPLDAAVEKAALAHPQARLLMTQPGVGPVTALAFVVTIGDAHRFRRGKQVASYLGLIPREHSSGGKQRLGAISKQGNGFVRLLLVEAAQSVTRLDAGFRKQYQHRCHRKPKGVAKVAAARKLAVRLYWMLRSNIGYPEIVHNESSSRCPVAGAS

SEQ ID NO: 425324 - protein, 337 aa, unidentified
MDVHKKSWTAHFKTDLFDNKTVTMPAESESLINYVEKNFAGHAVSCCYEAGCCGYWIARSLQQRGWEVKVVNPADVPRSNKQGWQKTDRIDSRNLCKHLSDGNLKGIYVPGEEQEQLRALFRRRIHLARNLRSIKNHIKSQLLYFGIKLPAQYDNPNWSREMKTWIANIKWKYNSAAESMKSRLKQLEFMWYEELHISNELRAYCRKHYKKDYYLYKSVPGIGGITAAAIIAELGNIRRFNRLDELAAIIGLVPGIYQSSDNKINLGMTKRSNHQLRSLLVEASWVAVRDDLALQQYYRKHAHNEPNKAIIKVAHKLLNRLRAVIQSGIPYQKGLLK

SEQ ID NO: 425325 - protein, 467 aa, unidentified
MSSESCNFFWDYDPDIKPAMILRMPKCVLERECECARTSDRHLPISGNGNMNAEKEIVCGADIHRDFLVATMISRSGLKLQEQFGMDQDGLLAFRSWILDHRCLRVAVESTGNYWYPIFCILEGHVEFILANAFQIRNIEGKKTDRLDSERIAIYCLNDLIKPSRIYPKDYRDLRSITRSREALVNARSKLKNQIHQSLAVCCIKLSSVISDSFGKSGRYIIEQLLEGKTIEQIISMIPSKRIKKKADELRKAIRNGLDPVQILLIKTNLDAIDYLSEKIKLLDAEIAIKVKPFEEDLNIILSVPGIGLTSAATILAEMGDYRDFQDADKLAMYFGIVPAVYQSAGKLRTGKITKRGSKHMRRILVQVAKAISKTKKSSKLKRFFLRVFTRSGKKNVAAIALARKVLCIIYHLLMKREDYQEPEVKKNKPKIPSCVSPLSMMDIDEMIKTISQAGYLVKKGLTEGCG

SEQ ID NO: 425326 - protein, 394 aa, unidentified
MSLIEDCAGLAGAEPQTWGTSLMNDTIFVGLDVHKETIAVAVAEGRRGGEVLQLGNFLNRSDHIEKLVARLAKGNRTLSFCYEAGPCGYGLFRQLVTLGHDRLVAAPSLIPAKAGDRVKTDRRDAVMLAKLHRAGELTAVWVPDDAHEAMRDLIRARATAVRVLGKARQHLQGFFLRHGRVYAGNKGWTRAHRRWLTTVRFDHVAQQVVLQDYIHAVTDAEARVERLLRQIEDLAQNWSQAPVVAALQAMRGVAFIVAVTLVAEVGDFSRFANPRQLMAYLGLVPSEHSSGRTVHRAGITKAGNALARRALIEGAWTYRMQPRVSQKLHDRIEALPQGVRDIGWKAQVRLCARYRRLAAAGKPKVVVTTAVAREMLGLVWAIARSVQIAPLRTT

SEQ ID NO: 425327 - protein, 412 aa, unidentified
MKDSGKRYIGLDVHKYYLIALGVDEDLNVVLPARRVELSHLEAWMKKTLTKQDAVVLEMTTNTWQLYDELCQYAGSVLVVHPPHVALITRSQVMNDKIAASVLARLLAKGLLVGIWIPPQEIREVRGLVAQRQKLVRLATQAKNRLHAVIQRHHLVAPAGNPFGVSNKAWWQALPIGKLEKINLQSDLETLQFAEQQVQRMTAIMEGMAAEQEEIGRLLHLAGFGVVTAVTVWAAIGDIRRFAEPRYLVGYAGLGTWVHDSGMTTHTGKITKAGRRDLRTVLIEAANVAANSHPHWKAALARLEPRLGRNKAIVAIARKLLVTVWYVLQGQTDKYAQPEAIAKKLLDFAYQVGKENRPAGQSAAQFTRARLDRLGLGCELTSIPWGRKKPIPLPPSSLKTERSDVPNGALAP

SEQ ID NO: 425328 - protein, 418 aa, unidentified
MTSPLFVGIDVSSKHNVVCCLTRDEEKRPLSRFTITNNRPGIHELQDRITQLVKKHGFEEILFGLEHTGCYSTHAAMYLHHHLDFGIRHKNVYVFNPSLIKEFKKSNYLDAPKNDRVDAWFIAAKLRAGHLPTPFTWNEQLMALQRLTRARFHLMRDLTRESNFLMTNLYLKFSDYSITGPFQSNKLSATSLAVIEEFDSTEDLVDMPLDKLVDFLVLYSKNRFENPEEIARALKKAARSSYRLPQSMADSVNLAMASSIRVIRTVQEQLKSLKKAIEDYLGTIPQTLDTVPGIGPIFASGILAEVDINRFKSHKELAKFAGLSWTENQSGDFKAKQTRMIRSGNRYLKYYLIEAANSVRVHDPVFAEYYAKKKAEPKEFADKRALALTARKLVRLIFYLLKTNQLYQPEGERIRQRT

SEQ ID NO: 425329 - protein, 339 aa, unidentified
MTIVGCDFHPGWQQIAVFDSKTRKIRDLKLGNANGEAEQFYRGLPVPALVGFEACGNTQWFEDMLDRLGHEVWIGDAAAIRASYVRKQKTDRRDAGHILRLLMEDRFPKLWRPSATERDLRQLLIHRHRLVGIRIRVKNGLHHLMLNKGIQLKRKLWSEAGQKTLRDLPLDGWAAQRRKDLLHLLGNLDPQIAELNTAVEQAAQQNPRAQLLMTQPGVGPITALAYVVTIGEPTRFQRGKQVASYLGLIPSEYSSSNRRRLGSISKQGNSFLRMLLVESAQTVNRLDEGFRKQYKHRCHHMAKGTAKVAAARKLAVRLYWMLRTNTAYPEIARIESSPR

SEQ ID NO: 425330 - protein, 315 aa, unidentified
MTQHSADTVGVDISKDFLDSNIHPSGEAKRFANNAKGHRAMIAWLAPRQVVRVVFEATGAYHRSFERTLAAAGFPMAKVNPRQARRFAEATGKLAKTDRVDAAMLARFGALLTPHTSEPVSETLDEMKELYNARAALVGDRTAALNRQKEMRSAVLKRFATQRLKQIDHQLEVIDQTLNQLCSADPALKTKFDILLSIPCVGQTTAFALLIEMPELGTLEAPQAASLAGLAPVARDSGNWRGKRSIRGGRAGFRQALYMPALVATRFNPDFKAKYEALIAAGKPPKVAIVAIMRKLVILANTLLKEGRVWSPKQA

SEQ ID NO: 425331 - protein, 341 aa, unidentified
MAKINFVNYGIGADLSKDSLHGCFSGITEQGNMVVIAQKKFKNNNSGHQKFKEWIEKHRKNKTIPFQILLEVTGVYHEELLYYLFNSGLVVCLELARRVKKYLEVIGQKSKTDKLDGKGIAQMACERKFKPWEPISSFIMELRTILRHRKALIQVKNQFSNQLHAIKHSAMKSKDVTDSLTEMIKSLKQQIKKNEKKALALAKADEVLFKKIQLIAQSIKGLGTLSVLTTVAETNGFEGFESVKQLTSYAGYDIVESSSGKFTGKTRISKKGNAYLRTNMYMPALTVIRTKFEPFYNLYVRLLARNGGIKKKAMVAVQRKLLTLIYTLWKKNEAFDLDYYK

SEQ ID NO: 425332 - protein, 408 aa, unidentified
MGRAAEVVAPSSSIRTDGGCPVVQVNDLSRSLAAFDPISTLVVVVEMSKASWLVSSVVPGVERQPLKKLEPDATALLRLIERWRNEAVRVGRPISRIALAYEAGRDGFWLARWLIARGIEAHVIHSASVAVSRERKRAKTDRLDAAMLMRVFLGWLRGERGHCGMVAIPTMEEEDARRPTRERESLVNERSRIINRMKSALARLGIRGFKPHLRKAPERLAGLRTAEGTGLPANIIEEFRRDMARLALVREQISSIEKTRAERLERAPDTGPHAMVRLLARVIGIGIETADMLVREILSRKLRDRRALARYAGLTGSPDESGLKSREKGLAKAGNARVRRGLIQLAWRFLMFQKDSALARWYRTRTEGPSGARKTTMIVALARKLLIALWRLVTTGEVPDGVELRPAA

SEQ ID NO: 425333 - protein, 451 aa, unidentified
MTKSKRRHPERDFTPTHPNAAAIDIGSRMHVAAVPPDRDPEPVRAFGTCTGDLQQLADWFERCGVRTVAMESTGVYWIPAYELLEQRGFEVVLVNARDAKHVPGRKTDVSDAQWLRRLHEYGLLRASFRPKGELAALRAYLRQRERLLDYSASHIQHMQKALMQMNVQLHHVVTDVTGETGMRIIRAVVAGERDPAVLATHRDRRCHASEEEIAAALAGNWREEHVFALGQALELYDAYHAKVVECDLRIEIVLRRLRDAAAKPAGRLPPARHRDKTANAPAFDARAALHAVLGVDLTQIHGLGPSLALKLIGECGTDLSAWPNAKHFTSWLCLAPANKISGGKVLSTRTRRSGSRAAALLRLAAVTVGRTQTALGAFYRRLSARVGKAKAVTATARKIATLFYNTLRHGIDYADPGASYYEDRYRARVLANLRRRAKSLGYMLHEMSAPG

SEQ ID NO: 425334 - protein, 355 aa, unidentified
MKQQAIQYLALDVHQATTVASVRDEQGNIVMRATVATEARAILGLVRGLGPRVQVAFEEGTQAQWLHDVLQPHAERVVVCNVRGRSETTNKSDRIDADWLSEQLRLGALKSVYHGSPSVATLKELVRCYTNLVDDSTRVMLRVKAIFRGRAIGTSGEAVYRPSQRAAWLARLEGRGARTRAASLLEQLDLLLDLRAKARAAMIAEARRQPGWKLLRSMPFFGPVRVALLLAIIATPFRFRGKRQLWPYVGLAVVTRSSADQEFVDGKLRRRKRAPLTRGLNRNHNRVLKNVFKGAANAAAAKAGPLKDIYDRCVAGGVREEMAKLTLARKLASIVLRLWKKGELWDPAKLTMQTI

SEQ ID NO: 425335 - protein, 412 aa, unidentified
MQTLIERGCGLDVHQATVVACLLMVRRDGKVQKQMRTFGTTTRELVGLREWLLSEGCTHVAMESTGVYWKPIYAILEGALEIVVANAQHIKKVPGRKTDVKDAEWIADLLCHGLLRSSFVPPKSIRELRDLMRYRRKLVESQAAERNRLLKVLETANIKLANVATDVFGMSGRLMLRALIAGKATPQEMAELAKGLLRKKIPELELALEGKLEQHHRFLLELQLQRLEAAEKDLAVLEQRIRQMLEPYAAQLALLDEIPGVDWTLAAVIIAELGVDMTVFGNVSQLASWAGVCPGNNESAGKRKSSRIPSGNVYLKSGLVEAANAAARAKGTYLRDKFFRLKARRGYKRAVVAIAHKILVAIYHMLSQQVSYNDLGDLYLDKLNKNHLTRNLVHRQERLGYAVTLTIQQKAA

SEQ ID NO: 425336 - protein, 338 aa, unidentified
MAILMGLDQHRAQITTEWVDTATGEVSRARVAPADRAGVRRFLARFRGQRLEVALEATTGWRFVVEELQRIGAVVHLAEPADTAALKGSKKHAKNDRADARHLRELLMAGRLPESWIPPAHILDLRARVRLRHTLSEDRGEWQQRIQSVLYHHGGPQRGELINRAGLAWLAALPLPACAREQVATALAMIDALERQLAPLDKELRRYARRQPGCKALQRHYGIGPLTAVTILAELGDPGRFSSSREAVRFAGLDITVHASDRRRAPGHLSRQGPPALRWALFEAAQCARRPNSPDHPYYQQAAKRLGGNRACLSVARKLLKRSYHTLRELGEEALQPA

SEQ ID NO: 425337 - protein, 321 aa, unidentified
MYTFVEDKPIKKKLRRAELLAFFANYPTSLIGIEACGSAHHWARELTKLGHEVILLNTRFVKSFVIGNKNDFNDAAAIFDAVTRPNRRIAAIKTIEQQDIQLVHNIRQGLVGNRTALVNQIRGLLSERGIIIPQGINRLSEQLTLILEDAENDLTALSREVFAEQYENLRALDDEIKEQDRRISRLCNNNELSKRFLEVPGIGPMTASIIASDIGNGKGYPSSRDYAASLGVVPRQHSSGGKFVYLGISKRGNKYIRTLLIHGARSVLKNSGKKTDKLSLWLQSLVERRGFNKAAVALANKNARILWAMATQKKEYNALLV

SEQ ID NO: 425338 - protein, 392 aa, unidentified
MASMTSSTATAQPAGVLFGGIDTHKDIHVAALLDCDGGLVGSASFPTTRAGYRQLLGWMHTFGILARVGVEGTGSYGAGICRQLTAAGVEVVEVNRPDRSQRRRRGKSDVLDAAAAAEAARTGNRIAIPKSRDGQVESLRVLRLTRASAVKARTKAFQQLDQLIVTAPERLRDQLRDLPKMRLIGSCAAWRPHSTDAADPTVAARIALKSLARRYLRLDAEITELDQLLEPFVADLAAQLVAVRGVGTETAGQILVTVGDNPHRVHSEAAFAMLCGVAPLPASSGKTQRHRLNRGGDRQANRAIHVIATTRKRCDPRTQAYMEKKTAENHTRREATRSLKRLIAREIYYLLNPRPHTPPVPPSRPVSRRAGAVKVEPPTRGTTLTAPSTGTP

SEQ ID NO: 425339 - protein, 282 aa, unidentified
MRIIGCDLHARQQTVAMLDTTTGELANLTLMHEGNNVREFYSQLPRPVLVGIEATGSMHCFLDLMDKLGIECRVGHPAQIRAAEPRKQKHDRRDADLILKLLAESRFPTIWLPSKELLDLRALLLHRHQWVRMRTRIQNALQAIALANGLRRGPSLWSYDGQAKVALLPLMPHTAYRRNALQPMYKTMESEIESLTQQVAEQAGNRPGARRLMTHPGVGPVTALATEVFLGDPRRFADGRALASYVGIIPREYSSGGQQRLGGVTKQGSPLLRFLWGEAGAS

SEQ ID NO: 425340 - protein, 444 aa, unidentified
MDSKNLKIDGFQLLRPNAAGIDIASGMHYVAVPLDRDEQNVRKFGSFTQDLHDMANWLKACKIDTIAMESTGVYWVQPYLVLEEYGFDVFLVNARHIKNVSGRKSDVKDCQWIQQLHSYGLLNKSFQPDDQIRELRTYVRHRKELTQGYATQVQLMQKAFDQMNIKLHNVLSDITGKSGMLIINAILTGERNANVLAELADKGVKASKEDIVKSLQGIWRKDNLFELRQAYELYQIFLEKIKDCDSQIESVLERISSATDKSSIQNDQKRKAKGKNKFNFNASSYLSPIAGVNLTEIFGISEITVTEILSETGTDMSKWYTEKHFTSWLNLAPNTRISGGKKLKSKRIVKKNKAGQAFIMAASTLKASKNWLGEYYRRIKSKNGAPIAIKATARKLAIIFYKMLKNKVPFNPLPLEEYNKYFHERKLKYVRKQALSFGLKLVPA

SEQ ID NO: 425341 - protein, 392 aa, unidentified
MVVSVGIDVSKDKHDCFILSSEGEVLVDVFTIPNTMDGFNCLLQRIQDCTTPQGKMKVGLEATGHYSYNLLGFLLDNGLATYVLNPLRTNLYRKSLSLRKTKTDRVDARTIASMLLSDAGLKPYTDTAYHNEELKSLTRYRFDKVKERAKLKSSIARLVCILFPELEKLVPSLHIASVYALLEEFPGAKQVAAAHLARLKALLETASNGHYKRDMALEIRDAAKNSIGSQMPAKSLELQHTIRLIRELNREIDEIEEQIQSIMDELHSPITTIPGLGFRMAAMILAEVGDFTRFDSPDKLLAYAGMSPSTYQSGQLKNCYPHMEKRGSRYLRYALYNATKYVCHWDSAFADYLAKKRAEGKHYNIAISHAAKKLIRLIFAMEKSRQPYCSAA

SEQ ID NO: 425342 - protein, 357 aa, unidentified
MLSSNVKYIGLDVHKEAIAIVVLNGAGKLVMESIVETKASALLDFLHGLRGELHVTLEEGTWAAWLYDVLKPHVQEIVVCNPRRNALLKEGSKSDKIDARKLAELLRSGMLRAVYHGENGLRTLRELARSYQVVSKDLKRVMNRVKALYRSWGIACTGTQVYTRRYRELWLNKIAQAGVRRRAELFYQQLDGLQVLRRMVRGELLAESRKHQPLKLLRQIPCIGPLRAALLLALMQTPHRFRTKRQLWTYSGLGVETHDSAQYRYVDGQLQRSRKPQQIRGLNHNHNHAMKEIFKSTAMSASHRAGPFQDFYAGLLAKGMKPEMAQLTLARKIATIALTLLKKGGCFDAKYLKPQAA

SEQ ID NO: 425343 - protein, 326 aa, unidentified
MFFIGIDVSKAKLDCCLSLDVEGTKRRAKSVPNSKPGILGLLAWCAKHQLAAQDLHAIMEGTGVYHEQAALALTDAGVTVSIVNPAQAKDFGRSLGIRTKTDGVDSLVLARFGALLKPRPWTPPAKEARVLQALLSRREAIAQDLRRERNRLEKADATDTPASIRQSIVDAIIFLEKQLAKLQQDIDNHIRKCPKLKADRDLLVSIPAVGPQVGNHLLAVVHNHHFQSAGQLAAYLGLVPIERQSGSSILGRPRLSKAGPARIRAVLYMAAVVATKHNPHIKALYQRLQERGKSKMSALGAAMRKLVHLCFGVLKTRQPYQANYAF

SEQ ID NO: 425344 - protein, 385 aa, unidentified
MQKPNDLNQSRIVLKQDSTLIAVIEMSLSSWLVAGIVPGVERQPLKKLAVDESALLKLLNRWREEAEKAGRRIERIAVAFEAGRDGFWLARWLRARGIEAHVIHASSVAVSREHRRAKTDRLDTELLKRAFLGWLRGERDHCKMVAIPTTKDEDAKRPNRERQSLVGEQTRIVNRMKAALIRLGIRGFNPKLKKAAGRLEDLRTPEGEPIPPNTLAELHRDMERRRLVSDQIRQIEEGRLERMEQAPGDGPHAMVRLIARVIGVGIETADMLVHEVLSRKLRDRRAVARYAGLTGAPDESGSKRREKGLAKAGNARVRRGMIQLAWRFLLFQKDSALAQWYRTRTESAGKKRKTMIVALARKLLIALWRLVTTGEVPAGVVLRAA

SEQ ID NO: 425345 - protein, 287 aa, unidentified
MNDAKYIGLDVHQATISAAVRDSSGSLVMEATLETKAETILEFVHGLRGSLHVSFEEGTCAAWLHDLLQPHVTEVLVCDSRKNALLRVGNKNDREDARKLAELLFLNKLHAVYHGETGIRTLKELARSYLTITRDLTRVMNRLKAIYRGWGIACAGQQVYAPRYRAEWLAKITEAGVRRRAEIYYLQFDTLAALRQEVRRELLAESRKHPAMRLLRQIPSIGPIRAALLIALMQTPHRFRTKRQLWAYCGLALRTYDSGEYRFVGGQRKRSKKAVTIRGLNKNHIMI

SEQ ID NO: 425346 - protein, 340 aa, unidentified
MSIVMGLDQHRAQISAEWIDTITAEVSRARIVPADRAGVRKFLARFRGEGLEVALEATTGWRFVVEELERIDAEVHLAEPAEAAALKGKKKRAKTDWADARHLRELLLIGRLPESWIPPVHILDLRARVRTRHLLSHQRTEWQQRMHSVLYHHGFPQRRNLLSLDSRQWIAGLRLPAAAREQLDIALGIVDALDIRLVPFDSELHAIARKQPGCRALIEQIYGVGALTAVTILAELGDVRRFQNSRDVVRYGGLDITVYQSDDHRAPGHLSRQGPPALRWALYEAAQRARFPASPDRAYYQRLAARIGGNRACLALSRKLLKRSYHILKDLGDQALAPVA

SEQ ID NO: 425347 - protein, 340 aa, unidentified
MNEITTVGLDLAKNVFQVHGVDAEGTTVLRKQLRRAQLLAFFSRLPRCLVGMEACATAHYWARELRALGHEVRLMPAQYVKAYVKRNKNDAADAEAICEAVVRPTMRFVPAKTAEQQAAVLLHRGRERLVRQRTMLVNALRGHLAEFGVIAPQGLRNVGRLIAIIRDEEDARLPGLARQVLQVLAVQIEQLEAAIAALEKQLMGWHKSNPVSQRLATIPGIGPIIATAIAAMVAEPSGFRSGREFAAWLGLVPRQNSTGGKNRLGGISKRGNQYLRRLLINGASANLLRSKATNADPWVIGLRRRRPSLVVAVALANKTARIAWAVMHRQENYQRMATAA

SEQ ID NO: 425348 - protein, 340 aa, unidentified
MEKVYAGIDLHSSNNFIGIIDEHDKRLFGKKLPNETETILKALEPFRENLVGIAIESTYNWYWIVDDLMEERYKVRLANPSAIRQYEGLKHTDDKWDAFWLAHMLRLGILPVGYIYPKEERPVRDLLRRRLFFVRQRTALILSLQGMITRNLGIRFSGNKIKSLTEHDAEGMFGHRCLAASATSSITTIRSLLKEIRGIEREMVSHAKLRPEFEFLQTIPGVGIILALTIMLEAGDIGRFEKVGNYSSYCRCVKSERISNEKLKGKGNTKNGNKYLSWAYVEAANFAVRYSPEARKFWQRKMAKTNRIVATKALANKLARASYYIIRDRVPFDSEKLFGK

SEQ ID NO: 425349 - protein, 454 aa, unidentified
MGIKIEVIKKELRSYTWRDLETNGKFAKNDKLSFITDDMLIAGCDIGSETHYIRAIDVRGRELSSRAFEFSNTSEGFANAKAWMLALAAKNDKKQIALGLEPTGHYWFALAAWMVSNGISVVQVNPYAVKQSKEIEDNSQLKDDRKDPKLIANLVKDGNYGMPYLPEKVYADMRRLSMFRDQLTEDRIRNINRLHRELKIYFPEYMDAFGKIDGAFTLEVLKVSAIPSDITALGAEGIKNIWHNEKLRGRGYSRANEIVSYAEKSVGLTDGTDAGREAVKWYAEQILKLDEQLAVIESTLHEKCREIPYAENILEIRGVGENILAGILAEMGDISRFDDVKEIQKLSGMGLVACSSGKHKGQTKISHRGRKRLRYWLFQVAKSAVSHADEFKQLHEYYTTRTNNPLKKMQSLVVIACKILRVSYTILKTGTTYDPQKLLKDIKRPTASQAPMAA

SEQ ID NO: 425350 - protein, 325 aa, unidentified
MIQERRVPTTAKGIDEVFGKIPPSRVALETGTHSPWVSRQLARLGHDAIVAHARNVRLIGDSSRKDDQLDARTLARLARIDPGLLGPVRHRSAQAQIHLTVIRARAGLVSARTALVNAARGLTKSYGERLQKCGTQQMNRESAKGLSEELRDTLDPLLAEIESLNERIAEYDRRIEQIAKQIYPQVALLKQVKGVGTLIALTYVLTLDDPHRFRRSRDAGCFVGLRPGRRNSGMSQPQLHISKEGDRYLRTMLVQGAHYILGPFGEDSDLRRWGMRLAERGGRNAKKRAIVAVARKLAVLLHKLWVSGEVYEPLRNNHKVVRQVA

SEQ ID NO: 425351 - protein, 431 aa, unidentified
MNYNQNHKIAQITPKTLIIGIDIAKHHHVARAQDYRGIELGSTCFFDNTQEGVRTFINWINQIKDSYEMESVITGMEPTGHYWLNLAHILKEEQIKFVTVNPLHVKHSKELDDNSPTKNDVKDAKVIAQLVKDGRYSEPTIPQGVFAELRVAKKLRDLLNVDLQIVQGQVHNWIDRYFPEFFTVFKSWEGKAALHLLKLEALPEELVRYTEEELLEYLRQAVKRSIGIKKIRALKEAANRSIGIRQGAMMAKMELRTLIQKYELIQNKFEELDQTLDTLLQDIPGVDQMLEITGIGRDTVAGFFAEVGDLSEYNHPRQITKLAGLSLKENTSGKHKGRTRITKRGRKKLRALLFRASMILVAKNKAFKALHHYYTTRPENPLKKMQSLIALCNKIIRILFSIGKKQFVFQEEKMLKDIPHMHAFIQEPIAA

SEQ ID NO: 425352 - protein, 459 aa, unidentified
MNEKIKNQKTKKFVSMPLVNPNAAGIDVGDTLFTVAVPESSDTLVVKEFGAFTCDLRAISEWLKQSGIETVAMESTGVYWKQLFTVLVRDGFEVYLVNAKSTKNITGRKDDENDAMWIQRLHSCGLLTSCFLPDEHTETLRTLVRFRRSLVQDSSRYILRMQKSLELMNIKVHTVISDIVGKTGTAIIEAIIEGERRPEKFMPYIDKRIKADKQTLMKSLEGNWRREHLATLKLSYEMYKIFQVKIEECEKEIEKTLQEYDIYEDDKNVIDPIENTQQEDSSVKKKKKSKIKNSISVDINTYLKKIHGVDVMEIYGISGVGALEILSETGTDLSKWETENKWVSWLNLCPNNKITGGKLISSMRLKKKPNAAAQAFRVAANSLSKSDHWLGDYFRRMKAKGGTKYAIVATARKLAIIYYRMVRYKETFNPVELKQYQEKYKAAKISYLKRKLEQLTKAA

SEQ ID NO: 425353 - protein, 339 aa, unidentified
MYYTGIDQHKLFSVITTVDKNGKLIKQAKLNNNDYEFVNYFKSLKGKHKATVETTGGWYWMNDLISALGIELKLAHAKYLKAISYAKVKTDKVDSLILAQLLRLNFIPEAYKISNDIRTLRDTLRARLRLSQKRTSCLNFMHRMLEKFNITDQFELDSFYLLQYQQFETQAKLLKEQMLTLEKSLYPSLIPNTDIQRLLWIPGIGKMNAFTILLEVGDINRFPSEKNFFSYCRLVPSARNSAGKIKQKSASKDGNKYLKIVFSDSAIHALQYYPVIKKYYNSKLRKKNKQVAKTIIAKEIARIVYHVLKNKTNFNSKFKNSDLEHLKTVQWPRITSPDV

SEQ ID NO: 425354 - protein, 359 aa, unidentified
MPSIAPSEPQRKIVVGVDTHKHLHVAVALNALGTRVGERTVAADSAGYAELEAWARSLGQIQAVGIEGTGSYGVGLASHLRRQGHRIVEVNRGDRRMRRANGKSDTLDAEAAARAVLAGTATAIPKSADGTSEMIRQIKIARDTAVKSRTQAIISLKAIVVNAPPELREQLDPLADKSLIGRCASLRPGPITTPLASVKHTLRALARRWLDLASEIAGHDVVLERLTRESAPSLREGFGIGADTAAEMMILFGDNPERIRSEAAFSKLCGASPIPASSGMTTRHRLSRGGHRQANAALYRVVIVRMRFHQPTIEYVARRSAEGLSKRDIIRCLKRFLAREIYRRVMTDHARSEVLLATS

SEQ ID NO: 425355 - protein, 351 aa, unidentified
MESLNNQIKGENLFVGIDLHKHRWHITIRTADLEIFSNSIVGRWDNLRRILDRYKGCRIHAVYEAGCFGFWLFDRLNSYGVCCIVTPPSLIPQEYGNRVKTDRRDSRKLARLLAKELLKNIWVPSPEERFHRQVIRRRHQLVGDRVRTQNRIKSELYFYGIDLPAVRGKWSQVYFTNLQRIKFKNKWMQQSFNQLLEQYEFLCAQIAKQTQLLKQLARLPLYRDRVRILCSIPGIGILTAMEILLELQDISRFRRAEQLAAYVGLTPSQHSSADKIRMGRITGIGKNTVRSALVESCWHLIRKDKAMRRKYEQIKVRAGGKRAIVAVSRKLILCIRRLLLDNRPYVYKPVC

SEQ ID NO: 425356 - protein, 386 aa, unidentified
MPQLNDLSRSLVILEQDATLIAVIEMGQSSWLVAGIVPGVERSPLKKLAVDESALLKLLNRWREEAEKAGHRIERIAIAFEAGRDGFWLARWLRARGIEAHVIHASSVAVSREHRRAKTDRLDTELLKRAFLGWLRGERDHCKMVAIPTLAQEDAKRPNRERESLVGEQSRIVNRMKAALARLGIRGFNPKLKKAVERLDGLRTPEGEPIPPNTLAELKHDMERRRLVRSQIRDIEGTRLERLEQAPGDGPHVMVRLLARVIGVGVETADMLVQEVLSRNLRDRRAVARYGGLTGSPDESGKKRREKGLARSGNARVRRGMIQLAWRFLMFQKDSALAHWFYARTKNAPQTRKTMIVALARKLLIALWRLAREGAIPEGIVLRPAL

SEQ ID NO: 425357 - protein, 370 aa, unidentified
MKFVGIDLHTNCFTCCYLSDNSSEKQTETFTLDSVGLRKFCSTINKETYILVEATINTFSFVVQFKDLVKEVIIANTYQLKSVGIPGKKTDKIDALKLAGKLKAQVISGVQQIVPVTIPSKEIRDLRALFATYRSLRKEIGQVKNRIHSLLKENLYPFTKEYIFGKKTRIEIRKISSDYLLTFQINLLMDTLERLEEAFEKLVIEIKKAGSQYIPQIKILTSMTGVSVITAIAIIADVIDVSRFKNSKHFASYLRSAPRVESSNEKTIIKSTTKAGRKLSITLLSQSLNHFRDSNETLNRFYERASIYKKKGIVRMALCRKVITQIYQMLKKQEYHYFYNPVLHEKKMIEYKRFLKGKNINFPENFQIAA

SEQ ID NO: 425358 - protein, 460 aa, unidentified
MQQPVEVQVDEHEPIVERVVAIDVAKASGMVCLRIPHETIPDRRVTKVWPVAATTAALVELGDHLRCERVTRVVVESTSDYWRPFYYLLEAAGLIVWLVNAAQVKNVPGRPKTDKIDAVWLAKLAERSMLSPSLVPTEPMRQVRDLARARFDLVEDRTRVKQRIEKLLEDALIKISAVLTDLLGVSGRAMIEALIAGQRNPVVLAELARGRARTRRADLERALHGRFTDHHARLARLLLGQLDELTARINQVTLLLDTAINALPTPATTTDAGPTDRADGDHGDGDHGDGPTTQAGYNRAVARLCAVPGAGPDSVRAVLGEIGLDMSVFGTPQRLCSWAKVAPRTVQSGRKTGRGRTGKGNPYLKSAIAQIAIGAAKTDTFLGERYRRLIKRMPKAKALVALQRSILVILFHLLNDPTAEFTDLGSDFYQRRIDRARRTTHLLRQLHALGYDVQLTEAAA

SEQ ID NO: 425359 - protein, 346 aa, unidentified
MILIGCDFHPSWQQVSWFDESTGEIGEQKLVHATGDAERFYRQLPGPALIGMESTGNCQWFVEMVTSAGHEVWIGDAAKIRASDVRQQKHDKRDANLLVKLLREKRFPRIWTPSSQQRDLRQLLIHRYKLVRLRAQAKNGLQHLAMNQGVQKKRRLWSKAGQKVLRELALQPWAGRRREDLLSVMAMLDQQIQSLDQAVMEAAEKDPHARLLMTQPGVGPVTSLAFVLTIGDVSRFRRGKQVASYLGLIPREYSSGGRQRLGSISKQGNRFLRMLLVEAAQSVVRYDPQFRLEYLHRCHQKPKGVAKVAAARKLAIRLYWMLRTQKAHPAIVSIESSSRVPLVGAS

SEQ ID NO: 425360 - protein, 345 aa, unidentified
MEYVGIDVHKRESQLCVLTEGGELIERRIRTEAQRFTEVLGERPRARILIEAGTESEWVARCLERLGHEVIVADPNFGPMYATRRRKVKTDRRDARGLAEACLLGAYRPAHRLSDAQRHVRARLAVRDALVRTRTRYISLVRALLRQHGWRLPSGHTETFSRRVFALPTPGRLRSEIAPLLAVMRQVNQPIAYSDEVIERITATDERVQRLRTVPHVGPVIAAAFVATLDDAQRFRDAHAVEAYLGLVPRELSSGDSQRRGRITKVGNGRMRWLLVQAALSILHRHCPEAEALRAWGKRLAARRGKKVATVALARRLAGILYALLRDGTTYNPRVVRPEVLEQTV

SEQ ID NO: 425361 - protein, 337 aa, unidentified
MSYLGVDLHTNSFTVCYRTAQGKQRIASYAIDRMEAFRKTLRRRDVVAVEATGNTAWFIEQVRNRVRKVIAVDPNRFMVIRKSVKKTDKHDAKTLAWFLSKDMLPEARMKQKKHTQLHSLAATRDKLVKQRTALVNKIHNVLNSYGLKWKKETLTTEKGLREVMLLDWDTIVRVELEVLTDQIRSLSTSIKRLDADISEHGKDLKGHANLRSIKGIGDRSATVLLSVIGNVKDFADEDKLAAYFGIVPKVKDSNESVRHGRITKHGSTLARTTLVQCTLSAKRYSPYLRRYYERIQRTRGSGKAIIATARKFLGIIYKTLTNDWIFEDFPNFVIANT

SEQ ID NO: 425362 - protein, 350 aa, unidentified
MKLYSGIDLHSNNSHIGIKNKRGERLFSKRIPNDLNTILKTLSPYKSEIEEIVVESTYNWYWLVDGLQANDYPVVLANPGAMKQYNGLKHTDDKSDAFFLAELSRLNILPTGYIHSPATREIRDVLRRRLLFVRNRTAQYLSLKSSLTRNIGKTYTKEFIKKLNIKKLEEILPGKPDLCFLLERQLELINFMSTEIHEIEKRVYNKIKLKSEFIKLKTIPGVGLILGLTIMLETGNIERFKKVGNYTSYCRCATAAGYSNDKKKCNNNRKNGNKYLSWAFIEAAHCMVRVCKPAQKFYQRKKSKVNGALASKALAAKLSKAVYYILKNQEDFDVFKIFGFNPAAVNQCRD

SEQ ID NO: 425363 - protein, 388 aa, unidentified
MSVNGLPGECFDGGLIVAIDPGKAMHRVWVTDRAGMVGEPVSLPNSRTGIERLEALVGEASATFAVEATGALHRAWAAELERRRPGALRLFAPSQTHAARAQLGTRRFKTDDRDCAALVWLARQGAGRPARSSGVEAMLAAVSHRRQLVLALTPLRQRLHDQLNALAPGLSAPAGHGRALLLSTPTGHAVLACAAAFAGRPPSPRSLQARANGRLTAATAALWAGRWRQCLAPPPDAELRAARLARDLDRFQALRADIAFVDGQLEHLLADSAGQILTTLPGVATARAAALTAYTLPIERFPTPEHLYSATGLAPASYESASVRRRSAIARTGLPEHRDALMGIAWGLGQFAPAFQRRRRELNQRGKTGIQARVALARHATPALLAHA

SEQ ID NO: 425364 - protein, 355 aa, unidentified
MTSTKYIGLDVHKESISIAVLNFAGKVVMECVIETKASTILQFIHGLRGDLHLTFEEGTWAGWLYDLLKPRVTELVVCNPRKIALLKDGSKSDRIDAHKLADLLYMNKIKSVYHGEHGLRMLKELSRSYLTISKDLGRVMNRLKALYRSWAIPCAGTQVYAPHYRSEWLAKIHEAGVRRRAELYYQQLDALRLVRQQARKELLAEARKHRATKLLRQIPGIGPLRAAHLVAVMQTPHRFRTKRQLWTYSGLGLETHDSAQYRVVEQQLQRSKKSVTLRGLNDNHNHDLKDIFKGAAMRASTAAGPLHDFYEALLAKGRKPTMARLTLARKIAAITLIVWKKEVRFDANYLKQQAA

SEQ ID NO: 425365 - protein, 410 aa, unidentified
MEHYQWMLGVDWGGGEHFVCVMGDDGAVVGTRAVAHTRAAVHEAIAWVTATTGSTRSEIAVAIETPRGILVDTLIEQGFAVFAINPKQLDRFRDRFSVGGAKDDPRDARVLADALRTDRRAFRPVQPDDPRIIYLRELCRIEEELQDSVTRLANRLREQLYRVDAAWLQLCPAADDAWLWELLRDTPHPDQWPRLSRTRVARVLKTHRIRRLTVDDIITVVRQTRLMSAPGVTEAVATRIGSLVPQLLLVDQQRTTTGHQIEHCLDGLAAPMKGEPREHRDVIILRSLPGVGRTVAATMLTEAAGPLAERNYSTLRAHAGTAPITKRSSKRTFVVHMRYACKLRLRNALFHWSRTSIQHDAAARAYYDRLRARGHHHSRALRSVADRWLRILIAMLNTGTLYDPSRLISH

SEQ ID NO: 425366 - protein, 400 aa, unidentified
MDPELRVAVDIGCTRHRVAVGLSEGKLLEEFDINHDAAGLSEFFERVGRHERQWGRPVAVAMEGYNGYARPLDERVLLHGYRLFNVNNMKLARFKEIFPGPAKSDPVDARKMLEMFSLKDKLPLAREALQEVAPVAEINLQLKALTRRRKQLVNERMRVSSRMQADLQAVCPGLLDITGEADNLWFLNFLTCRADLTKLKTVRESSLLALQGVGKGYAGKIRHWQKQATFSETVAWVGPMIIEDAKRMIELRKAIGALQTQIDALAEHSEIARRIDTIPGFGRVCAPELAGEIGSLQRFRGESSLALYVGMAPLDDKSGARSGSKPPRHVNVRAKAAMMIAAAQNAASVPESKAFYDKKRSQGKTHNQALRALGRNLVRVMWSMLKHGRDYQLESPSKKA

SEQ ID NO: 425367 - protein, 368 aa, unidentified
MKQQTSATTETNIKGRNIIDFTGKTIHVGIDVHEKDFQVAKVLGDICLGNHRMPANGQGLIDHLRTHYPGAGFKCVYESCAWGFTLQRQLQQAGIDCIVVHAADVSSSDKEKKRKTDKVDALKLARNHAAHQLTSIHVPNEEIQKQRNLIRFRKKLVGDLNRSKNRLKSLLKYQGINIPEQLGKKNNWSYNFMNWVEEVAKKDVLLQDTLLLMLEEVKLLRQLLLKTERALRKLMQTSYNDKAKLLMTTPGVGRTTAMLFLLEIGDIQRFGPFDRLNDFVGFCPDTDSSGEIDRDTGITSRRHKQLRSALIEAAWEAIRIDPALLDTYQKLTRRMKGNHAIIRIARKLLRRMRAVLISGISYQKGVVV

SEQ ID NO: 425368 - protein, 365 aa, unidentified
MQKIRTTRTAGKNIFHGQLTVGLDLGDRWSAYCVLDGAGEILLEQKVVTTPEAMRQAFENVPQCRIAIETGTHSPWVSRLLAALGHEVIVAHAQKVRLITKSRRKDDRLDARTLARLARIDPELLSPVQHRSAQAQLHLTEIRARAGLVSARTALVNAARGLVKSSGERLRRSGTEQFRRESATGLSAGLREALEPLLQEVESLNERIREYDQRIARMAQERYPETALLKQVKGVGDLIATTYVLTIEDPHHFRKSRDAGCFVGLQPGRRNSGESEPQMHISKEGDEYLRALLVQGAHYILGPFGEDSDLRRWGQKLAARGGKNAKKRAAVAVARKLAVLLHRLWVSGEMYEPLRNSQKAMNAAA

SEQ ID NO: 425369 - protein, 346 aa, unidentified
MKTFIGIDVSLASSAVCVLDEHGQVVKRAQIDSEPDALIAFLRDLPWPVEAIGLEAGPLSQWLHRGLGEAGFELVLMETRQVKAVLKAMPVKTDRRDAEGIARLLRMGWFRPVHCKSVSAQEMRALLSARKAVQKAALDIEQSLRGVLRNFGMKLGPVGKGKGRYEARVRELVAGNAALEAAASAILDARAMLRDRLSALDRRVLELARQDDACRLMMTMPGVGAVIALTVRAAIDDPARFRSSRDVGPWVGLTPRREQSGERDIVGRITKAGDAALRTALFNAATVMMHHARPCWLKAWGMQVARRRGSKRATVAVARRIGVVLHRMWLDGTEFRLQRDPVPAAA

SEQ ID NO: 425370 - protein, 391 aa, unidentified
MVCVGIDVAKDKHDCCILDSDGMVRADCFTIPNNMDGFKQLLQTIRNCTKKSDKIKVGLEATGHYSYNILGFLLDNDLAVYVMNPLHTNLYRKSLSLRKTKTDRVDARTIATMLLSDVDLKSYTDIAYHNEELKSLTRYRFDKVQERAKLKQSVSRLATILFPELEGLVSSIHGTSIYALLSEYPGTKQISEVHLTKLTNLLTTASKGRYGKEKAIQIREAARASIGSVMPAKSLELKHTIKLIQELASEINEIEDSIQKIIDELNPPILSIPGMGVNSAAVILAEIGDFSNFSSPDKILAYAGCSPSTYQSGKLTNCYAHMEKRGSRYLRHALYNATKYVCYWNPVFAEYLAKKRAEGKHYNVALSHAMKKLVRLIYALQKSGKAYLAAA

SEQ ID NO: 425371 - protein, 341 aa, unidentified
MGQVNTIGLDIAKRVFQAHGADASGRVVFRKRLVRAKVLAFFAAQPPCTVAMEACAGAHHWARELGKLGHTVRLIPPAYVKPYVKRQKNDMADAEAICEAAQRPSMRFVPVKSEEQQANGVVFRARDLLVRQRTQCINALRGHLSEYGYVFPQGITHADAVIAHVEDPDSSVPESARAVLKVLIGTFQALEAQIQALDAEITQRAKADPVARRLMTIPGIGPIAATAITALVPAPEGFRAGRDFAAWLGLTPLQKSTGGKQRLGAISKMGERTIRRLLILGASAVVRWAGQRGTPAGSWLARMLARKPKMLVTVALANKTARIVWALLVKGGVYRAPAPAA

SEQ ID NO: 425372 - protein, 344 aa, unidentified
MTTKYMAGIDLHSNNLFCAIVDMEGKRVFEKKLPCEMKSVLDALKPFKKRLEKIAVESTYNWYWLVDGLQDHGYPVVLANPAAMEQYDGLKHADDKSDGFFLAEMLRLDILPTGNICDRTVRPVRDLLRRRMGLVHKRTSLILSLKSLHTRMTGRDLGTGRIKALEPKDADTLFAHPADQLITRLDLQLVEQLGQGIKTIEATILGTVKSLPCYQVLQTMPGVGKILGLTITLETVDPKRFASPGDYASYCRCVDSRRMSNGKKKGENNGKCGNKYLAWAFVEAANFAQRHDAACRKFYDRKKAQVNGIVATKALACKLAKAAWHMMSQNTDYDAGRMFPGAKK

SEQ ID NO: 425373 - protein, 326 aa, unidentified
MNAWVGIDVAKESLEVVLLREQDEQQTSIPNTAQGFRTLHHFLKKRCRKGAAVCLEATGLYGDGVAEFLYQQGYRVSVVNPARIKAYGESLLRRNKTDRSDARLIAQFCRTQQTEAWTPLPSEVKELRAMLRHLDDLQGMCQQEQNRLQAGETSATVRAQLEQHILFLQQQMAHLQQQIEDHFDQHPDLKQQRDLLTSIPGIGDLTAGRLLAEVHDIRAFDSARQLAAYVGVTPRQHQSGTSVRRASHISKQGHRGLRAALYFPALTAKRHNPLVQPLVKRLRERGHSERSILLAAMHKLLHLVYGVLKSGIPFDPDYLAKKAALA

SEQ ID NO: 425374 - protein, 343 aa, unidentified
MQITTIGLDLAKSVFQVHGVDASGQILVRKSLRRSQMLAFFAKLPPCLVGMEACGTSHYWARELIKLGHEVRLMPPAYVKPYVKRGKTDAADAEAVCEAVMRPTMRFVPVKSPEQQAALSMHRTRDLLVKQRTQLVNMIRGLLAEFGIDIPKGLERALLKARQIVDGEAPDVPIEAAKIVVTLSQQALEIHVRLRAIDRDLLVWQRGNDVARRLMTIPGIGPIGATALAASVTDPHQFRSGRQFAAWLGLTPFQKSSGGKERLGRITKMGDKYLRKLLIVGMTSRVRRAKQNPTGDPRLADLLARKPTRVATVAMANKTARIIWAIMARGEIYRGGHQPALAA

SEQ ID NO: 425375 - protein, 439 aa, unidentified
MYRQSTPSIFDSVKEGSPGAIHGVVTFYTHPKQRQENPVMLYLAIDQHRKQLTINLRNEAGDVILKRQVSTEWKRVREFFENVRNQSVPEGGFITILEVCGFNDWLLKLLTEYGCRQTVLVQPEKRDRHKTDRRDANALGELLWTNRHRLLAGKKVQNVRQVVPPSERDAGDRQLTTVRQRMTHLRTRAINRVHHLLLKHNLQQECPTKVLKTKTARKWLAKLPLETIDRWELDQLLAQWELLDKQLGELEVKIGERQAENATARIIATIPGAGAWGSLALACRIGSMERFPHPGSLAKYWGLTPRSNNSGDHNHRLGSISKEGSSLARCILGQMVMHVLRHDAVMKKWYQQIKKRRGSRIARVAVMRRLATIIWHMVKRQQPYKLCSTRANDKGSDCCVVPADRDAFFKAKQGRSKAENEKSCRDTQAPSSQASLTRP

SEQ ID NO: 425376 - protein, 387 aa, unidentified
MPQAYDSSRSLVTFEQNATLIAVIEMGQSSWLVAGTVPGVERQPRKKIMPDETALLRLLHRWRDEAARKGRTVTRIAVAYEAGRDGFWLARWLIGHGIEAHVIHPTSVAVSREHKRAKTDRLDTAILMRVFIGWLRGERGHCGMIAVPTIQEEDAKRPSRERENLVGERTRIVNRLKAALARLGIRGFKPELRRAPQRLDTLRTPEGVPIPPNILDEMRRDLARLAVIREQIAAIERTRLERLNQTPGHRPHAMVQLLARVVGVGIETADMLVQEVLSRNLRDRRAVARYAGLTGSPDESGSKRREKGLTKSGNARVRRGLIQLAWRFLMFQKDSDLAQWLRSRTEGPKGARKTTMIVALARKLLIVLWRMVTSGEVPQGVVLRQAA

SEQ ID NO: 425377 - protein, 352 aa, unidentified
MDRMTQTRRDIVVGVDTHRDSHVAVALDALGGRLGERSVPTTRAGYTDLERWASGLGLVRAFGVEGTGSYGAGLARQLRAGGHVVREVDRPDRQARRRLGKSDPLDAEAAARAVLAGTATTRPKGADGSVEALRLLVLTRRSAEKARSAAMIQLRAVMVTAPAELRETLTGLGPVALLERCAAFRPGAPIDPWSATRHALRALARRIRALDEELAGTVSAMDRLTLGRAPALRATFGVGPDSAAALLVAAGDGPDRLRSEAAFAALCGASPIPASSGLRTRHRLDRGGDRQADRALYVIVLTRLAHHAPTRAYVERRTAEGRTKREIIRCLKRYVAREVFPLLTVPHPVDKP

SEQ ID NO: 425378 - protein, 358 aa, unidentified
MKSTAERAVVTTIAIDLAKAVFQLALADSSFRTVRKLRLKRADFFAFWPNHPRVHVVMEACGSAHHVGRWLSAMGHRVSLLPPQYVRPYVRGNKTDAADCAALLEAMRAGDLHAVPIKSEHPQVMQLMHRTRTRWQKDRTARINLARGMLREFGIAIPEGAAGGLAAMHEQRDNESLHPGIRALLTDVLAEIGALDSRITAMDRSLRATCKQDPVAAKLDRLPGIGHITATALCASIGDIQRFKNGRSLSNWIGFPPKENSSGSTRRMGRMSKRGDVYVRTLLIQGARAVLSAAMTKRKQHQPLDLLRQWAVEVFDRRGFNKAAVALANKLARIVWATWKHDRAFNADYALRLRAQNA

SEQ ID NO: 425379 - protein, 309 aa, unidentified
MNSAVVYVGVDVAKAHLDVAWAQRSRRFANGKSGWGALIKWIKQSALPVHLICEASGGYERGLLDAAEQNGIKLSRVQANRVRQYARAAGILAKTDKVDARVLCAFGSAMQPEPTLPLSVQQKQLRELESQRRHLSRMLVAEQNRLAQLNDKQLRRLTCCLLASLKKQMALIDARLAALIAQDQTLREKAQKLTAIAGVGSRTAVLLLAQMPELGTLNRAQTAALVGLAPFNRDSGTLRGKRTIFGGRRALRCGLYMAALVAARHNLILRNFYQRLRSNGKPHKVALTAVMRKLILALNQALKPTACFA

SEQ ID NO: 425380 - protein, 357 aa, unidentified
MESTTVGIDLAKLVFSVCVMDERGRITARRELKREALPEWLMQLPAGTVVAMEACSSAHYWGRLCSSHGLVPKLMAAQFVKPFRKSGTIKNDRNDAEAVATAARQGNMRFVGVKTEDQQARLSWHRVREGYKKDVLAVMNRIRGLLAEFGVVINKSAVALRRRLARLDEHHLPAEFVELVRLQQRHWEAIEAGMAACDARIKAHAGQDERCQRIGAITGVGWLTTDAMVATIGNARDFKNGRQCAAWMGLTPSQYGTGGKVLLGSISCRGDAYLRTLLIQGARSSLQRAKVTPADKMTAEQIWIVQLASRLPFGKVIVAIANKHARQIWAMLARDEAYDPEAWLKHPMVQRAEPAPK

SEQ ID NO: 425381 - protein, 313 aa, unidentified
MQITTIGLDIAKNVFQVHCIDANEKVVVRKQLRRGKLMAFFEALSPCLIGMEACATAHHWARELTKLGHEVRLMPAKDVKAYVKRNKNDAADAEAICEAVRRPTMRFVRIKSPEQQGQLMQHRTRDLLMRQRTQLINALRAHLAEFGIVAAKGDGGVKELLAIVADKEDTRLPMQHRANEASRRLETIPGIGVIGATAIAATVSDPTVFRSGRDFAAWIGLVPRQDSTGGKQKLGPISKQGDRYMRRILIVGAHSVLRRAKQNPGKYPWLTQLLVRRPFKVVAVALANKMARVAWALLAYGGTYRAPKLAEAA

SEQ ID NO: 425382 - protein, 520 aa, unidentified
MARTRSRKQRRSRRPQVLQKPRGTFHPRVQRVGPEHFGIVSVDPAKARSKWMLCDFYGKVLVPPTFVPHHRGELQAALATLRDAVQTHGLKDLLVAVERTGRYHHPIKHAFAAAGFEVRIVHPFATKQFRQASDPGQKTDDTDLAAIHRAASSGFALAEAPLDRPWRELQLLVRHRRDLVHKSSALCCQIREHLDAALPGYAACFAELWESPLALHLPRQLGSSQAIGQAGLEGLRARLRQDRVGFQERSLHRLLVWASQAPPPDVAAERHLAIALLLDDDRRQKRHEIQALEQQIAAHLTRTPYVLLLSFPGIHVVSAADFAGEMGPISHYANSRAITGRAGLYPSRYQSDQVDHPHGPLVRCANRKLRATILAIANNLLTCNRHFAALAAHWKAAGKDPRKTHVKVAARFCRIAYQIVAGRQVFRHPSLPGRSYILQKLLDFQSQHQTPTAECLAQLQAATDQLPRREHAAEAAPLVRALRHTRQARRRGPQPLGQILPIVLARLGVTPVQSPGSGDS

SEQ ID NO: 425383 - protein, 328 aa, unidentified
MFYLGMDVAKAKLDCCLLLDEASNKRKTKVISNNKSGIADLLVWIGKQQISPDALHVVMEGTGVYHEQAALALADAGVTVSIVNPAQVKDFGRGLAIRTKTDGVDSFVLARYGALLKPAAWTPPAPEARILQALIARRDAIAQDLQRERNRREKADATDTLARIQQSISDSIGFLSQQLAQLQQDIDLHIDRHPGLKEDLSLLQSIPAVGPQVGNNLLAVMHSHNFGSAEQLAAYLGLVPVERQSGSSVLGRARLSKAGPARIRAVLYMAAIVAKRCNPHVKAVYERLLARGKSKMSALGAAMRKLVHLCFGVLKTRQPYRHDYVKNS

SEQ ID NO: 425384 - protein, 450 aa, unidentified
MGNGSGVSRGDRNRNARLARLRALVPVTNAIVGIDLADAKQMVVVTDHDSKVLARKTFRCRAWNLGAALDWAAERATAKGWAGVTVACEPTGHRWRVLGQLAADRAMPFVCVQPMLTSWARRSEDLTSDKTDEKDAVLIARLTAQLRCYVPEPVDETWGRLRHLGARREQLIIEMVSQVQQIRALLECVWPAALDTAKQPLRSRTWAAAMTVICQRDGGDLARTRRLGAARFEQAVRREITRRGGCKPSLRILRHLFTALTDPTGVTAHRPGALERVAFLLQDWHTAADKLTDTDTRMTRVLDELKLTELATSIPGLSAVGAAAILAETGDPNRFATARALVKHAGLAPREKLSGTFVGRTKLTGQGRPALRLAAWRAVWGAQRSNAVYAARYQHLTTRETNKLTATQAQTVIAAAILRQLHAVITTGRAWNADIATYGSHHRRQVALAA

SEQ ID NO: 425385 - protein, 386 aa, unidentified
MQKLNDLSRSLTALEPDGTLIAVIEMSLSSWLVAGIVPGVERQPLKKLAVDESALLKLLHRWREEAEKAGRRIERIVVAFEAGRDGFWLARWLRACGIEAYVIHASSIAVSREHRRAKTDRLDTELLKRSFLGWLRGERDHCKMVAIPTIKDEDAKRPNRERDSLIRERSRIVNRMKAAFVRLGIRGFNPKLKRAAGRLDGLRTPEGAPIPPNTSAELRRDMERRRLVSDQIRQIEEARLERIEQAPSDGPHAMVRLLARVIGVGIETADMLVHEVLSRNMRDRRAVARYAGLTGSPDESGRKRREKGLARSGNARVRRGMIQLAWRFLLHQKDSALTRWFRARTENARGTRKPMIVALARKLLIALWRLVREGVVPDGVVLRPAQ

SEQ ID NO: 425386 - protein, 351 aa, unidentified
MYIVGVDYHPSFQHMAFLDQETGECGDRRLNHSDGEAEKFYRELRQKGISVRVGLEATGYSRWFERLLVELGIEVWIGNAAEIKAQRVRKQKTDRQDAQLLLKLLEENRFPRIWVPSPENRDVRQLLWHRHRLVQMRTRIMNQLQALAMNEGQRCKHRLWSAEGRALLEKFPLAPWASRRRQDLLELLDRLTPTIDELTTAVEQEARKWPEALRLMTHPGVGPLTALAFVLIIGTPGRFHRGKQIGSYLGLIPSEDSSGGRQRLGHISKQGNALLRFLLVEAAQAAARCNQDWRQRYWHLAMRREKSIAKVALGRQLAVRLYWMWRNGCAYAQSLEFGSHAGQLGTGHGVN

SEQ ID NO: 425387 - protein, 438 aa, unidentified
MQANDIGVWLGLDVGKESHHACALDRNGDKVHDKPLGQDETEIRDLLSRLAERGRVLLVVDQPNTIGSLPLAVARDMGVAVAYLPGGAMRKAAQLLPGDAKTDGRDAYVIAFTALHMPSTLRDCGSDDETLAGLKVLSGYDKDLAWETTRHVNRLRSLLPQIHPAFERALKSDRITSGTVLAPLERYGGPAGMRRTGIARVSEWARSRKPRNSAAIVASLFDAIGRQTVTVAGTEAAETVIPATARQLMELKRQRREVAGRVERLLENHPLLTVLTSMPGIAAKTGSQILLAIDGDITRFENSARLAAYAGIAPVTRRSGTSIRGEHPSRGGNKRLKNALWQSAFIAAFHDPESNAHYRRKRAEGKRHNAAIICLARRRCDVLYSMLKNGTLYQPKQTDLAKAAWPTSRRTNTDGTGHRAKRARKRHQQTTPNGLTKP

SEQ ID NO: 425388 - protein, 421 aa, unidentified
MTRRIAGIDIHKNVLMVVVATVLEKEIDGGMEQQIEYEGRRFGSGTQERGHLVAWLRERQAQAVVMESTAQYWKPVWMDLELHFPKLHLAQAHSNKAPKGRKNDFADARRLTRRMAAGELILSFVPDAEQRTWRTMTRGKQQLVRDRVRLQNQTEALLEEMRIKLSGVVSDLFGVSGRRILEALAGGETHPEKLADLGDDRLKCGREALVDALTGHSEPMHLQILKLSMERLKLLDRQIEALEQMAAGALKKHGAAVTRLAGVPGFGVDSAQQVIAEVGSDAKSFSGAGELASWVGTIPGSDVSAEQNHSSRSPKGNKFLRRIFTQAAQAAVKTKGCHFQNVFRRLVPKLGYKGAIWAIAHRLCRLAWKILHDGVSYIEQAAETTPQAKKRRAQRLTQALRRLGFQVAITPIAPKAEVAQG

SEQ ID NO: 425389 - protein, 322 aa, unidentified
MQGKVTTEDAMAPVYGGIDVCKERLDVYLHPLGEHFSVANDAGGWRRLRRRLGRHRIVRVVMEPTSKYHRAAHRHLDATGIAVALINPHRARLFAQACGQLAKTDRIDARILALAGERLEPAPTAPPTAEEEALEELAGARGAALAERAATANRLRMTGSSFLRRELGNRLRGLKRHLERIEARIADMIAADARLARQAAIIRSIPGMGPVNVLAILTGLREIGRINGKEATALAGLAPFADDSGPRHGQRRIRGGRANLRKALYMAAVAASRCNPELKAFYQRLRAKGKSAKAAFIAVARKLIVLANTLITQNRSWSPSRP

SEQ ID NO: 425390 - protein, 343 aa, unidentified
MTNRLLKQVAGIDVAQKELVVSLGKMDENAVTTVYANKVFTNNEKGFARLTEWVTRQTIAEYPLRYVMEATGVYHERFAYFLSGKGYTVSIIMPNKISNFFKTLEVKTVTDKSMSMAIAMFGLEKQLDDWTQPKRAYRSLRQLTRERSQLIAERTMIKNQLHAEQAEAFPGEDTIRRMHDRINMVNAQIKQILSEIKEAITADTALKQTITTITTIPGIGLLTASVILAETNGFELIRSKKQLTSYAGLDVKEKESGTSVKGKPRISKRGNKHLRKAMHLPALAAIRYSERYKAIFTRIVSRNGIKMKGAVAVQRKLLEMAFTIYKTNKPYQAEYLKLQAENS

SEQ ID NO: 425391 - protein, 333 aa, unidentified
MLPPNCGTATPYILRNTVGLDISKLTFDATAIVGNAEYSAKFDNDSKGLDQFSDRLKSLGCQNLHICMEATGNYYEEVADYFAQYYSVYVVNPLKISKYAESRFKRTKTGKQDAKLIAQYCRSAQESELVKRQKPTDEQYRLLRMTAAYAQIKSECAAMKNRHHAAKDEEAAKAYAEIIKAMNEQLEVLKEKIKEQTEKPKCKEGVKCLETIPGIGRMTAAVLFHHLTSSKFETSNKFAAFAGLSPQQKESGTSVRGKGKLTKFGNRKLRAVLFMLTMVAYRIRAFPDFIKRLEEKKKPKKVIIAALMRKLAVIAYHVHKKGGDYDPSRYKSA

SEQ ID NO: 425392 - protein, 354 aa, unidentified
MVSTRAITGGVDTHADTHVAAALDGIGGLLGVSEFPATPAGYGQLISWLQGFGTVCLVGIEGTGSYGAGLARHIAAAGIRVVEAGRPDRQDRHHQGKSDPLDAVSAARAALSGRASGALRGRDGQVEAIRALMVAKRTARAQRTQTINQARALIITGPDDIRTRFTGQMPGELVAELAALRPRPGSMVRYHTLLALRELGRRAQYLDDQLTHLDTLIAPLVAARAPGLLALHGVGPDTAAVLLIAAGDHPGRLKSEAAWAHLCAAAPIPATSGKTKNRHRLNRGGDRQANHALWRIVITRMSSHPPTRPPAPTSPAAARKGYPSPRSSAASNATQPAKPTATCGLTDPETPGAT

SEQ ID NO: 425393 - protein, 335 aa, unidentified
MQSYGIDLAKEKFDVSFFDLTSKKVSNQPSHKVVKNNLKSIGRFLETLPSDAVLVAEHTGVYGDTLLKCCMDSNVKIAFVGGYVIHRYRATPDRAKTDVLDCALLREFGERYPDKLKYKTFPEEALYELRQLARHREMLVEQRKQLITADKSEDCRPVRSLAVKRSMDRIKEMLDTEIAETEKEMLKVINGHDSIHHNYELVKSVDGVGLITAVELLVKTENFTKITTARQYSAYAGTAPYEKSSGKMDKGAHISKIGNRRSKTLLYICAESARLHNKEIKLYYERRTLIEKKPRHYVLNAIANKLLRIIFTLVEKGEYYDANFIRQDPRVVKYN

SEQ ID NO: 425394 - protein, 415 aa, unidentified
MKVHRNCCGLDVHKQTIAACLIREDSSGKTSKQKQLFGTMTQDLRQLAEWLREAEVEAVAMEATGIYWVPVWNVLERAGFHLLLINPEHYRAIRGKKTDLKDGERIAELLQDGRLEGSFVPPTELRVLRDLTRYRVKLVEHQSAVACRIQKLLEQCNIKLGSVASNVLGVSGTAMLHALASGETDPQRLANLAKKQLRSKIPALRLALDGCLLPHHRFLLGEMLHELSHIESQLARLEAEIESQMQPFEKALSAWMSIPGIKHRVAWTLVAEIGTDMQMFPSAADLASWVGVCPGNNQSAGKRKSGKTRKGNRWARRALCEAAWVAAKAKNSYLAAQFRRFAATRGSKRAILAVAHTILTIGYHMLQRGTVYQDLGANYFDQRHILRTTKRLVKRLEALGHRVILQSPILNPSIA

SEQ ID NO: 425395 - protein, 342 aa, unidentified
MKQLYYIGVDFHPYQQTVAYCNTQDGEIKYRQFRHSDKKQLRDFYRQCQTDSQIGVEATGSLDWFEKMLFEFGLKLRRGNPRLIRRRALSRHKNDYRDAETILELLVNQQFPELEPKSPRSQLILQTLGYRHSLVGKRTSLINQLQSFARKKGFPKFSVTSSSAKERLGAAAENETEELLVNSRLKLIDNLRQEIAQLEVELKSAVTEDKQVKLLATHSGVGDLTALALVHTLGDVGRFATKEQVVAFIGLDPLDHSSGEKHRIGKVSKHGSRLVRFLLGQAANTTRDKRLREFYQRVSRRRGTAKAKVATARKLLINCYLMLRDEIAYEEFCRHGEVGLCG

SEQ ID NO: 425396 - protein, 310 aa, unidentified
MTKPYVGIDVAKATLDVAIGSDGELVQVENNEAGIGRLLERLGEVAPTLVVLEATGGYESVVAGAIVGRGVAVAVVNPRQVRDFAKATGVLAKTDRIDARVLARFAEAVRPEPRPLPTAEAKELEEYLSRRRQLVDMLTMEKNRQSIATTERMKKSLKKHVDWLEEALRRANDDIDKAIRNSPAWREQEDLLRSVPGIGPVSARTMLAELPELGRLNRKKIAALVGVAPLNRDSGTMQGSRTCWGGRANVRQVLYMAAISAVRCNPVIRQTYAALRARGKKHKVALVACMRKLLTILTAMVRDQRRWSPS

SEQ ID NO: 425397 - protein, 414 aa, unidentified
MLKIVYRVCCGMDVHKSFVVACIASTNEYGVTTYKSKRFSTFTKDLRRCADWLSENNCKDVCMESTGKYWIPIYNILEPTCNVVLAHPKYVKAIRGKKTDKRDAKWIADIFKHDLVAGSFIPPADIRQLRDLVRYRWKLTNFTTGEKNRAQNCLTVSNFKLDDVFSDVFGKAASAITTRILQDPTEKITDVSGFRTKGMKATNEQVLAAVDGEMCEEQAEKLRIIRFHMDSLELCKLNLESLILSTAEQYLPQLNLVMTVPGIQSFAAIGIISEIGVDMSVFPTSKHLCSWAGLTPQNNESAGKKKTTRISRAGAYIKPLLVQCALCAIRAKQFPELRNRYLALKKRRGHKKAIIAIARMLLTAIYNMLKKNETYNPEIYRKGDRPPAHREVSVEEAIFILQRQGYLVTAPPTS

SEQ ID NO: 425398 - protein, 381 aa, unidentified
MATMTRERECNAPTTGLLMALELGQRSWKLGFSTGIGQRSRVRQIAAGAVEAVANEILKAKLRLGLPPDAPVMSCYEAGREGFWVHRYLVAHGVTNHVVDSSSIEVNRRARRAKTDRLDLASLLNLLARYVQGDRRVWRVVRVPSVTDEDARHVPRTWETLTADRTRLINRITGLLLTQGVHLPIDKDFLAHLRTAQIWDGSPVPPGLQERLRADWALLQQVEGQLRERKARAADLLDRRTRTSRVIDKLQQVQAIGRTGAWVLATEIFGWRQITNRRQLGNLVGLVPAPYQSGDTAHDQGITRAGNHHVRRVMVQLARGWLRYQPTSALTAWYQRRFSQGGKRLRRIGIVALARKLLIALWRYVQTGLMPEGAQLKPLAV

SEQ ID NO: 425399 - protein, 338 aa, unidentified
MKLKRIGVDLAKQVFQVHGVDSHEQVKCRKQLKRHQMLDFFRQLEPCVVAMEACGSAHYWARELGKLGHEVRLIAPQFVKPYVKGGKNDANDAQAICEAASRPTMRYVEVKTVEQQASQSVHRIRGRLIKARTALVNEVRGLLAEFGLIESRKGVAATRELLCRAIDDSDSSMPGSMRELLRGLSEELQGYDERLKKLEQLIQREAREDERVRRLMKIEGLGPISATAIVSAVGDARQFASGRQFAAWLGLVPSQYSTGGKERLGGISKRGDKYLRTLLIHGSRSVLKHCQSKTDKRSDWLSQLMCRRNKNIATVALANKNARIIWAILSKGEQYQHC

SEQ ID NO: 425400 - protein, 463 aa, unidentified
MKGKSRRRSAQHARREQRILEKIHLNAAGIDIGSESHWVAVPEDRDDQPVREFKSFTHELLALAEWLEACGIDTVAMESTGVYWIPLYEILEERGIEVLLVNARHVKGVPGRKSDILDCQWIQQLHTFGLLRGSFRPDAPIAALRSLIRHRDQLVEAAASYVRRMQKALVLMNLQLPNVISDVTGVTGIAILRDIVAGQTDPATLARHRDPRCKATEAEIAASLTGHYRDEHLFVLRQALELYDVYQQKLDACDEQIESHLRALEATCASPDTLPSPSPRAVRRGGANEPHFEIRSPLHTLCGGVDLTELPGIGPYGALKLIAEIGLDMRRWASEKHFVAWLTVAPRNEISGGKILRSRTQPSANRAAKIFRMAAMSLGRSNHALGAFYRRLGARIGKAKAITATARKLAILVYRMLRDRLPYREMSAADYDQQQRSRILRGLRRRAASLGCELVDTTTGLVM

SEQ ID NO: 425401 - protein, 366 aa, unidentified
MYIVGLDVHAKRSSMCILDENGKLVKHLEVKGDWQRMLQVVDEQVPKPFAICYEASCGYGYLHDQFAKRAERVTVAHPGQLRLIFRSKKKNDRVDADKLAKLLYLKEVPAVHVPGMDVRAWRGLINYRRKLIGRRAAVKTQIRAHLRGLGIAVGVKGGLWTKKGIAWLSEQAMSSSAADGLRRDVMVDDLTELEAKVRKVERELDRIGRAHPGVTLLRTIPGVGPRTAEAFVAHVDDVSRFARVKQVGSYFGLVPCQDASADRNRLGHITKDGPAPVRWLVAEAAWQGRRRSPKIRAYFDRVMRGDPQRKKIALVATAHHLTRVMAAMLRSGEVWREEEPQQPQTPPPASDQQEAKKTKTKTSNKE

SEQ ID NO: 425402 - protein, 432 aa, unidentified
MTKTHHKTGQPVLVAIDIAKHRNEVLIAVPGRRRRKRLTVRNVREDIDRFVETLTAFGVPVQVGFEPTGDYHRPLAWRLHQAGFELKLISSLSLARTREAMHNSWDKNDPKDAQVMLHMMQTGLTQIWHDPLVHGVNDIQELSKTHAVISQTKTEFWHRLRTHYLPLYFPEAERFMGNSRSDWFLAFLEQFPTPGSITCMSEDAFIEAAWGVVGKKASIARLLADIYATAADSIGLPVDPETPAIRMFCLVLGQGRHLIAQRDQIEQQASDLLGTHPDFVRLRTIPGIGPINALTILAEAGDLRRFGHHRQFLKFCGFNLSTQQSGIFRGQTKLSKFGNARLRRTFWMAGQVAIRQRENGFRDKYERYIARDHSDPHLKRKALTSVAATIARTAHSVIKTETDYRPFFEGRGPRRKDPALQVPLRRAHSATS

SEQ ID NO: 425403 - protein, 343 aa, unidentified
MKEVATIGLDLAKQVFQVHGADAQGNTLFNRKLRRAEVLPFFEKLPPCIVAMEACGGAFYWAREIGALGHEVRILPAQYVKPFVTRGKTDAGDAIAITQAMKRPDIRSVPVKTAVQQAATMTLRTRTFFVRQRANAVNALRGYMAEFGLVADRGIAHFGKLVAALPERGDSRIPPAARLMLDEILAEIETLSARIERIDDRIAAHAKQDEDIRRLTAIPGVGTLTASTIQAHVPDPGCFKSARHFSAWLGLTPKQNSSGEKLRSGSISRMGNAELRSLLYIGAMGVLTAARRWGTGSAWLRRLMNRRPLRVVAVALANKNARVVWALLTKGGSYQAPTELAGN

SEQ ID NO: 425404 - protein, 388 aa, unidentified
MIYVGIDIAKLNHFAAAISSDGEILIEPFKFSNNYDGFYLLLSHLAPLDQNSIIIGLESTAHYGDNLVRFLISKGFKVCVLNPIQTSFMRKNNVRKTKTDKVDTFVIAKTLMMQDSLRFMALEDLDYIELKELGRFRQKLVKQRTRLKIQLTSYVDQAFPELQYFFKSGLHQNSVYAVLKEAPTPNAIASMHLTHLAHTLEVASHDHFGKDKARELRVLAQKSVGVNDSSLSIQITHTIEQIELLDSQLFSTELEMANLVTCLHSVIMTIPGIGVVNGGMILGEIGDIHRFSNPKKLLAFAGLDPTVYQSGNFQAHRTRMSKRGSKVLRYALMNAAHNVVKNNATFKAYYDAKRAEGRTHYNALGHCAGKLVRVIWKMLTDEVEFNLE

SEQ ID NO: 425405 - protein, 457 aa, unidentified
MQQYYLGGDVSKGYSDFVILDSQKRRVEENFQLDDTIVGHSFLYDRLLIFFEEHPDAELCAAVESTGGYENNWYNTLRKFQSSLNIKTARLNPAGVCKNNEAALKRVITDKISAQGVAEYLIAHSEKVMYQQQDYWASLRKQWSFIKMLTKQSTQLLNQLESLLYSTNPEILKYCQDGMPAWVFKLLKQYPTAAKLSKARATSVARIPYISISRAEELVANAKTSVASATDTITGQLISAIVGQILQLKKIIKMQTKIMAAECTLQEVELLKTFTGIGDYSAIGLMLEIQAVARFSTAKKLAAFFGLHPVYKISGDGASGFRMSKKGRKEPRRILFMVAMSAINSNSLIRDLYQKHVENGMEKMTAIGLCMHKILRIVYGMLKNNTPFNPEIDLKNRERTSEQPQKERKDKSRRYQDFDATAPISGRQRKKRAERKLSQNAVSVECGICAPAPQLSS

SEQ ID NO: 425406 - protein, 411 aa, unidentified
MSKTLFVGCDVSSKRHTVCLMDPEGNPLGTQTFPNTLSGAQTLETWLLETLNQKRFSEVKIATESTSFLDLHLVDFLASSQRLAPFHPSLYQLNPKLVRNFKRAYPDKEKTDKVDAFVIADRLRFGRVPQPYESHQPYLPLKRLTRYRFHLVKAIAREKAYFLTHLYLKFSAFSLEKPFASLFGATSLALITDFSPDELVHFPLEELTQFILKTGKNRFKDPEGVVEAVKRAARESYRLRPALASSIDLILATILQTLRALQEALKEVDRAIEKEFEAFPNTLQSIKGIGPVYSAGIFSEIGEIRRFPREDALAKFSGLTWRKHQSGNFEAEETRLSKSGNEYLRYYLIEAANALRVHNAEYKAYYETKFKEVTKHQHKRALVLTARKLVRLVYALLKKGQLYRANYQQEA

SEQ ID NO: 425407 - protein, 338 aa, unidentified
MYVCILDQAGTVLVHKNLPTTPEAFLRVIAPYRAARVVAGECMFTWSWLADLLARAGITFVLGHALSMKASHGGKAKNDKLDAHKIAVLLRGGMLPQAYVYPAERRATRALLRRRCPLMRQRAELLAHRQNTNSQYNLPEIGKKVADKANREGVEAHFPDPRVRKTIEVDVALINPYDQLLGEVELASTRTAKAPDVQTFSRLQSVPGIGQILALLRLYEIQDISGCPRVPDFVSSCRLLKCAKESAGKRLGPAGKKIGNVHLRWAVAEAAVLFLRHNQPGKAYFTKLEHQHGKAKALTVRAQKLARAGYYLLAREQAFALTRFVPASPLRGGTEPAV

SEQ ID NO: 425408 - protein, 367 aa, unidentified
MIVNEVAKNVEKIISIDTAKNSFQVLVVNQKTGKKKNTKVQRSKFVEYILKQGPCLIFMESCSASQHWARLFESFGFTVKLIAAQHVKAFLRNRRVKNDERDAEAIYTCGIQPDTKFVRIKTVEEQTVALLHTLRKAAVSQRVELSNRIRGILAEFGIVVARGKGSFNSEIEAMFNECEKIHDVYLRSAISSLFEDYHYLEQREKELSEKIESLNKDNELVKIALTCPGVGSLTASAIVAEVGDASQFRNGREMAAWNGVVPSQHSTGGRSTLGGITKTGNRYLRTLLAQCACAVIQNASRHLEQGKDTHLDRFALRLKLNGKPVKKIMIAIANKIIRILWAMLTQRKTFENKANEISDTSAELQLA

SEQ ID NO: 425409 - protein, 399 aa, unidentified
MEYDEIGVFLGLDVGKSHHHGHGLTPAGKKVFDKQLPNTEPKLRDVFEKLKTKFGTILVIVDQPASIGALPLTVARDTGCKVAYLPGLSMRRIADLYPGEAKTDARDAAVIADAARTMPHTLRSLELTDEITAELTVLAGFDQDLAAEATRTSNRIRGLLTQFHPSLERVLGPRLDHQAVTWLLERYGSPSALRKAGRRRLVEVIRPKAPRMAVRLIDDVFDALDEQTVVVPGTGTLDLVIPSLARSLGAVHEQRRAAETQISALLEAHPLSQVLTSLPGVGVRTAATLLVTVGDGSGFATSAHLTSYAGLAPATKSSGTSIHGEHAPQGGNRVLKRAMFLSAFAALHDPASRTYYDKCRARGKTHTQALLRLARQRINVLFAMLRDGTIYEPRTPRLA

SEQ ID NO: 425410 - protein, 357 aa, unidentified
MNRIYYIGADVHSNSIELAIQNRRKIVGRYSVPATISAAAEVLDSLHGKKYMAIEEGPMSGWLYRNLHQKVDRFVVADPRRNKLISSDGDHDDKVDSAKLAMLLAGGYLREVYHTDDARRAELKHWVSLYHDRVRDAVRNILKIRARCRMYGLTIPRRVLRGPEHRDPWLSKLKQPALAKQLLMLWIGYDATAKQARMSKQQLIDLSKKYPIIRIWKKLAGIGTIRSVTIFAYLDTPWRFKKKNKLWKYCGVGLQRTASGTDKKGKPKPARLQLPWAANRMLKNAILGAALTAINQKQNPFKDHYERMVQNGITAGNARHTVARKLLTVMWGMWKKSCQCDLDNATLSEPTEQSVCV

SEQ ID NO: 425411 - protein, 350 aa, unidentified
MTMVGGFDVHRKQITFDYVDNDGLVRWGQIRPATRTTLRGWLREHCPDGDGEFALEGCTGWRYVSEELTAAGVGVHLGDPAEIAALRGPKKRAKTDRADARLLRTLLVEGRFPESWIPPAHVAEIRALGRLYCALMEERRGWQQRIHAQLFHQGCPPVKALLSEPGREVLVAAELSAAGRQYVDTALRRIDELTAEIDPLRMQLVRFARRQSGCRVLQRHYGVGWLCAAIIWAEVGDPRRFSSSDQLVRFAGLDVTVYSSDGKRAPGHLSRQGSPELRWAAFEAAKCAARRGSPDYAYYHNLAAKHEGRNGKNPTLAVERKILRRCYHTLRELGDAVLAMPIAEAEEVAA

SEQ ID NO: 425412 - protein, 430 aa, unidentified
MEIVYPRACGVDVHKSFIVAVICISESIKPRYIKKRFSTFNNQLIQFRDWLIENNCHNVCMESTGKYYIPVYNALEGHIPNVVVANPKWVKAIKGEKDDNKDAKWIADLFKFGIVRSSYIPEKDIRILREFTRYQYKLVNIRSSEKNRFQNALTVGNCKLDLVFTDVFGKSASSIVDTILSDEPYTSEDILSKVHGRCKASSDDILSAVEGTNLNQYQKARIKIVQKHMEYVDSLLDEVQHHIDMMVESYENYIQLLMTIPGVNRKSAIIIISELGIDVSQWSSARKLAAWAGLAPGHNESAGKKKSVKISKAGIYLKPCLVQVAHAAVKDKTCSYYAEKFVRISKRRGKKRAIIAIARKILVAIYHILKTDEVFNPSDMADVETTKEQRIAYITNNFRNAFNQLSRTGLSEEEILSIIIKKSNNSPQTE

SEQ ID NO: 425413 - protein, 408 aa, unidentified
MNQDSGFDIWCGLDVGKTGHHACALDAAGRKVFDKPLPQDQKRLEELFDKLQTHGRVLVIVDQPNTIGALPIAVARSMGIQVAYLPGLAMRRAADLYPGNAKTDARDAFVIADTARTMPHTLRRVDAGEETLAELKVLVGFDEDLAAEATRLSNRIRGLLTQIHPALERVVGPRLTTKQGLAVIEQLGGPQAMAAASKSKLLRVISKAYPRGAQEFADAITTALAEQTVIVAGTAAAEQVLPQLAASLRQTLDQRHALAAQIEQVVDAHPLAEVLTSMPGVGVRTAAQILLDVGDASQFPTAGHLAAYAGLAPVTRRSGTSIRGEFPARSGNKHLKRALFLSAFAALRSDPTSKAYYDRKRAQGKKHNPALICLSRRRCDVLFAMLKNREPYRAPTPTREPSPLPLAA

SEQ ID NO: 425414 - protein, 355 aa, unidentified
MDSKKYIGMDVHQATISVAVMDADGKVVMDCVIEIKAAIILELIQGMRGTLWVTFEEGTSAAWLYDLLKPHVAKVVVCDPRKNALLKAGNKNDRIDARKLAELLRSGLLSPVYHGGAGVRTLRELARSYLTITKDLTRVRNRIKGLSRSWAIPCSGQKVYSPRYRSAWLKKLTEAGVRRRSEWLYQQLDDLQPLRREARRELLAESHKHPANTVLRQVPWLGPIRVALRIALIQTPHRFRTKRQLWAYSGLALQTRASGEYRVSGGQLHRAKRQPSLRGLNENHNHELKAVFKSTATRASTSAGPFGDFYAALLATGMRPTMARLTVARKIAAIVLTIWKKGERFDPEHLKRQAA

SEQ ID NO: 425415 - protein, 357 aa, unidentified
MSENLNSAVAVIGIDIGKNSFHIVGLDSRGAIVLRQKWSRGQMDARFANMPPCLIGMEACVGAHHLSRKLKTFGHDARLMPAKYVRPYSKGQKNDFRDAEAIAEAVQRPTMKFVATKTADQLDLQAPHRVRERLVSQRTGIINQIRAFLLERGIAVRQGQRFLRAELPRILATPPDVLSIRMVRIIEDLASDWHRLDERIEGLSREIEALARQDAGCERLMSVPGIGPIISSAMVAAIGRGDAFGKGRDFAAWLGLVPRQMSTGDRTILGKISKRGNRYLRVLFVQAAWVVLIKPKSWERHGLKPWIEAAKKRLHHNVLAIALANKLARIAWSVLAHGRNRRGRSVWPPLNDHTMML

SEQ ID NO: 425416 - protein, 314 aa, unidentified
MKESFIGIDVSKQTLDVAIAPDGEVWSVPNDEKGIRDLKSRLVSIGPTLIVLEASGGFEVAVVSTLAAAGLPVVVANPRQVRDFAKALGKLAKTDSIDAKVLAEFGQRVRPEPRPLKDSELQELSALVARRQQLVAMLTAEKNRLKTAPKVLHKDIEQTIRFIEKKIKNTEGKIAKNIRNNPVWRENDDLLKSVPGVGPVLAQTAIGQLPELGNVNSKSASALAGVAPFNRDSGKFRGQRSVWGGRSSVRKALYMGTLSAIRCNPVIKAFYEKLIAKGKPFKVAITACMRKLLVIMNAILKTRKPWQVAHTSAP

SEQ ID NO: 425417 - protein, 390 aa, unidentified
MSLPNDLSRCLAKFDPHTTLIAVVELSLSSWLVAGMVPGMERNPLKKMEPDEAELLRLLEKWREEAIKAGSTINRVAVAFEAGRDGFWLARWLRARGIEVHVIHSSSVAVSREHRRAKTDRLDTALLMRVFVGWLRGERGHCSMVAVPSMEDEDARRPNRERENLVGERTRIINRMKSALARLGIRGFKPELRKAPQRIESLLTPEGTNIPNNTLEEIRRDLARLALVREQIDAIEKIRLEKLESAPDTRPHAMVRLLASIVGVGIETADMLVNEILSRNLRDRRAVARYAGLTGAPDESGKKRREKGLAKAGNARVRRGLVQLAWRFLFFQKESALVQWFRARTEGPAAGRKTKFIVAFARKLLIALWRLVTTGEIPAGVVLRSNQCSA

SEQ ID NO: 425418 - protein, 307 aa, unidentified
MAESVGVDVAKHALEWCVGAEGKIQHARNEPRPIAQLVRQLVALDPVRIVVESTGGYERTLVTKLAEAGLPVVVVNPHRVRSFAQGLGILAKTDAIDARLLALFGEKVEPPVRPILQGRARLLADLVARRRQLVSIVVAEKSRRETAGAAVRRSIETMLRVLAQQIRELDRRIDAALGEDAESAELAALLQTVPSVGPGVARTLLVDLPELGHLGRREIASLVGVAPFARDSGRIRGMRRIRGGRASVRTVLYLAAMNAARFNPVLRALYQRLRQAGKPPKLAFVAVARKLLTILNAIARERIAWQA

SEQ ID NO: 425419 - protein, 381 aa, unidentified
MMTTATHNEHATTPARVLFMAFELSEKTWKLGFTTGPGQKPRERTAAARNQACVLQEVVSAKRRFGLPETVPVVSCYEAGREGFWLHRFLQAHGITNYVVDSSSIEVNRRQRRAKSDGLDVRKLLSMLMRFHHGEREVWRVVQVPSVEAEDQRHLHRDLETLKQERASTTIRIKGLLSSQGVRLTSLSKLPEQLNTLRLWDGSAIPSGLRRRILRVYAHHQFLSQQIAEVEAERRAVLHSSQAASIEKVRQLMHLKGIGINGAWLLVMEFFAWRELKNRREVGGLAGLTPTPYQSGESAREQGITKSGNPHVRWMMTELAWSWLRYQPESALSCWFRERFGGGGKRLRRIGIVAVARKLLIALWRFLETGVLPEGAELKAV

SEQ ID NO: 425420 - protein, 351 aa, unidentified
MKKLRAEHRVKIIYLGIDVHKRTYSVTAILEGQIVKRDTIAASPAGLLAYVKRCFAGAKVCSVYEAGFSGFVLHRELVKHGVENIVVNAASIEVAANDRVKTDRRDSRKLAEHLYAGRLKAIFVPEPEQELRRQLTRTREQVVSQRARVANQIKSKLHYFGLLGTEVPDGAITDRSLKQIEQLGVGEELAFALQLLISQWRFLTQQMAAIMRKFRVQARGDAAIEAIYRSGPGIGRVGARVLANEIGNPAMRFHNERELFKYTGLTPSEHSSGERVWRGKISRQGPARIRHILVEAAWKSLVADPALQAAFDRIAARAGKKRAIVAIARKLMGRMRACFRAATSYQYGVCG

SEQ ID NO: 425421 - protein, 407 aa, unidentified
MDVVLTRCAGLAVHKKRITAWRMIPDPTGREAEGMMALRTFGTMTHDLLSWADWLTEASMTHVAMESPGEYGQPGSHLLADPCTVLLVHAAHGKNVPGRKTDQAEARWLATLMRLGLLPASCIPPKGQRDLRALTRSRTKRVHERVREVNRVQGGVERAKIQLASVMADLMGVSGRAMLEALMAGRVEPAPRADRATRRMRSQIPVLEQALTGRVHAHHRQWRAMQLAHLDLLDAQIEALNQAMEASLRARSVDTPSRAGKAPWPVPSPVSPPIASPTLTLTRAVARWDTVPGIDQRGAAVIVAESGMDRSRFATAPRLAAWAGGAPGHDESAGQQRSGTTRKGHRPLRAILPQLTPAAVRPQGTYRSALYQRLAARRGKNRAIVAVAHAIMRSVFDMLSRQAPYHE

SEQ ID NO: 425422 - protein, 450 aa, unidentified
MAQGSGLTRGDRNRNRKVEALRKVVRRDRAVLSIDLGEDKQDAVVMDHEGRVLARKVVKAKAHELAGLLEWGAERAVRAGFAGVVVACEPTGHRWKALMGLADAAGHGFVCVQSLAVHRSRESDDYTLGKTDHRDAYLIGKLALRLECYLPERADAQWARLRHLGARRSALVTDVTACMQQAGDLLGCAWPAPLSAAALPLESMTWLAGMTVITSRCCGVPSRLRKMGYEKFKAAIRRELPRWGGKLVYGPIARRLWDVLTDTGGVAAQRPGALERLHLLLEDWRELRARLAATEARMLTVLDELGLTGLAASIDGVTALSAAAILAETGDMTRFTSGRAVVKHAGLNPSEHTSATMNGQTRISHRGRPGLRSAAWRAVWGAVRHNTVLRAKYTHLTGRDENRLTDGQARIACAAAVLRWLWAVITTGIAWDARIAAGEITAVPVTAAAA

SEQ ID NO: 425423 - protein, 428 aa, unidentified
MNEEDCTRLEEFRQFKREIRKSAEYLIVGIDVAKDKHHAFFGTATGKTLFKRLVFENDLEGFRKLLVQAEAMKVQEGLRKVVFGLEPTGNYHKPLGEHLMRCGHRVVLVSGVAAHENRKTVDGRWDSNDTRDAANVADLISQGKCLFYEFPVGGLQDLRNLLSLKRRLKRQEHGYRVRIRNHLVAKYFPELDRYFEQSEKTSLAVVRWCLDPAVIAGLEYPKFVEMVSSGPRRLSQENRLQAIWKMAVDSVGCEIGPAVAFEVQVMVEGLKQIREGIREIDEKIYEICSQFPEYEFLLSIPGFGPDVSAKVLGAVGDPFRFQSGKQVLKMAGLDLSAERSGKTSPSAVPVISKKGKADLRYALYQAAFIASTRNQDFIVYYTLKLRGREREPGIKTKMRVKLSAKLLIIAWTLMKKKEPFNPDYLKIE

SEQ ID NO: 425424 - protein, 337 aa, unidentified
MKVTLIGIDLAKNVLQVCGVNQVGKTLFNRTVKRTQLLKTPVQYPDAVIAMEACSGSNYWGRELMSRGFEVKLIPPQHVKPFVKGNKNDRNDAFAICEAAMRPNIIFVKPRTLAQVDIIISHRIRERRIRARTALTNQIRGLLSEYGIVIPKGRDPLNLALPELLEDADNSLTTTARRYIRELLDELYAINASIKSLEKEIRLQARNHEDTKRLTAIRGVAEIIATAAVSFAGDGSGYQNGRHFSANLGLVPKEFSSGGKQKLGAITKRGNSYLRRQLIQGAWSVIRYANNNNDRLSVWARKVIERRGKQKAAVAVANKLARIIWAMLYYKTEYRPG

SEQ ID NO: 425425 - protein, 359 aa, unidentified
MKTIVSNKQNWFNKINLTKDDEIYVGIDVHKKSYAVAVWLNDAPAIDFVMPADNQKVLTMLDKLRIALKQVVYEAGPTGYSLARLLQDAKLPIRVIAPSKTPRQSARESKTDKLDCRKLAQYAAKGLLRPIAIPTKQQEADRQLFRLREQLVEKQRRLKLQIKSFLLQHGISDPAGLKSWSVLAVEKLRTIALPDKLRYCLDIFLDELTFLKTQIKKTEQRLKETFSSPQHAKKIELLLTHPGVGPVVAGQFCTEIFNPKRFKNATEIGKYVGLSPMVTQSGQSRKNGPVLKTGRPQLRSNLIEASWVWIRKDPHAYKTYIRLLHNTGEKNKAIVAMARRLAIHLWKMLSDNKPFVQAA

SEQ ID NO: 425426 - protein, 423 aa, unidentified
MQAQEFLETFAHFGGFDFARQTHHVVVVDRLGQIVLNQPLPETGEAWAAFRRAAQPLFPLAVAVETNNGPAVERLLELGVSLYPMNPKAAQRLRDRKAPSGVKDDELDAWSFADGLRTDGHGWRMLKPEDERTKELRILCRDELTLIGQRTALVNALQAALVEYYPAAMEAFDDWTMPSSWEFVLQFPSPRELLRRGQRKWQNFLHSHRLWRPEAGPKRLEIFAAAGEFACPCEAVTRAKSLLAVSIARQLITLQAQLEEYRRQVEKLFAQHPDHDLFDSLPGIGQKTKARLLGELGADPQRFQSPDALRAYAGSAPVTQQSGKSRVVFMRRACNKWLRNAMHWLADLSRDDCVWAEAYYQKKKDQGLAHAAALRCLAGRWQKIIWKMILTGQRYDPEFHLQNMVRHGSWVVNLLPKPAPPTT

SEQ ID NO: 425427 - protein, 341 aa, unidentified
MAVAGGFDLHRGQLTFDYVDTGTGESCRGRICPADRESLRGWLRRFDGVPDVEFAVEGCTGWRYVIEELQRAGITPHLAEPAETAGLRGGKRRAKTDWADARHLRDLLLDGRIPESWIPPAHVLEARALVRLYKDLLEERTSWQQRVHATLFHQGIPVVPKLGTADGQQRLDAAELSAAGRQAVQAGLRQIDRLNQEMAPLRRELARLSSRQPGCRALRKAHYGIGALLSVAARAELGDCRRFSPSDDAVRHTGLDVTVDDSDGRRARGHIARQGPPVLRWALDEAALYASRPASPDYAYFCSVRDRIDGQRALLPVARKLARRCSHTLRDLGEDALLPAA

SEQ ID NO: 425428 - protein, 422 aa, unidentified
MKVFNPADFAALIAIDWADRKHDVCELDQQNNETTFSVISAKPEAINAWANALKQKYNGQQVAVACELKKGPLIYALSKFKHIVLFTINPSTVAKYRKAFTHSGAKDDPTDAAIQLEILQQHMSKLNVIMPDTQSIRSLAQLVEYQRKLVQDRVNLTNRLSTTLKNYYPQVLDWFNEKDSMIFCDFLLRWPSLAKVKRARKQTLHDFFNLHNARYPNVNEKRINDIKQAESLTSDNAIIGPNLLLVECLVGQLKQLMLSIERFDHEIKSIYKQHSDRFIFDSLPGAGPQMAPRLLAAMGSNRERYQSSEEVQKYAGIAPVTERSGKKEWIHWRYSCTTFLRQTFVEWAGQSVRYSFWAKAYYEQQKSKGKPHNTIIRALAFKWIRILFRCWKRKTAYDESTYLEALKRKGSPLLKYAMESKF

SEQ ID NO: 425429 - protein, 377 aa, unidentified
MKRIKFVGLDVHAERIAVAVAEQEGEIRSLGMIPNREEAVRKLVKKLGPVEQLRFCYEAGPTGYVLYWELTKLGAACAVVAPTLEPWKTGDRVKTDRRDALKLARNYRAGELTAVWVPDAEHEALRDLVRAREAAKKDQLRARHRLSKFLLRHGRRPPVGVQPWRVQYLEWVKRDVHFAVKAQEATLLDYLHEVEHMAARIVRLDDAIEEAVKVAPAKMRAVIEGLQALRGIAQISAVTIVAELGEVTRFTRARELMGYGGIVASENSSGERQRRGGITKTGNAHLRRVVIEAAWAYRHRPAIGLTLRKRQENLSEEVKEMAWKAQHRLHARYGKLMAKGKNKGVVVTAIGRELLGFIWAIGVQVEAEQKESLRQAA

SEQ ID NO: 425430 - protein, 454 aa, unidentified
MAKQKKAKVSDKMISMPVVNPNAAGIDLGSRSHFVCVSQDNVKEYPVFTSDLHEIARHLQAHGVKTVALESTGYYWRPLYILLQDYGFEVTLVNARHLKNVKGHKTDVVDSRWLQLLHSIGLLSNSFQPDVFTHQLRTYARHRKSLIEDASKYITKMNKTLVLMNIQLKVVLRDIAGASGMRVIEAILDGEREASNLEKLVSIRCESERKDILKALIGDWREEYLFELKDCYDLYHYYWEKIRNIDKQIERLLIENSKNKPHEVSKSDYKPDKKKGHQKNDPKFNVEGFAYEMTGGVDLTQITGVGMNTVLTMMTEVGFDMSKFKSGKHLAAWMGYAPNRKITGGKLLSSKTRKKTSPLAKAIRDAANSAGNSKSRLGDFFRRLAYRKGRSVAITATARKICVIMYKMLTTKQPFCYELSQEEKLKIKTRKIKNIVKSLKGQEISKCELDMAWV

SEQ ID NO: 425431 - protein, 365 aa, unidentified
MGHHSEAFIGIDTSKLKNAIAIAEGGRDGEVRYLGEIDTTDAATRQLIRKLAAKYAKLTFCYEAGPTGYGLYRLITSLGHECSVVAPSLIPRKAGDHVKTNRRDAQSLARNLRAGELTAVWVPDERHEAMRDLSRARESAVDDLKSKRQQILSLLLRLGLHYPGKKTWGKSHRNWLASQTIGQREQRIVIEELFGAERQAQDRVGRLEQAIRAAVPDWSLAEVVTALMSVRGIDLVAAVTILAELGDLSRFASPRELMAYLGLVPSEHSTGDNIKRGGITKAGNRRARRILVEASWSYRYPPRIGRDKQAKVDAAPEPVRAIAWKAQTRLSSRFRMLSKKASGQRSWRPRSHANCAASSGQSIVR

SEQ ID NO: 425432 - protein, 365 aa, unidentified
MKKNNTCQQSSKGNKTRKRSLTIGMDLGDKISHYYVLDSEGELVREGTLTTTKKGMKQRFGSLQRCRIAMEVGTHSPWVSRLLGSLGHEVIVANARQVKLISASSRKSDRLDAQTLARLARMDPELLRPIRHRSEKAQGHLMQVRVRSALVETRTGLINTARGLAKAMGERLPACDADQMGVEKMQGLPAELAEALAPLLETVESLTERIKEWDQKLEQLAGREYPETELLRQVSGVGSLIALTFVLTLEDPNRFGKSRDVGCYLGLRPRRSESGERQPQLGISKEGDVYLRKLLVQGAHCILSQRSPDTDLKRWGLKLAGKGNKNAKKRALVAVARKLAILLHHLWVSGEVYEPLRNSQQQAVA

SEQ ID NO: 425433 - protein, 371 aa, unidentified
MLAEQVDYVVGVDTHRDQHALVVVAAPTGAVVAQTVVRAGARGYAEACRFADRHAGGTRAWAVEGAGHYGVGLSRYLSRRGETVVEAGRGLGSERRLRGKNDPLDAVRAARSTLAAETLTLPRAGERQEALRVLLLARRSAVDVRRLALVQLRSVIVTAPEALRSELRHLPVGQLIRRCSRFRRSDSRSIEELAVVLVLRSLARRIVAATEEADELEQEILAHVRATAPALLEEPGVGPIVAAQLIVTWSHHNRVRSEAAFARLAGVAPLPASSGLTTRHRLSRGGDRQLNRALHTIVLHRRHHDPKTRDYIARRVAEGKNTRRHTHPQALPRPPPLPRHAEHPASDDLTVIGDSFLNSVSSSPRWRCPIA

SEQ ID NO: 425434 - protein, 369 aa, unidentified
MPHVTSIGLDVHARSVAAAAFNPFTGEVVHRDFGTDAAEIAEWALGFEEPRACYESGPTGFHMARELRALGLDCAVAAVSKMQRPAADARRKNDRRDAEFIARMLATHNIVEVPLPDAAVEAARDLDRALDDATVEYRRARQRLNMFLIRLGHVWDERNADGTRKKAWTRAHWRWISEIRLEGPQRDALEYYVTAARCAESDRRQLERRVVALAGADRWRPAVEALSCIKGIDTLTAFRLAAEAGSFSRFRSAPAFASWCGLTPSEHSSGESERHGGITKAGNALARTALIESAWHYSMCSPRPKAPAPGTDVPPAIRSRADDCTARLCRRREALARAGKPACKANAAVARELACWVWEIGCRSEGTAL

SEQ ID NO: 425435 - protein, 413 aa, unidentified
MLKIVYPICCGMDIHKSFLVACIATTNEHGVTSYKSKRFSTFTGDLRRLAAWLSENNCKDVCMESTGKYWIPVYNILESSCQIVLAHPKYVKAIRGKKTDKKDAKWIADIFKHDLISGSFIPPADIRQLRDLVRYRWKLTNFTTGEKNRAQNCLTVSNIKLDDVFSDVFGKAASAITTRLLESNEPFDVTPYLTKGIKASVEDIQNAVDGKMCAEQAEKLRIIRSHMDNLELCKMNLESLILFVVEKYLPQLNLVLTVPGIQTFSSIAVIGEIGVDMSVFPTSKHLCSWAGLTPQNNESAGKKKTTRVSRAGAYIKPLLVQCANAAIKSNKHPEIKTRYLSLKKRRGHKKAILAIARMLLTAIYNILKKSEPYNPTLYRKANLPPAHREVSVDQAIFILQRQGYLITAPALSA

SEQ ID NO: 425436 - protein, 315 aa, unidentified
MDVLAVGIDVSKATLVIAVHPTGESWSSETTPAAIDGLVARLRALTPAIIVVEATGGYERPLAAQCVTAALPISVVNPRQVRAFAQAVGRTAKTDAIDARLLAEFGARVQPPARPITDAETQALAAFVVRRRQLIEMIGMERRRLEQAPPTGKITRDLRNHIRWLERRVADVDEEIGTAVQASPVWRVHDDLLRSVPGIGPTTARTLLAELPELGRLDRRRIAALVGVAPFNCDSGQHRGQRHIWGGRAAVRAVLYMAAVSAARHNPVLRAFYRRLRDAGKPAKVALVATMRKLLTIVNTMIKHQAKWNPEIRTA

SEQ ID NO: 425437 - protein, 324 aa, unidentified
MQAIPIGCDVSKGKIDLCVWLNDGKQEYLLIGNNQKGYLKALAEIERLNIKPHICMEATGIYYEGFADFMAENGHLVSVVNPLKIKKFAESEFQKTKTDKQDARLIACYCLKMQPKADYVKPNPEQYAFRRNIALLKQLNADLNGIKNRIKVAKDEFVRQILSNQQKEIKKHIKEVRQHLAEITEQTPAGQVAEKLESIPAIGQTTALILAHYLNMYRFDSENKFVAFAGLAPGKHESGSSVRRPDKLTKYGNRTIKGALYMPAMVAYRFGYFGAFVNRLKNKGKPPKVILIAIMRKLAAIAWNLWKNGQTFDPARYGLNSKTA

SEQ ID NO: 425438 - protein, 251 aa, unidentified
MFGIGIDVSKATLDVAVHGEQFRQFSNDKRGFVRLIRWLKTWPIKQVVLEASGGYERAALDVLHAAGLPMVRINPARARRFAQGTGRAAKTDRLDATVLAQMAHLLPLTRYVPLAPWQQRLAEFAQCRRQLVQMRVSEMQRLRRLVDPDLIAMKQRHKAQLSDDLKQLDKAIAEQLEGQPGWKNIGALKGVGPIRISTLACELPELGSLGSKAIASLVGLAPMNRESGTWQGQRRISGGRAVVREALYMRP

SEQ ID NO: 425439 - protein, 424 aa, unidentified
MKLTYQTCCGVDVHKSFLVATIVKTTGGIEPSYQKKRFSTFNSSILEFKQWLLDNDCHDVCMESTGKYWVPVFNLLEDEINVVIANPKWVKAVKGNKDDTKDSKWIGDLFRLGLVKGSYIPCKIVRILREYTRYRYKLVSCRSSEKNRYQNTLTVCNVALDSVVSDIFGKSSMSIIDYLLEQSGTSINHEEIASKLLRSLKSKEDAVIESVEGYQMTDAQKYRVRLVRAHMDYITAEINDVDKMIENMIFSNPDFENAVQFLCTIPSVKRDSAITIISEIGTDMSQFGGSKRLCCWAGLTPGSNESAGKKKSVRITRAGVYLKPALVQCAHAAVKSDKSPYYKKKYESLVKRRGKKRAIIAIARMILTAIYQMLSTGEQWNPSDLYKIDMPVALVEKQKAKAIKQAKKLLQREGILPPDEPLAS

SEQ ID NO: 425440 - protein, 316 aa, unidentified
MTTTAVVVGVDVAKDRLDVAVRPSGEVWSEANDETGITTLVGRLRPLRPALIVCEATGGFERAAIAALAAAGFPVVVANPRQVRDFARATGQLAKTDQLDAAILALFAERVRPTPRPLPDEAAQLLDAVLTRRRQLLEMLVAEKNRLGFAPKPLHRGIQAHIRWLERQLDDVTKELTGLIEASPVWRAKDDLLQSVPGVGPIVSFTLLGELPELGTLSHKQIAALVGVAPLARDSGTLRGKRLVWGGRANVRTALFMAAMCGRRWNPTLKVFYERLKAAGKPTKVALIACARKLLTILNAMVRDQSRWTSNVQYSC

SEQ ID NO: 425441 - protein, 357 aa, unidentified
MMVLGIDPHKKSHTVVALEAATGELVAELTVAADRCGHERLIAWARRLTPERRFAIEDCRHFSGHLERALIAAGEGCVRVPPKLMAQTRRSARRRGKSDAIDAACVARAALREPGLPEARLAGPERTLRLLVDQRSDLVGERTRIQSRLRWHLHDLDLEVPPKALGRACWLTRLEEELAPLAGVQARIARELVARCRTLSAEISGLGREIAVLTEELAPELLALPGCGALSAASLVGETAGAERFASAARFAMHAGVAPLPVSSGQSNRHRLNRRGNRQLNAALHRIALTQLRMYEPAQLFVARKRAEGKSTREALRCLKRHLARIVWRELRNAEARRELLPVCGDPPARAALPLAS

SEQ ID NO: 425442 - protein, 405 aa, unidentified
MKQPATLHYAGVDWATRTHAVCVVDPTGAIRARLQVPNTGKSYAGLCQRLVRLGVAGVAIERPDGPLVEAMLEAGLRVVVVTPRQVKALRSRYRASGAKSDAADAYVLADVLGTDGHRLAPLTPDSDPTKVLRALTRTRKDLQEARVALVNQLTSQLERCFPGAIGLFAELHIPTAVAFLGRYPTSHAAATLTQARLAAFLRRLYHPGRTPVQVLLSRIQTAPRAGISPAEATGRAVCVDALLEAIQACVRQERELEAEVIERLELHADQHIFTSLPRAGRGVRAAALLAELGDVRARFPDNDCLAALGGAAPVTITSGKRRAVKFRWACDKKLRAALIDFADDSRHASPWAAKVYAQAPARTGRHPHAVRILARAWIRVIWRIWQDGVAYDPTKHRGAVRLQAA

SEQ ID NO: 425443 - protein, 340 aa, unidentified
MEHIAAVDLHSDNGYYGIVEPDGKRIYQRRLPNDLPRVLRELEPFRQTLRCIVVESTYNWYWLVDGLIENGYKVRLANPGKFEKYNDLKYSDDKTDTFFLTEMERLNILPTGYIYPPQERELRDLLRRRMSLVHQRTCHLLSFQTLLSRQTGGSLNSNAIKALDVEDIERVLPEQSSHVRLSGQTNLAMIKFLNQRIRLLEKAVLKSAKLRQEYEKLQTISGIGIILALTIMYETGDIGRFAGAGNYVSYCRCAKSCHVSNGKKKAEGNRKNGNKYLSWAYVEAANHARRHCEEAKKYYQRKLAKTKNVVATKALAAKLCRGAYFIMRDQVDFDVKKMFG

SEQ ID NO: 425444 - protein, 337 aa, unidentified
MKSYLFIGIDISKATLDVSVFSSSVITDIHYHQFSNSSKGFAQLLKWLKQKSGGVLMEDWRVCMENTGMYSLELNCLLHEKGIWQSMENALQIKRSMGVLRGKTDKADCQVIALYAYRFFDKLKQYILPSVTLLRLKALFSQRERLVSMHSQLLVGSQSMKGYPEELVKDIQKQNKALLKNLVLQIKLADKSIKECLQEDDELQRKSKLIQSVPGIGQQTAAYVLIVSRGMENFATAREFACYSGCAPFEHTSGTSIRGKTKVHFLANRKMKMLLHMAAINAITFNDELKAYYQRKVAEGKKPMSVLNAVRFKLICRIFSVVKRNEEFKKEYQKIAA

SEQ ID NO: 425445 - protein, 313 aa, unidentified
MPVSLSKPIVGVDVAKNELVIYQSGGDLLEEIPNTRTSIKQWLKALSGTVAIAIEATNIYHLDFADLAYEAGCTIYMVGGYELKHYREGVKIRAKTDALDAKLLARYLKNEAEELRPWTPPSPLYRQLLSLFRRRAALVQARVGLVQSWSNEPLLKAAFAEQVKSMQQLETLIEKTINDQLKEAGLLGQLKRCLKVECIGFLTGARLITAFQRGDFRNADAFIAFLGMDLRVAKSGQKDARRSLTKRGDPEARRLLHNAAMSASRTKAWKGYYEEQRTRGFSTTQALVMLARKLARVVFALLKGQSEYQPKAS

SEQ ID NO: 425446 - protein, 422 aa, unidentified
MLQETQDREQIIARVAALDIGKAEVVCCLRVPHESRPGRRLQEVDTYSTMTRSLLGMADRLHSLGVTRVVMEATSDYWKPVFWVLEAAGFETWLVNARDVKHLPGRPKTDKLDAVWLCKVAERQMIRPSFVPPPQIRRLRDVTRYRADLVGARTAEKNRAEKLLEDAQIKISVVASDLFGVSGRAMMAALIAGERSPAALAQLARTRLRTRIPALQEAFTGHFTDHHAFLLDKMLARVDGINTDIAELDARIEEMIAPFAQAAARLDEIPGIGPVAAAIIIAEIGTDMTRFPTAGHLASWAKFSPGVKESAGKKKGSGSTGHGNKYLARILGEAVIGAARTDTFLGERYRRIARRRGAKKAIVATGRSILVIIWHLLSDPDARYTDLGSDFYNQRINPERRKRAHVHQLEALGYKVTLEPAA

SEQ ID NO: 425447 - protein, 308 aa, unidentified
MTTIYTGLDIAKLNLQLHLAGRIHDLPNTTAGHRRLLKLLAAQPGAHVVCEATGGYERDVVAALHAAKVPVSVLNPARVRHFARATGQRAKTDDIDAAVLTAYGQALHPKPTAPRTEQEQQLAELIRRRVQIVEILVAQRQQAERLTVPALRRQAQSLVRRLERDLEQIEAQLKVLRTQATVLDERVQKLEAITGVGAITALGVLAELPELGTLNRRQAAALAGLAPHPRDSGQWHGRRSIGGGRAPVRRALYMAALVAAHANRQLKPFYQRLRAAGKPAKVALTAVMRKLIVLMNHILKNPSFALQN

SEQ ID NO: 425448 - protein, 483 aa, unidentified
MKDKQPEKSKKAPGRATQGHWHEMNRKQRRETMRKIQSDDLRLEVVHPDAAGIDIGNESHYVAVPPSRDSESVRRFGCTTAELKEMADWLKQCGIRTVAMQSTGVYWIAVYDILEEVGMEVYLANARETKNLPGRKSDVQESQWLMKLHTYGLLRNSFRPSQEIRVLRTYWRQRNDLVRAAGRHIQRIQKALTQMNIQLANVLSDVSGMTGQAIIRAILGGERDPQKLAEFRDARVKASKQEIARSLEGHWQEDLLFVLQQEQNGYEFCQKQMAECDQRIEQYLQQREDRSAGASLPEEKRKERLRKKKKGNTPQFDLRTELFRMAGADLTQIDGVDVMTAMTILSEVGWDMSKWKTEHHFVSWLRLCPDNRISGDKIIGKGRLPTTNRATSALRMAASTLRVSNTYLGAQFRRLRTKLGAPIAIKAMAAKLARLVYRVLRYGMTFVDKGAEFYEAQHRTQQIEYLKWRAAKMGLQIIEAPAA

SEQ ID NO: 425449 - protein, 385 aa, unidentified
MPRYIGLDLHKEYVHGCEWVPDADPGHKERHFRFPNTSASWSRLIAQLTRDCWVAIEVTGSAFEIHDLLSPHAGRVLLANPVELKRLGSGRHTDRSDALRLAKLLATDAIPAVWVPPVPVREVRRLLHYRERLLTHHHRCIYQARAVLRRHGILIPHGADVGRWATEVPETVPLGDRLIFESALRQVAMLAEELAGLDIHIARVVADVPAVELLLTITGYGLIAAAATWAAIGDPRRFIHPKQLTRYAGLDPSVLQSGEEHYQGRISKNGNSLLRTVLVEAAHTVALHDTGSLRQFYLRKAKQIGHMKAIVALARKLLIVAWRMLLTGETYRAAKPHLVTRKHRHLQKLSTARSGANGDRVLAALVRQYWNPRVREARSRTKAPA

SEQ ID NO: 425450 - protein, 352 aa, unidentified
MTSLAEVVDFVIGVDTHVETHTAAVIDAHTGAALADLSVPTTPEGYRALIDFADEHGALRAWAIEGTGGHGAGLTRLLAAGEEYVVELDRPERTQRRHGAKSDKIDAVRAAREALARPVLGTPRAAGDRQALSVLLAARGSAVDAYTVTMRQLFSLTIAAPEVLRAKLRGHRPVEQVRIAAKLRIQPSWDTETSTTARVLRQLARRCQGLQTEAAGHETAILAIVKRWRPDLLDQLGVGPIVAAVVLCAWSHPGRIHSEAAFAMLAGVAPIPANSGQTTTRYRLNRHGDRQLNRALHTIVLSRQRYHQPTKDYTARRTAQGKTPREIKRCLKRYIARDLYRLLEHPPVLDRP

SEQ ID NO: 425451 - protein, 317 aa, unidentified
MAKTSIIAAGIDTGKHKLDVAIHGDKERWQFDNNPAGFVGLVRLLRRHKVDRVGIEATGGYEREVVSALRKAGLVAVVLQPIQVRGYAQAVLCRAKSDTIDCGLIADCVAHREVIRRDPDPRLVPMADLLTFVEQTEEDIARCKVRREHAHSPDQRRLIEVDIKRFTKRRARLLAKLLVMIAAHDDLAKRHDLLLSIDGIGERTALAMLIRLPELGHITREQAASLAGLAPFVHDSGQRKGERHIAGGRDRLRRSVYAATIPAAFFHNHQLIAFYRRLVAAGKPPKLALIACARKLVIYANTVLARGTPWARQNAPA

SEQ ID NO: 425452 - protein, 451 aa, unidentified
MSRKRKSNKKTGAPVLLCLNPNAAGIDIGATEIYIAVPGDRDLQPVRCFSTFTEDLHAAADWLKACHIETVAMESTGVYWIPLFQILEARGFTVFLVNAHHVKNVPGRKSDVSDCQWLQYLHSVGLLRGSFRPEQAVCTVRSILRHRDSLVQMASSHVQHMQKALDQMNLQLHHVISDITGVTGVAILEAILAGERNPHILAALRDRRIKASADTIVKSLVGDYRREHLFTLGQSLEAFRHYQELIAACDREIAQYLEGFESKVDPPPGPRSQSKGEPKPKDSEPRFDLQTHLHRIFGVDLTKVPGINVLTTQTLLAEIGPDFSRFASGPELTSWLGLCPDNRVSGGKVLSVKTRKVKNRAATALRMAAQSLYRSQSYLGHYFRRMRAKLGAPKAITAAAHKLARIVYHMVTTRQAYDETVCAQNEVQNRQRLEARLRKQARELGLQVVAI

SEQ ID NO: 425453 - protein, 308 aa, unidentified
MKKTSTVRVNGNMIFKGHKLTIGVDLGDRWSNYCVLDEAGEVLLEQKVATTPEGMKQTFERIPRSLMALETGTHSPWVSRLLKELGHEVLVAHAQKVNLITKSTRKDDRHDARTLARLARIDPELLGPVRHRSAKAQIHLTVIRARAALVSARTALVNAARGLAKSYGQRLHKCGTQQVSRELAAELSVELREVIEPLLKEIESLNERTKEYDVRMEKIARESYPQVALIKQVKGVGTQIALTYVLTLEDPQRFPKSRDVGCFLGLRPGRRDSGESQPQMHISKEGDPYLRTMLKAACFFCCLPRYGS

SEQ ID NO: 425454 - protein, 335 aa, unidentified
MTATDTNASTLLVAIDISKHRHEVLISVPGKKRRRRLTILNTLADFQRLSASLASYDLPVRIGFEATGNYHRTLAHHLGQAGFELKLVSSVGLARTREALHNSWDKNDPKDAQFILHMLEIGAVQFFHDPMVVGTADIQELSKTHEIVSRSKTELWHRILTHYLPLYFPEAERFHRSSRTDWFLAFLEKYPSPHMISAMSREAFIADAWDVVGRKVSKEQLLSDIYATSVDSVGLPVHADSDAVRMFRLVLAEGRSLVRQRDIIEARAVELLSDLPDYQLLTTIPGIGPINAMTILAEAGDLRRFRHHRQFLKFCGMDLATVQSGMFRGQSRISK

SEQ ID NO: 425455 - protein, 337 aa, unidentified
MGLYCGIALHSNNHVVTVINEEDRRLYERRLPNDLAITKAALEPFRTQLVAVAVESTFNWYWLVDGLMDAGYQVRLAHTGAVVQYEGLKHTDDEHDAFWLAHLMRLGILPTGYIYPKSERGLRDLARQRMRLVQHRTSHITSVQSQVWRSTAVRLRSETIKGKGKQPWPELLDPDVALSVETGRAAIDALSAQIERLEELLLKRVGLLPQFQLLKTVTGIGPILALTIALEVGDIKRFPGVGEFASYCRCVDSRRLSNTKKKGEANRKNGNSYLAWAFMEAAHFAIRNLPAAKRFYERKRRQRNALLAVKALAHKLARACFYILRDQVPFAPDRLFA

SEQ ID NO: 425456 - protein, 368 aa, unidentified
MAGCAEGVWPGKGALQPLEAVERLGRLRRDDRWPGEQGCRPQDRHDRCDLSQSTPHSIRLAGKKGDPGRLIERTKGGTNTVFLSVIETGRMSPAICLGLRELSVPIVCIDARQAHQSLKAMKANKTDPHDAAGLAQLARTGFYKEVHVKSPAAHGVRSVITARGHLVEARVRLDNMIRGLCATFGYRPGPGQGKAFLERIMHAAHIPGLGEAIASLLTVRAELVEQIKEMDRRLRIIASQSQACEILMTIPEVGVQTSAAFAAAVDEVGRFRQSRNAGAYFGLVLRRHQSGELDWTGRITKQGDGTVRKLLYEAANSILTRSKEIFALKTWAMKIAKRRGLKKARVALARRLAVIMHAMLRDGTLFQA

SEQ ID NO: 425457 - protein, 277 aa, unidentified
MNATTYGLDVAKRVFQMYWVEAETGEILNRRFGRDELIRFLAQRPAGRVALEACGSAHWWARTIKALGHEVVLLHAKFIRPFVQTNKTDAADARAIWTAVQQPGMRTVAPKTEDQQAMLGLHRMRALLVKFRTMQVNQLRGLLYEFGATFRAGRAAGLAEIRSRTAELEGLLPGTLMRCLHDQLRRIDELQRDIELLEKQIGVAQKEDAACRAISAVPGIGRLTATALVATMGDARTFRSGREFAAYLGLVPRQTGTGGKVRLGSVSKRGDPSCPRC

SEQ ID NO: 425458 - protein, 343 aa, unidentified
MQIVSVGIDLGKTTFHLVALGAAGKVLVRKKFTQRQLLTYTANMQTSLIGMEACSGAHFLGRALRKQGHDVRLIAAQFVKAFVKSNKNDFVDAEAIAEAVERKNMRFVPIKTDDQLDLQAIHRVRDRLISRRTAVINQLRAFLLERGLVFARTPAKLRAALPDILENADLDLTPQMRNLIELLWKEWKTVEDQIKGLSLELERISAADPGCTRIRQIPGIGPIVATAIVAAIGNGAAFRKGRDFAAWLGVVPRQYSTGGKARLFGISKRGNVYLRKILIHGARAAVLRIKRDRAPIGAWLDALDARAPKNVVVVAMANKLARIAWAVLSSGEDYRPHSNLAAA

SEQ ID NO: 425459 - protein, 338 aa, unidentified
MNIVFLGIDLAKNVFQICGLNQAGKPVYTKRTGRKELLQMLANIPACLIGIEASTGAFYWQREFEKLGHNVKVISPQYVKPFVRGQKNDGNDAQAIAVALMQPTMHFVPPKSPEQQDIQALHRARQRIVNHRTATVCQIRGLLLDRGITIGAAVSRVRRAVPLILEDAENGLSVRMRSTIAELYDLFNDLERRIHFFDKEIETVFRQSEACQRIAKVKGIGPKTATAVVAAIGKGTEFKNGRHFAAWLGLVPRQYSSGDRQVLMNMTKKGDKHLRTLFIHGARAVVRVAANNNDSHMNQWVNQLKERRGFNKTTVAVANKNARIIWSMLRNETEYQVV

SEQ ID NO: 425460 - protein, 429 aa, unidentified
MNYSKKEKINQITEETLVVGVDVSKNRHVGRFQDFRGIEYGNPIYFFNRESGFERFKQKCTEITEMKNKNNIIIGLEPTGHYWLPLYRYLVLSGYKVVTVNPHHVEKSKELDDNNPTKCDKKDAIVIAQLVKDGRYSEPNLPEKEYAELRVAMNHRRRLNKTLNSIQNRVIRWLDIYFPEFKEVFKDWEGKASLSTLRNLPLPEDVKEKQAEEIVAIWRKNGIKRGVGIKRAQKLKEYAPRSVGMDTGKNMAKRELKDLLKQYDQIKSQLSELESEVKKLIYKIPGAKEMLTIPGIGEMTVAGFLAECGYLGNYNHPKQVIKLAGLNLMEHSSGKHKGETKITKRGRPRLRALLFRVSLPLVRHNDEFRQIHEYYTTRSKNPLEKKQSLVAICCKLIKILYTLGTREIEYNGEKMLKDIERPDEYKKAA

SEQ ID NO: 425461 - protein, 343 aa, unidentified
METVTTIGLDIAKSVFQVHGVDAVGQVVIRRQLKRRFVLSFFEKLSPCLVGIEACASSHHWSRELRALGHTVRLMPPAYVRPCVKRQKNDATDAEAICEAVGRTNMRFVPTKTPEQQSGLVLHRTRHLFMRQQTAVINAIRAHLAEFGIIAPVGRKGVEALLNIVADASDKRVPEVARACIASLGAQLHRLKRQILEFDRMIRAWHRSSETCRRLDEIPGVGPVLATALVAGVADPKAFRSGRNFSAWIGLVPKQRSSGGKDRLGSISKQGDRYLRGLFVAGALAVIRYAKIHGSQHRPWLTALLARRPTKVAAIALANKIARMVWAMMAKGERYREPVALAA

SEQ ID NO: 425462 - protein, 383 aa, unidentified
MRIVCGLDVHKDSIYLCILSSTGEIIEKVFGVLTCQLQEMRDLMLTHHVEEAGMESTSVYWIPVWRVLEPHFKLKLINPYFIRQLPGHKSDVKDARWIAECMMKELVRGSFVPPERIQQLRQYDRRIYDLDDEIVRKLAKLDAVVQRCNIRLGNYVSNTDSKSYKSVIDRICEGVTDPKVLVEEIHGRIINRHGKDTIISSLTGCVTECDMDILRQLKAEIDMAGQHKQECMDKMQAVCEREYSAALQNLQTIPGIKMRAATSLIAEIGTDMGHFQTANHLTSWSGLRPRNDQSNKTIKSRRITHGNRYLRRTLIQCAWGASRTQGCFFNRFSYHQTQVRRKNRMKVQVAIARKMLVCAWHILSRNVQYKDFDNRIGTSDENG

SEQ ID NO: 425463 - protein, 362 aa, unidentified
MQIIGCDLHARQQTLAMLDTGTGEVVNRTLRHEGNSVREFYSALPGPVRVGIEATGSMKWFLQLMEELGIDCQVGHPATIRAAEPRRQKHDQRDAELLLKLLVEKRFPSIWQPSKELLDLRGLLLHRHQWVRLRTRIQNALQAIALANGLRRGSSLWSESGQRDIASLPLATHTAHRRSELQAMYARFEAEIEKLNEQVLEQAGQRPTAELLMSHPGVGPITALATDVFLGDPKRFSDGKALASYIGIIPRENSSGGRQRLGGLSKQGNPLLRFLWCEAAAHAVRRDPELGRFYRRKLVQKGLGKARVAAARKLGIRLWIMLRDQIDYNEFCRRGQMQQKSGDACAGMPGARYGAKSHRLID

SEQ ID NO: 425464 - protein, 341 aa, unidentified
MKVSTLGIDLAKNVFQLHGVDHEDHTILRKKLTRAKFVQFVMQLEPCLIGMEACSSSHHFARLFFRYGHEVKLIPPQYVKPYVKTNKTDAADAEAICEAVTRPNMRFVQIKTEEQQAVLALHTERGILIRERIACSNSLRATLAEFGITIAAGQSHLTRELPAILEDGENDLSPFVRTSIYRQSKHIRELEEQVKQVEEALASWYRTQEACQRMAKIPGVGMLTATYVVAAVGNARQFSTAKQFASWLGLTPKEHSSGGKQQLGGISKRGDGYFRYLLVHGARALTAWVNRNGAVGENTWLKGLLERKYYNVAVVAMAAKTARIMWSMLSHNTEYQLRQLA

SEQ ID NO: 425465 - protein, 345 aa, unidentified
MKIVTVGIDLAKNVFQIHAVNEYGKTVFRKQIRRDQMAEFFVNLPPCLIGMEACGSAHHWARKLTGLGHTVKLMAPQYVKPYVKSNKNDAADAEAICEAVGRPNMRFVSTKNIEQQSVLALHRVRQGFVKARTAQANQIRGLLGEFGLIIPQGIVNIAKRVPDLIEDGSIELTGSFRLLIDRLMGQLKDLDRQVAELDAEIKAWHRQSDSSRKLEKIPGIGPVTASALIASIGDAKNFDNGRQLAAWLGLVPKQHSSGGKTTLLGISKRGDAYLRTLLIHGARAVIYAAQRKKYIVDGWLRRLLERRSVNVAAVALANKNARIVWALLAREREFRSDYTCAVAAV

SEQ ID NO: 425466 - protein, 341 aa, unidentified
MKRDISVVGIDIAKRVFHLVGMDQRGKIVMRKRCSRGEVLPLLANLGPTTIGMEACGGAHYWARCLREQGHEVKLMAPQFVKPYVKSNKNDMRDAEAIAEAVTRPSMRFVPVKDVAQQDIQALHRVRERLVTARTALVNEMRGLLAEYGIVLPQGLAKFRQALMSTLEAEHTKLTPLGQELFHKLFGELGKLDAELAYYQDKLEALAQAHPVCQRLLTIPGIGPLTATALIAAVGDAGVFKNGRQFAAWLGLVPKQYSTGGQTRLLGISKRGDSYIRKLLIHGARATLRWARTKADRRSQWIRGLLDRRGWNRTAVAVANKNARIVWALLSRGGIYEANAS

SEQ ID NO: 425467 - protein, 346 aa, unidentified
MKILALDLSKFKSVGCVYEAEGGEHGYRRVNTTPQALHDLLVEVEPDRVVIEVSSVSGWVSDLVRAMGIELQVVNTNGEAWRWRSVKQKHDQADALKLARLSAMNQLDLVHVPAPEMRQWRAVIKYRQHLVGRRTDIKNHVRELLVREGVILPRGRKCWSQEGCAELEEMARSWEGIGIAELWRGELQSEMQQLQVIQERIREVEAKLETLAQADDRVGLLQTIPGVGPRLAEAMVTLIDDPHRFKRARDVGAYLGLVPRQYQSGEMNRLCRITKRGSKLLRSLLVEVSWVSLRYNPWLRSLYERMNRGSKTRKKIAIVAVARHLAIYCWAMLRDGTTWRQPCTTQ

SEQ ID NO: 425468 - protein, 387 aa, unidentified
MARVIIGVDPHKRSATIEVINEREQTIGQGRFGTDTDGYKAMLAAGRRHTDREWAVEGCNGIGRHVAQRLVADGETVVDVPAKLSARARVFATGQGRKTDPVDARSVAVVALRTADLRRVQADDTTVALRLLVDRRDQLGRARTELLSRLHHLLLELVPGGAKKDLSAQQARALLATVRPRDVVGKTRRWLASELIHELVVIDKKIKIAKQELTELVGTTGSRLLGLHGIGPSGAARLLGDVGDIRRFGSRAHFASWNGTAPIDASSGDNNRHRLSRAGNRRINRALHIMAIVQLRHDTEGRRYYRRRLAEGKPPMEALRALKRRLSDVVYRQMLADAKRRETGPGGHTGATLTSSAADPIPMIDTSDKSLPEPARPQPKTPFMINT

SEQ ID NO: 425469 - protein, 421 aa, unidentified
MGTFRKAQQKTVWVAIDVAKARHEALVELPNGSRRRTSVANTLAGFKRFADELRRSGKNCEIALEPTGDYHRPIANFLLRQGHKVHFVSSIATCRTREALYNSWDKNDPKDAQVILHLLKTGTTQIFSDPLERGYHDLRELLGAYRQIVSQKTKIYHSLMTHYLPLYFPEAECFIASSRSEWFLDVFRFAPCPTAVLKYTKATFIKKTVKDAGHPTVRRKLVGEYYEAAKQSAGLPIKADSLTIQMFQAVLDEYIRLAQRRRLLEKQLHEHLEPHADYQRLRTIPGIGPIVALTVMAEAGDVRRFSHYRKFLNYCGLSLSTSQSGSYRGASQLSKRGNARLRCAFWMAGKAAIAQRRNGFRKKYDDYMRENPLDGDLKRKAYTAVAAKMARVAYGLIKTETDYRHFLQAAIPAGESLRSCR

SEQ ID NO: 425470 - protein, 356 aa, unidentified
MSIVAHTRPFVIGVDTHARKHNYAILTAVTGELIATNEFPTTPAGMKRALSWVARLTGGDLAALWVIECAATFGAGLARTATGAGYDVVEAARMDARARRGVGKSDSLDAHRIGAAVLPLEPDQLRHPRADDGVRAALRVLTTAREHMSTDRTACVNALTALLRVVDLGTDARRPLTNAQITEVASWRSRVEDLALSVARAETVRLAKRIHVLNVELAKNNSQLKELIEQSGAAPLLEQAGLGPVTVAVAYAAWSHPGRVRSEAAFAALAGVSPIPASSGNTTRYRLNRGGDRRLNRALHMATVTRMVHDPETRAYVDKRQAQGRTTKEIRRCLKRYLARRIYRTLEALHSAPVGA

SEQ ID NO: 425471 - protein, 360 aa, unidentified
MQTQNSELTFKGQRIFVGIDVHLKSWTVTVLSESLPHKTFTQPASHLALNKYLTGNFPQAEYYSVYEAGFCGFMPHYRLQELGVKNIVINPADVPTTQKEHLQKDDPTDSRKLARSLRSGELTGIYIPLPANLGDRTLVRIRASLVSDMVRFKQRIKSFLYFYGITYPEEFKKTHTHWSNRFMKWLRESVVLEHEKDRQSLELLLQQADQQRALLLELTNKIKELSSSQKYEKNMKLLRSVPGIGMITAITLLTEIEDISRFPNTDHFAGFIGLVPNRHSSGESTQVGEMTFRGQTKLKKLLIESSWVAARLDPALLKCFNQYIMRMDKNKAIVKIARKVLNRIYFVLKNKMEYVPSVVK

SEQ ID NO: 425472 - protein, 407 aa, unidentified
MLFIGDDWAEDHHDVEVQDEQGRVLRRARLPEGMAGIAEFGELVGRLLSEDEQAADVLVCTETDRGPWVNALIAAGYRVFSVDPKQAHRHREILSSSGAKSDKGDARGLADMVRTRRHQLREAGGDSEIAEAVKVVARAHQTMIWERTRHMLRLRAALREYFPAILAVCDTVDLSLTSRPLLVLLDKAPTPELAAKLTARQILPMLKGCRNKDAKAAQIQQILRGENLGQPPVVTRAYAASVRSSVAVLMVIVEEITHLETEVKAHFGQHPDADIILSQPGLGPILGARVLAEFGDAPGRYRSSKDRKNYAGTSPITRQSGKMRIVAARYIHNNRLVDALQGQASCAILHDPDVRGYYDQLRARGTKHNAALRQVANRLVGVLHGCLNARTRYDRNTAWAHRHTAAA

SEQ ID NO: 425473 - protein, 412 aa, unidentified
MDVIHPRCAGLDISKKDAKVCVRSNGAGRRKTSETVTTFGATTRQIMSLRDHLAAQQVTCVVMEATSDYWKPFYYLLEDLPGVEVMLVNARHVKNLPGRKTDVADATWLAQLGAHGLVRGSFVPPEPVRQLRDLTRTRTAVTRERTREIQRLEKLLEDAGIKLSSVASDLTGVSGRAMLEALIAGQSDPAAMADLAKKRMRVKIPQLTEALHGRFTSHHAFLTRMHLNLIDQHTAAIEQLTDRIEVVIEPFRSFRDLICTIPGIGGRTADIIVAETGADMTRFPTAQHLASWAGTTPGNNESAGKVKSRRTRPGNPYLQGALGTAAMSISHTHGTYLAAKYRRIATRRGPLKANVAVQRALLVAIWNTAMTNTTYHDPGGDYFTRLNPQRARNNAVRQLEAMGYHVTLDKAS

SEQ ID NO: 425474 - protein, 376 aa, unidentified
MTKIRFIGLDVHAETIAVAVAEPGGEVRSLGTIPNRLESIRKMIGKLGPVKDLRACYEAGPTGYVLYWQLSNLGVDCQVIAPTLVPVKAGDRVKTDRRDAEKLARCHRAGDLTAVWVPDAAHEALRDLVRAREAAKKDQLRARHRLSKFLLRHGQRQPAGVKAWTKAYLAWVKSKVHFEELALEAALEDYFHEVEHAAARILRLEKSLDEAIGKAPAQLRAVIEALQALRGVAQLTAATIVSEIGSFSRFEPRTLMGYSGLVASEHSSGGKTRRGSITKTGNAHLRRVVVEAAWAYQRRPWIGGFLLRRQRNLNLSEEVKEIAWKAQNRLHKRYTKLTAGGKNKNQTVTAVGRELLGFIWDIAVRTERTWEQIKAA

SEQ ID NO: 425475 - protein, 461 aa, unidentified
MSKKRPIAKQKGSIQKKVDWKALDVVHPEAAGIDVGGSEHWVAISPDRDPEPVRRFGCFTADLREMARWLIDKGVQNVAMQSTGVYWMPVLEVLEQHGLAVHLVNARHTKNLPGRKSDVQECQWLLKLHAFGLLNNSFQPTNEIRVARTLWRHRGNLVAEAGSAIQRMQKVLIEMNIQLSNVLSDLSGVSGMKIIGAILKGEHDPWKLAAMARPEVKATPEDIAKSLEGNWREELLFVLEQEVELYRFYQEKIVDCDLQLRKHLESFGSTVDVQTRPIGPKPKGKKGSRNAPQFDLRTELYRITGIDWAQINGIDVLTAQTVIAEAGADLRAFPSEKQFASWLGLCPTNEQSGGKILNRRTRKVVNRATVAFRNAAATLLRSQSYLGAQYRRLRTRLGAPKAITAMARKLACLFYRLIKHGQQYVDKGTAYYEARYRDQQIRSLAKRAQKLGLQLVTPKTA

SEQ ID NO: 425476 - protein, 357 aa, unidentified
MSQEGAYYVGMDIHKEIIAYCVKNDRGETIMHGDIAANKKSLLLWEQELPHPWIGAMEATMFTGWIYDTLRPYAKELITANPLMMKAISSAKKKNDATDAEKLSDMLRIDYIPRCYMAPSDIRELRRVLRFRNFFVRHCTALKNKNASMLMECGVEYSKKRLHGKRYFKNLLETLEEVPPSLSSLLTINKDVIDQMSKVQRLLVKGLQETKLLKERAERLMTIPGVGEVLALTWALEIAEPERFSSIRKAISYCGLCSAQKESAGKRQRGPISKQRNEHIQWILVEAAKIAVRYNQSLAKVYAHEAVKGGRNRATLAVARKLVAYLLAVDKSGRPFEDRQAQKMEKETGEGRAPSLS

SEQ ID NO: 425477 - protein, 312 aa, unidentified
MDAIFIGIDVSKDRLDVAVWPLGEGFSVSRTGAGIDELGERLKAMSPKVVAVEATGGFETVVAAGLAGVNLPVVVVNPAQVRAFANALGKRAKTDPIDAAVIAHFAEATKPQVRQLPDETTQMLADLVARRRQIVEMIAAESQRARRLTSARLKKSIVRLRKALEKELADLDGEISDHVRGSPAWAEKEDLLASVPGIGPTIARSLIAELPELGALDRRQIAALVGLAPWTRQSGQWRGKSFIGGGRANVRRVLFMGAMVAARFNPTLKLFRDRLVAAGKPKLVAIIAVARKLLTILNAILRDKSPWQLKNA

SEQ ID NO: 425478 - protein, 414 aa, unidentified
MDIVHPHCAGLDVHKKTVVAAVSAPAAGGGWHTETRTFGTMTADLLALSDWLTSYGVTHVAMESTGEYWKPVYNILEANFELLLVNAQHIKAVPGRKTDVNDAQWLAELLKHGLLKASFVPPAGQRELRELTRYRTTFVRERATLVNRVHKALESANLKLTSVATDVMGVSGRAILAELIQGQTSPEQMADLAKGRLRAKRAELTKALDGRIKPHHRFVLTELLCEIDNLDEAIARFDEQIQEYSRPFEEAIQHLDTIPGVARDTAEVIVAEIGTDMSHFPSDAHLAAWGGVAPGNHESAGKRASGKMRPGNKALRTALNQAAHAAARTKHTYLAAQYQRLAARRGKKKAIMAVAHSILVIAYHLIQRHEDYRELGGDYFEKRRPETTAHHLIKRLEGLGYAVTVQAAPATTAT

SEQ ID NO: 425479 - protein, 414 aa, unidentified
MNFHVTQVYDDKTRWTNTVINSKEVLFMNYVGIDIAKQTHYASIMNSDGEILVDPFPFSNDLSGFQKLLKNLSAFSKDNVLIGMESTAHYAENLTSFLFTRGFHICIINPIQTSTLRKSNIRKTKTDSVDTYLIIKALSLNHYRLFTERDYDSLQLKNLCRFRQKLMKARTKVKIQLVTYVDLLFPELQYFFKSGIHGKACYALLKEQPNPDRIAKMHLTRLTNLLSKTSKGHYKQSHAVQLKELASQSVGIKNSTLSLQILQSINQIELYNSQLEEVENEIKTIMERIDSVIKTIPGIGSLNGAMIIGEIGDITRFQKTCQLLAYAGLDPSVYQSGNFNAARTRMSKRGSKLLRYALINAAWQTTLVNNTFKNYYDLKVSQGRRHYNALGHVAHKLVRVIHKMMTDNIEFDLA

SEQ ID NO: 425480 - protein, 343 aa, unidentified
MDHFAGLDVSVKDTSVCIVDSTGKIIREVKVASEPDALLAVLTNPAYHFNRIGLEAGPLSQWLFSALADAGLPVICVETRHMRAVLQAQINKTDRNDARGIAQMIRAGLYRPVHVKTLRSQKLRMLLTHRKLLQAKAIAIENDLRATLRNFGLKVGVVGTVKFEARVKELVENFPDLVALVEPLLVVRRVLREQISLLHRRVLAAVRDDEVCRRLMTVPGVGPVVALTYRATVDVPARFRKSKSVGAVFGLTPSRDQSGERDRPSAISRCGDEMMRTTLYEAAQAMLLRSAKWSWLKAWAMKVARHRGMKKAIVALARRLAVIMHRIWVDGTEFRWTREAAAA

SEQ ID NO: 425481 - protein, 476 aa, unidentified
MAHQRKVRSALVPIPVLAQETLYVGVDIGKFRHVAGFLSRTLLARHERFEGCPTLAFEQSREGFRTLVDRIRELVPLEQATVLLEHTGHYHRLLEQYLLEMDITVYRIHVQERPKGMLKTDKRDALNLANTLYAQLELGVQVADKMQLVRQAVAPTKAATQLKGFIQHRYELSHHGTQLKNKLTAICDELFPEFTQIFRDPNLPTALTFREQFPTPSALATASLSALRALRSRNFPSDAQLLKLQQLARETIGTKDVDRLQGLLLEQTLLLKELRLVQEHLALLQTEICAIVTNCREGQILLSIPPIGHIQAATIIATIGTIANFEKASELKSYFGWAPRRHQTGVTFDRTKLTRAGVRPVKQMLFLMATGATTMDCEWSRLYQRLLPRLASYDERIKGYRGKLKVIGRIAGQMASLIFALLKTDQELLSQVPAGQEPPPPMLYDPAVHRRHQEGHYRSLKPGTLPRKIIQLPKHT

SEQ ID NO: 425482 - protein, 396 aa, unidentified
MSMAELRVALDIGSKKHRVGIGNADGRLLEEFDITHDKEGFEQFFNRVSVFEQRFALPVVVAMEGLGGWARPLDRMIQQRGYELLNVNNVKLARFKEIFAAPAKSDKIDTRKILELMHMREVLPLAKRILHPVGQTPIENEQLKRFTRRRRQLIEEKTRVSNRLGSDLQAVSPGLLEITGDVDNLWFLNFLSAREDLSKLAGMKRSSLLKIAGVGKAYAARIELWQSEATFADETEWVSEMIVSDARRILELIREIQALEARIETIAATSSMATRLRTIPGFGPICSATLAGEIGNMERFGGEASLALYVGMTRLDNSSGQYTGTKNTRQVNTHARAAMMTAAARHIDYTPESKIYYDRKRAEGKSYNQAVRALGRHMVRVIWSMIKHERDYVQRS

SEQ ID NO: 425483 - protein, 315 aa, unidentified
MTSADVFVGIDVSKDCLDVAARPVGLAFQQNNDEPGITALVARLLPLRPVLVVLEATGGFELPVAVALALAGVPVALVNPRQARDFAKATGRLAKTDPLDAGALAHFAEAVRPPVRPLPDAEARAFTDLVQRRRQLLEMRVAEQNRLPTAVTAAVRARINAHIEWLTQEIEQADQDLRCTVEQSPLWRAKDELLQSIKGIGPTVARTLLSSLPELGTLTRQQIAALVGLAPWNRDSGKWRGRRAIAGGRAEVRSMLCMAALSAVRFNPVLRKFSARLQAAGKPAKVRLVAVARKLLTIANAVLRDQRPFDPALAQ

SEQ ID NO: 425484 - protein, 391 aa, unidentified
MTKPKTKTVNDFSRCLDPLDMDATVIAVIEMSQSSWLVAGIVPGVERQPLKKLAINERALLNLLNRWRAEAEKQGHRITRIAVAFEAGHDGFWLARWLAAQGVEAHVIHASSVAVPREHRRAKTDRLDTELLKRGFLGWLRGERGHCKMVAVPTLAEEDAKRPSRERETLVGEASRLITRVKSAFVRLGIRGFNPKLKAAATRLETLRTPEGEPIPPNTLAALKRDLERHQIVKKQIRELEQTRLESLAQAPAKGPNVMVLVLARVIGIGVETADMLVQEVLSRTMRDRRAVARYAGLTGSPDESGAKRRDKGLARSGNARVRHGMIQLAWRFLLFQKDSALARWYRQRTADAPSMRKTLIVALARKLLIALWRLARDGVVPEGVRMRPAA

SEQ ID NO: 425485 - protein, 340 aa, unidentified
MELYVGLDVSLDMTSVCVLDGAGKIVWRGRCSSTPDAIARVIREHAPTAVRVGLEAGQLSTWLIHELRKLGLPAICLDARHAKAALSLQINKTDDNDAHGLAQIVRTGWYREVAVKSMDSQTVRVLLMARAQLVSQRQTTANLILLKTFGLLVGQAGGSRFATRVRELTVDSPALGAIVEPLLTVWQSLREQVAELDRQVRARAREDARVRRLMTAPGVGVVVALAYTAVIDDPARFAKSSSVGAYLGLTPRRYQSGEVDYDGHISRCGDGLLRSYLFEAANVVLSRLTKPSWLKEWGEALAKRIGARKAKVAVARKLAVVLHRMWMDKQEFRWSRKAAA

SEQ ID NO: 425486 - protein, 337 aa, unidentified
MSKVTVFVGLDYHKSAVQLCVMTRDGGVLLNMRCANDWREITERIAAVGGAVRAAIESCSGAADLAEELVTQAGWSVDLAHPGYVARMKQSPDKSDYSDARMLADLVRVGYLPKVWLAPEPIRELRQLVRYRQQLVNERRDVKLRIGALLREQRVCFELARPWTRCWLAWLRETDDLSEQGRWIIDRHLHRLGTLDTEVSEIEARLEYVTQEDLVVKQLRSLPGIGPATAWMLRAEIGRFDRFRTGKQLSRFCGLSPRNASSGERQADSGLIRAANGQLRATLIQAAHRLVRHDRRWSDLAFKMLEAGKPRTVVVAAIANRWMRWLFHQMRSLATAA

SEQ ID NO: 425487 - protein, 349 aa, unidentified
MWIIGCDYHPRMQEVALVETETGEYDERQLSHDHGEAEKFYCDQRGVNVRVGMEATGHARWFERLMAELGFELWIGDPAEIKATRVRKQKRDREDARLLLKLLRENRFPRVWVPPPENRDLRQLLWHRHRLVQMRTRIMNQLQAIAMGEGVRLRKSLWSRSGRAKLESLQLAPWAAKRRKDLLELLDHLTPKIEELNVAFEQEAWNRPEVRHRMTHPGVGPVTGLAFVLIIGTPQRFGCGKQIGSYLGLIPCEDSSGGRQRLGHISKQGSSLLRFLLVEAAQQAVRFDADWKRQYLHLAMRREKRIAKVAMARRLGVRLYWMWRTGWDGKQALQFGSHAGQLVRSHGLT

SEQ ID NO: 425488 - protein, 344 aa, unidentified
MDYFVGLDVSLRSVAVCVIDGGGRTVLERSVACEIDDISGCLASLTASELQIGFEAGAMSQHLYFGLQGAGFDVVCMEARQVNAALSAMRNRTDKTDARGIANVLRSGWFNPVHMKSREAHAIRALLSSRKAVQRKCIDLANEIRGLFRVFGLRLPSGIDQASFDEQVRPIIQADTDLSHALLPLLDARAVLFTAYRELDRRVKRAANHDETCLRFMAIPGVGPIAALTFKAAVDDPKRFTSSRTVAAHFGLTPRRYQSGEMDNPGRISKAGDADVRSALYAAANAMMMRSVASSEIKSWGLRLMRRKGRRRAVVAVARKLAVIMHRMWADNTEFRQRPLEGAA

SEQ ID NO: 425489 - protein, 388 aa, unidentified
MQVVTGQAAAPTAIQTNLRAIFVSLELSRSTWLITSLSPGAAEKMSKHSVQAGDIAGLLRRLAQIKEKARARTGRDFPIITIQEAGLDGFWIHRVLQSEGIESHVVDPASIATSRRRRRAKTDKIDGETLVRTLLAYKRGEPRVCAMIKVPTPEEEDSRRLCRERKVLTAERVLHVNRIKGLLFCQGISGYEPLRRDRHERLEELQTGDGRPLPPHLKAQVNRELDRLELLPKQIKAVEAERDALLVAAHTPAAVPASMLLNIRGIGPEFAAVLWSEGLFRHFDNRRQVAAYAGLAPTPWQSGAVDREQGVSKAGNPRLRTTLIQLAWLWLRNQPHSALTLWFHERVSRNGGRLRKTTIVALARKLLVALWKYVTAGVVIEGAAMTAA

SEQ ID NO: 425490 - protein, 346 aa, unidentified
MLYCGLDLSRKRIDFHLLDVDGRVVEVGAVGADGDALAGLARRVGVHGLPVLAAVESMNGARFVHDELERHGWEVLVADAAKVRGFAPVACKTDKVDARVLAELAQKALVPAIWLPGLEVRGARERARFRLHLVRHRVSLKNRIHQTLVSFGVPCPVSDMFGVQGRERLERLQLPDPWAGTVQASLRLLDDLAVEIDSIERELRELGADHPYVPLLTTVPGIAWVLGYTIAAEIGDIHRFATPAKLAGYSGLCPRVYQSGASDRRGPISKTGPKYLRWALLEATTHACRHPAYNERYQRTKTRLGRQRGPKVAQIDLARRLSHAVWHMLTRNQPFAPAGATPALAA

SEQ ID NO: 425491 - protein, 394 aa, unidentified
MKLIGIDIGKNKHFFCVMDQQTGEIISQPVSFSNDKEGFDFLVQKIKSYPKDSILIGMEDTGHYHFALLKYLLDLQYTVALINPKTTDFNRKMQGGITKNDKLDTINICDVLDTPERKKQYRITKVNSFDLYEQKQLTRHHHNLKEEENVYKNRLQKCIDIVFPEFNKLFNSKYGIVYMNILKMFGSAENIANTDIRTIRKCFEIEGRGNRISLTPERLKECAISSIGISSSAEVIQIKHLTAQIELIEEQLTEIDKKIEEFSIQNNSPILSIPGISHFSGTSILAELGDISNYSKPSQIIKFAGVAPLHYESSQFNAQHTAITKKGSKYLRKTLYQIILPVIKHNQVFYKYYQLKISQGKGHRCAQGHCVRKLLRIIYHLLKTNQQFDPQLLR

SEQ ID NO: 425492 - protein, 346 aa, unidentified
MNQIIRIGMDTSKHIFQLHGVDSAESPVLRRQLRRHQLLEFFSKLPPTVIGIEACGASHHWARELSKLGHEVKLMAPQHVKAYVKRNKNDGRDAEGLCEAMSRPTMQFVPVKNQEQQAALMLAGVRHQLIARRTQLSNTIRGYAAEFGLTAAKGLGKIEELLVAIAQDQGVPALARELFAFQGRDYARLQTEIKVIEAKLMSWHRANADSRRLAQIPGVGPIVATTLIMKAPDPHLFPSGRQFAAWIGLTPKDHSTAGKTRLGKITRAGDEMLRSVLVAGATAVIQQARNGRGRHSPWLLALLKRKSPKQAAVALANKTARIAWKLMTTGESYDGARMLGASTLAA

SEQ ID NO: 425493 - protein, 346 aa, unidentified
MEHYAGIDVSLELSSVCVVDMQGKIVREAKVASEPEDLIAFFASLGFAVKRVGLEAGPLSQWLQSGLKSAGLEAVLLETRHVKAALSAMTVKTDRKDARGLAQLIRMGWFRPVHAKSIGSQEVRALLVARKQLLGRLIDVELSIRGILRGFGLKIGAVTRKGFEARVRELVNGQATLERVTGAMLSARAALKVEYEKLHKAVLAIVREDAVCRRLMTVPGVGPLVAMTYKTAMDDPSRITKSKAAGALFGLTPKKYQSGEKDVTGGITRTGDEMVRTALYEAANVLLARITRFSKLKRWGMDVAKRRGSKRAKVALARKIAVILHRMWVDGTTYRWTDAQLNATQA

SEQ ID NO: 425494 - protein, 343 aa, unidentified
MQTVTTIGFDIAKSVFQVHGVDAAGEVVIRRQLKRRSVLAFFQKLPPCLVGIEACASSHHWSRELQALGHTVRLMPPAYVKPYVKRQKNDMADAEAICEAVTRANMRFVPTKTPEQQSCLMLHRTRHLFIRQQTAVINSIRAHLAEFGIVAPVGRKGVMELLHVVADPGDKRVPEVARACLAALGTQLLRLKEQILEFDRMIMAWHRSNQTSKRLHYIPGVGPMLATALVASVADPRTFRSGRNFSAWIGLVPKQHSSGGKDRLGSISKQGDRYLRSLFVAGALAVIRYAKIHGTKHRPWLTALLGRRPTKVVAIALANKIARMAWAMMAKGERYKQPVALAA

SEQ ID NO: 425495 - protein, 429 aa, unidentified
MQIVYRRCGGMDVHKKSVVVCLLLIDESTGEERKQRRSFGTTTRALLELAAWLKRWGVEMVAMESTGVYWKPVWNVLEEELGAECQLMLVNARHFQQVPGRKTDQKDAEWLAELAQHGLVRSSFVPPKATRELRDLTRARATLTEDHTAVANRLQKLLEESNIKLSSVASNALGVSGRRILKELAKGNRDAAELAELALRRLREKIPQLREALEGRMSAHQQQMLNDYLTQLEFLEQQVEELDGRIEAHLIATGQIKQVELLDTIPGVNLVVGATMVAELGVDMKQFPDADHACSWAGMCPGNHISAGKRYSGRTNKGNVWLRRALCQASWAAGKSKKTYLSEQYRRWKGRRGKKRGIVALGHQILEIAYTMLKTGTAYHEWKPAERQTKERRSAKSRGRNWQADINRSIEVLHSLGYQVTAPSATPPI

SEQ ID NO: 425496 - protein, 354 aa, unidentified
MSQQLNTTIAVIGIDIGKNSFHIVGLDKPGAIALRQKWSRGQVEAHLANMPPCLIGMEACVGAHHLSRKLKALGHDARLMPAKYVRPYSKGQKNDFRDAEAIAEAVQRPTMKFVATKTTDQLDLQALHRVRERLVSQRTGIINQIRAFLLERGIAARQGQRFLRAGLPTILTTPPDVLSPRMVRIIEGLASDWRRLDERIEGLSSEIKAIACQDSSCERLMSVPGISPIISSAMVAAIGTGDTFSKGRDYAAWLGLVPKQMSTGDRTILGKISKRGNRYLRVLFVQAAWVVLIKPKSWQRHGLKPWIEAAKKRLHRNVLAIALANKLARIAWSVLARGRGFEASTISDTATQPA

SEQ ID NO: 425497 - protein, 344 aa, unidentified
MGEVITIGLDIAKSVFQVHGVDGLGAVVIRKRVSRARMLEFFAGLPRCLIGIEACPAAHHWARELQAIGHTVRLMPPSYVKAYLKRSKNDANDAAAICEAVTRPSMRFVAVKTKEQQAALMLHRARQLLVRQRTMLSNAIRGHLSELGIVSAKGRNGTDELLEIIGKDADSRIPLAARSVLKVLAAQYSAIGAEIASISKSILAWHRSCEPSRRLEEIPGIGPIVATALVAEISDWKAFSSGRGLAAWIGLVPKQHTTGGRDKLGSITKQGNRYLRWLLVNGAMAVIRYAQKHGTKKHPWLGRLMARRPTKVAAVALANKIARMAWTIMTRGERYREPVLLLAA

SEQ ID NO: 425498 - protein, 339 aa, unidentified
MNRIVVGVDIAKRVFQLHWVEPRTGEIVALQLKREKLLEHFANRSQCLIGMEACGGSQHWARSLQKLGHEVKLLSGRMVKPFVVGNKNDAADARGIWMAVQQPGIKAVAVKSEEQQAVLALHRMREQLVKFRTAQINGLRGLLTEYGEVMPQGRAGIKRDIPGALGRLSDRSPAIVIDTLREQYARLSEIDGQISQIERRLRQWQREDSATQRIAAIPGVGLLSATAAVATMGDAKAFKSGREFAAWLGLVPRQTGTGGRVRLLGISKRGDRYLRTLLIHGARAVLTHSKAPPEWLTELAKRRPKNVAVVAMANKMARTIWALMAHERAYQFGYVSRPV

SEQ ID NO: 425499 - protein, 364 aa, unidentified
MKNITTYVGVDAHKKDLFVAMLIGDQTTPVTWTVPNEPNAVRRLVRKLEREAPGPLRVCYEAGPCGYALQRQVTTPRVSCQVIAPALIPRKPGERIKTNRRDARKLAELLRAGLLTEVRPPTLEEEAVRDLCRARDDAREDLQRCRHRLGKLLLRRGLHYSGRNWTQGHRRWINGLTWAQPAERVVVDDYQLAIAQLEGRLSELDTRLAEIAQTEPYREHVGWLRCFRGIDTLTAILILAELHDFRRFQSPRALMAYVGLVPGEDSSGEKQRRGRITRTGNALVRRLLVETAWHYQHRPGVGVALTQRRKGQPGRVIAIADNAQQRLCRRFRRLAEHHKPAPKVVVAIARELVGFLWAALQPAN

SEQ ID NO: 425500 - protein, 312 aa, unidentified
MYYIGIDVSKKDLSVFDGKKDLKFINKEGLKSFKKYLKKKVNFSDLVIIFEPTGVYSLYLKEFCAKNSIKAYIVNPKKSHNFTRALGKRSKTDKIDARILYQFHKLIDLKDIKIPRIDQQAKALASYLTSYEFALKQRISLSNHLESLQDKGLIALMKKDLKRAKKLEDKIFNDILEYVSKNQNLKEDYQRLLTISGVGDKTAIALLTLFKTYQGTNRAQITALAGLDPVRRESGTSVKGKVRISKNGKGIYRKIFYLPTVCATVHNQKIRVFYQRLLAHHKIKKLAVIASMRKILLIAHAMYRDKTEYIAA

SEQ ID NO: 425501 - protein, 419 aa, unidentified
MADPNERCEPDFAAFIGIDWADQRHAWALQTTIKGAIEHGDLDHTPEAVDAWATELGRRFGGRPVAIALEQSRGALLFMLTKYAHFVLYPIHPTTLANYRLGFRPSGAKSDPSDAGLLLDLLVRHREKLRRLNPDTVETRTLQFLVEGRRKLVNDKTRYSNRLTACLKMYFPQVLDWFAEVSSKIAGDFLERWPTLPKLQKARLDTLRTFFIEHHSGRPESIQRRLEEIRRGVPATHDQAVIESCVATVTALVPLLRELRRAIQSYDEQIETTARQHADFVIFDSLPGAGAALVPRLIAALGTQRDRYSSASELQCYSGIAPVLASSGKQSWVHWRWACPKFLRQTFHEWAAHSIGSSAWASAYYNQQRAKGKSRNTAVRPSHSNGFAFCFAVGKTAYRIRKTCTNRPLSSELLAQSKL

SEQ ID NO: 425502 - protein, 475 aa, unidentified
MLQTWPASLNRAVIKRHRKRDQAKCSFLREAAGFLGLEGLSYSCCSINPKRKELMNMSKNMLCGCDVSLENNTVWLMLDDGSQPAKLFNADNNQLGAETLVERIYSIAKEHCVSDILIGTEATSMYDWHLLEYLAESKLALEFNLKLYRFNAKWIKNFKKSLAPRGKSDPIDSFAIAERLRMGRLPKEYIPDTKYQPLRKLTRFRFHLMQQIAREKNFFLANLFLKASAYSRVSPFGSTFSATSLSVINDFFSVDELAAMPVEELTEFILEKGKSHFSKPAEIVDNLKRVARESYRLKPELAPTVNLILASTFNNIRCYKEQVKLVDEAIAENLKAFRHTLDSISGIGPVYAAGILAEIGDVHRFLNDSSLAQFTGLTWPKHQSGRFQAEETRMSHAGNQYLRYYLVEAANSVKRCDATYKAFYEKKYKEATKHHHKRALVLTARKLVRLVWTLLTRQVLYQPGYCSFEDLSKIG

SEQ ID NO: 425503 - protein, 362 aa, unidentified
MEQVTIIGIDLAKRVFQIHGAASDGKVVFRKKLSRSQLLPFLAGQPRCTVAMEACATAHEWGRAIGTLGHAVRLLPPVYVKPFVKRQKNDAADAEAIAEAASRPTMRFVAVKTEEQQARSMIFRTRDLLVRQRTQLINALRGDLAEHGVVAPQGPAHVKRLADAIEDEESLIQPIVRDVGRLYLQQIAIYSEKIAELEKTLHREAARSETTARLQTMPGIGPITAIAIETYAPPLETFRRGRDFAAWLGLVPLQKSTGGKQKLGRTSKMGQRDIRRLLIVGAMAVVRWAARKGPPEGSWLARMLARKPPMLVAIALANKMARSAWAMLTKRENYRDPAVASARSTIEPSLAGPSGCEEGSEQ

SEQ ID NO: 425504 - protein, 350 aa, unidentified
MRRPTDKLIAGIDLHGNNLVIGVINQDGKRIAHQKLDCDLKQVTEFLKPLKPQLQSMAVESTFNWYWLVDGLRAQDYPIDLANPAKIEQYSGIKHADDKHDAFHLAELQRLKILPKAHIYDAELRPVRDLLRRRTKLVQQRTALFLSFKSLYARTTGQVMPLKTLKNMEPKEGKELYEHPANQLIAQVELEHIAALDRSISRIEKAVLGCAREIVLYEKLVSLPGIGKILGMTITMEVGEIGRFKSDGDFASYCRAVDSRRLSNGKQKGQNNQKCGNRYLSWAFVEAANFAKRSDENCRRWYDRKKAKTSTVLATKALACKLAKAAWHVMAKKTNYDATRMFPELAPKKK

SEQ ID NO: 425505 - protein, 413 aa, unidentified
METLVERCAGLDVHKDSVTACVRVPDSHAGRHAETRRFTTTTAGLGLLAEWLASFGVTRVGMESTGCYWKPVWQLLEGQVECWLLNAAHLHNVPGRKTDVADAAWIAQLVEHGLVRPSFVPPRPIRELRELTRYRKTQIQERSREVQRLDKVLQDAGIKLSSVATDVLGVSGRAMLEALVAGTHDPQVLAALAKGRLRSKLPALREALAGRFRTDHHGLLVAQILAHIDYLDEAIATLSARIQQVIAPFVEQVALLDTIPGIDQRAAEVILAEIGPDMGQFPTAAHLASWAGVCPGNNESAGKHRSGRTRKGSKWLGGCLSEVAKAASRTKGTYLNAQYHRLRGRRGPGKATMAVAHSILVIAYHVLDQGVAYQELGDDYFQQRHSVEHHQRQLVRQLERLGHKVTLEPIEAA

SEQ ID NO: 425506 - protein, 407 aa, unidentified
MDITCGIDWAEAHHDIAVIDERGVVLACKRIASDAGGYGELLRILAEHTDDVAAVPVAIETDKNLIVVALQAAGNPVYAINPRAVARYRERHGQAGKKSDPGDALVLADILRTDRHRHRVLPEISENGLAIKALARQHQEAIWATHQTISRLRSVLLEFYPQALQAFPQLKHKAALAVLAVVPTPDAGQRLTARRLVALLHRCGRRNDPALVERILSDLRTPALRQAPSVEQALGRTVVGLVGIVAAMQSAVEELEAALSEEFERHPLAPVLRSAPGLGPVLAARVLAEVGDDPSRFASAQSLRAFAGTAPITRSSGRSRFVNARRVRNKRLGDACHWWAFSMLTKSPGARAHYDRRRAAGDNHNAALRNLANKILGRLWWCLQNETHWDEAAAWPSARPAPLAAAA

SEQ ID NO: 425507 - protein, 343 aa, unidentified
MKLSRIGVDLAKNVYQLHGVDRHGKTVWKRRLRRGQWLQALLDKAAPGCEIGMEACTGAHHWARELQSRGYTVRLIAPQFVKPYVKSNKNDANDAEAICEAMSRPHMRFVTVKSVEQQDIQATHRIRAELKDQRNAKANQIRGLVAEYGLVAPQTLLALRRAIPDWLEDAENGLTDYFRSLLHGLWDDLLSLEDRITELDKEITRLANGNEVTRRLQQLRGVGPMIATALVATVGTGEQYRKGRQMAAALGLTPRQSSSGDKYRLLGISKRGDAYLRTLLIHGARAVVSQAKHRDDPLSRWATDIAKRKHTNVAAVALANKTARMAWAMLRNDTDYDPNLAVS

SEQ ID NO: 425508 - protein, 394 aa, unidentified
MIYVGIDVASRKHDIVITDNQGVVFKKPFKILNNLDGYKKLLSEICLANEFFNDKNSRIGLESTGHYSRNILHYLILAGCDVMFINPLLTNMDRKASSVRKIKTDSIDAKTICMFLIRNQNDFKPYTLSSYHIDELKTLVRFRKSLKKQINKDMNQLHAYLIQAMPEYYNVFRKIDSKASLEVLVRYASLSELKKVRLNTLSELIRKTSRGHHGLLQAKALKSLPLTSIGIDSQALSFAIKQTLVRINMLKSQIKSIETEVKFQVDKTDTTLLSIPGISYTTGGIILAEIGDIHRFKSTDALLAFAGLDPSVYQSGNYEGNFKISKRGSSILRWAIYQSAQAIVKFDPVFKEYYLKKKAQGKKHRNVLGHVTKKLTRVIYSILKNNSTYIIQAH

SEQ ID NO: 425509 - protein, 358 aa, unidentified
MQRNKISFKGQKIFIGIDVHKKNWDVAIALEVGAVRRHSQKASAKELFDFLKKHYPDGDYLAVYEAGFSGFSTYYALKEFGIDCIVIHAADVPTTQYEEVMKTDSVDSVKLVRSLKAGLLKGIYIRKKENVDDRSVVRIRKAIQRDLTRYKIRVKHILHSNGVILPKRFEKPGSHWSRAFIKWLKEDVTLLSSSRNSLDLLLRQVETIRTTLLESTNLIRRLSQTERYKKNYDLLTTIPGIGVMVSMCILTEVYDVRRFHNEKEFAAYLGLIPTSHSSGDKVVHGEMTFRGNKQLGPMIIEAAWVTVFRDAGLGSLYQRYTERMKSQEAIVRIARKLSNIIFAVLKNETKYVPYQTGK

SEQ ID NO: 425510 - protein, 354 aa, unidentified
MWIIGCDYHPSFQQIAFVNQVTGEYDERRLEHKGGEAEQFYRNLAGQQVRVGMEATGGMRWFERLLGELGIELWIGDPVKVRAAAARKPKTDKEDARLLLRLLLEKRFPRIWIPTVEQRDARQLVLHRHRLVQTRTRAKNQLQAIARSEGLHAKCRVWSQAGQRELMALPLSPWGTVRRQDWQELLVELNQRIDPLDRALEQEAEQRPEVRLLMTHPGVGPVTAMAFVLTLCDPWRFSTSKQVAAYLGLVPQENSSGKNKQRLGHITKQGNRLLRGLLTEAAHAAAKHDPEWRRKYVRLAMKKNRSIATVAVARCLAVRLWWMWKLGLDYGQMQSPVRMQSSPPDPVGRSSSSK

SEQ ID NO: 425511 - protein, 426 aa, unidentified
MARYVGLDVHKRTITACLLDGEGRPVRRATFDCTRTAIAQFAKKQLEHSDVVALEATTNSWAVAEILEPYVARVVVSNPLKTKAIAESTVKTDKVDSQTLAQLLRVGFLPEVWHPSGPFQLLRQLTVFYASLINDRTRVKNRLQSLFHRRLIHCPVSTLFSQAGLRWMASLEVSEHDRLILELAKQQVFDLNAKIGEVEQRIARLAQNDHSIKLLMTLPGVSLMTAACLVGAIGEVARFRDGDHLAAYFGLVPRVKQSADHCYYGSITKVGNNQVRKMLVLAARNLRTHPGPLGAYFRRMAKHKHINVAATATARKIVTVAYLILKNGEPYRYAQPATTSQKFGQLHMLATQSKRALVRVEAQPGEPVPPAGYRLERKPSLDQVLVRDGLSPIRWQAVPKGEQVVIEKFRDYITGISKPSATVRKG

SEQ ID NO: 425512 - protein, 321 aa, unidentified
MIKSKQIYGVDISKDVFDVVDSNGKHFQFPNNPKGFKDLFKAISSEALVVMEATGYYHYSLAQFLYEQGVMVSVVNPLSVKRFIQMKLSKVKTDKADAKAICEYATINEVPLYTARNKHQAECLQILSMLDIYIKQSTALKNKMHGEKTLGKPSKAVFHSLNRTLKAVQGEMKVLEDKLMDLVKEEQQKQLTLLKSIPGMGNKTAMHLIVITNGFSNFENARQLCSYTGITPIIRVSGSSVRGKSRISKMGNSKLRNLLFMCSFTACKHNKACREIYERIIAKGKSKKLALIAVCNKLLKQAFAIAKSGLPYDEKFVPKMG

SEQ ID NO: 425513 - protein, 317 aa, unidentified
MKPGETSTKCAGIDVGKRRLDVAVHGADERFELANEAGAFGGLVAWLKTRGVSRVGMEATGGYERAVRQSLEAAGFEVVIHQPLEVKLFARLKRMKAKNDRIDAVLIAAATAQVDTVKAAADPRLQAMAEWMTAYEQVADQLAELKTFMEHVSLKAVERLITQQIRSLERLKATLAAKLQGQIEGHEDLQARYRLLLSLPGVGPIVAMSLVVRMPELGQMKRGQPAALLGVAPFDRDSGQFKGHRFIGGGRARPRRMLYLAALTARRHDPGLKTFADRLLGYGKPPKVIIVAVMRRLIEAANLVLARGAPWTQHVPA

SEQ ID NO: 425514 - protein, 410 aa, unidentified
MEVIHPRCAGLDVHKQTVVACIRIANNGAPTQEVRTFTTTTSGLLTLADWLAAHGVEHVAMEATGVYWKPVWHILEGHFQLILANAAHVKNVPGRKTDGNAAMWLADLLAHGLIRASFVPPTPVPELRALTRTRKQFVRERASHVQRIEKVLEDANLKLGVVLTDILGKSGRAVLQAIIDGDSDPESLLARIDRRVKASRDQVLEALRGHISSHHRCMLQLHLEHIDALNRAIATLEQEVGAGLKPFLDAAELVSTMPGMSAVASHAVLAEIGIDMSRFQTPGHLLSWACLCPRNDESAGKRRSTRLRRGGKWLQTTLVQAAWSAVRVKGSYLQAQFHRLRARRGAKKAIIAVAASMLTAIWHMLRNGTEWRELGAAYFDRVDAQKTATRLIRRLQQIGYAVQVTAVTPA

SEQ ID NO: 425515 - protein, 352 aa, unidentified
MIVLGADMHKRSHTIAAVGSTSGELLGEKTVQVGVRGFGVLLVWARALDGERVWALEDCRHASGSFERFLIERGERVLRVPTRLMADARRGGRERGKSDSIDAIAVARAALREGLAKLPAAQLEGPELDLRLLVDHRERLVRQRVALNNTLQWHLHDLWPELTLPGSALFSTKWSTRIGRRLARAEQSTRVRIARDELRRLRELTVAASELEAEIAELVAVAAPQLLDEPGFGPLTAAKLLGEIAGAQRFATEAKLARAAGVAPIPVSSGNTHRHRLDRGGNRQLNTAIHRIALTRARCHPESQDYLARKRAQGKTGLEAMRCLKRHLTRRIWHLLQPPIPTKGQALTPSTS

SEQ ID NO: 425516 - protein, 410 aa, unidentified
MTDKDTRYVGLDVHKHFVMVGAVARNQKVLMPPRKVSLAEFEDWAKKHLLPTDEVVLEATTNAWFVHDLLAPIVGRVVVTHPPHIKLIAATMVKTDKKDTMVLAKLLATGLTPEVWVPPEHVRDLRPLISHRRRLVSQQTQCKNRLQSVLHRNHILPPQGKAYHPDNRNWWLDLKLSPGDKLRVRQELVMLEQLDTLIDETSDELHRLSLSDPWLNQLPYLIQLPGIGVMTGLVILSAVGDISRFPSAKKLVGYAGLGARVHASGQSYRTGGITKQGRKELRHALIEAAWITVRFDPTWNEQFERLANRIGRRKAIVAIARKLLVVIWHVLSKRRVDRQADPQRLVRYFLAWGRQARVFSRLGLKASVFARQQLDLLGIGQDLPTLITFGAAYRLPPSTLPVIEAAVASA

SEQ ID NO: 425517 - protein, 348 aa, unidentified
MRFYTNQHKFYCGIDLHARTMYLCIIDQKGKILLHRDIKTSPDIFLKTITPYRKDLVVAVECIFTWYWIADLCSEENIPFVLGHALYMKAIHGGKAKNDKVDAYKIASLLRGGMMPMAYVYPSGMRSTRDLLRRRTHLARKRAELIAHIQNTNHQYNLSDMGRISRKCDRNKQGVADRFSDPVVQKNIELDTALIDHYDKLLNHLEHELSLIAKVHDADSYFRLRSIPGIGRILGLTILYEIHDIDRFPRVQDFVSYCRLIKCAKESAGKIIGSSGKKIGNAHLKWAFSEAAVLFLRRNPEAIKYREKLARKHGKAKSLTILAHKLARAVYHILKRKEVFHPKVFFAK

SEQ ID NO: 425518 - protein, 398 aa, unidentified
MTESSDYESVQVFIGVDVGKDTHHAVAINRSGKRLFDKALPNDENKLRSLISDLKQHGQILLVVDQPATIGALPVAVARSEGVLVGYLPGLAMRRIADLHAGEAKTDARDAAIIAEAARTLPHALRTLKLADEQIAELSMLCGFDDDLAAQTTQASNRIRGLLTQIHPALECVLGPRLDHPAVLDLLQRYPSPEKLASLGEKKLAAQLCKLAPRLGKRLAADIAQALAEQTVVVPGTNAAAVVLPRLALQLITLRKQRGEVALEVEQRVLAHPLYPVLTSMPGVGVRTAARLLTEVACRAFASAAHLAAYAGLAPVTRRSGSSIRGEHPSRRGNKALKRALFLSAFAALRDPLSRAYYTRKMSQGKRHNQALIALARRRCDVLFAMMRDGTFYTPQAS

SEQ ID NO: 425519 - protein, 409 aa, unidentified
MDIVIPRCCGIDVHKKSLVACVRLLGPQGTVTRHLRTFGTMTDDLRALAAWLQEAGVTHAAIESTGVLWKPVWNVLEATVTLLLVNPRDVKQVPGRKTDVSDAEWIAQLLQCGLLRRSFVPPLALRELRDLTRNRTILEQQRAAVVNRLHKVLEDANLKLGTVVSDIVGVSGRAMLRAVIAGETDAVALANLARRSLRRKIPQLQRALAGHVTPHHRFVLGRLLTELDFIDQEADAYSRQILAATQPFADALARLDTIPGVDRRTAENVLAEIGPDMAVFPTAGHLASWAAICPGHHESAGRQTHGTTRKANPWLRRTLVQASWGAIRKKGAYPGSQYRRLVGTRGKKRAIVAVAHTLLRVAYYVLRDGVDYRDLGADHYDRLAPEKMTHYLVKRLERLGHKVTIDAAA

SEQ ID NO: 425520 - protein, 449 aa, unidentified
MKILALDLGKFNTMCCFFDTKTRKHSFLNAPTERNYLNTLFKNHKIDLVVMEACGPSGWINDLASSHGLKTLVCSTNEDAWKWSNVKRKTDKDDALKLSRMAAMNELKAVHMPSETHREFRSLVKYRKTLDCRINKMKCTIRAWFVNHGIEIDTGEKAWHSGRERINSFRKPLVECQPNELWKGELDLELTQFDALTVQLESVVKKLEALGKADPRIQRIRTIPGVGPRTAEILVACIDDPHRFTTGRQVSAYFGLEPRQYQSGETNRNGRITKRGNPLARTILVECAWASLRYNDWAKGVYDRICGKQKTRKKKAAVALARKIAVLAWAMLRDEKDWAPTHMIHVTESFGKMKRELKESLQSMKPKENSDQRKSRLRREAREAKAVADRPKKSVRTATAKRSRSKTTVVPNAAPPSNPTKRTTPKSTARTNLKPKPKPRRAGKLVSAV

SEQ ID NO: 425521 - protein, 332 aa, unidentified
MTSLPNQPTETCTITVGIDVAKASFETAFSDRSGTRSQANDEAGHAAMLAQLDQLRTAGARIGLIVLEATGGLEAELAWALQLAGWPVVVVNPRQARDFARSMGKLAKTDSIDAQLLAQLGLTLLSRPDLSKLIKPLPDERQRMLQAMVTRRRQLLAMRVAEQQRASGPDRRMRKSLNIMLKAIDRELARLEQELHAFIGEHHADLLALLGEVKGVGKATISTLLAEVPELGELSGREISALVGVAPINRDSGTLRGKRTTFGGRPQVRKVLFMAAMVASRYNPVIKAFYARLVAAGKPKKLAITACMRKLLTILNAMAKARKPFNAELHMA

SEQ ID NO: 425522 - protein, 370 aa, unidentified
MGKSVLYVGLDVHKMSMDVAIAEAGPGAEVRFYGKIGGDLDSLDRVIRKLRATGAQLQFAYEAGPCGYVVYRHLTAQGWPCLVAAPSLIPRRPGDRIKCDRRDALNLARLLRAGELTPVKVPDADDEAMRDLTRAREDAISVERRAKQRTAAVLLRHGRRYPGKTTWGRGHWRWLTQQVMDHPAQQIVLQEYLDAVRQASARVQRLTGQIQELLPQWRRAPFVAAYQALRGVSLIVAATMVAELGDLSRFNNPKELMAYLGLVPSEHSSGATVRRGRITKTGNGHARRVLVEAAWAYRLRARITGPLLQRQEGLPENIRQISWQAQLRLCARYRRFLARGKHKNTIVTAIARELAAYIWAIGQAVEPLTA

SEQ ID NO: 425523 - protein, 345 aa, unidentified
MLHVGMDLCRTRLDICVMDEEGEILEESAWPPDADGLAKMVRHLRKSKQPVAAVIESMNGARFVHDTLELGGWAVEIADAQRVKGIAPLACKTDRIDARVLAELSRRDLVPAIWLPSPGVRAERELARWRLHLVRHRSALKNRVHSILLAFGQPCPVSDLFGLEGRKLLENLGLAEPWRGHVEAALRLIDHLDDQIAELEEELRADGAEHPYVPLLMTVPGIGWVLAYTIAAELGDISRFPSPKKLAGYTGLCPRVYQSGGTDHRGPLRKNGPRYLRWALIEAAGHACRHPAYRDHYQATARRLGRNRGRRVARVELARKLAEAIWHMLTNGEAFNPYREPAKAA

SEQ ID NO: 425524 - protein, 412 aa, unidentified
MDVVVERCAGVDIGKDEIVACVRTPKPEGRGRRKQTRTFVSFTSGLEVMAEWFTAEGVTEVVMEATGSYWKPVWYLLEDRGFDLKLVNAHHVRILPGRKSDVADAEWLADLLEHGLLRGSFVPPPAIRQLRDLTRYRKRLIQAHNSECQRIQKTLEDAGIKLDSVASSVLGASGRAMLSALIAGERDPKVLAELAKGRLRSKMPELREALRGRFMDHHALLLEMILDHITYLERAIAELDHRVQVVIAPFAEARDRLSTITGIGNRAAECIIAEIGVDMTVFPTPAHLASWAGVAPGNNITGGKRRSGKTTKGDVWLIDILVQCAWAAARSRDTYLSAQFWRLTKRLGKKRATIAVGHSILVIAWHLLTTNCDYQDLGGDYFNRRGPTTRYQDHLVKQLQDLGYQVNLRKVA

SEQ ID NO: 425525 - protein, 338 aa, unidentified
MTIETLGVDIAKNVFQLHGVNGNGRVVLKRRVMRDQLLTVMAQIAPCTVVVEACTGAFYWARKFEALGHQVKLISPQYVKPFVRRQKNDGNDAEAICTAARQPHIPFVPRKSVEQQDIQALHRARQRMVNHRTAVVSQMRGLLLDRGFAFAKSITRARRAIPEILADRDNELTAMARETIAELYDLFRDLDRRIASFDKKIDAVFRNNEACQRIARIKGVGAKTATAVVAAIGDGSEFKNGRHLAAWVGLVPRQFSSGDRKILMGVSKRGSQHLRSLLVHGARSVVRTAPNKTDPTNQWVNQLRQRRGFNRATVAVANKNARIIWAVLRSGEAYRAGC

SEQ ID NO: 425526 - protein, 359 aa, unidentified
MLGTMTYVGLDVHARSVYAAAIDVGSGELCRARFGGGSEEVIGWLQGLPQPLKACYEAGPTGFVLYRAAEAAGVRVEVIAPSKTPRASGDRIKSDRKDAELLARLLLAGQLRAVVVPPPAVEAARHLARAREQVRGDLMRCRHRVSKLLLLHGCVYEGSAWTKGHRGWLERQRFEEAATELAYLDALAAVDGLVARKATLEERLSRLAFEGEWSATVARLRCFRGIDTLTAFVLALEIGDFGRFQRPAQLASWLGLVPSLDQSGESRRQGAITKTGSSYARRLLVEAAWQYARRPGSGSLIAERRARQPDHVIQIALRAQRRLHRLHTRLRERGKPGNVTTVAVARELACFLWAAAVAD

SEQ ID NO: 425527 - protein, 300 aa, unidentified
MGYFAGLDVSLEETTICIVDNAGKIVREARAASEPEALVAFFRACGMKMERVGLEACSLTAWLHAGLTEAGIPAICIEARQAKAAMGAMPNKTDRNDARGMAHIMRTGWYRAVHVKSPSCRSWRALLTARRMVLNKRRDVENGVRALLREVGLKVGTPSRKDFPARVRDLAAADPVLVSLTESLLSVIEVMTREVERLTKRALDEVRDEPTCRRLMTVPGVGPLTALAFRATIDQPGRFRKSRDVGAHLGLTPRRYQSGETDVQGRISRCGDELARTALYEAAHSLLIRCTKWSALRAWA

SEQ ID NO: 425528 - protein, 323 aa, unidentified
MNKYKETFGVDISKDVFDVHGSSSGHNQFKNDEKGFKSFLKILPKDSIVVMEATGYYHYRLAQFLYKNNVAVSVVNPLSVKRFIQMKLAKVKTDKSDAKAICEYALANEVPLYNALTNVQAECLQLFRLMDSYLKKRTATKNKMHGEETLGIPSKFVYRSLKRDKKHLDRELEGIEARLLELVKQEQQQQLTLLQTVPGIGAKTALFLIVITDGFSKFETGAQLCSYVGITPTIRESGSSLRGRSRISKVGNKKLRNLLFLCAFNACKHNKACRELYERIVQKGKSKKLALIAVANKLLKQCFAIAHSGLPYNDEYVSVLKIK

SEQ ID NO: 425529 - protein, 376 aa, unidentified
MSNVRFIGLDVHAETIAVAVAEPDGEVRSVGVIPNRLEAICKLVKKLGPVASLRVCYEAGPTGYVVYWQLTALGVRCEVVAPTLVPVKPGDRVKTERRDALKLARSYRAGDLTPVWVPDAAHEALRDLVRAREAAKKDQLRARHRLGKFLLRQGRRPPTAMNPWTQTHLTWVKTVHFEHAAQEATLLDYLQEVEHMVERIARLDRAIDDAVKTAPDQMRAVIEALQALRGIALVSAVTIAAEVGELSRFAKPSQLMGYSGAVSREDSSGERTRRGAITKTGNAHLRRVVIEAAWAYRYRPAVGTALRKRQATVGPDVKEIAWKAQHRLHARYRHLTARGKCKQQTVTAVGRELLGFIWAIGVHVEAKQRQRKSVAA

SEQ ID NO: 425530 - protein, 405 aa, unidentified
MGESRFAGIDWASEEHAACVVDPDGRIVEGRRYRHDERGLCGLCERLHDLGVVLVAVERPDGVLIERLLDADFAVIAVHPNQLAAMRPRFSAAGAKNANFDAFMLAELARTDRHRFRILVPDSDQTKALRALTRAREDLVEARVALANELRAQLESFWPGAARLFAEIDSPIALAFLKRYPSPADARGLGEQRLQRFLARHSYCGRRPVRELLGRLKGAADGRAGALESDARRQVVLALVSALEPLAARIAELTSEIRAALAEHPDGATFRSLFRDPKTAVCPATMLAEIGDCRDRYPTIRALAADGGQAPVTIQSGKAGHARFRWACDHRLRTAIATMADASRHHNPWAADIYDRARARGCSHQHAIRILGRAWCGVIWRIWHDHTTYDPHQHTALQRLIAPGG

SEQ ID NO: 425531 - protein, 311 aa, unidentified
MAQTVIGVDVAKDWIDAQPLGGKGERIAMEEGALRRFAETAAQKGAKVVFEATGGYDRPLAAALAAAGVTHSRVNPAQSRQFARAIGVGAKTDRVDARVLAEMGARLELAPALPLPPGRRDLQALATRRRQLVGMRKQELTRAQQTEDARASASITRVIAFFDREIAELEELIAAAVAADPALAEPARRLRTAPGVGPVIAVGLLAELPELGQLDRRAIAALVGLAPIADDTGHRRGRRAIGGGRPIPRSLLYIAALHASRRDPGFAAFRARMQAKGLTVKQALVATARKLLTVLNAMLKSGTDFLPKVAA

SEQ ID NO: 425532 - protein, 453 aa, unidentified
MEEPREVPDEEHERVWERVAAIDVAKGSGVVCTRVPDEDRPGRRRTHVWGVPARVNAIIELGDHLRGRQVQVVTLESTSDYWRIWFVLLEAAGLKVQLVNARTVKNVPGRAKTDKKDAVWLAKLTERGMLRPSFVPPAEIRRLREFTRLRADLVHERTRFWARLEKLLERALIKISDVTSTLDLKSVRKILRAMIAGERRPKVLADLAEGPLRKKRAQLTEALAGRFEDHHGEIAEIFLDEIDRLSGRIDHLSDRIAELLEQIPAAWGIDAGGSTGPGTGTGPGARVLPAVARLDEIAGCGIYAAQAVIAETGLDMTVFGTPGRLVSWAKRCPQTRQSGSKTSHGRAGKGNPWLNGILGEIAVSASRTDTFLGERYRRIARRRGKRRALAAIARSILVIIFHLLADPEARYHDLGPDHYDTHIDRDRKIRGLVRQMQALGINPVLEPIGTPAA

SEQ ID NO: 425533 - protein, 373 aa, unidentified
MIVIGADTHKRSHTVGAVGELTGRVVEDMTVCATRRAFEQLVVWARGLEDPDRVWAIEDCRHVSGALERFLLARGERVVRVAPRLMAGARSSARERGKSDVIDAVAIARAAIREGVDTLPVAQLAGPELDVRLLVDHRERLVAQRTALINDLRWNLHDLWPEFEIPARALIGCGWQERVGRRLSGAQQSARVRIARDELRRIRELSRSIGALEAELAPMIARLAPRLLAERGCGVLTAAKLIGEIAGIGRFATDAKLARTAGSAPIPASSGRTDRHRLDRGGNRQLNCALHRLAVSKARLDPETAAYLARRQAEGKTRREALRCLKRHLARRVFKLLQPPTPTPPAPGDRPPVIATAGHMIHCNTPAGTPALT

SEQ ID NO: 425534 - protein, 422 aa, unidentified
MSDQEAVAYSVYVGIDWADTKHDVCIQPATSDERVFDVIRHRAEAIDTWVKGLHQQYGGHIAVAVELSKGPIVSALQQYDFIDIYPINPSTLAKYREAFQPSRAKDDPTDAELALDMLLRHPEHFKVLKPQSTKMRALATMVEQRRCLVNDQIRITNRLRSALKQYYPQVLEWFEHIDTPLFCAFVKRWPTLTQAKRARANTLRRFFHEHHMYREGVLDSRQQAINNARPLTLDDAVIVPYRLQTLVLVEQLELMFRAIGQFDDEIEKLATRHPDYALFQSLPGAGPALAPRLLVAFGEQRERFKSAADLQKYSGIAPVTERSGKKHWVHWRLQCPTFMRQTFVEWASQTINKSYWAGAYYRQQRDKGSTYQAAVRSLAFKWIRILYRCWQSGVAYDESRYLKALERRGSPLLKRQNMLKTA

SEQ ID NO: 425535 - protein, 358 aa, unidentified
MKDSTTSPIVVGGVDAHKELHVVAVVDAHDVVIGTESFSTTRAGYRALVRWMRTYGDIARVGVECTGSYGAGLMRHLDAAGIDVVEVTAGDKADRRKRGKDDTIDAEQAAHAAYARVRTVTPRAHDGMVESLRALKIARSSAISARRVALQLIHATIISAPEELRDQLRNMTRMQLIRTLAGWRPDLSGYRDPVTATKISLKSLARRYLELHDEIADLQVPMHALVDQLAPDLLARVGIGYESATQLLITAGDNPDRLTSEGSFAMLCGVAPLPASSGMTTRHRLNRGGDRAANSALHMIAISRWRMDLSTQAYVARRKTEQHSNPEILRCLKRYIAREVYYLLRNQERAVRQVTPAA

SEQ ID NO: 425536 - protein, 400 aa, unidentified
MNAVGIDVSKGKSTVAVLRPFGEVVASPFDVIHNDNDLKRLVKLIRSLPGESKVVMEYTGTYFEPIAQFLHINGIFVSVVNALLVHDYGGNSLRKVKTDKKDALKLASYALDRWTELDEYVPADEQRKILKLLNRQYNQSIKIQTMMKNNLISLTDSVFPGINRLFTSLERQSDGHEKWVDFLHAFPHKDCVAKLYLSAFKAKYKSWCSRNKYRYSESKAEKIHSYAKSVIAVLPLNESVKLIVTQVVSQLNTILETAFSIRTEMNRIASSLPEYDTVMSMFGVGKVYGPQLIAEIGDTRRFRNRRAITAFAGLDAPPYQSGQLDVSSRHISKRGSAALRKVLFQITEIFILSKPENEPVYQFIIKKRSEGKHYYSYRIAAANKFLRIYYAKVNQILNAT

SEQ ID NO: 425537 - protein, 339 aa, unidentified
MNKVSTVGLDIAKKVFQVHGVDAAGVVKVRRSLRRSQVVTWFAKLAPCLIGLEACATSHYWGRELRKLGHEVRLIPPAYAKAYVRRNKNDAADAAAICEAVSRPGMRFVAIKTEAQQAIGGVHKVRALLLKQRIMLINHLRGLMAEFGLVVATGPQHVGELLAILADPEERGLVEPLRGALLGMTEVLRGLERRIEAIDRQVVAWGRSNTTYRHLITIPGYGPILASAVAALVTDPTTFRSGRDFSASLGLVPRQEGTGGKVKLGPISKRGNGYLRRLLVNGAMSVLGSKRARQDPWIAKLLASKPRKLAAVAVANKLARIGWAIMMRQEDFRTQPAAA

SEQ ID NO: 425538 - protein, 445 aa, unidentified
MICAAVERCAGIDVGKRWLSVCIMTGPLEGEPQVQLRRFGVNVGDVEQLRAWLIQEQVTHVVMESTGSYWKPVFNVLEDCVKVYLANPHEVKARKGHKTDDKDGRWLAHLLRHAMIQPSFIPPRRIRELRDLTRRRAKLQAAGTAEKNRVQKILEDANVKLGNVLSDVFGTSGQLMLDALLTGKANPEEIATMAKGVARKKIPGIIAALEGHQMQEHHRRMIRYSLAHMQFLEEQIAEIDQEIAAKIQQAGLEQQWQNLQSVPGIQERSAANILAETGADMAQFPSPRNLSSWAGVCPGNNRSAGKNRSSRTTGGNPWLRGALTECAWAAAAQKNCFIREKFWRISSKSGGKKTVALVAVAHTILQLVYDVLRTGQPYRDHQLPALADQQRERLILHHVRRLGKLGVRVHSHRPPHTPKTPPSTPPKKRGRPRKTSSSETNPASS

SEQ ID NO: 425539 - protein, 313 aa, unidentified
MKKTICGVDVSKAKLDACIEPGHRLASFNNDTAGIAELAAFCREHAVTLVVMEASGGYERRAFIELWEQGISCALTNPRNVRRYAEAMGILEKTDRIDSSIIARFADAKNLAPTPLPSQAQQRLKALVARLRQVTGDLTVQKQRRASLLDNSEMLASLDEVIALLKRQSRSLEGEIASMIDDDPLWAKLAETWREMKGVAGRTVARLHAELPEIGTLSNKAIAKLAGLAPIANDSGKRKGKRPTRGGRAGVRSILFLVAAIAARYDKSLGDFRDRLLKAGKEKMVVRIALARKLLVRLNAKARDARTEYANAT

SEQ ID NO: 425540 - protein, 347 aa, unidentified
MSEISIIGLDLAKQVFQIHGADPAGRCVLRKQLKRREVLQFFAKLRPCTVAMEACGTAHYWAREIGKLGHCTRLIPPAYVKPYVKRGKNDAIDAEAICEAAGRPTMRFVPVKPMENQAIVMLHRSRDLVIKNRTMLVNALRAHLAEFGFVAGKGIWKLPDLVKIVSQAPAEALPELVRTTLSGLLDIIAAISSQLDAIEKRLREWHKKDARSKRLDTVPGIGLIAATACRALVPDPKLFRNGRHFAAWIGIAPKLDGTGGKTRLGRISKAGDRYLRRLFVLGATSLLRSLENKSTRLALWVQALLARRTKRAVTVALANKLARIAWAVMTRDEAYKPLAAAQSAGCA

SEQ ID NO: 425541 - protein, 366 aa, unidentified
MKKNSTVAAERKQIFKQARLTIGLDLGDRTSYYCILDEAGNVIWERNLPTTSNGIRQAFGRIPRCRIALETGTHSPWVSRQLSELGHEVIVAHARNVRLIGESSRKDDQVDARTLARLARIDPGLLGPVRHRSAQAQIHLTVIRARAVLVSTRTALVNAARGLTKSYGERLKKCGTEQMNRESAKGLSQELRDALDPLLGEIESLNERIGEYDRRVEQIAKEVHPEVARLKQVKGVGTLIALTYILTLDDPQRFRRSRDAGCFLGLRPGRRNSGKSEPQLHISKEGDRYLRTLMVQGAHYVLGPFGQDSDLRRWGLKLAERGGKNAKKRAVVAVARKLAVLLHKLWVSGEVYEPLRNNHKVVSAVA

SEQ ID NO: 425542 - protein, 338 aa, unidentified
MNKFSGIDLHSNNSVVVVSDEADRVVYQRRLPNDPVQIRAALAPHRVDLVGVVIEATFNWYWLVDELMNDGYHVHLANPAAIRQYDGLKYSGDFTDAAHLAQLLRLGLLPEGYIYPAEERPVRDLSRKRMQLVQCRTAQILAIENLFSRHTGAQMQGERVKCLDQTQVNGFGFEPDVTLAVQANLAVMQTLQEQIGIIEKRLNERVKLRPDYALLKSVPGIGPILATTIMLETGTISRFADVGNFSSYCRCVDSRRESNSRKKGKGNTKNGNKYLAWAFVEAANFAIRSCPEARRFYERKKRARNGIVAIKALAHKLARACFHILREHKPFEVTRCFG

SEQ ID NO: 425543 - protein, 411 aa, unidentified
MRLFVGDDWAEDHHDVELMDEAGRVLARKRLPEGVAGIARLHALIGQQLGDDADDAEVVIGTETDRGPWVAALVAAGYTVYGVNPLQASRYRERHGVSGAKSDTGDAHMLTDMVRTDSHQLRAVAGDSPDAGAVKVVARTHKTLIWERTRQVQRLRHQLREYFPAALAAFEDLDAPDALELLGKAPDPARAARLTRAQVSAALKRARRRDIPGKATAILAALRSEQLGQPPAVTAAYAVTARSLIAVITTLNEQVKVLEEQVRAHFGRHPDAEIYLSQPGIGPVLGARVLGEFGDDPGRYASGKARKNYAATSPITRASGKKKVVAARFIRNDRLTDALMAQALSAISASPGARALYDAERDRGAEHNPALRKLANRLVGILHGCLKTRTPYDEATAWPQRENLPQSDLAA

SEQ ID NO: 425544 - protein, 314 aa, unidentified
MSEVNIGVDVSKQKLDVSVRPTGECRTFANDEVGIEEVLAFCEGQHATRVLMEATGGYEVKLLAALVAAGLPAVSINPRQARDFAKANNRLAKTDRIDASVLAHFAEAIKPPMRDVPDDRTRELVELVQRRRQLIDMRTAEKNRLEHATPKVRQSIAKHIAWLNKRIDDIDEQTKKRIRQTPAWREKEELLTSVTGVGPTTALTLVSMLPELGKLNRKEIASLVGVAPFNRDSGAMKGRRTICGGRGGVRSVLYMAALSAIRTNPTLKATYQRLLSSGKPSKVALVACMRKLLVALNAMCRDRKEWAPHAPVPA

SEQ ID NO: 425545 - protein, 427 aa, unidentified
MSVGLLIQKGTAMRVHHNVCCGIDVHKKSVTVCLMWGPADREPEYEIRRFDTMTSDLKKLGEWLKQAHCEVAAMESTGSYWKPVWNVLEDDMKLILANANHVRALPGEKTDQKDGKRLAGLLRHGLIRPSFVPPREIRQLRDLTRYRSKLLGNGASERNRIQKVLEDANIKLGSVLTDVFGVSGHKMLKALVASDVVEIDQITKLAHWKLEPKIEQIKKALEGKLTDHHRFLIDLSLNHMEAIEKQLIKLDQEIDRRLVKHQQSLDLLDSIPGLGPTSSKSILSEIGADMSAYPDGEHLASWSTICPGNNESAGKKFSGKTRKGNPHLKATLVDCAWGATRKKNSRFRAQYYRIKSRRGAKRAIIAVAHTLLLTIYTVLQSRQPYSEPEPPPLSETKRIKKASDLCRKLRQLGFDIALKEKIQIQNA

SEQ ID NO: 425546 - protein, 347 aa, unidentified
MTTIEDARVITGGVDTRADMHVAAALDSIGGLLGVQEFPATAAGYASLLGWLRGFGTLAVAGVEGTGSYGAGLARHLAAAGVRVVEVDRPDRQDRARQGKSDPLDAVSAARAALSGRASGAPRGRDGAVEAIRALMVAKRSARQERIQAINQARALIMTGPEELRARFVRRSPAQLIEAIAALRPRPGDVPGFATRVALRELGRRAQFLDAQLDRLDELIGPLVTARAPGLLALHGVGPDTAAMLLVAAGDHPERLRSESSWAHLCGVAPIPASSGKTAGRYRLNRGGDRQANSALWRIVIVRMNSHPATRAYADRRSEEGLCKKEIIRCLKRYVAREVYRQLRNGA

SEQ ID NO: 425547 - protein, 409 aa, unidentified
MNQLFVGIDVGSRDNAVYIMLPDGSKHSSFSVQNNLGGAMTLSMRVVSALREQGVNDVLLGLEATSVYGDNLVCFLREDGALAQFNRKIHVLNPKQVKKFKDTYSDLPKNDAVDAFVIADNLRFGRISTAVYMDDYRYKALQNLTRARFFAVQSLTREKQRFMNYLFMKCSGLAQEKTFSNNYGAAALALFEEFETPDDIANMDLDKLTAFISEKGKNRSPDPEKIAEAVQAAARGSYRLPKTVNDSVNQVLSISVSSIRAMQAQIKALDKEIERQVVNIPNTLTSVPGIGAVFSAGIIAEIGDINRFPDHPALAKYAGLVWTQHQSGTFEAQHSRLIKSGNRFLKYYLCEAANSLVRCDTEYRRYYDLKYKEVNKYQHKRALALTARKLVRLVFRLLKDNRLYIPSAS

SEQ ID NO: 425548 - protein, 381 aa, unidentified
MLYVGIDVAKNKHDVTVIDNTGKMVLNPITITNRKQGFELLHNTLKQLNQNCLIAMEDTGHYALNLLTFLHQNNYQIYTYNPLLIKEFTKSLSLRKTKTDKKDARTIALKLLSDPNRALFMHDNRQEELKIMTRHMNRLKKHQSDWKVQYTKCLDIIFPELHQVVTKHSDYVYELLKRFPSPEKMVTAGFDKLIEIKRLTAKHALDILELAPNSIGTTSLAREFELIEIIENIQHYEKLIKQTEKKIDELMAELNSVITTVPGISNRLGSVILAEIRNINTFNHSAQLQAFAGLEPAIYQSGQLDAQGKMVKRGSSHLRWALIQAAIKVARYSPAFKAYFKTKLAQGKHYNVAISHVAKKLIRVLFYLLKNNETFDEDKLR

SEQ ID NO: 425549 - protein, 350 aa, unidentified
MDKELYIGVDVSKQTLDLAYYDGESIDWKKAHIKVSNNNAGFKKIGSWVAKVSKGVDIVLFCMEYTGLYTQNFRLWLEEKHYIYRMVEPRKMHRFEPDLDDGLRSLDRIKTDELDSFRIAIYCEQNHRKILRNPSKLPPPVYFKLKRLLAERKQTVKQSVLYKQQLHDICAYDTDLSVERKNGQLKTLNDALKGIDNEIDMYIKEDADISKNFSLLTSIPGIGRVDALETIVLTENFMAIDNPRKYACYIGVAPFKKESGTSVRKGSSVSKKGFKQAKADLSIACLVCMQHIPNIRDYWERKRKEKCSGIVFNAIKFKMILRMFAVIKRGTPYVETDNYRNGKNKQPGVN

SEQ ID NO: 425550 - protein, 317 aa, unidentified
MSFVGIDVSKTQLDIAERPGNKRWSAVNAEADIGEVVEMIGALSPQVIVIEATGGMEVPLVVALSQARLPVVVVNPRQVRDFAKAVGRLAKTDRIDAEILAHFGEAVKPKVRALKDEETRTLTALVMRRRQVIEMLTAEKNRLGISPKVVHKDIQQHIAWLQARMEDIDRHLESAIRKSPVWQEKDDLLRSVPGVGQVLSVSLITGLPELGTLSRRQIAALVGVAPLNRDSGLFRGKRTVWGGRAHLRSVLYMATLSASRFNPAISRFYRRLIEAGKKPKVALTACMRKLLVILNAIMKNRIPWQAEYSTCPTPNIP

SEQ ID NO: 425551 - protein, 403 aa, unidentified
MVTADIGKFTNSVYFRFPDGSERPPFECANTGQGFKKLWSKIIAALHTHNLTEVVFGFESTGAYAEPVLHFLGARGVKLVQVNPMHSKRLKELPDNSPLKTDEKDPRVIATLVALGFTLSVVIPEGVAAELRRLTHARERSVERRTAFYNQLQDLVFVLFPEFLQVIKDVTTKSAHYLIKHSGTPTQLLALSPTELTQLLRRLSRGKLGQARAEELYRAAQESVGIAEGQHALRLEMQELLQLIEGCDNFIAHLEAEMLLQLAHIPYSRCLLSIPGLGAITVAGLIGEVANFDHFKNPAELLKYAGLNLYEISSGLHKGQRRISKRGRPLIRKLLYYAALRVVKKNGILHGQYQNYLTRGMIKNKALIAICRKLLTMIFAMVRDRCDYVAEHPAALPSWKLAA

SEQ ID NO: 425552 - protein, 355 aa, unidentified
MDSVRYVGMDVHQSTISVAVLNQEGKLMQQSVMATKATAIVELLKGLRGVVHVTCEEGTHSAWLYDVVVRHAARVVVCNPRKNALLKSGNKSDRIDARKLAELLRMGVLSPVYHGEQSTRTLQQLVASYMALTEDTGRAMRRIKALYRSQTIACAGKKCLGKRHRGEWLEKLSNSGQRRRAEWLYQELDAVQGLRREARLAVLAECQKYPAAKLLRSMPFFGPLRAAVLIARVQTPHRFRSKRQFWTYCGLGLETRSSADYVEKDGRIMRRRRPVYIRGLNWNYSHELKNVFKGAATTASTMAGPFREFYEVRIANGIAPAMARLTLARKMAAIALILWKKGETFEAKHLNLQAA

SEQ ID NO: 425553 - protein, 343 aa, unidentified
MQSISTIGLDIAKSVFQVHGVDAAGQVVLRRQLKRRHVLAFFQKLAPCLVGIEACASSHHWSRELQALGHTVRLMPPTYVKPYVKRQKNDSTDAEAICEAVTRPTMRFVPTKTVEQQSCLMLHRARHLFIRQQTAVINSIRAYLAEFGIVAPVGRRGVEQLLEIVADRADYRLPEVARACLAALGNQLRALKAQILEFDRRIIAWHRSSVTSKRLDAIPGVGPALATALIASIADPKAFRSGRDFSAWVGLVPKQNSSGGKDKLGSISKQGDRYLRSLFTAGALAVIRYAKIHGAGHRPWLTGLLTRRPTKVAAIALANKIARMAWAMMARGERYREPVALAA

SEQ ID NO: 425554 - protein, 376 aa, unidentified
MNAKSGRSTRCYKKLNSAPKLIQRTTSEAPQRHMYFIGLDVHKKTISYCVKDAAGRVHQEGKIASTRRELDGWIRTMPQPRTIAMEATIFTGWIYDHLLPHAERLKVAHPLMLRAIAASKKKNDRIDAGKIADCVRCDFLPECHMASTEIRDRRRTLRYRNLVIKQMVQMKNRISGLLMETGVNYNKQRLHKVGYFAELMTTNKEVHESIRPLLKLSRDMISRSQKLDYALVSSLQRDPVLKERLRRLRTVPGVGPITALTWALEIGDYTRFPSIKQAISYCGLCGDEKSSAEKVMRMPISKQRNKHIQRVLIEAAKLAPSESPELALTHARELEKGNRNRATLAVARKMVCYMLAVERRQQDFVPAEEFSRSIAV

SEQ ID NO: 425555 - protein, 427 aa, unidentified
MLNNDYNKQYERRQRIKKTTLVTGIDIGADFNAVGFMNKDGNVLGRLPKVYNSREGFDKFVRITEELKAKHRLKDVLIGLEPTGHYWRKIAYFAKDQGYAVRFIRTTSLKHERELNESSSAKSDIKDALTLTNLTREGKYLDTIIEDGVARQLRTLSKVREKIQKQNTGAKNMLHAVLDDYFPELKNIFWAMNSKGLWAILETCPFPEDVLKFKQSALADIIAKASRSKAEGARKAPAVYLAAQTSIGLTRIGAADRYRLRVCLNEVRRTEGMLKEIQKELKDLLNQLPSAPYLLSLPGVGYLSAAVFLGELGNPVYFHSAKQIVKYAGYDPQESDSGKRIGRRVISKKGRWLLRKYLYLMSLRAVAHSKFFQAYYQRRLETKNRFGQLLKKKEALCAVAIKLIKVIFALLRDKREFQDTVSFALAA

SEQ ID NO: 425556 - protein, 341 aa, unidentified
MNIKRIGIDLAKQVFQIHGVDGQEKVVLRKQLRRAQLLDYFKKLPPCLIGMEACGSAHYWARELQKLGHTVKLMAPQFVKPYVKSNKNDANDAEAICEAVARPTMRFVAIKSIAQQDIQAVHRIRSELVQQRTAKVNQIRGLLAEYGTVVGRRIDVLEHALPLILEDAENGLTSDFRVLLEGLQQDLATLNGRVDDLDKTIKSLATSNTDAKRLQQIPGIGPIIATALICAIGDGKQFKRGRDMAAWLGLTPRQHSSGGKDRLLGISKHGDAYLRTLLIHGARSVLKVASQKDDPRSRWLQNLCSRRNKNIAAVALANKNARIAWALLSKKTDFLPEGEPV

SEQ ID NO: 425557 - protein, 361 aa, unidentified
MITVGIDAHKDSYTLVAIDEVGKRIAALTVPARKAGHIRILEWLDEFGMVKVAVEDCRHLTRALEASLLLAGHQVLRVHTRLMAGMRRSSREPGKSDPIDAEAVARVALREDNLPTAHLAGPDRDLKLFSDHRKRLVEHRTGLQAKLRWFLHELVPDLEVPSRGIRRATVFDQITDAIAGIDGAVAEIARDLLADIITLTQRIAAIERQLTAIVRAEYPTLLAVPGMGVLGAAAIVGETAGVSRFRSRDAFARFNGTAPIPVWSGNNVKVRLSRGGNRRINTSLHMAAVTQQRLGGEGAVYFAKQVGAGKTRVEALRLLRRRISDRVFTALRQDEAARATSDHRTRITLNTTLKSILATAA

SEQ ID NO: 425558 - protein, 340 aa, unidentified
MKHTTVGIDIAKRVFQLHWVDVETGEINSLQIKREKFLDFFINRQPCLIGMEACSGSQHWARDLMNLGHQVKLMTGKLVKSFVMGNKGDVADAKAVWTAVQQPGIKPIAIKTEQQQAILALHRMRQGLVKMRIMQTNALRGLLTEYGEVMPQGKMGLRKGIAAAIAHVESRLPAIVVEALHAQWLRITDLDKHIAEIEAQLKSWLKTDSSAKAIAEVPGVGLLTATAAVATMGDAKTFKSGREFAAWLGLVSKQTGTGGKTKLLGISKRGDTYLRTLLIHGARSVLARTKQTSTWLEEIKKRKHYNVVVIALANKMARMIWAMLAYGRAYKSDWASTTPV

SEQ ID NO: 425559 - protein, 315 aa, unidentified
MVDVPCFVGIDVAKAQLDIALRPAGERWAVPNDASGIAPLVDRLQALHPTLIVLEATGGLERAATAALAAAGLPVVVVNPRQARDFARATGQLAKTDALDARALAHFADVIRPTPRPLPDAQTQELRALLGRRQQLIVMRTAEQNRLAGTSGRLQTDIAAHITWLNARLATLDDDLETTLRASPLWRENDDLLQSAPGMGPVCARTVLLELPELGTLTRQQIAALVGVAPLNCDSGTMRGRRTIWGGRAHVRTVLYMGTLVATRYNPRIKAFYERLLAAGKVKKVALTACIHKFLTILNAMLKQRTPWQPQEVQS

SEQ ID NO: 425560 - protein, 361 aa, unidentified
MAKGKREMQEYILKGETVYMGLEDSKKKWTVCVRSGSLIVHETTMPAKYEVLHNYLENRFPECQVRVMYEAGFRGFELHDQLRSDGIDCIVTPPHTLTEEKCNRKKNDRHDARRLAKNNESEDFKACHVPDRELREDRQVSRLYGKIQADIVRVRNRIRKALEFHGLDIDLPPGKWQPRHYVELEEYLKGKNLGRSLEFTFNKMLEQLEYLRNQKREILKELRRISGEERYQESVHILKSAPGIGALTAIRLTLEWGDVSRFKSKGKWGAFGGLIPSEYSTGEQEHKGHITKQGNPQVRSWLIESAWRAIGRDPVLMNKYRRVLRSSGSKKKAIVAVAHKLQVRLRTILLTGEPYVIGLAK

SEQ ID NO: 425561 - protein, 355 aa, unidentified
MNKINSNFEGQIIFVGMDIHKSSWNLGIHLGDLFVKNVHQKPNPHIMASYLKQHFPGAQYKAAYEAGKFGFWIQRQLTALGIECLVVNPADIPKSQKDTLQKTDPRDARNLSLRLQSGVLNGIFIPDEKQEADRLFFRHHKRIWKDLCRCKNRIKGMLAFSGIDIPGQYDNASWSHNFISWLKALDCKQHSRRRALDYMIAQMEYLRKELLSVSNELRKMMREKRYNKNYYLLRSIPGIGPLTAASILVEIGDVKRFETFYHLNSFVGLLPMEHSSGEVDNKLRLTVRKHRQLRSDLIESAWTAKRTDPAMALYFQQQIKQKDSKIVIVKIARKLLNRIRFVLINQQPYEMGIVK

SEQ ID NO: 425562 - protein, 358 aa, unidentified
MKKIVIGIDISKEKIDASAIDVRNTQLGVLRLGYQTFENRPMGFRRMLVWARHLIKDVGLEDVLFCCETTGGYDRSLCDYLYSKSLDIWRENALQIKRSSGVRKGKDDRADSLMIAEYAMRHMDKAVIYETPSDTVRELKALLQYRHKLVQEKTEKKVRMSHLADTAAKSKSMSFILRDARKSVKALEKSIKECERQILELIKGDEELERNYRHIVSVSGIGIVNATALIAYSNNFRGITTANRMASYYGIASFRDTSGTSVDKKAYVKCYSNSLLKAYLTQAAEWTIRENGIYHDYYMRLKEKGKPYGIIINNARNKLIHLVFSLVGNDADYEKNHEYIRTMRRAKNDFATELKNIN

SEQ ID NO: 425563 - protein, 379 aa, unidentified
MEQSSTLYVGLDVHKDSIDIAVADAPRDAEIRHLGSVAGGVTAVSKSMRRLVSAGHRLHIVYEAGPCGFVLQRHFTALGWRCDVVAPSSVPHPSGERIKTDRRDAMKLARLARSNDLAVVRVPDGADEAIRDLVRARDDAVREQRNGRHRLKALLLRNDTPYAGKCSWTAAHLRWLATVKLEHAAQQISFQEYLHSITESGARIGRLEQAMRDALPDWSLRPLVQALQALRGVQLIAAMTLVAELQDFLRFDNARKLMAYVGLVPGEHSSGSKRRQGSITKAGNSAARRMLVEMAWHYQQGARVSASIATRQADLPAAVTAIAWAAQLRLSAKFKRLVARRVMKTKAVVAVARELAGFVWAIGREVQISGWQGVKPATA

SEQ ID NO: 425564 - protein, 387 aa, unidentified
MTTDHLATALQTVVRVNDTKLFASLELSKSRWLVTVSAPGSEKLSKHVVIGGDGGALLNLLGRLRASAERRGGMAVQVVVIQEAGLDGFWLHRLLEANGIESHVVDPASIAVDRRHRRAKTDVIDGEMLLRTLMAWARGERRVCSMVRPPSPDEEDRRRLTRERGTLLKERTQHTNRIKGLLAGQGIADYDPLRKDRLARLDALRTGDGRPLPERLKAEIRREIERVDLVVSQMAMVERERDALVGMTSDPAPETAAAVLVRLKGIGPELGSLIWLEALYRGFSNRRQIAAYAGLAPSPWQSGGTDREQGISKSGNRRLRHALVELAWFWLRHQPASALSVWFRARVGQGRGRIRRIAIVALARKLLVALWRYATQGVVPAGATFKA

SEQ ID NO: 425565 - protein, 410 aa, unidentified
MEVIVSRGCGLDVHQATVVACLLVGEPGTAPRKQVKTFSTMTSSLIELRDFLAAAGCTAVAMEATGVYWKPVYNILEGHFELTVANARHIKAVPGRKTDVKDAEWIADLLRHGLLRPSYVPPPELRELRSLLRYRVKLVNARSAERNRIIKLLESANIKLSGIVSDPFGVSGRLMLDALKRGVATPEEMAELAIQRLRLKIPLLKLALDGRMEEHHRQLLSIQLDRLDRFDRDLKQMDAKLEAKLKPYAREMELLDGIPGINWVVGATVIAEMGIKMGQWPTVGHLTSWAGLCPGQNESAGKRGRTSIRPGNPYLRSALVEAALATTREKNSYFREKYYRLKARRGHKRAVVAVAHKILVAIYHMLSSDTPYRELGADYLERLEPERLKLNLVRRLERLGFHVNLEPKLA

SEQ ID NO: 425566 - protein, 467 aa, unidentified
MAHKKKNIKKMNRKRKPRSLKIVQPLAAGIDLGAREHWVSGPPLPEGAPNVASFGTTTPELLCLAEWLKQEQIVTVAMESTGVYWIPLFEILDSRGFEVHLVNARQIRNVPGRKTDMIDCQWLQLLHSCGLLRGSFRPSDDICRLRALLRERNTMVDQRSDWVRRMQKSLDQMNVCVHHAVSDITGVTGMSIIRAIVKGERDPQVLADFRDRRCRKTKAQIAEELTGNWRQEHLFNLKQAFRIYDQLCTVIADYDTEILNYIETLQKTDTRDSSAPPPTSKAKARKFVSRGQEPMRQALYRMAGFDLTSIDGIGVDTAAVIISELGLDFSPFADESHFVSYLRLAPNISISAGKKVPNKFKAVTCTRVSNALRMAATTLRNSKTALGAYYRRISWRKGASVAVFAAARKLAQIIYRLVCHGQAYVDEGAKAYEQRFTKRRLISLTNALKEMGYIVKPLTEQEVVVTS

SEQ ID NO: 425567 - protein, 340 aa, unidentified
MEQIIGIDLAKRVFQVNIVSAQGEKKANKMITREKLTAFIVQQPPSRIVMEACGSANYWSRQFRQYGHEVKQISPQYVAPFRMGSKNDKNDAAAIVEADSRPGMRYVPEKSIEQQDIQCLHRVRQRLMKNKTALINQIRGLGLEYGIAIPEGAHKIMAHLPEHLEDAENELTTLSRELFHEMLQELQDNQQRIKTLDLRLALISQQNEDTLRLKSIPGIGPLGASALTVALGDSADFQNGRHFASYLGLVPKDHSSGGKVRLLGITKRGDGYLRGLLIHGARSVVYRVINLPEERCGGLQRWLKGIIARSGVNKAVVALANKNARIAWALINQKTEYIVK

SEQ ID NO: 425568 - protein, 341 aa, unidentified
MKLIRVGVDLAKNIFQVHGVGDHEKAVWRRKLTRASWLKVLLETAEPGCEIGMEWCGGAHHWARQLQAHGFKVRMIAPQFVKPYVKSNKNDANDAEAICEAMSRPHMRFVAVKTVEQQDIQAVHRVRAELTKQRTAKANQIRGLVAEYGLVAPKELEHLRRALPCWLEDMENGLSERFRRLLNGLWGDLQALDERMAELDREIAVIAQNDPVAKRLQQLRGVGPIIATALVAAVGNGEQFANGRQLSAAFGLTPRQHSSGGKERLLGISKRGDVYLRVLLIHGARSVLRTSKDKADRLSQWVTRLAARSHPNVAVVALANKTARMAWAMLKNGTDYQPGTS

SEQ ID NO: 425569 - protein, 320 aa, unidentified
MAQRAAQSIVGVDVSKDQLDVFELETCQAYSIANDVEAIEQWLVRWDVPIRLGIEPTNRYHQAVAQAAHARGHQVCLIDPYRLVHYREGIGQRVKADRHDAKLLARYLSREDGELRLWAPMTQVEQRFWHLLKRRAALVRARTQLKQSLTDLGSVQSDVDELLAQCSQTIRKMERALTAEAKRMGWIAQVRRCQAIPGVGPLTALAMVATYHRGQFRSADAFIAFMGMDVRVRDSGQFRGRRKLTKKGDSELRRLLFNAAMQGRRNALWEPYYLALRARGMSTTAAFVALGRKLARVCFALLQNEVDFNPNFRLRGCAVT

SEQ ID NO: 425570 - protein, 426 aa, unidentified
MKYTQNERIMQITEKTLIVGIDVGSEKHYARAFNFRGVEYGKLLIFHNDAEGFAILEGWIRKLTVQNGFKDVTVGMEPTGHYWFTLGEHIKRTGMRIVLVNPHHVKKSKELDDNNPSKTDRKDPKTIAMLVKDGRYMEPYIPEGIYKELRNLMDSRWRITKELFAIKNRIRRWISIYYPEFTKVFVDWEGKAAMLILKECPTPAKIIEKGIDGIIAIWKEHKIRAVGMKRAVMLLEMARLSIGTKEGMTSAENELQMLLEDYESKMRQYERTMDLVERLAREIPGFEEMLAIKGVGLVTAAGFIAEIGDVRRFSHPKQIQKLAGLSLKENSSGKHKGKTTICKRGRRRLLYYLTFGMMPLLSKNEEFKALHEYYTSRKTNPLKKMQSLVALSNKLVRIFYVILTKKVAYDPQKMMNDIRRTEVKAA

SEQ ID NO: 425571 - protein, 401 aa, unidentified
MKQIVSVGIDVSKGKSTVCAMIHPNTIIKESFEVLHTVEEMSMLADYIGSLDGEIRIVMESTGHYHLPVAQFLYQKGFFVCVENAYIIRQFSRIMLHGAKTDPLDAKKLAKYGLAYWSELKPYKFHPSCYTELSLLSKQYQTYIKLLIAAKQNVIHLMDEMLPGFKEALDTASSVQFSKVKYVDFAKEFYHVDMIKSMGKEIFRENYKQWCKEKGYRFQSEKADELFHLAEDGIPTLPTEFPSTRLCMEVATEQVSQLGYALEQILSQMQNLAKTLPEYQTIRQMGGMGEKLCVRFIADIGDVRRFHNGKALVAYAGIDAPPYQSGQYTGTKRRISKRGNSALRKTGYEVMKSLKSHPPKTDTRVYDFIIKKENEGKSKKQAKIAGLNKFLQIYYARVIEI

SEQ ID NO: 425572 - protein, 336 aa, unidentified
MTLYAAIDLHSNNNYVCVIDNKDKRLLETKLANDASSVIQALKPYKRRLMAVAIESTFNWYWLADALIEAGFEVKLVNTAKVTQYEGLKRTDDRYDAFFLAHLMRLGILPTGYIYPLEQRGLRDLLRRRMRLVQDRTRYLNSLNTQYQRQTGLHLSCNKINSKLFRLPIVGDENVQLAMKANLNMCKALKVQIKLLEKSIMGQVKECKEFNLLKTTNGIGDVLAETILLETGDISRFSSPGNYASYCRCVDSCKSSNGKKKGMGNRKNGNKYLAWAFIEAANFAIRYNLKAKKFYERKKLKTNNLIALKALAHKLSRACYYIMKQGVPFDENKIFS

SEQ ID NO: 425573 - protein, 344 aa, unidentified
MPIITVGIDLAKAVFAVHGIDEAGKATLVKPKVARDQLVPLIAQLPPCLIGMEACSGAHHWARVFAEHGHTVKLMAPKLVSPYRMSGKRGKNDAADAAAICEAVTRPSMRFVPVKDEHQQATLCLHRTRQGFIEERTSTYNRLRGLLSEFGVVLPQSPERLRKEIGPCLDTLPGWARRCMSELLEHTSHIEDRLVELDRAINQIAREDDRSRRLLQLRGVGSTTASALVASIGDGHDFRNGRQVAAWLGLTPGQYSSGGKQRLGSITKAGDAYLRSLLVLGARSVMANLGDKQDPLSRWIRNLMERRGYWRAAVAIAAKNARMAWAVLHYGDTFKPEQAEPTGA

SEQ ID NO: 425574 - protein, 291 aa, unidentified
MKQLYVGIDLHSNNNYLAIIDEQDKRIYKHRWPNKPDIILAELEPFKKHIVGIVVESTFNWYWLVDILMDEGYKLHLANPTAIQKYKGLKYSDDNHDAFWLAHLLRLGILPEGYIYPKAERPIRDLLCKRGHLVKLRTSLINSLQGIIYRNYGCKLNVDKIKQSKENHVRPILSGQYNLELSGEVSKDTIDYLIRQIHKIESAILKEIKLRDSFKKLQTVPGIGKILALTIMLETGSIKRFSSVGNFSSYCRKVPTKRTSNDKKKGERQQQEWKQILGLGLFRGCRICQAV

SEQ ID NO: 425575 - protein, 479 aa, unidentified
MSETDRRCCGIDVHKNSVMVCVLPPTGRPAMGVKKRKFRTFTRDLKQMRTWLKNCRVTDIAMESTGQYWRPLWNVLEGEFSRLLLVNPQHIKGLNGYKTDPKDAQWIADLLEGGKLRGSWVPPRAIRELRDLTRERVNLLEDLNRAKNRIEQWCQTGNIKVSSVATDLFGASGRKMLKAIVEGQHDAGWMADYAQGRLRGKRRELELALQGTFTDEQRWLLAKGLRQVEWLEAQIEALEQEIERRMEPFEEPIRRLLTIPGVDRKTAWTIVAEIGADVSAFADAHHLASWSGLCPGNRESGGRRFSGRVRKANRYIKRGLCQAAWAASHTKKTYLSAFYRRMCIRKGAPKAVMALAHHMMVVVYQVLSRSEEYVEFGGDYYDRQEKPKTVARLVARLAKLGYEVDLKPLRAAAPAGPVPYEILPEPEAESIPSDPKTDKPKRRPGRPCKCSERGIICKHQTSGLLNSLTPETLEAGKFS

SEQ ID NO: 425576 - protein, 454 aa, unidentified
MRAPGPDLRLDSVARGENPVGSLRPATERQYRGRCSTRRAERQEADLLNDYEYFAGIDWGSEKHRVCLINRDGQILAERWIEHSGPSLAELTVWLRQQTSDSTSLLATAIEIPRGAVVETLLEHGLTVFSINPKQLDRFRDRYSSAGAKDDRRDAFVLADALRTDMHCFRAVKLDDPYVIRLRELSRMDDELAQEQNRATNRLREQFHRFFPQLLQLSECADEPWLWALFEMAPSPLGAARLTEARIARLLRQHRIRRIAAAEVRAVLKTKPLTLAPGASEAAAEHALLLLPRVRLLQRQRTDLARRISALLDELATPAEGQQEHRDAAILLSLPGLGRKIAATMLSEASQAIADRDYHALRCYSGAAPITRQSGKKKIVIMRRGINERLRNALYHWARVSVVFDPQSKKRYAAMRACGHSHGRALRGMADRWLKILTSMLTTGTLYDQQRRAA

SEQ ID NO: 425577 - protein, 414 aa, unidentified
MDTLVERCAGLDIGKADLKACVRTPGKNARRVREIRTFATTTVGLLQLRDWLTGHQVTVVGMEATGDYWKPVYYLLEDTFEVQLLNARHMRNVPGRKTDVADSAWIAQLIEHGLVRPSFVPPPPIRRLRDLTRYRTAVVQERTREIQRLEKVLEDAGIKLSTVASHTLGKSSRAMIEALIAGERDPQVLADLALARMRNKIPQLRQALLGRFTDHHAFVCRTMLERIDTAENTINKLTERIEQEIAPFHQTVTRLMTIPGVSARIAQILVAETGADMTRFATAAHLASWAGMCPGHHESAGKHHGGATRKGDSWLRGALGEAATAAARTKNTYLQARYRRIAAHRGTKRAVVAVGHTILTSAWHMITVEIDYADLGADYYQRHQDRRAATIRLVGKLTQLGYRVTLDDAATVAT

SEQ ID NO: 425578 - protein, 370 aa, unidentified
MPTTKLNNSLDFSGQKFYVGLDVHKTSWTVTVRTLGLEVEHFHQPASVQALVSHVQRRFPRGKFFSAYEAGFCGTWIHRELSDLGINNIVVSPADIPTTDKEKKNKTDVHDSRSIARSLEKGILHGIYIHSREQELLRSLFRLRQTKVRDVTRAVNRLKGFLNYFGVEYSTILSEDTPTVGITGRMIVALSKLKMGTEAGDMTLGALLENLTGQRSRLLEITRRLKAQVLEAYSASYNHLLSVPGIGSITAMGLLAEIGDFSRFDDPGEYCSFLGLIPWQDSSGETIRTKGLQPRCNTRLRPLLVEASWQAIRKSPELLLYYRRHAVRNNKQAIIKVARKLALIAKGVVLRNQNYQPGFNKIVAREKVEN

SEQ ID NO: 425579 - protein, 341 aa, unidentified
MESYVGIDAHCNAGLELAAIEADSGELLWRDRCRLDGDLLREAISRAPRPCTVVFEQGELATWLHLALSGCCKNLIAADPRRNRLISTSPDKGDPFDALALAQLARGRYVRAVYQPPVAFLNLRLQVRHHDRLNRHISALKNQIKALFRYHGIPVTGADVYSPEHRPAFLKCLPEAARPPGEDLLSILDVASEKKDAALLLLQQHGRRFPPVSRLMTVPEIGNVRAATFAAYLVTPTRFPSRSHIWSYCGFGLTRRQSGSHAEPVRLRRSFNRHLKRIIKSAVERMVLRQADPFAAAYHARLERGTLPTRAKLAIARKLIDVLCALWNNKEDYDPERVRVV

SEQ ID NO: 425580 - protein, 370 aa, unidentified
MKNTITYVGIDAHKKDLFVAMLAGTQSPVAWTVPNEPNAVRRLLRKLEREAPGPVRACYEAGPCGYALQRQMTTARVSCQVIAPALVPRKPGERVKTNRRDARKLVELLRAGLLTEVRPPTLEEEAVRDLCRARDDAREDLQRCRHRLGKLLLRRGLHYSGRNWTQAHRQWIDSLAWAQQAERVVVEDYLLGLDQVEARLIELDARLTEIAQSDPYREPVAWLRCFRGIDTLTAILILAELHDFRRFQSPRALMAYLGLVPGEDSSGEKHRRGRITRTGNTLVRRLLVETAWHYQHRPAVGVALARRRKGQPGRVIAIADKAQQRLCRRFRKLAAQHKPAPKIVVAIARELAGFLWAALQPAPATVAQRH

SEQ ID NO: 425581 - protein, 403 aa, unidentified
MNAVGIDVSKGKSMVAIMRPFGEIVSKPFEIRHTISDIHSLINLINSVEGESRIVMEHTGRYCEVLAHQLSAANLFVSAINPKLIKDFDNNSLRKVKSDKADAVKIARYALDKWQNLKQYSVMDELRNQLKIMNRQFGFYMKHKTAMKNNLIGILDQTYPGVNSYFNSPARSDGSQKWVDFASTYWHVDCVRKMSLNAFIDHYEKWCKRKKYNFSQSKAEEIYGKAKEIVPVLPKDEITKLIIKQAIDQLNSTSVTVEELRSLMNETASKLPEYPIVMQMKGVGPSLGPQLMAEIGDVTRFTHRGAITAFAGVDPGVNESGSYEQKSVPTSKSGSAELRKALFQVMDVLIKTMPQDDPVYKFLDKKRAQGKPYYVYMTAGANKFLRIYYGRVKEYLSSLPESK

SEQ ID NO: 425582 - protein, 414 aa, unidentified
MSKPSPTYAVTVGVDWADLKHDVFERHPDGSLHHQQINSSPEAITDWLFALRSVSAEGRAAVALEQRRGPLFHCLSRCLDWMDLYPINPQTLARYRKAFYTSGAKDDPMDSQLLEDLLRSHPDRLRIYQPAPELERKLELFCEQRRKVVGLAVKLENQLRSTLKEYYPLAIDLCAPAALRTSLALDFLQRWPTFDSLKKARPETLRSFYYAHNSRSESLIKERLEKLAAALPITEDSAVIEPLAFVTKMLVTQLRTITRSIDEIDERIAQLFHQHPDHHLFESLPGAGDQLAPRLLCAFGADRSRWSDASQIQKTSGIAPVVERSGKSCWVHRRLFRPKFLCQTFHEFAGESIPRSEWAKTFYQSQRQKGKSHHSAVRILAFKWIRVIFRCWKSHQPYNETFYLETLKKRHKNS

SEQ ID NO: 425583 - protein, 361 aa, unidentified
MNTVIRVGIDLANYLIQVHAVDASGKVVTNRALKRGKFLLWCADLPAGCVIAMEACSGAHHCSRKLIDRGFDARIIPGSSVAPYRIQGRTGKNDANDAAAVCEAASRPHMNFVPPKTLAQQGMLCVHRLREGLKEERTACINRIRGLLAEFGVVLPQSPEILRRHLIDIVEDASNDIAGVARLVLQRAHEHWRELNAHIKWCDQRITDHQKLDEQVQRAAELMGVGSITASALVATVGDFRQFRNGAQFAAWLGLTPKQHSSGGKTSLGSITKRGSVYLRTLLIQGAKAIVLTRQYDNPIFLWAHKLRERIGWQRAVVALANKNARILWAVMTREKRYDAHHVSCIPWLAAVTAPALVSVA

SEQ ID NO: 425584 - protein, 343 aa, unidentified
MKATTVGIDLAKNVVQVHGVDERGRPVLRKQLKRNQVLPFFANITACLIGMEACCSAHYWARQLQKLGHTVKLMAPQFVKPYVKTNKNDLADAEAICEAVSRPTMRFVPVKNGEQQAVLSLHRARQGFVRARTAQANQIRGLLAEYGMIIPQGLCQIGKRLPAILEDGENDLPGLFRELLQRLGEHLKELDRQVRELDSQIQLWHREHEGSCRLAQVPGIGPITASALVASIGDAKSFENGRQLAAWLGLVPRQHSSGGKTVLLGISKRGDGYLRTLLVHGARSVLRVAENKANYEASWLAGLLKRRHPNVAALALANKNARIVWALLRHDRNYDPGYQASAA

SEQ ID NO: 425585 - protein, 400 aa, unidentified
MNAVGIDVSKGKSTVAVLRPFGEVVASPFDVIHNDNDLKRLVKLIRSLPGESKVVMEYTGTYFEPITQFLHNNGIFVSVVNALLVHDYGGNYLRKVKADKKDALKLASYALDRWTELDEYVPADEQRKILKLLNRQYNQSIKIQTMMKNNLISLTDSVFPGINRLFTSLERQSDGHEKWVDFLHAFPHKDCVAKLYLSAFKAKYKSWCSRNKYRYSESKAEKIHSYAKSVIAVLPLNESVKLIVTQVVSQLNTILETAFSIRTEMNRIASSLPEYDTVMSMFGVGKVYGPQLIAEIGDTRRFRNRRAITAFAGLDAPPYQSGQLDVSSRHISKRGSAALRKVLFQITEIFILSKPENEPVYQFIIKKRSEGKHYYSYRIAAANKFLRIYYAKVNQILNAT

SEQ ID NO: 425586 - protein, 349 aa, unidentified
MVILGIDAHKRSHTVVAVDDVGRKLGERTIGTTTADHLAILTWAEQFGAERLWAVEDCRHLSRRLERDLLGAGERIVRVPPKMMAQVRDSARSYGKSDPIDALAVARAALREPDLPTAHLDGPAREVRLLAGHRDDLVAERTRVINRLRWHLHELDPAWEPPARSMWRPKNLTSIIERLTGLDGLVARLAHTHVERCRELTMQIRELDRELEPLVTRLAPTLLALCGCATLTAAKIIGETAGIQRFRSRHAFARHNGTAPVPVWSSNRHRHRLSRTGNRQLNAALHRIAITQAHYHPQARELLQRRRAAGDTKTESIRVLKRRLSDVIYRALLADVDRTAMPVEITAAA

SEQ ID NO: 425587 - protein, 341 aa, unidentified
MNLSKTVVGVDTAKRVFQLHWIDQETGEIVSLQLKREKFLEHFANRAPCLIGMEACGGSQHWARKLAAMGHQIKLMPAKAVRPFVGGNKSDVHDARAIWTAVQQPNVKAVAVKTEAQQAILALHRMRQQLVKFRTAQINGLRGLLTEYGEVMPQGKVGVKKGSAEALQRLSDRLPAMVIDTLREQWARIGQLDEQIGEIERRLKVWLKEDAASTRIAEIPGVGLLTATAAVATMGDAKAFKSGREFAAWLGLVPRQTGTGGRIRLLGISKRGDSYLRTLLIHGARSVLTHAKEPTPWLTELRQRRPLNVAVVALANKMARTIWALLAHQRTYQNGFVSQPA

SEQ ID NO: 425588 - protein, 310 aa, unidentified
MTKRFVGVDVAKASLTVVVRPELSSFVFPNTPSGRKKLAETLQKLSPSLVVLEATGGWDREVVETLAEAGLPVRVVNPRQVRDFAKALGKLAKTDRIDAAILAHFAEATQPEPRPLPDEETRELRDLLTRRKQLQDMLTAEKNRLRRAPSSLRPDIEEHIRWLEEKLKELERKIEEKTATFGERMQILMSVPGVGLLTSAVLLGYLPELGKLSGKEIAALAGVAPFNRDSGEHKGKRAVWGGRKEVRAALYMATVAAVRWNPTLRGFYQRLLGAGKPVKVALVACMRKLLVILNAMVKRGTTWSPTYATP

SEQ ID NO: 425589 - protein, 342 aa, unidentified
MDVGMKSSQICELTEAGEIVERQIRTERKRLQEVFGGRPQVRILMEASTESEWIACCLEELGHEVIVADPNFAPMYAHRSRRIKTDRRDAHALADACRLGAYRPAHRTSVPQRDVRAVLGIRELLVRTRTRWIVHSRTLLRRDGLRIAPGRAERFVTRVKDLPLSTPLAGHLAPVLALLAPLNVQIAELDAQVTKAARDDARAARLMTAPGVGPVTAVAFVATVDRVARFQNAHQLESYLGLVPREWSSSETQRKGSITKAGNTRMRWLLVEAAWCVLRRKPKPATAPLRAWADRLAVRRGSHVAAVALARRLAGILYAMWRDQTDYDPDQLGRSGRVQRVA

SEQ ID NO: 425590 - protein, 351 aa, unidentified
MKQEPEEIPDTEHELVLERVCAIDVAKDSGKVCVRVSGRASKRVSKVWDVPARTGAVAELAEHLLVEGIEKVTVESTSDYWRIWFYVLEAAGLSVQLVNARDVKNVPGRAETDKLDAVWLAKLTEKGLLRPSFVPPAPIRELRDYTRLRIDLTRERSRYWQRLEKLLEDALIKVSAVASTLDTVSVRDMLEALIAGERDPRRLAGLARGRMKPKQAALVEALTGRFDDHHAELTRMLLDQIDALATQIGTLTTRIDELLTALEPQARADEPDTRGGAGAGADGARESTTIERLDEIPGISPGLAQIILAEIGLDMSRFPTAAHLVSWAKLCPRTIQSGAIQRSGKTGRGNP

SEQ ID NO: 425591 - protein, 346 aa, unidentified
MDHYAGIDVSLECSSVCVVDASGKIVREGKVASEPEALISWFISLGYELSRIGLEAGPLSQWLFAAMREAGLAVELLETRHVRKAFEAMPVKSDRNDARGIAQLMRLGWFRPVHCKSIGAQETRTLLTARKLVQSKLRDVENSLRGILRGFGLKVGKTTERSFAERIRELASGHPSLETITEGLLAVHAVLLREFNSFEKQVRRVARSDTRTRLLMSIPCVGPVVALTYGSAIDDPARFKSSKQVGAHFGMTPKKYQSGETDYTGRISKIGDAWVRTALYEAAHIMLTKPVKGCSELKSWAMRIARRAGMSKAKVALARRLAVIMHRMLVDGTLFNPASKQTAAAA

SEQ ID NO: 425592 - protein, 427 aa, unidentified
MNYNQNLKLAQITPSTLIVGIDIAMDKHVARAQDDRGVELGKKLVFDNRIHGFQQLLDWVYRLQEKTNKSEVIVGAEPTGHFWMGLVYYLRAKDIHFVLVNPMHVKKSKELDDNSPTKNDTKDARVIAQLVKDGRYSVPNLPDGIYAELREGIKLRDQLIKQLIIIEGRIQNHIQRYFPEFDDVFKDWAGKTALFTLREFPFPYEIRQMTPEEVLAAWKTVTKRSVGIKRATKLVEKAKKSIGIEIGLRFARKELHNLLDQYELYKKQLTELDEEITDLLQDIPGAREMMNIKGLGAITVATFFSEVGDITKFDHPQQLINMAGLTLREQSSGRFKGQTKITKRGRKKLRKALYLAVRPLVASNPTFKALHRYYTTRPNNPLKKQQSLIALCGKLIRVLFTIGKKQCEFDGSKLLKGLPQVEALQTA

SEQ ID NO: 425593 - protein, 342 aa, unidentified
MKIIGCDFHPSFQQIAMVDTETGVYTEKRLIPDEAVQFYRQLQGPVLVGMEACGNTLWFERLLDQYGHTLWIGDAGKIRTLEVRKQKTDRRDAELLLRLLIEDRFPRLWIPSLEQRDLRQLVLHRHKLVGMRAQVKNQLQHLALNQGMQRKCKLWSRTGRKLLEALPLKGWTARRREELLLLLDDLDKKIGELDVAVEQAAEKDAVARLLQTHPGVGPITALAFSLTVGQIERFAHSRQLVSYLGLNPSEHSSGGRQRLGKISKQGNSLLRSLLVEAGQSAARQIPELKCAYLRLKHKKHSALAKVMVARKLAVRLYWLWKRQQPYTATRMQGSPTGPIAER

SEQ ID NO: 425594 - protein, 369 aa, unidentified
MKVTTIGIDLAKSVFAVSCADGRGKLVMRKQLRRAQVLEFVSRLKPCVVGMEACGGAHHWARAIERLGHGVRLMSPALVRPYRTGPKHNRNDADAICEAVRRPQMRYVAVKSVAQQDLLALHRVRAQLINQRVALSNQLRALLHERGVAARLGAAGLRAGLARALADEHDERHEVSGAMRELLLELSGWLRELEQRGAAITKRIEHAAKHDERCARLMEVPGVGPLGASALVATVGNARAFKRGRELSAYLGLTPRQHSSGGKTVMLGISKHGDRYLRTLLIHGARSLLYRNRRRAHPRAPWVARLVARRGPNVAAVALANHNARRLWALLSRGDRYRPSPQPRSFPSRPSTVVKSAREGKPRLNNQRN

SEQ ID NO: 425595 - protein, 368 aa, unidentified
MKEQTSATTETLNKGRTTIDFTGKTIHAGIDVHKIDCQVGLFYNGIVLGNHRMACNSADLINFFKKQYAGAVIKCVYESGAWGFTLQRQLTAAGIECIVVHAGDVPGSDKEKKNKTDKVDAVRLARHYAAGLLEAIYVPDEELQKERNLIRFRKKLIGDLNRSKNRVKSLLKFQGIVIPENMDNPNWSNNFIMWIEEQVAKDSLLRDTVELMLEEVKLQRLLLLKTERKVRTLMSGEKYVAKVKLLRSVVGVGPITSTLFLLEIGDIKRFKNFDCLNNLIGFYPGSNSSGEKDISTGISSRKHKQLRSMLIEAAWMAVKKDPAMLEAYEVLTRRLKGNEAIIRIARKLLRRMRAVLISGIEYEKGVVK

SEQ ID NO: 425596 - protein, 473 aa, unidentified
MSKGSGNGTTRGDRRRNARRERLRGLLPRDGAVIGIDLAEDKQALAVVDHDVRVLARKTVKVKAFRLGEALDWAVAQAKVKGFKQVAVACEPTGPRWMQVQRLCAERGLPLVCIQPLVSHIAREQQDYTPHKTDESDCVLIGRLAAELHCYIPEELDETWAQLRHLGRRRAQLITAATASVQRIGDFLSVTWPVVTEVCAQPFKPVTWLAALQVVTSRCGGDPARLAAMGPEEFTAVVRAAVPAWGGKKGWGTICGRVFAALTDTEGVVAWSRRGLLRRVADELGDLARTRAQLRAVAADMVMVLSELGLSRLGDIPGLTAVGAAAILAETGDPRRYDSSSSLVKHAGLSPSENASGALEGQAHISRRGRPGLRLTAWRAVWPMLRLNPVMAAKYAAMTQAADAAVASDAGSQPARAAASAARARRAKARVACAASLLRWIYSMVVHGTSWDAAVASGAAACQHAPRCQPEAA

SEQ ID NO: 425597 - protein, 338 aa, unidentified
MYYTGIDLHKFTSFLTTVEPDGNVVKKDNFKNLPQNFIQYFSSIPGQHITTVESTMSWYWLSDLLDSINIPLILAHAKYVKAIAYAKVKTDKVDSLTLAQLLRMNYIPVAHKISNQHRFLRDALRARLKIVQRHTSVTNSMHLILAKFNFDSPTQLDRIPKFQYEQLSELQTLLNEQIIDIEKQLHPSLIPNDDIQRLLWIPGIGIINAFSILLEVDDINRFPDLKNFFSYSRLTPSARNSAGKSKQRASKDGNKYLKVAFSEAAIRAIQYYPVIRKYHTSLLRRKNKFIAKTIIAKEIARIVFFVLKYKSDFNNKFKGQELIHRKSLQWPRITSPGA

SEQ ID NO: 425598 - protein, 449 aa, unidentified
MRPHFKQKEEAMGKDKKRKKHRNVDTSHLEQLNINAAGVDIGAELHYVAVPNGRDPEGQDVRHFSTFTTDLHKLADWLIQCKIDTVAMESTGIYWIPLFEILDSQGFNVRLVNPRNIKNTPGRKTDVVDCQWIQQLHTYGLLQSAFRPENQICELRAYLRQRAMLVSYASHHIQHMQKALEQMNIKLNQVISDIAGVTGMKIIRAIISSERNPVKLARMRNPRCNNSETIIAKALEGNWRSEHIFALQQAIELYDFYKKQIIECESRIQRHLESFDDRSNGSPLEKPLRKSGGSSNKFNFDARGCLHRITGVDLTRIEGIEAPAALNIIGEIGIDMSPWSTEKHFASWLGLCPGSKISGGKVLSSKTKPSANRAAHAFRLAAYSLQRSKSAIGAFLRRKKAQIGAPKAITATAHKIARIFLKCSNMAPNMLTLASNIMSNAIKSEWLQT

SEQ ID NO: 425599 - protein, 387 aa, unidentified
MRVDERGRIAQGRRYRHNEPGIRALCAQLVRLGVARVALERPDGLLIERLLDAGLAVVAVHPNQVKAMRPRYSVAGGKSDGFDSFVLAELARTDSHRFRVLEPDSDQTKALRAMTRARESLVRTRVGLANQLRDQLATFWPGAGNVFWSVDSKIALAFLRRYPTPLDARGLGEQRLQAFLKRHGYTGRKPARELLARLRAGAEGRAGELETQAHRQIVLALVSALEPVVQRISELTIETRHAVTAHPDGQTFRSLFIAADSWLCAATMIAEIGDCRDRYPSYRALAADAGQAPVAVESGKAKHAQFRWACDHRLRAAFCTLADSSRRHNVWAADIYDRARARGASHTHATRILGRAWSQIVWRLWHDHDTYDPHRHTALQRLTTAGG

SEQ ID NO: 425600 - protein, 345 aa, unidentified
MELHTIGIDLGKTVFHLVGLNLRGEVVVRKRFSRSQLLRFTANVRVGLIGMEACGGAHFLGRALREQRHEVRLIPAQYVKPYVKTNKSDYIDAEAIAEAVARPTMRFVPIKTDDQLDLQSLHRVRERWVMRRTAVINQIRGLLLERGITLRKGRCHVGAALPGILEDADAKLSGTLRMLLAQLKLELDHLDLRIDEADALIKKTACENEACQRLVAIPGIGPVTATAVIAAIGNGGAFRKGREFAAWMGVVPREHSTGGKQKLLGISKRGNSYLRRLFVQGARAVLQQRTKQSSGLSVWLAQLISRSHRNVAAVALANKLARIAWAVLAKNEQYRPSVVPDVAAA

SEQ ID NO: 425601 - protein, 335 aa, unidentified
MEKGKLFKQCVGIDISKQSFTACVCKYYISDLADYSSVEEFSNSKTGFNQFVKWSRKFLCKEIAGIYLMEATGVYNEALAYHLHKLHLQVAVVLPNKARHHMLGEGVKTKTDKVDARNLSQMGAFKPIRLWTPPPLIYRQLRSLTRFRIELTKQQTVLKNHLEALENSQESAPSVVKSYKKMLKDTGKAMESNDREIQGLVKADKILYERICKLETIKGLGFHTIVTILGETQGFELITSRKQLASYAGLDVVHRESGSSVMGKTKISKKGNSHIRGVLYFPAMVAARYNKHLQQDYQRIAERNLKHKRIAIIAIERKLLLLIYTLWKSGEVFKE

SEQ ID NO: 425602 - protein, 362 aa, unidentified
MENARSQVGKPNTQVQKRFRMTTFVSFVGVDIASASFMASVGTQPWKVTVKPTKFENDENGFVSFLGWLQEHNLKTESTVVCMEATGVYSEGLAYFLYASGYSVAVEPPLNIQRKFPVNASKTDELDCQYIAEYACRYADKLSLWKPRAEILEQVKLLLTTRQHFSVQLTGHKNALHAIHRKKVSSELAKHSHQNMIEQITKSIKEIDKEIRRLIESDPTFKQTLLLLMTVPGIGLQLAAHLLILMQETLDPRSLAAFIGICPIKHESGSSVYSAPTSRHFGPPKLRKLLYLAACSVRTHKKQFQQYFYRKVADGKHKKLVLNNIQNKILKIACAVVRSQQPYLPNYVAVNPLVFQKTLTAS

SEQ ID NO: 425603 - protein, 354 aa, unidentified
MEKRIKQCIGIDCSQNELVVSFAVLDASFQQSLLSNTKFKNTLEGFQKLKQWGDKLSDPGMELNYVIEATGVYHEKVSVYLTSQGAKMSVILPNKAKAFFQTLSNKTITDKSCGQMLSQLGLEKTLDKWEPPHPVYNTLKQLTRERAQLISEQTLNKNQLHAEESGAWINKNSVKRIKQRLNLLDKQLTEISENIEEILGENQWLKEKIERVCSIKGIGILTAIIIVAETNGFNLIRNKKQLVSYAGIDVKDKTSGTSVHAKPRISKQGNSYLRASLFFPAFSAIRYIPAMKNLYARIVAKQGIKKKALVAVQRKILELVYVLWKKNECFDANYQIRKAKKEEGWQKPTLHELA

SEQ ID NO: 425604 - protein, 342 aa, unidentified
MDHYAGIDVSLECSSVCVVDASGKIAREGKVASEPEALIAYFGSLRLSVVRIGLEAGPLSQWLYAAMKEAGLAVELLETRHVRTALETMPVKSDRNDARGIAQLIRLGWFRPVHCKSIGAQETRAVLTARKLVQSKLLDVENSVRGILRGFGLKVGKTTNRSFAGRVEDLVVNHASLHMIAAALLSVHAVLLRELKAFDKQVRSMARVDVKAKLLMSAPAVGPIVALTYASAIDDPGRFTSSRRVGAHFGLTPKKYQSGETDYTGRISKIGDATVRTALYEAAHIMLIKPIKGCAPLKSWAMRIARRSGMKKAKVALARKLAVILHRMLANATPFNAAMAAA

SEQ ID NO: 425605 - protein, 378 aa, unidentified
MTNCTRYLGLDVHAETITAAIAEGRGKIRSLGKFANRPEAVRKLIEKLDGGKNLKVCYEAGPTGYALYWQLTKLGVDCEVIAPSLIPKKAGDRVKTDRRDAEKLAQCYQSGELTPVWVPTLEHEALRDLVRQRAAGKADESRAKHRLVKHLLRRGLREPNESRAWTHPWWRWVQSLKFEHEAQQVALSDCIAEVLHMGERLARLDKAIDRLVASAPPHMQAAIEALQALRGVAKLTAVTIVTEVGTFKRFRRPTELMGYTGLVPSEYSSGQREAKGGITHTGNAHLRHVLGEAAWHARHRPWLNKRLKKLLPTLPAGVAAIAWKAQERLHKKFARMTFHRKHAGTVASAVARELVGFIWAIGSMAENQHVAKTKEQAA

SEQ ID NO: 425606 - protein, 347 aa, unidentified
MQFYTKTHQHYCGIDLHTKMMYVCILNSLGEIVLHENIPTNPDKFLKLIAPFQEDLVIGVECMFSWYWLADECEQKKLTFILGHALYMKAIHGGKSKNDKIDSEKIARLIRGGNFPLAYVFPAELRPYRDLLRRRNFLVRKRSEVLAHIKLTNHQYNLPAFEKHIGKKANRAHIAERFDNPAVRKNVEVDLAVADHTHLLINQLEAYIVRHVKQFDPRTYYRLQSVPGIGQVLALVIMYEVGDITRFPTVQSFCSYARLVKCPKESAGKLYGYGGGKIGNAHLKWAFSEAMCLFLRESDRAKAFVAKYEKKHGKGKAMSILTHKLGRAVYFMWKRQDAFDEKYFFKT

SEQ ID NO: 425607 - protein, 450 aa, unidentified
MSKRGRSKERSQLRRINPRAAGIDIGSASHWVAIDPSLSQQPVREFAAYTRDLQALANWLVEHKIQTVAMEATGVYWIALFEVLRERGLQVCLVDARATKQVAGRKSDISDCQWIQELHSYGLLKQAFVPEAQIATLRSYVRQRDRWVVDASRAIQHMQQALELMNVKLTEVVSDITGTTGLAIIDRILAGERDAEGLSELRNGRCAHSREEIARALLGSWHEEHLFALSQARDYYRYLGERIAACDVRIAAAMKACATPEGPRSEPPKVGKRDTSAHPFGFDAQGHCFQMTGVDLTAIDGVGANTVLTVLSETGTDLSAWRSERAFGSWLGLAPNPRKSGGRVVRSGTKPGAQRAATAFRLAARSLSNSKSALGAFYRRLRARIGAPKAITATAYKIAKLFYRMLKSKLPYQDIGQAAYDERFRARRLRSLRRMATELGFNLVPALSGA

SEQ ID NO: 425608 - protein, 446 aa, unidentified
MDKSKKNSKRIATFSVVHPHAAGIDVADTSMVVAVPPESIVENVRTFGCFTCDLHDIAHWLKECEIETVAMESTGVYWVQLFLLLQEYGFEVYLVNAKHVKNVTGRKKDDIDAAWIQKLHSCGLLSNSFQPNEQTRALRNLVRHRKVLIRDAARYLNRIQKVLELMNIKIHTVISDIAGKSGQDILRAILSGERDAERLASLCDKRIKASHEEIVKSLEGHWREEYIFELNQSYQTYHFLHEKIRNCDSEIEKNLAAIVTHSRPEGILAINQKTKRKMNYKNRPGFNVTAYLKAIVGTDVTEIVGISEISALEIFSETGFDLSKWKSDKYFTSWLGTAPNTKESNNKVISSRILKKKHHAGQAFRMAASSLYGSQSPIGDFYRRIRARAGAGKATVATARKIAVIFYHMVTEKTNFNPDMLLKSQQKYKDHKIKILEKQLAKLKAA

SEQ ID NO: 425609 - protein, 325 aa, unidentified
MTSSHSSNNSFIGIDVGGASLDVAWHRGDSAHYANRPDAIASLVKRLEVGPVARIIIEPTGGYEKPLLKALRQAKLPVELVHTSRFKAYRELVGAKAKSDTSDAKLLASYAACSDEVRGRKPDHFEVPEDTDREALAEFASRREQLKHMIHAESCRLKTVRMAELRQAITDHLDALYAEEKRIHQMMLKLVRQRLDLQRDQRLLRTIKGIGVKSALALIASVPELGQIDNKKAAALIGVAPFVRKSGTMTAPARIHGGRAAVRNILYMAAVTASRHNPVLRSFYERLVAKGKPAKLALIAVLRRLVVFANAVIRSGQPWKGAGAT

SEQ ID NO: 425610 - protein, 384 aa, unidentified
MRNVCGLDVHKDSVFVCVLNEEGVIFQEKYGVLTTELSKMSAALEMYGVEEVCMESTSIYWMPVWRVLEPSFTLKLVNPYFIRQLPGRKSDVKDAEWIATCLLKDLIRGSYVPGETVQQLRQYDRRISDLNREIVYKLAKLDAALQRCNIRLSNYVSNVDGKSYREVVKLLAEGVTDPDKLVAKVHGRTVKRWGRDTVRAALTGVVTEVDCEVIAQLRDELELATTHRAECQSKMAKMCNELFPKQMRDLQSIPGVGERAATAILAEVGTDLSSFQDAAHLVSWAGLRPRNDESAGKIKSRGITHGNKYLRKTLIEVSWAASRTQGSFFNRFSYTQTVARRKPRMKVQVAIARKILVAVWFVLHDNVPYKDPSASDGGSAHNRG

SEQ ID NO: 425611 - protein, 407 aa, unidentified
MISIGIDISKDKSTICALKSSSETIWKPFDLRHLESDMQSFISKLETLTEEIRIVMEATGKYHLPILYSLKSEGYFVTVVNPLKMKQFCRSMSFRKAKNDNIDSRLISEYGLIYWHKLEEYKLEREVYQNLKHLNRSYQHYIYLRVSQMNFLDTFIDQVFPGLKKLLPHGSGDFNKDKLLDFLEVWWHKDVVIIKNEEEFIKDYQKWAKEKRYHPNAKKAQAIYKVALEGISTQNSNSPYIKADVYESIQLVKRINQSLNYILSQMLDLAEPLEEFQEAKKFSGISDKLAVQITAEFGDLGKFRNKKCLISFVGIDAPTYESGDFKGNRRKISKRGNAILRKVGYQAMKCMMSAKNPENPVYCYMVKKEEEGKAKKVCKFAGLNKFLRIYYARVMEAKVENQAKKIA

SEQ ID NO: 425612 - protein, 411 aa, unidentified
MEAAVITAVGIDVSKSKSTVAVRRPGGEIVLRPFDVRHTNSDLKKLTSTLKKLGGDIRIVMEHTSTYWRPIALTLKEAGFFVSVVNAMLIHDFSDNTIRKLKTDRADALKIANYALTFWDTLPPFNNEEETRLLLKMQSRANERITATATALRNGLIALADQTFPGVNIAFAPNTKNANGHEKWVDFFLRYWHKDCVCQYSMEAFTESYRGWCKRKNYKFRTDTAHQIYLLAQEGVATLPKCESTKMLITQACKSLNAVCEAKQSTQLEMQRLAAMLPEYEVVMQMEGAGPITGPALMAEIGDVRRFKNKKALVAFAGIDAPPFQSGAFESKSRHVSKRGSPHLRRTIFIVSNIILTRSNPENAVYCFMDKKRSEGKHYYVYTVAGSAKFLRVYYARVTEFLRSQPSPGAC

SEQ ID NO: 425613 - protein, 351 aa, unidentified
MQPVPVLNLKVMDKFTKKSCFVGIDLSKPHIDAAMVNEKEPKRFQNARFSNDINGFEALEKWILKQGVKVKDCLFCMEHTGTYGLLLFAWLTKQNLDFCVEPGLQIKRSLGMTRGKDDKVDARRIATYAMEKKAKLKQYELPSENLIRLKQILAYRDQLVRLRTSLKNSLQSHKEYQQISSLDFVTKDIQKQITHLDESIESCEKQIKEIIKSEKDIQQNFKLATSVKGIGLVIASFMLVSTNNFSGFENGRKYACYAGIAPFPNESGISIRGKTKVSHLANKKIKTLLSNGANAAKSHDPEIKTYFERKIKEGKDYKSVINAISCKLVNRVFAVVKRQTPYVSTYQQKIA

SEQ ID NO: 425614 - protein, 453 aa, unidentified
MKKGSVKKGVIKMGTGLPVFNHHAAGIDIGDTLHYVAISDGAGGHEVKTTSAFTCDLEEIVDYLKSNGITTAAMESTGVYWLPLYLMLEDAGIEPYLVNAKHVKNVTGRKKDDTDSIWIQKLHTCGLLQKSFQPDNEIRLLRSYTRQRKNLILLGSDSVRRMQKALELMNIKIHTVISDILGKTGMKMVKAIIEGERDPQILSTLCDPRIKASKEEIIKSLQGIWREEHLFMLEQALENYEFHQKQIKSCEEKIKQQLLKQVAIIKEGDITGLEETLKKKSKAKPKKNQFDFAVAPYLKIIAGVDLCKIPSISEVTALEFIAETGVDMRKWFGGKQFDAWLNLVPNTKITGGSIVSSKMMKKKNRAGQCLRQAASTLSTNKTPLGGYYLRMRAKLGGKGAALATAHKLARIIYTMLLNKIEYNTGILTDNEEKIKLEKIKKLETQLARLKRAA

SEQ ID NO: 425615 - protein, 401 aa, unidentified
MTATHTTNSTVSHAPVLYLALDLGTRDWKLAFTVGLGQKPRLKTITARSTLSLVLEIKAAKRRFGLPEDAPVICCYEAGRDGFWLHRFLLDQGVQNQVVDSSSIEVNRRQRRAKSDRLDAVKLVQMLIRWHNGEHKVWSVVHAPTVAEEDARQLHREMIKLKAERTAQANSINGLLAGLGLCVIVDETLPTQLENLRQWDGAKLPPQLHQRLLRELQRWQLIDRQLRELDAQRMAKIRDDQTPHVEKVRRLLNLKGIGENGAWLLVYEFFAWRIIKNRRELGSLAGLTPTPCSSGESEREQGISKAGNRRVRWMMTELAWGWLRYQPRSELSQWYQRRFGRGNRRLRKVGIMALARKLLIALWKYLEGGEAPAGAEEVGWDNKPRFRAVKTRRRKELSPTG

SEQ ID NO: 425616 - protein, 389 aa, unidentified
MKIFVGIDIAKLNHFAAAISSDGEIILEPFKFTNDADGFQLLLSKLESFDKNSIIIGLESTAHCGDNLVRYLVTELYQVCVLNPIKTCQMRKNNVRKTKTDKVDTFVIAKTLMMQDDLRFITFFDLDMMDLKALGRFRQKTIKQRTRLKIQLTTYVDQVFPEIQYFFKSGLHQNAVYALLKEAPSPKEIASMHMTHLANLLKVNSHGHFTKEQAKELRVLAQKSVGANDSAISIQITQTIQQIELLDSQLEKIEVEMTDIMKFNDSVIMTIPGIGYINGGMILGEIGDIHRFSNPNKLLAFAGLDPSVYQSGNFQAKTTRMSKRGSRVLRYALVNAAWNVVRNNATFKAYYDAKRAEGRSHYNALGHCAGKLVRVIWKMLTDEVEFNLE

SEQ ID NO: 425617 - protein, 324 aa, unidentified
MSKIKEFFGIDISKDVFDVVDPLGKHHQFKNDLSGFKAFGKRLNEYSHCVMEVTGSYYQGLATWLYSCSFNVSVVNPLSVKRFIQMRLKTSKTDKLDALMIRMYGESEQPKLWTPPSKLIIEATELHKLIELLVRQRAGLKNRLHALDSKGVTESLVVTSVRRQIRNLSNEIGGLELKLESVIKEYEPDLLTRLCSIPGVGKRTAIYLIVLTQGFEKFESSRQLISYFGLDPIIRESGSSIKGKSRISKTGDNQVRKLLFMCAFTACEHNKACREIYQRLTAKGKSKKLALIAVANKLLKQSLALAKSGLYYDENYRSVNVNLG

SEQ ID NO: 425618 - protein, 317 aa, unidentified
MAQKTPVVGLDVSKRKIDACIRALGLRRTLASTPEGRAELVAWLRAHGVGRAVMEASGGYERSWAEALRSAGIAVRIVDPKRVRNFAKAAGRLAKNDTIDADTIAWFAETFEDEVAQADDPERAELDALLTARSGLKTMEGQIVQQGEQRRPTLAAKAHAAVLKVLRAQLKKLDATIAARINANPVFARRAEIVDSVPGLADQAAAGVIAWFPELGHITNEAAAALLGAAPYDDDSGEHKGVRHIKGGRRKLRNLLYMPVTGAATRHNPVLKAFYERLRAKGKEGKVAIIACMRKLIVILNTMLARDQLWDPARAAA

SEQ ID NO: 425619 - protein, 323 aa, unidentified
MRTSVGLDISKKTIDAAYMPAERQITSAVFTNDADGIQSLKQWLAAFGQSDLHICMEATGNYYEAAADALSTDYAVYVVNPLKIKSYAKKRFSRTKTDKQDAKIIAEYCFTALDSELEQRHTPSADQYRLKRFMALHGQLKQQMTAQKNRLKAAKDKFVQSIHKEQIAQLQRHIDAVEQEINDVAGGDSGTKAATDKLQSIPGIGGITSAKLAYYLIALKFKGAKQFAAFAGLVPQKKESGTSVRGKEQMTNYGNRQLRGALFMPAMVAYRNGYFPELIKRLTKKKKPKKVIIGAIMRKLATIAYYVHTTGKPYEPHRYRPQS

SEQ ID NO: 425620 - protein, 342 aa, unidentified
MSVYVGIDVHRKRSQLAVIDANGEVLANRNVPNGAEPILKVIGGLPTGTPAAFEAAFGTTWLVELLEDYGFDPHLVHPSRCKAIASARLKNDKVDAAILAQLLRADLLPEAWIAPPPVRQLRALLRHRVHLVRVRTLLRNRIHAIVADHGHDRPHGGYWSGPGRAWLAALPLPAISRELVDDNLGLIDAIQDRVDRLDGEIRQRARSDPRVKVLTQLPGVGPFTALVILAEVGDISRFASARKLASWAGLTPTVRGSDRIAHYGHISKEGSVWLRWVLCEAAQTAKRHPQFAATFQRIAKRRGKKIATTAVARKLLTRAWHLLTDAESIASPQPATPQIAAR

SEQ ID NO: 425621 - protein, 316 aa, unidentified
MNETIVEKFVGIDVSKSTLDVRIEPAVQTLHVAYDEAGVRQVVSRLKELAPALIVMEATGGLEVRIATELASKGLPVAVINPRQARDFAKATGQLAKTDQVDAAVLAAFAKAIRPQVRPLKDEDTRALDEMVSRRRQLINMRVQETLRQGTAASKPLQKSLTKHIVWLDKQITAIDTDLTKRLRGSDVWRAKDDLLRSIPGVGAVTTLTMLAKCPELGTLNRREIAALTGVAPLANDSGKHRGKRFIWGGRADVRAVLYMAAVSAINCNDPIKAFAERLKKAGKPPKVVIVACMRKLLTIMNSMLRNNTLWNLKNA

SEQ ID NO: 425622 - protein, 340 aa, unidentified
MPLYGGIDLHANNSVVVLLNDQDQVSYEKRLPNHLPAILEPLRLHPGEIEGVVVESTYNWYWLVDGLMEAGYRVHLANPAAIQQYSGLKYSDDHSDARWLAHLLRLGVLPEGYIYPKAERAVRDLLRKRAHVVRQHTANVLSMQNILARNTGARFSLKRMHELTKQELQSLLTEEAQVLAVTSSLAVLDCLQHQIKTLEQSVHKRLRHTPSYEQLLTVAGIGPILAQTIALETGAISRFPSVGHYASYCRCVDSNKLSNGKRKGTGNVKNGNPYLAWAYMEAAQFALRFQPAAQRFYQRKLAKSRNNTVLARKALAHKLARACYYMMRDLVPFEATKAFG

SEQ ID NO: 425623 - protein, 358 aa, unidentified
MNATTVAVDLAKSVFQLAVADASWRVVETHRLSRTQFERWFANRDVSLVIMEACGSAHHWGRWLNTLGIEVRLLPAQYVRAYVKRNKTDAAALLEAARASDIRPVRVKSVEQQALQGLHRIRSLWMGTRTSRINALRGFCREFGIAIPVGARTGIEAISRVLADPHTAVPELIRGTARLLIEEIRLLEARIAQLERELAALARLSPACTTLLSIPGIGLLTATAMVAATSGDVSHFKDARHFSSWFGLTPKEYSSGATRHLGRISKKGDRYLRMLLTHGARSVLRASKVAAGAGREVCGVRRWALDVQARSNHNKAACALANKLARICYATLRDKAPFTEGTVRLDKKVNRQAFVMPA

SEQ ID NO: 425624 - protein, 375 aa, unidentified
MKEKLRFLGLDVHAETIAVAVAEPEGEVRSLGTIPNRAESIRKLIKKLGPAEKLRACYEAGPTGYVVYWQLAELGVQCQVVAPTLVPVKAGDRVKTDRRDAEKLARCYRSGDLTAVWVPDEGSEALRDLVRAREAAKQDQMRARHRLSKFLLRSGQRPPSGVRPWTRPYLIWVAQLRFTQIAQEATRQDYLHEVEHMRERVARLEQAITEAVKLASPALKQVINDLQALRGIADISAVTIAAELGQVSRFDSARQLMGYCGTVPSEDSSGKRTRRGGITKTGNAHLRRIVVEAAWSYRRPPCIWYGLRKRQESISEEAKEIAWKAQHRLHKRYMKLAAAGKDQRKIVTAVARELLGFIWAIGNRDETISNQQVAA

SEQ ID NO: 425625 - protein, 370 aa, unidentified
MKFLGIDLHSNCFTCCIIYEDEKRFRHSFSFEQESLNKFYQHLDEETHVIVEASTNTFKFVELIRDKVNDVYVANTHKVKAVPMERKKTDKVDAERLAMYLKMQVLSREMMAKPVYVPENTIQNLRSLFSTYQLIVKQIVSTKNRIHALLKQNLFPFTKTYIFGKAHREAIQNLEMDEAMSFQIRLLFKALQQLEDNKKELKNKILTVGSEYINEIDIVTSMREISVFMAIALMADIATVERFPNSKHFTSYLRSAPGVESSNETTRITNTNKSGRKLSVALISQSLNHFRNSNLKLSRWYDKKAEYANRKGKIRMALCRRVIAELYQMLKKQKYHYFRDEKNHQMKMNEYYKFLERNNIVIQKAALLFS

SEQ ID NO: 425626 - protein, 314 aa, unidentified
MTPPNIYVGIDVAKAHLDVAQRPAAKVWRVSNDGPGIAALVERLVQFQPALVVLEATGGIELPLVGALAAARLPVVVINPRQVREFARATGRLAKTDAIDAQGLARFAEAVQPALRPLPDAATQQLSGLVTRRGQVVEMLTAEKNRLRTAAPAVGDHIKGHILWLERSLSDLDSGLGQAIHSSDIWQAQDDLLQSTPGVGPVLSTTLLAQLPELGSLNRKEIAALVGVAPLNRDSGSLRGRRTVWGGRSDVRAALYMAALVATRFNPLIRAFYQSLKEAGKPKKVALTACMRKLLTILNAMMRHQTPWRTCSTS

SEQ ID NO: 425627 - protein, 359 aa, unidentified
MQTQSNKIDFTGQHIYVGLDVHLKSWKVTIMTEKLPFKTFSQDPKPDLLYHYLSRNFPNGIYHTAYEAGFCGYWIHNKFKAFGINSIVVNPADIPTTDKEKVQKGDKRDSQKIAKALRSGDLRGIHVLSSKTLEDRCLIRTRAIIVQDLTRNKNRIKSFLHFHGIEMPENFKQMNHHWSKRFMAWLKSIEMTEPSAKKSLDLYIAEAEHLRSTILEATRGIRELSEKEPYVNQVELLRGIPGIGILTAMIILTELETINRFGNFDKLCSFIGLIPTTHSSGEKENIGAITHRGNSFLRGALVESAWIAARIDLALNKSYHDYCRRMEPNKAIIRIARKLLNRIRFVLKNNQPYVCSVVK

SEQ ID NO: 425628 - protein, 384 aa, unidentified
MQKHQRRFGAMTQDLQELANWLRQFEVPQVAMESSGVYWKPVWNILEGQFTVVLANAQHIKNVPGRKTDQKDAEWIAQLLQHGLLRPSYVPCEVIRDLRDLTRMRASLSQEASRISSRVQKVLEDANIKLASVATNTLGKSGRAMLEEIIVGQNEPEYLASLALGHLRAKTPQLKLAMEGKIRPHHRFLLRRLLDQLRFVEHEIVLLDERLEDIGRERPELSQAVARWDTIPGNDRVAGWTLLAEVGHSMAQFPTAEQLASWASLCPGNHESAGKRLGGTTRKGSPWLRRMACQCAWAAARTKNTYLSAQFRRLAARRGIKRAIIAVAHSLVIIGYYLQKSQRNYEDLGGDYFDRIDSDGLKRYFIRRLEKLGHKVTLVPIKTA

SEQ ID NO: 425629 - protein, 425 aa, unidentified
MPYKIAGIDVHKKMLAVVVADIEKDEYQFEQVRFGSAPEELRRLCTWLLEQGVEEVVMESTAQYWKPVWGYLERFWKPGCQPGEEGNGRAGVLHLAQAHSNRGRRGRKRDFPDAERLVKRLVAQELVLSFVPDPTQRLWRTVMRRKQQLIRNRVQLQNRLEALLEEAHLKLSSLVSDLLGASARRMLKAMAEGEKDPAVLAAMADKRLRATAAQLCDALEATAELNPVYRRLLKMVLEELALLEQQVGQLEQEMASLLRPHEDEVKRLAEVPGFGVDSAQQIIAEVGAKAASFPRKEQLSSWVGWCPGEEESAEQNKNGRSPKGNRNMKRILNQCANAAVKAKGSIFELLYHRWIVRLGHKRTIGAIAHKLSNIIWLILHRGVRYEERGPAVSQKAKQARTTKMIKELRKLGYRIELSDIQPAVS

SEQ ID NO: 425630 - protein, 366 aa, unidentified
MYEGITCIGLDVHKRTIVVAVRPPGDPEVHEERLSHEQQAVARWARRWKKRSGDQLICAYEAGACGYALKRQLEKLGVRCQVVAPSLVPRKPGERIKTDRRDARKLAEYLQGGHLTEVFAPTPAQEAARDLSRAREDAQQDRMRCRHRLSKFLLRRGRFYTAGRKHWTGAHRAWLQKLVFDDPVEQAVFDDYRLAVAQVNARIEALDRRIEVLAQEPAYRAAVGALRCFRGIDTRTALGLVTELHGIGHFDRPRRLMAFVGLVPSEASSGDRQRRGAITKAGNGHARKLLIEAAWHARHQPAIPVALRQRRSGQSPEVIAMADVAMQRLHRRYWRLVQRGKPTSVAATAVARELTGFVWAALRAVA

SEQ ID NO: 425631 - protein, 366 aa, unidentified
MKKISSVAEKQNRSFSEQKLTIGFDLGDRSSWYCVLDATGSVLLEQRLSTTPKAMKEVLGAMPSSRIALETGMHSPWVSRLLSELGHEVIVAHARNVRLIGESRKKDDRRDAQTLARLARIDPKLLCPVKHRSAKAQADLTVIRARAGLVRARTALVNTARGLAKSYGERLRGCNVRNMNPEKAQGLSPELRTGLEPLLAGIESLSERIRECNEGIERLARESYPQVAQLKQVKGVGRLIALTFLLTLEDAHRFCKSRDVGCHLGLHPGRRNSGQSEPQMHISKEGDPYLRTLLVQGAHHILGPFGTDSDLRRWGLKLAERGGKSGKKRAIIAVARKLAVLLHHLWVSGEVYEPLRTSKPTAMAAA

SEQ ID NO: 425632 - protein, 346 aa, unidentified
MKIIGCDYHPSWQQICWLDTETGETEERKLEHASGEAERFYRELREPALIGMESTGNCQWFLEMATAVGHEVLVGDAARIRASDVRQQKNDRRDAALILQLLLEGRFPKIWMPSSEEKDQRQLLIHRHKLVRIRAQVKNELQHLAMNRGVTKKRRLWSKAGERVLRALELAPWAARRREDLFRLKEMLNQQVDLLDQAVAEAAQKNEKARLLMTQPGVGPITSMAFVLTMGDVKRFQRGKQVASYLGLIPREHSSGGKQRLGSISKQGNRFMRMLLVEAAQVAVRCDPGMRSEYLHRCHRKAKGVAKVAAARKLAIRLYWMLRTNTAYPGVVRDGSSSRVPLVSAS

SEQ ID NO: 425633 - protein, 492 aa, unidentified
MNGQWARPNPTEPEFLEEGTKMIYSVGIDLHQGQHRVRCLDDRAQSCDSFSFQTTPQGLAILEERVFRDGANPIIVLEPAGLPWKMVAVYLRSRHPDCRLVKAKTQKVAALRRYLRGPVKSDRLDALTLAKMPFIDPEKLVDIYLPPAKIHALQRLTRQRKRMESAISGRKIRISAIVDGYLPGVRRTFSDAWSLPVRAFLRSRLNPYAVVREGEGALHAYLIKACPRSRWSRAETHLVFLACHSVADVCELSRSAGTVNEEFFADLQDEIARELRLMESEEAESEALARRITELYRELYSSDNLTSIPGVGEHTAPIFLSAVGDPARFHNQSAFANWEGVVPGARQSSDMEAKGLRMTKAGPSIVRMGLYQAGDVGRRTDPQLAAVYYREMVYHGKNHRQAMGAVMSHLGARVFAVLKQSRPYELRDTDGNPISKDDARILILDKYRVPEDIRRERRRRNPKARNTAAVPRKEREMATYRTNEAARAPQSV

SEQ ID NO: 425634 - protein, 397 aa, unidentified
MYIVGIDIAKRKHEAAVIDGEGAVIIKPFSFTNNCSGYNRLLAMLTKAKLPLDEVSFAMEATGHYWLALFTRLQKEGFRVQVINPVQTNSIRSFYIRQAKTDPRDALLIAEVIRFGHFSESTLHPENIYELRELCRGRHAIVSMQADVKRKVVALLDQVFPEYETAFTNMFSDTSMAILQTCPTPKELSETPLEELCHLIEVSSHKRFRMAKAQELQVLARNSFGFAMAGDVFSTMIRLYAKHLDFLKQQVQEMDRKIAEIMDTLDTPITTITGIGPTLGAYILSEIGDISRFSSAAKLAAYAGIDPTMRQSGEYNGVRNRMSKRGSPYLRHAIWLAASSAVLHDPALKLYFQKKRDEGKPYMASVGHACRKMVSIIYAVMRDNKAYTPCIPNEISA

SEQ ID NO: 425635 - protein, 408 aa, unidentified
MNTLYVGIDISSKSNVVYMMLPNGDKHSNFSVASSHEGSIQLVKRIYSALTSHSLDTVLIGLEATSVYGDNLVYFLREDATLAPFNSRIHVINPKQVKRFHDAYNDLPKNDYVDSFVIADCLRFGRINKEVYSGDYRYQALRNLTRARFFTVQNLIKEKQRFMNVLFKKYSTMTQEKVFSNTFSATALAVYEEFDSAEALANMDLHELTDFIIEKGKNRFQNPDAVAKAIQKAARSSYRLPKTVNDSVNQVFSISITSMKALESQIKEFDKAIKAQTELLPNVLISIPGICPVYSAGIMAEIGDINRFDNQSALAKYAGLAWKQYQSGGFEAEVTRLIPSGNRFLKYYLCEAAFSLVRCDKEYSDFYHLKYKEVNRCQHKRALALTARKFVCLVFRLLKDNRLYCPAK

SEQ ID NO: 425636 - protein, 391 aa, unidentified
MIYIGIDVAKDKHDCFITNSDSEVLFKAFTIFNNLDGFNDLYQKIESVMDDVTKIKVGLEATGHYSYNLLGYLIDKGLPTYVINPLHTNLYRKSLSLRQTKTDKVDARTIASMLMSDMNLKSYSDTSYHNEELKSLTRYRFDKVKERAKLKTSVSRLVCILFPELEKLVPTLHMASVYALLSEFPSAKHVATAHLTRLTNLLSESSKGRYGKDTAITFRDSARASIGSNMPAKSLELKHTIKLIQELDSEIDEIENEIKIIIDEINSPILSIPGINYRMGAMIIAEIGDFNRFDSPDKILAYAGFSPSTYQSGQLDGAYAHMEKRGSRYLRYALYNATKYVCHWDPTFAAYLAKKRAEGKHYNVAISHAVKKLVRVIYHLEKTNQQYIKAA

SEQ ID NO: 425637 - protein, 438 aa, unidentified
MSNNVIFNFDELFISVGIDVGADFSWMSIVLPNQQFVGKPYKILHNSMDSLASAVSKIKEAEEMYSLESRIFLESTGIYHYPLFCYLRDKGFNCSVINPIITKNSTNINIRKVHNDRFDSKKAALVGLKPDLKVSLMPSDLALNCRNLCREYYDLMDSRNAYVNKLIDELRMVFPQYLGIFSKVTIDTSLILLETYTSPSAFINADKQEIIDLIRSTARFGLTYACNKYNAIIQAANDADKFGYILDSNIKRIRLYIGFICKYDEEINSILESMHELAAANEDTDFVKQIRLIETFKGAGFLSAMSLMGEIGDFSAFSKPKQLFAYFGLDPAVKQSGKFEGTKIQMSKRGSAIARRVIHTLTLQSISASRTGESKNPVLLDYYLKKCESKPKLVAMGAVSHKVCNMIFAILRDSKPFEIITPQEHIKKYNAAKCDVAA

SEQ ID NO: 425638 - protein, 457 aa, unidentified
MRKKNKRTPGVEEAHPFSGMSRIHAYAAGVDIGAIEIVACVAGDENTQIVKAFGNYTVDLQALAQWMKSYRIKTVAMESTGVYWIPLFEELERQGFECLLISSRSLRRVAGRKSDISDAQWIQTLHTYGLLEGSFRPQGELVALRTLLRHRSQLVEHRSPHIQHMQKALLQMNVQLSQAVTDVTGMTGQKIIRAILAGEREPQALAALREAGCKKSAEEIGKALTGTWREEHLFVLKQSVLLYDFYTEQIQSCDEEIERLYGLTRPDWEAGDVESFTRRKKNSRSKNLPQHPEEIRKHLKRISGVDLSVVDGFGVSLAQTVIMEVGTDMSKFPDEKHFCSWLGLAPKHEISGGKVLKNNTLKTRNRAGQAFRMAAQSVKQAECMFGVFYRRLRARLGPAQATVATAHAIARVVYRMLKYKVEYDPLTLNEYQKQYEEQQIKYMRKKAAKFGFQLVPT

SEQ ID NO: 425639 - protein, 332 aa, unidentified
MFLGIDIHKREAQVAVRNDDGDVIEQVRVENTDLDEIGQQYAGGEALLEATTNYFYIYDMLSEYLDVVVGHPPKLKAIARTDKKTDKVDAEELSRLLWLGSVPESYVPTDEIRECRALVRGRISLLEDRTSFANKIHSLLLDNGITRRVKPLSVKGQAFLEKLSLPAPWDELLSSYLAVIETLTAEIEQLDDRIEERAKGLRETQLLMTIPGIAHYSALVIYAEIGEIGRFDRAKEVVRYVGLNPVIRESGDSRFEGGISKKGPGKVRWLLVQAVHSAVHTVEDEYLSRFYHRIERRKNKQKAAVATARKLLVSIYHMLDRGEVYDPPGVSA

SEQ ID NO: 425640 - protein, 409 aa, unidentified
MDIVPIYKRVIGLDVHQAQITGCAITEQPDGSVTHERREFGGFKRDRKALAEWARAIAPDVVVMESTGIYWKSPYAALEGVGIMAWVVNARHVKAVPGRKTDVADAQWLASLARAGLLRASFIAKADLRSLRHIARQRQKLGGMLASEKNRLHKLLTDAGVRLGVVVSDLHGQSARAMVKALIAGKSVPEVLSLASNRLRASREDIFEALQAEEITPAHRFVLTEIMAHIEELESRMARFDAELLRSLHSAGYSAPLQLLQTLPGIDLMGAAMLLVEIGADMSVFGSAQRLASWVGMCPGNNESAGKRKSGRIRKGNVWVRRLLCEFAQAAGRSRCALKDKFQSLNVRKGHKRSIVALGHKMLRTIYAMLSKNTCYVDKTVDYEALMVARNAPRWLQMLVKHGFVPTPA

SEQ ID NO: 425641 - protein, 364 aa, unidentified
MKRKVYVGMDVHKETIRIACLTNNTKEIVKEQQIKHNEVQIKKFVNKLKSEWNEIHSCYEAGVTGYPLYRYLKSLGVNCILVAPGKIPRQSSDKIKTDKRDAIKLAKLLRSGELESIHVPSEEDEAVRDYLRSRDSLRLDLGRNRQRLMKFLLRKGITYSATKYWTVSHNKWLNNLQFNNEILQETFNDYYSRVRVQEENLKAMDKRIQEIAESEPYREKVGVLRCFRGVDYLTAMFLLCEVCDFKRFKTAGSFMSFLGLVPGEYSSGSKRKQTGITKTGSPRLRRILTEAAWQHRFPGTGSKIVTARRSGQPALVVALAEKASLRLHKKFRNLQQRGKTPQVMITAVSRELSGFLWAAMNLVA

SEQ ID NO: 425642 - protein, 355 aa, unidentified
MDSVKYIGMDVHKESISIAVRNGAGKIVMESLIETKASMILQFIDGLRGDVHVTFEEGTSAAWLYDLLKPHVTKLVVCDPRKNASMREGNQNDKIDARRLAELLRLNHLSPVYHGEHGLRSLKELVRSYLTITKDLVRVMTRVKAIYRSWAIPCTGKQVYAPRHRAEWLGKIGEPGVRRRAEFYYQQLDALRTVRQQVRRELLAEGKKHQAWKRLCQIPSIGPIRSAVLLGILQTPHRFRTKRQLWTYSGFGIETQSSADHRRVGGQLERVKKQSSIRGLNRNCNHDLKNLFKGAAIVASSKPGPFQEFYAALLTKGIRPEMARLTLARKIATIVLIVWKRGVSFDAQYLKPQTA

SEQ ID NO: 425643 - protein, 421 aa, unidentified
MRAIGLDVHRDFCEVAISEAGEVRSAGRVAARPDALELFAQSLTSDDQVVLEVTGNAWEIARIIEGHVKRVIVVSPSDTGIRQARAKTDRLDARTLAKLLAAGSLDSVWMPDERTRVMRRRLARRSQLVAARTRAKNEVHAILMRRLKGRPEVSDLFGKQGRAWLAELELPVEERETLDSGLRQIDFLDGEVALVERAIAHDALNWPDARRLMTVPGVNVIVAVTFLATVGDIHRFPDRRKLVAYLGLDPKVRQSGDAPAAHGHISKQGSSQARHALVEASWSAVRTPGPLHAFYQRIRARRGHQVAICAAARKLACMFWAMLWRQQDYAFGQPSMTARKIRRLEITAGAPRRQNSRGVWAAAIAMREAERDLARQAEQAYAQTIRDRQAAGAIKAGASATPGHASQKPSKGTAARQTTSP

SEQ ID NO: 425644 - protein, 349 aa, unidentified
MPKSTTAVVTIGIDPGKNTLHLVGLDTRGAIVLREKVARARIVSRLANVPPCLIGIEAGMGTHYVTRDLLALGHDVRQVPPVYAKPFRQTHKNDFRDAQAIAEAVQRPTTRCVPPKTVEQLDLQALHRVRYRLVGQRTAIINQIRCFLLEHGITVRQRLHWLRHALPDILAQRADVLSPRMVRILEDLAQDWRHLDDRIEIVSGEIEALSKNTEPCRHLMTIPGIGPIISSAVVAAIGDGTAFTRGRDFAAWLGLVPKQISTGDRTILGRITKRGNRYLRMLFLQAARVVLLWPRNWMKHSFGPWLAAAAQRLHHNVLATALANKLARIAWSVLAQHRVYEARLSTAAA

SEQ ID NO: 425645 - protein, 465 aa, unidentified
MRTTSTQIMNSRKRKKARPQQTASAPSPLGHAIHPAAAGIDIGAEELVAAVPHGRGEGPFVRTFSAFTVGLHALRDWLLACEIKTVAMESTGNYWLCACAVLEDAGIEVCLVNARHVKGVPGKKTDVLDAAWLQQLHAAGLLRASFRPRREILPLRYLMRHRGDLIAQAGQQVQLMQKVLTEMNLHIQHVFSDVDGVSAQAIITAILEGQRDADKLAALRDRRCRSPLAKIKAALVGDYREEYLFVLRQCQTRWQQLLASLTECDAELARLTAAITGVTDAPLPVAGFAQRRVQKNMPAVLPVYEQAHRLLGVDLSAVPGVSGGVLCVLMSELGTAKHIREKFRSAEAFASWLGLCPDNRVSGGRILKAGTRKVANRIATILRLAANSLGRAQGRMGEFVRRFKGRLGKAEGIVAGAHKLARIIWAMVVSGQPYDEAKKPRLSTPPPPPPPAASRTCKTRPSHST

SEQ ID NO: 425646 - protein, 343 aa, unidentified
MSVIIGVDPHKATHTAVAIDHSEVELARARVRATRTQIPQLLRWAEPLGERTWAIESAGGLGYLLAQQLVAAGETVVDVPATLASRIRVLGTGRSDKNDPNDAWSVAIAALRARSLREVAPADHAEVLRLLAKRNIDIGKHRTRVVCRLHNLVMELSPGGIAKELNASDAVALLERVRPATPVERARHDLAAELLADVQRLDQQLKDSHRRIRTAVAASQTSLTQLFGIGPIIACYLIGFTGDTGRFATRDAYAAYNGTAPVERSSGGRIVHRVSQRGNRRLNHALHLAAICQIRQPHSEGRAYFERKLAEGKTKKDAIRSLKRHVSNAVYRQLVTDAERAKA

SEQ ID NO: 425647 - protein, 346 aa, unidentified
MCSLPVYVGLDYHDSSVRVCVEDTDGSELGNADRANDWKTIADFGDRFGRPVRAAIESCCGAADLAEELVSCAGWSVALAHPGYVQRMKQNPDKTDCQDAQLLADLERVGYLPRVWLAPRYIRELRHVVRYRLQLTEQRRATKLRLRALLREQRCHAPEGWNAWTKAWQQWVRQTAELSEQGRWLAKQHLRELARLATRIRQVEKRLEHLTANDVEVQRLQQQPGIGPVTAWMIRAEIGHFDRFRTGKQLARFCGLSPRNASSGQRQADAGLIRAANPALRTVLIEAAHRLVQYDPSWRKFAQRLRARGKPGSVVAAAVANRWMRRLYHEMKTPSGELAVAVGPAR

SEQ ID NO: 425648 - protein, 359 aa, unidentified
MDAQEGAVRRIIGGVDTHKDLHVAAVVDEQDRVLGTQSFASTRQGYRQMLAWMRSFGEVQRVGVESTGSYGAGLLRFLQQAGVTVLEVTTPDRQDRRRRGKNDDFDAQNAAHAAFAGIRTVTPKSRDGMIEALRVLSACRKTAVTARRIALQMIQNTIVCAPESLREMLRRMTRMQLVRTLAAWRPDLTAYRDVEAAYRISLKSLARRYLELHDEIADLDAMIAAIVDELAPNLVARNSIGHVGAAQLLLTVGDNPQRLRSEAGFAALCGVSPVPASSGKTARHRLNRGGDRAANSALHIIAIGRLRTDARTQAYVAKRIGEGHSKLEAIRCLKRYIAREVFTLIKQRQREINQTRIAA

SEQ ID NO: 425649 - protein, 415 aa, unidentified
MKGTEDTRQIERYIAPDIHKEYVLAGGQNAKQEWVMPPRRISMAKFREWASANLQEGDAVVIETTTNVWDIYDSVAPLVTRTVVAHAGAVRQIAEARVKTDKEDVKRLIRLLIADIVPEVWVPPVEVRELRGLISYRNRLVKTSTMIRNRLQSLLHRHNILLPKGSLQDAAWWQAQQMSGLEKMQIQQELVLLEEIDKHKAEVDAELGRQCLREPWGKQAVRLLQLPGFGVVMSMIVLSAIGDIQRFASAKHLVGYAGLGAGVHESGKEHIEKRITKSGRKELRWALVEAAWQAIRISPYWKEQYEKYLRRMRRPNQAIVVIARKLLVAVWHVLTKEETDIHASEEDLAYKMLVLAWDLDENVRLGLTYKQFAKYALMKLGIETDITRFVRRNVPRRIAPRAEVLARMEELGLTC

SEQ ID NO: 425650 - protein, 310 aa, unidentified
MGKEIIEFEQHIERGCGMDVHKETVVATVSGQGIKTETRTFSTITSSLKSMAQWLKKNGITHVAMESTGVYWKPVYNVLEKDFEILLVNARHIKNVPGRKTDKADSKWICKLLRSGLLKGSFIPPQDIRELRDLTRYRRKLTEQIAAEKNRIQRILEDANIKLSSVVSDIEGVVATRLIEGLLKGENVGELVKEHYHGKLSASREELKEAITGFFTNHHRFMITTIKSHIGYLEQQIDQIDIEINKKVEPCRELIELLQTIPGVGKEGSVGIIAEIGTKMDVFPDEHHLSSWAGMSPGNNESAGKKKVQE

SEQ ID NO: 425651 - protein, 374 aa, unidentified
MNNNTLYVGCDVSSDDNYFCFLLGDGTKLDTKCFDNNKSGANKLVKLILKHLETNSLSALIFGVEATSNYHFHLLNFIAYNELLADYDVKVYQLNAKIIKNFKDAYSDKSKTDKYDAFIIADKLRFGRLPEEYTPFNEYEPLKRLTRTRFHLAENLRREMNYFISNLFLKFSEYKKLPFSNTFGATSVALFTEFDVEEIADLSIQELIDFLVEKGKNRFSDPEGYAKEIKRIARNCYNIDRDIQDAVNLTLETSLDTIKALKSSLKRVNKAIEREVSKFQQTLDSIPGIGPIFTSGIIAEIGNISNFTDEAKLAKYAGLVWNHKQSNDYKSDETGMSKYGNKYLRYYLIQAANSVKNYCPEYKDYYSKKAQRVN

SEQ ID NO: 425652 - protein, 386 aa, unidentified
MLDAPRPALAAIRTDLGAIFVSLELSRRTWLITSLSPGAGEKMSKHAVAAADVSGLLQRFAELKRKAAARTGQDFRVIVIQEAGLDGFWIHRVLEAEGVESHVVDAASILTSRRRRRAKTDKIDGETLLRTLMAYLRGEPRVCSMARPPTPQEEDRRRLCRERRTLMAERGRHINRIKGLLFAQGVFGYEPLLKRRRERLGDLQTGDGRPLPARLKAQILRELDRLEVLLAQLKALQAERDALLGSARADAASPVASLARLKGVGPEFATILWSEGLYRHFDNRRQLAAYAGLAPTPWKSGQVDHEQGVSKAGNPRLRTAMVELAWMWLQHQPTSALTLWFQARDQALGGHKRKTTIVALARKLLVALWRYASAGVVIEGAAIRAA

SEQ ID NO: 425653 - protein, 346 aa, unidentified
MIPVASDVHKGRCWMAMIPPGEELKMLEPIECTREAWRQRLAELPPEAEIALEVSTSGYFVMTVLEEAGWRERAHWVHTAGIDSLRKQKSDRLDTRRLVKKLAVHDVEPLPEAWFPPPPIRALRLLARQRCGIARLRAQTKNRVHSLLEMHGLRPQRCVFTAKGRAWIQQQALSSAAQLCFDRFFRLYDFLSAERESSEGELGAAAAAFPQVARLQTIPGLGHMLAAVIWSEIGDLARFDSADALVNHTGLVPSSYDSGEVSIHGPITRQGPGWLRWALITAANALTRSKSPLGQRYWHLRRCHKHPNVAKAAVAGSVARCVYGVLKHGAPFQAERWGRRAGKLGQ

SEQ ID NO: 425654 - protein, 346 aa, unidentified
MLHVGLDLSRKQVEVCLISDHGELIDRLEATPDRDGLHGLACRVAVYGEPVRAVVESMNGARFVHDELVAHGWEVLVADAQKVKGLAPLACKTDKIDSRVLAELSFRDLVPAIWLPTLELRREREISRWRLHLVKHRSTLKNRVHSTLITFGHQRHMSDLFGVAGRRLLTELDIPEPWRSHVDASLVLIDDLEARIAAIAKDLRRSGADHRYVPILMTAPGFGWITSYTVAGELGDISRFSTPMKLVGYTGLCPRVKQSGQMDQRGPLSKHGPKYLRWGVMEAAIAASTHPLYRERYQRTKRRLGKQRGPKVAQIDLARQLTEAIWYMLTRDQPFAPAGAIIRLAA

SEQ ID NO: 425655 - protein, 316 aa, unidentified
MTADPSRPVAGIDVSGERLDVCLLPGEPVEPVPRTPEGCRSLARQLHRRGVTLVVVEATGGLEVMLVAELALAEVPVAVVNPRQVRDFARALNILAKTDRLDAQVLARFAKDVRPEARPIPDAQQRELAELVDRRRELIEARTAERNRLERVGSKAVRRSIQAAIAFLERQIDALDDELAGRIKNSPLWREKDELYRSVPGVGPATSHMLIAALPELGRLGHPQIIALVGLAPFCKDSGAMKGRRAIRGGRKPVRNALYMAALVATRSNPVIQAHYEELKKRMPLKSALVSCMRKLLIILNTIAARNTPWKYSPQP

SEQ ID NO: 425656 - protein, 422 aa, unidentified
MAAMNEVVYVRCCGLDVHKETVVACVRVVGSNGCVDQQVRTFVTTTRGLLELGDWLAEQNVAAIAMESTGVYWKPVWNLLEGRMNQPSQVMNLMLVNAHHIKNVPGRKTDVKDCQWIAQLLAAGLLSPSFVPPRPQRELRDLTRQRTQLIGDKARVANRLQKVLEDCNIKLASVASDVLGVSGRAMLKALIEGKMTPQQMADLSKMRLRTKIPQLAEALNGGVTAHHRFMLKAVLDQVEYLEKQIGWFDERIEEVMSPLELAAVQRLDEIPGFDKRAAQNVLAEIGTDMKRFPTQDHLCSWAGISPGNHQSAGKRKSGRMTEGNKWLKRTLNQTAWAASNTKASYFRAQHQRLSRRRGVKRATMAVAHSQLEVIYHMLTRDTRFEDLGADYFDRQNTDRLRRQLIGRLQRLGCKVTVETEAA

SEQ ID NO: 425657 - protein, 347 aa, unidentified
MNYIGVDCHISTLDFAVVNERGKLKDKACVNTSIKGFMEFVRKVPKPRKIFIEEGALASWLLETSLRYGEELIITDPKINKWIGKSGIKEDDIDAEKLAQLARGGYIKEIYHPVNKKRRFKELVFAYHDTVKSQTRIKNKLKARFRMDGIKCSGATVYSEKYRDQWREKLPKNQIAHLIVEEYWNQLYQLQEAKKKLKRNIEIESKQYPEIKRFIKVPGVGIINASTIFAIIDTPHRFANKKKLWLYAGIGLAKRSSGGKVYSEKLTREYNRQLKNAVKKSVESAIFAKGSQFKRQYLRLTYEQGLPSHKAKLTVARSLLATLYGMWKHGKDYDPDVYIKREEGNKK

SEQ ID NO: 425658 - protein, 303 aa, unidentified
MADIDGVAGIDAHKHTFTVAVLDGRGGRCGIESFPTAPDGLTEVLALLDSFGFAIGRIGVEGSAGLGRHVAAFLVAAGYDVREVQANRTAERRRRRRRHKTDREDAEAIARETLADAGLPPAGKQRRPDPCWDELVAVRNRRKSLINQRVRLLNEAEAVLTSLPLTIRAVLPPTSRVRPRLRALDRGAASSIQITAADRVNLAWLVEAAGDIARLDARVTELDHKIPALLGRLGCTLTDEYGIAAVGAMELLVEVGDPTRFATEAQFARWCGAAPVAVSSGEGDQAPTHHRLDLDDRFQGQWS

SEQ ID NO: 425659 - protein, 342 aa, unidentified
MRFIGADLHKKSITFCVVEVVQGKTIVVQRARILCQDTSRIEKFVARHAPCLLVVETTIGYEWFVQLCEPIADRVLLAHAGKLRVIAESTRKTDKKGAFVLAEFLAKDMIPEAWHPTARVRQHRALVRRRQKIQSRITSVKNTIRGILTRYNADRQDIFTRHGWEVAKEFDLLKEDRWVMDDLWDELLEHSARLDKVGKRLETFATTAPALEAEARAVLDTMPGVGPVTLETVLAELGDWRRFDNADSVVAFAGLNPGVRSSDGKRYDMKLTKRGSPLLRWIMIQLAHRVKRTSARWQRMFEQLSRRTGKKKATCAVARRLLLVMYAMLRDGQAYRPPAVAD

SEQ ID NO: 425660 - protein, 301 aa, unidentified
MCVTVVILSGTIHSKAMRRAQLLPFFTNRPPSRIVMEACGSAHYWARKLSALGHDVRLIAAQFVRPFVKSNKNDTADAAAIWEAAQRPGMRFVAVKTEEQQAMLALHRMRQQLVRFRVMQVNQLRGLLYEFGVVLPQGRRTGIAAAKIALADLADQLPAMLTDGLQDQLSRLLALDEQIQRIEQRIMEWRRCDEACRRISDIPGVGLLTATAAVAVIGNARTFKSGREFAAYLGLVPRQSGSGGKVKLGGISKRRLPGQAWQCHHRRYVQPWARRRQCTLPAPTAAPKTLPTSKPAAGGRQ

SEQ ID NO: 425661 - protein, 356 aa, unidentified
MNTPHYIGFDVHKKTISFCVKTAAGEILEEGVVVSQRPALQQWAMARRQPWRGALEATLFSGWIYDTLKPYSAQLEMAHPAKMKAISAGKKKSDSIDARTIADLVRCNLLPACYVAAPRIRELRRLLRYRSLVVSESVRMKNKMAGLLMETGAVYVKEKLHGKKYFASLLEELEEVPESVIDLLRTSRGALEMFESTQRRLVRELLADPELAERVKRLMTIPAVGEITALTWALEIGDPHRFRSGSEAMSYCGLTAALKSSAGKQQRGPISKQRNHWLQSTLIEAAKLAPRWNPQLAALHARELERGHRNRATLAVARKLVTYLLAVDKGGQSFQLRALSPEDGAEKEGAQKIKTA

SEQ ID NO: 425662 - protein, 322 aa, unidentified
MKHSIEKPKVFFGADVASRHIDIACHGSQQVRRIANDAEPLAAWLKTLPEGAVLAMEATGRYHLRLARLAHERGLRVYVLNPRDVKHYARGVGQRGKTDRLDARLLARYVEREHAELHAWQPPSAPAQRLGELLHRRAALVRHRTALRQSFAEDASLAELLGQMLAPLQQVLKALEAQIARAAAELPDGAAALERITSVPGLGLLSAAALLKLFQRLGGAGADAAVAFTGLDPRPMDSGDKHGVRRLSKRGDPELRRLLFNAAMAASRTAAWRAEYERHRAKGLARTAALVALARKLVRVAFTLFKTQTLFDPRRQQQALAA

SEQ ID NO: 425663 - protein, 344 aa, unidentified
MATWYIGADVDCNTTVLAVRRGGSVVGRYRVPTTIPALCEVLAQIPNPKVMTFEEGPLADWLYRNLRDRVTDLVVCDPRRNRLIVGDGDKTNPMDAEKLAELLQGGHVRPVYHSDRVDRAELKQWVALYHDRVEEAVRQVNKIRGRCRMHGVRPVRGFLSNEKARDAWLKGLRPGALAGQLRVLFLGYQAAAEQVRRCRQELARRSRREAMVRRWQQLPGVGLIRAVTFLAYMDTPWRFGSPKKRWKYCGVGLERKASGTDARGRDKPGKVRVCRACNRRLKSVVLGATLSAVGQGGNKFRDVYERLVRKGVSLGNARRAAARKLIDTMTGMWKQGSDFQPDLA

SEQ ID NO: 425664 - protein, 483 aa, unidentified
MTPTTQEKNRKSTEPLTQRHWNEMNRKQRREMMRKIQSEDLSLEVVHPDAAGIDIGNESHYVAVPQGRDSLQVRRYGCTTDELKAVANWLKLCGIRTVAMQSTGVYWIAVYDILEAAGLEVYLVNAQQTKNLPGRKSDVQESQWLMKLHTYGLLRNSFRPTQEIRTMRTYWRQRNDLVRAAASHIQRMQKALTQMNIQLANVLSDISGATGQAIIKAILAGERDPHKLAALRDYRVKANEEQIARYLQGNWQADLLFVLKQEQEAYEFCQQQMAACDQQLEQYLQQREDQSQGASLPEERRKARLKKKKGNAPQFELRAELFRMTGTDLTQIDGIDVMTATTILSEAGSDMSKWETEDHFVSWLRLCPDNRISGERIIGKRRLPTNNRTTIALKMAAISLRTSNTYLGAQFRRLRTKLGSPIAIKAMAAKLARLVYRMLRYGMKYVDRGVEFYEAQHRRLLIKHLKCNAAKLGFRVVEAPAAA

SEQ ID NO: 425665 - protein, 387 aa, unidentified
MPASGRRPGQVSVQVSLAAIFVSLELSRSTWLITSLVPGGGDKMSQHSVRSGDIAELMTHLAKLREKAHGRAGASFPIIAIQEAGLDGFWVHRVLEQAGIESHVVDAASVLTSRRRRRVKTDRIDGEALLRTLLAYKRGEPRVCAMVRAPSPEEEDRRRLCRERKTLVAERVAHVNRIKGLLFAQGIADYEPLRGDRRQRLEVLRTGDGRPLPPYLKAQIGRELDRLELLLEQLKAVEAERNAVLEPTNDAAPLAVQALAGLRGIGPEFTAILWSECLFRSFRNRRQLAAYAGLAPTLWQSGSVQHEQGVSKSGNPRLRSTMIQLAWLWLRHQPTSELSLWFRERVKRNAGRGKKTAIVALARKLLVALWKFSSSGVVIEGAMMKTA

SEQ ID NO: 425666 - protein, 370 aa, unidentified
MNQRTTLFVGLDVHKDSIAVAHVVEDRSADVIYVGAIGTRQSDIDALVRRLQSKAARLVFAYEAGPCGYVLYRHLSRKGLQCLVVAPSLIPKRAGDRVKTDRRDAVELARLLRSGDLTPVYVPRVEDEAIRDIARAREDAIADVKSAKFRLQAFLLRLGLHYSGRANWNAAHLRYLAKVVCPTPAQQIVFQESVRAVDQQVERVQRLDAELEEHVPSWRLYPLVQALQALRGVQHTVATIMVAEIGDLTRFDNPRQLAAFLGLNPSESSSGERRRQGSITKPGNGHARRALIEGAWAYRFPAKVSAHIQKRIETLPKPIQDIGWKAQLRLCKRFRRLTARGKHPNVAVTAVARELAAFMWAIAREVPITA

SEQ ID NO: 425667 - protein, 461 aa, unidentified
MEKASTAVFEELRRNVAGIDLAWRADHYVCGPRREDGGCEVVAFGTTTPELHRMLRWLLERNVESVAMESTSVYWIPTADLLEAAGIEVVLVDAREVRMVPGRKSDVQDCQWLQKLHSCGLLRGAFRPPEAVAAVRSILREKDTMAAMRTQAIQQMQKSLDQMNIRVHHAVSDIDGKTGTEIIKAIVGGERNPLKLAGLRDKRCKKSEREIADHLTGTWREEHLFNLGQAFKTLQFLDERIAEYDDKAQGMFALLANTVDTSDTLPPPSPMPDTKPTAKERTDSAGKGNIQRFMGFDPTVIPGIGYNTAAIIASELGTNFDRFPDERHFASYIGLAPSLGKSAGKNVRQKRCKNTSRVGRALRMAASTVYRSQTELGAFFRNVARQTDKKTAIKATARRMAHMIYRGVKYGKEYIDRGAEEYEARLRERTVRTVNRLIKSYNINSSEIAGASASLAALAAV

SEQ ID NO: 425668 - protein, 377 aa, unidentified
MLTTQQETLTEVGVVLGVDTHLDVHVTVALDELGRHLDEISIPANTRGYDTLVEWGEKFGPIICAGVEGTSSYGAGLARHLSRVGIKVMEVERPKRHQGSSRRPGRNGKSDRLDAEAAARAVLAGEVAGEPKSGDGRVEMIRALRTARRSAVKARSQATNQLKSLLVTAPDELRDRLRRLSTKELVTAAIRFRPGALPETPEEATKFALRSVARRYRSLSEEITELDIQLKRLVAEVAPDLPTLLGVGTDHSATLLVVAGDNAERLGSEASFANLCGVAPIEASSGKVVRHRLNRGGNRDANRALHLICVVRMKYDQRTKHYVARRTAEGKSKREIIRCLKRYVAREIYRVLVSGDSPSPPTAPSPIESRPKVVTTI

SEQ ID NO: 425669 - protein, 357 aa, unidentified
MLEGLESLSGSVGQSGVFLNPNSCMGFEPEPSKEGSWMMAQNDLIVAGIDVAKDKVDVCIRPLSLRRTFASTTEGRRELASWLRRKKVGKAVMEASGGYEREWAKALRDAKIEVRIVDPKRVRDFARSAGRLAKNDTIDAEMIAWFAETFDEAPGQAHDAVREELAQIVNARLGLIDLQTRLLNRDEHAGPEPVQKMHARMLKKIAVEIAKLETVIAAMIKATPRFVELAEIIESVPGLAETTSATLIAKMPELGQVNNKIGAALLGAAPYDDDSGCRRGERHIKGGRRKVRNLFYMACLGAATQHNPVLKAFYDRLIAKGKEKKVALVACMRKLIVILNIMIARRQKWDPNLHVLG

SEQ ID NO: 425670 - protein, 344 aa, unidentified
MDNHTQYSGFAGVDLAKKVMQIHFVTEDGEITDKSAKRAEFLDFFRNRGKCLIGMEACGSSQDWARKLEAMGHEVHLMSPKAVKPFVSGQKNDHNDAIGIYKAMFNGVRRVPVKSTEIRDLQTLRRIRSQVTKDKVKEINHVRGLLAEYGIVMGKSLNAFNKDISSALEILTERGDVSPLVAEELRTTVEAIKAKIERQKKLDREIEQLARGCKNYENFLKTPGVGPFTAAMLCVLLCDPSIFANGRQFAAYIGLAPRSRGSGGKNYVTGIPSKFNCDSESRAVLVECAQAIARCKNKSLWVEEILRRKPKKVALIAIANKLARQVWAMANKGENFKQMAILTA

SEQ ID NO: 425671 - protein, 379 aa, unidentified
MSTPNFFVGLDVHKDTVTIAVFRNRDPEPMRVDRLPNEHKRLRRYFQRLSAEGSVRACYEASGAGYVLQRALTEWGIDCELAAPSLIPRRPGEHRKTDRRDAIKIARDFRDDRLVLIHIPTEADERVRDLVRCRETFQREIVNSRHYILKFMRRRGFIYREGTNWTQRHLNWIRQVLAPGTLAEEDAVVLGEYLALLEYKLQRRDELDRRIEALALTPRYKPIVDRIRCFRGFKTQAAMVLATELGDVRRFESPRQLMAYLGLVPGEHSSGDRRRLGAITKAGNARVRHILIQAAWHYRRRPTVGATLRRRQQGQDPDVIAHAWKCQHRLYKVFHRLAAKKPRPVAATAVAREMVGFLWAVLNDIDVAQLQDSEVSRAA

SEQ ID NO: 425672 - protein, 419 aa, unidentified
MKVVYPICCGVDVHKKFFVATIIKTEGITPKYSKKRFSTFNNEILRFKAWLVENNCYDVCMESTGKYWIPIYNLLEDKINVVVASPKWVRAVKGNKDDTKDSKWIGDLFRLGLVPGSFIPPKPIRILREYTRYRYKLVSCKSSEKNRYQNSFTVCNVALDSVVSDMFGKSASLITDYLIKSDDFNPEHCKTLLYRSLKKKADAVIDSIVGYEIAPAQKERMIMVRSHLEYVEKAIEVMDAGIDNLVEPYECHISLLCTIPGVDRRSAITIISEIGTDINQFFSSKKLCRWAGLTPGNNESAGKKKSVRITRAGVYLKPALVQVAHAAVKSKDSPYYKNKYERICKRRGKKRAIIAIARMILTAVYHMFKTGEVWNPVDLFKVDMPPILMEKQKKKAIDNAIKLLASQGFLVVANPPPVA

SEQ ID NO: 425673 - protein, 404 aa, unidentified
MYNAVGIDVSKGKSTVAVLQPGGTVIRKPFDVSHTSQNLNELADYLSSLDGTTKIVMECTGRYHEPMVRALSEAGLFISIVNPHLIKNFGNNSLRKVKSDPADARKIARYTLDNWTELRQYSGMDNTRTQLKTLNSQFSFFMKQKVAAKANLIALLDNTYPGVNKLFDSPTREDGSEKWVDYAYSFWHADCVRKIGLKAFTERYMSFCKKHHYIFQQDKPEKLFNASKELVAVFPKEKTYKLLIQQSIQQLNLASEHVERLRREMNELASTLPEYSTVMGIYGVGKTYGPQLIAEIGDVSRFTHREAMTAFAGVDPGVDESGQHKSKSNRASKVGSARLRKTLFQIMTTLLQNAPEADPVYRFLDKKRSQGKPYYVYMTAGANKFLRIYYGKVKECLRNLEQTE

SEQ ID NO: 425674 - protein, 406 aa, unidentified
MEVLHECCCGLDVHKKSITACIITPKGKEIRTFATMTQNLIELVDWVKSQHCSHVAMESTGDYWKPIYNLFEPEDLHPMVVNAQHIKAVPGRKTDVKDAEWIARLLRHGLVQGSFIPNREQRELKEIVRYRRSIIEERTREVNRLQKVLEGGNIKLSSVASNVLGVSGRNMLEAMIKGERDTSVLADFALKKLKAKKEQLKLALEGRLETHQLHMIEKQLAHIDYLNELIGELDEEIEKRMTPFTEDLKIVDSIPGVGKRTAEQILAETGVDMSRFPTPGHLCSWAGMTPGHDESAGKKKSTKTRKGNKKLRSALTEAAKAASRQKNTYLSAQYHRIAARRGKNKAAIAVGHTILSLVHILLTRKQEYVDLGYNYFDERKKDILIKNSIKRLESLGLVVSVQVQTA

SEQ ID NO: 425675 - protein, 347 aa, unidentified
MRDDMYYIGLDVHKRTISYCVKDAAGHVHQEGKIGSTRRELDAWIKTLPQPRTIAMEATIFTGWIYDHLLPHAEKVKVAHPLMLRAIAAAKKKNDRIDAGKIADCLRCDFLPECYMTSTEIRDRRRTLRYRNLVLKQMVQMKNRISGLLMETGVSYNKQRLHKLGYFTELMSGNEEVDESIRPLLKLSRETIVRSQRLDYALVSSLERDPLLAERLKRLRTIPGVGPITALTWALEIGDVSRFQSVKQAISYCGLCSAERSSADKLVRMPISKQRNKHIQQTLVEAAKLAPRYSHELALVYERERQRGNRNRATLAVARKMVAYMLAVERRKQDFVLTGKCSGSAAA

SEQ ID NO: 425676 - protein, 444 aa, unidentified
MKEFAGGVGQAGYMDRIRALTPQQCLVVPVDVGKRTAMMLVADHFGHVVSGPVEFALTTSGLAKFVDVVVRAQQRTAAGSVRVGIEAAGHYHWALAATLRAGGFDVVELNPYHVKMARAQMGQARLKTDLRDCLAMVELLVRGQGWPVHRRDDATAEQAAMVAHRRRKALAAKVLGSQVHALADVAFPGLTGCFTTGLEAKALRMLLATLPDPVRTSAMEPGQLVAHAAQHGVRMLRPKAAQVIAAAGEAMCVPNTQREVAARLLIADVAAFEALRGDLVACDQRLAELLPDTPAGVLTSIPGVGVVTASSYAAALGDANRFTNAAAAYRFSGLTPSSYESAGRRAATVRISKIGSVELRQAMIALGIGITLHHPEFAAYKARLQASGKKPIVATIAVAHRAHRLAFAILRSQKPYDATTWAASTSRSQCRDRPVTAAEATRTT

SEQ ID NO: 425677 - protein, 415 aa, unidentified
MKAILDICCGLDVHKETVVACLLKGNLDSEPEAETRTYSTLIPNLEQLKTWLIEENCRHVAMESTGVYWHPVFNVLESAFDGTIELMVSNARHMKNVPGKKTDVKDAEWIAGLLRAGLLRGSFIPSQSIRRLRDLTRYRKSMVEEISSQKNRIEKHLQSCGFKLSTFLTDIFGVSGRGIVDHLAKFGHISPEEVDPLVKKSARAKLNDIKLAVNGNMDVLQRDFLKMLLKHLDDNREHLQIIDQKIDQELLKCQRQLEQLDGIPGINKTAAAAILAEIGTDMAQFKTAENICSWAGLTPGSYESAGKKKSSRTLNGNTYIKRILCEAAWTITRMRNTYLSQWYWKIKQRRGGKRAIVALARKLLVIIYNMLKNNTNYDENCFELVEAKQEKYKIKKIMAEARKLGLEVIELPKIA

SEQ ID NO: 425678 - protein, 415 aa, unidentified
MTKKLDDKFVSIIHPICCGLDIHKRSISACLILEDGTFELREFRTFTDELFKLCDWLLEHNCPIVAMESTGVYWRAVHNILEGLMEVILVNARHVKNVPGRKTDISDCKWLAGLVRHGLVKGSFIPQKEVRQWRELTRLRRTYTESLGDYKKRVHKLFETANIKIDSVLSDLFGVTGRNLIFLLCDSESELTLEAIQARAKGSLKSKVKELHQSIQGFFEEHHRFQLIALMQTIEGFEKRIGQITERLTQLMAPHQDILDRLDDIPGIDKVAAQSILSEIGVTLDAFICTAALASWAGLCPGNNETAGKRKSGKNSVHKHPFKTILIQIAWAAVKKKGSYYKDKYYRLKCRRGSKKAIVAIAHRISKAIYNIIKFGDTYKELGENFLLMKNRAIRLTNLRKQAKQLGFLLVPFES

SEQ ID NO: 425679 - protein, 412 aa, unidentified
MEGETVIAGVDTHKDVHVLCLLDGLGRKIWSGSFGADPEGYDRLAEAIGDPGSCMVVGVEGTASYGAGLTRRLVELGYNVVEVLRPKRDKARPGEGKSDPLDAERAARKAASGRGCSVPKSQDGWVEAVRQLYVARRLAVATSTSCVACAKSMLTTAPSALRERFRGRERPKDLMPLLARGRKAGDALEESVLASLRSVAAVWKEARSQVESLDERIRALLEANAPALLGVEGCGTTTAAALVVAAGDNPGRLKGEAAFSMLCGASPIPASSGKTERHRLNRGGNRQANWALYEIAIKRMAYDERTKRYVARRTSEGKSRREAVRCLKRYIAREVYRVLMDPNPDGAAPEGPELAKMRKAMRVTQKQAAAGLGMSAASLGHLEHGRRRSTKLERRYYELLCELKGALPQTAS

SEQ ID NO: 425680 - protein, 461 aa, unidentified
MAESRARRPRVSRRASPTVLERINPDAAGIDCGGSTHVVAVPPDRDDHPVQSFRTFTTDLHRLADWLVACRVTTVALESTGVFWIPVYEILEARGLTVQLVNARHVRNLPGRKSDVSDAEWLRDLHSVGLVRGSFRPTADIVALRTYLRHRHTLVELSAMHVQRMQKALVQMNLQLPSVISDITGETGLRIIRAIVAGTHDPAVLATYRNWRCRASPAEITAALTGHYRPELVFALRQNLELYDACQRQIDVCDQAIEAHGRELTAAITPPGPLPPARAARQRIEPAFEVRAVLHHLTGGVDLTQIDGIGAYTALKLIGEIGTDMRRWPTAQHFTSWLTLAPKNKVSGGRLLGSQTQPSANRAANAFRLAAAALGRTSTALGAFYRRLAARTGKPHAVTATARKLAVLVYHVLNGDFVYKDPGEQAYEVHQRARRLRQLRHRATRLGFALVDQHTGEVFAG

SEQ ID NO: 425681 - protein, 418 aa, unidentified
MAMKIVRFNCCGMDVHKNLVVATIGITDRKTNVTEYFQRSFSTLNSDLYRLKDWLRSHHCSDVCMESTGKYWIPIFNILEDEINVHLTHPKYVKAIKGKKTDKKDSKWICDLFKHDLIKFSFIPPKEIRELREIARYRYKLVCMRSSERNRYQNCMTVSNIGLASVVSDPFGKTASNIMKEVMKSNVIDDDKILKLVHKNCKNKDKILDSLHGYRIESDQRFKMEKSLDHMEYLDQLIDSCEVELIKRAYPFRRSFQHITQIKGISALSAILIISEIGIDMSQFGSDKQLVSWAGLSPANNESAGKKKSVRISKAGQYLKPLLIQCALSTIKDKTSYFGRKYSNIKKRRGHKKAIIAIARMMLVSIYHMILTGEEFNPSDYESFMDPKPNANPSLTVEKALNFLKQSGIDISSIPINL

SEQ ID NO: 425682 - protein, 427 aa, unidentified
MHMAAVDPGCTDTPVRAFGTFTQDLQELADWFKACGVISVAMESTGVYWIPAYEILEQRGFEVILVNARYAKNVPGRKTDVSDAAWLRQLHSYGLLRGSFRPDAEIATLRAYLRQRERLVEYAAAHIQHMQKALMEMNLQLHHVVSDITGATGMRIIRAIVAGERNPDVLATYRDVRCHASIETIRAALVGNDRAEHVFALTQSLELYDLYQAKMLDCDRRLESLIGALNNKGGKPVGRLSKPRVKTKQVNTPSFDVRTALYGVLGVDLTEIHGLGPSLALKLVGECGTDLRAWPTAKHFTSWLCLAPGNKISGGKVLSSRTRRSSSRTAALLRLAATTVGRSDTALGAFYRRLALRAGKSKAVTATARKIAVLFYNMLRHGMAYRDPGADHYEEQYRTRVVANLTRRAKSLGFVLQVDPGGQLAVS

SEQ ID NO: 425683 - protein, 382 aa, unidentified
MDTLSNTVAAIDSEQQKAKLFVALELGQATWVVALHSPIADKISIYRIEGGDTDQLMALIEKKRVQAARRLGRAAQVVSCYEAGRDGFWLHRFLIRRGIDNRVLDSASILVDRRARRAKTDRLDARALLRVLMALVRGEEQVCRVVRVPSIAQEDERRLSRERERLLHERNSHIARIKGLLILHGVRDYRLIERDWKERLDAVRTTEGQALPARAKTEIERECRRLWLAKQMLAEVEREIEQMIAHDGAVAGKLIQVRGIGQTFASVLTHEVYYRSFDNRRQVGSYLGLVSIPWQSGSVRRDQGITRSGNARARRCAIELAWLWLRHQPGSALACWYRTRVGTLTGRMRRITLVALARKLIVALWRYLQNGIVPEGAVLKAA

SEQ ID NO: 425684 - protein, 342 aa, unidentified
MNKVAIAAIDLGKNSFHLHAQDERGHELYRKKFTRVALVQHLANLEPCTVVMEACGGAHFMAQQAAKFGHTAKLIAPHLVRPYVKSNKNDFADAEAICEAATRPSMRFVPAKTQAQQALAMLNSTRDSFIKDRTATVNRIHAALLEVGISLAPGFKSINELTALLEASSLPDPIKKLLIRMHDHFDYLHEQIKSLDKELECQAAEDDLAARLMTIPCVGPITSSALAAELGDGKQFKCGRGYSASIGLVPKQHSTGGKTVLLGISKRGDRNQRRLLIQCARVYLMHLDRQKGVLAEWVRHLIATHHHSNHVVCALANKLARIAWAIAAHHTVFDAGPSAMNA

SEQ ID NO: 425685 - protein, 468 aa, unidentified
MKTVPEEIPDEEHEQIWQRVCAIDVAKESGMVCLRLPHDDRPGRRVSKVWQVRATTAAVIELGDHLVCQQVQKVTVESTSDYWRIWFYLLEAAGLDVQLVNARDVKNAPGRPKTDKLDAVWLAKLTEKGMLRPSFVPPAEIRVLRDYTRLRADLTHERTRHWQRLEKLLEDALIKVSAVASTMDTLSVRDMLEALIARQRNPWILAGLARGRMRSTQAALQEALTGRFDEHHGELARMLLDQIDALTTQTEQLTIRIEQLIAAIPAAQPTPGPGESPGEHPRNPAGAEHPATTDADAGSATEPVTRLNAIQRLDEIPGIGTDLAQIILAEVGLDMSRFPTAGHLVSWTKLCPRTIQSGTMMKSGKTGKGNPYLKGALGTAAATAAKTHTFLGERYRRIVKRRGKLKALVAVARSILVIIWHLLNDPTTRFHDLGEDHHRNRIDNSRATRNHVRQLEALGYTVTLTQAA

SEQ ID NO: 425686 - protein, 391 aa, unidentified
MIFVGIDVAKDTHYAAVSDDSGAVLVKPFAFQNNAEGFCLLLKKLSEFDRSKLLIGLESTGIYSENLICFLYESGFRLAVINPIQTATLRKTAIRKTKTDKVDTMLIIKSLMVNSYRLYSQRDADSLKLRTLCRFRQNLKKSKARMKIQLAEYVNLVFPEFGKFFKSGIHIAASYALLKKYSSPKEIAALRTSTLCTLLSKASHGRFGKDTAEALKSLALSSVGVKNPYISIQIAQTIAQIELLEQQIKDLNSAIEEAMESINSVLMTVPGIGAVNAACILGEIGDIKRFSKPCKLLAYAGLDPTVRQSGQFTAKSTRMSKRGSALLRYALINSAWQLTLNDTTFKAYYDLKRSQGLNHYGALGHVAHKLTRVIFKLLTSDTPFNPAKLVA

SEQ ID NO: 425687 - protein, 315 aa, unidentified
MSDMPCFVGIDVAKAQLDIALRPSGERWAVPNDASGVMTLVDRVQALHPTLIVLEATGGLERAVTSALATAGLPVVVVNPRQVRDVARATGQLATTDALDARALAHCADVIRPTPRPRPDAQTQELRALLGRRQPLIGMRTAEQNRLAGTNARLTKDIAAHMTWLNAAIATLDDDLETILRASPLWRENDDLLQSAKGIGPVCARTLLLELPELGTLTRQQIAALVGVAPLNCDSGTLRGRRMIWGGRAHVRTVLYMGTLVATRFNPQIKVFYERLLAAGKVKKVALTACMHTLLTILNAMLKHRTPWQPQEVQS

SEQ ID NO: 425688 - protein, 371 aa, unidentified
MRIGMDTSKSVFQLHGVDAAERPVLRKKLRRSQVLEFFRALPPTRVGMEACGAAHHWARQIGALGHEAVLLPPQLVKPYIPRNKNDAADADGICEAMSRPRMRCVPVKTAEQQAALMLVGVRDQLVARRTQLSNSMRGYAAEFGLVAAKGLDKIEPLLARIAADARLPELAKEMFTTLGADYAALGMRLSRVEARLRAWQRQDETSQRLMEVPGVGPIAAALLVMKVPNPHAFRSGRDFAAWLGLTPKDHSTAGKQRLGVITRAGDEALRGTLVVGATAVIQQMRRGRGRASPWLTGLVARKPPKLVAVALANKTARIVWKLMVSGECYDHGRAARARAERSAALTEGFALRSALAATALRGDAAATVRKP

SEQ ID NO: 425689 - protein, 386 aa, unidentified
MGITCGIDWAEAHHDVSLVDTNGDIIARTRIDTGAAGFTDFLALIAEHCDSVEDIPIAIETDKNLLVVALADAGFTLYPINPRAVARYRERHGQAGGKSDPGDAAVLAHVLRTDRHMHRPLPAISEQGRAVKTLARQHQEAVWALNQTVSRLRSLLLEFYPQAVQAFPNLKHRAATTVLAAVPTPAAAAKLTSRRVVTLLQRSGRGNHPALAEQILTLLRAPALRQPPQVETAYGHTATGLIAVLVAMREAVDALEAQLGQQFEAHPQAAILRSAPGLGPVLAARVLGEIGDDPERFTHPNNLRSYAGTAPVTMSSGRSHYVKARKVRNKRLAQNATSARSRCEPSCANSSSNRASGMQRGARVTTFGRYRPLRCPGNGSIGLWCA

SEQ ID NO: 425690 - protein, 309 aa, unidentified
MKQSVVYIGIDVAKAHLDVAWAGTFRRLPNERSGHAVLVRWIKQSATPVQLICEASGGYEQGLLESLEKSEVKVTLVQAVRVRQYARAAGILAKTDQMDAKVLAAFGSAMQPPPTPPLCAEQKRLRQYEAQRRHLSRVLVAEQNRLAQLSCAELRTLSRALISKIKKQIETIDTRIGDLIAQDQTLREKAQKLTAIGGVGVRTAALLLAQMPELGQLNRRQAAALAGLAPFNHDSGSIRGKRAIFGGRRALRSGLYMAALSAARFNPILSRFYRRLRTKGKPHKLALTAVMRKLLLALNQTLKPIPSLA

SEQ ID NO: 425691 - protein, 341 aa, unidentified
MAIEVSVVGFDIAKNIFQVHGVDRRGAAVLRRRLRRAQVPEFFRQLTGCLIGMEATRGAHYWARVLRGFGHDVRLIAPQFVKPFLKSQKNDANDAEAICEAVSRPNMRFVPSKSIEQQDLQALHRVRSRLIGCRTQLGNQIRGLLAEYGIVLPLHLSQVRKALPQLIEEENSLLSGMGRQLLAGLYEELCALERRIVAMEEQIHRIHHSNALCQKIAAVEGVGPVIATAVVAAIADGRAFHNGRQFAAWVGLVPRQHSSGEKQRLMGITKRGDPYLRMLLIHGARSVVYRAASNRTAEAAGSARSNKDWEQRKPASLWQTRTHASSGPCWLAMNHIGELRK

SEQ ID NO: 425692 - protein, 374 aa, unidentified
MKIVGCDFHPSWQQVAVFDPETGEIAELKLVNGDGEAERFYRELEAPALVGIEACGNSQWFIELLERLGHAVWVGDAAQIRASYVRKQKTDRRDAGHILKLLIESRFPRLWMPTAAQRDLRQLLIHRHKLVEIRTRVKNGLQHLALNRGVQKHSRLWSVRGRAYIEKLPLEGWTARRREDLLKLLAELDKHLDELDEAVTHAAEKHPQARLLMTQPGVGPITSLAFVLTVGDVSRFKHSNQVTSYLGLIPREHSSGGKQRLGSITKQGNRFMRQLLVESVQTVNRLDEGFRKEYAARCHHKPKGVAKVAAARKLAVRLYWMMRQNVGYPEIALIESSPRVALTGTSGTLGSPLRGSPDAASQVVMLNGRSRIQQ

SEQ ID NO: 425693 - protein, 443 aa, unidentified
MAATREAHRSRPRRRPRPRESLFVANWVGIGSMCSVRIAPALRVGDAFRAGSRCAIPRAKDDMSRQPAAPAAVLSALMKQKLTGKSIEQGSGEGKCNRVLKLGLDMHYRQVTVAMQEEAGAIKAVGRMGHDGFEHWVERKREAGWEIYSCYEAGASGYWLHRDLEQMGVKNLVVAPKAMGQDKAQKTDRRDSAELVDQLDRYLGGNRKALSPVAIPSIEQEQKRALLRYHRQIMADRSRYEARGKGLLCAQGIEVQGKWWQPQAWKELKTHGRFQTWMQTQLQGWRSKLLSAEQEQQKLRKQIEALAPALLPKGVGAYSAVALEYELKGLARFKTARALSSYTGLCPGIHSSDGRGKEGSINRCGNAAVRWNLVEMVWRLLKWQPHYQVVGQLGAALVRSKRARKRLVVKAARQLAIDLWRLETGRITAQELGLVMQPTSKAK

SEQ ID NO: 425694 - protein, 348 aa, unidentified
MVLIGCDFHPSWQQVCWVNTDTGETEEHKLVHAAGEAEKFYRQFAAPALIGMEATGNCQWFVELLAALGHEVWIGDAAKIRASDVRQQKHDRRDAALLLRLLEEGRFPRIWTPSSEQRDMRQLLIHRYKLVRLRAQAKNGLQHLAMNQGLQKKRRLWSKEGQKLLREVVLRPWASQRREDLLGVMALLDQQIQSLDLAVKKAAEENENAKLLMTQPGVGPVTSLAFVLTMGDVSRFPRGKQVASYLGLIPREYSSGGHQRLGSISKQGNRFMRMLLVEAAQVAVRCDPQFRSAYLHRCHEKPKGVAKVAAARKLAIRLYWMLRTQKRYPEIVHVESSSRVPLVVRHGG

SEQ ID NO: 425695 - protein, 445 aa, unidentified
MKVMHERVAGIDVHKKMVKVAIRSPGKGRWARKTDVVTFGTFWDELRAMARELRARGVTHVAMEASGVYSDPVYFALAEEGCFEEVLVVNPAHVKGLKGHKTDARDCARIAELLECGLLQGSWMPPQEIREMRDLVRYRQRKVQARTSEVQRLGKVLETAGIKLGSVASEITGVGPMEMIEALIGGERRGAVMAQRARGAARTKEKMAALARALEGRFSDHHAAMCRLITDQVRDLGEAIARVEAQITVKAAAWEREISLLKSIPGFGDATAWAWIAEIGPAPREWFSGHDKLASWAGLAPANHVSAGKRRNAGTTDAGAWIRPVLVQAAWAAIRVKGRLQARYDRLVRRMGGQNSPAARKKAIVAIAHTLLKIACAVLKSGQPYTEPGPDFYASREAPAQRQAYLQKQIQRLYPGCTVTVTITQPPATTAPPGTPPPGPTPKAV

SEQ ID NO: 425696 - protein, 435 aa, unidentified
MEEVTDEPLYRDRVCGIDIGKAGMVATIRVPSDKDPSRRAQETRSFGTTKKQVLALADWLRCWQVPAAVMESTGDYWKGPFYRLEAEGFECVLADAKQVKNLPGRPKRDPSDSRWLAACFERGAVTSCFVATPEFRVIRLHTRYRRDLTGERTREKQRAEKLLESAAIKLSSVVTDLHGVTGRDIMDHLIAGERNPKTLAQLARTRARRKIAELEEALEGAEFFADEHAALLKTMLERIDRVNAEIDELTAVIERLLAPYEEQLEQAESMPGWGRRSAQDAVAETGVDMTRFRTGGHLSSWAGKTPLDNQSGKRTGRAKSKKGNRYLAAVTGETAIAAGKTQTREGARYRRLARRRGKAKAQVAVGNTQLKVYHKLLSHPGMRYQDLGADYYERQRDVRRQIAHHVGKLGALGFEVTLCRTPEPQPDGTGQTQAA

SEQ ID NO: 425697 - protein, 342 aa, unidentified
MKQYVGLDVSQRETSVCVVDDAGKVLFQGRAKSDPGALTQLLRKRAPHAERIGFETGAMSSWLWHELKRVGLPVVCIDARHAKAVLSVRMNKSDDNDARGLAELVRVGWYREVKVKSTESQATRSLLVARSRLVAIRRDLENQVRSMLKEYGLQFGRSVCSQFRRKVRELVADGHHLLPVIEALLTIHEQVCREQEKFDRQIRSLAHEDETTRRLMTVPGIGVVTALTFRHTIDAPSRFRSAATVGAYLGLTPRRKQSGETDINGRVSRWGDRLLRTYLYEAASVLMHRTKKWSTLKAWGTRLSKRIGMKKAKVAVARKIAVLLHCIWVDGTSFEWGKEKAA

SEQ ID NO: 425698 - protein, 338 aa, unidentified
MEQVITIGLDLAKNVFQVHGIDAAGKVLVRRQLRRGDVLRFFGGLPRCLVGMEACATAHYWARELTKLGHTVRLMPPAYVKPYVKRGKTDVADAEAIAEAVTRPTMRFVAVKTADQQAALMLHKVRDLLVRQRTMLINALRGHLAEFGIIAARGPGGVTAAIISLHEAQDSLPELARVASHGLIDQLRIVRGEIARVEKRIVAWHRASNASRRLATIPGIGPITASAIAAAVPDATLFQSGRQFAAWLGLTPRAHSSGGKERRGGISKQGDGYIRRLLVTGATAVIRLARQGNASKTWAAKLLERKSARLVSVALANKTARIAWAVLARNQSYLAPAM

SEQ ID NO: 425699 - protein, 343 aa, unidentified
MYYIGLDVHKRTISYCVKDAAGHVHSEGKIGSMRRELDGWIRTLPQPRMIAMEATIFTGWIYDHLLPHAEKVKVAHPLMLRAIAAAKKKNDRIDAGKIADCLRCDFLPECHMATREIRDRRRTLRYRNLVIKQMVQMKNRVSGLLMETGVSYNKQRLHKVGYFGELMTTNKEVQQSIRPLLKLSRDMISRSQKLEYALVSSLERDPLLQERLRRLRTVPGVGPITALTWALEIGDYTRFSSIKQAISYCGLCGEEKSSADKVMRMPISKQRNKHIQQVLIEAAKLAPRQSHELALIHARELERGHRNRATLAVARKMVCYMLAVERRQQDFVPAEEFSRTVAA

SEQ ID NO: 425700 - protein, 342 aa, unidentified
MVQAITVGLDIAKNVFHAYGATADGGKAFSRKLRRAQVEMFFSKLEPCLIGIEACATAHHWARTFVAMGHEVRLMPPAYVKPYVKTQKNDEADAEAICEAVTRPNMRFADIKTIDQQSVLVLHRTRTMLIKHRTRMGNTIRAHLAEFGITEAIGREGLARLIDLIVTGEDARITGITRHAMMCLVGQYRLLQDQILDLDRQVMACHRSSEASKRLATIPGVGPLAASALVASIGDASSLKNGRSFAAFIGLVPRQSSSGGKERLGKISKRGDHYLRWLLVVGSLAVIRYAQRHGTKRPWLIKLLQRRTTKIAAVALANKIARIAWVLMTRGGVYREPAAQPA

SEQ ID NO: 425701 - protein, 376 aa, unidentified
MDSSRFLRGIIAVNRGSQPHQEEADMDATTMAVDLAKDVFEVAWATSTGRVLARKRLTRRQFERAIEGLSRECTVVMESCGSAHYWARRCQTRGAHVRLLPAQYVRPYVRRNKTDRTDTEALLEAHRCGGIQAVPVKTIDQQTLQALHRVRTQWQSARTARINVLRGLLREQGVAVPAGARTLVTRVATVLADTAAPVPDLLRQTLALVLDEVRALEARVHALDLQLARLAKTHPVAPRLMQVPGVGVITATAMVGAVNHIHAFRRGRDFASWLGLTPRESSSGGRRHLGAISKRGDSYLRCLLTHGARAVLLTAQRTARTTPARVTRLQQWAVALAARRGHNKAAIALANKLARIIWAVWRSDQAFCSPVADASA

SEQ ID NO: 425702 - protein, 391 aa, unidentified
MYVIGIDVSKYKHDCIIIDEDTRKVVRDVFSFNNSRTGFSQFLDVLKTLDPTQKKKIGFESTGHYQDNLRVFLEQSGLEFMELNALLVHKFRTSQTLRGVKTDKTDARLIVNYLLKVDFKPYPKISYHILALRSLCKRHFDLINERTKYLIRITNFLDRTFPEFKEFMNNNLKGKTVNYILHNYGVPSKIANMNMNSYENIRKLSRGSFSVAKFMRLKDLAKTTIGFSYETDIFEINSLLKIYDSINKEISTVENEIATHLSKIDTKIPTIKGIGDVSAATIIAEIENISRFNSPEKLLAYAGLDPRIYQSGTSEFKGKMNKKGSVVLRRVLMNSSERLICYNPNFYTYYRKKRNEGKSHRVALSHLARKLVRLIYKIETEHIDFNLSNIK

SEQ ID NO: 425703 - protein, 345 aa, unidentified
MSHFVGLDVSQKMTAICVVDKDGRRIWRGQCPSVPEQISVALRRYAGDNARIGIETGAMTPWIVHELRNLGFEVICLDARHARAALKMQINKNDQNDAEGLAQIVRTGWYRSVHVKSFDSHRARAILGARTQLVGMTTRLSNHIRGVLKTFGLLPGAMRGLPFDRKVEVLLEGRSDVEPIVRPMLVAWRQLRVQIAAFDKAIRAMVRMSGASRLLMSVPGVGLLSALAYVSTVEDPSRFARSRSVGAHLGLTPRQYQSGEVDRSGRISRCGDTLTRTLLYEAAGVILTRVKKASGLRDWAAAIAKRSGPGKARVALARKLSVILHSIWRSGEPFRWSEPKHVVVA

SEQ ID NO: 425704 - protein, 346 aa, unidentified
MEKLIRIGMDTSKSVFQLHGVGERDQPVLKKRLKRRQVVPFFSGLEPTVIAIEACGSAHHWARTLGELGHQVRLIAAQRVKPYVPRGKNDAADAAGLCEAMSRPSMTFVAAKSAEEQAALMLAGMRERLIATRTQVSNTIRGYAAEFGLIAPKGLDKIEPLVMRVTQDESLPELARRLFALHGREYARLQEEIRALEAMLMSWHRANPDSRNLAEIPGIGLVAGVRLAMKKTDAMACKSARYYAAWLGLTPKDHSTAGKQRLGGITRAGDPALRAMLVTGAMAVIRQAERNPAKASPWLLGLLKRKPKKLVAVALANKNARIAWKLMRSGERYNPDHAAPARASAA

SEQ ID NO: 425705 - protein, 394 aa, unidentified
MRYFAGIDVAKTVHWICVIDANAEVLLDRAVTNAQEDIDRLVGELRPFAPDLTICLDVMGSIATFVEAALIEAGFRVVHVPGIAVNRARDGFANREAKSDPKDARVIADYARTRPTLRPVEHDDETTIAIRLMIGRRRNLVEEQTRRIARLRRYLGSIHPELEIALDINGLGSAHLLTRYVTPTEIRRAGPKRILAHLQRLPHLHKREEMAHKVFEVAQRQHTIVPGEATFASLVRELAEEIILTREKLARLDKGLETLLARHPDAALIRTLPGMGAILTASFIAAAGSIARFKSAGAIAATAGLAPVMRQSGYSRVFRRTYGGDKDLKRVFFQSAFCAYAKGDPVCRAFYNRKRREGKRHTQAIIALARRRVNVLWTMLKSRQPFDPERAITS

SEQ ID NO: 425706 - protein, 348 aa, unidentified
MTLTIVETRAVTGGVDTHADVHVAAALDPIGGLLGVAEFPATAAGYARLLGWLGGFGTVCLVGIEGTGSYGAGLARHITAAGVRVVEVDRSDRQDRRRAGKSDPLDAVSAARAAQSGRARGAPKGRDGAVEAIRALMVAKRSARAERTQTINQARALIVTGPDDLRTRFAQHTAAGLVTELASLRPRPGDVVGYATRIALRELGRRATFLDGQLGRLDELIAPLVTARAPGLLALYGVGPDSAAMLLVAAGDHPERLRSEAAWAHLCATAPIPASSGKVTRHRLNPGGDRQANHALWQIVITRMSSHPPTRAYAARRGKEGLSKKEIIRCLKRYAAREVYPHLRPPAG

SEQ ID NO: 425707 - protein, 423 aa, unidentified
MMKLKYSICCGLDVHKNVIVATIVITNADGISEYRQKSFSTFNSDIRKFHSWLIENNCYHVCMESTGKYWIPIFNYLENDIEVCLTHPKYVKAIKGKKTDKKDSKWIADLYKFDLVRCSFIPPKDFRQLREIARYRFKLVCMKSSEKNRIQNCMTVSNVGIASVLSDPFGKTATEIMSYLLTHTSDSIDEKAVRKLIKKGAKAKSDEIIEAIRGYNIESDQAKKLELACSHLEYLDGMITQSEVELYVRIKPYYKFVELVSTMPGMTELSSTIVLAETGVDMGIFDDAKHLCSWCGLSPTNNESAGKKKSVRISKAGDYLKPMMVQCALAAIKSKKQPYFAIKYGRVKKRRGHKKAIIAIARMMIVCIYHMVSEEKPFTPIDYEELMSPKNHIECVILNENNVFAYLESLGYDSSKLVKRNDN

SEQ ID NO: 425708 - protein, 446 aa, unidentified
MPPSPPEDVLEDRRSGSANHRYVRFSRLEGVRDGEAAEYGTLKGDHERSEVMNYWVGFDVGKRFHWLCVLDGDGAILLSRRVDATEEQLEAACSEIAALGDVEERVIGVDVLGGPATLLETTLLERGERVRYIPGTAVNKVRDAYPGGEHKSDPKDAFVIADQLRLRWKSLREVRIRNESAIELRTLVGYRRDLVQDQRRRVCRLRDLLSQVFPMLEAALPDLAEKGALLTVAKVALPSDARRLGKSRLARWLKARGSRKSEALAEKALLAAKAQRRELPASEVKAALVSEIAWEILRTKDRIADLEKRLEELVETNPDGKIVGSLPGMGLILTAEFLAEVDDIGRFGSPDRFAAAAGIAPVLRASGSVSYQRRAKKGNRALKRVLYQSAYCAIGHHDKSRDYYQRKRAEGKMHEQAVVALARRRVNVLWAMLRDRTTYREMPLAA

SEQ ID NO: 425709 - protein, 349 aa, unidentified
MNATIVAVDLAKSIFEIAAADADWRIAQRSRLPRSKFFGFFMQLEPCQVVMEACGSAHYWARRISALGHTVRLLPAHYVKAYVRRNKTDRADAAALLEAARCADIREVPVKTVDAQQIQSLHRLRSQWMSTRQRYVNTLRGILREFGFAIPLGVNVAKDRIGTALADPESEVPPALRATLAEMLQEIRLLEQKILGIEHQLNALTRHDVRVQQLRQIPGIGALTSTALRAIVGDIQRFPSGRHFASWLGLTPNERSSAEKRRLGKISKQGDVYLRTLIVHGARSALLGAHRAERSGHPLDHLRRWALDCERQRGHNKATVALANRLARIVWATWTHERPFDGNWSTQAA

SEQ ID NO: 425710 - protein, 356 aa, unidentified
MSRDIKYIGMDVHKEAIVIAVLNGSGKLVMETILETKASSILEFLHGLRGELHVTWEEGTWAAWLYDLLQPQVQEVVVCNPRRNALLKEGSKSDKVDARKLADLLRTGMLRPVYHGENGLRTLRELARSYQTISKDLTRVMNRLKALYRGWGIPCAGTQVYAPRYRKEWLHKIAQAGVRRRAELLYQQLDGLQALRRNLRPEFLAESRKHKAAKLLRQIPCIGPIRAARLIALMQTPHRFRSKRQLWTYSGLGIETHDSAQYRYVGGQVQRSKKPQQIRGLNQNHNHDMKEIFKGAATRASCASGPFRDFYAALLAQGMKPEMARLTLARKIAAITLTLWKRGERFDAEQLKTQAA

SEQ ID NO: 425711 - protein, 322 aa, unidentified
MAMLSFGGIDVSKDRLDVMVLPEEQCSSVPNDAAGWAKLVEQLRGFSISAIGIEASGGYERGAVRALLAAGMSVRQVNPFKLRQFARASGVLAKNDPLDARMIASFVAVMPTRPAQRQTPAAERLAEMLAVRRQLSAEKVAAENASRLLEDAMLQRLSRRRIARLAADIDMLDGHLVEVVGTDAPLAHRYRLLTSMTGVGTVLACTLIALLPELGGMTRKQVAALVGVAPYAFESGTLKGRRCIWGGRANVRQVLYMAAMSASNWNPGLKAFHDRLEAAGKKPKVTIVAVIRKMITTLNAMLRDDVVWADRLRGRHSVPTVR

SEQ ID NO: 425712 - protein, 394 aa, unidentified
MKLVGIDVGKNSHHFCVMDKETGEFNVTPTSFSNNKEGFDFLINSLKPYSKKSILIGMEDTGHYHVALLKFLLSNGYTVALINPKTTDLTRKMEGGITKNDKLDTITICDVLDTPERKKQYRITKVDRFDLYEQRQLTRHHHNLKEELNVYCNRLQKSIDLVFPEFNTLFSSKYSIVYMNLLKTFGSAEAIASTDIRTIRKCFEIKGKGNRISLTPEKLKECAKNSIGISSEVETIQIKHLVSQIMLIKEQIAEIDKKIEEFSITNNSPILSIPGISHFSGTSILAELGDIGNYSKPSQIIKFAGVAPYHYESSQYNAQHTGITKKGSKYLRKTLYQIILTVINNNPVFKKYYLLKISQGKGHRCAQGHCIRKLLRIIYHLLETGQSFDPALLR

SEQ ID NO: 425713 - protein, 416 aa, unidentified
MAKENQYIEYEQVIERGCGIDIHKMVLVATIRGIGINEETRTFSGFTESIEEMGEWLKENQITHVAMESTGVYWKPVYNIIESDFEILLVNARHIKNVPGHKTDKKDSKWITKLLLSGLLKGSFIPPKPIRELRDLTRYKRKVIEQISSEKNRIHKLLEDANIKLSSVVSNISGATATKIIDAMIEGEENIEELLKFRHGKVQSSVEDLASSLKGNLTDHHRFMLKTVKESIKDKEQIIVKLEEQIDKQLKENELILDAELLATIPGVGKDGAAYILAEIGNNMEQFPNEQHLASWAGMSPGSNESAGKKKSTRITHGDKYLKVLLVQCAWAATRTKGTYLRSKYDSLVGRRGKKRALIAVGHKILVATYFVLKDKVAYKELGAEYLQELKKGKQIKRHIQILKELGIDIEIKEVA

SEQ ID NO: 425714 - protein, 397 aa, unidentified
MIAVGIDISKAKSTVAVIDSDGTVLASPFTMAHTQPEMEAFVSYLKGLGEPTTILMEYTGHYHYPVLKKLQDEGFPVCIVNPYQMKKYGDVEIHKAKTDKKDALRIAAYALEKSYKLIPYSSMEQKYEDLKFLSRQYNQRISYVAKLKVQLIALLDQTMPGITRILPLNSRNPEKCALLLFIKRFKSFDEIQRIGKARFLASYDVLAKKASERSASSKGLSIYELAVDSITTRGEDPYIWLSQNQCVDLLSATQNAADEIISQMRNIAETIPEYKVLRAMHGVGDRLGPIILAEIGDVHRFHSGKALNSYAGNDAPPYQSGQFESRNRHISKRGSSALRKACYEVMQALKLIKPQDDPVYLFMLKKEQEGKPFNVAKMAGVNKFLRIYYARAMELYK

SEQ ID NO: 425715 - protein, 412 aa, unidentified
MKDLLEISCGLDVHKEKIVACILTGPLGKPTRSEIREFSTLIPDMIALRNWIVSKNCHHVAMESTGIYWMPIYEILEDAFYGDITLLVVNARHMKNVPGKKTDMRDSEWISTLLRAGLLNGSFIPEKRIREFRDLNRYRKSVIRDITSQKNRIEKFLQSSDFRLSSFISDIFGASGRNIILHLIEHGQIDKTALDSCLKTKTRNRIDEILMSVNGTLSEHQKAFLRILMTHYDSLKKHLAEIETSLEKDMAPFALQVEQLNSIYGISTTASCAIIAEIGIDMKPFKTAEHICSWAGLCPGNNESAGKRKSTSVTKGNPYIKSMLCEIAWVIAGKRNTYLSAWYWRIKQKKGAKKAIVALARKLLVIIYTMLKQGTLFDESCFETRRKHCEQKQLSRYIRELEKHGYHVEAQS

SEQ ID NO: 425716 - protein, 407 aa, unidentified
MRITCGIDWAEAHHDVALVDHDGKVVARERIGTGVEGFTRVVELIAEHGGSPTGTPVAIETDKNLLVVALAGAGFTVYPINPRAVARYRERHSQAGGKSDPGDAAVLANVLRTDRHMHRSLPVISEQALAIKALARQHQEAIWAMNQTISRLRSVLLEFYPQAIKAFPHLKHHAATTVLAAASSPGAGQKLTRRRVEALLHRCGRRNDTRLVDQILADLKMPALRQPGRVEAALALTVEGLVATVAAMRHSVEQLEAELGHEFETHPLAPVLRSAPGLGAILAARVLAEVGDDPHRFTTANGLRAFAGTAPVTRASGRSHYVKARKVRNKRLGDACHWWAFAALSWSPGARAHYDRRRAAGEHHNAALRNLANKLIARMWWCIANDQPWDEHAAWPAFHSNEKPAAA

SEQ ID NO: 425717 - protein, 350 aa, unidentified
MVVVGADVHKRTHTFVAVDSVGKKLAELVVKATTDGHHKGIRWARERFGTELEWAIEDCRHLSARLERDLLTANQTVVRVPPKLMAQVRASARTRGKSDPIDALAVARAALREPDLPRASHDETSRELKLLVDRREDLVTQRTSTINRLLWRVHELDPEQAPKPRSLHLAKHRTILGTWLQTQPGLVAELARDELADIDRLTRAINDLAKRIQTKVTAVAPALLALHGCAELTAAKIVGETAGVERFKSEAAFARHSGVAPVPVWSGNTAGRVRMTRSGNRQLNTALHRIAVTQIREDGLGRSYYRKRLEGGDSTTEALRCLKRRLARIVFNHLKTDSQPAAGTCIPAAA

SEQ ID NO: 425718 - protein, 358 aa, unidentified
MRKSTDRASESKSLVVASGDSVFVGLDVHRKKVYAAVRLNGRELMTFVAPADTAKVVRSLRCWKVALKRIVYEAGPTGFGLARALRKAGLPTEIVAPGKTPQPANRDSKSDRLDCRKLAEFAEKGLLKSVSVPTEEEEADRQVMRLREQLTKKVRRVKQQIKGLLLMYGVAEPEGLKRWTKAGVAALAGLDLKPQVRLALDCLVEELTHLTSLRERTRSAMKTISRQKRHLGKERRLRTHPGVGETAALEFLTEVYQPERFEDAGALTKYVGLAPRVSQSGETRREGPLMKTGQGTLRALLVEASWKWVAQDEHAAAVFDRIWHNTGSKQKAIVAMARRMAVNLWCMLLRGEDYRRAA

SEQ ID NO: 425719 - protein, 355 aa, unidentified
MTDSKYIGLDVHQATISVAVLDSTGKLMMESILETKAATILQFFQGLRGSVYVALEEGTCAAWLHDLLQPHVTKVLVCDPRKNSLLKAGNKSDRIDARKLADLLRTGLLSPVYHGDNGLRTLRELARSYLAVTQDLTRVMNRLKALYRSWAIPCAGQQVYAPRYRSEWLGKITAVGVRRRAELYYQQLDALALLHQQVRRDLLAESRKHSAVKLLRQIPLIGPIRAALLIALIQTPHRFRTKRQLWAYSGLALKTYSSGEYRFVEGQLKRSKRLLAIRGLNTNHNHDLKNIFKGAASRAAMVPGPFQEFYAALVARGMKPSMARLTLARKIAAITLLVWKKGVRFDAEHLKPQAA

SEQ ID NO: 425720 - protein, 389 aa, unidentified
MKIYVGIDIAKLNHFAAAISSDGEIIIEPFKFTNDADGFQLLVSKLESFDKNSLIIGLESTAHYGDNLVRYLVTELYQVCVLNPIKTCQMRKNNVRKTKTDKVDTYVIAKTLMMQDNLRFVSFFDLDMMDLKALGCFRQKTIKQRTRLKIQLTTYVDQVFPEIQYFFKSGLHQHAVYALLKEAPSPKEIASMHMTHLANLLKVNSHGHFTKEQAKELRVLAQKSVGANDSAISIQITQTIQQIELLDSQLEKIEAEMTDIMKFNDSVIMTIPGIGYINGGMILGEIGDIHRFSNPNKLLAFAGLDPSVYQSGNFQAKTTRMSKRGSRVLRYALVNAAWNVVRNNATFKAYYDAKRAEGRSHYNALGHCAGKLVRVIWKMLTDEVEFNLE

SEQ ID NO: 425721 - protein, 408 aa, unidentified
MNAVGIDVSKGKSMVAALRPMGEVALLPQEFLHTEVGLEQMAYAIIALGEDTRVIMEATGRYHEPVAAALHEYGIYVCVLNPLFIKQSGGGSIRKVKTDKADAMKIAKYGLDNWVDLREYTPMDTVRQQLKLCSRQYNLYMKTVVSLQNNLISLTDKTFPGVNELFSSPERADGHQKWVDFVMTFWHCDCICRVSEKAFTERYQKWCKRKGYHFSAEKAQDVYLGSCGHFTTLPKNDNTKLLITTAAQQLLAGKMTLAALRTEMTRLAKQLPEYDIVRAMYGVGETTAVQLMAEIGDVRRFPRRSSIVGFAGVDPAVDQSGKHSAKSVPTTKRGSPHLRKTLYQIVCTYLKKSPVDEPVYQFLDKKRSEGKPYFVYMTAAQNKFLRIYYARVKECLEAFDAQQDTSQR

SEQ ID NO: 425722 - protein, 409 aa, unidentified
METVITQCAGLDVHKASVVATVRVPGDAGRRRVVTETFGTMTPDLLALREWLQAYGVTHVALESTGVYWKPVYYVLEDAFELLLINMLQLTHVPGRKTDVKDSEWLAQLLECGLLRSSFVPPPPIRELRDITRYRVQQTRDRSQEVNRLQKVLEDAGVKLTSVLTDIMGASGRAMVDALVHGTTDPAVLAELARGQLRKKLPALRQALVGRFRPIHAFLLEEILAKIDYLDEALDRLTAEIDRRVAPFESMLTALDTIPGINRIGAISLLAETGGDMTRFPTAAHLCSWAGMCPGHNESAGKRRSGQTRKANRYLRTTLIQAGVAAARKKDSALRTLYARVKGRRGHKKAVVATGHQILEIAYYVMRDRLTYRELGADYFQRRDRERTARRHVKQLEALGYVVTVQPAA

SEQ ID NO: 425723 - protein, 391 aa, unidentified
MEARVVNNLSPAAAHDGAVRCLLAIELSKKSWVVAVNRPPLDKINLYKLKPCDWKGLLQLIERIRKRVSEELKKPVEVISCYEAGYDGFWLHRLLEAHGVHNHVIDPASLQVDRRARRAKTDGIDVGKLLRSLMAYLRGEPKVWSVVRVPTVIEEDNRRLHRERSRLINERIQHVNRIKGLLAIHGIYDYEPMHPERIQRLERLRTADRHTLPLHLKAEILRELQRLELVLGMIQTIETERDAIASAKSKSQQTTSAKKIKHLVKLKSIGPEFATVLVGEVFYRTFNNRKQIGSYVGLTPSPFQSGSTSHDQGISKAGNTKARTTMIELAWLWLRNQPDSLLSIWFRERVASRKGRIKRIAIVAMARKLLIALWRYLETGVVPEGAVLKSK

SEQ ID NO: 425724 - protein, 471 aa, unidentified
MLACHAMVHGSPYRTLKQPGVTHPGLVQKVSPSTTRKKQNLIAIIQPKPLSVSAKSPLRSPTTALELPSRKVGISDEWLRGSCRKTGVFGNLDELYDKWDEQVSLGETIAMKNPRQHLIAEVPRRSSKVGMTIGIDLGDVWSHYCTLNEDGEVVDRGRFRTSPSGVEKWFADLPPVRIAMEAGTHSIWISEQLQELGHEVIVANVCELRAISHSDRKSDQVDAEKLARYARLDPKILRPIAHRTVAQQEALTLIRARNLIVRLRTAAVNAVRGLAKPCGYRLPASSTLCFAKRCVAVLPPGLTQALGPVLEQIAEMTKKIKHYDRLIKRLTETEYRETQALIQVYGVGQLTALTYVLTLGSKERFQRSRDVGCYLGLRPKRSQSGDRDPQLGITKAGNIYLRTLLVGCANHVLGPHGRDSTLRRWGLHLASRGGKQSRNRAIVAVARKLAVLLHRIWITQEPYIPFYGVAA

SEQ ID NO: 425725 - protein, 421 aa, unidentified
MRGLRAKRVKTVREGTLIATVDIGVASNTGYCTTLDGRGTKSFRFDNTKEGFEKFWCMTTASKNRFGCDEILVGYESTGPYAEPLVHYLVNKEVKIVQVNPMHTKKMKEVNDNSPLKTDDKDPRVIADIIRLGRALTLVVPEGDAAYLRRLNNARERHVGEQTAFLNQLQQLVFLIFPEFKTVLKDMKGKTAQYILKRYSTPERIGTLSKEALGEEMRKRSMGKFGIKDAESLIGLARKTVGIKEGVAGILLDIKHILMQLEAEGRFISEIEAEMGVTLERIPCSAKLLSIKGLGTVSVAGLIGEVGDFSKFSTQSEIMKLAGLDLYEISSGQRKGQRRISKRGRSLLRKILFYAAIQMIRKNGIMYEYYTRLTGRGMERMRALIAVSRKLLRIIHAIVRDNRDYAKEYQGSQGMVIKEAA

SEQ ID NO: 425726 - protein, 281 aa, unidentified
MPAVASVSHLVPIHLGLDVHKDTISVGILDPDQQVPDVERISHDEPSIRRFVARFAEPRALRACYEAGPTGFELARLLSSMGVGCEVIAPSLIPRAPGDKVKTDRRDCRRLARLHRAGELVAVRIPTVGEEAVRDLCRTRADMVEDLTRARNRLGKFLLRHGRPWRGSSTRTQAYQAWLRSQRFDQPAMAQTFGHYLAVVEVRNQALDAVEADLVGWCQRPPFDWQVARLAAYRGVTRLGALTLAAEVADWRRFATAKAFMGFCGLVPSEYSSGHTVHRAG

SEQ ID NO: 425727 - protein, 418 aa, unidentified
MKVVYPICCGVDVHKTFLVATLITTQGIVPHYSKKRFSTFNNSILQFKQWLIDNNCFDICMESTGKYWVPVYNLLEDTIHITVANPKWVKAVKGNKDDKKDSKWIGDLFRLGLVPGSYIPSKPIRILREYTRYRYKLVCCKSSEKNRFQNAFTVCNVALDAVVSDMFGKSASSITDYLVSSDSFDPVHCSSLLHKSLKKKADTVIESIEGYQMTQEQKERIGMVRSHLEFVQQSIAKLDEKLDKMVAPYESAISLLCTIPGVDRESAITIISEIGTDMSQFANSKRLCCWAGLTPGNNESAGKKKSVRITRAGVYLKPALVQVAHAAVKSDKAPYYKIKYERLYKRRGKKRAIIAIARMILTAIYNMFVTGEMWNPSDLYKIDMPQEMLEKQKEKAIKQAVKLLVSNGVIKATDISVA

SEQ ID NO: 425728 - protein, 391 aa, unidentified
MGIWVGIDIGKEIHFALALDDGGGEVFAREFANTEEAIERLRRDCRELGEPVFAVDMTEGPVALLLAVLVGAGEDVRYVSGLSVNRSRLMLAGESKTDRRDALTIAQNLRLRIRSLPRFGAGEDAMQTLKLLMRRRCDLVADRTRAINRLRDTLLSYFPGLERTFDFTNKGPLLLVTHHNTPDGIRRSGTSRIERHLKGAGAVRARDLAERAVAAARAQSVRIAGQDTASSIVSELASEVLRLCDRVAETDERVGETFFSLPQAEIITSMPGFGPLLGAELLVEIGDVSRFPSAGHLAAYAGIAPVSRDSGKSTGNRVRARGGNKRLKKAMYHAAFVSIRCDERARAFYDRKRSEGKRHHQAIIALARRRTDVLYAMLVHGSLYASEPAAA

SEQ ID NO: 425729 - protein, 342 aa, unidentified
MSYLGVDLHTNSFTVCRRTQQGKNSIRTFQISRISDFRKTLRKRDLLAVEATGNTAWFVSQIRDRVKKVTVVNPFQFEVVRRSVKKTDKNDSKTLALFLSKDLLPEARMKTKENAQLHSLATTRDKLVKQRTALINKVHNVLNSYGIKFKKESLGSEKGLKSVWAYDWDVIVRIELELLVEQIRRLNKSIKTLDKEMSDHGQKLKGHKSLTSIKGIADRSATVLLSVIGDVNDFADENKLAAYFGIVPRVSDSNETVRHGRITKHGSKLGRTTLVQCTLVAKRYSPYLHQYYERIKSHRGSGKAIIATARKFLAIIYNTLKNEWIFEDFPNFVLASSCVKKQ

SEQ ID NO: 425730 - protein, 344 aa, unidentified
MKEVITIGLDLAKNVFQVHGVDGSGDTVMRRQLRRSQLLPFFKKQRPCLVGMEACATSHHWARQLIELGHGVKLMPARYVKPYVKRNKNDAVDAAAICEAVTRPTMRFVAVKSAQQQSVLMLHRTRELLVRQRTMLVNAIRSHMAEFGIVAPVGVPRVKELFAVIADADDDRLPAIARACLEGLANQFLSLHEEIATAERRIHAWHRSNEASRRLETIPGIGPITATALAATITDPSVFTSGRELAAWIGLVPRQSSTGGKERLGRISKQGDQYLRWLLVAGAMSVIRQAKRRGTTSLPWLANLITSKPTKVAAVALANKMARIAWALLRQGGTYQKPATAAAA

SEQ ID NO: 425731 - protein, 406 aa, unidentified
MQFCGIDWANDHHDAVCIDDHGQQLGSIRVAHSPEGLSQLDAYLEQMAGPGGKEQIACILETTHGLLIAHLLEQGWGVYPVNPRTVEKRRAPSGAKTDTLDAYLLAKTGRADFQDLRRLNPDSEQIQELKTLTRDQDALIQMQTRLVNQLTACLKAYYPVALEVFGQLHQPSTLAFLRAYPTLPAARAASVEELTVLLKQARYPGARQKAQQLVTHLQQPSLQATEVTTRTKARLMLALVAQLEPLLKQIAAYDKEIERLFLSHADSELFQALPGAGARLAPRLLAELGDDRSRYESASSLQALAGTSPVLFQSGTYQKAHRRLGCIKPWRNALHQFAWESTHQEAWAKEYYQRKRAEGKSHTVAVRALANVWARILYAVWKTKEPYHTATFEAARRAHALHQPAA

SEQ ID NO: 425732 - protein, 430 aa, unidentified
MEVPKMKYTQNAKILQITENTLIIGVDVASETHYARAFDYRGIEFGRLLKFSNDGNGFAAFAEWTEILRAEHHKEHVMVGMEPTGHYWFTFAQHLKDHQIKIVLVNPFHVKRSKEMDDNNPTKNDRKDPKTIAMLVKDGRYMEPYMPEGIYSELRNAMDTRWRLVKGINRIRNQVKRWISIYFPEFNQVFGNWEGKAALITLREFPTPARVLERSIEGIVAEWRKEISRGIGKKRALRLVEAAKATVGMRQGLGAAENELECLLEEYRMLMRQYERTMVLVEELALQVPGMEGILKIKGVGLVIAAGFVAEVGDITRFEHPKQVQKLAGLTLKENSSGKHKGKTTISKRGRRRLRSILFQGIMPMVAQNQEFRELHQYYTTRPTPLKKKQSLILLCCKLIRIFFVLMTKQTAYDPEKMMKDIRRPPLQAA

SEQ ID NO: 425733 - protein, 331 aa, unidentified
MQKKEFFVGFDVSKLTLDVAIHGTRSHIRIPNSSEGFKHLQAWLKSLNIALSDCWFVLEYTGGYEYRLVQFCQSKHITFTRVPGLQIKKSLGMQRGKNDKIDSKRIAEYGYEKRQKLKAHTACDAAITRLKQLLTQRRGFVKDKKAHEHRMKESLAMMEFKANDPMMKRYKQAVDFALKMIDKTETEIKKIIAADEAMSKNFKLITSIPGIGEVNGWMTIVYTQNFECFPDGRTYGSNVGVVPYTHSSGTSIKGKSKVSHMANKQLKADLSMAAKASVQHDPEMKAYYERRAALGKHHMAIMNEVKFKLILRMFAVVNKGEVYVKKRNLAA

SEQ ID NO: 425734 - protein, 373 aa, unidentified
MPKYSTAFGMDVHLRSTTVCALDADTGEAVTRRFPGNPWGEIAGWMDGFPGPSLAAYESGYLGFAPQRELAGLGVECVVAAVSKIPRSAADSASKNDRNDAARMAKAILAHDISPAWVPSPEVEGIRDLAGAYDGATARLATAKQRLLAFLARRGFVYGGTTPAGNPRKYWTYDFLRWLDKVRPEDDGGVRTLAALRNEVEAAAEARADLLSEYRAAVDASPIAAEVAALQSIKGCGFALAAAFASEVGDFSRFRSGRQVTAYFGLAPSQRSSGDSVRLGGISGAGNALVRKLAVEGSWCYAAARHQPKLMPRDTGVPLEIRMHGRKGSERLLRRREEMLARGMPAAKANAATAAELVRWLWALGMMCREGAE

SEQ ID NO: 425735 - protein, 343 aa, unidentified
MAQQTIIGIDLAKHVFQVCMVTPTGTLKTNTTVARGKLLALIARQPPALIFMEACGGAHDWARRFCALGHEVRLLAPQYVTPFRRGQKNDPNDALALTEAGQRPNIPTVPIKTIEQQDLQALHRVRERLVKHRTAVVNQVRGLLLEYGIVIPQGIARLRKRLPRVIEEADNGLSFLMRDLLQSLQSELSALDTRITEMTGQLTRLSHELEACQRLQEMEGIGPLSATALVAALGNGHNFHDGRQVAAWLGLVPRQHSSGGTTRLGGITKGGNSYVRRLLIHGARAVISHVRDKPDAKSAWIRQLVTRIGVNKACVAVANKMARVAWALLHTGAQYRKPVALSV

SEQ ID NO: 425736 - protein, 353 aa, unidentified
MGNILAIDLGKFNSAVCIFDRSSLKCKYKTVRTRKQVMHDLFVQYQEQIEIVLFETGSQMGWMADILWALKIPFEVANTNHSAWKWKNNPNKSDRKDAQRLAMMYHTGFFPTVHVPRRAVRQKRSLINYRDDIVKRITKIKNSIRAILGREDIPLPSGRKGWTIKALKPIREMAMPHKDIGELEDLWKGQLHNEFNQLDNTIEELKAVESKLNVIGEADERVKRLRTIPAVGPRLSEAVVAIIDDPHRFKNGRHVSSYLGMVPRRWQSGQVDITGRISKCGNKLLRTLLVEVSWLGLREPWMRDIYDKVRRGDKKRSKVAIVAVARQLLVRCWAILRDESCWDADHAKRFVKC

SEQ ID NO: 425737 - protein, 430 aa, unidentified
MVKVSSFISVGIDVGADFSYMSIALPNQQLLGKPIKITHSNLSSLEYCVKAIKEAEEMYSLESRIFLESTGVYHYPLFCFLCDRGFNCYVINPIITKNNTNMNIRKVHNDKFDSKKAALLGLKPDIKTSVMPSDAVLNIRNLMREYYKLTDNRSGYINRLQGQLRMVFPQFIGVFSKITVNTSLALLDKYGSPENFIAADKNEIIGIIRKTARFGAAYAESKYTAIIEAAKAASVFGHSVPSNFTLIRLYIKFIREYDKEINAVLAAIDELLAENADETFVKQVQLIQSIKGAGLLTAVTLMCEIGDFSVFKSPKQLFAYFGLDPAVKQSGKYIGNKVKMSKRGSPLARRAIHTIAVVSIGKTKHGVPHNSVLLDYYQTKCKSKPKMVALGAVMHKVCNIVFAILRDNKPFEIITPKEHNELYQNRILAT

SEQ ID NO: 425738 - protein, 329 aa, unidentified
MPILKSVVGIDVSMNSFEARFGTTDTEQHVVLSPSKSFSNSPQGFRRLLRWLPDSPTPIVFVMEATGVYYERLAHFLVLKKRPVAVVLPNKIKNYAKSLQSKSKTDPLDAAAITRFGLDRQLTLWSPPSDTTKALHNLSREYHALKATITSIKNQRHALSASFEPQRHSLARKAQLLKFLKRQCHQIEEELHKLVDADPVLSQRLPTISTIKGVGFITIVSVLAETQCFEHVTGQKQLASYAGLDVVFNDSGLRKGKSTISKKGNAFLRHAVFMPALAAVRCNLQMKELYRRLTTKGKNKKLALIAVARKLLLLIYALWKNNTIYSPDY

SEQ ID NO: 425739 - protein, 332 aa, unidentified
MYLGIDVHKRYAQVAVMDEAGEIVEEVRVENANLDNLAQRYAGAQAAIEATSNYYHIHDTLSENLDVTVAHPKELNQIADTDKKTDRVDTKELARMVRLNSVPESYVPTGEIREARALVRGRQSLVEHRTEYANKIHGLLSDHGISDDVKPLTQEGREFPRELSLPMPWESVLESYLEVIETLTDEIQNLEETIEECAGSLKETQLLMTIPGVSYYTALTIYAELGEIERFDGDKEVVSYVGLNPVIRESGDSRIESELSKRGSGRARWLLVQAAHTAVHTCNDEYLSRFYERLASRKNSQKAIVATARKMLVSMYHMLDRGEVYDPPGVSA

SEQ ID NO: 425740 - protein, 347 aa, unidentified
MDQISRIGMDTSKHFFQLHGVNAAEMPVLRKKLRRKDVVAFFEKLSPTVIALEACGASHHWARLLQSLGHTVKLIPPQLVKPYVKRGKNDAADAEALCEAMSRPTMRFVPVKTAEQQAALMLIGVRDRLIRNRTQLANAIRGYAGEFGLTAAKGMAHLGPLLDRIQADVTLPSLARDLFAAQAEELTELQARIDAVDAKLMVWHRADECSQRLAKIPSVGPIGAMLLRIKTPQPELFQSGRQFAAWIGLTPKDHSTAGKVRLGVITRAGDEALRSVLVVGATAVIQHAQRSGKASPWLSALLKRKSPKLAAIALANKTARIAWKMMITGETYKAIAAPAAFSHRGTA

SEQ ID NO: 425741 - protein, 368 aa, unidentified
MSRKERLLVNTIDVEQEYKVIGLDMAKNDTSCVCIAESGEIIAIDRLSYPDLLEAAEQLSPTIFAMEPCNGMHWLVNQLQEYGHECRVISGKAVQQYVGSHFGKQKTDLNDAQAIAYLALDEILRFIRAKTPTEMSIQALQAIRTQLTKQKVSSIVCFKSMCQGYGISIGKNESSVINFISLLKETDKIPEEVKEALRMLIANYKVLRTRINKIDKVLEKIVTNNVTGKNLKDIPSFGVQCAARLLTIAPNIKDFKGPKDLVAYCGLAPRNITTGHKQKTAGITKRGDKLMRRNVVQAANTLYRMNKHGKLQNCKLKRWMDKRLKILPYQKFIVQLAAKLLRIAYAVMRYGTEFDYARAGVARSALKS

SEQ ID NO: 425742 - protein, 450 aa, unidentified
MPAKKKCLPAPPTLVVHPNAAGIDVGGDAHVVAVPSDRDAEPIRSFGVFTSDLRMMAAWLHKCGITTVVMESTGVYWMPLCDFLEAQGFEVLIVDPRSLARNLKKKTDVQDAAWLQELHAFGMLKSCFRPDGEVRHLRTLWRHREHLITEAAKLLQMMQKVLVQMNVHLHLVVADIAGVTGMRIIRAIVHGQRDPMKLAGLRDPQCKKSGAAIAKALEGVWDFAHLYELKSLLKTWDHYQHEIQACDHQYEKAAGKLPDKTQGRPVPEPQKETQRHRNSVSAFDGDALIFKMTGVRVTDVDGLAANTVLTVLSETGPNLEAKFPTEKHFAAWTTLAPRRHQSGRRTKYPARTASRVAKAFRLAARALINSKSVLGHFLRRLRSRLGIGTAIRATANKLAKLFYRLITKGEAYRRDSGEAEELKQRERQLKALQRKAQELGMQVIPQVVPA

SEQ ID NO: 425743 - protein, 322 aa, unidentified
MAKPITICAGIDTGKWKLDVAIEGRREQLQVENTQEGHARLLAWLRQRRVKRIGIEASGGYEQPVVAELRRKRFVVVVFQPAQVRAYAKFHSQRAKNDKIDAALIAACTAAVRKIHAAPDPRMQPFAEQLTMIDQIGEDIARLKNRIESCRNARIKKLWQEDIARLEQREKAELKTLVASIREHSDLAKRLDLINSVDGIGLPTAVAILVRLPEIGRITREQAVALAGLAPYDDDSGEQVGIRHIDGGRKRLRHALFTASLAASFRWNRQLIQLYRRLTAAGKEHKRALVACARKMLIFANTVVARGTPWCDEPPVGSASVS

SEQ ID NO: 425744 - protein, 370 aa, unidentified
MKKRITFVGLDTHKNSIEVALADEGRNREVRLYGSIGGDIASLDKMIRKLQATGGELRFVYEAGPCGYEIYRHLRAQGLPCDVVAPSMVPKRSGDRIKTDRRDACNLARLYRAGELTAIHVPREDDEAMRDLVRGRQDAIDAQSKVRQQLGGFLLRQGFRYPRKCAWTSAHRRWLAGIKMPHPAQQIMLQEYIHNVEECTQRVHRLTEQILQLMTDWRMHPLVEALQALRGVAPVGAATAVTEIGPMNRFESIRQLMAYLGLVPSENSSGGSIRRGAISKTGNVHARRALIEAAQAYSHPARISRVILKRQKAVPEPIRQIAWKAQLRLCARFRRLPARGKSRNRVVTAIARELSGFMWAIAKQVRVPQA

SEQ ID NO: 425745 - protein, 401 aa, unidentified
MKVSGLDVHKDTVFCAIYDGKKYGEVTEFATFTENIREMASMLHEQGVKKIAIESTGIYWIPVWNILEDAGFNLMLVNPFLIKQMPGRKSDVKDAQWIAKLLHKGMLRGSMVPDKTIRQLRTYSRKYVKMQAMITRVNQEMERILEMCNIRITSLMSKNHGVSIQKVIEKIIAGQDSVEELACCIHGRTLNAKGELVQLSLDGKVDEHHRFTLSLAYEQYKLYLKQADSLEMKMEDLCDEHYASEMELLMSIPGVGKQAAMQIISETGADMQAFADSGKLTGWTGLRPRNDESAGKIKSKAITHGNKYLRRIMVQCAWAASRTKGSHYKSKFEQLCIRKSRKKALIAIARKLLTVVWHVLKEKEPFDHQMLPVYDPKKIKSKMNYHKKELEKLEALGFSCT

SEQ ID NO: 425746 - protein, 394 aa, unidentified
MKLVGIDVGKNSHHFCVMDKETGEFNVTPSSFSNNKEGFDFLINSLKPYSKKSILIGMEDTGHYHVALLKFLLSNGYTVALINPKTTDLTRKMEGGITKNDKLDTITICDVLDTPERKKQYRITKVDRFDLYEQRQLTRHHHNLKEELNVYCNRLQKSIDLVFPEFNTLFSSKYSIFYMNLLKTFGSAEAIASTDIRTIRKCFEIKGRGNRISLTPEKLKECAKNSIGISSEVETIQIKHLVSQITLIKEQIAEIDKKIEEFSITNNSPILSIPGISHFSGTSILAELGDIGNYSKPSQIIKFAGVAPYHYESSQYNAQHTGITKKGSKYLRKTLYQIILTVINNNPVFKKYYLLKISQGKGHRCAQGHCIRKLLRIIYHLLETGQSFDPALLR

SEQ ID NO: 425747 - protein, 428 aa, unidentified
MSKRDYNNQLEKRQKIKDTTLVVGIDIGSRFNAVALMNNFGKVLGSFPKIYNSRKGFDYFIEVIEGVKAKQGLKDVLIGMEPTGHYWRKIAYFAKDRGYAVRFIRTTALKHQRELDESSSSKNDVRDALTITNIIREGKYIDTVIEDDVYRQLRTLSKVRERMHRYSVGSQNTLVAVLDDYFPELKEIFWSVKTKSLWAILDRCPFPEDVLSEKISTLTEIIARSSRRRKTAADKATDLYRLAKESIGLKKISLADRFRLKVSLEEVKRSEVLLNDIEQEMKSLLAQIPYSKYILSIPGVGSLSTAVFLGELGNPANFKHPKQIIKYAGYDPQEKDSGMRTGRKFTSKKGRWLLRKFIYFMSLGVISNSEFFISYYKRKLEKKNQFGQLLKKKEALCAVAIKLIKVIFALLRDKRTFDTEATCLALAA

SEQ ID NO: 425748 - protein, 348 aa, unidentified
MRRYIGVDLHKNTFTVCYLSAKNNELKNFKVNKSGIEDFKQTLCQSDEVAVESTGNTGYFVREIKGLIKAVRIINPTQFKIISQSVKKTDEKDAEIIAKYLSKGLIPEVRMRSKEEAQLTSLIGTRDKFVKLRTTLKNKIHNILNANGIVTKREIFASEKNLEKVLSSDLDPASLFELRIIITELRNLNKAIVEIDKEMTDRGQKLKGHQNLTSLTGIGDISATILLNTIGDVNDFDGDNKLAAYLGIVPRVYVSNETSNYGHITKMGNKIARTALVQCALIAIRYNPYLRAFYLKLKAKKGSGKAIIATARKLLTIIYRTLKNNWVFEDFNSFKLMPAKKVYRLSPA

SEQ ID NO: 425749 - protein, 508 aa, unidentified
MNHRHVRCHKPMRTQASIYSKRNPQLVKLFEGAGQPSKLMCVALDYAKAQHTALLCNGSGDLIKGAFAIDNNPQGVAQLLKQVRAACKLRNIRPEHVFFGGEDSPSFAENFVRALRKEKFLVVRVNAWEAKQQRDNFQASSDALDLLGIARCCLKWRAQALFDPPAAYANLKIATRDRDKLVRQRTLISNRIHTSVERLLPGFLVPDQSGVPPFGEASLALMEQGLSPGSLKKRPRAKLALWLGHRGVDKPLEVAAQLKHLATQVLGPAPEQTLLLQRSLGILVALYRCLEESIGVLDREVAYWLARTPGALLTSIPGIGVTLAAGWTAELGAPTQWQALPRLCSYAGVVPRTKQTGGPGKEPVVGSVQARCNKRLKNVLLLAVEKVRAHGPEQLTRCAQELEARGAHTQFAMAKRLLRLGKCLMLSGTLYRPKALLDPDTTPATLAAYYQELWTKLPLKWKAKADLNDVFAPQHPLGQWRNMARELYALELRLPGQRASHASSALTP

SEQ ID NO: 425750 - protein, 428 aa, unidentified
MHPKIHPKIHPKVHPKMQYTYVGIDSHKETHTAVFLDCFFERLGVVTFGNLPADFADFFTQAQAFKQDGTSFLFGLEDVSSYGSALTRFLRASSQPVKHVNAYLVASERKNLNVDKSDSADAECAARLLISKFGTLPDAEDDEQYHVLRTLVVRRNFLMRGNLALKTYLHSLLTVDFPNYHKFFAEIGGKTSLAFFTKYPHPGLLNGTTADELAQLLWEHSGGLLGLKRANEILAAVDTTAMHETCGTISNKHEIRSKTVHSAIRQLQYNRDELEAVEADLATVYRSFNTTLTSMSGLDIVSASQLLSCIGDVRKFSTPAKLARYAGVAPASHSSGKRDTQFANQRGDRELNSLFYGLAVRLIITFGPGHKAHNPFFYEYYHRKMSEGKTKRQALKCVQRRLVNIVWGMLTHGEDYVNPPMIAVAKQS

SEQ ID NO: 425751 - protein, 470 aa, unidentified
MTPRKDNFPYPDPPVRSPSLQVVNPHAAAVDIGAAEHWVAVPPDRDAQPVRRFGTCTIDLEAIADWLLACDVTTVAMESTGVYWIPLFEVLEARGFQAVLIDPRQAQRAPGRPKSDPHDCQWLQRLHAYGLLAAAFRPANQVCVLRAYLRQRRMLITYASQHIQHMQKALEQMNLKLPEVVSDITGVTGMAIIKAILAGERDPVRLAQFRDRRCQHSEEQIAKALQGTWRAEHLFALSQAVELYEFYHRQLVACDAQIATHLATFPDQSGGQPLPSKPRKSKRKANAPRFEVRTPLYRMAGVDLTALEGIEEETALIILSEIGTDMSRWPSVKHFCSWLGLCPQHKVSGGKVLSRRVRPGANRVAVALRLAAGSLHHSQSALGAFFRRLRARLGAPKAITATAHKLARLVYSLLKHGTAYVQQSLEEYEAQYRERKVKGMARQAKALGYTLVPLAAPDGQAMPAVAGAPA

SEQ ID NO: 425752 - protein, 391 aa, unidentified
MSMYFIGIDISKYKHDCCIISAANQKVVSKVIIKNNKAGFNELLTIIHSLANPADIRIGFESTAHYALNLELFLENSLLTFMEVNPVLISEYKKSKTLRRTKTDSVDCESIARWLMTVEYKPHSKGFYHAYSLKSLTRLRDKLIRQRSFYLVKITNVLDHTFPEFKPFFNERLSKTALYLLENYGSAEKMARMNSASYEKLRSVSRGKFSPQQFLRLKELAVNTVSVNNSIFDVELNSLLSLYKSLVKEIDTIKKEINQLIEEVHPHYMSVPGIGPLSAAVIHSEYGDISNFTNPGQMLAFAGIEPGINESGTESHGGKMVKRGSSQLRYTLINCCLPLIRFDMTFATYYAKKRGEGKPHRVAITHVAKKLIRVIYALESQDIDFNAQELR

SEQ ID NO: 425753 - protein, 366 aa, unidentified
MKKHSIRIKNGKGDWEGKKLTIGMDLGDRTSRYCVLDQEGQVLFEGSAATTQKGLSEAFSALPPSRIAIETGQHSPWVSRHLGGLGHEVIVAHARNVRLIGESTRKDDRLDAKTLARLARIDPALLSPIRHRSAEAQAHLTRIRARAVLVSSRTALVNAIRGLTKAYGERLRKCHPEQIRKELATELSSELRTALEPLFQEVQSLTERIQHYDREIEKIAKQHYPEVAQLQQVNGVGTLIALTYVLTVDDPHRFGKSRDLGCYIGLRPGRRNSGNSQPQLHISKEGNRYLRTMMVQGAHYILGPFGKDSDLRRWGQKLAERGGRNAKKRAVVAVARKLAVLLHKLWVSGEVYEPLRNHREEKRAAA

SEQ ID NO: 425754 - protein, 438 aa, unidentified
MSNKVIFNLDELFISVGIDVGADFSWMSIALPNQQFVGKPYKILHNSIDSLTTAVSKIKEAEELYSLESRIFLESTGIYHYPLFCYLRDKGFNCSVINPIITKNSTNINIRKVHNDRFDSKKAALVGLKPDLKVSLMPSDLALNCRNLCREYYDLMDNRSAYVNKLQGELRMAFPQYLGIFSKVTINTSLTLLETYTSPSAFLKADKQEIIDIIKSTARFGLTYAQNKYNAIIQAATDANQFGYIINSNIKRIRLYISFIRKYDEEINSILESLHELVDANEDADFVKQIHLIETFKGAGFLSAVSIMGEIGDFSAFSKPKQLFAYFGLDPSVKQSGKFEGTKVQMSKRGSAIARLVIHTLTLQSISISRNGEAKNPVLREYYLKKCDSKPKLVAMGAVSHKVCNMIFAILRDNKPFKIIAPQEHIKQYNSAKCDIAA

SEQ ID NO: 425755 - protein, 429 aa, unidentified
MQESSSSAPAEGVAAYIGIDWADQKHDVILRAASEPAKVEHRRIAHEPEALMEWLGELQQRFAGKGKILVSLEQSRGALIYHLMGYEFLELYPINPSQLASFRQTFSPGGAKDDRPDAELICELLYCHRDRLKAWKPDDELTRKLAFLNEGRRKAVDQRTQLANEIKSQLKVYFPLALQVLDNDCLTALAADLLLQSPTLDSLQKQSAHKLRKFFYAHNCRQEQKLLERLELIKAAKPLTRDLAVIEAAALRVQLLAQQLKSLLPYIARYEKQIAELFDAHPDSFLFRDLPGAGSAMGPRLLTAFGTDRKRFEHSMEISSLSGVGPVRRASGKKSGKHATVHFRNACPKFLRQSFHEFAACSIRYCSWAEACYQTQRNRGKGHHAAVRAVAFKWIRILFACWKQRVPYDPQRYQQTLQTRGSEYAKITA

SEQ ID NO: 425756 - protein, 341 aa, unidentified
MKQDMSVVGIDIAKRVFHLVGMDERGKIVMRKRCSRGEVLPLMANLGPVTIGMEACGGAHYWARHLREQGHEVKLMAPQFVKPYVKSNKNDMRDAEAIAEAVTRPSMRFVPVKDIAQQDIQALHRVRERLVTARTALVNEMRGLLAEYGIVLPQGVAKFRQALVSTLEAAQTKLTPLGQELFHKLFAELGKLDAEVAYYQEKLEALADTHPVCQRLQTIPGIGPLTATALMAAVSDAQVFKNGRQVAACLGWVPKQYSTGGQTRLLGISKRGDSYLRKLLIHGARATLRWVKLKTDDRSRWMRGLLARCGWNRTAVAVANKNARIVWALLSRGGVYGDNAS

SEQ ID NO: 425757 - protein, 412 aa, unidentified
MNERVEKACGIDIHQAFLIATVLDLAGTKETRRFSTCIEDLLNLREWILDRKCQRVAIESTGIYWIPTYTLLEGKVETIVANPYQIKNIPGRKNDDIDSEWIAEVCLNGQIKPSYIPPIEIREIRELTRSHVKITQARTSFKNRVHKILSRSGIHISGVLTDIFGKSGMIILNGLLNGKNIDQILNEIKNKKIRIKKSEIKESLKGELSQNDIFVIKECLDSIKFLDQKIREFDSKINQNLKGMKKEMEILMSIPGVGFTTAAAILAEIGNIEVFSKSKKLVGWSGLAPAINESAGKSSNGHITKRGNKFLRTILVLAANSIAKGKPNKLRFFYQRIKAKKGHKKAIVALARKLASIIHHLLTFKEVYSEEEGKEKKFKIPKFIPVPDFSIDDMIGILSEAGYSVDKPAVNT

SEQ ID NO: 425758 - protein, 429 aa, unidentified
MTRISAGVDVSKNRSTVCIMDQDGKVIMRPFLVWHSTEELDFLADTPKRLNGEVRVIMESTSIYQYPIALHLKEKGIFISIVNAYKVKKFANTDFRGGKTDKKDSRTIASYGISYWDKLVEWQIPKDTYFNLDLLNRTYMNAKKHRQIILQELQHYIDCAMPGMDKELHSLNLNTKKDFMLDFVEKFWHRDKIVNMTEAEFTEVFTAWAKEKGYRPVEGKAAKIYAIAKSCIPYYPANPTVKTILQCIVDKLSGVNRTLVTIVTQMIEEAKKLPEYQIVREVPGVGDPLAARSFGSAGDIRRFKNSKALVAYAGIDSPPDESGDFSSTHRHITKKGSKVFRDTGYEIMMALRAQKRTWEKVRKNPDVYDYMLRKEAEGKPPKVAKIAALNKFLRIIYARIKELYDNMALAERAKTKTRSKTRAKTKVTA

SEQ ID NO: 425759 - protein, 419 aa, unidentified
MSTEKRKVCGIDVHKAFLVATILDREGNCETRRIQPNTESLLEFRDWIQAENCESVAFESTADYWRSLYLVLEGRVPVTVANAHHIKHVPGRKTDITDSRWIAQLELNGLITPSRIFAGEMYDLRSLTRSRELLVQNRTELKNKIHHLLDSTSIRLSSVISDLFGKSGTIILKGLVQNKPFEEIIESLPKKMRGSADAISSAIPASNPPVFLVLLQSYLKLVDDLDNEIKLLEGRIREALINKSREIQILTSIPVIGFIGVSTLIAEIGDVHDFEDADKLTKWAGLTPSVYQSANVTRTGSITKQGSRHIRWILVELGHVAIRSPGRIRTFFERLMPKKGYKKAIVAVARKMLRIVWHLLVHDEVFVDDLPRSKQVKFPKMPKKIQAVGINRIIELLSTASEVIFKDRNQENFRLGLSD

SEQ ID NO: 425760 - protein, 332 aa, unidentified
MYLGIDVHKRYAQVAVMAEDGKIVEEVRVENANLDDLAQQYAGAQAAIEATSNYYHIHDALSEHLDVTVAHPKELNQIADTDKKTDRVDAKELARMVRLNSVPESYVPTDEISEARARVRGRQSLVEHRTEYANKVHGLLSDHGINEDVKPLTQEGREFLRELSLPTPWDSVLASYLEVIETLTDEIQNLEETIEERAGSLEETQLLMTIPGVSYYTALTIYAELGEIGRFDGDKEVVSYVGLNPVIRESGDSRIEGELSKRGSGRVRWLLVQAAHTAVHTCNDGYLGRFYERLASRKNSQKAIVATARKMLVSTYHMLDRGEVYDPPGVSA

SEQ ID NO: 425761 - protein, 343 aa, unidentified
MAKDTLVAVDLAKSVFEVAVSHRPGQVATQRRYSRQQFPLALAQLPPATVVMEACGSAHFWARRIRSLGHEAVLLPPHAVRPYVRRNKTDRTDTKGMLEAYRNEEIRHVPVKSVAQQTLASLHRVRSGWLGERTASINTLRGLLREFGIVIPLGASHAVPSAWAQLEDAESEIPDPLRPALGEICSEIKGLERRIKMIEHQLAALAVQTPAVAQLMTIPGVGLLIATALVAFVGDIQRFPSGRHFASYLGLTPRESSSAFRRRLGSISKRGDVYLRTLLIHGARSVLLAAKRRTPDRLRAWALAREAARGHNKAATALANKLARIVWAVWKHDRPFHSVPNAV

SEQ ID NO: 425762 - protein, 417 aa, unidentified
MRTLRGSSVEWTARTEEVPLRELIAVPVDVGKSSAMVMACDFTGRVLLSAVEFPLTRAGVGQMLARVQAAVPAGAQLVRVGVEAAGHYHRPLTTVGVWPDGWQVVELNPAHVSAQRRVNGQRGVKTDRVDLVAIADLLLAGRGSPVIACEEPLIELAAWVAHRRRRGEVRTATKNQLLTQLDRAFPALSLALADVLGTKVGRLVAAHFADPARLARLGPGRFREFAARRGVKVNRQVAARLVEAARTALPTAEAGIARQILQADFALLCDLEAQIAAAQEQIAALLPATSYHVLTTTPGWGVTRAAEYAAALGPFTRWGSPAKVYRAAGLTPALYASAGRRHDGSISREGSVHLRRALLGLGIGLWQNDPAARGYAHTLRARGKPGGTIACALAHRAGKIAFAMVRDQTPYDPSRWS

SEQ ID NO: 425763 - protein, 418 aa, unidentified
MIHAVVERCAGIDVGKTFLAVCLMTGPASEEPTTEFRQYGTVVSELEMLSQWLEENHCTHLVMESTGWYWKPVFNVLEEKFTIVLANPQEVKNRKGHKTDWKDCQWLAHLLRHAMLRSSYIPARPVRELRDLTRRRKQLVRSAAQEKNRVQKALEEGNVQLGQVLSNVLGKSGRDMIEALLEGRLGPQQIAELARGQARKKRIELSGAVQNHRLTDSQKSLLRHSLRHLDFLEAEIARLDREIQKHIRSNGWQLQGELLLTLPGVDQTAAASLLAELGPDAGAFPSAAQLSSWAGLCPGNNTSAGISHSCRTTKGNRWLRDTMTEAAWAGCRKKHSVLWIKYRRLAARRGKNRAVIAVAHTLLVIAYCVLTRRVPYRKTEEEQLNERAKTRSIRYHIRCLASLGVPVDPGPTASAPSP

SEQ ID NO: 425764 - protein, 358 aa, unidentified
MTTSQTSSVDFTGHEIYVGMDVHKKSWSLSVHTKELEHKTFTQEPDSKRLVHYLHRTFPGATYHCVYEAGYSGFWIHEQLKALGVDCRVVNPADVPMSNKDRNFKTDTNDCRTLARRLKTNDLTGIYVPPRDSQEDRTLVRTRQEFVNKQTRVKNQIKAFLSFYGIVIPQELEESHWSNRFLLHLESLELTRITGTTALKAHLGELRALRKTILNLTQAIRTLSRTDDYRADIALLMSIPGIGLTTAMTFLTEIVDINRFPGLDELASFVGIAPGSHSSGESEHITGMSHRGNAHLRHLLIESAWTAARSDPVLLKDYSNYCKRTTPTKAIVKIARKVLARMRFVLKKQTPYVSLDQE

SEQ ID NO: 425765 - protein, 362 aa, unidentified
MAQVRSWAGLDVHARSVLAVTMDATTGEIRSRRLPGETQKVVEFCRSLPGSTRVAYEAGPTGYGLARALDTAGVSCVVAAPGKIERPSGDRVKTDERDAARLLRLLMIDALHPVRVPAVEEEALRDLVRAREDVRRDLMSARQRLSKLLLRHDVVYEDTASAWTQRHRAWLRAQDIGGGAQITLLDHLGAIDVLESRREQLETAISTLIPDSPYALAVARLRCLRGIDTLSAIGLCTEIGDFHRFARPGQLMSYLGLVPSENTTGASRRQGAITKTGSRHARRLLVKAAWPYRKTPARGVVLQRRQAGQPAAIISLSWKAQRRLHHLWQHLDSDRGKRRTIVAVAAARELAGFCWAITTTET

SEQ ID NO: 425766 - protein, 313 aa, unidentified
MNVGIDVSKEHLDVAIRPTGERWRVTNDEKGFADLRKRLAKRRPERIVVEPTGGYEAGVVQTLAAAKMPVVVVNARQVRDFAKAAGHLAKTDRIDADVLAHFGEALKPEIRALPDEAHRELEALVHRRRQLVDLRAAEVKRKQLAPVLIHPSIDELIKFLTRQIDDVEKDLRALIRKTPAWRESDDLLRSVPGVGAVLSSTLTALVPELGKLNPKQVAALVGVAPYNDDSGKGERKRRTWGGRAPVRAVLYMAACAASRFNPAIRAFHERLAATGKPAKLVLVACMRKLLTMLNAIARDRRPWNPRLVAAGAK

SEQ ID NO: 425767 - protein, 428 aa, unidentified
MNKKEAEETDEYAALIGLDWATEKHDVYLWDAATGEVQHRVVQHSPEALSEWLCELQTRYPGQRLALCLEQSRGALIYALMGYAFLDLYPVNPATLARYRAAFVPSRAKDDPSDARLLCEILRLHREKLTVWKPDDEQTRTLGFLNEERRKAVNLRVKLVLRMQAALKLYFPQALAWVGTDLSSPMACDWLLKWPTLEAVQRARPQTVRAFFYAHNCRSAARIESVLAALPTAKPLTTDAAVLAVQPLTVQMLAKQLRLLHHSIIEYERQIAALFRSHPDASLFENLPGAGKAIAPRLLAAFGSDRSRHPTAQNMQTHAGISPIVERSGKSCWTHWRWNCPKFLRQTFHEFAKSSIPYSVWAKAYYDQQKSRGKGHNAAIRSLAFKWVRIIHRCWLTRTPYDESLYLQALAQRGSPLCAFIAAPTQET

SEQ ID NO: 425768 - protein, 427 aa, unidentified
MGAMSESEVPGQELQFSAWVGIDWADQKHAWCLQVAGTTQRENGEVEHTPEAIEAWVGQLCRRFDNRPIAVAVEQVKGALVFMLSKYGSLHLFPVPPAMSAKMREALYPSGSKDDPQDADLLLELLLLHRDKLRRLSPDSEATRRVQNLVEERRNLVDEKTAQINRLTHQLKIYFPQMLEWFEQLDTELVCALLELWPTLEELQKVPPERLRTFFRKQHCRYLELIERRLAGIRQAIPADRAVIEAKSAVVKVSAKVIRSLVWGIADLDRKIEEAAAAHPDFFIFESLPGAGAVLAPRLLAAFGSQRERYASAEEVQTYSGISPVMKRSGEKKWVHFRWACPKFVRQSFHEWAGHSIAHSQWARSYYRQQRERGKGHHAAVRGLAFKWIRIVFRCWKDRVAYDESRYLMTLAKRNSPLAAVPGGTML

SEQ ID NO: 425769 - protein, 289 aa, unidentified
MVQIYGIDLGMSSFDVSFLSESGSVRHLSGVKNTVHGISKFLLSLPSSAVLCAEHTGVYGDLLLRLCTLNRTCLCFVPGYQIKHSLGLQRGKSDPLDACRIREYAERFYDLLRPCFYPGEEMSELQELYRTRSLLVESRKRLDTLNIGDNCKSSVSLAADHARRAVLAELNTQISGLDHEIEALIQNSSEFSRNYQILTSIVGVGPVTSCELIIKTENFRKLDTAKKCAAYAGIAPYPKESGKMKCGHKISPMGDKQLKTLLFLCARSAKEHNKEIRLYFLKKQVQMNK

SEQ ID NO: 425770 - protein, 379 aa, unidentified
MATTRTAPRSQHTLKPVALYMSLELGDKRWHISIGDDRRSVSRYTVEAGHTEEVADCIAKAAARLHTTARARVQSCYEAGRDGWWLHRWLTSVGVDNIVVDPASIEVNRRARRAKTDRLDADKLLAMLVRHHSGERVWSVLREPSPSDEDARRVHRELQRLTHERIAHTNRISSLLVLHNLRPRIVIGGRDWPAWWNSHREQVPPSLRAELEREAVRLKVVKEQVRVIEAERAKELAEGKQPLVAQLARLRAIGAKGAWVLVKEVFGWRHFANRRELAGSLGLVPTPYASGGSEIEQGISKAGNRRVRALLVELAWSWLRLQPDSALTQWFNRRFARSGKRMRRVGIVALARRLAIALWRYLQDGEIPAGACLKPTARA

SEQ ID NO: 425771 - protein, 449 aa, unidentified
MASKKKGTKKTTPLAPVNRRAAGVDIGSTFHVVAVPQELDAEPVRSFRSFTTDLNALADWLGRLGVTTVAMESTGVYWIPLFEILQARGLDVVLVNARDAKNVPGRKTDINDAQWIQQLHSYGLLRASFRPEGEIVALRAYLRHRERLLEYAAAHVQHMQKALMQMNLQLHHVVADIAGVTGMKILRDIVAGETDPEVLAAYRDMRCKSSIETIRDSLTGNYRPEHVFTLKQALELYDFYQARLSDCDVEIERALHALPKRAAPGPARSRQRGKNEPQFEIRLVMNALLGVDLTEIHGLGPYSVLRIFAECGSDMTRWPTAKHFTSWLTLAPGNKISGGKVLSAKTRRSANRATVLLRLAAVSVSRTATALGAFFRRLAARVGKAKAVTATARKIATVLYNTMRHGKAYVDPGAMYYEERYRERALSNLRRRASAMGFALVASAVEGAS

SEQ ID NO: 425772 - protein, 409 aa, unidentified
MGLYCGIDWATAHHDVAVIDDDGKVVARGRVGNDAAGFAALLGLLAEAGDSAEHPIPVGIETDRGLFVAALRETGRVIYPINPLAASRYRSRYSVSGAKSDATDAALLANIVRTDPGAHRPLPADTELAQAIRVLARAQQDAVWARQQVGNQIRDLLKDFYPAALVAFADLDGGLTRPDARTILTAAPTPAQAATLTPARLRRLLIKAGRQRYLDRDVARLREVFSDTYLHQPPAVENAMGIQLSALLGQFEAACTAADTLAEAAIAHFDQHPDAEIITSFPGLGMLAGARVLAEIGDDRTRFVDARGLKAFAGSAPITRASGKKTVVLHRHIKNRRLAAVGPIWALVSLRASPGARRHYDTRRAAGDWNQQAQRHLFNKFLGQLHHCLQTGQHYDEHVAFPPPLQLAA

SEQ ID NO: 425773 - protein, 346 aa, unidentified
MSYSTTVGVDLAKNIIQISVVSDRGKELCNRSLTRKKFAEFLGTQSPSLIAFEACASAHYWARAAKRHGHAARIIPAKAVAPFRQGQKTDSNDALAVAEAARRPNIKDAPMKTVEQQGLQSIQRSRYLLIQECIALSNHMRGILLEFGVTIPQGFASLLRTLPEVLEDGDNDLPDLYRPTLHRLYGRMLELRSDIEAMTKEIDNLVKQHPVCSKLTALEGVGPIGALSLYAALGSGTAFAKGREFAAYLGLTPRQHSSGGKTNIVGLSKKIGNRRLRSILIQGALAYVYRMKEPRTSKDRWLLDLIERAGPRRAAVALANKNVRTAWALVTQGTEYQRREQQEMAA

SEQ ID NO: 425774 - protein, 336 aa, unidentified
MYCGIDLHSRDCWLAILDEDLGVVEEERVGNDLERVLAVLEPYRMDLEGVAVESTFNWYWLVDGLMDAGHQAHLTNTWAVKQYEGLKYSDDRHDARWLAQLLALGILPEGYIYPKEERPVRDLLRRRSFLVRKRTSFLLAMRGSFECRTGMRVRSNDLKGWSAADVEGHIKDPTEALGISCLLEPMNAVNGQIKELEKRALGRGRLRPEYAALETVWGIGKVLALTIMYEVGEIERFRKVGNFTSYCRLVKTARLSAGKRKGTGNRRNGNPYLSWAFSEAAHHAIKHHKEARNFYQRKKAKTNGIVAVRALAHKLARASYYVMRDHTDFDPGKVFA

SEQ ID NO: 425775 - protein, 408 aa, unidentified
MTDSGKRYIGLDVHKHYLIALGVDAELNVVLPARRVELSRLESWMEKTLTRQDEVVLEMTTNTWQLYDELCEYAGSVMVVHPPHVALITRSQVMNDKIAASILARLLAKGLLVGVWVPPQEVRELRGLVAQRKKMTRLATQAKNRLHAVLQRHHLAPPEGNPFQNAQNDWWLDLPLGKLEKVNLQCDLDTLHFAETQRARLTSMMEEIASQDEQVTRLMHLSGFGVVTAVTVWAAIGDIRRFAEPKHQVGYAGLGAKVHESGMSSRSGRITKAGRRDLRVALVEAAQVAANTHPHWKAELARLEPRLGRNKAIVAIARKLLICGWYTLSHQVPDRFAEPEAIAQKFLKFAYRVGKNNRPAGQSAAQFVRERLDALHFGSELTSIAWGSKKPIPLPPSAMQKRRERRPN

SEQ ID NO: 425776 - protein, 372 aa, unidentified
MNYNTVYVGMDVHKESFTLCSCKYEDEKASHYQRTPASYKNVLRYLAFLRTIYGEDTRFVCGYEAGCLGYSLYHQLENFNVECVILAPTTMLEQRSKRRIKTDKRDAEIIARSLAQHNYSPVHIPTETDNQTKEFIRMRDDHKAELKKIKQQILSFCLRQGYQYDGSGNWTAKHVKWLRSLKTEGLYKEILDEYLLTYTILTDKLNRLDQRIEELASEEEYKEPVSKLTCFLGIKTHTALSVIVEVGDFQRFASARKFAGYLGLVPGQHSSGDDRNGLGITKAGNTHVRRLLVESAQSYTRGKIGYKSRVLRSRQAGNSPQIINYADRANERLRRRYYQMILKDGKKYNIAKIAVARELACFIWGMMTDNIY

SEQ ID NO: 425777 - protein, 304 aa, unidentified
MKKYSELFIAFDTAKKKHAVAVADVGREGEIRYLGEIDSSSTAIEKVLGKLAGRYATLHVCYEAGPTGYGLYRQICALGHECTVVASSLIPRRPGERIKTNRRDAVTLARLFRAGELTSVWVPDAVHEAVRDLVRAREVASRDLRKKRQQLLSFLLRHGRIFTGRKHWSLAHRRWLADQKFQHPAQQIVFQDAVNAIEDAAARLRRLDEQLVAIVPSWSMAPVVTAYQSMRGVSFIAAVTFVAEIGDVRRFDNPRQLMAFLGLVPAERSTGERVRRAGLTLAGNRRARRVLVEGRSAPTTGGRC

SEQ ID NO: 425778 - protein, 375 aa, unidentified
MIATTHPEMSVSEPTLYVAFELGKKDWKLAMTSGFGVTAWLRTVASGDLGGVERALRQGRQRLGLSAHAPVVSCYEAGRDGFWIHRALTQRGIANRVVDSASIEVSRRARRAKTDRLDALKLVQMLVRVCLGERHVWHEVRVPTVADEAARQVSRERTDLVQAQTRVINQMRGWLATWGATLPSRRRGNWWTTAQDWAGATLPAALQTRLARAEARLAMIAGQIGELEAQQAAAVTTAAPTRALRQLVQLKGVAPTSASVLLDEGLVWRAFRNRRQIGGLLGFAPTPYDSGESTQEQGISGAGNKRLQSISLQLAWNWVRWQPQSALTQWYHARFGTGKRARRIGIVAVARRLLIALWRYVTTGVIPAGAILKIA

SEQ ID NO: 425779 - protein, 356 aa, unidentified
MSSGTSTSHLQLDPPPPGLRIGVDTHADVHVAVAIDELGRRHATISLPTTMAGLRRLHTWARQLGPVVAWGIEGTGSYGARLARLLVDHGEVVLEVSRPDRRLRRDLGKSDPIDAEAAARAVLAGTALGQPKTGTGAAESLRHLRAARQAALKARTQAANQLRALLLHAPEELRTLRDQANPGRLAASCARLRPATATTGADLLKHTLRSIASRWLALDTEIRTLDTLIDPLLRSAVPVLLARRGIGPDVAATLLVTAGDNPQRLRSERAFAALCGASPIPASSGKTRRHRLNRGGDRQANRALHVIVLNRMQHDPRTRAYVARRTTEGRSKLEIMRCLKRYVVREVFPLLRQAVS

SEQ ID NO: 425780 - protein, 362 aa, unidentified
MKKDNNSGKKNEQPSKQTKSRGPVRRDTKEVLAELVAKLLEKLDPKKVAATSAGEEDQRGELRPNLDRLTVGVDLGDQWSHYCILGLAGETLAEGQFQTTQEDFGTFFQGLNAARVVVEVGAHSAWVQEVIRGYEHEVLVANPRLMEGSKRRKRKNDRIDANKLARLGRVDPQSLHPMQHRSPEVRQDLVMLRARDALVAVRTELINATRGLVKSMGKRLPKSSSRSFAHKAEEAVPAEVSDALLPVVRVTAMLSDCIQEYDKKIEKLAREKYGHTALLRQVKGVGPITALAYVLTLENPKRFVKSRDVGPYLGLVPRQEDSGESQPQLGISKAGDTMVRKLLVGSAQYILGPFGPDTDLRR

SEQ ID NO: 425781 - protein, 368 aa, unidentified
MIERFHGIDRHKKHFTASVLNREGKEIEFVTKCVDLRGYIEKLGAEDAVIVEASAGAFYWADLMESQGTVCYVLDPFKFKIIRDSWNKTDKQDARNMAKALWIYLVTGEFGIPTVYKPSMEIRELRKLFCQYRLFSRQMTMLKNNIQAIFVDNGVDLNSEEKVRVLSKKHGEKAMAGYEVSPASRVSLELNLDLLWKVEEQKEKIKKEILLAGEPFSYEVKLLITVRGITPLSALAFLADVADIERFRTLRKMNAYLGLVQKVRESGGKSKPGHINRASRSLTRTLLTQSVMHFADASPQLRRYYSELSARRGAGRARIALIRKVCGIMRRMLLDGEQFRGMKEDNFERKWKRYENQLKRIKKERKIA

SEQ ID NO: 425782 - protein, 326 aa, unidentified
MLIIGCDFHSRFQQIAMVNTETGEVTERRLEHGNGEAKKFYAELQKPVRVGMEATGYAQWFEQMLAKLGYELWVGNAAEIRAAMVRKQKTDSRDALHILDLLMENRFPRIWIPTPGERDLRQLLWHRHKMVCLRTSVRNQLHALAMGQGICRKQKLWAAAGRQELEALTLDAWARRRRQELLEILGVRCLMEQPGVGPVTALMFVLTIGPVERFRKSKQIVSYLGLNPRESSSGGRQRLGSISKQGNSMVRFLLVEAAQSASRYDEELRRNYQRLKFRRGSAVAKVALARKLAVRLYWKLRKQPSPVPPARTQGNPENSLVDVSPS

SEQ ID NO: 425783 - protein, 354 aa, unidentified
MSHNALLPNVTIGLDLGDRMSRTYEVDAGGACLREGTVPTTVAGITQYFAKRERCRVVLEVGTHSPWVSRLLEELGHEAIVANPSAMFAGRGRRRRNDRLDAQFLARQGRADVTLVSPMQHRSAAAQRDLEHLHARDQLVAVRTKLINHVRGAVKSSGCRVSRCSSEAFAKRAAGELPEALSAALTPLLEVIADLTRRITAAERQVAVIMRERHPVAQRLQQPAGVGPLTALAFVLLIEDPKRFRKSRDVGPYFGLVPRLDDSGDATPQLRISKAGDEFGRRLLVSAAQYILGPFGPECDLRRYGTAIAHRGGKNAKKRAVIAVARKLAVLLHQLWVSQAAYDPDYQLKRRAAA

SEQ ID NO: 425784 - protein, 538 aa, unidentified
MRRKNRTSRRRARHVPGQKRRGGFQDRVQKVKPEHFAIVPVDCGKSEGQIRVADFYGNVLLKPFSFEISRAGIESTCKLVRETFERHKIYDCVCSIETTGRYHRPIKEAFREQQWDTRLVHPFTTSLIRRSADEGTKTDEIDLEALHRATVDGLAMRPEEIDPQWQQWRVLARHRRDLVEKAAALKAQLHEAIHAYLPGFLGVWDSDNVWESPIPATIATAFDSVQALRNASAEQFHQVAREAGSTIHTRTIKRIQAWTHQAAPADPASPSYHVRACSLWQDLKSKWREIRTFELDLANFLCQRAGVLLLAFPGINVVSASDYVAELGPITNYATSKAIAGRAGLYPARYQSCNTDHADGPLVPRRNRELRAALMRIARNLDRCNAYYMSIGAEYAKRDTEHDRKVVIASRFSRLSYYILAGEKLVGHPALQNSEKILQKLLEFYSEHRAESSVTTEALGHVIRRLSPATLPAEREGMQAQFNEVQNAKRRTGRVVRLGEILPDLILRIDQRLAKETTTQTSDPPNNNMIQKDRTHGS

SEQ ID NO: 425785 - protein, 346 aa, unidentified
MKKFFVGIDFSKRKMDVSIVEKDFPERTIGCKQFINNAEGAKKMCEWVEYTTNTSTKLEGEVLFCCEHTGSYCLEVCDYLSENGKYIWLGNPLDIKRSMGLVRGKDDILDSRRIATFAAEKHHRAIMYMRPEDSTRALKYLLSIRNTLVEHKKALTCQIKENFPKLHDAALLCEIENELKHALDLIKTEIKKIEKMMLDIILSNKEYKHTFDILTSMKGVALINAAAIIVFTDNFKRFSFNSRKICTYWGITPFRNESGDSIRRGTHTSPIRNNWLKAILSEAVLCAIRYEKRLKEYFLRLIAKGKHRNVALNNTKNKLLKTLVAMVRDGKKFDENYVSIPQTCAV

SEQ ID NO: 425786 - protein, 305 aa, unidentified
MIVLGADMHKRSHTLAAIAAGTGELLGDTTVAVGECGFAAALEWATRLGDDRVWALEDCRHVSGAFERFLLVHGERVVRVATRLMAGERRAGRDRGKSDRIDALAVARAALREGVERLPTAELAGVELDIRLLVDHRERLVRMRTALYNDLLWHLHDLWPEQRFPKCALPSKKWSATVRRRLARAEQTARVRIARDELRHVRELSQTVDALEAQIAELVAQAAPQLLAETGVGPLTAGKLIGEIAGAQRFTSDAKLARAGGIAPIPVSSGNTNRHRLDRGGNRQINTAIHRVAVTRSRCDTRPRA

SEQ ID NO: 425787 - protein, 391 aa, unidentified
MLICGIDIGKFRHEACLIDETGKQLAKTLSFTNTTDGGEKLLEYFTKHNPGNHVIVVGMEATGHYYLSLYCFLFDKGYQVHAINPVQSDAIRNLFLRKTKNDAKDSFLIAETIRIGRFSSTPLADEDILSMRQLCRHRMDLVDYIADQKRKIIGVMDRVFPEYQHIFSDMFGKTSTELLNRAVTPEELLAIDTKELCELLKKHSRGRFGEAKAEQLRNAAKSSFGITIATTAFSMQLRQLLEMISLLEIQLKELEEEIAHYLRKMDTYITTCPGIGDVLGAVILSEIGDISRFSEPKKLVAFVGVDPSVKQSGEFIGTQNKMSKRGSPHLRRAFFLAAGVAAFHDPILYAYYQKKRAEGKHHYVAVGAVSRKLICIVYAVLRDKKPYVPNC

SEQ ID NO: 425788 - protein, 319 aa, unidentified
MLIIGCDFHSRFQQIAMLDTQTGEIVERRLEHESGEAERFYRSLPHPVRVGLESSGHAQWFERLLAELGHELWVGDAARIRAAVVRKQKTDTRDASHILDLLMTNRFPRVWRPSPAERDVRQLLVHRQKLVWARIKVKNQLQTLAMNQGVCIRRKLWASAGRRALEGLTLGPWTSRRRKELLQMLDQLNGSVEELDRAVGEEAQKRADVVRLMTHRGVGPVTALAFVLTLGPVERFRRSKQVVSYLGLNPQEHSSGGRQHLGSISKQGNTMMRYLLVEAAQTASRFHPELRRNYQRLKSRRGSAVAKVAIARSQRQYEG

SEQ ID NO: 425789 - protein, 308 aa, unidentified
MIVQNYVGCDISKTWLDFFDEASGRFRQIANQADAIAAYVAGLCPGHDFVVMEATGVHDRLLRHALAKAGVAFSRHNPAHTHHYAKSTRRRAKTDRLDARMLSDYGRRYQPEAEPAPREQNERLQSLAGHRDHLVGMRATLKKHLAEAFDELVIADLEEAIAHFDTRIKALESRIAQVIRQSEDTARDYTLMVSVPGVSKVGALCLLALLPELGQRSPKSIAALAGLAPFDNKSGKLNRRSQIQGGRSRVRRALYMAALSAIRTCDRFKAFYTALAARSGSKKLAIIAVARKLLVVLNAIIRDKTAFA

SEQ ID NO: 425790 - protein, 406 aa, unidentified
MEIEAINRRVIGLDIHQAKITACALVEDERGGLRKEHRQFGAFKRDRRALADWCAAIDPAEIVMESTGIYWKSPYAALEKVGIRAKVVNARHVKNVPGRKTDIGDAEWLAMLSRAGLLRGSFVPEADHRELRLVSRQRQKLVGILASEKNRLHKVLTDSGIRLGVVVSDLHGQSARAMVKAFIEGKPPEEVIQLASRRLKASRDEMMDALHGELTPTHRFVLDELMQHIEDIEERIRRFDQKLLEGLSGAGDALMVLQTIPGVDLIGAAMLLVEIGTDMSVWENEERLSSWVGICPGNNESAGKRKSGRMRKGNPYVRRLLCEFAHAASRTESTFKAKFQGLLVRRGRKRAIVAIAHKLLRTIFFMLKRGQHYRDTTVNYEEMSVKRNAARWIKKLTEFGFLPKPA

SEQ ID NO: 425791 - protein, 308 aa, unidentified
MSPIPVHIGVDVSKAVLAIHGPQLKCELPNTASGHRRLIKSLPPGAHLIIEATGGYERELALALHEAQIALNVINPRKARDFARAQGRLAKTDAIDACVLADYGACFHPEPDAVPTLSQVELCEMVSRRGQILGARSAEKNRAEHHRMPKIRSQALKAICFMDKQVAQLDLWITEALEADEVLKKKSERLQQLVGIGPVTASVLLAHMPELGSVERGEAAALLGVAPLNHDSGPYRGQRHIRGGRSAPRACLYMAALVAVVHNPTLKAFYQQLRAKHKPAKVALTAVMRKIILVLNHMLKNPNFVLAS

SEQ ID NO: 425792 - protein, 412 aa, unidentified
MEVVHARCAGMDISKKDARVCVRIAGAGPRKAAETVTTRGSMTSQILALHDHLIAQQVTCVVLEATGDYWKPFYYLLEDIPGAQVMLVNARHVKNLPGRKTDVADATWLAQLGAHGLVRGSFVPPEPIRQLRDLTRARTAITRERSREAQRLEKLLEDAGIKLSAVASDILGVSGRAMLEALIAGDRDPARMADLARRRMRSKIPELTEALAGRFSAHHAFLARVHLNLIDQHTAAISQITERIEAAMEPFRSFRRLICSIPGISTLTADVIVAETGADMTRFPTAGHLASWAGTTPGSNESAGKVKSSRTRPGNPCLQGALGAAAMACAQNPGTCLGAKYRRIATRRGPQKATVAARHAMLTAIWNMATNGAFYDDPGAGYFTRLHPDRARNRAISQLQATGYHVTLERAS

SEQ ID NO: 425793 - protein, 396 aa, unidentified
MHAANERPEAPTTAIRMDLGAIFVSLELSRSKWLITSLSPGGGEKMSKHAVAADDIAGLLARFAELKRKAQARTGRYFPTIVIQEAGLDGFWIHRVLQAEGIESHVADPASIATSRRRRRAKTDKIDGETLVRALLAYKRGEPRVCAMLRVPTPEEEDRRRISRERKALTNERVRHVNRIKGLLFSQGVSGYQPLRRDRRTRLEELRTGDGRPLPTHLKAQVGRELDRLELLIGQMKAVEAERDAMLAAAPVDSAHFADCEQPAPAMLLALKGIGPEFAVVLWSEGLSRHFDNRRQVAAYAGLAPTPWQSGSVDHDQGVSKAGNPRLRTTLIQVAWLWLRHQPHSALSLWFKQRGKQNDGRLKKKTIVALARKLLVALWKYVNAGVVIEGAVMKTP

SEQ ID NO: 425794 - protein, 325 aa, unidentified
MVLIDERDEVVYRKRLANDLTLIIEQLSAYQPSLEGIVVESTYNWYWLVDGLMAKGYQVHLANTAAIQQYNGLKYTDDDSDARWLAHLLRLGVLRQGYIYPREQRPVRDLMRKRSQLVRQRTTNLLSIQNLYTRNTGQALSANRIKELQVEDIDAMLSVSDLTLAIKANLAVLRSAQEQVQILEQAIEERVKLRPEFSFLKTVPGIGQFLALTIMLETGDVQRFSTVGNFASYCRCVGSQKISNGKRKGSGNTKNGNKYLSWAFVEAANFAVRYQPRIKSFYQKKKAKSHGVLAIKAVAHKLCRACYYIMRDRVPFDVSKAFGQK

SEQ ID NO: 425795 - protein, 345 aa, unidentified
MEQYVGLDVSQKETVICVIDGNGKQVWEGVCSSTPGAMAAVLHRKAPLAVKIGMETGPLAVWHWHELRRAGLPIVCLHARHAKAALSVQLNKTDANDAFGLAQIVRTGWYREVEVKSLESHTLRLLLAGRARLVSMRTTLYSQIRGLLKTFGVVLQAGKGGTFERLVIKGVPADRHVKLVIESLMATWRHLTLELRKFDREISKISSTNPTCRRLMTLPGVGPITALAYLTTVDEPRRFARSKDVGAYLGLTPRRYQSGEVDHSGRISKCGDRMTRSLLVEAAGVLLCRNKRASVLKSWGLKLRRRVGFSKARVAVARKLAVLMHRMWMREMVFQSYPATSGTAV

SEQ ID NO: 425796 - protein, 416 aa, unidentified
MKKHNNSGKKSEPTSKRTKSRGPVQRDTKEVLAELVGKLKEKLDPTKVAATSAGEKPQRGELRPNLDRLTVGVDLGDQWSHYCILGLEGETLAEGQWRTTQEDFATFFQGLNGARVVVEVGTHSAWVQEVISGCGHEVLVANPRLMDGSKRRKRKNDRIDANKLARLGRVDPESLYPIQHRSREVRQDLVMLRARDALVAARTEIINTTRGLIKSMGTRLPKCSSRSFAQKGEEAVAVEMREALLPLVRLAATLSADIKEYDKKIETLGQEKYGHTALLRQVKGVGPITALAYVLTLENPQRFAKSRDVGPYLGLVPKQEDSGESQPQLGISKAGDTMVRKLLVGSAQYILGPFGPDTDLRRYGWRLCERGGKNAKKRAAVAVARKLAVLLHRLWVSGEVYEPLHSAMSAPIAAAA

SEQ ID NO: 425797 - protein, 341 aa, unidentified
MHYAGLDVASKGSFIYVRDRKGRKIEAREIETTRKGLREAFKKYETVGVMVAVEAGGSTRWVYDELTRRGIEVYVVNPNKVRAIAESKKKTDKIDAKILSELLRINALPERVYVAKDEERELRDLMQARYQVVKGYTNLMNYIRGLLRQEGIRLKAKELKMMEIFVKLSGDRIPGHVKEILERYKGTIEAMMEQKDKLEEKIKSYKSKEIELIKTIPGMGEISSRTIISAIGEIKRFKKAKALASYCGLVPSVRASGERVEYGHITREGRSEVRRVGVQSAHAVLRSKTIESQPLRDWWENIADRRGKKTAVVALARKLRTIIFYVLRDKKSYDYRLLKVA

SEQ ID NO: 425798 - protein, 386 aa, unidentified
MSQRNDLSRSLIPFDQHNALIAVIEMSQSSWLVAGIVPGVERHPLKKLEPDEKALLQLLQRWREEAVKAGHTITRISVAFEAGRDGFWLARWLRARDIDAHVIHPTSVAVSREHRRAKTDRLDTELLKRVFIGWLRGEPEHCHMAAVPTIEEEDARRPNRERESLVGERSRIVNRMKSCLARLGIRNFRATLRKAPERLAALHTPEGALLPPNTQAELRRDMARLRFIMNQIKEIEQARLERLEQATEKGPNAMVRLLARVIGVGVETADMLVHEILSRNLRDRKAVARYAGLTGSPDESGSRRRQKGLARTGNARVRRGMIQLAWRFLMFQKDSALAQWYRARTDNARSMRKTMIVALARKLLIALWRFVTIGEVPAGVALRPIS

SEQ ID NO: 425799 - protein, 326 aa, unidentified
MQGKEASEQETKAKSNVGIDVSKDWLDVHALPSGERRRVANSCEGIRQLKRWLMRLELALVVVEATGKWHRHVQRSLAASGIPVAVTDPFRVRMFAKAQGILAKTDRLDARVLAQFAAVMAPPVRAPEPKNLEELRELVVTRARAVEQQTRLKNERSAATFTFLQRHLDRRIERGDKDIAALDAAILNRVKADADLARRYAILTSIAGIGLITAVTLLASLPELGHCTVKQIAMLAGLAPISDQSGRREGARVVWGGRANVRRILYLAALAATRFNADLKVFYQRMTAAGKPPKTALIAVARKLAVLANTLISQDRTWLPQAPKYA

SEQ ID NO: 425800 - protein, 338 aa, unidentified
MKKKCFIGIDVSKHTLDTAFIIRHGDTLTDPVWKQFSNTHSGLKEMNRWLLEMKISLDQHTVIVIENTGIYHRLLWQYCSKLQVDLCIENAAQVKWSLGIARGKNDKVDSRRLALYAVRHADRLKPTPGLHNNIMALKDLLTLRTKLLVQSRSISTGFHELKNVSDTATMRTMQKLLRPAQDGLKESLKRVEEQIKAMVSKDKELSRIYMLLLTIPGIGHITAVMLMCCTNLFSLCSSGKQLACYCGVAPFDHQSGISIKGKSRVHRMANKELKRLLHLCALTVIRHKQEFKLYYERKKQEGKHPMCILNAIRNKIILRVFAVVKNERPYVNNCIQAA

SEQ ID NO: 425801 - protein, 518 aa, unidentified
MLSKVMHHRGQRSGRGDRIPKVVNNFAAAYSGTGEQLATAETRLFEPCPTRADRRLPTPPPAPGPSAKRTSPLEGSHIRSRPSQVPAPLRAARIMNPNWNEQPYFAALDWAKDHHDVIVVDRVGTIVADFQFAHTAPRWEEFNCKMQSFGKCPLTIETSVGMAVDQLLERGYPLYPINPLAAKEYRRRKTPSGSKTDRHDAWSLADALRIDGQAWRALRSQDEATAILRLLCRDEIGLIETRTALVNQLQATLGDYYPLALDSFEDWASPAAWAFVRTFPTPADLAKAGKRQWQNFLHRHKLWRPQTASQRLELWAQGQQLNASAATITAKTLLALSLVKVLDALQRQIQEYRSRITQAFKQHPDHDIFGSLPGAKQTLAPRLLGLIGSRRELFPDPDSLMCQAGVSPVAYQTGKLRKARIRWACDHFLRHTIHLWVDQSRRKCDWAQTYYQAKRDNGHDHASALRCLGKRWLKVLWRMWQDHTPYDEAKHLRSLQQHASFVWQALQNTPTTPQPACE

SEQ ID NO: 425802 - protein, 390 aa, unidentified
MPIASDRPEVPTAIRIDLGAIFVSLELSRSTWLVTSLSPGGREKMSKHAVGGGDVAGLLTRFRLLQDKAQARTGKLYPVVVIQEAGLDGFWIHRALEANSIESHVVDPASIAVSRRHRRAKTDKIDGEALVRTLLAYKRGEARVCAMVTVPSPADEDRRRICRERKVLVAERVEHGNRIKGLLFAQGVGDYEPLRRDRRERLEELRTGDGRPLPPLLKAQIGRELDRLDLLSGQIKAVEEVRDALVATDTKMQSRPTPAAMLLDIRGIGPEFAAILWSEGLFRHFDNRRQVAAYACLAPSPWQSGSVDREQGVSKAGNPRLRTTLVQLSWLWLRHQPKSALALWFEERVKRTGGRFRKSAIVALARKLLVALWKYVTAGVVIEGAVLKNA

SEQ ID NO: 425803 - protein, 419 aa, unidentified
MKLEWFVGVDWGTQKHQACVVDADGEVVGERAFEHGGEGLTAMADWLLSVTDSKAAAVGVAIEVPRGPVVESLMERGFEVHSINPKQLDRFRDRLSPSGAKDDRRDARVLASALRTDAHCLRRLEPTDPVIVALREWSRLSEDLTRERVRLANRMREQLWRYYPQFLKAVDDDVATPWALDLWRSLPTPRAGQRARAVTLTRVLKQHRIRRLDAAALRERLRAPAVKLTPAAAEAATTHVRLVVERLALVNRQLDHVRGQLEEMVHRLVEAAPAGETDSSADTEADPSDAAILMSMPGIGVGVLATLLSEGNDALRRRDYAALRCLCWVAPVTKRSGKSVFVERRLAAHGRLREAVFHWARAAARYDAVSRGKYQALRARGHGHARALRSVADRLLNVACAMLRDGACFDPQRVLVAAT

SEQ ID NO: 425804 - protein, 343 aa, unidentified
MQPVTTIGLDIAKSVFQVHGVDAQGDVVARRHLRRRQVVPFFKKLSPCLVGIEACATSHHWSRQLKALGHTVRLMPPAYVKPYLKRQKNDAADAEAICEAVMRPSMRFVETKTLEQQSCLMLHRTRHLFIRQQTAVINAIRAHLAEFGIVAPVGRNGVEELLDVVADPDDDRLPEVARECLAALGAQLRMLKAQILEFDRRILAWHRSNETSRRLDEIPGVGPALATALVASVADPRAFRSGRDFSAWVGLVPKQNSSGGREKLGNITKRGDRYLRSLFTAGALAVIRYAKIHGCKHRPWLTALLARRPTKVAAIALANKIARMAWAMMAKGERYREPVALAA

SEQ ID NO: 425805 - protein, 402 aa, unidentified
MNCVGIDVSKGKSMIAVMRPFGEVVVSPFEVCHTASELSELARLLKSLDGETRVVMESTGNYHTPVAWLLHDAGLYVSVVNAMLVHDYGNNSLRRGKTDKKDAVKLANYGLDHWLTLPRYVPEEDTRLMLKTCYRQYQQYSKVQTMLKNNLISLLDTAFPDANRLFTSPPRADGSEKWVDFVATFWHCECVCGLSKKAFTAKYQKWCRKHGYNFSQDKALDIYASACGRFGVMPKTNTAKLLVEQAISQLQTTSAALAALKQEMQSLAASLPEYPVVMGMFGVGPTLGPQLIAEIGDVRRFHSKKALVAFAGIDAPPYQSGQIDVRSRSISKRGSASLRRTLFLVMGVLLQCAPIDEPVYQFMNKKRSEGKPYRVYMMASANKFLRIYYASVKAYLESLEHD

SEQ ID NO: 425806 - protein, 355 aa, unidentified
MEKPEITIGLDLGDRFSHYCMLNGDGDAIETGRIQSTEEALRRHFEGEPTMRFALECGTHSPWISRLLEQLGHQVIVANTRKIRAITSSESKNDKNDAEKLARFAFCDPRLLSPIRHRSPERQQDLNLIQARSTLVRARTMIVNALRGLVKSAGGRLPACSPQGFEARVEASIPPALAEAARPLLNQIVALNAGIQQMDRGIEQLANRYPEIPVLRTVPGIGPLIAAAYVLTLDRPDAVQHSRQAGAFLGLRPRQSQSGDSDPQHRISKTGNVYLRSLLVQAAHYVLGRFGPDSELRRWGLKLAGSGGKRGKKRAIVAVARKLAVILHRIWQTGKPWQAFPQSANNAASKDVCMV

SEQ ID NO: 425807 - protein, 338 aa, unidentified
MTIVMGLDQHRAQITAEWLDSETGELSRARVAPAHRESVRRFLGRFRGRELEAALEATTGWRFVVEELQRIGASAHLAEPAETSALRGNKKRAKNDRSDARHLRELLQAGRLPESWIGPDHLLDLRARVRLRHSLVDDRGEWQQRMQAVLYHHGVPKRADLLTRENRAWVQELPLPATGREQIAVGLAMVDAIDLQLQPLDRELCAYARRQPGCKALRGHYGIGALTSVTILSELGDVSRFSSSREVVRYAGMDITVHASDRRRAPGHLSRQGPPALRWALYEAAQAAAREGSPDRAYFLQAAERLGRNRGCLALARKLLKRAYHTLKDLGEEGLQPA

SEQ ID NO: 425808 - protein, 414 aa, unidentified
MITVPAIRQSCAGIDVGKRELAVAIAVGPVDKEAAIETRMFGTTVPALQQLRCWLEEHQCSSVAIESTGSYWIPVKNVLEGALEMVLVCSRKHHPKKGEKTDYRDAIGLAHYHRHGLLTGSYLPERRVVELRDLTRRRKKLLGDVRGEKNRIQKVLETANVKIGNIISDLFGVSGQEMLQALLSGKPLPVSEIANLAKRRLRLRIPELEEALQQHQLNDHHRWLIKQSIEHLVLLDRQLEELESKILEYLEPYRAQYDLLLTVPGIKEHTAAAILAEIGPDMSVFPTGAQLCSWAGICPGNNRSAGKSKAAHIKKANKFLLIALVEASWGAARTGDTKFQAQFQRWTRNLGWKKAVIAVCHSLLRTIHAMLRDQQPYNLNYAQAKRYGSSRRVAGHGAVERASRVPVERMNLLL

SEQ ID NO: 425809 - protein, 323 aa, unidentified
MIDKEGINNEAQSFVGFDVSKASADALSLPDGEYKRFENTDCGLQQCLDWVQGKRHCLCVVEASGGYETALAGVLAAAGVAIAVVNPKHVRDFARGMGILAKSDRIDARVLALFAQKRRPPIRALPSETQRSFIDLVDRRRQLVSMRAQEQTRLAQAKGRARTSIQAHIKWLNAAIDDVDRNLNDTLRGCELWLVDSQLLDSVPGVGKVTICTLLARLPELGHLDRGAIAALVGVAPFVRESGQWRGRRFIWGGRAEVRSVLYMAVISAIRCNPVIKAFYRKLLAAGKAPKVALTACMRKLLTILNCMMRTRTHWNPPPAQNT

SEQ ID NO: 425810 - protein, 339 aa, unidentified
MAIQSKKIIQELKSLFAGIDVGAEELILTIRKNGTPYKAQKFANTHADRARLVKKMVSMPGIIVCLEATGVYHFDLSIALHDAGVSLMVVNPKSSHNFAKVLMKNSKTDAVDAETLAQYAERMDFVAWTRPSDEKIALRSFARRIDTLTRQKAAAKNNCHALSVSQETPEAVLRDVKLAISQLEKRIERLAKDALDLIGKHPELERVFLLLTGIKGIAQTSAIALMGELLLLPQGLSHREWVKFAGLDPRAFDSGKSVHKQARLSKAGNRHIRSALYMPALSAKQHDPYVKAYFQHLVDNGKKPLQAICAVMRKLLHAIHGMLKHDKPFDNTRFYAIPA

SEQ ID NO: 425811 - protein, 336 aa, unidentified
MIKFKAFTGIDISKKTFDAALILAESGTVHHRLFQQTKEGYMAFIKWLKSFGITLEDTLICMEHTGLYTNGIIHFLTSLKANLWVEMAIKIKRSMGLQRGTNDKASSITIAEYAMRFTDRAKLWEPVDTKLSKLRDMIAQRDRIVNAIKQLTVPVEEVKQCGSAKEARDLEGLQQPAINGLNKAKEKIELAINDFITGDPKIYKTIALICSIKGIGLQTAISLYAYTKGFTMFGNAKQLACYCGVVPFSKISGTSVRYKAGVSPFANRKLKSLLHLCAMSALRWDKEIKAYYERKVMKGKNKMSVINAIRNKLILRIFAVLRDQRPYVENYQLAGA

SEQ ID NO: 425812 - protein, 415 aa, unidentified
MNWNENAHFAALDWAREHHDVVVLNQHGVVVDALRFDHTPAGWQEVRTLFAKYPSLPVAIETNQGLTVEQLLACEVRVYPINPKSAERYRERHAPSGVKDDYRDAWTMADALRLDGHGWRPLMRLDPRIAELRLLCRDEIALIEQRTALVNQLRSALHDYYPAALEAFTDWTTPATWAFVIAFPTPEALQAAGKRRWTTFLHLHRLWRDTAQHRLDVFGRATALVGSPAAIAAKSLLAVTLAQVLTALEKNLNEYRRRIATIFAQHPDHALFGSLPGTGTKIGPRLLGEIGDDRERFPDVEVLQCNAGTAPVTVQSGAKIYQRLRHSCNNTLRATVHHWANLSRQRCEWAEAYYQAHRKKGKSHACAVRCLGQRWLRILWKMWQTRTPYDEALHLRNQIKHGSWLAAEKPASPAW

SEQ ID NO: 425813 - protein, 347 aa, unidentified
MIYVGMDLHQKTTTWLAIDDAGARVGGGVVASTERGWGEVVSAWPVAEVRVAVETGTVTWWVVSVLRELGIEPTVVDARRFKLIAQSRKKSDRRDARTLAEALRAGLAEQCTVVVPSERARRGRALLQARQTIVRQGTGSRNAIKGLLRSIGVAARRTVWSSPAAFEDLLRHPAIPAWLATLLRSHYAVWSATQEQRHALDEQIEEELGCWPDATHLLEIPGFGPLVTLAVASAIDSPKRFRRGRQAASYTGLVPTVRDSGESTRRGGITHEGRSLLRHALIQAAHSALRSRSLTPGLRAWTHRLAARRGRQIAVAALGRKLMVLSHHMLSTGVVYQSNYGAASKAA

SEQ ID NO: 425814 - protein, 318 aa, unidentified
MRIGIDVAKAELVVAAHPTGERWTVANDARGIRTLVERLRSATPELIVLEGTGGYELLCVAALAAAGLPVVVANPRQVRDFAKATGQLAKTDRIDADILALFAERVRPAVRLLPDAETQELDALLSRRRQLIEMLGAERNRLGQVFGKGKQRVKKSLTAHIAYLERELRIADTDLGDMVRHSPAWQERDDLLQRVPGVGPVLSLTLLADLPELGRLSRREIAKLVGIAPLSRDSGTMRGRRFVQGGRATVRAVLYMGALVATRRNAIIRAFYQRLLAAGKPKKLALVACMRKLLTILNSIVRSGQRWSAEHAAALIPA

SEQ ID NO: 425815 - protein, 473 aa, unidentified
MSKSIFKSASNDLKNLLAICKPEQLLYAPIDVAKYNHSAMIVNLLGEIIIPKFDFPYNLHGIDFLKSKLQSACDISHAKKLFLALESTGHYHENLVASLSLSGYDITIIRPIDSKNERDNVHAKTDAIDLAAIAKVIISNKGTRSNMPDTVYYNLQRASRTHRQLTWQDTRVKNIITMLVDKTFNGLWNPDNAIFSDKWGKASLLFVEHYPTPQQAIKMGAKRLSEFFKKHNTKLGIETADKIIALAKDTPARPLETMESDILALKANISVLETLTSAIQQQKRQMVKYLVQTPGTYLLSIPGISVVYAGDFTAEVGDIHRFAYAGQVVSLAGTAPRKYQSGELDKANLPTSHKGKNLLRMTVNQIALSLNAHCPEYHKYYSDKLFHYQDAPPKARTATANRFIKLAYAMMKNETLYCPRTGNPLTTEKEYYQSVYRKVKEKLADYLSDDIPQDNYLSKIQHQLEEKYGITQD

SEQ ID NO: 425816 - protein, 388 aa, unidentified
MTQMPVAQPTYCAADFDRTLILALEVSEKSWVVAAHVPGLRGSKIRHTLSPTAEALLDAVGTYRARAARAGRNIDRVVLVYEAGYSGFWLARWLARHDVDTFVIQPSSVPVDRRARRAKSDGIDAELLLRTLLAWLRGEPRVCSMVPIPTEVDEDARRCVRERQDLLGERVAIANGIASILATLGARGYDPLRRDRRQRLGDVRTALGSPLPPRAKARIERMLDRLELVLTQIAALERQRDAVLDEAAPGDAERMIQRLVRLRGIGVQSATLLVREAFVRPFANGKALGAYAGLSPTPYSSGGTEREQGIGRSGNARLRSTLVELAWIWQRYQPGSAIVGWFRDRLGGGARRQRKVMVVALARKLLIALWRLATQGVVPDGAALKPVA

SEQ ID NO: 425817 - protein, 345 aa, unidentified
MKIVGCDLHTRYQQIAMLDTETGELTERRLEHESGQARAFYAGLAGEVRVGIEATGHTRWFERMLAEMGHELWIGDAAQIRAAMVRKQKTDTRDAAHLLDLLLSERFPRIWRPTMEERDLRQLVWHRQKLVWMRNAVGNQLHALAMGEGVCRKKKLFSKKGRAELESLRLDCWAKYRRQELLVMIDQLDASLKTLDQAVAEQAEQNPAAVLLMTHPGVGPVTSLAFVLTLGPVQRFARSKQLVSYLGLNPREHSSGGRQRLGAISKQGNPMMRSLLVEAGHSAARLDAELRRDYQRLKLRRGSGVAKVAIARKLAVRMYWMLRAQASYAQLVRMQDSPWATLVKR

SEQ ID NO: 425818 - protein, 465 aa, unidentified
MAKAHKSRSKSRAKQNHRAKLKPQDCTLGLQVVNPKAAGIDVGNDEHWVAVPPDLDPEPVRRFGCFTSDLLEMADWLVRCGIETAVMQSTGVYGTALYDILAERGIRVFVVNARDTKNLPGRKTDIQECQWLLKLHVYGLLRNSFRPEEEILMMRTYWRQRQQHIGDASRCIQHMQKALTQMNVQLANAISDISGTTGQAILSAILAGERDPQTLAKLRDPRVKASEATVAKSLEGNWRPELLFVLKQEQESYQAFQTKIAECDQQLQRHYETMEAKADPKRLPPIPRDKRPHGNIPAGFDLREELYRTTGVDLTAIDGLNVLTAQTLIAEVGSDMNRFATEAHFVSFLGLSPRNKISGGKVVGREKCKTKNRAGTALRLAAGTLLNSGTYLGAQYRRLRTKLGAPKARKAMANKLARIAYRMLKYGEEYVDKGKEFYEQKYRQLQIRMLTKKATELGLQLVQSA

SEQ ID NO: 425819 - protein, 418 aa, unidentified
MTATHSIAPTLLVAIDISKHRHEVLIGIPGKARRRRLTVMNTLEDFQRLSVALASYELPVRIGFEATGNYHRPLAHHLGQAGFDLKLVSSVGLARTREALHNSWDKNDPKDAQVILHMLEIGAVQFFHDPLVVGTADIQELSKTHEIVSRSKTELWHRILTHYLPLYFPEAERFHRSSRTDWFLAFLEKYPSPHMISAMGRDAFIADAWDVVGRKVSKERLLSDIYATAVDSVGLPVHPDSDAVRMFRLVLKEGRSLVRQRDEIEARAVELLLDLPDYQLLTTIPGIGPINAMTILAEAGDLRRFRHHRQFLKFCGMDLATVQSGMFRGQSRVSKYGNARLRRTLWMAGQTAVLKRTNSFRDKFERYISKDRHNAHLRRKAYTAIAAKMARTVHAVVNHGEPYRPFFEGVSPGGRTSL

SEQ ID NO: 425820 - protein, 349 aa, unidentified
MTLVGCDLHTRKQQVAVLHTDTGEVVEQELLHAGDAVEQFYRTLPRPVTVGIESTGYALWFHELMQRLGHTLLVGEAAKIRAMVVRKTKTDRRDALHLLDLLKHDRFPAVWIPDPATRDLRALVTHRMRLVRMRTMVKNGLHAIAMNRRLTLGPSLWSQRGLAQLQGLALAPHTTQRRDESLQRLTWLTARIAALDDRVAAAAQADPGARLLLTHPGVGPLTALTTVLVLGPVSRFLDSKHVVSYTGLAPAVHASADTCRLGPITKQGSPLLRFVLGQAGLIAAHSEVDLTRHYRTILRRRGRPKAIVAIARKLLVRLYIMLRDQIAYEEFRRRARTPRRQEVPPPALA

SEQ ID NO: 425821 - protein, 331 aa, unidentified
MYFSQFVGVDISKNTLDAAIYPAKDKKLDLLHFDNTQKGLGEMLSWLKRRGVKPSEMVICAEHTGVYTNPLIEFADKKGIALSLNSPLDIKHSMGIARGKNDAVDAGRIAEYAHNHRDKLRLYEKPSEAIIQLQYLLTERRQYMRQRTALINLNSAMCKYETPEARTRNESAIYHCEKLVKKVEEQMMSVLRSEPEVKQNFDLVSSVKGIGLINAINTVVYTNNFKAFETPRRYACYIGVAPFDHTSGTSVKGKTQVSKICRTQQKAELSMAARSAVIHDPGLKRYYQRKMKEKGGGKNAHGVVLNAVKFKLILRMFAVVKSGQPYKVLNY

SEQ ID NO: 425822 - protein, 413 aa, unidentified
MSVTHQGVSTRVCAGVDWAKDDHAIVIIDSDGQVLDRFAVTHDAAGLKSLVRRLLTAGVDDVGIERGDGPVVEALIQAEFTVLVIPPAQLKNLRSRYGSAGNKDDRYDAYILADVVRTDRRRLRPLVRDSAATIALRTTVRARRDLVEHRVAAANQLRAHLQIVFPGATGLFAAIDSAITLTFLERFSTQAQADWLSPKRLGTWLSSVSYTGHTDPGILHARLLAAPRGSTGTDAQTHTVTTLAFVAVLRSLNTQIEALARSIGEQLAIHPDAHIVTSLPRSGTVRAARLLAEIGDARGRFPTADSLACLAGVAPSTRQSGKVKAVTFRWGANKELRDAVCDFAGDSRHANPWAADLYAKARARGHDHPHAVRILGRAWIHIIWRAWQDNLSYDPNKHGALQALLNNTADKAA

SEQ ID NO: 425823 - protein, 338 aa, unidentified
MYYTGIDLHKFTSYLTTVDSSGAIVKQANLKNASHNFIQYFSDLGDENITTVESTMTWYWLNDLLSSINIPMVLAHAKYVKAIAYAKVKTDKVDSHTLAQLLRMDYIPAAHKISVENRLLRDALRARLKIVQRHTSITNSMQLLLAKYNYDSPTQLTGIPRFQYEQLSEVEEILNEQMLELEKQLYPSLIPNEDIQRLLWIPGIGKMNAFTILLEVDDINRFADVKNFYSYSRLTPSARNSGGKSKQRSSKDGNKYLKVVFCDAAVHAVQYYPVIRKYHNKLLRKKNKQIAKTIIVKQLAEIVYHVLKNKTEFNNKFKGQELEHKKSLQWPRITSPYA

SEQ ID NO: 425824 - protein, 344 aa, unidentified
MKINLLGIDLAKNVFQLCALNQANKVLFNRAVRRPRLRQTIAQFEPTTIAMESCSSAHYWGRAFEAIGHLVLLVPPQHVKPFVRGGKSDARDALAICEAAQRPGLHPVPIKSVAQQDILLLHRLRQRQVQHATALANQIRSLGREYGVVFPTGIRTLIARLPEALEDGSNDLSPVARYALSQQHHSLCSVRDRALALQREIEQLAVHNPAYTRIQVLPGIGPLVASAYVATMGDGRQFRCGRQVSSWLGLVPRQHGSGGRLELKGMTKNGDRYLRTLLVHGARAAITRGQKNCPPLARWVQPILARRGHNKAVVALANKLARIAWVILTTGEPFDLNKAFKPAA

SEQ ID NO: 425825 - protein, 404 aa, unidentified
MHYIGIDIAKYNHVVGVLKKDGTPVGNARSFTNDFEGFSDLLRRLAELKVGADDSIVVMEATGHYWMALYVFLVDHGFDVAVVNPALINAFRKSDTLRKTKTDAIDAFLIAKFAKEKEITASPATIEATDGLKQLTRYRRHLVKEQTMLKNKCTAVIDRVFPEFGSLFSDMYGGAAKALLKADPTPAGIAATDIRTITKRIKEGSKGRLGREKAEKVKAAAKDSVGVQFASSTLAFEISHIVALIEHLDNQLDELEAEISRLLEETPGKWLTTIPGIGDTYAAIIMGELGDAERFESPKKVIAFAGIDASKNDSGQFESSGNRMSKAGSPYLRYALIEAADKARIYDPYFGDYYDSMVARGKHHLVALSGVARKLAGVVLTLMKEQRAYEPRPSIQSAKPEDVR

SEQ ID NO: 425826 - protein, 419 aa, unidentified
MKFKQSDKQNQRIERISTNHLIIGIDIAKYTHVARATDYRGIERGSYLAFSNDFEGYEKLLHWMKSLMFEFNKTDVIVGVEPTGHYWLNLAFWLKEKQLELVLVNPFQVKRNKENRDNSPTKNDIKDALVIADMVKNGYYSEVYFASEQFRALRVLVTSRESLVKQVAGVINKIHRWTDMYFPEFHHVFKDPKSKTALATLVEFPHPSDICQLTVENIREGWKKHLKRNGARSTAAALIQAAKQSSALPGCEDEAKLSITLLMQQLDLFNEQLAQLEEKLESLIQCIPTSKSLLTIKGINTVTLATLYSEAGDFSRLDHGNQMLRLAGLHLSENSSGKHKGEVKLTKRGRPGLRKVLYQAVFQMVSVNPEFKALHQYNKQIKKMKGMKSLLKLCGKLARMLVAMAKGNIAYDMEKVRIA

SEQ ID NO: 425827 - protein, 355 aa, unidentified
MSQEKYIGMDVHQATISVAVMDAHGKLLMECLLETKAATILEFIQGLHGTLSLTFEEGTSAAWLHDLLKPHVNRLVVCDARKAALLKDGNKSDRIDARKLAELLRTNQLKPVYHEEHGVRTLKELGRSYLTITKDVTRVMNRIKALYRSWGIPCSGAGVYAPRHRAEWLAKIVEPGVRVRVQRLYQQLDLLQPVRLEARRELLLESHKHAAVKLLRQIPSIGPIRAALLVALLQTPHRFRTKRQLWAYSGFAVETHDSGEYRCVRGKLQRNRERITVRGLNDNHNKDLKNLFKSAAISASTRPGPLHDFYVARVEKGMRPTMARLTLARKIATITLTMWKKGVGFDPQNLRRQAA

SEQ ID NO: 425828 - protein, 355 aa, unidentified
MNSEKYIGLDVHQATMVVAVTDSSGKLIMESILETEAATILQFFAGLRGTLAVTFEEGTWSAWLYDLLNPHVDKLVVCNPRKNALLKDGNKSDRIDARKLAELLRGNQLKPVYHGETGVRRLRELSRSYLTIVKDLSRVMNRLKAVYRSWAIPCAGRDVYYRRHRAQWLDKIREAGVRRRAERLYEQLDMLQKLRQQARRELLAEARKHAITAKLRQVPYLGPIRSALAVALMQTPHRFRTKRQLWAYSGLALETRISAEYRMVDGQVRRSKKLLCIRGLNKDHNHDLKGLFKGAATMASVRPGPFQDFYQAALAKGIKPTMARLSLARKIAAITLTLWKKGESFDAQKLKSQAA

SEQ ID NO: 425829 - protein, 328 aa, unidentified
MLAKMSDAIVGIDVSKETLDAYCARGQRKQGRTFANSPDGWKLVRAWLKAMGSKQAHVCMEATGRHSLGVALALHEAGHVVSVVNPAQIRDFARTKLGRNKTDKVDAALICEYAGLFNPEPWAPPSPAMRRLCELHTVRAGIIRSRTEWKNRSGSGLGDSTATKLAAATITHFTRQLEAIDRAIGETIDQDAELRGRRELLLSVIGVGKTLAASLMAEMPEPGVLRRSGEMVAYAGLNPSHHRSGSSIDRPTRISKIGNATLRSSLYMPALSAMRFNPAVAALVARLKSAGRLQPKQIVVAAMRKLLVLCFGVLKTGKRFDPAIAMPA

SEQ ID NO: 425830 - protein, 318 aa, unidentified
MNIIGLDISKDTIDATLHKTNGSIHYIKFKNNDDGLKQFRLWIKGNRIRKAYIGMEATGIYYEKAADMLSSYYTVYVINPLKIKDYGKSRFNRTKTDKADSNLIADYIKRHQDTLIPYQIPKNKALQKLINLKNQLHQYQKQIKNRLHSTEEDFIRNIHQDLIDTIQDKMEQVKIAISEQIKKQTDNNHYRNLQTIPSIGKDTASVLYAQLTEKHFKTANQFVSYAGLSPAIIQSGTSVRGRGRLSRYGNRRLKSTLYMPALCAYRFNAFPKLINNLKKAGKPKMVIIVAIMRKLAKLAYYIVKTGQPYDAERHRLNQ

SEQ ID NO: 425831 - protein, 369 aa, unidentified
MTKYVGLDVHSKMSVFVIQDEDGKIVGRGEIPTSAEGMRRLRDENGLPAGTKVALETGTVAFFAARKLSEVGLTPIVVDAHEVRIKAHRPTQKSDRRDALELCEGIRRNSYRSIVHVPPVSVARLRESLSRRRHFVRAQTSEVNAVKRLLRSEGLGQLARSLRTAAGWGKLAKALREHDPMLTTYVEHHRLVWQSAGEQIDKLEELLETQRAPFEQDVKRLQTVPGVGRIVALTAVAIFSDIGRFPSSKEAASYVGLVPSTHQSGDRHAHGKITKRGSTELRAMLCEAAHHAARRHNPLNPYFRKLCAKHGYKMAVVAVAHRLCRILYSMLKNRTDFDEGKLAVERGPFERKTQDLYRLRVVPITMSNA

SEQ ID NO: 425832 - protein, 344 aa, unidentified
MDQVSRIGMDTSKHIFQLRGVDAAEAPVLRKKLRRKEMVAFFEKLAPTMISIEACGASHQWARLLQSFGHSVKLIPPQLVKPYVKRGKNDAADAEALCEAMSRPTMRFVPVKSAEQQASLMLVGLRDRLIRNRTQLTNSIRGYAAEFGITSAKGMAQLVPLLERIQADDSLPALARELFAIQAKEHAQVQAQIDEVDAKLMAWHRADECSRRLAKIPGVGPIGAVLLTMKTPDPQLFRSGRQFAAWIGLTPRGHSTAGKVRLGGITRAGDEGLRSVLVVGATAVIRHFRCGGKEAPWLSELLKRKSPKLAAVALAHKMARIAWKLMATGEIYSARSTSPAMGTI

SEQ ID NO: 425833 - protein, 392 aa, unidentified
MNSVIGLDISKEESHGQAFLDRGKPYRGIFHFEHTRDGLEILLQAIHVIEHESGHRPTLILEATEHYQSPVVHFLEEHHYLFIVFNPLISNRLRKTNLRKVKTDAADAYLLGELYYREEFEPFKKRGVQLLNMRYLTRQHESFSKMCVQTKLQFQVVLDQVLPAYKGVFGAMYSNVPLRFLLEFPTSTSVLQVSEEKLKITINALLTSKRGRSEKWINERVQRLMEAAKRNPFQQTMYESQLINLKIMISLILQYQEHLSVLEQTIDALASKIEEYDLIQSIPGIGPKIAATILAEIGEVDRFDHPKKLVAFTGIDPSVFASGKFTATRNRITKRGSRQLRYALVMAVQCGLIRSRNTRIKEFYERKRAEGKPHKVALVACANKLVHWLYAL

SEQ ID NO: 425834 - protein, 376 aa, unidentified
MANVEKDFAKGKPVYVGLDVHKREWTVTVVCQGEELYHATVVAECAGLVRLLRRFEASEVHTVYEAGPTGYWLHDALTEAGFDSMVTPPSLVPRIGGRVKTDRRDSRKLASLLASGFLKRVHILALEERANRQLLRTRNQIERHRKQTQAQIKSMLLFHGKKAPRTLLERWSQTHVDWIAHIEWGNPALKASMDALIEMYRHLNDQLKAMTASIEELSQTDKYRERAALLTQIPGMGIYTAMSILIELQDVERFRRAEQLASFLGLTPSQHSSGERVRLGEITHCGNPRLRTRFVESSWTLIRYDMAMRSVYERIKHQTGSGKKAIVAVARRLALRVRRILLDRTAYRYGDGRRPQFARDKTREIKKLVVRRVHLV

SEQ ID NO: 425835 - protein, 347 aa, unidentified
MIVLGVDAHKRTHTVVAADPSSAQVGCLTVAATSEGHLRLLRWAEQFTLRRWAIEDCRQLSRHLEADLLRAGERVVRVPPKMMANTRRRARTQGKSDPIDALAVARAALAEPGLPAAFLDGPARQLRLLVDSRETLIRQRSAAQSQLRWHLHELEPGWDPPARTLALAHTLKGIETRLAHHHNTVADLARQLLQHIRHLTRQAADLHTQISRLTTTQAPHLLAIPGCGPLTAAKLVGETANIPRFPTPDKFAMWAGVAPIPVWSGNPQRHRLNRGGNRQANAALHRIAITQIRIHPPAQDYLKRRLANGNTKPEAIRALKRHLANTIYHTLTLDTVTQHTTPQALAA

SEQ ID NO: 425836 - protein, 323 aa, unidentified
MTDSPSIVVAGIDVGKSKLDVHILGVGLDRQFDNTKTGRRALRNWLLKLGVYRTVFEPTGRYHRNLHQCLFDSGLQTVLVNPVRSRRFAEAIGQLAKNDRVDASMLARFGLLDGLESTPPQPDILCRLSDLLALRRKLVEHLGALRKLCAELDPEAAACPSATLDALQADIADCDRRMRDCIAADTVLSRRDAIIQSIPGFGPVNAACLCAGMPELGSLGRRQAASLLGLAPFDRDSGQHRGARSIRGGRAQPRHLLYMAALSAIRCEPSAQACYQRLTANGKPHKVALVAVMRRLVGLLDTLLREDRLWQPRPPARQLEAAA

SEQ ID NO: 425837 - protein, 346 aa, unidentified
MYYTGIDYHKKYSFVSIQNEAGEIVLESKISDNDPHLFENAFSQVGGEVAVVYEASFNWGWLYDVLESIKLVKSITVANPYKVRLIAETQIKTDKLDARKLAMLLRLGVVPECHVPDRATRARKEVLRQRAYWVRQRTGIRNRIHRIIGRQHGLQMPQVSDLFGTKGKIAMSKAVLPEPDNMLLKQNLEMLENLDKAVRADEEKIKAEGKNDRAFEIVTSITGVGLIIGSIIAAETDGIKRFLRPERYTGYCGLSPSTHSSGGKTYHGRMMWQCNKWLKWAFIEAAWVAVGCSAYFGGVYRYHRERGKKANTAITIVARRICRIVYQLLMEDRLYEERTFSPAALI

SEQ ID NO: 425838 - protein, 349 aa, unidentified
MTEQRRSYTGEWVYVGVDVHKETYTVTCVCHKQIVKTATVQAEPASLAASLQRWFPEAMLASAYEAGFSAFVLHRALTKVGISNIVVNPASLAVAANDKVKTDRRDSKRLAVDLADGRLRGIYVPTEEEELARLLPRTRAQLVEHRATLARQIKAKLHQFGLIIPSSRRLLSHRYLREIESWALPPELRTSLKMLAEQWRFVTRQLLEMRRLLREQATAQAAIDQVYRSVPGIGEVVARTLATELGDMTRFANERALFSYTGLTPSEYSSGAAVRRGPMSRQGSSRVRHLLVETAWRALSYDVVLQTMFERIAATRGKKRAIVAIARRLIGRIRACFRQGTLYAVGTLA

SEQ ID NO: 425839 - protein, 450 aa, unidentified
MKTLSSKPVHVDSDDDDLLARVAAIDVAKDSGMACTRVPDESRPGKRATTVWSIRARTSSINELADQLAEQRIERVVLEATSDYWRPFYYLLEARGLTVWLVNARDVKNVPGRPKTDKLDAIWLAKLNERGMLRPSFVPPVEIRQLRDYTRLRADLTGERSRHIQRVEKLLEDALIKLSSVATNIMGVSSRAMLSALIAGERDPAVLAELAKGRLRIKRTALIEALTGRFDEHHAELADILLSQIDSLTAQIEWLDTRAEQIIADIPAAQAPPTPAATTTSDRPPPAYLAAIERLDEITGIGRHGAQTIIAEVGLSMEVFPTSAHLVSWSKISPRAVQSGAKTRPGKTGKGNPYLKSVLGEAAASAGRTNTFLGARYRRLARRIGKQKAQVAVARSILVIVWNLLADPTRRYDDIGPEFYDNRIGPERRKRNHIRQLESLGYTVTLTEVA

SEQ ID NO: 425840 - protein, 424 aa, unidentified
MNVKMQNKQNQLIERITDQHLVVGVDIAQHVHVARAVNYRGIVVGKPLSFQNNEEGFTSLLNWIKELKHLKNLDTTIVGMEPTGHYWINLSKWLVKQNMDVVTVNPHHVKRNKENRDNTQSKSDKKDALVIADMVKNGYYAFVRSTSESFEKLRVLMANRDVIVKRLVSSINQINRWVDVVFPEFREVFKDVSCKGAIASLRLFPTPAELCSLQPQDIVTGWKSCMKRHSGHKKAHSLLALAKRSIGTKQALDAYRLHLGQLLEEYDLASSQLERVTQEVTNVLEQIPFVKQLLAIKGISEISLAGILGEAGDLSGFAHGNALLRHAGLHLAEASSGKWKGQIVLSKRGRSRLRRYLFLATMSLVMNNPEFKALHSNNVKVKKIKKMKSIMKLCGKLARVLVGIARNGSAYKPEMVFPLEQLAA

SEQ ID NO: 425841 - protein, 343 aa, unidentified
MNQYIGLDVSLKDTAISIREDGKRIWRGKCPSDPKLLAQMIRKHAPYARRVVFETGPLSTWFFHALTSEGVPAICIEARHAQKVLSETLNKTDANDADGLAQLAEAGFYKAVRVKAFDNMLTRTLVTARHQLLRISTQLGNQIRGLMKTFGLIIPKGTGRVFDSNVRGLLHGNEGLARIILPLLDAWHDVRKRAAELDRRLLAVARESHTTRLLMTIPGIGAVTALSYVAAIEDPENFRTSRSVGAWLGLTTRRYQSGEVDYDGHISRRGDNHLRGLLYEAATALLTRTSARTESSLKSWGLKLRERLGFKRAAVAVARKLAVIMHSMLKTGEVFNASASATV

SEQ ID NO: 425842 - protein, 409 aa, unidentified
MLFVGDDWAEDHHDVEVQDQHGRTLRTARLPEGVDGMARFHDLVAGLLPDDATPARVLVCIETDRGPWVRALIAAGYQVYGVNPKQAARHRELVSLSGAKSDKADAHTLADMVRTRRHQLRQVAADSEIAEAVKVVARAHQTLIWERTRHTLRLRSALREYFPAALAAYQPLTLTGTDALELLAKAPTPAQAAKLTTAQISATLKRARRHDIAAKATAIRQALRTEHLGQSDIVTSAYAATVRATAAILQTLNAEIRTMEAQVEAHFGRHPDAEVYLSQPGIGAVLGARVLAEFGDAPGRYTDAKSRKNYAGTAPITRQSGKTKTVHARFIHNDRLVDALHMQASAAILHDSAVRAYYDQLRARDLNHPAALRQIGNRLVGILHGCLKTGTHYNQATAWSHRTALPAAA

SEQ ID NO: 425843 - protein, 391 aa, unidentified
MTILVGIDVAKDKHDCFIMNSEGEVLAKSFTILNNKEGFDFLYKKIQSVSSSDKIKVGLEATGHYSYNIIGFLLNKGLATFILNPLHTNLYRKSLSLRKTKTDKIDSKTIAMMLLSEVSLKSYSDISYHNEDLKSLTRYRFSKVEERAKLKTSFSRLAQILFPELEKLVPTLHMTSIYQLLEEFPSASAIASVHLTRLTNLLSKASKGHYDRETAIKIRDAAKNSIGSNMPAKSLELKHTIKLICALTIDIDEIEAEISKMMDKIASPITTIPGIGRNMGAMIISEIGDFSRFSSPDKILAYAGFSPSIYQSGKLDNCYAHMEKRGSRYLRYALFHAAKLVCHWDKTFADYLAKKRAEGKHYYVAISHAVKKLVRVIFHIEKTKQAFLKAS

SEQ ID NO: 425844 - protein, 359 aa, unidentified
MREKVNEKAFVGQSIFVGIDVHKKEWKISVMTEEIHCKTFSAPPEADKLSNYLRRNFPGAAYYSAYEAGFSGFWLHKELTKLGIKSIVVNPGDIPTTDKERKQKEDQRDSRKIAKTLRAGQLKGIFIPSEKVQQDRILLRTRETIVKDLSRSKNRIKSLLYFQGINYPQRFNSNSTHWSKLFIQWLEGVTFEHESGKTGMNAHLEIVKHHRGLLLKVTRQIKELSKSPEYGQNVELLISVPGIGMLTAMKLLTELETIDRFTDFDHLCSYVGLVPSTDSSGENHVDTGITPRRNSRLRAALIESAWTAIRNDPALLVAYQKLCKRMSDNRAIVRIAKKLLNRIVHVLRKKEKYERSVVK

SEQ ID NO: 425845 - protein, 356 aa, unidentified
MSYDVKYIGMDVHKEAIVIAVLNEGGKLVMESVIETRASSILQFLHGLRGELHVTWEEGTWAAWLYDLLQPQVQHIVVCNPRRNALLKEGSKSDKVDAHKLADLLRTGMLRPVYHGENGLRTLRELGRSYQTISKDLTRVMNRLKALYRGWGIPCAGTQVYAARCREEWLSKIPQAGVRRRAELLYQQLDGLQILRRNVRLEFLAESRKHKAAKLLRQIPCIGPIRAARLIGLMQTPHRFRSKRQLWTYSGLGVETHDSAQYRFVSGHVQRSKKPQQVRGLNQNHNHEMKEIFKSAATRASCGRGPFYDFYASLLAKGMKPEMARLTLARKIAAITLTLWKKEERFDAEQLKTQAA

SEQ ID NO: 425846 - protein, 360 aa, unidentified
MKKVSKQMRKMEAPDKPEMTMGLDIGDRYSHYCLLNQPGDVVEEGRIQSTEAALRRHFEGEPCMRIALECGTHSPWISRLLTALGHQVIVANARKIPTITGSESKNDRNDAEKLARFAAYDPRLLSPLEHRRPERQMDLNLIHARATLVRARTMIVNALRGLVKSAGGRLPACSTESLPSRALSAIPRGLAVVATPLIQQIALLNAQIGGMDKQVEKLAAKYPEIVLLRTAPGVGPIVAAAYVLTLDRPDAASNRSAGAFLGLRPGQSQSGDADPQKRISKTGDRCLRSLLVQSAQYILGRFGPDSELRRWGLKLAATGGQRGKKRAIVAVARKLAVILHAMWRSGQRFRAFPQVAAVAA

SEQ ID NO: 425847 - protein, 340 aa, unidentified
MDTIGLDLHKRESQLCVLTEAGEIVERRIVTSRERFTAVLGSQPPARILVEASTESEWVARHLESLGHEVIVADPNFAPMYATRRRGVKTDRRDARTLAEACRLGAYRLVHRASAPQRHVRAQLAVRDALIRTRTRYVSVVKALARRDGLRLPPGNPVHTEAKLAALPLAAPLAGELAPLRALLAPLNQEIAGADERLAAVAAADPVVRRLQTAPGIGPVTAVAFVATLDDVTRFASAHQVAAYLGLTPREYSSGEQQHRGRISKTGNARMRYLLVEAAWRVLRTKDPAAAALRVWADGIAQRRGRSVAAVALARRLAGVLYAMWRDGKDYRPPPPTTAP

SEQ ID NO: 425848 - protein, 362 aa, unidentified
MKKLSKQSQRIEATQEKPSLTMGLDMGDRYSHFCLLNEEGDVIEEGRLQSTEESLRRRFASEPRLRIALECGTHSPWVSRLLTALGHQVIVANARLIPAITGSASKNDRNDAEKLARFAAHDPRLLSPLEHRSQERQVDLNLIHARATLVRARTMIVNALRGLVKSAGGRLPACSTELLPARALPAIPSPLIVVATPLLEQISLLTAQIDGMEKQIEKLSAKYPEIVLLRTAPGVGPIVAAAYVLTMDRPDAASNRSAGAFLGLRPRQSQSGDSDPQRRISKTGNSCLRSLLVQSAQYILGRFGPDSELRRWGLKLAASGGKRGKKRAIVAVARKLAVMLHSMWRNGQRFQPFPQATAAVAA

SEQ ID NO: 425849 - protein, 388 aa, unidentified
MTQTPVPQPTYTAADFDRTLILALEVSEKSWVVAAQVPGLPGSKPRRTLSPTAEALLEAVETYRARAARAGRIVDRVVLVYEAGYSGFWLARWLARHAVDTFVIQPSSVPVDRRARRAKSDGIDAELLLRTLLAWLRGEPRVCSMVPIPTEVDEDARRCVRERQDLLGERVAIANGIASILATLGARGYDPMRRDRRQRLEGVRTALGDPLPPQARARIGRMLDRLELVLTQIAALERQRDAVLDEAAPGEAERMIQRLVRLRGIGVQSATLLVREAFVRPFANGKALGAYAGLSPTPYSSGGTEREQGIGRAGNARLRTVLVELAWIWQRYQPGSAIVGWFRDRLGGAARRLRKVMVVALARKLLIALWRFAALGVIPEGAALEPAA

SEQ ID NO: 425850 - protein, 348 aa, unidentified
MKIVGCDLHARQQSIAMLDTETGELTEKVIRHEGNGVREFYAALGNSVVVGIEATGSMQWFLELLEELGIESRVGDPAKIRAAETRKQKHDRRDARLILDLLERDRFPAIWMPTSGQRDLRSFLRDRDQWVKMRARLQHTLQAMALNHALRKGPSLWSGRGQDALRKLPLPPYASQRRNELMSLYAQLQRRIQELDKQVEEQAQQRPQARRLLTHPGVGPVTALATDVFLGDPSRFTTANQVASYIGMIPSEHSSGKRQRLGKMSKQGNSLLRYLWTEAGMHATGKDPELKRFYRRKLIQKGMGKARIAAARKLGIRLWIMMRDEIDYEEFCRRGKLRQIGESPCGNA

SEQ ID NO: 425851 - protein, 367 aa, unidentified
MDSVALSAGLIHLGLDTSKDTIAVAILRWDEQVPDVEKIFNDEASIRRLIARFPDRGQLRVCYEAGPTGFGLCRLLTSMGVACQVVAPALVPKAPADRVKTDRRDSRRLARLLRAGELVAIRVPAEAEEAVRDLCRARADLVADRTRTRHRLGKFLLRHDRIWRGGQAWTLRHAQWLAAQRFDDPALRSTYGHYRAMLAARDAELAAIEADLNHWIEHGPFADQVARLAAYRGIAHLGALTIASEVGDWRRFPHARTFMGFTGLVPSEYSSGASVHRGRITKAGNAHLRTQLIESAWAYQHQPSLGVTLRRRQQQVGPATVARSWTAQQRLCARFRRLTARKASRNIVVVAIARELAGFCWAEMTTD

SEQ ID NO: 425852 - protein, 396 aa, unidentified
MRTIGIDIASEIHVAAGVDDDDNVVLKSTRFEESGDGHDKLVTILGSPEKTLVVMEATGHYWQNVFARLVSDGFAVAVVNPLAVRRFGESTLARAKTDAVDALLLARFGRAHRPAPAAVPDPELEDLRERMRLRDRWVQDLGDRVRQLHRFVDLGFPEFTRHVKDLGSGLATALLGRCPTAAAFSKVKPSTLGELRYDGRHTVPLDLAVTLIAEAKRSCGKHHGEAYQLGVSTACEDINVLRRRIKDTDREIARRIDDLELGKLLQSIDGIGPTTAARMIAEFGDPATYRSADALAAQMGLVPRVQHSGKSTPARAGLTHIGDRKLRAKLWMPTLTAVIRNPWLKAFYDRLIAAGKLPKVALVASMRKLVTAIYSVAKSRKPFVPRLPAKPETNPC

SEQ ID NO: 425853 - protein, 398 aa, unidentified
MDQDRFDVFVGLDVGKEHHHATALNTAGKRVHDKALPQDESALREVFDKLAGYGSVLVIVDQPATIGALPVTVARALGIEVAYLPGLAMRRIADLHPGNAKTDARDAYIIAEAGRSMPHALRRVGGDDDLIADLAVIVGFDDDLAGEVTRVSNRIRGLLTQIHPALERAIGGDIGHPAVLALLTKFGGPTGLAAAGKRRLTTTAKPLAPRMHERLVQAIVKALTEQSVTVPGTRAAELVLPQLAAQLQGLLAQRAEAAKQVEEALDAHPLSQLLMSIPGVGIRTTARLLLDIGDGSAFPTAGHLAAYAGLAPVTRRSGTSIRGEHPSRGGNKHLKRALFLSAFAALHDPDSRAYYDRKRAAGKKHNAALICLARRRVDVLHAMLRNGTYYQAKPAAAA

SEQ ID NO: 425854 - protein, 472 aa, unidentified
MTKRNEVKKKGQGIVSFQQVNPDAAGVDISAGSHVVAVPADRDTVSVKEFGAFTEDLQCIVKWLKFCRITTVAMESTGVYWRQLFLVLVEAGFEVLLVNAKHVKNVSGRKTDESDAMWIQKLHSCGLLRSSFLPDDDIEKLRTYTRHRKSLIEDSSKYVLRMEKAMELMNVKLHSVISDIMGKTGRAIVEAIIAGERDAKSLLVHLDSHIKADPETIRKSLVGNWREENLFTLGENYELYKLVHERIRHCEGKIEQCLQELAAKNNEGLIEPVVPVPAEAEQEAGKSGKREKKKSSKPKKRKKKKNQPNFDTKAYLIQIYGVDVTAIFGISDGAALEILAETGMYLSKFENEDSFVGWLNVCPNNKISGGKLISSRVMRRKANRATQAFRAAANSLQKSNTWLGDFFRRMKAKGGNKYAIIATARKLAIIYYKMITEKVEFCPVDVEEYRAKYKEQKIERLEKQLEKLKSVA

SEQ ID NO: 425855 - protein, 343 aa, unidentified
MQTVTTIGLDIAKSVFQVHGIDAEGTVLIRRKLKRRYVLAFFEKLPQCLVGIEACATSHHWSRELTALGHTVRLMPPAYVKPYVKRQKNDATDAEAICEAVTRANMRFVETKTPEQQSCLMLHRTRQLFIRQQTSVINAIRAHMAELGIVAPVGRKGVDQLLAIVTDARDERVPELARACLAALGAQLRMLKAQILEFDRRILAWHRSNAMSRRLDAVPGIGPALATALVASVPDPKAFRSGRNFSAWIGLVPKQHSSGGKDRLGSISKQGDRYLRSLFTAGALAVIRYAKIHGTKHRPWLTALLARRPTKVAAIALANKIARMAWAMMARGERYKEPVALAA

SEQ ID NO: 425856 - protein, 459 aa, unidentified
MNREQRREMMRKIQSEELRLEVIRPDAAGIDIGNESHYVAVPPTRDSQPVRRFGCTTAELKAMADWLKQCGIQTVAMQSTGVYWIAVYDILEAAGLDVYLVNARDTKNLPGRKSDVQESQWLMKLHTYGLLRNSFRPSQEIRTMRTYWRQRNDLVQSASRHIHRIQKALTQMNLQLANVLSDVSGLTGQAIINAILAGERNPHKLAAFRDPRVQASEEQIARSLEGNWQEDLLFVLKQEQDGYEFCQKQMAECDRQLEQYFQRREDRSQGASLPEEKRKTRLKKKNGNKPQFGLRADLFRMSGTDLTQIDSIDVVTAATIVSEVGWDMSKWETEDHFVSWLRLCPDNRISGNKIIGKGRLPTNNRVSIALRMAASTLRVSNTYLGAQFRRFRAKLDARVAVKAMAAKLARLVYRMMRYGMKYVDQGAKFYETQHRNLQVKHLKWRAAKLGYQLVQAPST

SEQ ID NO: 425857 - protein, 454 aa, unidentified
MGEATDGGNIHALCRAGYSQKSVVACCITPGERGEKQIEMRTFGTMTADLLALSDWLLSKGVTHVAMESTGEFWKPVYNILEGNFELLVVNARHIQNVPGRKTDVKDAEWIADLLRHGLLRGSFIPPQAQRDLRDLTRQRTNLVQDRTRVINRLQKVCEWSNIKLSAVATDITGVSARAMLEAILAGNTTPAALAELARGRLRTKRSELERALTGVVRAPHRFLLAQHLMQIDFLDEQIALLDEQIALHMAQTDTNNAQQPPASPDLPTDTPEDTTGEAPSSAAAPPGWEEAVALLDTIPGVNRRTAEVLLAEIGADMSRFPSAAHLASWAKVAPGNHESAGKRFSGATGHGNRWLRTALVQAAWAAIKVRRSYLAAFYHRLAGRRGAKRAIFAVAHRILIAIYHMLSRREPYRELGATYLDERNKANLIKRTVRRLEQLGYKVNVEPVQPAVV

SEQ ID NO: 425858 - protein, 409 aa, unidentified
MNTLYVGIDVSSKSNVVYLMLPNGDKHSNFSVANSHEGSTLLVKKIYSALTSHSLDTVLIGLEATSVYGDNLVYFLREDATLAPFNRKIHVLNPKQVKKFHDTYNDLPKNDYVDSFVIADCLRFGRINKEVYMGDYRYKALQNLTRARFFAVQNLVKEKQRFMNVLFKKYSTMTQEKVFSDAFSTTALAVYDEFESAEALANMDLHELTDFIIEKGKNRFPDPVAVAKAIQKAARSSYRLPKTVNDSVNQVLSISITSMKALESQIKEFDKAIKALMELLPNVLISIPGIGPVYSAGIMAEIGDINRFDNQASLAKYAGLAWKQHQSGGFEAEVTRLIPSGNRFLKYYLCEAAFSLVRCDKEYSDFYHLKYKEVNRCQHKRALALTARKFVRLVFRLLKDNTRLYCPAK

SEQ ID NO: 425859 - protein, 349 aa, unidentified
MRHIGIDLHKTNFVACFLAADETQRLETYPLTREGLALFKRQLRKSDEVAVEATQNVHFFYDQVKRHVRRVAVVDTYRFGVIAKSKKKTDKADAAALARFLRLGWLPEVPVPSEQVRTLRQLLQARETLVSMRTKLKNMAHAAFSRNGIALARAAFASRSSRARLSSRDDLPTSDLLVLRACLRQIEQLDSEIKVIEEEVTRHGQTLKGLRRLLQVHGLNLLSAISLLAEIGDISLFDTSKQLVSYAGLATSTRQSSETTRHGGITKRGRKRLRTVCIQAVLAMVNRTDTPLMSFYQKKKREKGAGKAICATARKLLTIIFVLLKKELDYWYLEDRLYNRKLRALNAAA

SEQ ID NO: 425860 - protein, 337 aa, unidentified
MKKFYIGIDISKEKLNFCYRKGLEIVLEEECTNDVAIIKKAFRDSLKTLNSTFDDVLVCAEYTGRYIYPLTVACQDMGLFLWIDDPTRIRNSFGIIRGKNDAIDAARIAEYAFRYSDKAVRYTIASKALVSIKNLLSDRGFLLQDRKRYQTQITDQRKYMEHSEFKRKSQRWNKVIKVIDEQIKAIDTEIDNLIASEPMLAHQKELLKSIDGIGDRIAINMIAVTAGFTRFRNARHFCSFAGLTPYRYDSGSSIRSKSRISKRANQNIKALLHLSAVNVATRMKENEYREYYERKIKEGKHVMSVLNVLRAKLVHRMFSVIARDEFYTKKYMPDFVK

SEQ ID NO: 425861 - protein, 509 aa, unidentified
MVSGCPAFYHVAPSRIMAPRSTPYCPLPVTHTDDPAEHQVLHPYGVGIDTHSKFIQVCILFRTPGSDTGGIKRLERTFLTTFSDLQRAHQWTLNVLAGLAEPETLRYCIESTGTYHCPVLIAWGGIPSVVNPLLAGPTRRKTDVLDARLLAHHSITGLWRSSFIAPPDLQQLRVLWAQRREFAREATRCTNRIQNIILRFGHTYAARDPIRSTVGRSITESLLLGTAPNCPGVCPGGLPPEVAQVIAGLLSKYDTAKEAAHRALVAARNFIRSRNWPTGTTPMPGTNLLHLLLSVPAVGEVTAITWLAEVGDPKRFDHAKQVSAFCGCDPSLKTSAGKVTSFTRRAGNIRLHSALAAAAQVLMASPSNPFGQYGRSIAGRHKKGGYKKAVGALARRLAIALWHVHFKAEPFSFAGYKFHEQPPVPSVSITAALGSAVARRLAPHGFQKMPDLVDAYRAGKLAQISGIGGTTLDLIREWLTANARQQPKQKDKQHGKKHTTKHPRSSDRR

SEQ ID NO: 425862 - protein, 393 aa, unidentified
MHKATHTAVIIDCWTKKLGEITFENRPGKFDKFLKDVKTIAGNLIPVFGLEDTGSYGRSLAVFLLGYKHIVKEVNPSYTKSMRHNSPIVFKDDSYDAYCVAKILRDMFDTLKPANPQDIFWTIKHLVGRRDSLSRGLIAIQNQLHGQLTYNYPSYRKFFCDIGGNTALYFWESYPSPGHLEGITEEQLAEKLKEASHRAVGLKKAQQIFDLVAEDGETKQEYQAERDFIIKSIVKEIRQKKEAIAEIDVELQKMIPLTGYKLQSMPGIDLNTAVHIIAEVGDVNRFSNSDKLARFAGTAPVMFSSAGKGKEQRCRQGNRRMNAILYFLAVQQVQLHFVSKKPRNPAFRAYFEKKLKEGKTKPQALTSITRRLIRILYNMMKNKTEYRMSEVEN

SEQ ID NO: 425863 - protein, 365 aa, unidentified
MIVIGADTHKTSHTVGAVNEATGRVVADRTVKAKRRSFEDLLRWGRGQGEERVWAIEDCRHVSGALERFLLVRGERVVRVPPKLMAGARKSARERGKSDVIDAVAIARAAIREGLDTLPVAQLAGPELDVRLLVDHRERLVAQRTALINDLRWGLHDLWPELEIPSRALTGGRWQDRVAGRLARNEQTARVRIARDELRRIRELTRSIDALERELAALVAALAPRLLAERGCGALTAAKLIGEIAGIGRFASDAKLARIAGSAPIPASSGRTDRHRLDRGGNRQLNCALHRLAVCKGRLDPDTAAYLARKQAEGKSRREALRCLKRHLARRVWRLLQTPADPVAASPTTPVTIYCNTPHGSFALT

SEQ ID NO: 425864 - protein, 450 aa, unidentified
MGRPRVIDDEEHERVYEKVAAVDVAKDSGMVCTRMPHPSRPGARQGTVWTVQARMGAIRKLGRQLARDGIEMVTLESTSDYWRIWFFVLEACGLGVQLVNSSQAKNLPGRPKTDRLDAMWLARLTEMGLLRASFVPPAAIRALRGYTRARTRLTQERTRCWQRLEKLLEGALIKISSVASKLTTLSAQDMVRALIAGERDPQVLAALARGKMKAKHDDLAGALDGMFGDHHGELAQLLLDQIAFLDGKIAELTARVGQQATAMPAAWGVNADGTTGPHAGTAPGDPVLPAVQRLAQVPGISEDLARSIIAETGLDMSRFPDAAHLVSWAGLCPRARQSGTRARTGKKGRGNGYLRGYLGQAAIGAAATATFLGERYHRIARRRGKAKAQVAVARSILVIIWHLPASPEARFTELGYGYYQARTGKDRKIKNHIRQIEALLGHPVTIAKAA

SEQ ID NO: 425865 - protein, 394 aa, unidentified
MTAAHTQSTARTRVLYLAFELGWENWKLAFATEAADNPRIRSVKDRNLAALRHEIAATKAKFHLPADAPVVCCYEAGRDGHWLHRCLSAEGFRCHEVDSSSIEVDRRQRRAKTDTLDAAKLVSMLIRFENGEKRVWRTVRVPSEADEARRHLHRELEDWLDQRRQHNNRIKGLLAGQGLDATVDKDFPKQLDALRCWDGHPVSEELKERLLRQFEGWQFADRQVKDLENQRARSIRTGTDSCLDTVRQLLRLKGIGAASAWLFVMEVFAWRDITNRRQMGSIAGLTPTPYTSSTTSREQGISKAGNRRLRAMAVEIAWMWVLHQPQSELTKWFLRRFGTGSRLRKIGIVAVARKLLVALWRYLKEGTVPPGAVLVDWKAKMNSHRKPVAPAAAA

SEQ ID NO: 425866 - protein, 482 aa, unidentified
MKKSSIYPNQSQELLGLFEKAGNPSKLMCVPIDYAKKDHIVMFCNGNGEVLRKPFSVKNSVDGVKYLLGQVNRSCRHRHIQSDHVFFGGEDVNSYAENFANTIRADGWLVANVNAHDAKKQRENLQASTDRLDLMGIATMLLNRRANCCPAQSGVYRNLRTLVRHRKKLVKMKTEVRNRIHTIVDRLFPDFLNEKKSGIVPFSNSSLHLMQTRFSAPQIRRRQRPALIRNLEKRGTKKAEQVAAKLQEYASQVLTTPDEYTATLQVSLDSHVTHYRCLFDGAHQLVNEMAQLLAQTQGAFLTSIKGIGIVLASGVTAEIGDPLAQRSADQLASYAGIIPKVKQTGGSQGPSITGRVSKRSNHLLKDFVVQSAFHIGRYGPKDLKDDFSRREAAGQHADFGIARRFVRMTMCMMRTSQIYLPPDLRCTHAKLERRADYYLSMWPYLRDKWSKTGALDTAFLKDKPLGQWRYIVQELYGIKLRM

SEQ ID NO: 425867 - protein, 452 aa, unidentified
MAKKRERRECKAVVLEPDAAGIDIGAEEIYVAVPPDRDEESVRMFSSFTCDLHALADWLQRCRIRTVAMESTGVYWIPLFQILEARGLEVYLVNARYLKSVPGRKSDVSDCQWIQYLHSVGLLRASFRPGMEICAVRSLWRHRSSLLQMASEHILHMQKSLSQMNLQIHHVLSDLTGASGQAILDAILAGERNPVQLAQLCNCRVKSPREQVAKALEGDYRPEHVFTLKQSLDGYRYYQKLIAELDREIQRLMQTLPSAVETEQEIPQRTKHSAFQRQGNDPGFDLRGQLYRIAGVDLTDIPGVSAVTAQVILTEVGPDLHRFRNASAFASWLGLCPENRVSGGKILSCKTRRVKNRAALALRLGANSLCRAKGYFGEFFRRMRAKLGTAQAITATAHKIARTLYHVLLTKEPYAETVFHKCDEHTRRRAEMRLRKHAALLGFQIIPVNPAT

SEQ ID NO: 425868 - protein, 320 aa, unidentified
MPQQGRIVGIDVSKAKVDACIRSLRQWLSAPNTPTGERELIAWLHDNRVGLAVMEASGGYERSWAEALRGAGIAVRIVDPKRVRYFARSAGRLAKNDPIDAEMIAWFAETFATEAQLRHDPDRDAVDRLMTARSLLVRLSTQIRQLGQHRQPPVVENAQRAMIKAIKAQLAKLEAAIEVKIRANAELAARAAIIRSVPGFGRQFVAGVLAWLPELGGIGNKAAAALVGIAPYDDDSGQHRGQRHIKGGRREIRDLLYMATLAAASRHNPVIKAYYQRLRAKGKKAKVALVACMRKLIVILNTLLARGQMWNPPSAAASAV

SEQ ID NO: 425869 - protein, 353 aa, unidentified
MHATTVAIDLAKDVFELAFADTRNRVLERKRLSRKSFAHCLDNRPPLRVVMEACGSAHYWGRRFQALGHDVRLIAARDVRPYVRRNKTDRTDVAGMLEADRCADIASVPLKTPEQQGVQALHRIREQLKAQRTATINVLRGVLREFGVVIPLGAAKVRLAVLSALEDGDNDLPMSLRDALAAQLDQVLALEAQMRRIEHHLEEFAARDATTMRYQDVPGIGLLTATALRASVGPLARFASGRHLSAWIGMVPREHSSGSQRKLGRISKRGDGYLRTLLIHGARSVLHAAAVRRRNAQPLDRLQAWALDVQQRQGHNKAAVALANKLVRRLWAMEHHGKRFDANHCSVRPEVTH

SEQ ID NO: 425870 - protein, 340 aa, unidentified
MEELYVGLDLHSRNTYTGIMTKDFKRVFGKRLTNDLLVIVGALEPFRNDIQGIVVESTYNWYWLVDGLMDAGYDCLHLANPSAIKQYEGLKHVDDKSDSFWLAHLLSLGILPEGYIYPKEERPVRDLLRKRSFLVKQRTSHIHSLKSMIERNTGERISTRKLTGPDRIDLEQLLKEEYLFLSANASRSNIKFLSHHIKIIEKAVRKKIEIKKGFEFLKTVPGIGDILALTIMLEVGDINRFPKVGDFSSYCRCVSSKWTSNGKSKGKGNTKNGNKYLAWAFVEAAHFAQRFSPTIKRYYQRKSAKRNEIVGRKAIANKLARACYYIMRDKVPFKEDASFC

SEQ ID NO: 425871 - protein, 312 aa, unidentified
MANLFIGIDVSKDILDISCLESTNLKYLKYDNTTLGLTKMIEYFNKSKKKIYVGLEATSIYHKLAADYLSVAGYNVYELNPYTVFNYKKYKRTYAKTDKIDSLSIVQYLKENYEELPLYTVKTEDEKKLYVILTRINQLNKMKIQEINHKESSLLVDKDTQKHIDFLDKKIKELKKKLNEIIKLKKNKVLKEKINIISKVPGIGFYTAVVILINMSELGKMNRNQVVSLSGMAPFAEDSGKKRGKRRIRGGRKRVRDSLYMPSLTAIRINAHFREVYDRLKQKGKIHNVIRIVIMKKMLIQANTLMKEYYNK

SEQ ID NO: 425872 - protein, 437 aa, unidentified
MRDDMYYIGLDVDKRTISFCVKDASGQVHQEGKIGATRRELDRWIETLPQPRIIAMEATIFTGWIYDHLRPHAQQVKVAHPLMLRAIAAAKKKNDRIDASKIADCLRCDFLPECHMASPEMRDRRRTLRYRQLLVRQMVQMKNRVSGLLMETGVSYNKQRLHRVGYFRELLSSHEEVHESIRPLLKLSRETIVRLQKTEYGLVSSLERDPLLADRITRLRTVPGVGPITALTWALEVGDVSRFRSIRQAISYCGLCGAEKSSADKVMRTPLSKQRNKHIQHVLVEAAKLAPRQDHDLALVYETEKQRGNTNRATLAVARKMVAYLLAVDGGKGISCLQKTKERGGLIPVRRRKHQNHTERRLPGPAICRLSDGDQTPEALFELFQDWQRTQTQSSVTALTGPRQRMDVRFCEGRNQPPRGNTCGLRVLAGSVVRAPP

SEQ ID NO: 425873 - protein, 402 aa, unidentified
MLSVGIDVSKEKSMVCIMKPMGEIVAGPYEIEHTESDLSELAHMIKRLDSDVRIVMEATGIYHLPVATTLKDAGLFVSVINPLEMKNYRSQDMRKVKTDKRDSISIANYGIEKWFTLCPFDCQEGVYAELKLLGRQYRFFMESRIELLLNLTHLLDYTMPGVKACFGGWSEYSGKDKLCDFAEEYWHYDNITKCSETKFIEHYQKWAKEKGYHQSESKASQIYRLAKDGIPTIPSNAPSTKMLVLEAVKALREVNSALFAILTRMQELARTLPEYPTVRAMGGVGDILSVKLIAEIGDVRRFHSSKGLIAYAGIDPPPYESGKLIGTNRHITKRGSATLRKIGYEVMRCVKAGGRSEEDPAVYDFMIKKEDEGKAKRVAKIAALNKFLRIYYARIMEVYSAN

SEQ ID NO: 425874 - protein, 349 aa, unidentified
MNATIVGVDLAKNIFELAIAGSDWRITQRQRLARPKFLSFFVHLAPCEVVMEACGSAHFWARRISALGHTVRLLPAHYVKAYVRRNKTDQADAGALIEAARCAEVREVPLKTVEAQQIQSLHRLRSQWMSTRQRCVNTLRGILREFGFAIPLGVNVAKEQIGVALADFDSEVPQALRATLTDMLQEVRSLEEKILGVERQLNALTRADARVQQLRQIPGIGALTSTALRAIVGDIQRFPSGRHFASWLGLTPNERSSAEKRRLGRISKQGDVYLRTLLVHGARSALLAAHRALRAGRPLDRLRQWALECERQRGHNKATVALANRIARIVWATWKFERPFDGNWSPEAN

SEQ ID NO: 425875 - protein, 350 aa, unidentified
MNTIHYIGLDVHKKSVSYCVKAADGRILEEGKLAATRAALCEWARKRAVPWHGAMEATLFSGWIYDTLQPYAAQLQMGHPARMKAIGASKKKTDELDARTIADLVRCDLLPACYVAPAEMRDLRRLFRYRNLVVGEAVRMKNKIGGLLMEVGAPYQKQRLHGQEYFSELLDNLEGVPPSVKDLLRLSRGVLVMFEATQRQLLRRLHQHPSLVERVKRLESIRGVGPVTALTWALEIAEPQRFPSLNHAVSYCGLTAALRSSADKVQRGPISKQRNAHLQTVLIEAAKLAPRWNPQLAALHARELERGHRNRATLEVARKLVAYLLAVDKSGQPFQPRCPQETAAQIEKVA

SEQ ID NO: 425876 - protein, 404 aa, unidentified
MNDSMIGYAGVDWAMDGHAVCVVNGHGTAVIEFDVEHSAEGLSEMCRRIAGTGAPRVAIERPDGPVVDALLGAGLEVVVVSSRSVKALRERYGTSGNKSDRSDAFVLADCLRTDGHRWRSLEPDSPATVTLRGHVRARKDLVETRVAVANQLRAHLRIVFPGAVGLFSAIDRPIALRFLERFPSATSAGWLSEKRLATWLRANSYSGSKDPAELYTRLSAAPAGVIGVDGDARGAITLAYVKVLKTLRTQIDELNTRLDELLDAHPDAPIFRSLPRCATVRAATLLAEIGDCRARFPDPESLCCLAGVAPSTRASGRHRVVTFRFSSDTKLRAAICDFAGDSWRGNEWAAHRYHELRASGKTHPHAERILARSWTHIIWRCWQDNTTYDPTRHGAHQRLTTQAA

SEQ ID NO: 425877 - protein, 298 aa, unidentified
MFQKCRWILCLIKRLDHSTSNDVDGFDAIIAELKQHSIALVLMEATGGLEAAVACSLQTQGFDVAVINPRQARDFARSMGYLAKTDRVDAAMLAQLAEVINRHPERARFLRNLPNAEREMLNTMVVHRRQLITMLTAERNRLYPSHPQSRKSISTIIGVLQDELKCINKSMEVHISTHFKTLAEILGGVKGIGAATIATLLAEVPELGHLSRREISALIGLAPFNRDSGNMRGRRTIFGGRANVRSALYMATIVATGHNPVIKQFYNRLVESGKAKKSRSGSLYAQTPDNPECDDKEK

SEQ ID NO: 425878 - protein, 417 aa, unidentified
MSLTPEPVVPVIAGRVCAGIDWASIDHAVCILDGQGAVLERFFVVHDAAGLKTLVRRLLKAGVEEVGIERSDGPVVDALLQAELAVLVIAPGQLKNLRSRYGSAGNKDDRFDAYVLADVARTDRARLRPLVRDSAATTAMRTTVRARRDLVEHRVAAANQLRAHLQLVFPAAAGLFAAIDSAINLTFLERFTTQTHADWLSPTRLASWLSKSAYSGRTSAAVLHTRLLAAPRGTTGTDAEVHALTTKAYIALLRTLNTQIGALEDNLATQLTSHPDTHIFASLPRVKTLRTARLLAEIGDARGRFPTADSLAALAGVAPSTRQSGKVKTVTFRWGANKQLRDALCDFASDSRHDNPWAADLYTRAIARGHDHPHAVRILGRAWAHIIWACWHNNLSYDPSQHRALQNILANTTAQAA

SEQ ID NO: 425879 - protein, 398 aa, unidentified
MLSIGIDVSKGKSTVCGMKPGGEIVYTPFEIQHTREGMSELVSLLRGSGEEVRVVLESTGSYHCPVVAALLENGIFVSVVNSLRMKRFCSQSIRRVKTDQIDAMQIALYGLAYWQELQPTRLPENTYRELQLLARQYYQMTSILIKAKVDFNALCDQVLPGMQELMNDHAGRHKLSDFVLRYRHTTHILEMGETRFRKDYCKWAEKKGYRNRERMAALIFATAQNGIPVLPNAPSTQIVITEAIRVLHTVEASRDAILTQMQALAKTLPEYSLVREMPCIGDTLAPRLIAEIGDVRRFHSKRALIAYAGIDAPPYQSGKFSANNRHISKRGNRYLRKTGYEVMQSYVMHKPANDPIFTFIEKKRSEGKSGKLAMVAGLNKFLRVYYGKVTELYRSLPQ

SEQ ID NO: 425880 - protein, 402 aa, unidentified
MPMLSIGIDVSKGKSTVCGMKPGGEIVYTPFEVQHTREGMSELVSLLRSSGEEVRAVLESTGSYHCPVVAALLENGIFVSVVNSLRMKRFCSQSIRKVKTDRIDAMQIALYGLAYWQELQPTRLPEDTYRELQLLARQYYQMTSMLIKAKVDFNALCDQVLPGMQELMSDHAGRHKLSDFVLRYRHTTHILEMGETRFRKDYCKWAEKKGYRNCERMAALIFATAQNGIPVLPNAPSTQIVITEAIRVLHTVEASRDAILTQMQALAKTLPEYSLVREMPCIGDTLAPRLIAEIGDVRRFHSKRALIAYAGIDAPPYQSGKFCANNRHISKRGNRYLRKTGYEVMQSYVMHKPANDPIFTFIEKKRGEGKSGKLAMVAGLNKFLRVYYGKVTELYRSLPAIE

SEQ ID NO: 425881 - protein, 374 aa, unidentified
MDKAYYTTIGMDVSDRKTQVCVMAKAGATPRIVMETTIPTTKDGLAKFLSTQDGAAPVVFETGMHCRWMNEVAEGMGFKVYVANPCRIRMIAESKTKNDVNDARTLARLALSDPGLLHPVKLRGPEHQKMLNLHEMRNLLVKQRTGIVVQLRAVAKSMGFRIAKCQAASFHKLERRAWPKELNDIAWPMMKNLEQLAVTIKTYEKLIRELSGTPTFKAQVERLMEIRYVGLYVATGFVAVTGGDMDRFEKPRDVGPWLGVTPRQDQSGDIDRQCHITKAGSPLMRRLLVESAQMILRDGSADTDLKAKGLRICARGAKIAKRKAITAVARSLAVLMVAMLKKPDAPYVPLSARCEKELLAMRATVEAAGPGKNP

SEQ ID NO: 425882 - protein, 410 aa, unidentified
MVERVAGLDVAKEEVVACVRTPGGAGSRRRQEVRTFPTFTACLDQLADWLAAEGVSQVVMEATGPYWKPIWYVLEERGGFELLLVNARHVKIVPGRKTDVADAAWLAELLEHGLLRGSFVPPAAIRELRDLTRYRKRLVQAHTAECQRVQKTLEDAGTKLDSVASDVLGVSGRAMLRALVAGERDPEALADLAKGVLRKKGPQLRQALYGRFGSHHALLVRLALEHVEHLEGAIAALGAEVDKVIAPFAEARDRLDGITGVGKRAAECIIAEVGTDMTRFPSAAHLASWAGLCPGNNVSGGKRLSGKTNKGNRWLGEVLNECAWAAAHSRKTYLGAQFWRLSRRIGKNKAAVAVSHSILVIAWHLLGTGSEFHDLGGDWFVRQSDPERRKNLLVKQLQALGYSVALRPVA

SEQ ID NO: 425883 - protein, 343 aa, unidentified
MEGYAGRQFVGIDLHRRRSVIVRTTEGGDVLETVRIVNDVERLASVMARAGESPETVLEATYGWYWAVDALQAGGASVHLAHPLGVKAFQYRRVKNDVRDATDLADLLRMGRLPEAWIAPPATRELRELVRHRAKLVGLRSGCKAQVHAVLAKCGIQVLMSDLFGVDGTNLLDRVDLPAPYAARIGSLRRLIDDLDFEVDHFAGLARGRLVREPGYIAVQNIPGIGPVLAAVFVAEIGDISRFPAAAKLTCWAGLTPKHHESDTHVHRGRITKQGSRLVRWAAIESVKKIPKYSPAGLLRERVADRRGRNIGSVAAARRQLEFVYYALRDGHVRALEHPPRAA

SEQ ID NO: 425884 - protein, 370 aa, unidentified
MLDTTTFIGLDVHARSIKAVSLDVMTGEVRAATFGYDAGAVAEWVRSVDPGARCVYESGVTGFDLQKRLSGLGVDCVVGAVSKMIKPSADRRRKNDRNDAEFLARMLSVGNVVEVWVPDDECEAARDLTRALEDARDDLSRSKQRLSKFLLRHGLVFDERTPTGRRKGNWTRAHWSWIESIRFAERADNDVLAYYVDAVRRAAEEKARLEGLVEAEARKPRWRKRVDSLRCLKGVDTASAADLVFEAGEFSRFRNARSFAAWVGLTPSEHSSGESDRRGAITKADNKHLRKTLVEAAWHYLTCSGRPKGLAKGQAPDRGARRHAAKGVRRLVERRESLLARGVHGNKANVATARELACWVWAVGLMAEEA

SEQ ID NO: 425885 - protein, 427 aa, unidentified
MEAVQMARKKRVTDEVEEIIYECCCGMDVHKDDIKACLNIGGKKEVKTYSTMTDDLLAAAKWLKDNAVQMVAMESTGPYWKPVYNILESEEIPVMLVNPQHIKNLSDPKTDVRDARWISGLLRHGLIRASFVPERDMRELRELIKYRNSLSEESTRTLNRIDKVLQGANIKLSSVISKTGTKTELSILEALVNGENDIQKLSALAKGTLKNKTAEITRALNGVIGDHQRLLLKSMYNHLKVINEEMAILETEIDKRMTKDNELIERLDEIPGVGKLTAQSIIAEIGTDMEQFPDEKHLAAWAGVCPGQNESAGKRKSGKTRKGNSHIKKTLVQAANAAANTKNTYFSAQFKRIAARRGNKRAKVALAHTILIICYFMIRDGVSYQELGATYFDKRNTEGIVKRSVKRLETLGFEVTVKRKDEQKEAS

SEQ ID NO: 425886 - protein, 343 aa, unidentified
MNPVIGLDISKEESHGQAFLDRGKPYREIFHFEHTRDGLEILLQVIHDIEHESGHRPTVILEATGHYQSPVVQFLEEYHYLFFVINPLISNRLRKTNLRKVKTDAAGAYLLGELYYREEFEPFKKRGVQLLNMRDLTRQYESFSKMCVQTKLQFQAVLDQVFPAYKGVFGAMYANVSLRFLHEFPTSSSVLEVSEETLKITINTLLSSKHGRSERWINERVQRLLDAAKQNPFQQTMYASHLINLKILISLILQYQEHLSELEQTIDALATEIEEYELIQSIPGIGPKIAATILAEIGEVDRFDHPKKLVTFAGIDLSVFASGKLQQHVIESLNVVPDSLDTH

SEQ ID NO: 425887 - protein, 371 aa, unidentified
MQKASTFVGLDVHKNSIVVALLRPGQSTPLEWKVVNEPGAVHRLIRKLEREAEDGLQCCYEAGPTGYVLKRQMDRAGIPCQVIAPSLIPVKPGSAIKTDRRDARKLAELLRAGLLTEVKPPTEDEEAVRDLTRSRDDAQRDLTRARNRLSKFLLRRGCVYAVDRKPTWSQKYRSWLRALTFERVADQVIFEDYLLAVEQVEGRLEALTDRIEHFAEQEPWRERVQALRCFHGINTVTALALVAEIHDPRRFAHPRRLMSYLGLVPRESSSGMRERRGGITGAGNRHVRRLMVEAAWHYRHKPVVGRALRLRRREQDPKAIALADRALRRLTLRQRRMLYQGKHANLVNIAVARELVGFVWNVLHTRATAQA

SEQ ID NO: 425888 - protein, 408 aa, unidentified
MNPLYVGIDVSSKNNVIYLMLPNGDKHSSFSLANSHDGSTQLVKRIFTAMTSNNIDSVLIGLEATSVYGDNLVYFLKEDTTLASFDRKIHVLNPKQVNKFKESYNDLPKNDYVDAFVIADCLRFGRINKEVYMDDYRYKALQNLTRARYFAVTNLTKEKQRFINVLFKKYSTMTQEKVFSDTFSTTALAVYEKFESAETLAKMDLQELTAFIMEKGKNRFPDPDAVAKALQKAARSSYRLPKTVNDSVNQVLAISITSIRALESQIKAFDKAITKQMELLPNVLISIPGIGPVLSAGIMAEIGDINRFQNQAALAKYAGLAWQQHQSGNFEAQTTRMIHSGNRFLKYYLCEAAFSLVRCDKEYNRFYHIKYKEVNRFQHKRALALTARKFVRLVFALLKDNRLYRPAE

SEQ ID NO: 425889 - protein, 309 aa, unidentified
MDECFAGIDISKATLDVIKRPSNEHWTVSNNEKGFAEIIERLKGVKLVVLEATGGLQVAVTAALLNAGIPVVAVNPRQIRDFAKSIGVLAKTDHVDAKVIARFAETIRPQVRLLKNEEMTQLEAIVVRRRQLVSMQTEEKNRLHIAPKKIKKDIEEHLEWLQKRLHEIDKEMADFIKNSPAWREKEKILRSVPGVGPILTATLLCELPELGTLDRKKIAALVGVAPFNRDSGKFKGTRSIWGGRAAVRAVLYMSTITAIRFNPAIKEFYQRLRSAGKKPKQAITACMRKLLTILNSIVKTGAPWQFNYS

SEQ ID NO: 425890 - protein, 391 aa, unidentified
MFYIGIDIAKKNHEASIIDSSGKSLSKSISFPNSTKGIEKFNNFIAEFGITTNNCIIGMEATGHYWISLFSYIVDLGFTCYVINPIQSDAFRKMYVRQTKNDSVDSFIIAQIMRFGEFSISNFSDENTFALRNLTRYRFALVDECSDWKRKLVAILDQVFPEYSSLFSNIYGVASKELLSKYPLPEDMLSIPAEKLGNLLYECSKGRLGINKAEEIQSRARESFGIKFAKRSFSFQIKQIISQISFLEEQLKEIEIEISCLLEDICPVITTITGIGSVLGASIVSEIGNISRFERANQLVAYAGLDTRIKQSGDFSATNTKLSKRGSPYLRRSIWLTATVAAFNDPALSIYYQGLRARGKAHGTAIGAVARKLTNIIFAVLRDQKPYTPNI

SEQ ID NO: 425891 - protein, 411 aa, unidentified
MAVVDVVHPRCAGVDVSKRDAKVCVRVAGVGRAGATSTVTTWGAVTNRVLALREHLIAAQVTLVVMEATGDYWKPFYYLLEDGPFEVMLVNARHVKNLPGRKTDVSDAAWLAQLGAHGLVRGSFVPPEPIRQLRDLTRTRTTLVRERAREIQRLEKLLEDAGIKLSSVASDITGVSSRAMLEALIAGRRDPVELAELARRRLRVKIPDLTEALTGRFSEHHAFLARLHLDLIDQHTRAVAELTGRIEVVIAPFRAVRDLIVTIPGISTGVADVIIAETGADMTRFPTAGHLASWAGTCPGSNESAGRVKSTKTRPGNPYLKGALGVAAMAAAHGNGTYLSARYRRIAARRGPVKAIVAVEHAMLTAIWHMLTNGTGYTDPGGDFYTRHNPDKTGSSYLRWGGATRPGAVMR

SEQ ID NO: 425892 - protein, 345 aa, unidentified
MQPMYYIGLDVHKQKISYCVKDSAGKIHDEGWIPATRFDLDRWMKRLPQPWSAALEATMFSGWIYDHLKPHAVALKVAHPLMLRAIAAAKKKNDRIDANKICDCLRCDFLPECYMAPTAIRERRRTLRYRNLLVRQMVQMKIKISTLLMEAGVSYNKQKLHKAGYFRELLATNPDIPEGLRPLLRLSREMVVRLGKTESALIHSLQQDRLLAERVERLMSIPAIGPITALTWALEIGEVQRFSSIKKAISYGGLCGDEQRSANSVQRTPISKQRNKHLQTTLIEAAKMAPRYSPTLALLYDRETQKGNANRATLAVARKLVAYLMAVDRGQCRFLVIDQETRTAA

SEQ ID NO: 425893 - protein, 344 aa, unidentified
MWIIGCDYHPSFQQIAFVNQATGEYNERRLEHKGGEAEQFYRSLAGQQVRVGVEATGGMRWFERLLGELRIELWIGDPVKVRAAAARKPKTDKEDARLLQRLLLEKRFQRIWVPTVQQRDARQLVLHRHRLVQTRTRAKNQLQDMARNEGLHPKRWVWSQAGQKELMALPLSPWATVRRQDWQELLGELNRRIDPLDRALQQEAAQRPEVQLLMTHPGVGPVIATAFVVTIGEPGRFQTSKQLAAYLGLVPLENSSGKGRQRLGHITKQGNSLLRGLLTEAAHIASKHDPEWRRKYMRLAMKKNRSIAAVAVARCLAVRLWWMWKLGLDYGQMKESRSHAEQLV

SEQ ID NO: 425894 - protein, 458 aa, unidentified
MEEVMTKRNAEAERAKAPRKPGPSQKALTITHPNAAGIDIGSCSHYVAVPPDRDAEPVREFASFTADLHALADWLKSCGVDIVAMESTGVYWIALYEILEARGFTVLLVNARHVKNVSGRKSDVLDCQWLQQLMSYGLLSGAFRPADAVCTLRSLTRQRGMLLREQGRHVQHMQKALTQMNIQLTNVISDVAGVSGQRILRAIVAGERDGHALAALKDGRIRASGQEIAKSLEGNWRTEHLFALKQAVEAFDFTGAQLAQCDRQIQIQLESLQAHDGEPVKGKKRSRTRNAPAFDLRTHLFKMCGVDLTRIDGIDVTTALAVISETGADMSRFASVGHFTSWLGLCPGTRITGGKVMSGKTKRVVNRAAQALRMAAASLRSSKSALGAYFRRMCSRMDKPKAITAAAHKLARLIYTLLTRGQEYTDQGQEYYEERYRQRVLWHLNQRAEKMGMKIVPA

SEQ ID NO: 425895 - protein, 344 aa, unidentified
MKHYAGLDVSVKETSICIVDEAGRICREMKVVSHPEDLLAVLCDPAWRLERVGLEAGPLSQWLSSGLAEAGVPAICIETRHAKAFLKAQVNKSDRNDARGIAQMMRVGLFQPVHVKTLASQKRRALLAARKILQEKALAIENDIRGLLRNFGLKVGIVGVVGFEQRIHDLVEGVPELADIMEPLLAARRVLREKFAKLHRKVLLLARDNEVCQRLMTIPGVGPVVSLAFISTVDVPARFRNSKAVGPSLGLTPVLNQSGESHRVGRISLCGDEAMRALLYEAAQVMLTRVQKWSWLKAWAMNIAKRRGQKKAIVALARRLAVIMHRMWSDGTEFRWTREMAPTI

SEQ ID NO: 425896 - protein, 315 aa, unidentified
MSDVPCFGGIDVAKAQLDIALRPSGERWAVANDASGVATLVDRVQTLHPTLIVREATGGLERAVTSALAAAGLPVVVVNPRPARDVARATGQLAKTEAVDARALAHVADVIRPTPRPLPDAPTQELRALLGRRQPLIVMRTAEQNRLVGTSERLTQDIGAHITWLNAAIATLDNDLATTLRASPLWRENDDLLQSAKGMGPVWARTLLLGLPELGTLTRQHIAAFVGVAPLNGDSGTRRGRRTIWGGRAPVRTVLYMGTLVATRSNPQIKAFYERLLAAGKVKKVALTACMHKFLTILNAMLKHRTPWQPQEVQS

SEQ ID NO: 425897 - protein, 361 aa, unidentified
MRHDGDVTNHQTKREETNMKITVVGLDLAKNVFHAICCNQQGKVIKKKMLKRPELLGFFTQIESCLVGMEACASAYYWARELKALGHTVKLIPAQHVKAFLRGNKNDYNDALAISEAVVRPEMRFVAIKTVEQQDIQALHRLRSLCIKERTALSNQLRALLAEYGIVFPKGIATLRRQLARIQYDEQSPLTAFFKLSLARGYAQLQQLEEYISAYTKTLEQHVKALEACQHLKTIPGYGSIVASAFYTEVGNGAAYRRGRDVSASLGLVPRQHSTGGKENLLGISKRGNGYLRSLLVHGARSVVNQAKRKEDKLSVWINHIRLTRGYNKATVALANKMARMGWAVLKNNTVYQPTFNLALD

SEQ ID NO: 425898 - protein, 333 aa, unidentified
MNTIGIDVGCKELVVVVMVNGKARQAKSFDNTPLGHQSIIQSLTKLKGESKVCTEATGVYHFDLAVALSRANDIEVMVINPKAAHNFAKALMTRSKTDAIDAENLAIYAERMPFEAWDRPADECIGLRATARRIAALSKQKTQTKNQLHALKSTVETPTLVIEQTEQLIDILDVQIKTLRDSAINIIHQNEGLEQAYTLITGIKGIAQASAIQILSELMILPKDMTARQWVAHAGLDPRIFDSGSSVSKKPRISKVGNKYIRQALYMPALVASRFEPNIKGYYHHLIDDNGLKKVQAVCAVMRKLLHAIHGMLRTNKEFDGTRFYTLPIITNS

SEQ ID NO: 425899 - protein, 293 aa, unidentified
MQTITTIGLDIAKSAFQVHGIDAGGQVVVRRQLKRRYVLAFFQKLQPCLVGIEACASSHYWSRELQALGHTVRLMPPAYVKPYVKRQKNDATDAEAICEAVTRVSMRFVPTKTPEQQSCLMLHRTRHLFIRQQTAVINSIRAHLAEFGIVAPVGRKGVMELLQVIADPSDKRVTDVARACLAALGTQLLNLKERIVAFDRMIMAWHRSNEASRRLLYLPGVGPMLATALVASVGDPKVFRSGRNFSAWVGLVPKQHSSGGKDRLGSISKQGDRVYYAVVLRFRGGRRPLRTKS

SEQ ID NO: 425900 - protein, 389 aa, unidentified
MKIFVGIDIAKLNHFAAAISSDGEILLEPFKFTNDADGFQLLVSKLESFDKNSIIIGLESTAHYGDNLVRYLVAEFYQVCVLNPIKTCQMRKNNVRKTKTDKVDTFVIAKTLMMQDDLRFITFFDLDMMDLKALGRFRQKTIKQRTRLKIQLTTYVDQVFPEIQYFFKSGLHQHAVYALLKEAPSPKEIASMHMTHLANLLKVNSHGHFTKELAKELRVLAQKSVGANDSAISIQITQTIQQIELLDSQLEKIEAEMTDIMKFNDSVIMTIPGIGYINGGMILGEIGDIHRFSNPNKLLAFAGLDPSVYQSGNFQAKTTRMSKRGSRVLRYALVNAAWNVVRNNATFKAYYDAKRAEGRSHYNALGHCAGKLVRVIWKMLTDKVEFNLE

SEQ ID NO: 425901 - protein, 362 aa, unidentified
MRIIGCDLHARQQAVAMLDTETGEVVSMTLKHEGNNVREFYSSLPRPVRVGIEPTGSMQWFVNLMEELGIECLVGHPAEIRAAEPRKQKHDRRDADLILKLLAENRFPAIWLPSKELQDLRALLRHRHQWVRMRTRIQNALQSIALANGLRRGTALWSHDGQNTIASLPLAPHTAYRRNELQALYAKFEAEIEKLNQRVEEQACGRAGARLLMTHPGVGPVMALATDVFLGDPARFADSKALASYVGLIPREYSSGGRQRLGGLTKQGNPLLRFLWGEAGAHAVRRDPELQRFYRRKVIQKGFGKASVAVARKLGIRLWIMLRDQIEYNEFCRRGQKQQKSSEACAGMPETRYGANSHRPID

SEQ ID NO: 425902 - protein, 459 aa, unidentified
MSRARKNSIPTTLPVAEVDVLTIINANAAGIDIGLAESWVSVPADRDPQPLRKFGMNTPDLIAVADWLKACGVTTVAMESTGVYWIPLYEILEARGFKVFLVNARHAKNLPGRKKDETDAQWLRRLHTFGLLNNSFRPEGEMCAVRAYLRHRAELIEHRAAHIQHMQKAMQQMNVRLSPTVTDITGVTGMAIIRAILAGERDPVKLAELRNPCCAQPESEFIQALTGNYRDEHVFALKQAVALYDCYTEQIRECDQELERKFSALKPVHADDDLPPLETTDKRNTHSKNAPAYDGRRLLYQLLGIDLVAVPGLNEVTAQIIISEIGTDMSRWSDEKHFCSWLGLAPHNDISGGKVLRSRTLKTRNRAGQAFRLAAQAVSRTETAYGAFFRRMRAMHGPKKAIVATAHKIARAVYLMLRDHKPFDVMSADTYLKRDREREIARLQKKATKLGYTLAPVPA

SEQ ID NO: 425903 - protein, 391 aa, unidentified
MEARTVNNLPPAGIHDDAICCVLAIELSKKSWMVAVNTPLSDKISRHSLKPCDGKELLDLCERIRTRVARETKQRVEIVSCYEAGYDGFWLHRLLEAHGIRNYVIDPASLQVDRRARRAKTDRVDVERLLRSLMAYLRGEPKVWSVVRVPSVAEEDDRRLHRERGRLINERIQHVNRIKGLLAIHGIYDYQPLRRDRMQQLERLRTADGRTLPPRLKAEILRELQRLVLVVGMIKTIEAERDAIASAKIETEQQHSSAKRIQDLAKIKSIGPEFATTLVGEVFYRSFDNRKQLGSYVGLTPAHFQSGAMCRDQGISKAGNGKARTVMIELAWLWLRHQPDSPLSVWFRDRVGKLKGRIRRITIVAVARKLLIALWRYLETGLVPKGAALKV

SEQ ID NO: 425904 - protein, 373 aa, unidentified
MIVIGTDTHKKTHTCGAVNALTAAARDELTVPARKHSFGKLLVWARKLDPERVWAIEDCRHVSGSLERFLIARGERIVRVAPKHMADARRSSRERGKSDSIDAFSVARAALKEGIENLPSAHLDGAALDIRLLVDHREDLIHSRTADQQRLRWHLHDLWPELEIPAGALDTAKWLGTVARRLGRTPKTARVRIARELVREIAARTTRIRELEAELAALVESYAPRLLAERGCGPLTAAKLIGEIAGADRFATDAKLARTSGTAPIPASSGNTQRHRLDRGGNRQLNCALHRLAVNKGTWDPDAAAYLARKQAEGQSRKEALRCLKRHLARRVWRILKASPPIAIPPGTIPAVDALPTREPVTGSAPYFMPCTR

SEQ ID NO: 425905 - protein, 426 aa, unidentified
MKTYILRDPKAVEPQNRKPNPRPRRPDPAITATVDVICGQRAPAPPALGGRVLYVGLDVHNDTIAVSLAPSDSTEVRRYGIIGGQHDDVLKLLKKLQAAHPGAALKFCYEAGPRGYPLCRFIRQHGAECLIVAPSKVPRQPGDRVKTDRRDADQLARLFRAGELTGIYVPDPQDEAVRDLIRARYQVSQQQHRARQQLKMFLLRQNLRYAGTKPWTQKHLNFLATVKLPFAEQQFVFQEMVNVISDAGQRLERYEQEIESVVESWRRQPVVRAIMSLRGVALLTGATLVAELGDLHRFPTAPQLMSYLGLCPGEHTSGETRKQGGITKLGNGIARRAMIEAAWNNSRAPRMSRTVLARQAGLPKAVTEAAWAAQTRLHQRYKHLTGVGRKKSQVAAAALGRELAGFVWAIGRMVQPRAAQPEVGKQ

SEQ ID NO: 425906 - protein, 472 aa, unidentified
MRLTLGIDVACRAAHQASLAGRDGALVWSGRKFFTRPADLERLWDDLDLDKACGAGELTVVMEPTRNAWVPLASWFRRRGARVVLVPTTQSADLRAYYSKHTKNDHLDSKILARLPLLHPDGLREHTDAGPAGPLRRIVKQRSSVVKRRTAIFQRLDAQLELLGPAWYDALGSNYGKAALALLARYADPTALLKLGHARLTRFLIRHSRGAWRDDHATALLAAARESLQLWGCPDGRFGIDFAELAADIAVEAEQAQVLTEQIDDLDERIANLYHEADPDAIIASAPGVGPVTSAVIAGRLGDPHRFTSLAAIRAYSGLVPKVNQSGLSEHHNGLTKAGDTLLREALYAAADSARKTDPQLAARYVRLMNNDRHHASALCHIAAILLTRIATCWRTGQRYQLRDTTGRAITEAEGRQIVRDHHQVDRQVRINAANKRQSQRLKNRTGREHKESPSAPASRPVKIKSTNPSAA

SEQ ID NO: 425907 - protein, 328 aa, unidentified
MTIVDAPRPVTGGVDTHLDLNVAAALDPVGGLLAVADFPATSGGHRRLLDWLAGFGPVRRVGVEGTGSYGAGLARYLRAAGVEVVEVDRPNRQARRRAGKSDPLDAIEAARAALSGRACGVAKTRDGNVEAIRALVVAKRSARSTKIKTLNQIRHLSFTAPDELRERLKGVSRQQLGARAAALRPSQREGADPVLVATKTALRILRRRVLALDKEKARIDALLSGLVTQTAPELLTLHGVGIDTAATLLVTAGDNPGRLRSEAAWAHLCGTAPIPASSGKVTRYRLNRGGDRQANAALWGIVITRLRNDPAPGPTWPAAWPRAGPSPR

SEQ ID NO: 425908 - protein, 455 aa, unidentified
MAKKGKKNPSTPENLPILHPHAAGIDVGAEEHWVCVPADRDAQPVQKFSAFTCDLHRLADWFTACRVTTVAMESTGVYWIPLFQILEARGFAVALVNARHVKNVPGRPKTDRFDGRWLHKLHSYGLLAPSFRPPEDICQLRSLLRHRENLIQMTVKHIQHMHKSLDQMNLHLHHVISDVTGVTGMRIIRAIVAGERDPKALATYRDYRIKSAQDTIAKALEGDYRPEHVFTLTQSLALYDFTQQQIAACDQEIERVLDTFDSLVDPEDHPLPPPTTAHRRPQRNEPAFDLRTHLYRITGVDLTQVPGLQAPTIHIVLAEVGLNRHKWPTDKHFASWLGLCPDNQISGGKVLSTSSRRVQNRASRALRMAAQSLRTSPSSLGAFHRRMRSKLGPAQATTATAHKLAKIIYHMLQDKTPYQERGAEHYLHKDQERKIRQLRKQAKHLGFDLVLQTSH

SEQ ID NO: 425909 - protein, 370 aa, unidentified
MDSTHFKYGFRMSHNDDFKCHSTRRRVRMNNIKVVGIDLAKNIIQIHGNDKKGKCVLRKRLSREKLVEFMAQLPSCLIGIEACGGAHHWARTFQVMGHTVKIMAPQFVKPYVKSNKTDRNDAEAIAEAVIRPNMRFVPVKTIEQQDTLLIHRARELVIKQKTAQANQIRGFLAEYGIVIAKGIQNLEKIAMIIDDNKEKLSIKAQGILEQLCKQFKAFDAEMEHYDKQIAQVIKENAMCQSLLKIEGVGPITASAIVATIGDAKAFKNGREVSVWLGLVPKQHSSGNTVRLGSITKRGDRYIRRLLVHGARSAIKVAGNKKDRRNTWITDKKERLGYNKAAVALANKNARIIWAMLATGESYRQQRLLAA

SEQ ID NO: 425910 - protein, 329 aa, unidentified
MDSPAATLGIDIAKLKFDVCLIKENGNAKHKVFANTRHGFEQLVCWLASHRVADSRACLEATGTYGDALALFLYEAGFVVSLVNPAAVRAFASAGLSRTKTDKVDAELIARFLLAQQPAAWQPPAPEVRHLQALVRRLESLIEMRVAEENRLSSGILNEAVRYSLEQHIAYLVEEIKQTEALIRQHINNHSNLKEQSELLDSIPGIGETTAALLLAEIVNIKQYKGARQVAAYAGLVPRERRSGTSVRGHTKLSKIGNARLRKALYFPAITALRCSDFFKAWAEPLRTRGKCKMSVIGAAMRKLIHLAYGVLKTGKPFDPNWVKRTEVA

SEQ ID NO: 425911 - protein, 489 aa, unidentified
MSGARTSRWCGLALGRQPNPTIGEGTRLKIRLGVDVACRAAHQASLADEQGRFLFVGHRFRTDPDELDTLWARLPKDAERIEVVMEPTRNAWVALAAWFRRHGATVVMVPPEQSADLRDYYNKHTKTDRLDSKVLARLPLLHPEGLHREDSLGPGDELKRAVKIRSGLVHRRTACMARLDALLEILGPAWIAALGSDMTLTALRFLARYANPVQVKRLGKARLAAFFRRSSRQAWADERADAIIEAAATTLRLWGADGSELDFDALAADIAAEARLALTLTDEINGFDKRIGALYDKADPAGIVRSVPGAGRVCAPQILGRLGDPTRFANLAAVRSFAGLVPAADSSGQADGHRGPTKAGDCCLREALFIAADHARKVDPTLAVRYQRLMLAGKHHDSAVCTLAAVLLTRIAACLRAGTHYLLRDTDGRVITEAQGRAIVAERYTVPPEVRAARRKVTPHRHPRRNERNERAKTGVATRSKASPVPQPA

SEQ ID NO: 425912 - protein, 317 aa, unidentified
MKDKKEFVGIDVSKGSLDIAVHPGGERWRTCNNGKEIRALTKRLKGLSPEIVVLEATGGLEMAVASALAAEGLPVAVINPRQVRDFARATGRLAKTDSIDAHVLAHFAEAVKPEVRPLKGEEAQELSALVARRRQVLEMIGAEQNRLGQTASECIRKELKEHIVWLEKRLRDVDGNIDTAIRGSSVWRVKDDLLRSVPGVGKVLSSMLIAEVPELGSLNRQQVAALIGVAPLNRDSGLMKGKRSVWGGRADVRKVLYMATLSAVRCNPVIRAFYRRLKDNGKESKVALTACMRKLMVILNSMVRTGETWRYDHAVPS

SEQ ID NO: 425913 - protein, 345 aa, unidentified
MPIVGGLDIHRKQITFDYLDTVTGEVKRGQIAPADRGHLRAWLARFAGRGDVAFAVEGCTGWRYVTGELAAAGIAAHVAEPADTAALRGRKRHAKTDKTDSAHLRRLLAEGRLPECWIPPAQILQYRALLETYHDLRREHTAWVQRIHAVFFHQGAPPLGEEALRTEPGLARLRAAAAAHLSPAGQQQVATALDVLAATEAQLGPLRHQLRDAAWHLTGARVLAERLYGVGPVTGLALTCWLAGQDRFSSSRKAVRFTGLDITVHSSDRKGPPGRLSRQGPPMLRWAVYEAGKTHARAAAPDHGYYAAVKDRSNGKLAALSEARKIVRQACHILAELGDDALTTA

SEQ ID NO: 425914 - protein, 487 aa, unidentified
MCDSSLASDRSKRAMSRVGEEVEDVLLLSLTGLVSQNSEEDVVVQGSGLSRGDTRRNAKLARLRELVPVDNAILGIDLADVKQAVVITDHDSRVLARKAVRAKAWDLGPVLDWARRTAHKHGFAGVTVGCEPTGHRWRVLNELVAQRDMTLVCVNPMLVGRARESEDYTRDKSDDKDAVLIARLVAQLHCYVPERADETWARLRQLGARRERLITEATACVHQLRDLLECAWPGVLAAAAKPFESTNWCAALAVVLERCDGRPERLSRPGLARFEGAVRRELARWGGSRRRRAIIEAVFVALLDPTGVMTQRRGALERARWVLGDWRAATTRLAQVETRMVEVLDELGLTELVTSIPGVSAVGAAAMLAETGDLTRFDSPRALVKHAGLCPRDNSSGTFTGRSQISRRGRPRLRLAAWRAVWGALPHNPVMAARHRYLTTRQHNRLTDGQARAAIAAALLRWLHVIVTRRVRWQAAVAGADVLPAAA

SEQ ID NO: 425915 - protein, 465 aa, unidentified
MSKLRKRNRARSSQGATRPFEGMRQVHPHAAGVDIGAHEIVACVPDGDDQQIVRTCGTDTVDLQTLADWFVDRGIQTVAMASTGVSWIPLCEEREARGLPCCLISAQSIKRVPGRKSDVLDCQWIQTLHSYGLRAASCRPAADLVALRTLLRHRAQLLEHRAPHVLHMQQALLQMHSQLSHALRDITGATGQRLIRAMVAGARAPQHWAALRNDRCKKDAHEIAMALTGTWREEHLFVLTQALALFDFSTTQLSACDAQVEHAFAVIKPHVESTAAASVPARAAVPPRRKPHSPSKNAPEGNTRAHILRITGVDLVAVHGMSDSLAPTIVAEIGTDMSQWPDDTHFCSWLGLAPNNDISGGKVLKSRTMKHRNRAAQAFRMAAQSVIRSHCAFGAFYRRLTGRLGPAQALVATAHKIARTVYHMLKHRVPYYDIGAAEYNKRFREREMHSLQKKAAKLGYKLSPG

SEQ ID NO: 425916 - protein, 397 aa, unidentified
MNKIVHYIGLDVHKDSIAVTIAPQNSTEVRRYGIIGGTLDAVDKLIKKLSLQNVELRVVYEAGPCGFVLCRHLRGKGIHCDLVCPSLIPKKASDRVKTDRRDADQLARLYRAGELTPIHVPDQEDEAIRDLIRARSAAVNDQRQARNRLKGFLLRLGFRYTGKSSWNDAHKRYLSGLLMPRPAQQIAFQEYIHAIDDATDRVARLTQAVEDALPGWKWEPVVRALMCLRGMQVLSGMTVVAEVGDLSRFDNPRSLMHFLGLTPSEHTSSDKRVQGGITKCGNAHCRRVLTEAAWHYRLKPLVSEAMQKRQEHQSKEVRLIAWKAQQRLHKRFKQLVVRKKSVVAVTAIARELVGFVWAIACKVKPAQQSPAPEIIRTCQGKVYVLDPEKKMSKTKAK

SEQ ID NO: 425917 - protein, 439 aa, unidentified
MNTPHPYDLVIGLDRSDKKADLHLITTATGQRRSQTIDTAPEALWEWLLQLRQEQPQARVGLCLEQPAVHLIAFLESYEWIMLYPINPITLQKFREAFVTSRAKDALYLAELLLTHHDQLQPWAPEDSATRAVQQLVFHRRAVVDERTALTNRLIALLKQYFPQALVLCGEDLWRPLATRFLLKWSSLQAVQKAKPATLKQFYYLNGSRSAKRLEQRLALVEKAVPVTDETALIESFALRVQLICRQLQLVQQTIQSYEKQIASAYAAHPDREIFASLPGAGPVLGPRLLASMGSQRERFGAAADLQHYTGVAPVTKRSGGSCYIHRRYLCPKFHKQSFHEYAKESILWSRWAAAYYLQQRIKGCPHHTAVRALAYKWQRVIWRCWQDRTVYREEIYEAALRKNGSPLVALFDRVELGKSPFKNPAKNPKKTLDGLPQR

SEQ ID NO: 425918 - protein, 383 aa, unidentified
MTLDRYFRQCVGIDVSKDKFTACLQMYDRANDVGCHTMSIDFDNTKSGFNQFVKWSRKEAVKGFPLTYLMEPTGVYYEPLAYHLHKIGQTVYVVLPNKARSFCEAEGIKTKTDAMDARCLALMGCTSRKLKPWSPPAPIYRELRQMTRFHADLSQIMTSVMNRMESLNHVEEADKTVHKNCQKLIDEIDTLMENNDKAIMQKVAEDKELEARVKRIAKTKGLGVTTVVCIVAETEGFHLIENRKQLTSYAGLDVRAKQSGKEDPKHAISKRGNAHIRAALYMPALVAVRYNPQIKAAYGRICQKRPKEKKIGVTAAMRRLLLLIYTLWKNGEEYDPMRDKTHTPKKRMKEEDTELEYGPKDCIGPKHEPVDWNATDEHGNPPF

SEQ ID NO: 425919 - protein, 376 aa, unidentified
MNAVGIDVSKKKSTVTIRRPGDVVLLPPRDYRHTQSSINELIATIKGLDGETRGCMEHTGRYYEPIAHWLSSAGIFVSAVNPKLIRDFGDESLCAPKTDKADSRKIARFALNRWTKLRQYSPMDETHNQLKTMNRQFSFYTDQKTAMKNNLIALLDQTFPGVNGFFDSPARSDCSQKWVDFVYTYWHVDCVRGKSLSAFTEHYRNWCKRKGYNFSADKAEEIYRVAADLIAVFPKNDNTRMLIRQAVTLLNTTSQMVESLRIQMDQVASTLPEYSVVMAMNGVGPTLRPQLMAEIGDPTWFTHREALTAFAGVDPGADQSGDHNRRSNRTSKNGSPYLRRTLFLIMDGLIQRSPADSPVYAFMDKKRTQGKPYSFT

SEQ ID NO: 425920 - protein, 410 aa, unidentified
MDVLHPRCCGLDVHKETVVACLRLVIDGKVAKEVRTFSTTTAGLMALSEWLTQNNCQQIAMEATGVYWKPVWHILADGEFDLVLANAAHVKNVPGRKTDVKDADWVSDLLAHGLIRASFVPDSPTQEMRTLMRTRKQLVREKSSHILRIQKTLEDANIKLDSVISDVLGASGRAMIEALIAGEHSPSKLARLANHRVKASQGTLREALRGRVTKSHRFLLRLHLDQIDALDASIATIDAEVETGIAPFRTAVEQVTSIPGIKDLSARAILSEIGIDMSRFATDAHLISWTCLCPRNDESAGKRRSTRIRKGSPWLKTMLVQCAWAAARTKGSYLQAQFQRIRSRRGAKKAIVAVAASILTAIYHMLKHGTMYQDLGPNHFDNRTKERQKNRLVQRLAELGYAVDLAPLAT

SEQ ID NO: 425921 - protein, 428 aa, unidentified
MQQPKGYPMKTWKELTHYAGLDWAKDHHCVLVLDGQGTIVADFEFAHSLEGWKSFSDKIAAWPQVAVAIETNQGAVVDQLLQRELTIFPVHAVAAKSYRQRKAPSGNKTDHLDAWALADALRTDGHAWKGLDPLDALTQQLRLLCRDEVVLIQQRTALVNQLQQALLEYYPAALEAFDDWTRSSSWEFVLAFPTPDALVTAGKRKWEKFLHTHRLWRPDTAQTRLEIFARADKFKASQPVTLAKSQLAVSLCKLLSTLDKQLALYRSQIEELFDKHPDKDLFGGLPGAKKVLGPRLLAAIGSDAKRYGSHNVLQCLAGTAPISFQTGQMNKVKVRWGCDKFLRHTVHLWADCFRRASAWGQTYYKQKRSKGMTHACALRCLGQRLLKIVFKIIETKKPYDAELHARNQQKHGSWVLKLVPANAPEPCE

SEQ ID NO: 425922 - protein, 371 aa, unidentified
MRFYTAQHRFYCGIDLHARSMHVCILDQAGGVVFDRNLPARPEAFLRAIAPFRDDVIVGVECMFAWYWVADLCQEHKLLFVLGHALYMKAIHGGKAKNDRIDAGKIARLLRGGNFPIAYAYPKGMRETRDLLRRRTYLVRKRAELLTHVQILNAQYNLAPFPKKLSFAANREELNIAARFADPSVQRSAAVNLALVDRLDELIGELELYLVRTAKVDDVQAYHRLQTIPGVGKVLALVLLYEVHDVHRFASAGQFLSYARLVRCLHESAGKKLGAGGKKIGNAHVRWAFAEAACLFLRSSDRAKQWKQKQAAQRGEGKALAILAARLGRTVYHLLRKGEAFDEARFWGGPSQPAPTGSSSLSRAETNHARD

SEQ ID NO: 425923 - protein, 423 aa, unidentified
MSNEVVYRKEKRITHACKTTVRGCSMFYAGIDIAKNNHEASVINAEGKALLDSISFSNTKEGCEKLFALFDRIGVAKDDVLIGMEATGHYWLSVHAYLSEMGFDVKVINPIQSEAFRKMYIRQTKNDSKDSFIIAQIMRFGQFSSTNLSEEVIVAMRQLSRYRLALVDICGDCKRRVIALLDQVFPEYDSMFSDTFGVTSTEILLKYPTPEDMLAVSTNKLTALLSKYSHGRFGEEKAKQLKAVAAGSFGVVFAKNAFSFQIKQLMEQLVFIEKQIDDLEKEIAALLKQTGTYISTIPGIGDTLGAIIISEIGDIHRFDAPEKLVAFAGLDVKVNQSGEFTGTKNKISKRGSPYLRRAIWLAAGRAAFCDPILSAYYQSLRARGKHHLTAVGAVSRKLCNIIFAILTENRPYEPVPPKSKPQS

SEQ ID NO: 425924 - protein, 360 aa, unidentified
MTLYGSVDLHSTNSYVAITDEADRLICHKRLPNRLEELDRFFEPYKDGLSSIALESTYNGYWVMDGLIGLGYRVKLVNTWMMQEYSGLKYTDDKSDCLWLNRMNRLGVLPTGYIYPVQERPVRDLLRKRGLLVHVRTKIIQTLKHQSVTWTAINIPRKEVFDVSEEDVNLLFQDPALRLSANTFAETIQYLTEKIKRIESFIHKKAKEDELVRRLRLLRGIGPILSWTIRYETGDIGRFPSVKNFLSYCGLVESKRMSNFKVKGRSHVKNRNRYLRWALAEGAIASLADPSIKKYHDRLVKKKGPVKAKAILSSKMARMAYFLMKDPGFVYDERRLFNMESSQAMPAVSRGMGAVKNALA

SEQ ID NO: 425925 - protein, 419 aa, unidentified
MAFKIFRFNCCGMDVHKTWIFACIGITDANGRTEYKEKRFSSFSRGLRDLAAWLTSYNCTDVCMESTGKYWIPVFNVLEKTCNVVLAHPKYTKPQKGNKTDRKDAKWICDLFMCDMIKPSFIPPANIRHLRDLVRYRFKLTNMLTGEKNRAQNCLTVSNLKLDDVFSDVFGKSSRSITEHILAHPGESFDVSPFVDSRCKTSIEEIQAAVDGAVSPEQAIKLRQCLDHIDELEKHKEEIEREIVRVSDPYLDTLELIRTVPSLYKNPFTAIQILSEIGGDMSVFPTDQHLVSWAGCCPRNDQSNFKIKSTRISRAGSYLKPVLVQVANALIKSKKHPEITERYSRIKAHRGHKKAIIAICRMLLTAIWHILTDLKPYTDEGYLAPRPVKGKKVLTTSQALNLLKLRGYVIKDDLPATAS

SEQ ID NO: 425926 - protein, 494 aa, unidentified
MRRRRSKSRRRRTSVPPRRPPAGEQAGERGDSAAEDEPRDGRADDHLALVRAQLGLPVGRLDDLAAQLLDRHRELCAVGLDRLPDLFRGALAHFVSAFAGTVGPAGVAGLIARCLRLEPDPAEIRVVLETRHGLLVERPVEAGFVVVPVNPDLIARRRGPAKKKDDVEDARIACLLALDRFQPLRPLIPHGELAAELRLLGRDDERACQDERRLLNRLRADLLAVFPAAVQIAGPDMGAPTFLRMLQRWPTATALAATSRQELVAFARAAHSGYPDRFADRVCQALGREHFTARPALAQAKVDTIQLMVTQLLLIGAQRRTWERRMGQLLLGAPRRRGGALPSQAERDRSQAVPGGELYLSFPGLGDRLAARIAGEIGDHPEQFQTPNSLQCYAGQAPVTRRSGKRELLITRRLACNRHLADAVHKWAFASLRRSAWAKDYYDSQRARGKDHHAALRALGNRWLEILWHCLQRQVPYDEAVHVANRTRALQPAA

SEQ ID NO: 425927 - protein, 477 aa, unidentified
MPLLGRNHNHTNMKSKTPKSKKEKKKISVDQGWEAINPQAAGIDIGAKEHFACVPAKATPKNVRSFGTCTADLNALADWFKECGVTSVAMEATGVYWIPVFQILEGRGLAVILVNARQTKNVAGRKSDVQDCQWIQRLHTYGLLQGSFRPEDAYCVLRTYLRYRDELVSARSTQCQHMQKALQQMNVQLVQVLSDVMGVSGMAIIQAILEGERDPVKLANMVDRRVRATQIQIQKALEGDYREEHLFVLRQAFSLYGTYEEKINACDEQIVRETATLSDKVDPQHKPLPPRKEGRPASKDKVQGQDMREVLYRKFGADLTAIEGIGVTTALVVLTEVGPDVSGFKTEKHFCSWLGLCPDNRISGGKVLSSHTRRVMNRASDALRMAAVTLERSQSALGGFYRRMKGRLGAAEAITATAHKLARIIYRLIKHGEAYVRQGMEDYERKFRERKLHALRKTAISMGFTLIAKQELTSPVS

SEQ ID NO: 425928 - protein, 316 aa, unidentified
MANHVEKITLGIDVAKDHHVIYNWQTKQTTRLPNECGDIKAWLKTFHGPVRIAIEPTSHYHMIMVDEALALGYEVYLINPRQLLHYREAVNERNKTDPLDAWLLARFLEHEVDQLRPFKPRDPRAQRLWSLVLRRATVVKSRQQLQQSFAEVKLSIQALLTQFQHLLDRIERRIIALIQELGWWSDYQRCLSIPGIGEGNAGALVVVYHRGCFAGSDAFISYLGLDVRIRDSGHFKGKRKLTKRGPPELRRLLFCASHAARHYHRFAEYYQKQLDKGLCKIAARVILARKLARIAFTLMRNEENFIKEQKIHCVAS

SEQ ID NO: 425929 - protein, 347 aa, unidentified
MNFYNNTHPYYCGIDLHAKLLYVCILDDKGNTCLHKEISASPVKLQALLEPYLGNVVVGVECMHCWYWVSDFCEDLGIDFILGHALYMKAIHGGKAKNDKIDSYKIAKLIRGGNFPLAYVYPKEMRATRDLLRRRTKMVKQGGNLKAHTVNTTSQYNLPSIKINLKNKEARKLVRSTFPDPVVQKNMDLNMALLECYAKELSKIEWFLEQQAKQHNPVHLHILKSISGIGRILSLTIIYEIGDINRFSSVQNFASYARLVKCKAESAGKTYGTSGNKIGNAHLKWAFSEAAVLYLRGNEKAQKYLEKLQKRMSKAKALSVLAHKIGRCVYFMMKNNTVFDESRFLMS

SEQ ID NO: 425930 - protein, 336 aa, unidentified
MLDESGRMIQQTILATRAAAILDFIGGMRGTLHVTFEEGTHLAWLYDLLVRRVARLVVCNPRKNALLKSGNKSDAIDARKLAELLRAGLLSAVYHGEKSALEVQHLARSYSLLTEDTTRVMARIKAVFRGQAIPCSGKKLYGQKHREEYLAARGACALRHRAEFLYQELEAVQQLHRQAKRDLIVECRKYPETKLLSSVPFLGPVRAAVLIGRVQTPHRFRTKRQFWAYCGLALEMRDSGEYRMVNGQVERRKRPAQIRGLNWNHNHELKNLFKAAATSASAGNGVFHEFYLGLLKKNMRPEMARLTLARKIAAIALKIWKKGEAFDAEHLKLQAA

SEQ ID NO: 425931 - protein, 409 aa, unidentified
MLFVGDDWAEAHHDIEIVDQTGRRLAHGRLPEGLAGISRFHELVADHLDSDAGPEQVLVGIETDRRPWVQALVAAGYTVYAINPFQASRYRDRHAASGAKSDPGDAHVLAEIVRLDRDHHRPVAGDSDVAEHVKAAARAHQSMIWSRQAQVNTLRSTLREFYPAALAAFPDLTSGDALAVLAVAPSPEAGSRLTQQRVETLLRKAGRQRNVTTKAGEIRAALNRAELSARPGVVGAYAASVSALVAVITVMVAQTEVLAGQVEQGFGQHPDVEIYRSQPGLGTILGARVLAEFGDDPHRYVDAKARKNYSGMSPITRASGTKRVVLARHARNRRLGDALYQQAFCALTSSPGARAFYDRHRDRGATHHQALRALGNRLVGVLHGCLRHHTLYDENTAWPALSHDNKQAA

SEQ ID NO: 425932 - protein, 345 aa, unidentified
MTVYIGVDFHARAQTISYLTTEDGEIQRLQLDHGQPDEVRSFYQQFAGQQVVVGFESSGYAAWFEELLEELGCEIWIGHATAIRLFARRRQKNDRRDADLILDLLLRGDFPRIHRYSPVSREVLQQLRYRQRLVKMRTMVVNSLLFMASSRGLSLRTQLKSRRGLERLQQLALPQPLTAQRDELCQLLLELKTKVDKVEEWLAAKAGSDVRVKRLRTHYGIGPLTGLCLVHTLECPERFANSRKVTAYVGFDPVEDSSGQRRRIGSISKQGSRLLRFYLVEAGQIAIRQDQDLARVYQRVLVRRGHAKAKVAVGRRLLVRAFIMLRDEIDYAEFQRRGVAARSSR

SEQ ID NO: 425933 - protein, 344 aa, unidentified
MATYYIGADVHCNNTELAIEKRGKIMARYSVPTSIPAISTILDSLQGKKVFAMEEGPMAGWLYRNLNEKVEKFIVSEPRRNKLITCEGDKDDRIDSGKLAALLRGNFLKAVHHTSDSDRAHLKHWVNLYNDRVRDGVRNICKIRACCRMHGIAIPRKVVRNNVHRHDWLSGLDNTVLKTQLQMLWIGYDATKEQVGLAKKQLSSYVRKYKIIKYWRKLPGVGLIRAATIFAYLDTPWRFKNRSKLHKYCGVGLMRATSGKDKKGRPKPARLQLPWAVNRRLKNAVIGAATSAIRHRDNVFKDYYERMLSNGITPANAKHSVARKMVSTMSAMWKTDSKFDEKLF

SEQ ID NO: 425934 - protein, 296 aa, unidentified
MTGRFVGIDVSKATLDVALVPDDRAWQTERSESGIASLIEELRDGVVDLIVLEATGGMETSLVAALAAARLPVVVVNPRQARAFARATGALAKTDAIDARLLARLGQTLNPEVRPLKDEQTRELEGLLTRRRQLIDMLTMEKNRLPAAPARGRRDIVAHIDWLTKRLKDVDGELKGAIEANEAFRLKDDILRSAPGAGPVLAVTLLAAVPELGRLNRREIAALVGVAPLNRDSGTFRGARRIWGGRAAVRTVLYMATISAIRCNPAIRAFHARRRASHRKWRSRPACASSSPSSMQ

SEQ ID NO: 425935 - protein, 328 aa, unidentified
MKKKFIIGADISKSTIDIHCFGKSLSLTVSNNIKGFKELLKWIKKHVSKDFESVMMVMEYTGIYTYNFENFLHGHQVDYVKKPALDIKRSAGMKRGKTDKADAVMISKYGWQRKEELQPMKPLTQAQLDLQQLMSYRDKLVADKASYQSRIKELKEQMHKKLNERIIQSTESIMQLLKEEIKKTEAAIKDLISKEEGLAANYELVQSVKGIGFATAVHMLITTENFTRFDARKFACYSGIAPFKNESGSSIRGKTTTSHLANRKIKSLLTMAAISAINHDPQLKEKYEQKLQEGKAKMVALNIIRFKLIERIFAVIKRQSPYILSLAA

SEQ ID NO: 425936 - protein, 337 aa, unidentified
MKDCNIFVGLDYHQAAVQVCVVNKEGTVLMNRSCRNDWHAIARVVEPHGRVTRVAIESCSGAADLAEELVATVGWSVDLAHPGYVQRMKGSPDKTDYSDARMLADLERVGYLPRVWLAPQEVRELRRLVRYRQQRVNERRDIKLRIGALLRDLRIRTTVGSRWTIPWLCWLRTTSDLSGHSRWIIDHHLARLQQTIAEVAEVEQRLSNATENDRMVQRLQQFNGIGPVTAWTIRAEIGRFDRFRNGKQLARFCGLSPRNASSGTRVADAGLIKAGNRQLRATLMEAAHRLIRFDRLWGARAAKLLRRGKPKSLVVAAMANRWMRWLFHEMQPHRIAA

SEQ ID NO: 425937 - protein, 325 aa, unidentified
MEIRSVGIDLGKTSFHLVALGDRGKVLVKKKFTQKQLITFTANLQTCLIGMESCSGSHFLGRALREQGHEVKLIPAQFVKPFVKSHKNDFVDAEAIAEAVERENMRFVPIKTDDQLDLQSLHRVRERLMTRRTALINQIRGFLLERGIVFAKSPLRLREALPEVLENAKDLELQIAEMNDEVERIASSDDACRRLRQIPGIGPLVATAIVASIGNGAASRKGREFAAWLGLLPNQHSTGGKSKLGAISRRGNCYLRKILIHGARAVVLRSKRDRIAMGAWMTSLAIRAPRNILIVATAHKLARIAWAVLSTGQDYRADVPAAAAA

SEQ ID NO: 425938 - protein, 394 aa, unidentified
MIYAGVDIAKTDHVIGAVDERGAEMCRPMPFKNTEAGLERAAAWLEGLAGSPSDVVVGMEATGHYWMACYSFLVARGYSVAVINPMQVKAVRKLKKLDKVKNDRIDAWLIAETLRIGQYDETRLATDEVASLRSLSRYLQSLRGMAAELKTQCVCLMDAHFPEYAGIFSDMFGAGSRAVLSKSPLPFELARRRADSLARDIAEASRRGGKSAGYAARIKAAARSSIGVRLGQEAASFQVKSLIRQIEFADSECAKVEARVRALLDEVEPLVLTIPGVSYVTGAQIVSEIGDVSRFRNASALVSYAGLNSSVSQSGQFDSGGGPITKHGSPYLRRALWLAANRARQYDPGLRAFYDKKRAEGKPHRVAVTAVARKLCHIVFAVMRDQVPYDPGRE

SEQ ID NO: 425939 - protein, 348 aa, unidentified
MTIVDAARPVTGGVDAHLDLNVAAALDPVGGLLEVAEFPATSGGYRRLLDWLAGFGPVTRVGVEGTGSYGAGLARYLRAAGVEVVEVDRPDRQARRRSGKSDPLDAIEAARAALSGRACGVAKTRDGNVEAIRALVVAKRSARSTKIKTLNQIRHLSYTAPEQLRERLKGVSRQQLAARAAALRPSQREGADPVLVATKTALRILGRRVLALDEEKAHIDALLSELVTQTAPELLRLHGVGIDTAATLLVTAGDNPGRLRSEAAWAHLCGTAPIPASSGKVTRWRLNRGGDRQANCALRGVVITRLRNDPRTQAYMARRLAEGRSKPEVIRILKRYVAREVYHHLPRP

SEQ ID NO: 425940 - protein, 345 aa, unidentified
MPIVGGLDIHRKQITFDYLDTVTGEVRRGQIVPADRAHLRAWLARFAGRDEVAFAVERCTGWRYVAEELAAAGVAAHVGEPADTAAARGRKRHAKTDKTDSRHLRTLLAEGRLPECWVPPAQILEYRALLETYHDLRREHTAWVQRIHAVLFHQGAPRLGEEALRTEQGLAGLRSVAAAQLSAAGQLQVATALDMLAALEARMEVLRTQLRRAAQHLVGAKVLAARLYGVGPVTALALTCWLGGAGRFSSSRKAVRFTGLDITVWSSDRKGPPGRLSRQGPPVLRWAVYEAGKTHARSSAPDHGYYAQVKDRKNSKRAALSEARKIVRQACHILTELGDDALTAA

SEQ ID NO: 425941 - protein, 347 aa, unidentified
MSSSNVHIYGIDLGKNWFHIVAMDRQGHILWRKKLNRNQLKTFVINTPPAIVAVEACPGSQYWGRLFNDAGFSVKIIPAQFVKPYLKSNKNDFNDAAAIAEAGSRGTMRCVSLKTHEQLALQATHRVRQRFIVERTATVNQMRALLLEYGITVPVGRKVFERNLPSILEDAENGLPDFIRALVFRLRERWQHLDVQIDEMSVQLQQASIASEKCQLISSVPGIGPIVATGLIAAVGSGTQFKRGRDMSAWLGLVPRQYSTGGKSNLGGISKRGNVYLRRQVIQGAKALKIHMKRDKSALGRWIAKLEATHHHHVVLIALANKIMRICWKVLTSGQEYQPYPAASATK

SEQ ID NO: 425942 - protein, 331 aa, unidentified
MKTKEFIGIDVSKLFIDVRLHLRQSSSRFDNDPGGIAMMIQWCERQSGLKKQELFFVFEHTGLYSYELSRELSSLEIPYSMEAGLAVKRSLGITRGKDDGIDAIKLARYAYRLRDELSPYRPADKQIQRLQSLLTLRDRMVKQRSGYKASLKEQKRVLEPKDYQFLFHTQKQLISQLSEHIKETEKQIRAIINESDSLKTLYKLITSVKGVGAQTAYHFIVFTHGFTRFKTWRQFAAYCGTAPFPYQSGSSIRGKSKVSHLANKKIKTLLDLCAKSAIQHDPQIKGYYQRKVKQGKQKMSVINAVRNKIIARIFAVVNRKSPFVETYKFAA

SEQ ID NO: 425943 - protein, 407 aa, unidentified
MSVHVAPVTSSTIVVAVDVGKTSAVLSVTDAARHRLLAPSEFAMTGSGLTVATARAMAVTPAAVQVKVGVEAAGHYHRPVLDHRWPNGWEVLELNPAQVAEQRRVQGRRRIKTDAIDLEAITELVLAGYGRPVTDRDVVIGEVNAWAVHRSRRVATRTATKNQLLGQLDRAFPGLTLALPDVLGTRIGRLVAAEFTDPSRLAGIGVDRLIRFAAARGLQVRRPVAERVVAAARDALPTRDAVIARRILAADLALLADLDAQIQSAETALELLLPRSPYATLTSVPGWGVVRVSNYASALGDPQRWPGPRQIYRASGLSPMQYESAHKRRDGGISREGSVALRRALIDLGMGLWLNEAAAKDYAHALKARGKPGGIIACALAHRANRIAHALVRDHATYEPTRWACSP

SEQ ID NO: 425944 - protein, 355 aa, unidentified
MNDEKYIGLDVHQATIVVAVLDSTGKLIMESILETEAATILQFFAGLRGTLSVTFEEGTWSVWLYDLLNPHVDKLVVCNPRKNALLKDGNKSDRIDARKLAELLRGNQLKPVYHGETGVRMLRELSRSYLTLVKDLSRVMNRLKAVYRSWAIPCAGRDVYYRRHRAQWLAKIREAGVRRRAERLYEQLDMLQHLRQQARRELLAESRKHAITAKLRQIPYLGPIRSALAVALIQTPHRFRTKRQLWAYSGLALETRISAEYRMVEGQVRRSKKLLSIRGLNKDHNHDLKGLFKAAATMASVRPGPFQDFYQAALAKGIKPTMARLTLARKMAAITLTLWKKGENFDAEKLKSQAA

SEQ ID NO: 425945 - protein, 416 aa, unidentified
MNAAGIDVSSRKSTVAVLRPFGEVVRLPFDVAHNTEGLASLAEQLKALDGETRVVLEHTGRYYEPVAKALHEAGLYVSAVNPLLIKEYGANSLRRVKTDKADAVKIARYALDNWADLRDYTPMDTIRYDLKTLNRQFQLASKQRTASANNLIALLEQSFPSIRKCFDSPVRSDGTQKWVDFVHTFWHVECVRKQSLNAFSERYRKWCKRHGYIFKQGNAVEVYSLAKNAVVLVPKSEVTKVLVQEAANQLTSISRSVETYRAEMERLASTLPEYPVVMAMYCVGKSFGPQLMAEIGDVRRFERKQSLVAFAGIDPMPNQSGDKNVRSNKSSKRGSPYLRKTLFNIMGIYLKCSPQDEPVYQFLDHKRSEGKPFYVYMTAASNKFLRRYYAQVRDYLSTLDDLPPVDMDSTGLKTSD

SEQ ID NO: 425946 - protein, 356 aa, unidentified
MSEGSWVGLDVHARSVVAGVIDMGSGEVRSLRVPPGSEATVAWLKTLPAPVRVVYEAGPTGYGLARLCAEAGISCVVAAPSKIGPAADRVKTDRRDAERLARLLRLGEITPVRVPGPVEEAARDLVRAREDARGDLMRARHRLSKLLLRHGAVYDATAWTRAHDAWLRKQRFQDGPLAIVFDECYSRMIDAKTSRDTLDKAIAELAASEPYVDVVERLVCLRGVSTLTAFALTVELGDWNRFRPESLAPFLGLTPSESSSGERRRQGGITKTGNTHARRLLIEAAWHQRSAPRLSVTLERRRTGKSLAVRAQADSSARRLHGRWNALEARGKPRLIVVVAVARELAGHCWALATME

SEQ ID NO: 425947 - protein, 366 aa, unidentified
MPSVGLLKPYAPSMEFTMIARSDAACFVGIDLHKDTLTACVLRGTDREVTYVKLACKCRERIRSFFSALPQPSVVAIETVGFYRWLWAELEPLTGQLVLCDARGARALAGRRIKTDREDALNVALLLADGRLPLAWAPPENVQVLRNWTRHRNGLTRQHAKVLHHVKSTLNRLNFPGPVRLDAAALQRYLLAGVERFTADDLTMLWQHQRRLVEIEQDRAQSERRISELMRAPEFSRLRELLESVPGVGLVTAATVIAEIGDFSRFADSKAIGRYAGLTPTVYASGNSSRLGHISKTGAPDLRWVLQQAAWTAIRCDAGFKKTWLRIAKTAGKKAAAVAVARKILVLMWTLQRKDEPSKSRDPVAA

SEQ ID NO: 425948 - protein, 318 aa, unidentified
MNTNTLQNINVGVDTGKSQLDIYIRPLDIYFTVPNTEKGISDAIKTIKKHKPQRVVIEATGRLEMPFIHACDKAKLPYVIANPLRIKRFAGAIGQRAKNDRLDAALIAHYAERVQPELTKLKSENIRLMSDLVTRRNQLLTMQTMERNRLQILPKNISSTITPILTALKNQIEKVEAKIAKLIESCPEYQAKNTILQSMPGVGKVLAASLISNVPELGFITNKQASSLIGVAPITRESGRFKGKRLIQGGRTQVRTVMYMAMMSAIQCNPVFRATYERLLTAGKPKKVAIVACMRKMVVILNSMLRDGVMWDTDSLKN

SEQ ID NO: 425949 - protein, 307 aa, unidentified
MFAGIDVSKDDLEAQLDSKDAGINCPNTANGFPLLIDWLKSHQVRCVLLEATGGYERQVMKALQTDGFEVIRVNPSRARSFAKAMGQQAKTDPIDARLLAQFAATIKPPKTQPTSPDQDDLRALVHQRENFVQQRSDDERRLKTAGSDAVKPLLKGHIDYLNKVIVLLDARIRQSAESLDRKRVLRLCSVKGIGLITAASLMAYLPELGKVGRHEIAALAGLAPYNNDSGKQKGKRYISGGRFSVRRSLYMACWSVIRFQPEFNARYKALLDKGKCAKVALIACMRVLLIRLNAMIRDDSEWRDRVA

SEQ ID NO: 425950 - protein, 351 aa, unidentified
MMIIGVDYHPSFQEIAFLVEETGEYGEQKLNHSEGEAERFYRDLHARGIHVQVGMEATGFSRWFERLLAELDFELWMGDPAEIKAKRVKKQKYDREDARLLLRLMRENNFPKIWVPSPENRDLRQLLWHRHRLVQMRTRIMNQLQALAMNEGKRWKKKLWSAQGRTELEKLPLAPWASRRRRELLELLDRLDPSIEELSKAVEREARKRSDVLRLMTHPGVGALTALAFVLIIGTTERFERGKQIGTYVGMIPTEDSSAGKQRLGHISKQGNSLLRFLLVEAAQAAARINPHWRRRYMHLAMRRHKSIAKVAMGRRLGVRLYWMWRNGCDYSSSLEFGSYVGQLGTGHGVK

SEQ ID NO: 425951 - protein, 402 aa, unidentified
MVLFMFYIGIDIGKSHHEVGLINDKGDHIGKTIRFANSKDGSQKLLKFINQYKLTPDKAVVGLEATGHYWLSIFSFLHKLGFKTTVFNPLQSDALRHFYIRKTKTDVSDAYLIAQVIRIDSPDETPFLEEDLLELRHLERLRFSFVDQCSDLKRKVISLLDQVFPEYEKIFSDVFGASSTEVLLHSPLPEDLLNIDTQKLADLLNHVSKGRYGEIRALTKANQLQESALDSFGITVGSDVFKLQIKLLLEQIKLIENHLKTIEQAMIVISNRQEHYLTTITGISDVTACVILGEIGSISRFDRPEQLVAFAGLDASVHQSGNFNSNRTRLSKRGSPYLRRALWQAAFVASNHDPALSLHYQKLRQRGKAHGTAIGAVARKLTHIVFAILRDKKPYEPRPTVE

SEQ ID NO: 425952 - protein, 343 aa, unidentified
MKVTTIGLDLAKNIFHVVCFDERFKELRKRMLRRHQVKLFFANLPSCCIGMEACASSHFWGRELSKLGHDVKLIPPQHVKAYLRGNKNDYNDARAIAEAATRPGIPGVALKSVEEQDMQALHRLRSQCLRDRTALTNSTRGLLSEYGIVLPKGIASLRKRIPELLEDADNGLSILFRNLLARRYEQLVELDGHIAFYTDKLEILGQQDNGCQRLQTIPGFGPIVASAFRSAIGNGRAYSKGRDVAASLGLVPRQHSTGGKNVLLGISKRGDQYLRSLLVHGARAVVIQAARKKDHLSRWLNRIIKERGLNKAVVAMANKMARMGWAILRYNTSYNSLSAVSAC

SEQ ID NO: 425953 - protein, 428 aa, unidentified
MTADTTLTPETWLVAIDIGKAFHAVLVEGGDGKRQQFRMANHVEDYDRLVVFLRGLPGPARIALEPTGDFHRTLAHRLLREGFSVVSVSSVAGARYREALFNSWDKNDPKDAHVILQLLKHGLVQHYHDPLLAGDHDLQELAKTYHQIVLARKRLADSLLNHYLPLYFPEMGRYWESTRVEWFVAFLEQFPTPAAVQALPKEAFVRAAWSVVGRKVNKQAKLEELYELAQRSIALPVAVDSVAIETFRLQLAQLRRLAELRQTLEARAHALLKDRADFQRLCSLPGVAAILALVILAEGGDLRRFPHHRQFLKYCGLDLAKCQSGQFRGRERLSKRGNARLRMAFWMAAQRAVRMNENSFRDKYERYTRQDPGNPDVRRKALTAVAAKMARVAYAVVKHDLPYHGYHEHALPSGSIPLKRAVGARATP

SEQ ID NO: 425954 - protein, 461 aa, unidentified
MRPERHVSQSKTWEGLKVIHPHAAGLDIGSTEIWAAVAPDSTAEPVQVFGTTTPDLTALADWLKSCGADTVAMESTGVYWIPSYEILQARGFEVCVVNARHFKNAPGRKSDIQDCQWLQELHSVGLLRGSFRPEAEIVALRAYLRQRAELVEHRAAHIQHMQKALAQMNVQLTQAVKDITGVTGLSIIRAIVAGERNPQKLAALRQPGVKKTEVQIARALSGNYRPEHVFALKQALALYDFYTGQLAECDVEIERQFANIKPVDEDLPPLPPSDKSDSHSKNAPSYDARSHLYQMTGVDLMAISGLNASTVQTIISEIGTDLRAFPSEKHFCSWLGLAPHNDISGGKVLRSRTLKTHNRAGQAFRMAAQSASRSPSTAFGAFYRRMKARLGGQQAIVATAHKIARAFYYMLKHREPFHDLGGEEYERRAREREVRNLDKRAQKLGLKLVPAQITVVVPAVS

SEQ ID NO: 425955 - protein, 351 aa, unidentified
MPRKSSVCTVTAIGIDMGKTTLHMVGLDSYGAIVLREKVSRGRIASRFANLPPCLIGIEAGMATHYVARELAALGHEVKQVPPAYAKPFRQGHKNDFRDALAVAEAVQRPTTRFVPAKTNEQLDLQALHRVRSRLVSQRTAVINQIRGFLLERGIIVRQGLRFLRQLLPDILAKRTDVLSPRMVRIVSDLAGDWRQLDDRIEIVTDEIETLAKADDSCRRVMTVPGIGPIISSAMVAAIGNGSAFSKGRDYSAWLGLVPKQMSTGDRTILGRISKRGNSYLRMLFIQAARVILLRPANWPKHGFGAWLVRAIQRLHPNVLAAALANKLARIAWTVLAQERSYEARVTKAEA

SEQ ID NO: 425956 - protein, 319 aa, unidentified
MQPKLVIGVDVSAGWLDAALPDGTTKRVPQDAEGYQQLTQWVRGQAPAEPGALVFACEASGGYERAFAEAMTDAGFGVRILDPRRVRQYARAAGQRAKTDRIDARIIGACAAAFPGPLFQRDVPRDALSEMVRLRDQLSAERMVAEAQRRGLRLPRMVVLADQRISQLRQMLKEVEAEIADHIAAHQALAADAALLRSMPGVGPVTAARLIADLPELGKASRGEIAALVGVAPFADDSGKRQGKRRCAGGRKAVRNTLYMAATVAVRHNPTLKAFNDRLRAAGKPPKVALGAVMRKLVVILNAMMRTRQPWATSHHQTA

SEQ ID NO: 425957 - protein, 345 aa, unidentified
MINSQIIGLDLAKNVIQICKIDRHGELISNKAISPKKLKEQLAKSITSIVAMEGCGSCHYWGRLAKKYGHDVRIISPKKVKGFLQGQKTDANDALAICNAAMQIGMLFSPIKSEERQSLQTLESSRQFLTKELTALNNHIRAYLYEYGISIPKGRKSLRENIVLVLDSEDDRLPKSLKSSLHVLWERYQLTLSQLKAIETAKETLVKQLEPCKRLMKLEGIGPVCAAMLYTSLGDASEFKNGRQASVYVGLTPKQHSSGGKVYMTGINKQGGNKPLRAALYQGALSVISQLSDVPKTVKEAWLLELVKRSGIKRACIALANKTVRTAWALLSTGKDYTPTLLNQN

SEQ ID NO: 425958 - protein, 331 aa, unidentified
MQKTILVGIDVSADDFTAAFDGTDDQPQVLSFPNSAAGHKRLCRRLQRAGRPARACLEATGIYSMDLSLALHRAKGIEIMVVNPRATKDFARACMKRSKTDRTDALSILEFVRRMPFAPWRPPSSETLNLRAISRRIAALMLTRIQERNRLKAVQRTREFSAGLGEDIEAHIEYLEQSMERLRGEALEIVDATPELRRRFMLLVSVKGISTKSAIRILGELAVLPEDMAARQWVAHAGLDPRHYESGSSVDKPTRISKTGNRHVRAALYMPALVAIRSEPCVQAFYQALLSRGKKPMQAIVAVMRKLLHAIYGMFRNNQGFVGEKFYRSNA

SEQ ID NO: 425959 - protein, 340 aa, unidentified
MSEITTVGIDLAKNVLSVHGVDAHGKTVLRKTLSRAKVTELMAQLPACRVGMEACSGAHELARTLQALGHDARIMAPKFIVPYRKNQKNDGNDAEAICEAVARPNMRFVPIKSAEQQAVLVVHRVRNELVQSRVGLINQVRSLLTEFGIVMPQGRFSFRHNIGVALDDARLPTLARQILHEVNARIRVLDEDILAYDRRIEAMVRDSALMRRIVAVCGVGPITASAIVASVGDAKLFKNGRQFAAWLGLVPRQYSTGGKAILGRITKRGDVYLRTLLIHGARSALVALSRRTDRLSRWAAALIARRGFKRACVAMAAKNARIIWALLAKGEDFQLERAAA

SEQ ID NO: 425960 - protein, 339 aa, unidentified
MWKPKLSKVEQSYFIGVDVSKNKVDIAVIARTQEVVLEREVPNTDVSLKRFFGSLIKQFAWCSSDVLICCETTGIYSNPLKRVTLELGLKLWVEHAMKVKRASTDMRGKDDRTDARRIAEYALRYSDRKRLYVAESTAMKRLGTQGKIRNTLLKKRTSLENELREAKAMDIALYRELKAVYGPVISSLNRQLKKVEEVIRTLVKQDEDIRQNMKLLQSIPGVGEQVSLHLILRTNNFKSISSPKQLACYAGVAPFKNESGVKIKRARVSHMADKQLKKILHLAAMAAIRSKGELNEYYQRKTEEGKNKMSTINAVRNKIIHRVYAVVERQSPYQIKLEI

SEQ ID NO: 425961 - protein, 377 aa, unidentified
MGDYSEAFVGLDTSKLRNAVAIADASRGGEVRFLGEIENTPAATAKLVRKLSARYKRLTFCYEAGPTGYGLHRQIKDLGFECVVVAPSLIPKRPGDKVKTNRRDALSLAKLLRADELTAVWVPDGRHEAMRDLTRARETAMLDLRTKRQHVSAFLLRLGRPYPESRKTWTKAHASWIASQKLEHPQQRLVLEEMMLAIRQAQERLQRLEQAIAATVPEWSLAPVVAALMAMRGIDLISATTLLAEIGDLSRFRTPTELMAYLGLVPSENSTGDTVKRGPITKAGNRRARRMLVECSWSYQHPPRVGQAKQPKVDAAPLAVREIAWKAQCRLYRRYRMLIRKGKLKTVAIVAIARELAGFIWAVARAVSTMRIAAATT

SEQ ID NO: 425962 - protein, 286 aa, unidentified
MTTRISMLAIDLAKGSFQVCAIGADGAVLYNRVLSRTRLMTLLAEQSACVVAMEACATSHHWGRVAQSHGHEVRLVPAAYVKPFVKRQKNDKADAEAIAEAASRPTMRFVAVKSAETQGRAVAFRTHQCLVRQRTQLINALRGHLAEFGLVAPKGPASLKVLENALADEASDLPDPVREMGTIYVEQIARLTEVIERLVDELEAASKTDEELRRLCTIPGIGPVTAGAVAAFAPDLDTFDSGRNFAAWLGLVPRQRSTGGKTRLGSVSKMGQPTEGSMPASPSRSV

SEQ ID NO: 425963 - protein, 342 aa, unidentified
MYFIGLDVHKKTISYCVKDAAGQVHREGKIGSTRRELDCWIKTLPQPRTIAMEATIFTGWIYDHLLPHAEKVKVAHPLMLRAIAAAKKKNDKIDAGKIADCLRCDFLPECHMVSTEIRDRRRILRYRHLLVRQMVQMKNRVSGLLMETGVEHNKQRLHKVGYFHELLSTNQEVHPCIRPLLKISRETIERCQKTEDALVSSLQRDPMLAERIKRLRTIPGVGPITALTWALEIGDVSRFRTIKQAISYCGLCGEEKSSADKMMRTPLSKQRNKHIQHVLIEAAKLAPRQSYELALVHEKEMQKGNRNRATLAVARKMVVYLLAVDRQQRDFVPAEERRAGAA

SEQ ID NO: 425964 - protein, 362 aa, unidentified
MTPSIASPPAIGKIVVGVDTHRHVHVAVAVDAFGARLEDRSFPADSGGYQALIDWAGELGRIEAFGIEGTGSYGVGLASAARRAGHRVIEVNRGDRRSRRANGKSDTLDAEAAARSVLSGQSSATPKSADGTAEMIRQIKIARDTAVKAKTSAIITLKQIVVNAPPELREELEPLGDKALMARCAGFRRTGAMNSTTASAKHTLRSLARRWLALRDEIADHDALLDALTAQAAPTLRDGFGIGPDVAAEMLIIFGDNPERIRSEAAFAKLCGACPIPASSGMTTGRHRLNRGGHRLANSALYRAVIVRMRFHEPTKSYVARRTAEGMPKREIIRCLKRFLAREIYQRVMTDHRARVALEATA

SEQ ID NO: 425965 - protein, 403 aa, unidentified
MRVYKLDGEAIAKDQKISLAFDAHKESLHATALGPEGEVVYRESIPYEQSHVKGLIGRFPGCDIEATYEAGPTGYKLLEWLEEEGCQAFMTPPSKVKQDKGGKQLKTDARDSLDLAKQLRADMLKEVHHHGRGHYRQRELTRTREQLVSQRTATCNRIKSKLLYHGIEVPDEINATWSNDFLDWLEDGPSGNRWLDVSIEVLTANYRELSEHIRRLEVELKKLACCEAKQVESEPPDGEERFGFAGWVELLKTVPGIGLLSAMILVLELGDIRRFETAEKFASFLGLVPGEWSSGQTQLKGSLTRWGNRRARTVLVEASWKLIGKDERMGEVYERIKAKSGSGPAICAVARRLGLAIRAMIRDQKPYQSNHPSTQRKDVEHAGNRPPGAAEQTESQEESAEQT

SEQ ID NO: 425966 - protein, 399 aa, unidentified
MECRNAPAERPRPAPGQALSRSLVALDQNSTIIAVIEMSQSSWLVAGMLPGVERQPRKKLEPSPERLLGLLHRWRDEAVGAGRTITRIALAFEAGRDGFWLARWLAARGIEAHVIHASSVAVSREHRRAKTDRLDTELLKRAFLGWLRGEPGHCSMARVPTIAEEDAKRPNRERDCLVGERTRIVNRIKSTLARLGIRNFKPTLRKAAERLATVHTPEGIPVPPNTLAELQRDMARLGFVVSQIREIEDARQKRLEQQPETGPHAMVRLLARIVGVGVETADMLVHEVLSRPMRDRRAVARYAGLTGSPDESGARRREQGLARAGNARVRRGMIQLAWRFLMFQKESALALWYRARTVDSGSGTRKTMIVALARKLVIALWRFVSTGEPLEGIVLRPAS

SEQ ID NO: 425967 - protein, 395 aa, unidentified
MFIVGIDIAKRSHEAIIIAEDGQVVRKAFSFRNNCTGYNLLLEQVRRLTLVKSQIVFAMESTAHYWLALYARLLKDGYAVMVLNPIQSHSLRELYIRKAKTDARDSLIIADLVRFGRCKASNVPQDRILALRELCRSRAYLVDMAADLKRKLIALLDRIFPEYESLFDSVFSKASIAVLCKYSTPQKVKNANLRKLTDLLMESSNGHFGEWKAHQLKEAACSSFGIDDSGGVYSTLLGMFLEQILSLTAQADSLEKQISVFFQEFNNPLTSIPGVGTVLAATILSEIGDITRFSSADKLLAYAGLDPSVKQSGEFKSNQNRMSKRGSPYLRRAIWLASTVAVHRDPMFQTYYEKKISEGLHYINVIGHVSRKMTAVIFAVLRDGQPYQPILQSAG

SEQ ID NO: 425968 - protein, 428 aa, unidentified
MEEKTLIVGCDVHQKTICFCLLDKATGQPVAAPFTLPNDRFGAEQAIQTLQRLLSHHRYTRLEVGMEATGFFWLPFYRAIERSDLLAPFHPRLVLFNPKLVAHFKKGLDLSPNKTDNRDARAVAERLRFGRLPVTHVPDDFWQGLRRLTRYRYHLAHDLAREKVRFVTYLFLKLSAWAQIQPTSDLLGATSAALLTEFTADDLVQMPLTALADFIARRGRHQFDDPEATAQKVREALRRSYPVTPELDGAVTFSLSLMRDHIRHLEQLLKRLDREIARWIEGVPNPLETVVGLGPVVCAGILAEVGDIRRFPGHPQLAAYMGLVWKRRQSGSFRAEDTPRVSGGNPYLRYYITLGANNLRQHNLEYKAYYWRKYRETPHHKHKRALVLTGRKLTRLVYTLLAKNTAYAIPQTVLKNGEEVALLMAEVG

SEQ ID NO: 425969 - protein, 493 aa, unidentified
MTAVMIGVDPHKGSHTAVAISADECPLGRMGVRACPAQAEQLVAWAQAWPDRAWAVEGAAGLGHLLARQLVAAGEYVVDVPPKLAARVRLLEAGDTNKNDPNDARSVAVAALRSKAQRPVIAEDHAAVLKVWARRHRDLSRARNQAACRLHAVLCDLVPGGIPDEITAARAEGILGQIRPWSAAAGARCELAIEFLADIRRLDAQRGDAKKKLAAAVKASGISLTRKVFGVGPVIAATVIGDVRQVSRFPSRDHFAAYDGTAPAEVSSGNRKIYRLSLRGNRLLNHALHMAAITQIRHKHSDGRGCYERKIAEGKTHKEALRCLKRRISDAIYAVLVADARPAAAAPEGPGGQPGNLSVSPGGRLTPRAPALRTSHSRAPHHPTASRGRDAAASPPRGSADLENGCGWQLSHRTPQEPPPEIDLQGTQRNPLTTKGLDLDADGADLPTDGERAEICQFWCAASRPFVGDERASRRRACGISRHLPDVRAGLAY

SEQ ID NO: 425970 - protein, 347 aa, unidentified
MITLGVDAHKRTHTIVAVDSNGRQLASKTIATTTKDHLGLLTWAEQLASGNGLVWAIEDCRHLSRRLERDLLAAGHAIVRVPPKLMAHVRDSARTYGKSDPIDALAVARAAQREPDLPVARLDGPDRDVRLLGDHRESLVAERTRVINRLRWYLHELDPSWEPKARSLDRLAILDQVLVRLEPLTGTVARLARDLLERCRTLTQQIDELTAEITTLVTDMAPSLIAIPGCGTITAAKILGETAGVDRFRSKDAYARHNGTAPMPVWSSNKARHRLSRTGNRQLNAALHRIALTQAHWHEPTKQMMTRRKASGDSGMEALRVLKRRLSDVVYAALQADLATGVKTAAA

SEQ ID NO: 425971 - protein, 338 aa, unidentified
MSIETLGIDIAKNVFQLHGVNKAGRAVFKKRVMRDQLLQVITRIEPCMIVVEACTGAFYWARKFEELGHKVKVISPQYVKPFVRRQKNDGNDAEAICTAARQPHIPSVPKKSIEQQDIQALHRARQRMVNHRTAVVSQIRGLLLDRGFAMAKSITRARRLIPEILSDHDNELTPLAREAIAELHDLFRDLDRRIASFDKKIDAVFRQSESCQRIAKIKGVGPKTATAVIAAIGDGSEFRNGRHLAAWVGLVPRQFSSGDRTTLMGISKRGSQHLRSLLVHGARAVVRTAPNKTDPNNQWVNQLRERRGFNRATVAVANKNARIIWAVLHKGEPYRAAF

SEQ ID NO: 425972 - protein, 389 aa, unidentified
MIYVGIDVAKHKHDCYIVNSDGEIIEDVFAISNDLTGFTKLLNSIPSVASEHIKIGLEATGHYSINLLNFLKDHYHHIVLFNPLQTNLFRKAHTLRKNKTDKIDARFIALMLHSNDYNSYLDISYHLQDLKSLSRHRFRLKSQSSKLKISLTRLITIMLPELPSVVYSIHQKSTYALLEQFSSNAEIANAHLTTLTNLLHKTSKGKYSKEKAILIRDTARSSIGSDSRALSFELKQTLRLIKSLQDEINSLDQEIKSLMNEIQSPITSIPGISNTLGSIILSEIGDISRFETPAQLQAFAGLEPSTHQSGNFTASNSRMVKRGSKYLRWAILEAARLIAMRDTTFRLYYQKKKAEGKHHFVAQSHVAKKLIRVIFHLLSNNLNFVPQLV

SEQ ID NO: 425973 - protein, 367 aa, unidentified
MKNTKYFIGLDVHKEKTSYCVRDKLGNIPLENKTATLYTELEPQLKPYLATSLIGLEASTCYYTLYQAFLKKGYNIKVANTIQLRQLIAKNDKLDAKRLSEMLRLGTFPSSYIPEEKIQHLRNLVQMRHALMQEKVRCNNRIQTLLDKNGVIMPPQKAFSKKWKYALMQYIGSGDVSIELWYEYDHYIYLEKKNEQVDQELIGYTRKHWAKEYQLIRSITGFGILLPCYIIAFVHPIERFLSNRKLRRYAGVIPVTKESGDYTSKGKIPKSSSKALLRWALVQAANTIGKTNTNLGRYYRRKKKQKKNTGTAKIAVASTLVDIIYKVLTTKKPYTPKADCVLNNWGLHICVRWWVSAVLLSRGLCTL

SEQ ID NO: 425974 - protein, 347 aa, unidentified
MDQIIIGVDTHKSNHVAVAINTQGARLGSLSVPATSQGYLDLEKWAEDFGPVKAFGIEGTGSYGGGLSRSLLSHDQTVIEVMRPNRQLRFLHGKSDNIDAEGAARSVLNGQATAIAKSQIGSVEMIRHLKVARDSAIKSRSQAAIILKALIVNAPAQLRDGLDKVKGNIALVRHIAAFRPGEVTTPTASAKAAMRAIAKRWLFLHEEVRTHDLELAALVELRAPKLMAAHGIGAMTAAEMLILVGDNPERIKSEAALAKLCGVCPIPASSGKTNRMRLNRGGNRKANAALYIVAITRMRNHEATQSYVVKRTAQGKSKREIIRCLKRYIVREIYHYLCVPTDAKCAT

SEQ ID NO: 425975 - protein, 390 aa, unidentified
MRYFIGIDVAKFKHTACVIDTDGIALVEPFDFTNDIIGFQSLLKNIKPFLKKKHLVGMEDTGHYGDNLRNFLLEKQYKVVMLNPIVTSHIRKASNKAKNDRIDCFVIANTMMNPNFYRDQQVQSIDYATIRQLTRMHHTHTEEINRYKCQLQKSIDIVFPEFNSLLNTKYSKTYLEILDTYHGAYTIANTDIRLLRNTLKNVGVGRSVSISAEQLKKSAKESIGQHNLAIEMDIPFLISLIRRLTSILGEIDKKIEEFSHQLNSPILDISGISHFSAMSIISELGDITYFSNEKKLIKFAGVNPCVYESGTYSMTHTRLEKKGSKYLRKTLYQIIDSVIRFNPIFQAFYQKKISQGKSYRCAQGHCIRKLLRIIYKILSTGEGFDSAKLK

SEQ ID NO: 425976 - protein, 363 aa, unidentified
MMTSPVAGIDPHQDSFTVGIVDANGVELSHETFPTTAVGYLAAIELLTERDVEMVGIEGSASWGAHAAIALVGAGFDCREVPAQRSAAQRRSRRLDKTDVVDAVAAARALLAEPTLGPAQALEVYDALVAKIEAVLEHRRMLVTVRTLVLHHVQDQITKLPVEIRDQLSSSGKIEGRLRRLEQIDTSVVSTLAGEYRLSWLIPLIDQNRAARRQIRQLERDIDTLLDTHGTTLRDEPGIGPIAAATLLTEVGDPFRFARESKFARWCGTGAVALSSGEGAGLPVKHRLDFSDNRRVNSVLYIVSVTQHRDLDDARTYIDRKLGEGKTRREARRAHKRHLANRVIRRMWKDETRRRERPAHLAA

SEQ ID NO: 425977 - protein, 339 aa, unidentified
MTIVGCDFHPGWQQVAVFDAETGEIRELKLENGNGEAERFYRQLSSPALIGFEACGNTQWFEDLLDRLGHEVWMGDAAAIRASYVRKQKTDRRDAAHILKLLMESRFPRLWRPSAQERDLRQLLIHRHKLVGIRARVKNGLQHLMLNRGVQMKRKLWSEAGQKALRALPLEGWTAQRRQDLLHLLSGLNPQIRQLDVAIERAAQENPRAQLLMTQPGVGPITALAYVLTLGDVSRFQRGKQVASYLGLIPSERSSSKRRRLGSISKQGNSFMRMLLVESAQTVNRLDEGFRKQYQHRCHRMAKGVAKVAAARRLAVRLFWMLRTNTAYPEIAHIESSPR

SEQ ID NO: 425978 - protein, 450 aa, unidentified
MRDPEEIEDEAYEQILERVCAIDVAKASGKVCTRVPHPSQPGKRRTRVWDVDATTNAILELGEHLVAERIEKVTLESTSDYWRIWFYLLEAAGLDVQLVNARDIKNAPGRPKTDKLDSVWQAKMTERGMLRPSFVPPVEIRQLRDYTRLRVDLTRERTRYWQRLEKLLEDSLIKVSAVASTLDTLSVRDMLEALIAGERDPKVLAGLARGRMKAKHAALIEALTGHFDGHHAELARMLLDQIDALNGQIGKLTARIEELIAAIPAAQGTDADGTTGPGAGRGTDAAVLPAVDRLDQITGIGREGAQAIIAEIGLDMNRFPTAGHLVSWAKLSPRTIQSGATSRSGRTGKGNPYLKGILGEAAASAARTDTFLGERYRRIVKRRGKLKALVAVARSILVIIWNLLAHPGARYQDLGSGYYASRTNKDRRARSHIRQLEALGFTVTLTQAAA

SEQ ID NO: 425979 - protein, 417 aa, unidentified
MNESAKLLPQKYMEGDKVHVLGIDVSRGKSNCALLHDHTVIKEFQIIHNKSGLAKLKSIITSDLPVMAVFETTGIYSRVLTRFFSEEGMNYLEINPLESSIRMAGLRRQKTDRSDAVKLALLGIDQKSLIHGRRPYSRPYEQLHLMAHRYLEITKERSRIINHLHAALDQTFPELNDIFNPIRSVLGLTFVSLFPHPDFLTGYIPGTMAKQIIGLVSPKIHSDLIVRRCNEVWQAGQLSYPAQPANSFLTNQIHSYCEEIQRYNQAHDLLKRQLITYAKTFPEFKLIASIPGAGEISTALLLGFTGKIARFPSYKQLNAYVGIDLRRIQSGGFKEADRINRRGQSSARYIMFEMIRSMLRNKARIDNHIVDYYYKLKKGPHPKPDMVAMITCVNRLDRTIMNLVRTNQIYNYARTSH

SEQ ID NO: 425980 - protein, 411 aa, unidentified
MEVIYKRCCGLDVHKEIVVACLLIREGGKVLKEIRTFLTMTVDLVVLHDWLKAHQVTHVAMESTGIYWRPVFNLLEEDFTALLVNAAHIKTVPGRKTDVKDCEWIADLLSHGLLRGSFIPPEPIRDLRDLTRYRKSLTDERVREVNRLQKFLEVANIKLSSVASNVMGVSGRAMLEALTSGSTDPQVLAELAKGRLRKKLPELKKALEGRFRAHHQFMVAEILTHLDFLDEAIERVSQEVSSRMIPFSKIVELMDLVPGINQRVAEGVLSEMGVDMSCFPSHGHAASWAALCPGNNESAGKRKSGKTRKGNRWLRRYLIEASWAAVRSKRTYLSALYYRLVPRRGKNKAIVAVAHALLVMIYHILKDQVSYRELGSDHFNKLNAAYIQRHHVKRLESLGFKVILEPLSEAA

SEQ ID NO: 425981 - protein, 355 aa, unidentified
MSCEKYIGLDVHQATISVAVVDSQGKVVMESILETKASTILEFFAGLRGSLFVTFEEGTWAGWLYDLLKPHVTEVLVCNPRKIPLLKQGNKSDKIDARKLAERLRLHDLKPVYHGETGIRMLRELARSYLTVVKDLSRVMNRLKALYRSWAIPCAGRDVYYRRHRSAWLDKIPEAGTRHRAEQLYQQLDLLQHLRQQARRELLAESRKHAITAKLRKIPSLGPIRSALAVALIQTPHRFRSKRQLWTYSGLGLETRDSGEYHFIKGQPRRRKKQATIRGLNKDYNHDLKGLFKGAATRASVKPGPFQEFYQRSLAKGIKPTMVRLTLARKIAAITLTLWKKGEDFDIDKLNSQAT

SEQ ID NO: 425982 - protein, 458 aa, unidentified
MIEKKRARRGAMEGLQVRNPNAAGIDIGSRQHWVAVPEGGVEQPVRSFESFTADLHQLADWLAECGIDTVAMESTGVYWIPLYDILEERGFEVLLVNAAHVRNVPGRKTDVRDCQWLQQLHSYGLLRASFRPHAEILELRAYMRHRDMLVHSAARHVRHMQKALTQMNVQVHHVLADITGVTGMRILRSLVDGEYDPATLAEHRDPRCRSSKERITAALQGNYKPEHIFSLKQALNLYDSYKQNLAECDAEIERKLSALSRLAAEPEQPLPRPKSRRKPCGNEPAFNIRGPLHRLFGGVDLTQIPGVAAQTALALTSEIGTTVERWPTAKHFTSWMNLAPGSNVTGGKSLSGKRPHAKNRAGQLLRQAASSVGRTNTALGAFYRRLAARQGKGKAVVATARKVAVVIYNLLKHGGQFLEMGLKKYEALQEQRNLRSLRKRAKQLGFQLLPMPTADGVT

SEQ ID NO: 425983 - protein, 402 aa, unidentified
MNKFNPTTAKVSTTSALGTIQTAQSALDKYAAYIGLDTHKDSIVVAIALPGRAHAYIDSELANNEKNISKLIHRLSKQFAGQLLLFCYEAGPCGYGIQRQIMASGHDCEVIAPSKIPKKPGEKVKTDRIDARKLAQYLRSGDLTAIWIPDHEQEAMRDLTRARSDMKSQELKARQQLNAFVLRHGHSWPSNKTRWTKSHYNWLESLKFNHDWLQVVLQEYIDAVKAATGRVTDITEQMERVLPQWSMAPVVDSLIALRGIDKLAAMVLLAELGDISRFDSPKQLMAYLGLVPSEHTTGSKRRQGSITRTGNSHARRMLVESAWSYRFPARQTMHLKRKAIKASDKAKAIAWRAQKRLCGRYTTLIQAGKNTKQTTVAIARELIGFIWDIVCHEMPKVKIVAQ

SEQ ID NO: 425984 - protein, 392 aa, unidentified
MDSPPPRHHSATVAFEEANGSEGETMKKHSSKHDSLSSTDVELCTTICVDLAKQVFQLAGEDATGRVIYEDRIKSRQAFHDFLTRLPTTVAVLMECGPGAQAWARLLQTKGNPVRILPAQRVAEHRSGAKNDRNDAHAILRAGRDTSIASVPIKSTTALAIQALHRIRRGNIKRHTALGNQIRGLLLEHGVSMPQGDAAISQQVSRALEDASLPLPDLLRELLDELLTDWLSLGERIAALSGRLEVTAQQDKVAQRLITIRGVGPIIATAIVAKQTEPSRFASGRMYSAFFGIVPDQHSSGNKIRLGRMSKRGDGYIRSLMIQGAHAVLSQLRPDSDQPDDRRLLRWLSRLGRKEAAIRLANRNLRIIWALLQSNQVYQRKPNNNPEAAMSL

SEQ ID NO: 425985 - protein, 418 aa, unidentified
MGKINERCGGIDIGKRFLLCCVLTGAAHEEPRSQTRRFETTVADLVRMRDWLAEERVTHVVMESTGSYWVPVFNILEDRLIIVLANPEEVKNRKGHKTDRKDAEHLADLLRHDHVRASYIPPKPIRDLRDLTRRRLQLIQDATRERNRVEKLLEHVNVKIGNVLSDVFGVSGQSMLLALLDGKATAEEIAQLARGQAKRKVPQLTEALEGHGMRDHERFLIRSCLRHLACLEEEVEQVDGEILQRMQEPPFTGAFLRLQTIPGVGQLAAASILAETGVDLTTFPTAEKMASWAGLCPGNRESAGIKKGSQTTQGNSYLRTTLVQCAWAATRKKGCIFQARFRELSPRRGQKRAIVAVAHQMLTALYFMLRNDVPFLGVENPPKQRRRQRRAHHHLRCLRRLGISVQVLGPPEFSPQIE

SEQ ID NO: 425986 - protein, 360 aa, unidentified
MVGERTSVGLDVHARSVVGCAIDGVTGELHRHRLTPDAGAVLAWIGQLPGPVAVVYEAGPTGFGLARFLRDRGVVCLVAAPSKLQRPAGDRVKTDARDALHLARLLKLGEIVEVTVPSVSQEAARDLVRAREDARGDLMRVRHRLSKLLLRQGIVYSGGQAWTGRHDAWLRSHQFAQPGLQLAFESGYEAMLLTVARRDRLDAAIVAMAAGGEFTDVVHRLGCLRGVSTLTGFALAVEIGDWGRFTGSSIGAYLGLVPSEHSSGATRSQGSITKTGNGHARRLLVEAAWHHRAAYRHPGATMRARWQAAPPAARARGHEGNRRLHERWQAFNDRKKKPVVANVAIARELAGWCWSLATLE

SEQ ID NO: 425987 - protein, 351 aa, unidentified
MRTSQKITGIVTTIGIDIGKNTFHLVGFDQRGAIILQQKVSRSQLERRVANIPRCLIGMEACSGSHHIGRRLAEIGHDVRLIPAQYVKPFLKGHKNDYRDAEAIAEAVQRPTMHFVTIKTPEQMDLLALHRVRSRLVGRRTGVINQIRGFLIERGITVRQGPMPLRKALSEILSSDTGALSPRMVGLIADLAQDWRRLDERIAAVSAEIEALAEQDDSCQRLMTVPGVGPIISSAVVAAIGNGTGFKQGRDFGAWLGLVPKQESTGDRTILGKISKRGNKYLRTLFVQAAHVVLERRPSAAMRGLWPWAEQASKRLHRNMLAIALANKLARIAWAVLARGGTYQPRITHAA

SEQ ID NO: 425988 - protein, 350 aa, unidentified
MVDVAMDLHKRHSQVGTLDEWGEIQQLRIEHDGDSREMEKFLGGLEAGSRIAIEATGNWWWVVDLAEKHGHEVVLSNPKKTRLIADACLKNDHVDTDQLLHLLRLGYLPRVWIPPAPLRYGKEVLRYRALLVRMRTGLKNHLSALLSKRNLKGPGKHLWSKPGEAYLEKLELNAEAAEIRDQTLALRKTLDGLIGRWDQELGRRVRGDERVRQLQTAPGVGAQTAFAYRVFVGDVNRFPSGKHVAKYFGLVPRERSSGEQRHLGHITKEGDGLMRTLLVEAALRATRKAGPLREYYRRMVRHKGKAKARVAVARKLAVILYQMWKKDLTYGEFLRREAQCAGGLGKAAGH

SEQ ID NO: 425989 - protein, 355 aa, unidentified
MNDAKYIGLDVHQATISVAVRDSDGKLVMEAILETKAETILQFVRGLRGSLHVTFEEGTCAAWLYALLKPHVTQVLVCDPRKNALLKVGNKNDRIDSRKLAELLRANLLSSVFHEDTGLRAVKELARSYLTMTKDLTRVMVRLKALYRSWAIPCATKQVYAPRHRAEWLAKIREASVHRRAELYYQQLDALRSLQQQVKKELLIEGRRHSATKLLRQIPSIGPIRAVLLLALIQTPHRFRTKRQLWSYCGLALETRTSAEYRVVHGQLQRSKKPVAIRGLNKNHNHDLKNLFKGAALRAAAVEKPFQEFYAALVAKGIKPEMARLTLARKIAAITLIVWKKGARFDAEQLKQQAA

SEQ ID NO: 425990 - protein, 343 aa, unidentified
MKLSRVGVDLAKNVYQLHGVDRTGKTMLKRRLKRHQWFKVLLDKTEPDCVIGMEACAGAHHWGRELQALGYTVKLIPPQFVKPYVKSNKSDAKDAEAICEAMSRPNMRFVTVKRVEQQDIQATHRIRAELMTQRTAKANQIRGLVAEYGLVAPKHLSSLRAAIPCWLEDAENGLTGDFRALLQGVWNDLLGLDDRVCEMDQVIKRLAENNEDCVRLQQLRGVGPMISTAMVATVGDARQYQKSRQMAAAIGITPKQHSSGDKHRLLGISKRGDVYLRTLMIHGARAVVARAKHKDDQLSRWVTNIANKKHPNVAAVALANKTARMAWAMLRNETDYDPDYAIS

SEQ ID NO: 425991 - protein, 365 aa, unidentified
MKKIANIGVDYHLNNITIAVMIEGQRKFHDTIRMKNEDRAIKQYMKKVSKDFTIQACYEASSCGYVFQRKMKSWGYPCDVIAPSLIPKKRGERRKNDFRDARNLARLYANGLLSVVHTPSEEEESVRALIRCRMAFKESEKSTKHQINALLLAHDYRWPKTKWTHQHRKWLSELRLPNEHLQQVIEEHLGHLAYLHSRVQYLDERIAQIAHSELYAPSVNKLRSLKGIDTLTAMVLIAEITDFRRFPNPGTLMSFLGLIPSENSSGDKQKGGGITKAGNHRCRKLLIESVQHYTRRPFISEQMRDHLSQIDAHSAQIAVKCLKRLNKRFWTLLLKGKIRPLAITAIAREFVGFIWAMMQPEPLSA

SEQ ID NO: 425992 - protein, 353 aa, unidentified
MKCDKYIGCDLHQATTVVAVLDAEGKVVLETIIATEAAAVIRFLKSLSGPLHITFEETTQARWMYDVVRGYVSEAIVCDPRRNKLLAEGSKADKPDARKLAELLRAGLLRPVYHGHEATRQLKELVRGYETLSADTQRMMVRIKSIYRAHGIRTSGSAVYQQKQREQWLQLLSEPGTRQRVSWLYEELDHLRPLRKQAKMAMVAEGRKHQAFRLLRTIPQLGPIRCAMLVATVDTPYRFRTKRQLWAYSGLAIVTYMSSEYEIKAGRVVRSRKPVATRGLNRNCNRRLKDLFIGAAVAGSRSEPYRSYVEGLQQKGIRAEMARLTLARKIAAVALRVWKKGETFDPKKLNSTT

SEQ ID NO: 425993 - protein, 338 aa, unidentified
MPLYGGIDLHANNSVVVVLNEQDQVIYQRRLANHLPTILEQIAPYQADITGVVVESTYNWYWLVDGLMEARYRVHLANPAAIQQYSGLKYTNDQSDARWLAHLLRLGVLPEGYIYPKVERAVRDLLRKRAHLVRQHTAQILSVQNLMVRNTGVRFGAKRIDKLTPSELANILPNAEHVLAVTSSLAVLHCLGQQITTLEKAVQQRLKHTPAYAQLQTVDGIGPILAQTIVLETGDMRRFPTVGNYASYCRCVGSTKISNGKRKGQGNVNNGNPYLEWAYMEAAQFAIRFSPTVQRFYQRKQAKSHLMIARKAVAHKLARACYYIMRDLVSFDVHKAFG

SEQ ID NO: 425994 - protein, 373 aa, unidentified
MKKNSRRAKKAGEADLTKLKEMAAGSLVIGIDTGDRYSEICVLDQQGLVVQRGRIQTTGLAMHQQFSTLAGQRVAMETGTHSPWMYGVLVSCGHEVIVANARKVRLITDSDAKSDELDAFQLADLARTNVRLLHPIQPRSRGAQEDLAMIRARESLVETRTGLINHVRGVVKSHGERLRQCDSKGFAQRVQEQIPAGLRPSLSGVLDTLDGLDEEIQGYECRLEHMVATKYPETELMKQVNGVGTITALTFRLVIDDPHRFKDSRTVGAYVGLVTRRRQSGERDPELGITKAGNELLRKLLVNCAHHIIGISGEDSALRRWGLKLLARGGKKARKRAATAVARKLAVLLHHLWVSGEEYEALRGCAAAESTAA

SEQ ID NO: 425995 - protein, 413 aa, unidentified
MTTNSPPQVNSRVNTLYMSIELSATKWKLGFADRFGRIPRVRSLDAGDFRLLRREIKAAKKTFGLEADASVVSCYEAGRDGFWIHRCLVSMGIESHIVEPASIEVNRKKRRAKTDRIDAQKIVIALMRFKVGDRFACRMIRIPDAEAEDARHLNREMRTIKTEQTAHSNRIRSLLVTQGISNVVIDRNFARQLESMRTAEGIPLAKQLRQRLRREFDRLALATEQIRLLQMQQAKMIRLAAKEVAQFEAEANSPRAAVIAEHLMSLSGIGPVTAWTLSTEVFSWRDIANRRQLAALAGLTPTPHASGDEEKEQGISKSGRGELRVLMIEIAWGWLLHQPSSELTKWYERRFNDGTKRNRKIGIVALARKLLVALGKYVRDGEIPADAKLKSELKFAYMPMLKISKTQSVGVAA

SEQ ID NO: 425996 - protein, 346 aa, unidentified
MEYVALDVHKNYTWARVENSQGARLYESRLAHGHGTIKNFVNRWSGRSPVAVETVGNWYWVVDEIEAGGGTPQLVNARLAKLMMGNVNKSDKLDCQGMNRLQRTGTLPTVWIPSSSVRDGRELARTRMVLSRQRTQLKNRIHATLGKYGYTVKGASDAFGKKGREIIEELLLKLPPHTQQALRLILDELDHVTDNLKAIEGHMIEIFSPCPQTQWLKSLPGVADILAVVIWTEIGTIERFNRAEQLASYCGLVSRENSSGGKIRLGPVRRDVNVYLKWAFVEAANSALLNAGRCGYAHISRLYERIKPRRGHGKAKVAVARHLAEASFWMLKKGEPYREPMPSTQR

SEQ ID NO: 425997 - protein, 457 aa, unidentified
MSKRRKRTQSKSFNLKSLPKQLQHINLNAAGIDIGSERHMVAVPEGRDEVAVREFGTFTADLIALADWLQQCGVTTVAMESTGVYWIPLFELLERRGFEVKLVDARHVKNVTGRKSDILDCQWIQQLHTYGLLAGAFRPADELCVLRSYLRQREMLTQTASMHIQHMQKALQQMNLLLHNVVSDITGVTGMKIIKAILAGERDPQVLVSHRDNKCHHDRATIAKSLVGNYRIEHLFALRQAVDLYEIYQTKIGDCDEAIVTQVSAQPDVTDEPPPPEQKRTSARDRQRGGVNVRDLLFQKSGVDLFAIPGLAADTLLVLSSEVGFDLSPWKTVKHFSSWLSLCPGTKISGGKVLSRRVKRNPNRAAQAFRMAAATLSRSKSALGAFYRRIKARSGGKQAITATAHKIARIYYALITQGTTYVELGQQAYEQKYEARRLKHLMAQAKSLGFQLVPSQT

SEQ ID NO: 425998 - protein, 443 aa, unidentified
MSNLAMLDPRAAFVDVGSEKMHVSIAGGPPAVFGTVTSQLHALRHYLVEHQVRSVAMEATGVYWLPLYGVLEASGMEVIMVDGRQARNLPGRKTDMKDCQWGATLHAHGLLRAGFVPPAHVRRLQDYLRLRGDHIVAAAGHVQHMQKALERMNIKLHDVISSLTGASGLAVIRAILAGERDPQALLGLCHRQIRTVKAERVVESLRGDFAEEHLFALAQAVQSWDHYQGLIAACDRQIADILRRMPDANTPPPAASTKKATPRRQPGVNAPDIADLRDMLEQICGGKDLTILPAHTEYSVLQIIGEVGTDLTKWRTEKHFTSWVGLAPGSAQSGKRNRRVKRRRNRVGRIFCVMARSLARSKYIAFGGFYRRMAARRGGLVANKALARKLAALFWRAMVKGLDFVEMGVAQYEAKVLETKHSLLHKLARQLGQQVVPKPIAVA

SEQ ID NO: 425999 - protein, 323 aa, unidentified
MDKNNTFFGIDISKDVFDVMDPEENHYQFENNVKGFRKFSRLLNLQTTCVMEAAGYYHLQLAYFLVEKHFKVSIVNPLSVKRFIQMKLSKIKTDKFDARMIRLYAQGNEVKLWQGQSKNQIEALQIARLQEQYTKQSTALKNKIHGEKTLGNPCNIVSNSLKKSLMQIKKEQAKLDERLVDLVRVENRQLLTNLESIPGMGRKTATMLVIQTDGFKRFDSAAALCSYCGTTPIIRKSGSSVNGRSRISKMGNQKLRNLLFLCSFTASIHNKACRDIYNRIVNKGKSKKLALIAVSNKLLKQSFAIAQSGIPYDENYKSVLIMA

SEQ ID NO: 426000 - protein, 317 aa, unidentified
MTETIIATAGIDTSKAKLDIALHGQAERWQVANTLPGWRRLAGDLIKAGVVRVGIEATGGYERGAVRYLREKGFAVLLLQPIQVRAFARVRLRRAKNDALDAALIAACAAQTDQPIREVDERLAELAGHLTFVEQIEEDIARLKTRLEHVDDPRLRRIVVADIARLKARRAAEMSRIVNVLRMHEDLACRLDLVRSIPGIGERTALALIIRMPELGRVNREQAAALAGLAPYDDDSGKIKGQRHIAGGRGRLRRSLFAAALPAAFRWNKALIALYARLTAAGKAHSAALIACARKLLIYANTIVQRGTPWVDKPTVA

SEQ ID NO: 426001 - protein, 343 aa, unidentified
MKYIGLDLHKKSIFATVLGEDGKILSRTKIGPTTRDIQYYLKKQGRKSELSVAMEASYNWPYCYRAVEDAAENIILAHPLKTRIIGEAKIKTDKIDSKVLAYMLKADMLPKAYVPSREIMENKMILRSRISLVRIRTQIKNKIHSIVDRNRDSYPGLEHLADIFGRAGRSILKETKINPTDYRILSGYLELIDEINKKIKDLEKQIDKKSLEDSDIKLLKTIPGVGSFLAFLIKSEIDDITRFRSKEKLCCYAGLVPSTHGSADRLYHGRIIKQGNKFLRWGLVEAAQTSIRYSSYFRYHYSRIKSKKNANSATIAVARKIAEIIYFILKEKRGYIEKPIDIK

SEQ ID NO: 426002 - protein, 370 aa, unidentified
MKQRLLYVGLDVHKNTTDVAIANGRSNGKVRSYGKIPSTLDALNKLIKKLQDGDKELRFVYEAGPCGYQIYRHLDAKGIHCDVVAPSMIPRRSGDRIKTDRRDAINLARLFRAGELTSIYVPTPEDEAIRDLIRCRDDMKRFERKARQRLLSFLLRHGYQYSGKRNWTKGFYTWLATVRFSHPAQQVTLQEYIDVTNECSERIKRITQQIQVHVEEWSRAPFVKAYQAMRGVSLIVSTTVAAEIGDMRRFQNPKQLMAYLGLIPSEHSSGKTVRRGPITKTGNSHVRRVLIEAAWTYKMQARVSNILLNRQKGLPKSVCEISWKAQTRLCARYRRLYARGKSKQTVVTAIARELSAFIWAIDKEIQLVVL

SEQ ID NO: 426003 - protein, 413 aa, unidentified
MTNSYHLFVGIDLGSDCHQVCVVDQEGTILGQRKVEHGGGAIQQMLAWLAELAGGASPETVAVAVEAPRGAIIDALLGHQYAVFSINPKQMDRFRDRYSVAGAKDDPRDAYVGANSLRTDLSHFRRLRPDHVQVVRLRELSRAHDALQEDWRRHANQLWSYLQRYFPAVLKLSSAADELWVFDLLEQSKALSQRAATLSIEELTKLLRRNRIRRFSAEHLHQTLQDRLALAAGVEEALAEQVLLLLPRLRLLHQQRIEVDRRTERLLEEMAEESFPEHRSVEILRSIPGLGRVFLATVLSEATRPLLERDYHALRNLAGAAPVTRRSGKTTIVSMRRACNDRLRDAVLNSANTHVQKDPRAKQIYARLRAHGNTHARALRGVGDRLLELICILLSSDQLYRLERRQPPKTDAA

SEQ ID NO: 426004 - protein, 324 aa, unidentified
MKMSKPDTVGIDVSMLWLEVVVLPRGVRFSVTNDAAGWAELVQKLRPWSVAAVGLEPSGGYERGVIRALLAAGLSVRRINPNQLRQFARARGVLAKNDRLDARLIAEYVAIMPTRSVQSDPAAERLAELVTVRRQLCDEHVSVANQVSHLEDAMLRRLSKRRLARLEADIALLDNRLAEMVGSDAELARRYRRLVTMPGVGPTLAYTLLALLPELGQMSRKQLAALVGLAPYDFDSGKLKGLRRIYGGRTPVRNVLYMAALSAGRFNTPLKRFHQRLVAAGKKPKVVIVAVMRKMITTLNAMLRDRADWTARCDTGRHTVPATT

SEQ ID NO: 426005 - protein, 328 aa, unidentified
MKKEKVFIGIDVSKLTLDICIVKNTTTSLVIKNNKTDIKKFLNEETKGSSEVYLCIENTGKYGWLITELAPDYLTNFYIINPLHLKRSMGLIRGKNDKIDAVRIAQFIKRNYQEEVCYVRERSLITALKVLLSERGYKVKSKTQLKVKNKDIEVISDKKLAKKLIKSNLKLIVTLEQQIKEIELEIKRLIESDKQLKQHSYLLKSIPGVGDILSTSLIIKTNEFKSITDPRKLACYCGVVPFENRSGTSIFGKKRLSLLADKKIKKVLHLGAMRAIQMENDFRVYYIRKVKEGKNKMSVLNAIRNKIIHTAYALIKNQELFQNRLVLS

SEQ ID NO: 426006 - protein, 345 aa, unidentified
MDKIIRIGMDTSKHVFQLHGVNGEEKAVLRKKMRRKEMIDFFTTCPPTLVAIEACGGSHHWARLLTSFGHEVRMIAPQLAKPYVKRNKNDAADAEGLCEAMSRPTMRFVPVKTVDEQAALMLISVRTRLIANRTQLANAIRGYANEFGFSAAKGLVQIPPLLERIQADGSVPELAQELFISQAEEYAQLDRKIADIEAKVKAWQRNDERSIRLNTIPGIGPIGSVLLIMKTPAPELFQSGRQFAAWIGLTPKDHSTGGKLRLGGITRAGDEALRAVLVAGATAVIHHARRSGKASRWLAELLTRKPPKLAAVALANKMARIAWKLMVSGETYSAKSGPALTGCAA

SEQ ID NO: 426007 - protein, 343 aa, unidentified
MQTVTTVGFDIAKSVFQVHGVDVAGRVVIRRQLKRRQVIAFFQKLPSCLVGIEACASSHYWSRELQALGHNVRLMPPAYVRPYVKRQKNDMADAEAICEAVTRANMRFVPIKTAEQQSGLMLHRTRHLYMRQQTSVINAIRAHLAEFGIVAPVGRRGIEELLRVVADPSDKRLPEVVRVCVATLASQLLSLKKQILDFDRMIMAWHRSNQTSKRLNGIPGVGPLLSTALVASVPDPKTFRSGRNFSAWIGLVPKQNSSGGRDKLGSISKQGDRYLRGLFVAGALAVIRYAKIHGTRHRPWLTALLARRPTKVAAIALANKLARMAWAMMATGERYNYPASLKV

SEQ ID NO: 426008 - protein, 275 aa, unidentified
MAYYVGLDVSVKETSICIMDDKGVVAARTDVSTDPDLIARFISKHASEVERVVHESGILAIWLTRELEKRGVPIICIDARLAHKALSGRINKSDQGDAEGLAQLARTSWFTQVHIRSEASERVRVLIGARERLIRMRKDLEGHVRGVLKVFGICMTSVGTGKLRRDFRDQLAAAADTDPAIKMMSETFFPLHKTLCIARDALDDEVKTMARESNLARRLMTVPGVGPIVALAYIATLDDEKRFRKSIDVGAFLGLTPKRHQSGEVDWSGKISKMR

SEQ ID NO: 426009 - protein, 396 aa, unidentified
MVFWEDGRLRHAGRIDMTRTALEGFGKTLLASDEVVVEATANSMAVSRVLAPFVARVIIANPLQVKAIAQAHVKTDKIDAGTLASLQAAGYLPQIWTPDAETERKRRLVARRYQVVRHRTRLKNEVHSILHAHLIPKCPHADLFNARGRAWLGAQQLPHDERAAIDRHVRELDRLAEDLALLDREIAQDAIDDLAVNRLMTITGVNLAVAAGIVAAIGDISRFNSPQKLVSYFGLNPRVRQSGLGAAHHGRISKTGRSHARAMLVEAAWAAAKAPGPLHAFFVRIRARRGHQVAAVAVARKLTVLCWHLLTKGEDYLWARPALVANKTRAMQLQAGHPQQKGSRRGPAYAYNIAALRNREMLIAAQAERNYERMVSQWKPRRPKPGARAPQLGRTK

SEQ ID NO: 426010 - protein, 377 aa, unidentified
MKRILKIGMDVHSTNYTLCAMEPVIGAEDRVFANIQVTPDYKNILMFIENLKLKLGLEDTYDIECGYEAGCLGYSLYNQLTASGVKCVILAPTTMLTQQGQRIKTDARDAHMIAQCLSYGGYHPVYIPTEEDDSVKEYLRMRDDHKKALKKVKQQVNAFCLRHGYHYEGTKWTLAHLKWLKKLELSALYQETLDEYMASYDEQTAKIERFDARIEEIASQAGYADKVKKLGCFLGIRIHTALSLVVETGDFRRFAKGNVYAAYLGLAPGEHSSAEKINRLGITKAGNSHLRLLLVEAAGGICKGAIGHKSKELRHRQQGNSAEVISYADRANARMRSKYYRLIRHGKKRNIAVAAIARELACFVWGMVTENIEEKAA

SEQ ID NO: 426011 - protein, 387 aa, unidentified
MDVGCHSHNVAIGLSSGEILDEFEVSHNPEGFYLFFSRIEKQERVYDCPVAVAMEGFNGYARPLDTLVRARNYRLFNVNNMKLARFKEIFPGAAKTDRIDARKCLELFQLRDLLPLAKDALQEVAATPVENEILKRLTRRRRRLVNERARVLNNMQGDLQAVCPGLLETTGDAGNLWFLHLLTSTDSLIKLAKLRRATLLKIAGVGAKYANTIQTWQKRAHFSHEAELVGEMIQEDAFRILELTDKINAIEAKIEDVTSRSTIAQKIITIPGFGPVAKSELAAEIGTIDRFKDESGLALYLGMAALDNSSGRQKGTKIPKHVNTRAKAVMMVAVDRHRKCVPESQNYYEKKRAEGKKHNQAVRALGRHLCRVIFKMLKQEKDYEIRK

SEQ ID NO: 426012 - protein, 338 aa, unidentified
MKLYGGIDLHSNNNVVNILDEHDKVLYNKRLPNDLPTILTALTPYQSQIEGLAVESTFNWYWLVDGLMEEGYRLHLVNTTAVQSYSGLKYTNDSHDARWLAHLLRLDILPTGYIYPKEERATRDLLRKRAQMVRLSTTNILSIQNLFARNTGGSIRGDTIKRMSVEDVALLLPHEDHALALSCNLSVMQQCQKQIKILERIVLKRIRLRPEFQSLLTVPGIGQILALTIMLETGDITRFDKAGNFASYARCVDSKKVSNGKKKGENNRKNGNKYLAWAFVEAANFSIRFSDTIKSYYQRKSAKTKKVIAIKAVAHKLARACYYVMRDKVDFDVKKAFM

SEQ ID NO: 426013 - protein, 357 aa, unidentified
MTLIQRTTTEAPQGHMYYIGLDVHKKTISYCVKDVSGRVHQEGKLGATRCELDLWMRTLPQPWTVAMEATIFTGWIYDHLHPHATQVKVAHPLMLRAIAAAKKKNDRVDASKIADCLRCDFLPECHMASTEIRDRRRTLRYRGLLVRQMVQTKNRISGLLMETGVTYNKQRLHKVGYFRELLASNEEVNESIRPLLRLSRDTIARLQKTERALVSSLQRDPLLTERIKRLRTVPGVGPITALTWALEMGEISRFRSIRQAISYCGLCGDERSSAEKSIRTPISKQRNKNIQFVLIEAAKLAPRQDHDLALLYEREKQKGNANRATLAVARKMVAYLLAVDRGQRDFVTAEDGRCDAA

SEQ ID NO: 426014 - protein, 383 aa, unidentified
MLHDHPSVGPTAIRTQFGAIFVSLELSRSKWVLTSLSPGNGEKMSQYSLAAGDIGGLLARFADLKRRAKERTGSDYPVITIQEAGLDGFWVHRVLQDEGVESYVVDAASIATSRRRRRAKTDKIDGEALLRALLAFKRGEPRVCAMVVAPSPQEEDRRRLCRERQTLLEERIVHTNRIKGLLFAQGISDYAPLRRDRRKRLEGLNTGDGRPLPVHLKAQISRELDRLELLIDQIRSVEAEQEALLARERKAARPGSKTEPHNAVAMLLAVKGIGEHSAAILWSERLCRQFSNRRQVAALVGVAPFNRDSGKMRGKRAIYGGRRPVRHGLYMAALVAARHNPILRAFYLRLRAAGKPAKLALTATMRKLLIALNSALKPALSYA

SEQ ID NO: 426015 - protein, 359 aa, unidentified
MSQQPSDRSVIIGGVDTHKELHVAAVVDAHDRVLGTASFPTTRHGYKTMLTWMRSFGELSRVGIECTGTYGAGLLRYLQRAGITILEVTTPDKTVRRKRGKDDAIDAENAAHAAYAGVRTVTPKTRDGMIESLRVLKVCRKTAVAARRVALQMIQTQVVSAPEELRDLLRNMTRMQLLRTLAAWRPDLNGYRDVTMAYRIALKSLARRYLELHDEIADLDVMIKAIVDELAPKLVSRTAVGYETAAQLLITAGDNPDRLGSEASFAALCGVSPIPASSGKTQRHRLNRGGDRAANSALHIIAIGRLRLDADTQAYIARRVGEGHSKLEAIRCLKRYIARELYYVLRSRHREINQTQIAT

SEQ ID NO: 426016 - protein, 432 aa, unidentified
MSNRLQVGIDFSQKSADFGLFFPDGQPLEPHQAFDNSLIGYPLAKHLLLDALDTYAFDGLDVSGEATGYYWLPFFLQLAADPDLAPHDLNLFLLNPRWVHWFKKCFAQDDKTDAKDPFYIAERTRTRRPSATWAPHLDTLPLRFYTRLRFHLIEDLAREKCYLSAFLFLKASAYRRLKPFADVFGVTSRLVLGAWPTLDELAALPVADLAQQLHELSGHHLPEPLDNAGKLHQVAQESFRLPTALVLPVQRVLDLTLAHITFLEGQVSTVDAWITAEAQPQRDVLTLSTTPGIGPVFSSGLVAEIADLQRFLQGRKWDKPRKRFRPKNLRDAEDAVAKTAGLWWPRADSGDFEAEDRRMAKTGNRYLRYYFIQAANRMRLCIPEYADFYARKYREASKHKHKRALVLTARKSVGLVVGLLHRHEAYRPRKAN

SEQ ID NO: 426017 - protein, 363 aa, unidentified
MVESRTVTVGLDVHARSIRLAAVRADELLEERTLPYDEEAVERLLRRWPAVRCCYEAGPTGFGLYRHLVERGIECVVVAPGLVPQRPGDRVKTDPRDARKLARLHAGGLLEPIYVPAPEFEAARDLVRAREDARLDRMRDRQRLSKFCLRHGRLLPTTAWTVTRRAWLGQQQFEHAAQQLTFDTYLHAVDLVDHRIDALEQAIREAAEQRPWRQLVARLRCLRGVDTHTALALVVEIGDFGRFRSAEELMAFVGLVPSERSSGEQRRQGSITKVGNAHVRRLLVESAWHARRRPSVGYQLARRQRGQDTVVIERAWRCQQRLYSRWQRMAGRGKPHQKIVVACARELAGFVWAIATEQPLRST

SEQ ID NO: 426018 - protein, 406 aa, unidentified
MAQISEAVHCFKSFCLCSEGARYPFHLPKLRCVNDWVTKDCNARCARYDLFEDLQVFSAQFREIEKQSGNVSTWSGDTSYKSGLNGISLQVDTNDGDGPRRVSGSPEQHRLSVSNNPAGWAELIEQLRGFSIAAIGLEASGGYERGVVRVLLAAGLSVRQINPFRVRQFANASGVLAKNDRVDARMVASFVANIPTREVERPAPVLERLAEILRARRQLSNEKVSAENASKLLEDAMLQRLLRRRIARLAADIDTLDGHLVKIVGIDTALAHRYRLLTSMPGVGPVLACTLIAQLPELGQLSRKQIAALVGVAPYDFDSGKLKGRRCIWGGRSPVRHVLYMAALSASNWNPVLKAFHRRLTADGKLPKVVIVAVMRKMITMLNAMVRDNVVWAARVGERHTVPIAR

SEQ ID NO: 426019 - protein, 381 aa, unidentified
METSPAPAVPATDMEPATLFVALELSKAKWLVGLHSPTADKISRHTITGGDAPALLRLIEAARRRAEASLGGEVQIVACYEAGYDGFWLHRLLLAHGIANQVVDPASLLVNRRARRRKTDRIDLAGLLRTLMAWHRGEPQVCSIVRVPSLEEEDQRRRGRERERLVKERVQHLGRIKGLLMTQGIRDFQPARRGWQERLEALRTGDGQPLPGCLKAEIARECRRLALVDEMLEELEREREATSNGKAPQQAALLSKLRGIGPISAHVLAEEVFHRDFANRRQVAAYLGLDPSPWQSGQRDHEQGISKAGNRRGRRVAIELAWFWLQHQPDSGLSRWFKERVGTAKGRVRRIMVVALARKLIVALWRYLASGTVPEGASMRA

SEQ ID NO: 426020 - protein, 434 aa, unidentified
MSNLEKIIKNCAGIDIGSEKVFVAIEGEEVRSFRTFTSTYKELGVYLQEHGITHVAMEATGIYWITLYDILESIGFDVCLVNPADSKNLPGRKTDVQDCQWIQQLFSYGLLRKSFVPEDIVRKLRVYTRMREDKLQMASSHILHMQKALVQMNIRLPEVLSQTHGASGMAMIQAILHGERDAQVLLSLCTSDLIKRKGVDILLALEGNYKEEYLFELQQAYDAYIFYLNQVKLCDVEAEKILIEFKKKSSHNYKDDNRIKPIRHNKPEIKDLHDLLMGIHGANPTVLPGLTDYSLMRLTAELGNNIKQWPNVKSFVSWLGLAPGKNQSGKTNKRSKKKAMTRSGQIFKQAAQSLLVSKQPGLGAFARKLRARRGAAIAIKATARKIAELYYKTFSDGMQYVEKGIEMYLQKQKEQQIRFLTKKAVELNMQLVLV

SEQ ID NO: 426021 - protein, 425 aa, unidentified
MNYKQNEKINQVKESTLVVGIDIGSTTQYARAFDWRGIELGKVFTFSNSREGFEAFKAWMQRLQDKYRKSDVIVGIEPTGHYWFDLGAYLEDEGILLVMVNPYAVKQTKELDDNSQSKNDRKDPKVIAKLVTEGRYSAPYTPDGVYADLRIMVTNRKRLIREMTQIKNRFARWFAIYFPEYTDVFGDYEAQSSMLLLKKVCTPEAIVELGAEKINQIWRDAKLRAVGMKRATTLCETAKRSIGLKKGSSAAQYEMKLLLEDYEYKKAQLDAVIEEIEKLCRKIPESEQMLAIKGIGVITVAGFLAEVGDVRRFESPRQIQKLAGLSLRENSSGKHKGQTTISKRGRSKLRAVLFNAAIPLIATNPEFKSLHEYYTTRANNPLKKKQSVIAISCKLIRVFYAILAKGVTYDAQKLISDIHRQPQAA

SEQ ID NO: 426022 - protein, 343 aa, unidentified
MTEVSTIGLDLAKNVFQVHGVDVAGETVIRRQLRRRQVLPFFRKQPPCLVGIEACATSHYWAREIGALGHEVRIMPAAYVKPYVKRNKNDAADAAAICEAVTRPSMRFVAVKTAEQQSVLMMHRTRELVVRQRTMLVNAIRAHMAEFGVIARVGLPQVKELLTVIADPGDDRIPPLARTCLEGLARQLLSLEREISAAEQRIHAWHRANQASQRLATIPGIGPITASALAASISDPSVFRSGRELAAWIGLVPRQTSTGGKQRLGRISKAGDHYLRWLLVTGAMTVIRHGRRTNFAKRPWLGDLVARKPTKLAAVALANKNARTAWALLANGGTYRQPEITVA

SEQ ID NO: 426023 - protein, 345 aa, unidentified
MSEYEGKQFVGIDLHRRRSVIVRMTEAGERLETVRIVNDVERLASVMARAGQVPEVVLEATYGWYWAADALAELGAVVHLAHPLGVKAFEYRRVKNDERDAADLADLLRMGRLAEAWIAPPATRELRELVRHRAKLVALRSHGKAEVHAVLAKCGVQVSMSDLFGVAGSALLDRVELAAPYRARINSLCRVMGALDFEVDVFTRLSRNRLVRDPGYVAVQQIPGIGPVLAAVLVAEIGDVHRFTGPDKLACWAGLTPKHHESDIHVHRGRITKQGSRLVRWAAVESVQVLPPTTAIGAFRDRVAAHRGRNIGVVAAARKQLGHVYYALRDHHVRALARNPKACAA

SEQ ID NO: 426024 - protein, 456 aa, unidentified
MRKKQSPRIQQQNKRVLEQINHNAAGADMGAEAVWICVGEHASEDPVRVFGTTTVELRASAQWMVDVGVDTVALEATGVYWVAAYEIYQEYGLRTILINSRAIHNFNGLKKSDFIDCQWIQLLHTFGILQASLRPEKVMVELRGYMRQRRTLVEQCSEEIQRMQKALVLMNVRLDQAVSDITGVTGMKIMREIIEGERDAAKLAALRDPACAKSELEIAQALTGHWRDEQLFALEQSVKLWDFCRTLIAECDQKIEAVIQKVPVQPQAAESAPVKKSRAKARKNQVNFDGRTLLQERLGVDLTEIKGLDVLTILTVISESGIDLSRFPTEKHYASWLGVAPGTKKSGKRVLSARSRRTTNRAATALRLAAQSLLKAKSELGAFGRSLRARVGAEKAITAVAAKLAHRIYLSLRTGRVFADRGAEYHEQQHHDRYLASLHKRARKLGLQLVPLQQTV

SEQ ID NO: 426025 - protein, 411 aa, unidentified
MEAIIERAAGLDVHQGSVVACVILGTPGRRPSRETRTFGTMSRDLVALRAWLLEMGVTHVGMESTGVYWQPVHAALEGAFTLIVGNAAHMRNVPGRKTDVKDAEWTADLIRHGLVKASFVPPPQVRVLRELVRHRKALAGTLAAERNRTLKLLESAGIKLAGVMSDVFGVSGTLMLKALAEGVATPVAMAELARRRLRSKIDQLALALDSHLAEHQRLLLRLHLRRLEEIDRDLAEVEAAIIAAMRPFAAQQVLLMTIPGVNALTAAAIVAEIGIDMASFGTARGLAAWAGVCPANHESAGKRKQRGTRKGNTHLKATLVTAAISAAQAKGTYLRDKFHRLKARMTAKKAAMAIAHKILVAVFHMLQRAVTFAELGADYLDRLDKHRTAKRLVRRLDALGYEVMLRPKMAG

SEQ ID NO: 426026 - protein, 344 aa, unidentified
MRPRSRFQVVESKVECPFQNSVLMDKYTEIYGIDISKDVFDVMNTRGVHNQFFNTLKGFKSFIKQVKKGSLIVMEATGYYYYGLAQYLSSKGYLVAVVNPLSVKRFIQMKLSKIKTDKSDARSICGYACMNEVELYTARDKNQSECLQLLSLIDIYLKQSTQLKNKLHGEQTLGLPSKTVYHSLNRSLKSIKREIKVLEDQLTKLVQQDNQEQLSLLKSIPGMGDKTAMLLIILTSGFTKFETSGQLCSYTGITPTIRQSGSSIRGRSRISKMGNKKLRNILFLCSFSACKHNKACREIYERIVAKGKSKKLALIAVANKLLKQAFAIAKSGLPYDENFVSKLV

SEQ ID NO: 426027 - protein, 376 aa, unidentified
MQDSTFIGLDVHKATISVAVAQGQRGGEVRHWGSVSHRPDHIRKLVEKLAAGGGLLHFCYEAGPCGYGLHRQLVEMGHECIVVAPSLIPVKAGDRVKTDRRDAVMLAKLHRAGELTAVWVPDAAHEAMRDLVRARATAMRVTGKARQHLQGFLLRHGRIYPGKKGWTGAYRRWLATVRFTHPAQQIVLQDYIDAVADAEARVERLTGQIADLLPNWSLAPVVDAVQAMRGVGFIVAVTVVAEVGDFQRFETPRQLMAYLGLTPSEHSSGASVRRGGITKAGSGLARRALIEGAWSYRMQARVSPKLHARLEALPKAVRDIAWNGQLRMCQRYRHLVAAGKAKVVVITAIAREMVGFIWAIAKAVTATPEDKGVREG

SEQ ID NO: 426028 - protein, 310 aa, unidentified
MFVGIDVSKERLDVALRPTAEAWQVANDAAGIADVCARLTQSAPVLIVLEATGGYESAAAAALGAAGLPVVVVNPRQVRDFAKAVGKLAKTDRIDAQVLALFAERVRPEIRSLTSEAAQELEDLLSRRRQILEMLQAERNRLEHARGTVRRDVIEHTRYLERRLVRVDSDLDQRIRESPVWRAKEDLLRSVPGVGPVLSRTLIAELPELGRLSRQEIAALVGVAPLNRDSGRMRGRRSTWGGRARIRAVLYMAAVVASRRNAAIQTFYLRLRATGKPGKVALVACMRKLLVILNSMVRNNRPWDPALVPG

SEQ ID NO: 426029 - protein, 331 aa, unidentified
MFPVGIDVSKNTLDFCMLYDGIKGRIKTRNIQNNRHSVENILRWLRLQHCGPEDVHVVMEATGVYHERLATELHDAGFRVSLANPHRSREFARGMGIMTKTDKVDAYMLACYAFLKKPHRWEPPTPEIRYLGALLRRRDVLLGDALREENRLEKYLSTDTPADIISSCKRMAQLLREEVSNIERQIKAHIKACPALRRDYTLLTSIKSVGPQLGMHMQVVLRSHNFASAEQAAAFLGVVPIEKRSGTSVRSRPRMSKIGPPQLRAKLYMSALCGKIYNKRMRNIYDEMCLRGKPKMVAIGALMRKLVHWCYGVLKTGTVFNDESLKQVLST

SEQ ID NO: 426030 - protein, 430 aa, unidentified
MKSNTQNAKIEAITEKTLVLGIDVGSEMHYARAFDYRVIEYSKKPFKFSNTEAGFATFKEWVLDLKERHEKDKVVPGMEPTGHYWFNLGKFLQDNEMKPVLVNPHHVKKSKELDDNNPTKNDRKDPKVIAGLVREGRYMIPYLPEGVYADLRTASNIRFQLQAELTRIQNRISRWFNIYFPEYKTVYGKPDAKSGILILKTAPLPEDILTLGIDGVNQIWRDAKLRAVGKARAKTLIEAAEHSVGSKEGAVSARMEIRMLLEDYESRNTRLQEVMVLIEELVRKIPMAEKLLEIKGVGIRTVSGFLAEVGDISRFNNPKELQKLAGLALVENSSGKHKGETTISRRGRKRLRYLLFEVAMSLVSKNQEFRELHNYYTTRRLNPLKKMQSLMAIAAKLIRVFYAMLTKGVDYDPKKMVSDIKRPAVYLQAA

SEQ ID NO: 426031 - protein, 360 aa, unidentified
MFSERTSVGLDVHARSVVGHGIDQVTGEVFTSRLVPDGGAVMEWLAGLPGPTAVLYEAGPTGFGLARQLRSAGYRCEVAAPSKLRRPSGDRVKTDARDAEHLSRLLRLDDFTAVAVPQEATEAARDLVRCREDCRSDLMRARHRVSKMLLRHGVVWSGGHAWTGDHLAWLARQRFSQSVSQYAFEEALDQVLATVARRDRLDSRIEELAADSAWTPVVRRLGCLRGISTLTGFALAVEIGDWARFDGNSIGAYVGLVPSENSSGKSRVLGPITKTGNGHIRRLLVEAAWHHRPRYVVGKTLRGRWALATPAARARGDAGNRRLHSRWVVFQARKKRYNVATIAVARELAGWCWSLAMIED

SEQ ID NO: 426032 - protein, 386 aa, unidentified
MDGSKDKHDCFILNSEGEILSDVFTIPNSLDGFTILLQRIRDCSSSQDNIKVGLEATGHYSYNILGFLLDNGLPTYVLNPLRTNLYRKSLSLRKTKTDRVDARTIAAMLLSDAGLKPYTDTVYHNEELKSLTRYRFDKVKERAKLKSSVSRLVCILFPELEKLTPTLHMPSVYALLDEFPGAKQIAEANLTHLKAILHNASKGRYNRDKAIDIRESARASIGAVMSAKSLELRHTIRLIRELDAEIEDIEAAIQSIMNEMHSPITTIPGIGTRMGAMILAEVGDFSRFDSPDKLLAYAGMSPSTYQSGQLKNCYPHMEKRGSRYLRYALYNATKYVCLWAPTFAAYLAKKRAEGKHYNIALSHAAKKLVRLIFAMEKSRQPYCSAT

SEQ ID NO: 426033 - protein, 417 aa, unidentified
MAMKIVRFNCCGMDVHKNLVVATIGITDRKTNVTEYFQRSFSTLNSDLYRLKDWLRSHHCSDVCMESTGKYWIPIFNILEDEINVHLTHPKYVKAIKGKKTDKKDSKWICDLFKHDLIKFSFIPPKEIRELREIARYRYKLVCMRSSERNRYQNCMTVSNVGLASVVSDPFGKTASNIMKEVMKSNVIDDDKILKLVHRNCKNKDKILDSLHGYHIESDQRFKMEKSLDHMEYLDQLIDSCEVELIKRAYPLRRSFQHITQIKGISALSAILIISEIGIDMSQFESDKQLVSWAGLSPANNESAGKKKSVRISKAGQYLKPLLVQCALSAIKDKASYFGRKYSNIKKRRGHKKAIIAIARMMLVSIYHMILTGEEFQPTDHESLMSPKSNTDQSLTVEKALNFLKRSGIDISSILVN

SEQ ID NO: 426034 - protein, 320 aa, unidentified
MPQNGRIVGLDVAKLKADGCIRSLQLRLSQPSTPEGRAAMVAWLRANEVATAVMEASGGYERSWAEALRAAGIAVRIVDPKRVRHFAKSAGCLAKNDAIDAAMIAWFAETFPDTFAQPHDPDREELDALVTARKALVELVTQIGNPGEHRQPRAVRRAYAAILRNVATQLARLEAAIAAKLAATARFTARADIIESVPGLATQTAAGLIAWLPELGHIGNKAAAALLAAAPYDDDSGKHKGERHIKGGRQEIRDLLYMAILGAATKHNPVLKAYYQRLRAKGKPAKVALIACMRKLIVILNTMLARGEKWDPSRGAATLA

SEQ ID NO: 426035 - protein, 340 aa, unidentified
MNVIIGIDPHKATHTAVAIGCDEAELATVTVRATKQQTDQLLGWAEPFRKRTWAIESAGGLGYLLAQQLVDAGEHVLDVPATLASRVRVLGTWKSDKNDPNDARSVAIAALRSPGLRSVQPADHADVLRLLAKRNEDIGNLRTKLVCRLHAQIASLAAGGIAKELNASDADGLLGVFEPSSPAETIRHQLALELLEDVRRLDDQLKESHKRMKIAVRASGTTLTDVYGIGPVLACSLIGYTGDVTRFKSRDQFAAYNGTAPIEVSSGGRVTHRLSRRGNRKLNHAVHMVAICQIRQTHSEGRAYFEKKVADGKTKKDAIRSLKRQISNTVYRHLVLDAQR

SEQ ID NO: 426036 - protein, 359 aa, unidentified
MEQIKELDFSGQRIWVGIDVHLKRWRVSIMVGDLYQKGFSQAADVQQLINYLHKHYPKGDYVCCYEAGFSGFWAYEELVKAGIACKVAHASDIPTTDKEKRQKTDPRDSRKIVRELSKGGIEGIYIPHQEALQARSLVRARYKIAKDSQRAKNRIKSHLHFYGYHRGIPAELGYWSKRYINYLSELASNKQDRGLALLIEELNQLRQLQLRAIKQLRQLSRCAPYQELVVLLKSIPGVGLLTAMVILTELIDINRFKKLDHLCSYAGLIPQTSSSGETQRVGAMTKRGNTQLKKALIESAWVAIQRDPALALAYQKAKNRYASNDSQAKNKAIVKIARKLLNRIRFVWQNRQKYETGKP

SEQ ID NO: 426037 - protein, 407 aa, unidentified
MFSARNSSPLTYTFYEPQIESKELGRALHPRKGTRAGHQKRWFVSVLSATVTKTDHPMNPLKQVVGIECAQNELVCRFGELTPDLESIRKASKTYPNTVEGIAALIKWADGLGSGTVAPLFVVEATGIYHQKLAYGLYHRGRPVVVVLPSRASHFAKTLKVRTVTDSSSAEALMHMGLEKNLDLWQPPDPVFARLKGLTRERKRLKDEINRLKNQRHADEGAVESLPETLRRIDQRLQLAEKHIGAIEQQIQALIAEDEQLTRRFGYVCSIKGVGLMTAATVGGEADGFSMTRNARQLVSYAGYDIVEKQSGTSVKGNARISKKGNSYIRRALYFPAITAARHDQHLGDFYERLHGKHNIKMKAYTAVQRKLLVLIYTLWTKQEPYDPNYQHKKVEQPVPAAPHELT

SEQ ID NO: 426038 - protein, 377 aa, unidentified
MKRIKFVGLDVHAETMAVAVAEQEGEIRSLGMIPNREESVRKLVKKLGPVEQLRFCYEAGPTGYALYWQLTRMGAKCEVVAPTLVPMKAGDRVKTDRRDALKLARNHRAGELTAVWVPDAEHEALRDLVRAREAAKKDQLRARHRLSKFLLRHGRRPPVGVTLWTVKYLEWVKRDVHFAMKAQEATLLDYLHEVEHMAARIVRLDSAIEEAVKVAPAKMRAVIAGLQALRGIAQISAVTIVAELGEVTRFTRARELMGYGGIVASENSSGERQRRGGITKTGNAHLRRVVVEAAWAYRHRPAIGFTLRKRQEKLSEEVQEIAWKAQHRLHARFGKLMAKGKNKGVVVTAVGRELLGFIWAIGVQVKAEQKESLRQAA

SEQ ID NO: 426039 - protein, 677 aa, unidentified
MRRSAELIGIDGSAYRVDDIRDAKTHTSVKVTRIAQEIHCPECRCKTHAHGSTTATVYHAPYAGKPCLIALKKRRFRCPMCGKTFTEDQPLLCRLTPHVSTRLEAFILDELGKGKTIAELERITGASKNILTKLEANAQMPKHYLPHNLCIDEVKAFPKRIAIRKGEPHMASCIYDADEKTLVDMLAGDDPKTVTAYLESFTKGERDAVATISCDLNGSYISLAEKYFPGAVIYADKTVCPERQDLGDHRPGKKGPPAQTGCDNEIPVSECGAQERAAVEKEDPLMTKYAVESEYCSVFGMDVHARTTTVKGLDRSTGETATKRFNDAPSPAVIASWMKQSFAGPWYAAYESGCTGFHLCRELRREGIGCDVVAVSSIARSIDDKQRKNDSRDAARLLSELVSMEKTYTAVWTPDPETEAMRDLCRARVAAVDAVKVAKLQTSAILLRHGYVWNEKTPDGTLKNSWTKNFVAWIKSADLGNACADEALTFSLRAVEEGTERVKDLEARLDALCDLPRWKPYVDAISLLRGVGKLTALTLACEIGSFHRFRSGRDVSKWLGTVPSHSESGGKGHHGGITKAGNAVCRTLLVEGITGSGRYKYKDSKVLRAGQVVSPEVKATCRKADRRLAKRRQHLSEQKKHPNKVKIAIANELIRWVWAIGCMVEDEQAPHVASRPA

SEQ ID NO: 426040 - protein, 318 aa, unidentified
MKTQQATEFVGVDVASDHLDVAVHGQPTVRRFANTIQGIAQLLRMVPPSSVLGLESTGRYHTQLAMAAHAAGLCVHVLNPLDARRYAQSVGQRGKTDRMDALVLARYICHEHAHLQQWQPPTACQAALRELLAHRATLVRQRSALAQAGCHNKALARLDEPVLAAMQQAIAQIDEQLASTVQADPASQEAFEYITSVPGLGLVCGSLLVMLFGRMQTRSADAVIAFTGLDPRPNDSGKKTGQRRLSKRGWPEIRRLMYTAAMSAARTKTWNSFYRAQRDKGMSTTAALVVLARKLLRVAFSLFKKRVKFDATLVAASA

SEQ ID NO: 426041 - protein, 409 aa, unidentified
MRYYIGVDWADAEHAVWVADEEGQRVSATMVPHSAVGCSEWGRQLDEWRAQGIGLWAAIERPEGRVVDFLLDHGVRVYPVNPKALDRARDRFRQSGAKDDRFDARVLAGFLRTDHAHLMALEPSSEAAQELKLLTEDYQRQVRAQTRLVNQLTATLKAYYPRALEVAELTTALAAAFLQAYPTPAPLLTLTERQWQRWAKAHHLSAARTTELWSRLKAPQLPVPAHVVRAKSRLMQALVTELAAVMAAVARYRQAIDDFFARMPAAGWARTLPVGEHGVTVPTLWGRLGDAPGRWQSFRHLQAQAGMVPVTVRSGKQVVVAFRFACDKQLRYAVDQVAWLSLPRSEWARAYYDEQRARGHRHRRALRALGAKWLKIIFMMWQRHVPYSEEHHLATMARQALRHPEKRIA

SEQ ID NO: 426042 - protein, 365 aa, unidentified
MTTSMPQPTLPTQPEDPPTEDVVLGVDTHKDVHVAAVITVLGGMLAHQEFPATAAGYRQLLAWACSFGALRRAGVECTGSYGAALARYLKREDVQVVEVNQPDRAIRRKRGKTDAVDAEAAARAVLSGRADVIPKTGEGPAADMRVLRLAKESAVKARTQAKNQLKAVLLGVDPELREALSSLSNTALIATCADLPDGDDAAVFTLRLLARRIQQLTAEVKELARRTTKAVRCWHPQLLDVIGVGPDSAAALLIAAGDNPERLASEASFAALCGVSPVEQSSGKTQRRRLNRGGNRQANAALYRIVITRLRRDARTRLYLERRTKQGMSKREIIRCLKRYVAREIYGQLQPPSPPLCRLLPLDAT

SEQ ID NO: 426043 - protein, 342 aa, unidentified
MRVVGIDTHKATLAACAIDDVGVVLGEATFANDPAGFGAVLAWLHEVGSIERIGLEGSAGYGAGAARYLLAAGEAVVEVPPQLSHRERLRTRRAGKSDPGDALAIARVTQREADLPPVRLPDASRELQLLVEAREDLVAEATRVRNRLHADLVVLVPGYSAVAANLVADKYRRHAAGLLRRRPGIQAELARDRLGRLDRLSREVRQFERRIERLVADHPLRSLWGAGPLVTAKLIGETGDIRRFRSADAFAMLAGVAPIPASSGQTSRMRLNRGGNRQLNRALHGIALAQVRTYPPAQAFVARKRAEGKGWFEALRALKRHLARIVFRLLSQALSQAPSSGA

SEQ ID NO: 426044 - protein, 371 aa, unidentified
MVKIAKYVGLDVHKDTIAVASCTGGPGGAARDEGILPHDVSKLRRKLLSLAPAEHLHVVYEAGPTGFGLCRDLKAHGISCIIVAPNKVPLMPGPRVKTDKRDARHLAWQLRMGTLAGIALPDEELEALRDLIRAREDALHTRRRTRQQLGGLLLRHGARWPGKSTWSVKYLEWVHSLRLGSEAQELAKQQYLGEVKHFDERIELLTEQIERLAGMLRDEHGELYRALQALRGVSTIVAATLVCELGDLRRFGTASQLMSYVGMVPREHSSGARVWRGSITKAGNPHVRRVLIEGAWSGRLKPAMPERLKHRQQGLDQAVIDMAWKAQKRLYARYCRMRTRGKPQNIAIVAMARELLGFIWSIGQQVGRKSA

SEQ ID NO: 426045 - protein, 431 aa, unidentified
MVKRNKSIHRRNIKFKTEVSKTDKSRILGVAIDTSKSFHRVLIFNFLGKIIQEPFSIDTLQSGYVTLIKKIVASQKKIKAQKTFIALETPAKYTDNLVYHLRKDFGLVCFVSPFEVSENRSQRTFVHVKSDDIDTSSVADLLIHGEFTEYIPLKPTAIKLKTLIHWRDQKLKIRTILKHQIEHRVARILPGLNTTFDGHKKVYGHAYESQLHLGLIKLNKTAQDIMKLDNRLLRDKFGYQNYSRGSYHIKKLKNRLDEMLLPEERSTRIELEFLKKDFALYEMLNEAIANAEKEIISLGYETEAKYLFNQIKGIGELSASMYVGLVGNIERFDSAKKIYSYAGLSPRRYQSGGDTKQSLGIKRHGNKLLRSFLFRLSTTIIKCNPKFNTYYKNLRQNGKSWKESIVIVAKRLNNILFALIRDKSTYEESSR

SEQ ID NO: 426046 - protein, 414 aa, unidentified
MESGYRLIVGIDWATETHQVCVLNGQRRLLEQGRVEHRAEAIAAMIDRLIGLAGGDPASIAVGIEVPRGAVVEALVERGLHVFAINPKQLDRFRDRHTVAGAKDDRRDAFVLADSLRTDLSAFRRVHLDDAWTIQIRELTRIEENLNTEITRLANQLRDLLLRFYPQLLRLCPAADQPWLWALLKLAPTPAKAQKLRRSTIQRLLHQYRIRKWTADQVRTELRTAPLSVAPGVTEATSAHIALLLPRMELLMAQHKLCAKAVQTALNERISAEEQRREHRDAEIILSLPGVGRVVAATMLAEASQLLAQRNYHALRTLGGVAPVTRQSGKRWAVRRRYGCNRRLSNAFYHWARVSSQCDPRAKHHYQSLRQIGHSHGRALRGVADRLLALLVAMLRDQTLYDTTRAHAPKPIAA

SEQ ID NO: 426047 - protein, 342 aa, unidentified
MEQVTIIGLDLAKRAFQAHGATAEGQVAFRKKLSRGQVLAFFASLRPCVVAMEACATAHYWARELGALGHDIRLVPPAYVKPFVKRQKNDAADAEAIAEAASRPTMRFVEPKSPRQQARAMIFRTRDLFVLQRTQTVNALRAHLAEHGLIAPQGLSNLAGIERLVEESATDLEPLVAETARIYLEQINDLTGRIVKMEATLQQEAAQSDASSRMITMPGIGPITAMAIEAFAPTLSVFKRSRDFAAWLGLVPRQHSTGGKQVLGRTSKMGQRDIRRLLIIGAMSVIRWATCKGTIRGTWLHTMLQRKPRKVVAIALANKMARALWAMETRKENYRDPRLAAA

SEQ ID NO: 426048 - protein, 362 aa, unidentified
MQIIGCDLHTRQQTMAMVDTTTGEVVEKTLMHEASNVREFYSTLSGPVRVGIEATGSMQWFVNLMEELGIECQVGHPAKIRAAEPRKQKHDRRDADLILKLLLENRFPSIWLPSKELSDLRALLLHRHQWVRMRTRIQNALQAIALANGLRRGPSLWSQAGQCTIASLPLAPHTAHRRSELQAMYVKFEAEIEKLNQRVEEQACERPGARLLMTHPGVGPVTALATDVFLGDPTRFADGKALASYVGIIPSEYSSGGRQRLGGLSKQGNPLLRFLWCEAAVHAVRRDPELQRFYRRKLIQKGLGKARVAVARKLGIRLWIMLRDQIDYNEFCRRGQMRQKNGDACAGMPETRYGANSHRPVD

SEQ ID NO: 426049 - protein, 420 aa, unidentified
MAPLSNQQFKAFVGIDWADTKHDICLQQAGDDRREFDCIPHQVTRINEWAKALHQRFGGPIAIALELARGPIVSVLQKHAFFTLFPINPAMLAKYREAFKPSRAKDDPTDAELALDLLLRHPERFSPLRPQSAGMRSLLSLIEQRRELVGDKTRFTNRLTNALKQYYPQTLEWFEDIDTVLFCDFLTRWPTLPAVRRASRKTLETFFHAHNCRRAKLVEGRLESIRCAVSLTDDPGIVAPHRLLALMLVAQLRTALAAIDVFDKEIATVARTLPDFDLFDSLPGAGPHLTPRLLAAFGEQRDRFKGADELQKYSGIAPVTERSSKKCWAHWRWQCPTFLRQTFVEWAGQTINKSFWAGAYYRQQRAKGSSYQAAVRALAFKWIRILYRCWQTGTRYDESVYLNALRKRGSSLLRNLELPG

SEQ ID NO: 426050 - protein, 441 aa, unidentified
MAMRKRDDDLVFPNAAGIDVGGSSHWVAVPRHSCEEAVREFGAMTDDLNAMADWLLACGVDTVALESTGVYWIPVFEVLEQRGLTVFLVDARQMKYVPGRKSDVQDCQWLQRLMSQGYLRAAFRPTDEVCVVRAVARQRDVLLAEQASWVQRMQKALVQMNIQLTEVLSDVMGLTGQAIIRAIVAGERDPKVLARHRHSRIKASEHDIAKALTGNWRDEHLFMLRQALAIYDDIARYLGECDAKLQGLLSALGCARVDLGKTPRAGSKTRAEFDARQILANWAGVDLTRINGLGLSAVLKILSEVGPDLSRFANVKHFCSWLGLCPGTKISGGKVLSSKTKRSGNRIRQALKMAAMSLSHSDSALGAFYRRLSGRMDKPRANTATAHKLARMVYFMLTRGEAYVDQGQQHYEEQQRQRSIAALKRRATALGFQINPTPVPA

SEQ ID NO: 426051 - protein, 390 aa, unidentified
MDVLYQSCAGIDVHQANIVVCILHGPLTSTRPKREMATFDTTTKGLRACHDFLSQFHVEAVGMESTGVYWRPVWHALCDDFKLILAQPAHMKAIPGQKTDKKDAHWIAKLTRIGLLPRSFVPDETIQELRELTRQRKHYVESRNRETNRIHKILQSGGIKLTTYIEDIMGLSGRNLLQLLVDGTPITPRIVHQSVYTSLKKKVPQLLEALDGYFSDHHRFMLKQSLEIYDFYQKQIELLEERINVYLSQYENHVEILDSIPGIDVITASVIISEVGVDMSQFPTAGHLASWAGLCPGNNESAGKKRSTKIRHGNSYLKKCLCQAAFAVKKQKGSPLADRFYQIQSRRGSQKATIALAHQLLKIAYILLKEQITYPEFLAQKKTTRDELVA

SEQ ID NO: 426052 - protein, 372 aa, unidentified
MVQDRPLPGAIGGPVRQPDLHHLSPVEPEQSLGPVEAEPVFTRKGDPTVQPNFNSKCWVGIDTSQDWVDVVVLIQERVAERKRCDRTAEQLEELAKHLLTLAPQGVILEPTGGLEAPVIAAAVAVGLPVMRINPKRIRDFARAHGLLAKTDVLDAYALALFGARMQPPLRPLPEAERQRLMAWVGRQRQLTDMRAGERNRLRRTDDPKLRASIERVIVFLGEELEQLQQQLRSWVVESETWRPQAELLRSAPGVGEKTSQVLLAYLPELGQLNRRQIASLAGLAPFACDSGQWRGRRQIRGGRSVVRSALYLASWTAVRTAPVFRDFYLQLVARGKARQLALLAVARKLLLVLNEMVRTSSPWQPLLSPSGA

SEQ ID NO: 426053 - protein, 356 aa, unidentified
MSYYAGIDLHSNNNYVGIIDEVNAVVLRKKLTNDLGKVLQVLKPLKDQMAGIVIESTFNWYWLVDGLMENGYQVELANPAAIQQYRGLKQIDDQRSALWLANLLRLGILPTGYIYPKEERPVRDLLRKRLQLVQQRTAHILSIKNIISRSLGIRMKSDEVKKLEARQVKKLFPEEHLYFSVNASVTLMNQLNQQINRIEEVTKEKVRLRKEFKGLHSLPGIGDILALTIMLEVGDIHRFKEVGNYSSYCRCVKSTRISNNKVKGEGNRKNGNKYLSWAYVEAANIAKRFYPLVNRYYQRKAAQTNKVVAIKAISHKLARASYYILRDQVTYDGGKLFGGYGGKAEPVLGLAYNHKT

SEQ ID NO: 426054 - protein, 339 aa, unidentified
MRVRKHELRAGIDVSAKTLAVAWRTLKGDIEQSEVANDGDGHAKLVGLFKARRASARVVLEATGNYSIDLAIALCDAGIPVMVANPLATRRFAEAKLRRAKTDRIDALELLDFAERMEFVPWIRPAVAVMQLRDFSRRISALGDDKVAEENRLHAARAKDGIPDMILADIAESIAAIARRIDHLTQAAVALMQGDTELQAALDVVTSVHGIAERSAVRILGELMSLPADMTPRQVVSHAGLDPQTFESGTSVKKQTRISRKGNRALRASLFMPTLVAVQHEPTVREAYERLLAANKPKLVALTAISRRLLQALWIMLRTNTRFQAEKFGHNKPPRLRAA

SEQ ID NO: 426055 - protein, 428 aa, unidentified
MSEAVVEAAAEFAALVGLDWADQKHDVALLEAGAARCEQGELTHTPEAIDAWACELRQRFGGRPVAVCFEQTHGAIAYALLKYDFLVLFPLPPARLTKYREAFTGSGAKDDPTDAALLLDYLRRHYDRLRAWRPDSPETRELRLLAEYRRDAVDQRTRLSNQLTAVLKLYFPQALVLVGGEVSTPLAGDFLSRWITLDSAQKATPDALRKFYWAHFCRSAPRIQERIDLLKSALPITNDQAIVLSSILRVRCLVGQIRALGKAIGDFELRIRQLMQQHPDAALFEGIPGAGDALAPRLLVAFGSDRERFGSALELQTLSGAAPVTKRSGKRCTVHRRWACPKFLLQTFHEFAGCSVPRSVWAAAFYHQQRAAGKGHHAALRSLAFKWIRVLFRCWKTRTPYSEARYLECLRKRNVPLLKFLKPATTGA

SEQ ID NO: 426056 - protein, 336 aa, unidentified
METKFVHFAGVDVSKQKIDVCVIVNNQRSEIVHNQFEQSKKGFASLKKWLVQVTARQTGKLLICVENTGLYDDALMYYLSDHDLGVSLENAANIKRSVRDHRGKTDKLDARNIALYALNHHDELRLWERPRKQVALLQQMLSERSRLVNALKMLKQAHTEQQVFSWSGRVQSKSYQSGIKGLQKDIEQVEKDVWELVKSDKELLQMFMLIVSIPAVGKITAYHFICYTNEFKQVKSGKQLASYCGVVPFERSSGSSVKGKPRLPHQANKILKKLLHLCAITAIKMKGAFAAYYRRKIEEGKNGLIAINGIRNKLVLTIAAVIRNNEPYNENYIYKP

SEQ ID NO: 426057 - protein, 343 aa, unidentified
MGEVSTIGLDIAKHVFHAYGADAQGRGVFSKRLTRAKVLTFFATQPRCTVALEACGGAHHWARELMALGHTVHLIPPAYVKPFVKRHKNDAVDAEAICEAAQRPTMRYVAVKSAEQQASGLVFRTRDLLVRQRTQLINAIRGHLTEYGWVAPKGPTHIATLGHLLDEEAITALPPAAVSMFRVMLDLLSELDDRIADLDREIARRAREDEAARRLMTIPGIGPITATALIALAPEAENFAKGRDFAAWLGLAPLQRSSGGKQKLGRISKMGERTLRRLLIIGGSAVVRQASRTGAAKGSWLDQMLARKSRMVVTVALANKMARIVWALLAKGGSYRAPAVAAA

SEQ ID NO: 426058 - protein, 363 aa, unidentified
MKKVSKVLRQTEVGHAKPEMTMGLDLGDRYSHYCLLNRDGDVVEEGRIQSTEAALRRHFEGQPELRIAMETGTHSPWVSRLLTELGHQAIVANARKISAITASVSKNDRNDAELLARFAAHDPKLLSPVKHRSQQRQQDLNPIHVRATLVRARTLLLNALRGLVKSACGRLPACSPEAFPRRVPSSVPAALAASTAPLIEQIALLNGQIGGLDRQIEKLAAKYPEIGLLRTTPGVGPVVASACVLTLDQPGAALSNRSAGAFLGLRPAQSQSGESDPQRRITRAGDNYLRSLLVQSAQYMLGRFGPDSALRRWGLKLAATGGKRAKKRALVAVARKLAVLLHSMWRSGKSFQPFPQPAQTAAA

SEQ ID NO: 426059 - protein, 400 aa, unidentified
MLSIGIDVSKGKSTVCGMKPGGEIVYAPFEVQHTREGMSELVSLLRSSGEEVRAVLESTGSYHCPVVAALLENGIFVSVVNSLRMKRFCSQSIRKVKTDRIDAMQIALYGLAYWQELQPARLPEDTYRELQLLARQYYQMTSLLIKAKVDFNAICDQVLPGMQELMNDHAGRHKLSDFVLRYRHTTHILEMGETRFRKDYCKWAEKKGYRNCERMAALIFATAQNGIPVLPNAPSTQIVITEAIRVLHTVEASRDAILTQMQALAKTLPEYSLVREMPCIGDTLAPRLIAEIGDVRRFHSKRALIAYAGIDAPPYQSGKFCANNRHISKRGNRYLRKTGYEVMQSYVMHKPANDPIFTFIEKKRGEGKSGKLAMVAGLNKFLRVYYGKVTELYRSLPAIE

SEQ ID NO: 426060 - protein, 429 aa, unidentified
MSYRIAGIDVHKKMLAVVVCDVEIESEYEFERRKFSSSPEQLRSLAAWLLEQEAEEVVMESTAQYWKPVWEALERYWKPLCEKREGARRKSGTLHLAQALSNRGRRGRKRDFPDAERLVKRLVARELTLSFVPDAEQRLWRTVTRKKYQLRCDRIRLQNQLESLLEEAHIKLSSLVSDLLGLSARRMLKAIAEGETNPAALAALADERLRATPEQLCDALGACTELNAVYRRLLKMALEELRLIDEQIGRLDQEMASLLSEHQDAVQRLAEVPGLGVDSAQQIIAEVGPTAATFPSEKCLSSWVGACPGDDESAGVNYSHRSPKGNRHMRRLLNQAANAAARTKGSIFELAYRRSVPRLGHNQAIGVIAHRQCRLIWLILHQGVRYEERGPAVGKRSKQLRTWRMIRQLRKLGYRIEPPNPQPSQASAQ

SEQ ID NO: 426061 - protein, 355 aa, unidentified
MLYLGIDQHARQITISLRDESGDVLEARQVSTQPGRINAFFEQLTRQRLRKGELFVAVLEVCGFNDWLIRMLKDYRCHKVILIQPYDRKKRKTDRRDAAALSELLWVNRDRLLDGKPVRGLRQVDVASTSDQENRRLTTLRKEIGQARTRLINKIRHMLRRHNMQWEMPTKTFPTQAAIAWLKKITLPAIDRLEMNYLLVDLQHVEQRVKELEETIAQRCGASEDAVLLSSMPGVGCFTATGLASRVGRVERFPRAHSLANYWGLTPGCRNSGENNQRLGSITKAGSGMARWLLAQVARNALQKDARLREWFKRIKRRRGASIARVAAMRKLATIVWHMLSKRKTYKECRALAAA

SEQ ID NO: 426062 - protein, 342 aa, unidentified
MKDTMIGVDLAKNVFVLHGASMTGHVKFRKKLSRPRFRQFMAEQPSAVVVMEACGGARHWAREMIRFGHEVRLIAPRYVKPFVKRQKNDAADAEAIVVAAQRPEMRFVEPKSEEQQAKAVLFRARERLVHQRTDLVNALRAVLYEFGLVVPQGIRHLTRIEEFIVEPNGDLPELVRAECRDLIDQIMDKSSRIETKTARLREMAKQNDEARRLQTMPGVGPLTALAIEAFAPDMANFKCGRDFAAWLGLVPRQRSSGGKERLGRVSKQGQSDIRRLPVIGAMSRLNRLGRKSIPEGSWLARMLAKKPRMLVAIALANKMARAIRAMLTRNENYRNPDPAMAA

SEQ ID NO: 426063 - protein, 377 aa, unidentified
MTAVLQSEDNASEAVMYMAMELSDKRWRLGFSNGEKQRQVSVVAGDWVGLNEQIDRSRERLKLARGCRIVSCFEAGRDGFWIHRALVEQGIENLVVDSSSIEVNRRKRRAKSDKVDVKSLLRLLQRYWGGERGMMSVVRVPTVEEEDQRCLHRERERLVKERGSHSARIKSLLVSHGVRLDIRSDFLERLEAAKGGLGYELGLDFKAELVREYERYCLVDRQIKELEGEQKARAEAGLSEAMKQVNGLMLLKGVGWQSSWVLVMEFFAWRKFGNQRQLGACAGLTPTPYSSGDGEREQGISKAGNRRIRHLMVELSWLWLRYQPGSALSQWFAKRFAGGGKRMRRIGIVALARKLLIALWRYLKEGVIPEGAILKAV

SEQ ID NO: 426064 - protein, 462 aa, unidentified
MNRKKQAGKAAKGSAQKKVDWKALEIVHPDAAGIDVGGSEHWVAISPDRDPEPVRRFGCFTADLHEMARWLIEKGVRSVAMQSTGVYWMPVFEVLEQHGLKPFLVNAQHTKNVPGRKTDVQECQWLLKLHAFGLLNNSFQPTDEIRVARTLWRHRGDLVAEAGSAVQRMQKVLTEMNVQLSNVLSDLSGVSGMKIINAILEGERDPQVLAAKVMPGVKATPEDIVKSLEGNWREELLFLLRQHLELYGTYQEKISDCDLQLRKHLESLGSKVDPIAQPLGERPKGKKIARNAPGFDLRSELYRISGVDWSQINGIDVLTAQTVMAECGADLSAFGSEKQFASWIGLCPTNEQSGGKILNRRTRKVVNRATVAFRNAARTLLRSQSYLGAQYRRLRTRLGAPKAITAMARKLACLFYRLIRHGHQYVDKGTEYYEARYREQQIRSLTKRVQKLGLELFISKIA

SEQ ID NO: 426065 - protein, 369 aa, unidentified
MGKASTFVGLDVHKNSIVIALLRPGQATPLEWKVRNEPGAVHRLIRKLEHEDGVQCCYEAGPTGYVLKRQLDRAGICCQVIAPSLIPVKPGSAIKTDRRDARKLAELLRAGMLTEVQPPTEDEEAVRDLTRSRDDAQRDLTRARNRLSKFLLRRGCVYAIDRKPTWSQKYRSWLQALRFERVADQVIFEDYVLAVEQVEGRLEALTDRIEHFAEQEPWRERVQALRCFHGINTVTALALVAEIHDPRRFAHPRRLMSYLGLVPRESSSGMRERRGGITGAGNRHVRRLMVEAAWHYRHKPVVGRALRLRRREQDPKAIALADRALRRLTLRQRRMLYQGKHPNLVNIAVARELVGFVWNVLHTRATAQA

SEQ ID NO: 426066 - protein, 347 aa, unidentified
MKKTIVGIDLAKKVIQVCVVRANQIVSNDEMSPAQFTSWLATAKPVIIVFESCATSNYWKQVAKEKGHDARIISAKLVSQIRQNQKTDKNDALAVVQASQLVDIKFINGKTFEQQELQSIMRMRELAVKHKVALRNQIEALLLEFNIRISPRNGGLGGTIQSVLEDGENGFCMPFRQALDATWNLYLQTVENIAEKDKLLAQAIKLHPECEKLLALEGVSTINAVNLYIAIGCGEAGAFKAGRDASACIGLTPLQHSSGGKTKLGSVGKSIKNVALRSYLVNGAMSVVNHVDKREPKTKKEKWLKQLLERKSKKCAAVALANKTVRTAFALLTQGTEYKAEPLVASA

SEQ ID NO: 426067 - protein, 429 aa, unidentified
MRTESTPGARGPVFCGVDTHADSHWLCVLDWRGRKVLSRQFPADAAGYEALAGAIAAAGEPACVAMEGTSSYGAGLTRHLASLGMPVREALSPARMQRRRPGQGKCDEADAERAARTAMSGSKLGTPKSQDGWVDGVRCMLAARSGAVKARTSAINTARSLLTTAPEGLRSRFRGMGGPRLMEELPSVRAEGALGAALGALADLWEAARDAALDMERAIEASLEENCPALLAMYGCGPVSAAKLAVAAGDNPGRLRSEASFAAICGACPIPASSGKTVRHRLNRGGDRQANSALHEIARQRVMRDPETAEYAERARGRGKSDREVMRCLKRYVAREAYRALMHPHEIRRPGDASELVAARRAAKVSQVRAASILGTSEKYISMLERGQRELKPIRRAYEAWVEAGLPLDWDRRAFEAERKMDSKKHLAK

SEQ ID NO: 426068 - protein, 363 aa, unidentified
MFTERTSVGLDVHARSVAAAAIDGVTGELVQSKLTPSYDHIRSWVQALPGPVAVTYEAGPTGFGLHRALAAAGIRCEVAAPSKLQKPSGDRVKTDAKDAVHLARLLRLDEITSVAIPSVDQEAARDLVRAREDCRGDLMRARHRLSKLLLRHGIVYFGGNAWTGKHDTWLRHDAVKLLTPRATRMAFDSDYETVLAVKARRDRLDVAIAQMAAESEFTDLVHRLGCLRGISTLTGFALAVEMGDWNRFTGSTIGSFVGLVPSEFSSGSSRVQGSITKTGNTHVRRLLVEAAWHHRPRYVAGKTMRDRWDLAPAQARSRGDAGNRRLHQRWVKFTERRKRPTIANVAIARELAGWCWSLAVMDQ

SEQ ID NO: 426069 - protein, 351 aa, unidentified
MSHKTAATIAHTIGIDTGKNTLHLIGLDDKGAIVLREKVARDRITVRLANVPQCLIGIEAGMATHYVARELSALGHDVKQVPPAYAKPFRQGHKNDFRDAHAIAEAVQRPSTRCVPVKTDDQLDLQALHRVRSRLVGQRTAVINQIRSFLLEHGIAIRQGLRFLRQQLPAILAKRSDVLSPRMIRIIEDLSGDWRRLDERIEHITAEIEVLAQGSESCRQLMTVPGVGPIIASAMVAAIGNGTTFAKGRDFAAWLGLIPKQMSTGDRTILGRITKRGNRYLRTLFMQGARVILLRPANWMKHSFGPWLTAAAQRLHHNVLATALANKLARITWTVLAQGRSYEARVEPKTT

SEQ ID NO: 426070 - protein, 371 aa, unidentified
MDHHSVAYVGFDTSKTKHAIAVAEGGREGEVRYLGEIEATPAAVERLLGKLERKYKTLHVCYEAGPTGYGLYRHIRALGYACDVIAPSLVPKRPGDHVKTNRRDATMLARLHRAGELTAVWVPDAAHEAMRDLVRARATAARGLTKARQHLSGFLLRHGKIYVGPRAWTVAYRHWLTTVRFAHPAQQIVLQDYIHAVDDAEKRIARLVAQIELLLEQWSMAPVVAAIQAMRGVAFINAVTIVAEIGDFARFTNPRQLMAYVGLVPSEHSSGDNVRRGGITKAGNSQARRALIEGAWTYRMQARVSRKLHDRIAGLPKSIRDTAWRAQVRLCARYRRLVAAGKKTVVVTTAIAREMIGFIWAIARQVELRSA

SEQ ID NO: 426071 - protein, 345 aa, unidentified
MELHTIGIDLGKTVFHLVGLNLRGEVVVRKKFSRKQLLHFTANLQVKLIGMEACGGSHFLGRALREQGHEVRLMPAQYVKPYVKTNKSDYIDAEAIAEAVGRPKMRFVPIKSDDQLDLQSLHRVRERWVMRRTAVINQIRGLLLERGITLRQGRGHVDAALPGILEDASAMLSGALRMLLAQLKLELDHLQMRIDEADAMINKAAGENEACRRLVAIPGIGPVTATAIIAAIGNGAAFKKGRGFSAWLGIVPGEYTTGGKQKLLGISKRGNSYLRRLFVQGARAVLQQSAKQSSGLSAWLAQLTTRTHSNVAAVALANKLARMAWAVLAKNEPYRPPMLVGAATA

SEQ ID NO: 426072 - protein, 472 aa, unidentified
MRYIGLDLALTAAHKAVILDEKGQAITKVMSVKATATALEELFQCARGAAPADEPLVVVMEPTGMAWFPVAVFCQRRGVQVYLVNSQQVADLRRYYRKHAKSDRIDARVLARLPIVSPEKLHPLQLICAAQRSCQRGCKELDRLIDLMTAIQNRLRAIDRFAWPGLEQVLPDNASTLTRWFREHWYDPSQVIALGAAGLQQAWQKSGLKSTEMPPSDEWAADLVQLAQAVLALYGCEAEFLDYAYLQAEVSREQALLAMLEAEHKRLQLKTIRPLYRQLHPSRNLESLRGVGQDGAAVYFSFIGNPERFPNHAAFRGWTGMIPRSSQSGSSEAKGLHMSQAGPDLIKKFSFMGAETARQWDPQIAAIYYDQIVRHGKHHTQALCACATHLLDRIWTILKEDRPYELRDVDGTPVTKQQARQIVEQRYTVPKEERQRNNQCTRRARQEQQAEKQHKRESRPGEVRGKSQTSSV

SEQ ID NO: 426073 - protein, 334 aa, unidentified
MRHTGIDFHKRTSYITTVDEEGKVLMSYEISNDPVSIKSLACGLGPGDQVAVEATGHWMYLYEQLEDSGAEVILSHPQATKAIAAARLKNDKVDSRMLAHLLRTKLLPRSYIPPRAVRDLRELLRLRSSLIRMRSSVKIRLRSILMKTGSDYDGVDILGKSGVNYCRSLAVRDCYRMALDRWCRAGEHLNGQIQELDRELAVLAKSNANAELLMTIPGVGLYSALLILAEIGEIERFKYSDQLVSWAGLAPRVDQSANRIYRGPITKRGSKYLRWILIEDAHHAIKKAERFRRKYESVKRHRGPQKAMVAVAALMLRSIHWMLTHQEPFKDVEG

SEQ ID NO: 426074 - protein, 352 aa, unidentified
MTYYKRIHQFYIGIDLHARSMYICVINNRGETVFHKNMECSTDNLEIVTKTFGTDIVIGVECIFTWYWVADFCAEHEIDFALGHAYYMKAIHGGKTKSDKIDSEKIANMLRGGMFPLAYAYPKKKRTTRDLLRRRLYFVRQRAELSVHLQLTNHQYNINEPLASSKMRSRVYRDTIPEKFSDPMTLKMVNADLYMFDAYHDIITKLESQIEDSMEVQDPVSYAIINSIPGLGFILSLTILYEIDDINRFPDEGKFISYCRLVKCSHESAGKKESGRHNKIGSVHLKWAFSEGAVLFLRNNELGQKWHDKLVQRYGKARAMSMIAQKLARTVYFLLKRKESFNAEQFYGLKKT

SEQ ID NO: 426075 - protein, 414 aa, unidentified
MDVVHPRCAGLDVSKKDAKLCVRIQKPGQVRASSTVTTWGAMTAQILSLRDHLIAEEVTLVVMEATSDYWKPFFYVLDDGPFEVMLVNARHVKNLPGRKTDVSDATWLAQLGAHGLVRGSFVPPEPIRQLRDLTRTRTSITRERAREAQRLEKLLEDAGIKLSAVASDITGVSGRLMLEALVAGQRDPHVLADLAKRRMRSKIPELTEALTGRFGDHHAFLVKLHLDLIDQHTRAIDELNTRIEVMIAPFRAARDLVITIPGISALVADVVIAETGADMTRFPTAGHLASWAGTCPGSNESAGQVKSTRTRPGNPYLKGALGVAALSAARSKGTYFSAKYRRIASRRGPVKAVVALEHAMLIAIWNMLQTGALYTDPGDDFYTRRNPDKAKNRAVDQLRKMGYAVTLQPLAASG

SEQ ID NO: 426076 - protein, 575 aa, unidentified
MSTATPLDRIGVGIDTARYGHRVTFLKPDRLPAAKPLTVLENRASYRALQQRLQRLHEQHPQAHFHIRIDAAGQYAANLERFLRQLSLPMTVSIGEPKRNKDYRKAHFPKRTTDDTESQAMARFAVVEQPAATAGSAPAMVLLREVAGRLQAKVKQSTQAINRLHNILARVFPELATLTNNLAAAWVLNLLDKYPTVERIAQARSSSLEKIRYLSEDLATQVRRAAQQSVASVHGDVAAALVRDLVAQVRHTQQAEEGMRQLLKQAFADLPPSGHLQIETIPGIGPTTAAVLVAKIVDIDHFATPDKLVGYFGVFPELNTSGVDKQGQPLSAGTLHMSHKGNDLVRAYLWNAVRSAILHNPAVRALYHRLRAKGRRGDVAMGHCMRKLLHLVFAVWKTNRPFDPEHVPWEQHTDMVVSPKTTANTDDTNNKAVGHKRVKPALEVVTTADVTVVPATPSVKLPLRTAKPFKLDFAFLRQQVTMEQVLERLGILSNLRARGEQRRGPCPIHSQPTDRQRTFSAHLGKNLFQCFHADCAAQGNVLDLWAALHHLSLYEAALDLADTFHLRRNREEEPV

SEQ ID NO: 426077 - protein, 465 aa, unidentified
MGKGSGNGTTRGDRKRNARRERLRGLLPRDGAVIGIDLAEDKQALAVIDHDVRVLARKTVKVKAFRLGQALDWAAAQAKVKGFERVTVACEPTGPRWMQVQRLCAERDLPLVCVQPLVSHIAREQQDYTTHKTDESDCVLIGRLAAELHCYIPEELDETWAHLRHLGRRRVQLITAATASVQRIRDFLSVAWPTVTEACAGPFESVTWLAALQVVTARCGGDPARLASTGVEEFTALVRGAVPGWGGKKGWGRICGRVFAALTDTEGVVAWSRRGLLRRVADELADLQRTRAQLRAVAADMVMVLGELGLSRLGDIPGLTAVGAAAILAETGDPRRYDSSSSLVKHAGLSPSENASGAFEGQAHISRRGRPGLRLTAWRAVWPMLQFNPVLAAKYAALTRAADAAAADAGSQRARAAAAAARARRAKARVACAASLLRWIYSMVVHGTSWDAAVASGAACRPEAA

SEQ ID NO: 426078 - protein, 482 aa, unidentified
MKSKPQEKNKKATDHPTQHHWHEMNRKQRREMMRKMQSEDLSLEVIHPDAAGIDIGNESHYASVPPDRDNQPVRCFGCTTAELRAMAAWLKQCGIRTVAMQSTGVYWVAVFDILEQAGFEVYLVNARETKNLPGRKSDVQESQWLMKLHTYGLLRNSFRPSREIRVMRTYWRQRNDLVQSASRHILRIQKALTQMNVQLANVLSDISGVTGQAIIKAILKGERDPHKLAAFRECRVKASEEQIARYLEGNWQPDLLFLLKQEQDGYEFCQKQMTECDRQLAQYLREREDRSQGAPLPEEKRKGRLKKKRANKPRFDLREGLFCMTGTDLTRIDAIDVMTAATVISEAGYDMSKWKTENHFVSWLRLCPDNRISGNKIIGKGRLPTNNPISIALKMAASTLRKSKTYLGAQFRRLRTKLGAPIAIKAMAAKLARLVYRMLRYGMKYVDQGAAFYEAQHRQLQIKQLKWKAAKLGFQIVQAPAA

SEQ ID NO: 426079 - protein, 365 aa, unidentified
MTETVYCGVDFHARMQTIAYCDTANGEIQLAQLDHRKDDVRGFYSQFTGEVIVGIESGGYSTWFEAMLEELGHTIWTGHATEIRRRANWRQKNDRRDAELILEIMLRGDFPRIHRHSRESVEVLRMLRYRARLIKMRTMICNNLQAIAMSCGLTERSRMLSRAGQERLKSARMTPVIKQQSEDLLTLLVPINERIGKVDRWLKQQASTDDRVKLLMTHPGVGVLTALGVVHTLEPFNRFSKQRSVVAYVGLEPMERSSAERKRYIGISKAGSRLLRFLLGEAAHIAVRFDPELKQFHERIGKRRGKAKATVAVARKLLIRCWIMLRENIDYAEFRGRGVEARLARLGHRPTMPEVVIERPASSDR

SEQ ID NO: 426080 - protein, 344 aa, unidentified
MKRSLGIDLHTNSFTCCYLQADGHETIRTWPLQGGGLEQFLTSVHAGDEVALEATGNAAHFCKMVESHVSRVVVIAPWQFEVIRRSVKKTDKHDARAIALFLSKDMLPEARIKSEAHVQLSSLITTRDQLVKLRVSLLGKVHGLFVRHGLKVRREVLTSQAGFTRAVAGHDWNPLERVELAGIDDQLQGLHRNIKRLEKEIATFAKTLPGYDNLISIKGIGPLSVAVLLTHIGAIDDFHNTGKLAAYFGIVPRVSQSNDTHTSGAITKRGNKLARTTLVQCTLIAIRYSPYLRGFYDSIKTRRGTGKAIIATARKLLNTIFHTLKNNWVFEDFPNFQLLPCNQS

SEQ ID NO: 426081 - protein, 340 aa, unidentified
MYYTGIDLHKKTSFITTIDARGKIVSRANLQNVEEDILAYFANLGDETKIVIESMSSWYWLYDLLTGNGLDVVISNPVKTKAIASAKIKNDKLDSHMLAQLLRADLISTVHVSSLETRKLKELLRHRSRLVRDATRMKNRIHMLLMKNNFSSPFSDLFGVKGLSYLKEIDLPDYHRQQVETYLLLYEKLQEQIEPLSKIVRALAKENHIAQLLMTIPGIGPITAMFIVAEVDDISRFRSYRNLASYAGLVPSLDASAGKEKRGRITKQGSRYLRTALVEAAQAAARMQNCRLRIFFRRRIVKAGYQKAIVATAHKILQYAFYIWKNQTPYQETYPVCVTR

SEQ ID NO: 426082 - protein, 333 aa, unidentified
MDTETGELEERRLQHPEEAEKFYRELAAQGMKARVGMEASGHARWFERLLAELQFELWIGDAAEIRTRRVRKQKTDRQDAQLILRLMLKDDFPQIWVPSWENRDLRQLLWHRHRMVQARTRIMNQLQAVALNEGLRCKKRLWREAGREQLEAFPLAPWASRRRRDLLELLDRLSPTIAELTQTIEQEAKKCPAAQRLRTHPGVGALTALAFVLIIGRPERFQCGKQIASYLGLVPSEDSSGDRRRLGHISKQGNTLLRFLLVEAAQVTVRSLPEWRSKYFHLAMRRGRKIAKVAMARKLAIQLYWMMRKEWDYEQVKRCGPHAGQPEHRRGVQ

SEQ ID NO: 426083 - protein, 341 aa, unidentified
MQITTIGLDIAKNVFQVHGIDGDEKVVVRKQLRRSQVIRFFQELAPCLVGLEACATAHYWARELMKLGHKVRLMPAKDVKAYVKRNKNDAADAAAICEAVSRPTMRFVPAKSAEQQAELMQHRARDLLMRQRTQLINAIRAHMAELGISAPQGREGIKQLLAIIAADEDTRLPADARASLIVLAAQLQAIQTTIGSLERRIVARHRSNQDSKRLQTIPGIGVIGATAIAATVTDPTVFRSGRDFAAWVGLVPRGDSTGGKHKLGPISKQGDRYLRRILVGGAVSILRRAQLNPQRYPWVTRLLARRPFKVVAIALANKMARVAWALVAKGGIYRIPRLAAV

SEQ ID NO: 426084 - protein, 339 aa, unidentified
MSRYVGVDLHKNMFVASFYDADVGEHQLGKFGLKDIPKFKRQLKKTDILGVECTTNTRYFVEQIEQTVDSVKVVNPSQFRVISRSVKKTDENDARVIAEFLSKDMIPEVRLKDKRLSELSSLAHTRDKLVKLRTALKNKIHNILSAYGIVLKKEQLSSDKALDKVLDFRVSETARIELEVMVAQIKNLNEGIKKLDSELENRGKDLPGHKNITSIKGIGNKSGTVLLCAIGNINDFESEKKLASYFGIVPRVSNSNETMHQGRITKHGNKLARTTLVQCTLVAIRYSPYLRAFYDRIKAKKGSGKAIIATSKKLLGIIYQTLKNNWVFEDFPNFVLKSA

SEQ ID NO: 426085 - protein, 481 aa, unidentified
MKIKSIYPARNSSQLREVLGKYSPGELLYAPIDVAKYNHKACAVNFFGDILTPAFEFSNNAHGVKFFISKITEAARNAKAKKIFIGLEATGHYHQNLTLHLKSLGYEVAVINPFDSWKERLNKSSKTDKIDLGSIAKSLISRKFSSSTVPEGVYYNLQRATRTRRKFVNRRTSSKNIITGLLDNLFPGLWDKEDTIFSDRWGKASLSVLEHYPTPQMVLRLGEKRLTRFLKKGTTKLGEKTARKIISAAKVALTRSPYEQTMDILALRSHLQAYRLYEEIIFHLEKEIAYLLVQTPGTYLLSVPGISVTYAAEVTAEIGDISRFAYANQIISLAGTCSKKDQTGEHDPQNLPISKKGNKFLRTVLNQAGLSLNTWCPDFNAYYSRKVEEKKGRCEIARTATGNKFARLAFALMKHESLYHPHSFNTLVQDPGNYYLSVYGEILKKLRAFSSEKILPQSNYLEKIKQKLEKEYAINLSEVKG

SEQ ID NO: 426086 - protein, 405 aa, unidentified
MKTTAYCGFDWASETHYYVLKNARKEVLSEGTVPHATEGFEAFLESLEQCREGGRVALIVEANRGVPMNALLDVSWLDLYPVNPMKTRKLNELQGSVRQKSDASDCHLLCDYLIANESELSGSYVERDSLIRQMQEWIGMETDLVSNCRQLKQRIMSHLDTFMPDLKRMLPNLDKKVYVRYLFEFDPLTPVDCSEVESFLRRHGCRNAETIEAFAAGHVALRALGEDAEVHRAQADVLRAWAELLWQLQCSLEDCRKRINALFVQLPQAAIYSSLPGLGETLAPRMACLFGSRPSERFACKEQAVAYFGQSPVTEQSGKGLKVGRRRNCHRYARNTCFLWAMAVNKMPNCHWQRTFLDKRRRKGDARPTRYRKLGRKMLGILYRCVIDNVPYDEVKFIQNLHQKA

SEQ ID NO: 426087 - protein, 353 aa, unidentified
MDNKVIDFTGSNIYAGLDVHKKNWYVTILTDEVEHKTFSQPPDSSVLSKYLHKHFPGANYYSAYEAGFSGYVHHRELLNQGIENIVVNAADVPNTNKELTTKTDKVDSRKIAKGLRSMMLRPIHVFDRKHEEYRSLSRQRHIFQRDLRRYKQRIKSFLLYYNFHIPQDIDAGNWNLDLEAWLKGIKMITTDGQSVLNNLFEGYLFHKQQVRSLSNELRKRTRKEHKEAYYLLRSIPGIGPLTAITIIAEIKDMQRFSSIDKLSSFVGLMPMSYSSGQTERIGGMTYRSNTYLRTMVIESSWQAIRMDPAMLMYYKKHIGKGNPKKAIVKVARKLLSRIRYVMINKESYQVGIK

SEQ ID NO: 426088 - protein, 406 aa, unidentified
MNAVGIDVSKGKSMVCVMRTFGEIVASPFEVTHTDSEIRELAKKLEGLSGETKVIMECTGSYHLPIAFALHDAGFTVCAVHAQLIHDFGNNTIRRVKTDKADSIKIANYGLTNWLDLTEYVPEDDIRHMLKAYSRQYNKYIKIKTMLKNNLISLLDQTFPGANELFTSPPRKSDGHEKWIDFAATFWHCRCVCDLHQSDFINTYRKWCKRNGYYFNEAKAEDIYIESLGHFHIMPKNETTKLLITQAITQISTISESIAIVAREMKNLALQLPEYPVVINFRGVGEILAPQLIAEIGDIYRFARKESLVCYAGLEAPPHQSGGINVSSTSISKKGSPHLRKTLFQVMDCLIKHKPVDDPVYQFLDRKRAEGKHYYNYMTAGSAKFLRIYYARAKEFLDSYYDEAEV

SEQ ID NO: 426089 - protein, 355 aa, unidentified
MTVYYGVDFHARCQTISYLDTADGEVHSRELHHQKDDVRGFYQQRSGEVIVGLEASGYSSWFEEMLESLGHTVWVGDATEIRRLARRRQKNDKRDAEHILELLVKGEFPRLHRQRAESREVLRQLRYRQRLVKISTMIKNNLHAIALGAGLSLQSQLSTLKGRERLEALPLSQALAHQRESWLQLLERVREQITSVERWLKGQATGDACAVRLRTHPGVGLLTSLCLVHTLGDVSRFSTTRKVTAYAGLEPMEHSSAETKRYGAISKAGSRLLRFLLGEAAQVAVRTDDELRGFYKRLLTRRGKAKAVVAVARKLLVRCFIMLRDEIDYAAVSATRCRRARCRSIRSARTYTWAY

SEQ ID NO: 426090 - protein, 409 aa, unidentified
MRYYVGVDWADQTHAVWVVDESGTQITARTVPHTAEGFVEWGRELDEWRVQGIERWAAIERPDGRVVDFLLDHGVVVYPVNPKALNRARDRFRQSGAKSDPFDARVLADFLRTDHLHLQALQPSSDAAQELKLLTEDCQRHIRQQTRLVNQLTTTLKAYYPRALEVAELTTALAREFLHAYPTPEALTVLTARQWQRWARGRRVSEARIGALWAVLQQPQLPVPAHVVRAKARLMQSLVEQLTPVVVAVAQYRKTIDDFFARMPAAQWARTLPIGKHGITAPTLWARLGDAPGRWESFRHLQAQAGAVPVTKRSGKQRVVHFRFACDKALRHVVDQVAFLSLLSSDWARAYYDQQRARGHGHRQALRALGAKWLKIIFVMWHRQVPYDEQYHLATMTRQQLRQRQTKIA

SEQ ID NO: 426091 - protein, 350 aa, unidentified
MRRPTDKVIAGIDLHGNNLVIGLMNQDGKRLGHQKLECDLEQVEAFLRPYKQQLQSMAVESTYNWYWLVDGLQAKGYPIDLANPAKIEQYSGIKHADDKHDAFHLAELQRLKILPKAHIYDAELRPVRDLLRRRTGLVHQRTALFLSFKSLYARTTGQAMPLKTLKNLEPKQAKELYEHPANQLIAKVQLEHIGALDRSISLIEKAVQASAREIPLYEKLLTLPGVGKILGMTITMEVGDIGRFKTDGDFASYCRAVDSRRLSNGKQKGENNQKCGNKYLSWAFVEAANFAKRYDENCRRWYDRKKAKTSTVLATKALACKLAKAAWHVMASKIDYDATRMFPELALKKK

SEQ ID NO: 426092 - protein, 419 aa, unidentified
MSFKILKFNCCGLDIHKTWIYACIGITDSNNRTEYKQARFSSFTKGLNELCDWLAKYNCKDVCMESTGKYWIPVFNILEQHNLWVTLSHPKYTKPMKGNKTDRKDAKWICDLYMCGMVKPSFIPPADIRELRDLVRYRFKLTCMITGEKNRAQNCLTVSNLKLDDVFSDVFGKSSRSITEQILKHPRETFDVTPFVDGRCKTPTEEIQAAVDGAISKEQAVKLRQCLDHIDELNKHISEVEQEILRLSDKYEIALNLIRTVPGFNKNPLTAIQVLSEIGGDMSVFPTAKHLVSWAGCCPRNDQSNQKIKSTRISRAGSYFKPVLVQVANALIKSKKHLEFTNRYKRIKARRGHKKAIIAICRMILTAIWHILSDLKPYTPEGFLESRPVKEEKVLSTSQALNLLKQRGYIIKDEPLSVS

SEQ ID NO: 426093 - protein, 425 aa, unidentified
MNSISNKKINQVTDQTLVVGMDIAKKKHYACFVDERGRVLKKPFPVLQSREGLEWLYQCIVEAMKEFGKTEVIVGIEPTGHYWLNLAYFLDEKGIPLVMTNPMHVKRSKELDDNLPTKHDAKDALVIARLVKDGRFSYPRILKGMEAELRVGATFRSKLVEERGAIRNQMIRWLDRYFPEFSQVFPSFGKMALAVLEYTPFPSDLAGKELEEVLALYRQSEGLQSPQKPKAKKLMDLAQHSIGVTEGQQMARIEIATLVRRYRQLEKEIEALNEQLTELVQTSVEYEWLKTVPGLGDATIVELLSEIGSFSHYQDPRQLLKLAGLTLRENSSGQHKGQKRISKRGRRRLRALLFRVMMPMIRHNEAFRQLHDYYTTRPDNPLRKKQSIVVLCGKLLKVLHAVCTKHQAFDAKRMMQDIFGLETAA

SEQ ID NO: 426094 - protein, 410 aa, unidentified
MRLCVGDDWAQDHHDIEVMDEAGQVLAARRLPEGVAGIGQLHELIGAFVPAGEDVEVQVGIETDRGPWVTALLAAGYVVFAVNPLQASRYRGRRGVSGAKSDGGDAHMLADAVRTDAHQLRPAAGDSPAAEAVKVLARTHKTLIWQRSAVVLRLRAQLREYFPAAVAAFEDLDAPDALELLGKAPDPARAARLTRAQVSAALKRAGRRKIAERADAIVAALRSPQLGQPAALTAAYAATVRSLTAVIATLNEQVASLQGQVEAHFGQHPDAEIYRSQPGLGAITGARVLGEFGDDPHRYATAKNRKNYAGTSPITRASGKKKIVQARFVRNDRLIDALMLQAFGALRVSPGARAFYDAQRARGCAHNEALRNLASRLVGILHGCLKTRTRYDEAIAWGHRENIPQSDAAA

SEQ ID NO: 426095 - protein, 311 aa, unidentified
MASIICGVDVSSETLDGRIEGSGLELSVRRDPEGIAALGRFCVEHGVELVVMEATGGYEKLPFGLLWSAGVPCAIANARSVRRFAEAMGVLEKTDRIDAKVIADYARAKGLVGQVPESRTQERLRALVTRLRQLTALKVSQSNQRRLVVEPEVMAAFDEMLALVARQSRVLEARIAELLGADPLWRALDAGFRQIKGVAGRTVARLMAEMPEIGTVSNKAVAKLAGLAPIARDSGKRQGRRPVRGGRAQVRSILVVVAAVVARHDPDMAAFHQRLIQAGKPRMAVRIAVARKLLVRLNAKARDARALMLPA

SEQ ID NO: 426096 - protein, 366 aa, unidentified
MLHKLNSAATLIQRTTTEAPRDHMYYIGLDVHKRTISYCVKDAAGHVHQEGKIGSTRCELDAWIKTVPQPRMIAMEATIFTGWIYDHLLPHAEKVKVAHPLMLRAIAVAKKKNDKIDAAKIADCLRCDFLPECHMASTEIRDRRRTLRYRNLVIKQMVQMKNRVSGLLLETGVSYNKQRLHKVGYFADLMSTNDEVYESIRPLLKLSREHIVRAQRLDYALVCSLERDPLLAERLERLRTVPGVGPITALTWALEIGDFTRFRSIKQAISYCGLCGDERSSADKVMRMPLSKQRNKHIQRVLIEAAKLAPRHSHELAMVRERELQKGNPNRATLAVARKMVSYLLAVERRKQNFVPAEQFKCTAAA

SEQ ID NO: 426097 - protein, 346 aa, unidentified
MEYYVGLDVSLKQTSICVVNQAGSIVREGVVDSDPDAIASFVRSKAPGTVRIGIETGPTTTWLWTELNRLGLPVICIDARHAKAVLKMQINKSDRNDAAGIARIMQTGWFKEVRVKDLDSHAVKALLASRALLVKIKRDLENQVRGLLKNLGLVIGRAKFNVFAVRAEGLIENRPELVAAVRPLLEARKAIEQQVDDLDRKVHKLARHDVQIRRFMTVPGVGPITALCFKATIDDPTRFKRSRSVGAYIGLTTRRHASGEMDWSGRISKCGDAMLRMYLFEAAGVLLTRVPKWSGLKAWGAKLTKRNGLRKAKVAVARKLAVILHRMWIDGTEFNWSTKKTAAQHA

SEQ ID NO: 426098 - protein, 466 aa, unidentified
MEQVVQKFYLGCDVSKGYSDFVIIDDQMNCVEENFQLDDTATGHAELSERISAFFEKHPSATLYAAVESTGGYEDNWYAFLLRQQGKFNLHAARVNPNGIAHDNKAGMIRNLTDKISARSVAEYQIRHPDKIPYGKRDPNKSLKKMWGRYRSLKKQMGVLLNELESLLYSANPELLPYYRSRMPQWLMLLLLKYPTAKMLARARVATVASIPFLKKPLASVLVKNAKASTAEESDDLTAFLVSSTVSQIASLSKQITIFEQRFEKECDWPEVQLLMSINGVGRMTAIVLMLYIEDITRFKSAKKLASFLGVHPELKLSGDGSKKGSYKMSKKGQKAPRAMLYMSVLAGLSKGSRNDVIKRIYDEKRASGMVAKAAIGVCIHKLVRLAYGVLASSKPFDPAIDDKNREKSKPAEKPVPLSKDRRYQGFDTAAPVSRRQNKKRMEQIKSQDSYAVECGIKDHAPRALQ

SEQ ID NO: 426099 - protein, 506 aa, unidentified
MKVQASKPTFTIGYNPIGQYGSNICRQDIGRKRPYRSLLRQRYWAWSFTSKLITMAKVAKRKQTSKGLRLEVVNPNAAGIDISPKEMQVCVPSDRDGECNRTFGVYTEDLHYIAEWLKACCIDTVAMESTGIYWLPVFRILKESGFEVILVNASDVKNFSGRKTDASDAEWLMILHSYGLLKPCFQPENIARTMRNLVRHRDNLIRSASREVLHLQKAMEQMNLKLDNVFSDILGKSGQSVIKAILNGERDPKVLADLADPRCRTSKEEIEKSLQATWDEEHLFEMRQSDSLYQFYQQLIAECDAKINEIAMQYSATVDAPKTELLRSGKYNAKKNRIGFDVEKVAFELWGVNVMRIPGMSRGALLRLVGELGAGFTTKFVDVKHFVSWANLVPNNKISGGALLSSKVPKKKNPVGMIFRQTANTLKAAKNPLGDYFRHMRAKGGYLQAMVATGKKLASIFYCMVQRKVEYNEKVYCNHRKQELQNKVAYLHKRLQRMESELANCG

SEQ ID NO: 426100 - protein, 326 aa, unidentified
MSRILIGVDVCKDFLDAHARPSGTKQRFANTPDGITQLVAWVQSFPAERVVFESTGPYQKAAVGALLAAGLPAVVVNARQVRDFAKGTGQLAKTDQIDAGILAHFGEVVATIVRPLPPQEVLEFREWCDRRSQLVRMLATEKNHRHAAQGGSAKVLKNIDKHIAYLQGQIEDLEERMDRLVAQSETFRAKDEILQSITGIGPQVSRTLLVHLPELGQGSRQRIAALVGLAPFARDSGQSKGHRHIAGGRGHVRAMLFMGAWTASRSKTPLGDFYRRLIAKGKAAKVALIAVAHKMLTIANAVVRSGEPYDPSHEDPAHEVSLVYAG

SEQ ID NO: 426101 - protein, 405 aa, unidentified
MDIIAEKGCGLDVHKETVVACIMGIGIKKEVRTYTSMTHDLLRLKGWLQEAGITHVAMESTGVYWKPVFNILEDHFEVILVNARHVKNVPGRKTDVQDSEWLCRLLRSGLLKGSFIPPRGIRELRDLTRYKRKLIQAIVAEKQRVEKVLEDANIKLSSIASDTFGASGKRIIGELMRGKLKVEEMAELSKGRLRQKREDLKEALVGEVREHHKFMIRASLKHIRAMEKILLGIERKIREKIERDYKEEDELLQTIPGVKENASTVIAEIGVEMDVFPDEMHLSSWAGMSPGNNESAGKKKPGSTTYGNKCLKAILIEFGWVASRMKGTYLRSKYHSLVGRRGKKKTLVALGHKILIMCYHILKYRRPYKELGEDYLDKRRRDRITRSYIKRLNHLGYEVILQDAA

SEQ ID NO: 426102 - protein, 352 aa, unidentified
MDKQLQNEVILGVDTHLDTHVAAIVNFAGKLLGVLATPTTAAGYLQLLSWARSMGNLKRAGVEGTGTYGAGLARLFREQGIEVFEVNRPDRARRRLQGKSDPTDAESAARSVLSGNATAIPKSQEGAAEAMRLISVTRRSAVKAKTQAINQLRAILVSAPQNVRERLWKAKPEHCVAGCAHLRSLGTTTLLQTLTIALRMLAKRWLMLAAELKEIDAALDKLTSAYAPRLRGQFGVGPQTAATLIAVAGDNPERLRSEAALAALCGASPLQASSGKTVRHRLNRGGDRSANNALWTIAMVRMRSEPRTRAYVARRTAEGMSAKEIQRCLKRYIVRELYPLILADLAPAVQIS

SEQ ID NO: 426103 - protein, 411 aa, unidentified
MKDLLEICCGLDIHKDKIVAYILTGPLGQPTNSVIREFTTLIPDMAALRDWIISSDCHHVAMESTGIYWQPIYEILEDTSDDITLLVVNARHMKNVPGKKTDMRDSQWIATLLRAGLLNGSFIPDKNIREFRHLNRYRKSIVRDITSQKNRIEKFLQSSGFRLSSFISDIFGASGRNVISHLIEHGTIDKEALDSCLKTKTRNHINEILIAVNGTLSKHQQDFLKMLMDHYDSLKTHLSEIEAAIDEEMAPFALQVEQLSSIYGISTTASSAIISEIGLDMGRFKTAEHICSWAGLCPGNNESAGKRKNTSITKGNPYIKSMLCEIAWVIAGKRNTYLSAWYWRIKQKKGAKKAIVALARKLLVIIYTMLKQGTLFDESCFELRRKNCEQKQLSKYIRELEKHGYHIESQA

SEQ ID NO: 426104 - protein, 338 aa, unidentified
MQVTSIGLDIAKSVFRVHGADAKCNAVIRRQLRRHDLLRFFANLEHCLIGVEACHSSHYWARELIALGHEVRLIPTQYVRPFRRGGKNDANDAEAICYALSRPSINTVAVNSAEQQAIQSLHRSRERLIRQRTTTANQIRSLVAEQGVVCSQGIARLRRCLYDLVADEGRATPLLRRLICQFLEQLSALDQWISELDAKIKELATHSEVCRRLTRLQGVGPVIATAVVGTDGNAHVFKNGRQFAASLGLVPGQRSSGGRVQLLGITKRGDTYLRKLLVQGARAIMRVAGRHDDRLSNWVRELIARRHKHVVAVALANKMARTIWSLLVKGEQFDFVRG

SEQ ID NO: 426105 - protein, 455 aa, unidentified
MTGAKSLGAEALSMVNPGAAAIDIGSTMHMAAINPQAGDNPVRAFGTFTGELHEMARWFKASGVTSVAMESTGVYWIPAYEVLEEHGFRVILVNARYAKNVPGRKTDVSDAAWLQRLHSYGLLRGSFRPEAGVATMRSYLRQRERLIEYAASHIQHMQKALMEMNVQLHHVVSDITGVTGMRIIRAIVAGERMPITLAEMRDVRCHASVETICAALSGNWRDEHIFALCQSLALYDFYQAKILECDRKLEVALKALEIDKGHDIRGLPKVRTKRRQVNEPDFKVRSALYRVLGVDLTQIHGIGPSLALKLVGECGTDLAAWPSSKHFTSWLCLAPGNKISGGKLLSSKTRRSSSRAAALLRLAATTIGRSDTALGAFYRRLAARAGKAKAVTATARKIAVLFYNSLRYGMAYHDPGATQYEERYRNRVIGNLQRRAKAFGFSLQELPPEPNMAVS

SEQ ID NO: 426106 - protein, 345 aa, unidentified
MRRVIAPLVKCAAGLDVHKKTVVCTVLQEETEERISKSTREYPTFRSRLQQLAQWLVEMRVELAVLESSGIYWQSVYESLEAAEINTYLVNARHVKNVPGRKTDVKDSEWLAELARCGLLRASFIPPRDLRELRFLTRYRRKLVGNLVGEKNRLNKLLDSCGIRLGCVVSDVNGVSAQRIIKALLEGDKSPEEMAELVIGRLEKKKPEIILALDGFLSDRHRFVLGKIINHIDWLQRQLAEIDAQVVAAMEPYQREWQLLQTIPGIDRIGAAMLLAEIGTDMGRFGSKARLCSWAGMCPGNNESAGKKRAARPRWATSMSASYSVRRPTAPTKPTVSLKDFSKGS

SEQ ID NO: 426107 - protein, 329 aa, unidentified
MRNVRFVGLDVHAETIAVAVAEAGGEVRGLGVIPNRAESIGRMIRKLGKAEQLRVCYEAGPTGYVLYWQLARLGVRCKVVAPTLVPVKAGDRVKTDRRDAEKLARCYRAGDLTAVWVPDAAHEALRDLVRARLAAKRDQLRARHRLGKFLLRHGRRAPEGTSAWTERYMAWIRTVRFDYSAQDGTLLDYLHEVEHAGERIVRLERLIDAAVETLPVKMRAVIEALQSLRGIAQISAVSIMAELGELSRFEHPRQLMGYAGIVSREHSSGERIRRGAISKAGSAHLRRIVVEAAWCNRHRPAVGRELLGFIWAIGVQVERPMPVQQPRVS

SEQ ID NO: 426108 - protein, 389 aa, unidentified
MKIYVGIDIAKLNHFAAAISSDGEILLEPFKFTNDADGFQLLVSKLESFDKNSIIIGLESTAHYGDNLVRYLVAEFYQVCVLNPIKTCQMRKNNVRKTKTDKVDTFVIAKTLMMQDDLRFITFFDLDMMDLKALGRFRQKTIKQRTRLKIQLTTYVDQVFPEIQYFFKSGLHQNAVYALLKEAPSPKEIASMHMTHLANLLKVNSHGHFTKELAKELRVLAQKSVGANDSAISIQITQTIQQIELLDSQLEKIEAEMTDIMKFNDSVIMTIPGIGYINGGMILGEIGDIHRFSNPNKLLAFAGLDPSVYQSGNFQAKTTRMSKRGSRVLRYALVNAAWNVVRNNATFKAYYDAKRAEGRSHYNALGHCAGKLVRVIWKMLTDEVEFNLE

SEQ ID NO: 426109 - protein, 341 aa, unidentified
MKPEMSILGIDIAQRVFHAVGMDERGKIVLRKRLSRHDLMPFLAQLPAVRIGVEACGGAHDWARRFRAHGHEVKLMAPQFVKPYVTSNKNDSRDAEAIAEAVTRPTMRFVPIKDVDQHDIQALHRVRERLIGARTAWIHAVHGLMHAYGIVMPKGVSKFRQAVGEKLESEKDKLTALSQEMCWKLVEECAALEKQLASYQEKLDTLATTHPACQRLMTIPGIGPLTATALVAAVSDASAFKNGRQCAAWLGLVPRQHSPGGKERLLGISTRGDSYLRTLLVHGARTTIRWVGRTTDRRSPWIRQRVERRGKNRAAVAVANKNARIVWALLTSHQDYQLTTG

SEQ ID NO: 426110 - protein, 336 aa, unidentified
MEPTTIAIDLAKRVFQIHFVDPDTGAIHSKVLKRAQLVPFFANRPASRVVMEACGSAHHWARVLARLGHDVRLIAAQFVRPFVKSNKNDAADAAAIWEAAQRPGMRFVAVKTEDQQAMLALHRIRQQLVRIRVMQINQLRGLLYEFGVVLPQGRRASIEAAKVALGSLADHLPAMLTHSLQDQLSRLRVLDEQIARIEQRILDWRRNDDACRRISEIPGVGVLTATAAVSVIGQAKTFRSGREFAAYLGLVPRQNGSGGKVKLGGISKRGDVYLRTLLIHGARSVISAAKHLPERLRALLTRRPTNVVAVALANKMARTIWALLAYGRTYQAAPAQ

SEQ ID NO: 426111 - protein, 347 aa, unidentified
MDHYAGIDVSLEASSVCVVDGAGKILREAKIASEPAALIGWFASLGLDLARIGLEAGPLSQWLYAAMKEAGLAVELLETRHVRTALQTMPVKTDRNDARGIAQLMRLGWFRPVHCKSMAAQETRALLTARKLVQSKLYDIEMSLRGILRGFGLKVGPTTPKRFARRIEELVAGHSTLEVIAKALLSAHAALLRELDMFEKLVRAMARRDKRARLMMSAPGVGAIVALTYVSAIDDPARFSSSKRVGPHFGLTPRKYQSGETDVTGRITKIGDAGVRTALYEAANVILTRPVKGAGLKSWAMKLARRAGMKKAKVALARKLAVILHRMWIDGTAFDARKAAFAGVAAA

SEQ ID NO: 426112 - protein, 295 aa, unidentified
MPQQGRIVGIDVAKLKVDACIRSLELRLSPPSTAQGEAELVAWLRDNGVGLAVMEASGGYERSWAEALRAAGIAVRVVDPKRVRYFAKSAGRLAKNDPIDAAMIAWFAEVFAAADAPAHDPDRDALDRLVSARRRFVEISLQLGQLDEHRQPRLVEQAQRAIVKTIRTQLARLETAIAAKIAANESFAARAEIIRSVPGFGRHFVAGAIAWLPELGRMTNKQAAALVGLAPYDDDSGERKGERHIKGGAGKSATCSTWQPWPPRPATTQSSRPTTNGCAPAARKPRWRSSPACAN

SEQ ID NO: 426113 - protein, 361 aa, unidentified
MTTIAEDDRRVIAGVDTHKDFHVVVVLDEQGRKLDTATFAATPRGYRELTRWVTDFGEVLAIGVEGTASWGAGLCRHLRERGLNVIEVNQPDRHRRRRKGKSDRLDAEWAARAVLAGDATARPKAGDGPVEALRQIRVARTGAMKARTAAANQLHSVCDTAPDAIRAQLRGLSTRRQVTVASRYRPGDVLTPTGAAKRALVVIARRWLALDAEIRELDRAIKTILDTIAAPLLARPGLGYETVGALLCTAGDNPERLGSEASFAALCGTSPVPIATGKSNRKRLNRAGDRNANAALWTVVMVRLRHRHPPTMAYLERRIAEGHSKRDTIRCLKRFVAREIFDDIQTISTARPARPAVEIAA

SEQ ID NO: 426114 - protein, 401 aa, unidentified
MTDSPTTRPAPPSAVSPVIVGGVDTHKDLHVAAIVAAADQVVATEFFSTPAPATGPCCAGCAATATSPGSGGCTGSYGASLLRFLDNAGLEVVEVTAPDRAERRRRGKDDTIDAENAAHAAFAQIRTVTPKTRDGIVESLRVLQVTRKTAVCARRVALQMINSQTISAPEELRDQIHNLTRMQLIRTLAAWRPDLTDFRDATTANKIALKHLARRYLELHDEIADLDRLIHALVDELVPTLRGRVGVGYQSAAQLLFTAGDNPARLTSEASFAMLCGAAPLPTSSGMTTRHRLNRGGDRAANSALHMIAISRWRIDPKTQAYVARKRTAGHSNPEILRCLKRFIPRDLLPAQRPRSSRPATRTGRLTHRRASVGDAVARQDAGAAPHTSTRPIPRRPTCLP

SEQ ID NO: 426115 - protein, 335 aa, unidentified
MLYAAIDIHKRTFQAAVLDAASGEVDEQRLAASPEALRAWAEWWQGRIAAVALEATTGWRWVARELQGRGFDVRLCDPGQANALRGAKRRAKTDRIDAAWLALLLAKELLPQCWLPPADIQQLRDLTRLRLALARDRMRWAQRLHALLVHEGFPCARGRLITQDGQRWAATLPLPVATRANVAVMLAMIGTLDQQLATIDADLRRRARDDQRLMALDRLFGVGPVIAAHILAEVGDARRFRRARQVVRIAGLDPAVSESADTRRRGRLTKQGSPQLRWALVEAAHHACQPRSPDHGLYLAVQQRCGTQRAILSVSRKLARRAYHTLAALELEAAA

SEQ ID NO: 426116 - protein, 315 aa, unidentified
MTGRPVVGVDVAKDRLDVAVRPSGETWSAPNDDAGITAVVTRLRPLDPALIVCEATGGFERAAIAALAAAGLPVVVANPRQVRDFARATGQLAKTDQLDAGILALFAERVRPTPRPLPDAAAQLLDAVLTRRRQLLEMLVAEKNRLGFAPKPLHRGIQAHIRWLERQLDDVTTELATLIEGSPVWRAKDDLLQSVPGVGPIVSYTLLGELPELGTLSHKQIAALVGVAPLARDSGTLRGKRMIWGGRASVRTVLFMAALCGRRWNPALKVFYERLKAAGKPTKVALIACARKLLTILNALVRDQSRWTSHVQYSC

SEQ ID NO: 426117 - protein, 463 aa, unidentified
MRVNRRSPTPAVADAPKAERTPPREGSCISSPGSRRPEPVRAARIMNTDWTQHVYFAALDWASDHHDILVLDRQGAVQAEFRFAHTADGWAEFTLKMQPFTGAPITLETSSGPAVDQLLQRGWAVYPVAPSAAARYRERKVPSGTKTDRHDTWALADALRTDGHAWRPLRPQDEATATLRALCRDEIALIEQRTALVNQLQAALREYYPAALAAFDDWTAPYAWALLLQFPTPAQLQAAGKRKWEKFLHTHQLWRPQTVAARLELFAHAQALPASPAVTAAKSLLAVSLAKILVTLQTQLDEYRRRITEAFRQHPDHDVFGSLPGAKATLGPRLLAEVGDVREEYPDADALLCQAGVSPVSYQSGKVNKCRLRRACNKILRATVHLWANSSRLTCEWAQAYYQMKRDEGQSHASALRCLGKRWLKILWRLWQNHEAYNEAKYLAQLQKRGALTWTKLQTPQTV

SEQ ID NO: 426118 - protein, 359 aa, unidentified
MRTITIGVDLAKQVFSVCSVDAAGRVQDRRELRREAFRQWLPSVPAGTIVAMEACSGAHHWARRCQDSGLQPRLMAAQFVAPFRKSRTAKNDRNDAEAIATAARQGNMRFVPVKTVDQQVRLSWHRVREGYKAEALATSNRLRGLFAEFGVVIAQSDAALRRALADLDALALPCALVELLRDVDAHWQQLQARIADADRRINAHARADDACTRLRAIIGVGPITADAVVATIGSAQSFANGRQFAAFLGLVPMQHSSGGRSRLGRISCRGDGYLRTLLIQGARSSLQRAKAVPWEKASPEQRWIQDLGRRLPFGKVLVAIANKHARQLWAMLARGEHYDADAWLKHPMVQRPARRSAAR

SEQ ID NO: 426119 - protein, 347 aa, unidentified
MAAVMIGIDPHKGSHTAVAIGAGEERLGELRVRASAVQVQRLLAWAAPWPERTWAVEGAGGLGHLLAQQLLSAGERVLDVAPKLGARVRLLAAGAVNKNDPNDARSVAVAALRSASRREVAADDHAAVLKVWSKRHRDLGRARTQVACRLHAVLCELIPGGVSKRISAAQAGQLLEGIRPSGAVERARCELATEFLADLRRIDAQMRDTKNKLTVAVRASGTTLTEVFGAGPIVAATVIGEARGVSRFASRDHFAAYNGTAPVEVSSGRRKIYRLSRRGNRRLNHAIHMAAVTQISHRHSPGRAYYQRKLAEGQTPKEALRSLKRRLSDVIFARLQADARRAVAGPR

SEQ ID NO: 426120 - protein, 408 aa, unidentified
MHSDFQYFTGIDWGTEKHRVCLMNREGAVIGERWVEHSGRCLAELVDWLRQHCGQSPQTLAACIEIPRGAVVETLLEHGFAVFSINPKQLDRFRDRYSPAGAKDDRRDAFVLADSLRTDMHCFRAVQLDQPVMIRLRELSRLEDELGEEFGRAANRLREQFQRFFPQLLQLSEAASEPWLWTLFEAAPTPQRAAKLTPARIERILKQHRIRRIQAAEVRAVLKTQPLTLAPGAADSAAEHALLLLPRLRLLHQQRTDLARRIQAILEELASAQQDQSEHRDAAILLSLPGLGRKVAATMLSEASQAIAERDYHALRSYSGAAPITRQSGKKMIVTMRYACNLRLRNALYHWARKSILWDPRSKKTYADLRARGKSHGCALRSMADRWLKVLVSMLRHKTLYDAQLRAA

SEQ ID NO: 426121 - protein, 366 aa, unidentified
MKKITTRTICRISRLQDGQLTIGLDVGDRSSFYCAIDGKGEVILEAKVATRPEALRETFGRMPRSRIALEAGTHSPWISRLLSGLGHEAIVAHARDVRLIGQSRRKDDKMDAQALARLARVDPQLLSPIQHRSAEGQADLSVIRARYALVRARTGLICAARGLTKSFGERIRGRNPKAFRPEMGEMLSPQLRAALTPLLYALETMTEQIREYDDQIEKLAEEKYPEVALLKQVKGIGTLIALTYILTLEDPRRFRKSRDAACYVGLQPGRRNSGQSEPQLHITREGDSYLRMVLVQGAQHILGPFGEDSDLRRWGMKLAERGGKNAKKRAIVAVARKLAVLLHHLWMSCEAYEPLHNTRKHRLAAA

SEQ ID NO: 426122 - protein, 366 aa, unidentified
MKKSITPIGTPVGVDVHKRRCKVVELDQGEITVRKSIANTREEWLEMLTELPSDAEIGLEVSTAGYYAMSVLEEAGWRERAHWVHTAGIDSNRRQKNDRLDAERLARKLAAHHLDPLPEAWFPPPAIRELRLRARQRCWLALLRTKAKNHLQSLLGMHGLQAPGTDPFGAAGEKWLAEQTLPMPLSESIPQIKRLLKFLEEEIKVSEKYLQAVDGQFPELTLLRTIPGIGPILSAVIWSEIGTIQRFRSAKALANNTGLVSSFYDSGEVKVSGPITRQGSRWLRWALVTAANVVIQYRNPFARRYHRLRRGKKPNVAKAAIAHSLARCVYGVLKHGCPYREDRWGRQVGVLEQEARAGARSTKTAL

SEQ ID NO: 426123 - protein, 310 aa, unidentified
MNKTLVGIDIAKAHFDLYDSLTHKHLRFDNNSSGIKKCTRYLVPLQPTLIVLESTGGYELDLVLSLQEIKLPVAVENPRRVRDFGRASGRLAKTDRIDAVLLSEYAAALNPLPQPVKSPQSRKMKALVARRHQLLQMRTAELNRRDHAKDKDIDQSIKTIIAVFEKEIDRIEQQLRTLIEVTPDYRKKLQILTSVPGIAETTATMLLVELPELGQLNRRQIAALVGVAPINRDSGTFRGKRMTGGGRRLVRTRLYMPTVVACHHNPQISAFYKRLVEKGKTKMAALVAAMRKMITIINTMIAKNQSWCLQ

SEQ ID NO: 426124 - protein, 429 aa, unidentified
MSFKIFKFNCCGLDVHKTWIYACIGITDSNNRTEYKQARFSSFTKGLNELCDWLAKYNCKDVCMESTGKYWIPVFNILEQHSFWVTLSHPKYTKPMKGNKTDRKDAKWICDLYMCGMVKPSFIPPADIRELRDLVRYRFKLTCMITGEKNRAQNCLTVSNLKLDDVFSDVFGKSSRSITEHILQHPGEKFDIAPFVDSRCKTPITEIQAAVDGAISKEQVVKLRQCLDHIDELNKHISEVEQEILRLSDKYEAALNLIRTVPGFNKNPLTAIQVLSEIGGDMSVFPTAKHLVSWAGCCPRNDQSNQKIKSTRISRAGSYFKPVLVQVANALIKSKKHSEFTSRYKRIKARRGHKKAIIAICRMILTAIWHILSDLKPYTPEGFLESRPVKEGKVLSTFKPPQGWFICYDLFFSDNLYFFVSNFFLLHQT

SEQ ID NO: 426125 - protein, 466 aa, unidentified
MKSYYLGIDVSKGYADFVIVDKQKQPVVKNFQLDDTFDGHSHLYQILGLFFTEHRNSTVYCAVESTGGYENNWYNALTKFQASLNIKVARLNPAAVFNNSKAGLKRNTTDKISAQNVAEYLVSHPEKVVYQQHDQMASLRKQWGFIQMLTKQCTQLLNQINNLLYTANPELLLFCRDGMPIWVLKLLLKYPTSGQLKKARAKTLTKIPYVTMPRAQQLIANAKRSVASATDPITAQLIGATARQILHLKKTIATQDKLMAADCDLPEVDLLKTFIGIGDASAIGLILEIQSVARFPKAKNLASFWGLHPVYKISGDGSGGFKMSKKGRKQPRKILFTVTLTATEHNPVIKELFQYQLARGKEKMDAIGICMHKILRIIYGMLKNKTAFDPKIDATNKMRRVSAKMVNTKSKSDRRFQCYDANAPVSGRQQKKRVEREQSHSVNDTKHGISAPVPIGNIIANTLAKL

SEQ ID NO: 426126 - protein, 359 aa, unidentified
MAETPETSHVVGGVDTHKDLHVAAVVDHYDRVLGTESFPTTRHGYRLMLIWMRSFGDLQRVGIECSGSYGAGLLRYLQTAGVEVLEVVTAPDKNERRRRGKNDDFDAESAAHAAFTERRTVTPRSRDGMVESLRVLRVCRKTAVQARRIALQMIQTTIICAPDRLREPLRKMTRMQLIRTLAAWRPDLTAFRQVEEAYRISLKSLARRYLELHDEIADLDDMIEAIVKDLAPELLEQIAIGLNSAAQLLLTAGDNPERLKSEASFAALCGVSPVPASSGKTVRHRLNRGGDRAANSAIHIIAIGRLRLDPRTQAYVAKRIAAGNSKLEAIRSLKRYIAREVFGIIMRRYKEINQTQIAA

SEQ ID NO: 426127 - protein, 476 aa, unidentified
MSSYFLGIDASKGYADFVVVDSRKRIVESVFQLDDTFEGHAHLYQFLEAFCETHSTANLFAGIESTGGYENNWFHALRRFQGSLPLRVARLNPALVQKHAEAEGHRVKTDAVSASYIASFLVAYPEKVNYEQEDSLAGLRAQWRFIDQLTKQETALRNQFQTLLYSAHPELISFLSSGIPAWVLKLVGKYPTARRLAKARLESVVKIPFITRERAKELITAAMQSVASLQDPTIERLLQDLSQHILLLEDMLKTQKQVLEAQLELPEEVDLLTSFGGIGAYTAVGLLLEIQAVERFPSSKKIASFYGVHPAYKISGDGITLVKMSKQGSSRMRAMLFMITLNAIQTNPVIAPLYRRLVEEQGMEKMAAIGVCMHKTLRLLYGMLKHRQAFNPEVEREHRQRYRSEADGASSDRKRRYQHYDQSAPVSARAKKRRRQQKHSQSVVHAAYGMLTPTIAYPEQRASDSKSSFKEQSNPA

SEQ ID NO: 426128 - protein, 450 aa, unidentified
MMREPQEIQDEAHEQVAERVAAVDVAKASGMVCTRVPHPSQPGRRLTKVWEVAATTGAIIELGDHLAGLGVELVTLESTSDYWRGFFYLLEAAGLEVQLVNARDVKNVPGRPKTDKLDAVWLAKLTERGMLRPSFVPPAEIRQLRDYTRLRIDLTRDRSRHVQRLEKLLEDALIKLSTVATDIMGKSGRAMLEALISGQRDPKVLAGLARGRMKAKHAALVQALTGRFDDHHAELARLLLDQYDALTAQIDRLTARIQELLAAIPAAQGVDTDGTTGPDAGTGPDAAVLPAVARLDAVPGIGVKAAQVLLAELGLDMGIFPTPAHLVSWAKLCPRTIQSGTKHRAGTTGKGNPYLKGILGEIAAAAAKTDTFLGERYRRIVKRRGKRKALVAIARSILVIVWHLLADPAARYHDLGAGYYASRIDTARKARNHIRQLEALGFTVTLAPAA

SEQ ID NO: 426129 - protein, 370 aa, unidentified
MLTTTHDNEEIIERVAALDIGKAELMCCVRVPDGDHAGRRLQEVQACPAMTRAVLGLADHLGRLGVTRVVMEATADYWKPVFYLLEAAGLETWLVNAKDVKHLPGRPKTDKLDAVWLCKVAERQMLRPSFVPPPPIRQLRDLTRYRADLVAARTAEKQRVEKLLEDACIKLSAVVADIFGVSGRDMPAALVAGERDPKVLAQLARRSMRAKIAVLEEAFTGHFTTHHAFLLRTMLGRVDAISADIAAVDERIAAQAAPLAGAVARLDDIPGISLASAHVILAEIGTDMTRFPTAAHLASWARLAPASANRRARRKARAPPGTGTPTWPPCWATPPPAPPRPTPSWARSTGASPAAAAPSAPSSPSAARSW

SEQ ID NO: 426130 - protein, 420 aa, unidentified
MKVVYQTCCGVDVHKSFLVATIIKTTSGIEPSYQKKRFSTFNNSILEFKKWLLDNSCRDVCMESTGKYWIPVFNLLEDELNVTIANPKWVKAVKGNKDDTKDSKWIGDLFRLGLVPGSYIPCKPIRILREFTRYRYKLTSCRSSEKNRFQNALTVCNVALDSVVSDIFGKSATSVIDYLLKQSDNSINHEEISSRLLRSLKKKSESVLESIEGYQMTDAQKYRMRLVHAHMDYITSTLADIDSMIDSLMEPYENAVQLLCTIPGVDRSSAISIISEIGTDMTQFSNSKRLCCWAGLTPGNNESAGKKKSVRITRAGVYLKPTLVQAAHAAVKSNKSPYYKAKYERIMKRRGKKRAIIAVARMILTAIYHMLSTGEAWNPTDLYQIDMPEPLKNKQKEKAVKQAKKLLIHEGILSESQFAS

SEQ ID NO: 426131 - protein, 343 aa, unidentified
MQTITTIGLDIAKSVFQVHGVDAGGKAVVRRQLKRRDVLAFFQKLSPCLVGIEACASAHHWSRELQALGHTVRLMPPAYVKPYVKRQKNDATDAEAICEAVTRANMRFVPTKTAEQQSGLVLHRARHLFIGQQTSVINAIRAHLAEFGIVAPVGRHGVEELLNVVADPSDRRVPEMARVCLLAFGAQLRRIKEQILEFDRLIRAWHRCNEMSMRLDEAPGVGPVLATALVAAVADPKSFRSGRNFSAWIGLVPKQHSSGGKNRLGNISKQGDRYLRGLFVAGALAVIRYAKIHGTNHRPWLTALLARRPTKVVAIALANKIARMVWAMMARGESYKEPVALAR

SEQ ID NO: 426132 - protein, 479 aa, unidentified
MNAKAKNNKNQVSNNFSVINTLSAEERQTRVDDLLNTLQAKTWHDLETSGKFDKNAKLSFISDDMLIVGCDIGSETHYLRAIDRKGRELSKKPFSFLNNEEGFEAAKAWMVDLAAVNGKKQIVLGLEPTGHYWFCVATWLISNGISVVQVNPYAVKQTKEIEDNSQLKDDRKDPKVIANLVMNGNYGMPYLPEGIYADLRSLSLLRSQLAENRIRSINRLHRLMKIYFPEYKDAFGKTDGSFAMEILKVAPFPEDIIRLGEDGIRDIWHNAKLRGRGYSRAAEIFKYASVSIGKKEGSEPDRYSVKCHVEDIISLDERLATVEAAINEKCMEIPHAENILEITGLGQNIVAGIISSMGDIERFDDAKEIQKLSGLNLVANSSGKHNGETKISHRGRKELRTWLFQGAKSVVAHAPEFQYIHEYYTTRAKNPLKKMQSLIVIACKLLRIIFTILKKGITYDPQKMLDDINRFEEAEIVAA

SEQ ID NO: 426133 - protein, 388 aa, unidentified
MIYAGVDIAKTDHVIGAVDERGAEMCRPMPFKNTEAGLERAVAWLEGLAGSPSDVVVGMEATGHYWMACYSFLVARGYSVAVINPMQVKAVRKLKKLDKVKNDRIDAWLIAETLRIGQYDETRLATDEVASLRSLSRYLQSLRGMAAELKTQCVCLMDAHFPEYAGIFSDMFGAGSRAVLSKSPLPFELARRRADSLARDIAEASRRGGKSAGYAARIKAAARSSIGVRLGQVKSLIRQIEFADSECAKVEARVRALLDEVEPLVLTIPGVSYATGAQIVSEIGDVSRFRNASALVSYAGLNSSVSQSGQFDSGGGPITKHGSPYLRRALWLAANRARQYDPGLRAFYDKKRAEGKPHRVAVTAVARKLCHIVFAVMRDQVPYDPGRE

SEQ ID NO: 426134 - protein, 360 aa, unidentified
MGQGKELAPELTVGLDLGDRYCEICLLDSEGEVVERGKVRTGELPLRRRFGGIERARVVLEVGTHSPWISRLLAELSHQVVVANPRKLRLIYENPRKTDRADAEYLARVGRMDPELLAPVTHGGPQAQADRGVLRARQQLVSIRAKLINHVRGAVKSWGERLPSCGTAVFAKRMEHVIPEALRPALKPLVRQIEVITEEIKAFDEQIEQLCEERYPETRLLRQVPGVGPKTSLSFILTVEDPDRFKRSRDMGPYFGLVPRQRDSGSRERSGRITKTGDKMCRRLLVQSAHYILGPFGPDCDLRKWGKQIIERGEARGRKHAAVAVARKLAVLLHRLWVTGEAYEPLRAAKAKEEPNAALV

SEQ ID NO: 426135 - protein, 412 aa, unidentified
MRIVYPRCAGIDIHKQSMTVCMIVDSQNGSAPEYHKRKFATHTEGIGELAAWLREFQVTDVGMESTGVYWKPVWNALEGEWKLHLCNPHHTRAIPGAKTDFRDGTRVAELLAYGKLPESFIPPQWQRELRDLTRLRARYTQEVTRIENRIEKVLEDAQIKLGTVTSKLLGVSGRAMLEALARGETDVDKLAGLAQRKLKRKKPALRQALQGKVTEHHRFQLGMLLDDLKHTEEKITQLELRIWEYVEPHRELVERLDQIPGVDWLSAAVILAEIGPDVSHWEDARKLASWSCLCPGNCLSAGKRLSGRTRKGNPWLRRAFCQMGWAASHKKNSYTKAQFRRLAGRRGKQRAVLAVAHTLLTVVYHLIANPDLQYRDLGEDYFDRRNAEQTKKQLVKRLAKLGYEVTLTPKAA

SEQ ID NO: 426136 - protein, 331 aa, unidentified
MFPVGIDVSKNTLDLCMLYDGIKGRIKTRNIQNNRHSVENILRWLRLQHCGPEDVHVVMEATGVYHERLATELHDAGFYVSLANPHRSREFARGMGIMTKTDKVDAYMLACYAFLKNPHRWEPPAPEIRYLGALLRRRDVLLGDALREENRLEKYLSTDTPADIISSCMHMAQLLREEVSNIERQIKAHIKASPALRRDYTLLTSIKSVGPQLGMHMLVVLRSHDFSSAEQAAAFLGVVPIEKRSGTSVRSRPRMSKIGPPQLRAKLYMSALCGKIYNKRMRNIYDEMCLRGKPKMVAIGALMRKLVHWCYGVLKTGIVFNDEGLKQVLST

SEQ ID NO: 426137 - protein, 346 aa, unidentified
MKQISTIGLDLAKNVFQIHGADAEGSPILNRKLRRAEVLRFFEKLPPCLVGLEACGGSHYWAREIAALGHDVRLIPPIYVKPFVKRGKTDAADAEAISEAVTRKTMRFVPIKSAEQQAAGMVLKTRALLVRQQTQAINALRGHLSELGVIAAIGTAKVAALIEIVRDEEDTCLPKAARFALAEVADQIETLTRQIDRLEREIVAQAKLDEDMRRLTTVPGVGAITAATVKALVPDPDGFKSGRHFAAWLGLTPKPHSSGGKERLGGISKMGNPTIRSLLVCGATSVLRRVKGNDKAPIWLIGLLARRPFKVVAIALANKMARIIWALLTKGGTYRNTGTANGAASA

SEQ ID NO: 426138 - protein, 344 aa, unidentified
MRELYYIGLDVHKKSISYCIKRQDGAIIDQGTIEATRTALTAWAAAIEEHPWVGALEATLFTGWIYDHLKPFARELQVAHPAMLKAIACGKKKNDRLDATKICDLLRCNLLPRCYMAPPEMRELRRVLRYRNLLVCEAVRMKNKISGLLMEVGEPYNAKRLHGRKYFYSHLDSLRDTPESVIELLAITRGSLEMFDRLQGELLRGLRSHPLLRARVELLQSIRAVGEVTALTWALEIVEPERFGALSRVVSYSGLCAAQRESAGKTQRGPLSKQRNKHLQRVLIEAAKLAPRWNPQLREVYERACERGPRNRATLAVARKLAAYLWAVDTSGRPFVPRVEDEAA

SEQ ID NO: 426139 - protein, 413 aa, unidentified
MVFWSVQYLLQHLLVQTQVSHQLLQPLILILQLPQTPQFRHARPGKFFLPVNGMDYFLPLRLTVRNVLTRRITMNIVFLGIDLAKNVFQLCGLNQAGKPVYTKRTGRKELLQTLANIPACLIGIEASTGAFYWQREFEKLGHKVKVISPQYVRPFVRGQKNDGNDAQAIAVALMQPTMQFVPPKSPEQQDIQALHRARQRIVNHRTATVCQIRGLLLDRGIPIGSAVSRARRAIPLILEDAENGLSSRMRRTIAELYDLFNDLGRRIHFLDKEIETVFRQSEACPRIAKVKGIGPKTATAVVAAIGKGTEFKNGRHFAAWLGLVPRQHSSGDRQVLMNMTKKGDKHLRTLFIHGARAVVRVATNNNDGHMNQWVNQLKERRGFNKTTVAVANKNARIIWSMLRNDTGYQVVCN

SEQ ID NO: 426140 - protein, 343 aa, unidentified
MQAIKTIGLDIAKSIFQVHGVDADGQVVIRRKLKRRYVLAFFQKVPPCLIGMEACATSHHWSRELQALGHRVRLMPPAYVRPYVKRQKNDATDAEAICEAVSRANMRFVETKTTEQQSCLVLHRTRHLFIRQQTSVINAIRAHLAEFGMVAPVGRKGLEQLLEAVANARDQRIPALARACIAALGAQLRALKAQILEFDRQIMLWHRSHETSKRLDEIPGVGPALATALVASIADPKAFRSGRDFSAWIGLVPRQHSSGGKEKLGSISKQGDRYLRSLFMTGALAVIRYAKIYRSKHRPWLTALLARRPTKVAAIALANKLARMVWAMMSRGERYKEPVALAA

SEQ ID NO: 426141 - protein, 312 aa, unidentified
MEKLSYGGIDVSKDRLDVVVLPEGWFFSVSNDTAGWTELVARLRPLAVCAIGLEPSGGYERGIIRALLAARLSVRRINPNKLRQFARARGVLAKNDRLDARLMAEYVAIMPTRAVQRDDAVDRLAEIVTMRRQLCDEHVTVENQTAHLEDAMLRRLSKRRLVRLEADIRLLDKRLAEMVATNAAFARLYELLTSMPGVGPVLAFTLIALLPELGKMGRKQIAALVGLAPYDFDSGKLRGHRSIYGGRMPIRNVLYMAALSASRYNPALKTFSNRLAHANKKSKVIIVAVMRKMITTLNAMLRDNAVWQPQSN

SEQ ID NO: 426142 - protein, 381 aa, unidentified
MKKDSIARLQVTKSQIRRMAAKQRLTVGLDLGDRSSRYCILDEAGEKASEDQLPTSKAGLDMLFAKMAPCRIALEVGTHSPWVSRHLAAMGHEVIVANPRKVRLITQSVKKNDRMDAEQLARLARVDPRLLAPIRHRGPEAQADLAVIRARAELVEGRTKLINAARGLTKPMGERLKSCDADTVKESMADGLSEATQKVIRPLLKSVEVITQQIKVYDQQIQEIEKRYPETKLLKQVHGVGPLVSLAFILTLEDAERFEHSRDVGPYLGLTRKQRESGESAPELGISKAGDELVRRLLVQAAHCILREDAPDSDLKAWGLTKVGAGAGKKGSKSRKKKAVVAVARKLAVLLHHLWVTGEVYDPQYNRKAIEASKRTKQAAA

SEQ ID NO: 426143 - protein, 338 aa, unidentified
MTILTVGIDLAKNVFAVHGVNEAGKAELIRPAVPRDKLHELIASLPPCVIGMEACSGAHHWARLFQASGHTVRLIAPKFVTPYRMTGKRGKNDAADAAAICEAIQRPHMRFVPIKTLDQQSRLMVHRARQGFVEQRTATINRIRGLLSEFGIVLPLKAATVRRRACECLEDLPGHANTVIGDLLSEVTHLDERIAQYDTHIQAMAKDDERARRLMQLGGVGPTTATCLLAMIGNGHDFDCGRQFAAWLGLTPGQYSSGGKTRLGRITKAGDAYLRSLLVLGAKALLAAAKNKADPVSRWAIALAERRGYWRAVVAIAAKNARMAWAVLRRGDEFVLPA

SEQ ID NO: 426144 - protein, 339 aa, unidentified
MHYCGLDLGKKSSNFCIVDEKRSVIREGKVRNRVHELCRLFGKLPPMKIAIEASTKSFWIVDRLREFGHDAVVVDPGRTKAIGAAFIKHDKLDARILATLCAADVLAEIDRPTEEQRLARMPVVARDGIVRSRVKLVQLVRSLLDSEGIELKKCALNVFVDRVTDLWDEIPAGMAHAIEPVLTAIHMLTEQIADCDSRIEEAITKDPDAQLLMTAPGVGPIVAACFLMAVRDPSRFKSGRDVGSYLGLVPSLYQSGETYRRGRITKHGNRQARWALSMAASVLLSVVKKQSALRQWGLEVADRRGRKTAVVATARKLSAVLWSMWKNQTPFEPRLTEAA

SEQ ID NO: 426145 - protein, 361 aa, unidentified
MRIIGCDLHARQQTLAMLDTLTGEVVNRTLMHEGNEVRKFYTELPRPVLVGIEAIGPMQWFLNLLEELGIECQVGDATKIRAAEPRKQKHDRRDAELILKLLIEKRFPRIWMPGKELLDLRALLLHRHHWVRLRTQIQNALQAIALANGLRRGHGLWSYDGQAKIAFLPLAPHASSRRSALQTMYRQMKEEIENLNQQVAEQAEQRSGARLLMSHPGVGPVTALATDVFLGDPQRFADGKALGSYVGMIPREYSSGARQRFGALTKQGNPLLRFLWSEAAAHAARRDPDLQRFYRRKLVQKGLGKARMAVARKLGIRLWIMLRDQIDYQEFCRRGQKQYSSAACAGMPEVRFGAHSHRPVG

SEQ ID NO: 426146 - protein, 411 aa, unidentified
MRLFVGDDWAEDHHDVEVMDQAGKVLAKRRLPEGVAGMGQLHELTGRFLPDDEQGAQVVIGIETDRGPWVTALIAAGYVVYPVNPKQASRYRERHGVSGAKSDGADAHMLADMVRTDSHQLRPAAGDSPEAEAVKVTARMHKTMIWERTRAVQRLRHQLREYFPAALEAFEDLDAPDTLELLGKAPDPERARKLTRAQVSAALKRARRRNIPDKATAILAALRGGHLGQPPALTVAYAGTVRSLIALITTLNEQVKILDGQVREHFGRHPDAEVYLSQPGMGPILGARVLGEFGDGPRRYRDGKARRNYAATSPITRASGKKKVIAARFIHNDRLVDALNAQAFAALNASPGARAFYDQQRAKGIEHNDALRRLANRLVGILHGCLKTSTLYDEATAWGHRENLAQSSVAA

SEQ ID NO: 426147 - protein, 312 aa, unidentified
MKQQHQDSEVTIGLDLGERRHRFCALDGRGEVVEEGSLLNDRPSLARLTARYPGALAVMEAGTHSPWVSRYLEGLGWEVIVSNPRKVRAIYQHERKSDQRDALMLARIGRMDRALLYPVRHGSEQAQQDLLRIKLRDSLVRARVALINSVRFSLKSLGYAVCNPSSERFHKVAMERLPERVQQMIAPSVQALAELSTRIAVLEREINVVARTKYPQTLWLQQVPGVGVLTALYFVLKIEDPQRFENVRDVGAYAGLCPRRDQSGQSDPQLRISKRGDPYLRRLLVSAAQYILGPFGPQSALRGYGLMLAARW

SEQ ID NO: 426148 - protein, 404 aa, unidentified
MTARRRTKKEAEQMHWVGFDVGKAFHWVCVLDGEGEEVLSRRVEATEEDLEAACSEIAALGGEGTVGIDLRGGPATLLEAILLERGEKIFHVPGIAVNRARDAYPGESKSDARDARVIADQLRLRRGSLQEIRPRNEVVAEMRVLTAHRRDLLQDQTRRAARLREVLLGVFPGLEAALDLKREGALLAVTKVATPSAARRLGGARLHQWLKAKGVRKARDLAERVVAAAKAQCRELPAAEAKSALAAELAFEMLRTRQRLAELDRRLEELLATTPEAEIVRSLPGMGVVFTAEFLAEVGDLGRFASADSLAAAAGIAPVLRASGASSHQRRARRGNKVLKRLLYRSAFSCISHHGRSEAFYRRKRAEGKGHHQAVIALARRRVNVIWAMLRDGEIYRERSSQTA

SEQ ID NO: 426149 - protein, 395 aa, unidentified
MFLGLDVGKDAHHAVGLDPDGKRLHDAPLPNTEPKLRALFDKLARHGTLLVVVDQPATIGALPVAVARAAGHQVAYLPGLAMRRIADLYPGRAKTDARDAFVIADAARSLPHTLRPVDVGDEALAELEVLVGFDDDLAGEATRISNRIRVLLTGTHPTLEHAIGPKISHPAVLEILSRCGGPTGIAKAGRRKLTAIAKVHAPRMGDKLVEAIMTALGEQTVTVPGTAAADTVLPRLADSLKTVLQQRKQVAAQVEGILDAPPLAGVLTSMPGIGVRTAARILLEIGDASNFASSGHLAAYAGIAPVTRSSGTSIKGEHPARTGNRKLKHAFFLAAFAALSDPTSRTYYDRKRAEGKKHNAALICLARRRCDVLYAMLRNGTHYRHPEAAPAPAAA

SEQ ID NO: 426150 - protein, 369 aa, unidentified
MKKNSKNSKENARRKALQARSGQTRLTVGIDLGDEWSQCCFLDDKGEIVEECRVKTTREAVKARFGELKPALIAIEVGAHSRWVSQLLSELGHEVIVANARELRAITGSDRKSDRVDAEKLARYARVDPKILRPLRHRGEPAQVDLLVLRGRAVLVKTRTQIVNSVRGMVKSFGYRMPTCSTEKFAQLKVLVPLLIKESLAPMMEALEQVQKKIEEYDERVKKLATEKYPETKVLRQVWGVGEITTVSFVLTIEDKERFGKSRDVGPYLGLRPRRSQSSESDPELRITKAGDCFLRSLLVECAQKILSEKAPDTALKQFGKRIEARGKKKAKKRAIVAVARKLAVLLHKLWVTGEVYEPFPGAKERKAA

SEQ ID NO: 426151 - protein, 409 aa, unidentified
MRYFVGLDWASREHAVCVVDEQGTVITRFMVEHSAAGMAELAVRLCKLAPAAELRVAIERPTGLIVDTLVEAGFLVVPIHPNAVKATRPRYSAAQGKTDPGDAYLLADVLRTDGHRFRVLTPLSDETKALRGRVRLRDDLVAQRVALANQLRSLLEQFWPGAAAIFCDVDSPIALDFLERYPTPASASALGEKRMGAFLASHGYCGRKSATELLTRLRAAAVGVTGELEAKVNGECVRALVAVLRPLVAQVRSLTAAVEHAVEAHPDGIVVTSLFRTGRVCAAQILAELGDDRARFTSAEHLAAESGVAPVTRESGKHRAVGFRWACNKRLRTALTCLADSSRKTSPWAEALYQRARDRGCDHPHACRILARAWCRVLWSCWQKRVPYDASKHAAARAFVPQLVHQEAA

SEQ ID NO: 426152 - protein, 530 aa, unidentified
MAREASTLSLATCHAGFSRRGIDPVGETSIVSGIPLVARCLMAFTFRTRKPETSMVVPSQEPTKPTNPKKPAKPSKSPKRSRPVPVPASAAALHVINPDAAGIDVHSNMHMVCVPADRDANPIRQFGANTADLHELAAWLRNCHIKTVALESTGVYWIPLFELLEAEGFEVHLVEPGQLSRCGARPKTDVLDAQWIQRLHSYGLLRGSFRPPDSVLALRAYWRQRQMQVRYAASHVQHMQKAMEQMNVKLTEVVTDITGLTGMLIINAILDGERDPIKLAELRDERCHCSQEQLALALEGTWRPEHLFELRQAHALYQFHHRQITECDQQVEAELAKFPNRAGEKTRTVKPRKRGRKSNDVRFDATGPLFQALGVDLTLIEGIDVGTALVILAEIGVDVSRFPTEKHFASWLRLCPPQNESNKTNRRRGHRKSTSRVTIALRMAARSAGKTMTPLGCFYRRIRSRIGGLGAVKATAHKLACLVYRMLKYGQEYVTQGMEEYQAKVKANLLRALKRKAAAMGFELTPLPTP

SEQ ID NO: 426153 - protein, 390 aa, unidentified
MSVLTAPRTQEVTVSRAPDPKLFVSLELSCSTWLVTSLAPGGDKMSKHTVAGGDGAGLLELLERLRAKAEQRGCGAVGIVCVQEAGYEGFWVHRLLTGRGVESHVVDPASVAVPRRQRRAKTDAIDGETLLRTLLAWERGEPRVCAMVVPPSPEEEDERRISRERETLIQERIRHTNRIKGLLRAQGVAEFDPRRRDRRQRLETLRTGDGRPLPRHLRAEILRAFERIEVLLRQIAEVEAERDRHLKKGAAEAEDRAPAPLLTRLKGVGQEFAAVLALEGLFRSFGNRRQVAAYAGLVPTPWKSGRIDHEQGISKAGNPRLRRTMVELAWQWLRHQPGSVLSRWFHDRVGRERGRIRKIAIVAVARKLFVALWRYATQGVVPEGAVLKGA

SEQ ID NO: 426154 - protein, 311 aa, unidentified
MSLTIGLDVHKDTLVLAINGGAQWTTTRSSADLTALVKKLGRLQPSLIVLESSGGYETPVLAALHAANLPVSRVNPRPVRHFAKASRIQAKADRLDARVLASYGATMQPPLTPAPTPAATRLASLIRRRRQLTETAAAEKRRRETADSEARASIARHVAFLEGEIADLTVQIAAFVDTDPVLQRRRELLCSVPGVGRVTAQLLLAELNELGPLDAKALASLVGVAPFTQQSGASTGTAQIDGGRRHVRTGLWMPTISAMRFNPVIRAFRDRLHADHKVHKVVTIACMRKLLTILNAMLAKDELWTPRLPHA

SEQ ID NO: 426155 - protein, 324 aa, unidentified
MTIPALGIDVSKDTLDVNIIIRGKERRQHFANSADGWASLLSWLRQNRVERVHACLEATGRYSMGAALALHDAGHVVSVVNPAQIRDFARSRLGRNKTDQFDAAQIRDFASLMAPKPWTPPSPALRRLCELHTMRAGFMASLVEWKNRSGSGLDDATAQTLAQSTIQHFTAQIKAVDQAIYQTINDDDDLHGKRDLLLSISGVGDILAAVLLAQLPGPDVLKTAAQAVAYAGLNPRQHQSGSSVHQPTRISRIGNAKLRTALFMPAMVAMRFNPVIAAFVTRLRERGRLKGKQIVVAAMRKLLVICFGVLKSGKPFDPAIAMAA

SEQ ID NO: 426156 - protein, 429 aa, unidentified
MIRFAGLDVHKKLVVAAVLDAQGGLVAEHKIPATAESLTAFAREQLTPEDRVALEATTNCWAVVAQLEPHVAEVVVSNPLRTKAIASAKIKTDKIDARVLAQLLRLDYLPRVWQPDPTTRARRQATHRRASLVGLRTGSKNRIHAILHQRLIPVAVPELFNARGRAWLAALELDDAGRAALESELRILALAETEIAALDRRLAEGAYQEPRLRLLMTLPGVDFGIATTLLAALGDITRFDSPDQAAAYLGLAPSTRQSGAHCYHGSITRHGNPHARWLLVQAAQHLAAHPGPLGVFFRRLMKKKNRNVAVVACARKLVVIAWHMLRRNEPYRYAQPRQLAAKMSRLRVRVTGARRRGGLAQGSGRSPRYGLGRTRRVPALSQVCAAEALPAPQPLAPGEQRMVADHGLAAFHRQIQTSYREPKKKTAAQ

SEQ ID NO: 426157 - protein, 407 aa, unidentified
MDLLKTVFGIDVSSRKSNVCIMVNGQKVNDYAISNDMVGFNRLLGDLKQVTKPQIIFEATGVYSRRLQAFLDMHELRYVMMNPLEAKRKTKDDLHKNKTDKLDALYLAKLQSEYPQRLAYVQSKEYQELMANNRIYEQASHDLISNKNRLHKAVQLTFPEIEHLLANPRGKNYWSIALRFPHPDIVLEAKEADIIDFLKGLSGIGKKRANDITQSLIRLAKVACPAVKENSAHVRGLKMAINNILSAEEECQTALQEMAKLAPKRDLEILTSIPGIGENTALRIISELGDIRRFNNPSQLNAFVGVDPQVYESGNLTAHLSISKRGTAIGRKVLYLAINQIQSAKKAGNPCHIADYYEKRKRSSETASHKKAAIASIHKLLRTIFALIKNDQLYSYDVAKHNQRLLS

SEQ ID NO: 426158 - protein, 350 aa, unidentified
MKEYISFDSHKHYTLMERENMRTRKAMQRRIEHGPGSIRRALAGCEPGSAVAVEATGNWYWILSEIEEAGMRPLLVHPRKAKLMMGMINKTDKLDVHGLNTLQRNGTLPTVWIAPAALRDLRELTRVRMALSCQRTRLKNRLGATLAKYGLGVEASDPYAAGARERLRHEVGKLPAQTQWAAGMLLEQLDFITGQIGAQERRLKELLKITPQMQRLMSLPGIGLVLSAAIALEIGDIGRFASAGRLASYAGTTPRVISSGDKTRYGRLRPDVNHYLKWAFAEAANSVAVNHARCPQRHTSQLYRRLRERKGHAKAIGAVARHLAEAAYWVLQRKEAYREPALNQGPSRKR

SEQ ID NO: 426159 - protein, 345 aa, unidentified
MLYIGIDVHKKNLQVCILDNEGERLSNCRLENRPESVAGYFGKIKAPAGVALEATHNWGMLYDLLTDQGFDVHICHSKEAKLIGLASVKNDRVDAYKLATLLRVGLLPEAYVPGAESRELRGLVRGRASLMGQSTAIKNQIHAILRANWVHSPWTDTFGKSGRKFLDSLEIADSYKLVMASKLSVLDKISEQVSVLNHEIVRRAHLDARAMLVTTAPGFAEFRAVMLLSEIVDISRFAGAEKLVSYTGLNPREHSSGEKARRGKISKEGSSWLRWIFVEAAQQAIKEEGKIQDLYLRVSEKKGHNRGVVAAARELVVSIFWMLKRMEPYHADGKRVHIALASEVG

SEQ ID NO: 426160 - protein, 354 aa, unidentified
MQTITTIGLDIAKSVFQVHGVDAGGQVVIRRQLKRRHVLTFFEKLPPCLVGIEACASSHHWSRELQALGHTVRLMPPAYVKPYVKRQKNDMADAEAICEAVTRANMRFVPTKTPDQQSGLMLHRTRHMFVRQQTAVINSIRAHLAEFGIVAPVGRKGVTELLHVVADPNDKRVPEVARACLTALGTQLLALKEQILEFDRMILAWHRSNQTSKRLHYIPGVGPMLATALVASVADPRTFRSGRNFSAWIGLVPKQHSSGGKERLGSISKQGDRYLRSLFVAGALAVIRYAKIHGTGHRPWLTALLGRRPTKVAAIALANKIARMAWAMMAKGERYKQPAALARQTRSRRATGVM

SEQ ID NO: 426161 - protein, 336 aa, unidentified
MTEIEDRRCAETAIRVDIGAIFVSLELSRSTWLVTSLSPGAREKMSGHSLDAGDLKGLFDRFADLQRKAAARTGETYRIIVIQEAGLDAFWIHRALEQEGFESHVVDAASIAVPRRRRRAKTDRIDGETLLRVLMAYKRGEPRVCAMVRPPSVEEEDRRRLGRERQTLLDERVRHVNRIKGLLFAQGVRDYEPLRRDRRARLEDLRTGFGQPLPAHVRAQIARELDRLELLLGQIKAVEAARDAMLAKEEGAAPAATLARLRGIGPEFAATLWLEAFFRSFGNRRQIAAYAGLAATPWRSGSIHHEQGASKAGNARLRTALIQLAWLWRRHQPSRP

SEQ ID NO: 426162 - protein, 424 aa, unidentified
MKVTYPTCCGVDVHKSFLVATVIKTTGGIEPSYQKKRFSTFNNSILDFKSWLLENECHDVCMESTGKYWVPVFNLLEDQINVTIANPKWVKAVKGNKDDTKDSKWIGDLFRLGLVKGSYIPCKSIRILREYTRYRYKLVSCRSSEKNRYQNALTVCNVALDSVVSDIFGKSSSSIIDYLLEQSGTTINHEEIASKLLKRLKSKEDAVIESIEGYQMTDSQKYRMRLVHAHMDYITAEINDVDKQIESLISSVPDYVKAIQLLTTIPGVKRDSTITIISEIGIDMSQFCNSKRLCCWAGLTPGNNESAGKKKSVSITRAGVYLKPALVQCAHAAVKSDKSPYYKKKYESLVKRRGKKRAIIAIARMILTAIYQMLSTGEVWNPSDLYKIDMPAPLVEKQKAKAIKQAKKLLQKEGLLPPDEPLAS

SEQ ID NO: 426163 - protein, 317 aa, unidentified
MVRDRIGNILIEGEAATLYDELYAHLRQYLGPSVIGLEASTSYYALYQQFLEHDYCVKVANTLQIRQLIAKNDRLDARRLSDMLRLGTFPTSYIPGKEIQHLRGLVNIRHSLMEEKVRCNLRIQALLDRNGAVMPSCKAFSKKWKYALMQYMGSGDISAELRYEYDHYIFLEKKNEQVDQEMIGYTKKYWKNEFMLIQSITGFGQVLSCYIIANICPIERFPSSKKLRRYAGVVPTFHESGNYTSRGRIPKNSSRKLLRWALIEAANAIAKTNTKLGKYYRKKKKQKKNAGIAKVAVASSLVDIIYKVLTTKKPYMG

SEQ ID NO: 426164 - protein, 468 aa, unidentified
MLRIEAANRIRAIQPDSKFGLGAVLEQQTVARGNTANTKGRLTSSGAFRSTHRKGHGMEVVHPSCCGIDVHKGTVCACISIKDNQRVEKQKRRFDTTTAELRELAAWLRECKVTTVAMEATGVYWKPVWNILEEEFELLLVNPQHLKSIPGKKTDFKDGERIADLLQHGLLRGSFVPPKPIRELRDLTRARASFAQERSRIINRIEKTLEDPNLKLGVVASDVVGVSGRAMLEAIIEGEQDPVKLAELAKGTLRKKIPQLRLALEGKITAHHRFMLRQWLDALDFTDGKIADLDQQIAEKARPFESTVQTWMQVPGLRRVNAFSLLAEIGADMKQFPTAAHLAAWAAICPGNRESAGKQTSGKTCHGNPWLRRTLCEAAWAASRTKNSYFRALYQRKMRTRGKNRALIAVAHSLLTTVYSFTTAGQPYRDLGLDYFDHLNRQNLERSLVKRLEKLGNHVTLEPARPAA

SEQ ID NO: 426165 - protein, 342 aa, unidentified
MNIHKVSHGSLTSKDGMLLGFEHYVALDWSKQTMAIGHMSPRSQHPKVFEQEANLAALKEYLTSLRGRTVLVIEETTTAQWLYVELRDSVERIIICDPYRNRLLSDGPKTDKVDAAKLCQLLRAGLLKEVYHTTDEIYQLRQFISAYEDLVKSGVRLKNQRHALYHGHSESGPEAAFILGHLETALGLYEATKKQYEQRFERLSSQYRLARLLQEITGIGIIGSLTILAIVVDARRFPRSSHYLVYCGLVHFRKQSGGRDYGKRKARYNHTLKRIYKLAAMSAISSLSNPLREYYDQLRAQGVADYNARHALARYIARITYGILKTGTPYKPYDATLKKNAA

SEQ ID NO: 426166 - protein, 337 aa, unidentified
MEQITTIGLDLAKNVFQVHGVDAAGKVLVRKQLRRAEVLRFFAPLPPCLVGMEACGTAHHWARELTKLGHTVRLMPPAYVKPYVKRGKTDAADAAAIAEAVTRPTMRFVAVKTVDQQSVLMLHKVRDLLVRQRTMLINALRGHLAEFGIVAARGPGGVTAAIMTLHEAQDDLPDLARQVLHGLIDQMRVIGAEIAKAEKRIMAWHRASEASRRLATIPGIGPITASAIAAAVPDATLFRSGRQFAAWLGLTPRAHSSGGKPRLGGISKQGDGYIRRLLVIGATAVIRFARQDNGKTWAARLLERKPARLVSVALANKTARIAWAVLARNQSYTAAAL

SEQ ID NO: 426167 - protein, 391 aa, unidentified
MSMYFVGIDISKYKHDCCIISAADQQIVSKFTVKNDKDGFEHLLTTLNSLSNPEDIKIGFESTAHYALNLELFLENAHHSFMEVNPVLIKEYKKSTTLRRTKTDSVDCESIARWLMTVEYKPHSKGFYHSYSLKSLTRLRDRLIRQRSFYLVKITNVLDHTFPEFKPFFNERLSKTAIYLLENYGSAEKMAHMNSASYDKLRCASRGKFSIQQFLRLKELAANTVGVNNSIFDIELNSLLTLYNSLCKKIKTLEAEITKLIEEVHPHYMSIPGIGPISAAVIYAEYGDISNFSNPGQMLAFAGIEPGINDSGTESHGGRMVKHGSSQLRYVLLNACLPLIRFDITFATYYAKKRAEGKKHRVAITHVAKKLIRVIYALERQDVDFNVQKLR

SEQ ID NO: 426168 - protein, 316 aa, unidentified
MSVETWFVGIDVAKDRLDVAVHPTDERWTGSNDPAGIEALSEQLVRLAPQLVVLEATGGFEVPLVGALGARGLPVVVVNPRHVRDFAKALGRLAKTDRIDATVLAECAARVRPVVRPLPDEEARELHAWLARRRQWVEMITADENRRQQAAAPIRRQIEGHLRWRRCQLAALERELTTRVRRSPVWRESETLRRSTPAVGPVLARTLLADVPDLGRLTGQQIAALVGVAPFNRDSGPRQGHRSLWGGRAPVRGVLDLAALVATQHNPVIRAFSQRRVAAGKPWKVVLTACMRKLLTILNARMKHRTAWKPVPALGA

SEQ ID NO: 426169 - protein, 463 aa, unidentified
MCAELRFQAQISVFLSTETYLCNDATRSCLRDSVNVGLHYFFIGGFLLALKIVYPVCCGMDVHKSFLVACIASTDSAGVTTYKSKRFSTFSHDLRLLAAWLSNNNCRDVCMESTGKYWIPVFNILESTCNIVLAHPKYVKAIRGKKTDKRDAKWIADIFKHDLVSGSFIPPYDIRQLRDLMRYRYKLTNFTVGEKNRAQNCLTVSNVKLDDVFSDVFGKSSSAILDRLSLCPNGDFDVAPLVSGKCKSPVEKIQAAVDGSICPEQLQKLAIIRSHINAIYECKSNLDSLICSIADKFRAQVNLVSSVPGIQFFSAVSVISEIGVDMSVFPTAKHLCSWAGLVPQNNESAGKKKTTRISRAGAYLKPLLVQCALTVCKSSKHPEIRNRYLMLKKRRGHKKAIIAICRMLLTAIYAILKTATPYNPNLYSSLNSAPKSRTFTTISAIAFLKSHGYVVVDCDGVMT

SEQ ID NO: 426170 - protein, 358 aa, unidentified
MKRTTKYVALDVHQATTVASVREEGGRVIARTVVPTEAPALVEFFHGLRGTVHVAFEEGTQAQWLHELVAPLVDRVVVCDQRGQPRHGNKGDQVDADQLSELLRRGGLRAVYHGSAPQAELKELTATYRNLVEDGTRVMLRLKALFRARAIPTRGTQVYQPRERARWLAQLADRGAQFRAGTLYAELDVLRALRPPAKSAMVAQARRDPAWPVLRAIPFLGPVRVALLLATMQTPWRFRTKRNLWAYAGLAVVTRSSDDYRLVAGQPVRRRRAPLTRGLNRNHNRLLKDVFKGAATARPGPLQDCYHGMLARGMREVECIPSAAFVTLPCGHASFAEVPELFLAEVQPFLAKSRFRKS

SEQ ID NO: 426171 - protein, 349 aa, unidentified
MGEVITIGVDIAKSVFQIHGVDAAGTVVIGRRIGRARVLEFFADLPPCRVGMEACATAHQWAREIAKLGHDTRLMPPIYVKAYVKRGKNDAADAAAICEAVTRPSMRFVPIKSVEQQSVLMLHRARDLLIRQRTQLTNALRSHLAELGLVAEKGREGLHQLAAIVMECGNERLPSDARFACQAIITQLHAVQIEISGLDKRIAQIHRANADSQRLETIPGFGVILSTAVVGTMTDPKAFKTGREFAAWIGLVPRQNSTGGKERLGSITKQGDRYLRRLLVVGATSVINSARARPYKYPWVIELLGRRPTKVVAVALANKMARIAWAVLAKGERYRSPTRLSNPVIPAAA

SEQ ID NO: 426172 - protein, 368 aa, unidentified
MSLTRKERRSPWPSSRIPARFVIGVDTHARNHALAILASPTGEVLDGDQFPATAAGLTRAVSWAARRTGGDLNVLWVIEGIGTYGARLARAAADAGYPVVEAARMNARANRGVGKSDPMDARRIAAAVLPLHLTALRHPRADDGVRAAVRVLVASRDHMTTERTAAVNALTALLRVTDLGVDARRPLTSSQITAVSAWRARNEDLASATARGEAIRLGKRVTALDEDLKANTKRVTELITQSPARELLEQPGIGPVTAAVALTAWSHPGRLRSEAAFASLAGVNPIPASSGNTIRHRINRGGDRRLNRALHMAIVTRMRMDPTTRAYVARRTAEGRTLKEIRRCLKRYLARQIYRQLNAAPQASPTTA

SEQ ID NO: 426173 - protein, 351 aa, unidentified
MNKKYLCFGLGLDISKATFDACFGGKLPNGDFKVIRTKKFKNNPTGFEAFITWIEQNRVKNKLEKLDFKIMMEVTGVYHESVLYCLYRKGYQVCLELGSRVKHYCKAIGLESKNDNIDSKGMCQMAYTLNLKLWKPVSESILNIRSLLRHRKALLKTKTSLGNQLHANKFSEVKDPEVANSLIKMIKQLKQEIKIIEARAKLLSKSDKEFHRKVMMVTKSVFGLGFISVLTVVSETNGFKEFRNRKQLESYAGLDIIENSSGVFSGKTRISKKGNANIRTVLYMSVLTIIRSKSKPYYDLYSRLMKRNGGISKKANVAVQRKLLLIIYTLWKKDEAFDLSHYESVKEVVPA

SEQ ID NO: 426174 - protein, 381 aa, unidentified
MKIASGLDVHKDSVFLCILHENGEKIQQKFGVLTEELELMRDLMLSEGVEECAMESTSIYWMPVWRVLERDFKLHLVNPYFIKQLPGRKSDVRDAEWIATCLIKGLISSSFVPEEKIQRLRQYNRRIFDLSASISRNLVKLDACVQRCNIRISNYVSTVDSKGYRTVVKMLSQGITDPEVLVGALHGRTVNKHGREVLVGALTGVINDTDIDIISQLMEEIELQQRHKDEAQQKMTELCRQWFPQELENLQTIPGVKERSATSIIAETGTDMSKFQTPKHLVSWVGLRPRNEESAGKIKSRRIVHGNKFMRKTMIECAWAAPRTKGSFYSAFYQRQTIGRRKNKMKVQVAIARKLLTVVWHVLHDGCPYVPYKDLSTQGTL

SEQ ID NO: 426175 - protein, 320 aa, unidentified
MRNTVGLDISKLTFDATAIVGNAEYSAKFDNDSKGLNQFSDRLKSLGCQNLHICMEATGNYYEEVADYFAQYYSVYVVNPLKISKYAESRFKRTKTGKQDAKLIAQYCRSAQESELVKRQKPTDEQYRLSRMTAAYAQIKSECAAMKNRHHAAKDEEAAKAYAEIIKAMNEQLEVLKEKIKEQTEKPNCKEGVKRLETIPAIGRMTAAVLFHHLTSSKFETSNKFAAFAGLSPQQKESGTSVRGKGKLTKFGNRKLRAVLFMPAMVAYRIRAFPDFIKRLEEKKKPKKVIIAALMRKLAVIAYHVHKKGGDYDPSRYKSA

SEQ ID NO: 426176 - protein, 335 aa, unidentified
MLADELDYVLGVDTHRDEHVIAVVTAPTGAVVAGASAPTNVRGYRELVRVAQQHAPGRRAWAIEGTGSFGAGLCRYLQARGETVLEISRIPRGERRLRGKDDALDATRSARAALASDTLALPRRGERREALRLLLVARRSAVDVRREALTQLRAVIVTSAEPLRQELRRLPEGKLLDRCSRFRQTSKASPGELATRLVLRSLARRIQAATEEAKQLEREILTHVRALAPVLLDEPGVGPIVAAQLIVAWSHPGRLRSEACFARLAGVAPVPASSGQTTRHRLSRGGDRQLNRALHTIVLHRRQHDPATRNYITRRLAEGKSRHLYRLLQQEPAMA

SEQ ID NO: 426177 - protein, 403 aa, unidentified
MITCGIDWAEDHHDIALMDDSGFIIERRRITHDPNGFAELLAMVADHGGTADDVPIAIETDKNLLVVALAGAGFTVYPINPRAVARYRERHGQAGNKSDSRDAAVLADIVRTDRHQHRRLPANSEQQQAIKALARQHQEAIWAQNQTISRLRSVLLEFYPQALQAFPKLKHRAAMEVLSIAPTPTDAAKLTRPRISNALKRVGRRNDPALVTQIHSDLHAPGLRQPDAVEVALGHTVASLVAIIVAMLDAVAVLERELVTAFAEHPQADIIDSVPGLGGVLGARILAEIGDDPKRFSSPTGLRSFAGTAPVTIASGRSHYVKARKVRNRRLADACHWWAFAALTWSAPAREYYDHRRAVGDHHNAALRALANKLLGRLWWCLQHDQSWDDTAAWPRAATPAAA

SEQ ID NO: 426178 - protein, 521 aa, unidentified
MWNRFSLFDGHIIAEKFRKSTGKKYNHLLSFLSLTTKIGFDMSSDNIVTSNVVVIRAPLQGLCYTVRDAVDWLIPPTARRFVKGSNHSPLQYCSSVRYRQTVYVEQGYKSKVSCGTSINQINTPEVFIMICVGIDVAKDKHDCFILSSEGEVLADVFTIQNNAEGFDTLLQTIRCCARPEDKIKVGLEATGHYSYNILGFLLDKGLPTYVINPLHTNLYRKSLSLRKTKTDRVDARTIAAMLMSDVDLKPYTDTAYHNEELKSLTRYRFDKVRERAKLKQSVSRLVTILFPELEKLVPTLHLASVYGLLSEFPGAKQVAGAHLTHLKAVLSDASKGRYGRDMATTLRDAARCSVGSVMPAKSLELQHTIRLIHELDAEIEEIEAAIQSMMDEIQSPITTIPGIGVRMGAMILAEIGDFSRFDSPDKILAYAGMSPSTYQSGQLSLSGAYSHMEKRGSRYLRYALYNATKYVCLWDTTFAAYLAKKRAEGKHYNVALSHAAKKLLRLIYALEKSGLPYSSAI

SEQ ID NO: 426179 - protein, 412 aa, unidentified
MDIVHYRCAGLDISKRDAKVCLRTQEPDRARASSKVTTWAAVTSQILALREHLILERVTLVVMEATSDYWKPFYYLLEGGPFEVTLVNARHVKNLPGRKTDVSDAAWLAQLGAHGLVRASFVPPEPIRQLRDLTRTRTTIIRERTREIQRLEKLMEDTGVKLSSVATQMNGVSSRIILDALVAGERDPVVLADMAKGRLRSKIPELTEALTGRFSEHHAFLVQIQLDLIDQRAQAIDEITARIEEVMEPFRAARDLISTIPGISTRVADVIIAETGADMSRFPTAGHLASWAGVCPGSNESAGRVKSTRTRPGNPYLKGALGIAALSTTRSHDTYYAAKYRRIASRRGPIKAVVAIEHTMLITVWNMLQTGEAFNEPGGDFYARRNPERAKRRAIDQLRNLGYTVTLEPTAA

SEQ ID NO: 426180 - protein, 367 aa, unidentified
MGKSSTAFIGMDVHKESIDIAIADAKEARLYGRVGGEAGSVDRAVRKLRSVHRDPVFVYEAGPCGFWIYRRLRAQGLACMVVSPSMTPRRAGDRVKTDRRDAMALARLARAGELVPIYVPDARDEAVRDLVRAREDAVCMQRQARQRLQALLLRNEIRYVGKSSWTAAHRRWIAHLKLPDPAQQIAFEEYVQAVEEAGARLERLASAIAAQLEHWRWRPVVEALQALRGISAIHAVRIVAELGDFNRFEAPRKLMGYLGMIPSENSSGARRRQGSITKAGNSSARRALIEAAHAYAHPARVSWVIARRQTKLAKSVCHTAWKAQLRLCARFRRLAARGVARNKVIVAVARELSGFVWAIAREVKPLS

SEQ ID NO: 426181 - protein, 402 aa, unidentified
MNAVGIDVSKGKSMVAIMRPFGEIVSTPFEIKHTSSDINSLVKLIKSIEGESRIVMEHTGRYYEVLAHQLSEANLFVSAINPKLIKDFDNDSLRKVKTDKADSVKIARYALDKWQNLKQYSVMDELRNQLKTMNRQFGFYMKHKTAMKNNLIGILDQTYPGVNTYFDSPARSDGSQKWVDFASTYWHVDCVRKMSINAFIDHYENWCKRKKYNFSKSKAEEIYGKAKELVPVLPKDDITKLIIKQAVDQLNSASITVESLRTLMNETASKLPEYPVVMAMKGVGTSLGPQLMAEIGDVSRFTHKGAITAFAGVDPGVNESRSYEQKSVPTSKRGSSDLRKTLFQVMDVLIKTHPQDDPVYQFLDKKRAQKKPYYVYMTAGANKFLRIYYGRVKEYLASLPES

SEQ ID NO: 426182 - protein, 453 aa, unidentified
MAQRNRSIEIKPAKSRQALSITHPNAAGIDIGSASHFVAVPPDRDDEPVREFPSFTADLHALADWLKACGVDTVAMESTGVYWIPLFELLESRGFTVLLVNARHVKNVSGRKSDVLDCQWLQQLMTYGLLRGAFRPAEAVCALRSLWRQRGMLLRSQGRHVQHMQKALTQMNIQLANVISDVVGETGQKILRAIVAGERDGHVLAAMKNVRIRASADEIAKSLEGHWRAEHLFALKQALALFDFIGTQLTECDGEIEQQLQSLQVHDGDPAKAKRRGRGRNAPRFDLRTQLFRMCGVDLTRIDGIDVTTALAVISETGADMSRFATAGHFASWLGLCPGTKITGGKVMSGKTKRVANRAAQALKLAAAALRSSQSALGAYFRRMCTRMDKPKAVTAAAHKLARLIYTMLTKGEEYTDQGQDYYEERYRQRVLRQLAQRAEKMGMQLVPAPQST

SEQ ID NO: 426183 - protein, 368 aa, unidentified
MLADELDYVVGVDPHRDTHALAIVRAATGAAVFGAEVAASERGYAQALRLAEREAPRRRAWAIEGTGSYGAGLARFLAARGERVLEVGRTRRERRSHAKSDALDALQAARSVLGEAKHAAPRAAGEREALRALMVARAGALAAKKAGLCQLRALLVTCPEPLRSELRSLTRARLLRRLRAVRPDRHRDAELRGTLIALRALARRVQALTAEERELKREIEALVAKLAPALLDEPGVGPVAAAQVLISWSHRGRFRSEAAFARLAGAAPIPASSGRVRRHRLDPGGDRQLNRALHAIILSRRKNHAPTISYIERKTREARACARRPVASSATSPATSSACSRQARWRLDTHRSIPKKWSSNTRDAAVFP

SEQ ID NO: 426184 - protein, 337 aa, unidentified
MDRQYVGIDFHRRRSVIVRVSATGEKLSTTRVANDPLAIAAAVAEAGPNPEVVVEATYGWYWVVDLLQANGARVHLANPQGLNGGQRRVKNDERDAIDLADMLRLGRLPEAWIAPPATRELRELVRYRAKLVALRSGLKAQVHAVMAKEGVLPTVADMFGGQGNAQLDAIAMTENYRTRVESLRDLIELYDRQVTMLEGQIHQQLRLHRGYRAIQAIDGVGRTIAAVLVAEIGDVDRFRSAEALCSWAGLTPKHRESDTTVRRGRITKQGSRLVRWALIEAVSRYHGGPTLAPGFRRLAERRGTNKARVAVARKVLTLVYYGLRDGEIRCLAQAQAA

SEQ ID NO: 426185 - protein, 418 aa, unidentified
MQAELTQYTAIIGMDWADRKHDVCVQATASRQRKTYQIQHKAEKIDEWARSLHRRYGGLIAVALELSKGPIVSALQKYDFFVIFPIDPTTLANYRKTFTPSGAKDDPTDAELALDLLLCHPDHFQALKPQSVEMRTLMTLVEQRRRLVSDRVRLTNRLRNALKQYYPQALEWFDHIDTPLFCDFIKRWPTLSQARRARKATLEKFFHEHNMNRKALLERRVTAIKSAVALTTDDAVIVPYRLQALTLVAQLQVALESIRIYDDEIAALAPQHPDYDLFSALPGAGPLLAPRLLVAFGEQRERFANAAELQKYAGIAPVTQRSGQTTWIHWRWQCPTFLRQTFVEWAAQTINKSYWAALYYYQQRAKGASYQAAVRALAFKWIRILYRCWVTRTPYDEAKYLKALKDRGSPLLMNAETA

SEQ ID NO: 426186 - protein, 350 aa, unidentified
MDVHRETISLAYLTSKSKDVVKEEQIKHNEVQIKKFINKLKSEWNKIHCCYEAGVTGYPLYRYLKSLGVNCILVAPGKIPRQSSDKIKTDKRDAIKLARLLRSGDLESIHVPTEEDEAVRDYLRSRDSLRLDLGRNRQRLMKFLLRKGNVYSATKYWTVSHYKWLNNLHFENEILQETFNDYYSRVKVQEENLKAMDQRIQEIAESEPFRERVGILRCFRGVDYLTAMFLLCEVCDFKRFKTAGSFMSFLGLVPGEYSSGSKRKQTRITKTGSPRHFDGSCLAASLPRKIVAARRTGQPALVVALAEKASLRLHKKFRNLQLRGKSPQVMITAVSRELSGFIWAAMNLAA

SEQ ID NO: 426187 - protein, 438 aa, unidentified
MSNKVIFNLDELFISVGIDVGADFSWMSIALPNQQFVGKPYKILHNSIDSLTTAVSKIKEAEELYSLESRIFLESTGIYHYPLFCYLRDKGFNCSVINPIITKNSTNINIRKVHNDRFDSKKAALVGLKPDLKVSLMPSDLALNCRNLCREYYDLMDNRSAYVNKLQGELRMAFPQYLGIFSKVTINTSLTLLETYTSPSAFLKADKQEIIDIIKSTARFGLTYAQNKYNAIIQAATDANQFGYIIDSNIKRIRLYISFIRKYDEEINRILESLHELVDANEDADFVKQIHLIETFKGAGFLSAVSIMGEIGDFSAFSKPKQLFAYFGLDPAVKQSGKFEGTKVQMSKRGSAIARRVIHTLTLQSISISRNGEAKNPVLREYYLKKCDSKPKLVAMGAVSHKVCNMIFAILRDNKPFKIIAPQEHIKQYNAAKCDIAA

SEQ ID NO: 426188 - protein, 353 aa, unidentified
MGHQSIQSEVILGVDTHLDTHVGVVISDTGKLLGTLAVPTDSAGYLKLLTWAKSLGRLRRAGVEGTGTYGAGLARVLRDHEIDVLEVNRLDRTNRRLQGKSDPTDAESAARAVLSGSAAAIPKAQSGAAEAMRAVSVARRSAVKAKTQAINQVRALLVCAPQDIRERLWKGKPSDCIEGCARVRSLGTTPLLQTLAATLRMLAKRWLMLAEELKELDAMLERLTREHAKRLREQFGVGPQTAAVLIAVAGDNPQRLRNEAALAALCGASPLQASSGKTTRHRLNRGGDRSANNALWTIAMVRMRGDPRTRAYVERRTAEGMSNKEIHRCLKRYIIRALYPLILADLADSARVV

SEQ ID NO: 426189 - protein, 324 aa, unidentified
MAEPALGIDVSKDTLDVNIIVRGKPRGRRFANASEGWRALIVWLGQHQLERVHACLEATGRYSLGVALALHEAGHIVSLVNPAQIKDLSRTKLGRNKTDKVDAALIRDFAALFVPPAWSPPSPALRRLCELRTMRAGFLASRVEWQNRAGSGVADRTASELARTTVAHFEVQIAAVDKAIAETIDGDDDLRTKRDLLLSIDGVGETLAAVILTELPAPEVLSRSTQAVAYAGLNPRQHQSGSSINHPTRISKIGNATLRTALFMPALSAMRCNTVIAAVVARLRTQGRLKGKQIVVAAMRKLLVLCFGVLKTGKPFDPAIAMPR

SEQ ID NO: 426190 - protein, 350 aa, unidentified
MADVAMDLHKRHSEVATLDRWGELQELRIEHDGDSGAMEKFLSGLEVGSRIAIEATASWWWVVDLAEKHGHEVVLSNPKKTRLIADACLKNDRVDTDQLLHLLRLGYLPRVWIPPAPLRYGKELLRYRALLVGMRTRLKNHLGSLLTKRNLKGPGKRLWSKPGEEYLEKLKLNAEAGEIRHQTLSLCRTLDKLIGHWDQELGRRVRGDERVRQLQTAPGVGPQTAFAYRVFVGDVSRFPSGKKVAKYFGLVPRERSSGEQRHLGHITKEGDGLMRTLLVEAALRATRKPGPLREYYRRMVRNKGKAKARVAVARKLAVILYQMWKKDLSYGEFLQGEAQFAGGLGNGVGH

SEQ ID NO: 426191 - protein, 347 aa, unidentified
MTIVEAARGVTGGVDTHLDVHVAAALDPLGGLLGTERFETNSAGYKALLTWLESFGDVTKVGIEGTGSYGSGLTRYLRRVGVEVIEVDRPNREERRRSGKSDPLDAVEAARAALSGRASGRPKSRDGAVEAIRVLVVAKRSARQARVKALIQMRHLGYSAPEQLRCRLKGLSVPALVAEGTKLRPTRSPDPVTAATKASLSSLAHRIEALDRELAQLDERIEGLLVATVPDLLDLFGVGPDTAAALVMAAGDNPERLHSEGAWAHLCGVAPVPAGSGKTNGRVKAHDGGDRQANSALWRIVMVRIAHDPETQLYFERRVKEGKTKAEVIRILKRYVAREVYRYLPRG

SEQ ID NO: 426192 - protein, 316 aa, unidentified
MTILGCDISKDTVDSVLLAPDFVLLQHLDCPNTVEELIKILQELKKDFFDLCVGCESTGMYHLPLVEACDALGIPCKLLNPILTKEFNRSSIRKKKTDRDDALVIAKLLAQGEGSIIHADDCTDRLKATVRSARKIADLSRSLLLHSRHAGKLLPTQLSHYEHVQEELLTLQKALKKSAITMCDASLRSLLESIPGIGAWTASIILAETKNFERCRNADAFVAFAGLDPRVQQSGTTLNRNSRLTKRGSPHLRAALFIAANVGRMNDPELGAYYHAKKEQGKKFTAITCALSRKLCYRIYAVIKRKTPYEVHEKQS

SEQ ID NO: 426193 - protein, 426 aa, unidentified
MARQKRSVEGEFDIFVGVDWGTEFHRACVLNARGEILRGCRIDHNGEAITEFLRSLQQLTNGGPSRIAVAIEVPRGPVVEAFLEGGFAVFSINPKQLDRFRDRHTTAGAKDDSRDAYVAADSLRTDQHCFRRIATDHPDVVRLRELSRTEESLGEALRRTVNQLYQLLLRYYPQLLQLNSAPDEPWVWALLEAAPHPQCGAKLTLARLKSLLAKHRIRRWAAEEVQVILRTPPLPLSAGSAEAISEHAPLLLPQLRLLHTQRKKVHDRIEALLNHMTVVGRDHPECCQHRDIGLLLSIPGLGCLIAANLYTEAADSLAQRDYAALRAHSGVAPVTKQSGKSKQVIMRRGCSQRLRGSVYHLARCSVLHDPHSKQHYAHLRSIGHTHGRALRGVADRLLSMLVAMLKSGKPYDATRRSTAAATAPAT

SEQ ID NO: 426194 - protein, 353 aa, unidentified
MQIVSALDIHRRQITFKTLDLGSGEVRRGRLSPATRETLREWLEPFAGCEAEFALEGTTGWRFVVEEIERAGHRAHLADPAETAAKRGRKRRAKTDQADCDLQLRLLLAGELPESWIPPSHMLELRTRVRMRKTLIDQRTAWQQRLQAQLFHQGVAAGLKPRTRAGREALAKLELSPAGRELVLLALRMLDVLDAELTPLDRQLRSFARRQPGCRALSERLYGVGPVCATAILAELGDCRRFSNSDDAVRHSGLDVTVHQSDQKRAPGHLSHEGPEVLRWALFEAAQSAARLSSPDHAYFCRVRERIDSTRACLSVARKLCRPAYHILRELGEEALAPLELDSEPEEAIKTAA

SEQ ID NO: 426195 - protein, 427 aa, unidentified
MKEPTITCGVDVHKMFLQVCILSRSGEASQHRFHNTLNGILALKDLVLAEGCEIVAMESTGIYWYRLFLELESDIRTIVANARQIKSIPGRKTDMNDARWIAELALHGLIRPSRIFPRRDREFRDLTRNRETLVRTRTTIKNRIHKILDSAGIRLNLALKDLFGKSGRHLLSGLAEQKDLETTLATIPSPRILRRADQLREILQGSPLSPIQLHLLTTQLHLLEEIEEKIAHLDELILASLEDPQLEAVAICTSVPGISITAATTILAELGDVRDFSTASRLVSWAGLAPSVYQSADTQVCGKITKQGSKSLRWILVQAAQAASRTTGTVFSSFFRRIAYRRGRNKAIVALARKILSILWHLLVNRESYVEPGLKRVRKLPARMTLPKISIDDAVETLLSAGYRIYSPENQKSTGKGVRAERATHPL

SEQ ID NO: 426196 - protein, 359 aa, unidentified
MREQRNKISFRGQKIYVGIDVHLKSWSVTVLSETSVLKKFSQHPSPEALYGFLTRSYPGAEYHSVYEAGFCGFWIHERLTALGIDNIVVNPADVPTKSSEKLRKTDTVDSGKLARSLRANELKGIYTPDSVSLEMRSLIRLKNSITKDTTRQKNRLKSQLRYLGIEIPQEFLTPFSNWSKRFFAWLKEIETLPPSGRQALDIHIRHLEELRRQKLEMTRALRTLAKTDRFREPLRLIMSVPGFGQATGMAFLSEICDITRFRNAEQLAAYIGMIPMCHSSGEKDGTGDITIRKHAVMRCNLIEAAWVAVRQDPAMNLFYTEQCKRMPKSKAIVKVARKLVNRLFFVLKHQTEYVNSIVS

SEQ ID NO: 426197 - protein, 343 aa, unidentified
MEHYAGIDVSLKLSSVCVRDERGTIVREAKVASEPEALVAWFSACGLTLALVGLEAGPLSAWLYREMHAAGLPVQLIETRHAQVGLKLMPVKTDRNDARGLAEIMRLGWFRPVHCKSLAAQERRALLTARVVVKTKLHDISMHLRGQLRSFGLKVGRTTPARFAGRVRELVAGNPTLELIAEALLAVHAELRRQLAVLHKRLLAIAREDPVVRRLMTAPAVGVIVGLTYAAAVDDPTRFRRSKQVGAYFGMTPRKYQSGETDVDGHISKLGDASVRAVLYEAAHVLLTLPTKGGWLKSWGAKLAKRVGQRRAKVAVARKLAVVLHRMWSDGTDFAFVKPAAAA

SEQ ID NO: 426198 - protein, 354 aa, unidentified
MNNITFSNSSFFVGIDTHLKNWRVTIRNSGLELKTFSMNPSPEELYKYLTTHYPEGTYFIVYEAGFCGFWPQRKFNQLGINCIVVNPADVPSSGKEKVIKTDPNDSRKLARELENGSLKAIYVPDVNHEQLRSLMRLRFRLVQNQTRIKNRIKMLLYNYGIIIPKEHIKNPRWSGYFIHWLKSIKLNSTAGQFTLDNLLLQLEQSRENLKQVLKQLREESKQENISPVISSLVSVPGIAFITAMSLYTEIIDINRFNSFDHLASFVGLVPSVYSTGETDYTRGLTFRHNKFLRPLIVEAAWTAVRKDPVLTLKYNQLIKTMPKQKAIIRIAKKLLRRIRHVWINQDRYVKALVA

SEQ ID NO: 426199 - protein, 359 aa, unidentified
MVMLAEHYDFVIGGDPDRDTIDLAILEAGTGRVRDQTADWTDGPAYSRLLAWARQHAPGRRVWALEGTGSFAAGFVTMLAEAGEDIVEIPGQKRSRRAKNDRIDAVQAARTALAQTEQAAPRERGLREALRQVLVTRQGVLVSRTKAINELKSLIVVAPDHLRAGLRGLALIKQLDRIDHLTSPAGATIEHRVTVSTLRSITARIRFLIAQTAELDAELHVLVPHHPAGPTLLAEPGVGPVVAAQLLVSWSHRGRVRSEAAFAALAGVAPLEASSGQRTRHRLSRAGDRDLNRALHTVAITRLRCHDESRAYETKRVAQGKTHRDVRRSLKRALARRLYRRIQAATHPAAAFNGLAHAA

SEQ ID NO: 426200 - protein, 348 aa, unidentified
MAHFVGLDVSVKETSVCVIDDTGKVILEKKVPTEPADIIALLTSLGVTYGRIGIEAGPLSQWLVNALTAAELPVICVETRHMKALLQAQQINKTDRNDARGIAQMMRVGLFKPVHVKTLVAQEQRMLLTSRKLLQRKLLDLECDLRGTLRNFGLKVGVVSGGRYEARIRELVAGFPRLAAIAEPLLNVRRVMRQQLAVLHKMLLDTVRDDPVCRRLMTAPGVGAVVALTYRATVDQPQRFVHSRAVGAHVGLTPKRYQSGETDYDGRVSKSGDALLRTMLYEAAHSLLIHSGKWSWLKAWGVRVAQRRGMRRAIVAVARRLAVVLHRMWVDGSEFRWSKDSAAVPAVA

SEQ ID NO: 426201 - protein, 407 aa, unidentified
MIFVGVDWAEAHHDVFVQDEDGKRLAGGRLPEGVEGIARFHEMVGAHAEEPDEVVIGIETDRGLFVGSLVAAGYQVFAVNPMSTSRYRDRHSTSGAKSDPGDAKVLADMVRTDRHNHRPVAGDSELADAIKVLARAHQTMIWARTRQTNFLRSTLREFYPAALVAFEDLTSGDALEVLKVAPTPTLGAGLSRSKIAAALRRGGRQRRVDQRAEEVQVALRAPQLQGSALVATAMGTSVSATAVVIVTMNAQVAELAQELGVHFEQHPDAEVVRSQPGLGTILSARVLGEFGDEPNRYATSKSRKNYAGTSPITRASGTKRTVLARHVRNKRLADAIYFWAFASISASPGARAFYDYRRAAGDTHHAALRHLGNRLVGILHGCLVSQSIYDENTAWGHRVELELARAA

SEQ ID NO: 426202 - protein, 319 aa, unidentified
MSRIILGIDVAKKTLDVALIADERTLIKQFANSPAGFNLLAAWLESLHLSAIDVCLEATGSYGEAVALFLHEQGHRVAVVNPLRIKGYAQSKLQRQKTDRTDARLIASFCLSQEPAQWFPPSPEVRHLQALMRRIEALEEMLQAELNRLSAAPPEVQPSLQRIIDTLHREIKKLQEQVRQHIDQFPDLKEQSRLLQTIPGIGERTANLLLSEIEFERYSSARSIAAQAGVTPRKRQSGTSLKQTNLSKLGNARLRKALYFPAIVARQHNEIVKEFAERLKSRGKTPMQIVCAAMRKLLHIAFGVLKHKRPFDSSLAFSA

SEQ ID NO: 426203 - protein, 339 aa, unidentified
MNNIKTLGIDLAKNSFSLVGMNAHGKVVLRKTLSRKKLLAFIAQLNPCFIAMEACSGAHYWAREFKLLGHQVAIIAAKFIEPFRTGGKNDNNDAEAICEAAMRPNIWHVPVKTAEQQAVMTLHRVRQGLVKERTSMINQLRGLLSEFGIIIPKGRYSLHDVIGDILEDADNKLPHLAREMTSNLWQRIKQANEQILSYDRALSKQVREDPVAKRLMTISGVGEQVATAVTANVPDPRLFKNSRQFCAWLGLVPRQFTTGGKIRLGRITKRGDKYLRMCLVHGARAVMANLREKEDKVSCWIRELIARRGYLKAAVALAARNARIIWTLMVKQEDYKVIN

SEQ ID NO: 426204 - protein, 341 aa, unidentified
MDKELYFGVDVSKKTLDLAYYDGETIDWKNAHIQVSNDDAGFKKIGSWVAKVGKDFDTFLFCMEYTGLYNQNFRLWLESKEYIYGMVEPRKMHRFEPDLDDDQRSLDRIKTDELDAFRIAIYCEQNHKKILRNPSKLPSPVYFKLKRLLAERKQNTKQSTLYKQQLHDICAYDTDLSVERKKLLLKSMKENQKAIDREIDSYINEDASISKNYDLLTSIPGIGRIIALETIVLTENFTAISNPRKYACYIGIAPFKKESGTSVRKRTTVSKKGFSEAKADLSIAVLSAIRNNPSIRDYWIRKRKEKCGGIVLNAIKFKLVLRMFAVIKRGTPYVETDAYKN

SEQ ID NO: 426205 - protein, 342 aa, unidentified
MSIVYVGLDLGSSNFQQVALNREGVSRVNRDFSTSEANLIKAFSDLQGEIQVHLEAGELAPWAAAVIAPLVERVVCSHPQSNAWIAKDADKCDRIDAYKLAELLRLNRFKEVHYAPDQPRRNFKQLVQHYDELTAQQARLKTKLKARLRMQGVIITGEGLFSAAGRKQVLARVESRDLRTAIKQLYEVLDQSVATQAQARLLMLRAAQAFPEIKLLRTVPGVGPIGACRFSAYIHTPSRFSTTRKLWKYCRLSVSHRSSNGKPLRRPRLDRSGCGRLKDVSRKAFDVAIRSHQDNGFKRAYLRALETTHDATHARLTVQRKIVSTLRAMWLNQTPYCDELMR

SEQ ID NO: 426206 - protein, 378 aa, unidentified
MRKLYIGLDAHKASNVVAVAFEGRKEVELYGNLPSDLKAFIAGLRRLMKKYEVKREDLALCYEAGPTGFVLARRLRELGFEVEVVAPSLIPIRASDRIKTDRRDARKLAGLFRAGELTFVHVPDSHDEVIRDVCRARTDAVDVQTRSRQQLGALLLRNGYHYTGLSNWTEAHMRYLRELVLPNRAQKTVLEEYLQRIDSAVAQVARIEESMELLLKDWPRQRFVEALQGFRGFQRVASMTITSELGNLLRFKHPRQLMAYMGLVPGEQSSGGRRRQGSITKSGNSHARWMLVEVAQHYRMPPKVSKELSVRQEHLSRDVREVSWRAQNRLHRRFTRLTLRGLHHNKVTVAIARELTAFIWELARIVDREGRPVPAVNG

SEQ ID NO: 426207 - protein, 404 aa, unidentified
MIFVGVDWAEAHHDICVLDEAGEVLARQRIPDSLLGVRNLHEMLGEHAEEPGDVVVGIEKDRGLIVTSLLGARYRVYALNPMSVARYRERHVTSGSKSDPGDAKVLADLVRTDRHNHREAAGDTENAEAIKVLARAHQSAIWTRQREVNALRNALKDYYPGALTAFGNDLGDRDALAVLEIAPTPPLGRGLSTSKITAALRRGGRQRNLERRTEEIHQALREEQLAQGPVLEAAYGRITASHVRVIKALNVEITELEGALSEGFEQHPDTGIIHSLPGMGTVLGARVLGEFGDDPNRYCNAKSRRNYAGTSPITRASGKSHVVLARHMRNRRLADALDQWAFCSLTKSPGARAYYDELRGRGKTHRQAIRQLANRWVGILHACLAQRVNYDENLAWKHRTDLAA

SEQ ID NO: 426208 - protein, 339 aa, unidentified
MRQLYCGFDLHSNNVYCGIQDDADQRVFRRRMPNDINVILQELKPFKKELVGVVVESTYNWYWLVYGLMEAGYTVHLANPNAIKQYNGLKNVDDQTDAFHLAHLLRLGILPQGYIYPKEERPVRDLLRRRMLLVQQRTAHVLSLESLMMRHLGCRLKSREIENLDEHGLDSHLPDPTLRLAADTAISMVQHLNGRIKLLEKEVADRCKLKPEYAKLTTIIGVGPILATTIMLETGPIQRFASDSNYSSYCRCARAVKTSNDKKKGENNGKNGNKYLSWAFVEAANHCRRVCEPARKFCQRKTDKRNGVVAVKALACKLSKAAYFIMRDQEVFKLNKCFG

SEQ ID NO: 426209 - protein, 372 aa, unidentified
MNYNTVYVGMDVHKESFSLCAYTIEAEKASHYQKTDADYKNVLKYVEFLRTIYGDDANFICGYEAGCFGYTLYHQLTANNVKCIILAPTTMLEQRSKKRIKTDKRDAEIIAKCLAQHNYSPVHIPTAKDEETKEFLRMRDDHKLALKKVKQQILAFCLRHNYRYDGKSHWTAAHLKWLKALTPEALYKEILDEYLLTYQTLSDKIERLDKRIEELATQDEYKEAVKKLCCFIGVKTHTALSVLVEVGDFKRFASAQHFASYLGLVPGEDSSGDDQNRLGITKAGNRHVRLLLTEASQCYARGQVGFKSKELKSRQSGNTPAVIAYADKANERLRRRYYKMVLNKYKKHNVAKTAIARELACFMWGMMTDNIA

SEQ ID NO: 426210 - protein, 361 aa, unidentified
MDRKGFEKLKSHLSFVSPGSVLIGMESTASYHVNLFSFLASEGYAVVVINPLLISNYVKMQLRKTKTDKKDAWVIAQFLLANRDSLIRRATSPLILDLRELARQRESLVDQMTSLKNDIKRILNVTFPELEHMTGIFTKSILKLLQHYPSAYALKDIDLDQLTQMLIEDSYGRKRGAFAEALLKAARSSIGTPSPMKDVILKQKVSLHLHLDEALQEITEMLLQTSRGMMGDDMDLLNSIKGIGDKTAAGFLIEMGGDIRQFEDPNKIIAMAGIDPAVRQSGKYEVSSRITKRGNRHLRRIIWLMTTQVIHYCDVFRVYYRKRRKDGLPYKKAVLATSHKLIRVIYAMLTQRAAFCPIVNS

SEQ ID NO: 426211 - protein, 362 aa, unidentified
MQYIAFDAHKHYTLASVEREDGRLVREQQIPHERGALQAFLQGCDPESPVAVETTGNWYWIVDEIEGAGCLPRLVHARKAKLMMGMINKTDKLDARGLNRLQRAGTLPAVWIPPSALRDQRDLPRTRMVLVRQRTRLKNRIHAALAKYGVSRSDVSDLFGRQGTRWLQEHLGQLPPQTAYAAQRVLEQIKTLDRQVAQLEQRMSELFTPTAQLELLRSLPGVGFILGVVILLELGDVRRFPRSAQLAAYSGTTPRVHASGGRTRYGPLRPDVNRYLKWAFVEAANIICRHRARAPDRHVCQLYARIARRRGHQTAIGAVARHLAEATYWILTKEQPYREPQSRPPQGPAAGIVHGGVSAPMP

SEQ ID NO: 426212 - protein, 373 aa, unidentified
MVYIGIDIAKFKHFASVVSSDGKVIIKPFPFENSRQGFMKLIEEIENFQDCLIGLESTGHYAENLIQFLYERNYSVALINPIQTDSLRDSNIRKTKTDKVDTMLIVQCLMLKKYSLISSKNIDLIKLRRLSRFRLEMVQQQTRIKTQLTACLDIVFPELTLFFKGNLHLKVSYSLLEKYSSAKAIRSARIDGLTNLLYNNSRGKYNYEKALQLKALAKDSIGLDNPAVELQIQCLIKQLRLYQKQISDIDISIMTIMEIINSPILTIPGIGYTLGAMIISEIDDIKKFSNPSKLLAFAGLDPVVKQSGNFQSDSLKISKRGSTYLRYAIYRVAFLIIYNNETFHNYYLEKRAQGKTHRIALGHVCNKLVRVIF

SEQ ID NO: 426213 - protein, 324 aa, unidentified
MIDGILGIDVSKNTLDASMSSRNKVRARSFANSSDGWRDLLDWLITQKIRRVHACMESTGRYSLGIACALYEAGHIVSIVNPAQIRDFARTKLGRNKTDGVDAAHIREYCELFKPKPWAPPSAAHRRLGELQTIRAGIVAGLTEWKNRKSSGMIDAVAQSLANVTISHFTSQLRAVDEAIAQTIDNDSGLRRKRDLLLSINGVGETLAGVVMAELPGPDELRSSAEVVAYAGLNPRQHQSGTSIDRATRISKIGNAVLRAALYMPAMSAMRYNPAIVALVGRLKSRGRLKPKQILVAAMRKLLVLCFGVLKTGKPFDPAIAMGC

SEQ ID NO: 426214 - protein, 322 aa, unidentified
MNTIALGVDLAARSLVAALWFDQQRQAKACFLNDPRGFRQLDRWLKTHGTGHVRVGLECTNTYGQALAHWLHAKGHQVYLLNPERTAAYARARGQRNKTDPADAVTIAAYVALHELTPWVPPSPEQEELRALTRTRHQLVQQGVQLRSQLKTAHPAARPFLQATLKALLHQIDRIKAALAELLRQQPGLDEQVRRLMTVKGIGWLTATITVAELPPVGPQSDPRALCAWAGLIPRRWQSGKTELPARLSRKGNAYLRQALFMPALVARRSNPLLRAFADRLQAKGKRPGAIIGAVAHKLLRILVGLLKSKTNFDPNWSFSPP

SEQ ID NO: 426215 - protein, 374 aa, unidentified
MNHHSGAYVGIDTSKLRNAVAVAEEGRGGDIRYLGEIDTTEAATRKLVTKLAAKYRQLTFCYEAGPTGYGLYRLIRKLGHDCIVAAPSLIPKKPGDRVKTNRRDAVGLAKVLRAGELTAVWVPDERHEAMRDLSRAREAARKDLKGKRQQVSSFMLRLGRHFPGKKTWGPAHMNWLMLQKLEHREQRIVLEELLGAVRQESERVERLEQAIRDAVPEWSLAEVVTALQAMRGIDLVSAVTVLAEIGDLSRFQNPRELMGYLGLVPSESSTGDTVNRGGITKAGNGRARRILIEAAWSYRYPPRVSREKQIKVAAAPRAVREIAWKAQMRLCGRFRSLTRKGKRPTVVATAIARELAAFIWAINREVVGSHATAN

SEQ ID NO: 426216 - protein, 410 aa, unidentified
MDVIVARQGALDVHKAQVTACVRVPGADGDRVERVEQFATTVRGLLVMSDWLKAHAVTHVVMEATGDYWKPVWHLLEHDFELMLVNARDVKQLPGRKTDVSDSSWLCRLAEAGLLRASFVPPKPIRDLRLLTRYRRTQIAERKREAQRLHKALEDTGIKLDCVATDILGKSGRAMLDALVAGTTNPEILAELALGKLRKKIPALREALEGRFGTLHALLIGAILAHLDFLDEQIAQLSEAIEEQMLPFAAAAELLCTIPGVAQRTAQVIIAEIGADMSVFPTAGHLASWAGQCPGNDQSAGKRRSGRTRKGVKEPQLRAQGRRDGRTAQQRQLPPSALPPQEAPARPRPRAGSRQALDDCAVWHMLSTGELYNDLGGDYYARRDPERQTRRLVAQLDRLGHTVILEQQAA

SEQ ID NO: 426217 - protein, 400 aa, unidentified
MNDSDDVGVFLGLDVGKSAHHGHGLTPAGKKVFSKQLPNTEPKLRQVFDKLTAKFGTVLVIVDQPASIGALPLTVARDAGCKVAYLPGLSMRRIADLYPGEAKTDARDAAVIADAARTMPHTLRSLGLTDEITAELTVLVGFDQDLAAEATRTSNRIRGLLTQFHPSLERVLGPRLDHQAVTWLLERYGSPAALRKAGRRRLVEVIRPKAPRMATRLIDDVFEALDEQTVTVPGTGTLDIVIPSLARSLGAVHEQRRATEAQISTLLEAHPLSAVLTSLPGVAVRTAATLLVTVGDGASFPTAAHLASYAGLAPTTKSSGTSIHGEHAPRGGNRQLKRAMFLSAFAALHDPASRTYYDKCRARGKTHTQALLRLARQRINVLFAMLRDGAFYEPRTPRLA

SEQ ID NO: 426218 - protein, 420 aa, unidentified
MTISDFTPADAVLVAIDIAKARNEVLIEAPNHKRRRRLPVLNCRAEHDRLIELLQTYGRPVVCGFEATGNYHRPIAWRLAEAGFEVRLVSSLALARTREALHNSWDKNDPKDAQVILHMLRIQATQRYHDPLRAGINDVQELSKTHEAIARAKTEIQHRILTHYLPLYFPEIDRFRGNSRSDWFFAFLDAFPTPAAITALAKEEFVKAAWSVVGRKVSKTQILMEIYETARTSIGLPLPLDAPAIRMFRMVIAETRSLIRQRNEIEEQADELLRHSQDYQLLRQIPGIGPINALTIIAEAGDLRRFHHHRQFLKFCGLDLSTQQSGQYRGQTRLSKFGNARLRRTLWIAGQVAIRQRENGFRHKFERYIARDRDNPDLRRKAMTAITAKMARVVHAVVKGGSDYRPFVEGRVPGGRTSVS

SEQ ID NO: 426219 - protein, 341 aa, unidentified
MSDYSYFCGIDLAKNHFSLHAVDQNGKVILHKSVTRSKLLTTLSNMPLMRIGVEACGGAHYWARTLNKMGHDTRIMAVKYVIPYRTKGKNDLNDAVAICEVVQRPSTRFIPVKSPEQQAILSVHRMREHWVRERTALMNRMRALLSEFGLVIPVRRSSLMKHVPLMLEDAENELPYLARTVIADAYHHLDELNQRITDTEQIFESFAKVSDNVQRVMKVRGIGPQTATAILASIGNGSQFDKSRDFSAWLGLVPKQYSTAGKPRLGRITKHGDKYLRTLLVHGARTVIANLGDKQDRLNQWCRGVLERRGMNRAIVALAAKNARIIWSLLHNQTEYENYAA

SEQ ID NO: 426220 - protein, 408 aa, unidentified
MNPLFVGIDVSSKNNVAYLMKPDGSKHSSFSVQNNLGGAKLLSERIVSALGSMQLERVVIGLEATSIYGDSLVYALREDGRLGRFQRKIHVLNPKQVRKFKKAYSDLPKNDWVDAFVIADHLRFGRINREVYMDDYRYKALQTLTRARFDVIQNLTREKQRFANYLFLKCSGMAQDKDIQNTSATTIALMEHFETVDDLANADLEELTAFITETGRGKFADPDATAKAVRAAAKGSYRLPKTVNDTVNQAMAVSIASMRALKGQVKVLDKAIEQQFEIIPNTLTSIPGIGKVYSAGIIAEIGDIHRFDSQASVAKYAGLVWNRSQSGDFEAEHSRMIKSGNRYLRYYLLEAANSVRRCDSEFRRYYDLKFKEVNKYQHKRALALTARKLVRLVFRLLKDNRLYIPPEG

SEQ ID NO: 426221 - protein, 338 aa, unidentified
MHYVGIDHHRQYSHLTVMDYEGHVLRSGRVANLRVEIAKFLEGLGEVEAVIETGRSSYTMVDVLDEMGVAVKIAHPNEVKAIARAKIKTDKRDSEVLAHLLRMNMVPEVYRRTEKNRQAQRVLRQRAFYVRAMTALKNRVYAFLSQQREEIRQEVARESNVFSEKGQKVLLGLELVPREKRLLEELLKTFRHLEKRAKESAGFVEKLYEESREAQLIRTIPGFGKYLSVLVAVEIADIARFTDAAHLHAYAGVIPSTHSSGDRMYHGKIVRAGNRWLRWAAVEAVWPAMRADFDLRCFFERLARNKGANKAKVATARRLLTIIYKVLREQRNYIAYRR

SEQ ID NO: 426222 - protein, 369 aa, unidentified
MADRITYVGLDVHKESIVVAVASGGLRGEVREYGRIANTATALDRLLRKLGDAGMVLRFCYEAGPCGYGIQRHVSAQGHECVVVAPSLIPKRAGDRIKTDRRDAASLAKLHRAGELTAVWVPDPQHEAMRDLVRARLDAVHSLRRARQQLSGFLLRQGCHYGRPAWTKLHRRWLAGLIFEQAIHHIVLEDYIAAVEAAEARRDRLTAQIGTMLPDWTLAPVVAALQTMRGMAMVNAATLIAELGDLSRFADPRQLMAYLGLTPSEYSSGSSVRRGGITKAGNGAARRLLIEAAWSYRFPARLSRELLLRQESQPKPIRDIAWKGQVRLCARYRRLARSGKPANVVTTAIARELTGFVWAIARQVTVTPG

SEQ ID NO: 426223 - protein, 362 aa, unidentified
MNQRTQRGEAHVKYYTTTTEYNCGIDLHADQMYVCILDPTGQVLVHRNVKGNDFGHFLKLAAAYRHDLTVVCECTFNWYWLADACFAAGIKFVLAHALYLAHIHGGKNKNDRVDSEKLAHLLRTNLIPPAYVYPAERRPMRALLRQRLSYVWRRAEVLAHVSMKQSAEGLVPAAKSGHNRDVWEERILAQYANPLHQFGVECDMEVVRAYDRQIDRLDLEVLRQAKKHLGRDYHLLQTVPGVGQVLGLTILFEMDAVARFPTAKDFLSYCRLVKGSVASAGKVKGLTGGRMGNAYLRWAFGEAAVLAKRSHPLLKPYAERLVAKHGKFRGNAILAAKMARAVYHMLQSGTGFDAERVIATSI

SEQ ID NO: 426224 - protein, 353 aa, unidentified
MTRAMIAVLGIDLGKSSCSLVGLDAEGAVVLRKRMRRETVIAFATKLPTCVVAMEACCGAHHLGRLLAGLGHEVRLMSPEYVRPYVKAQKNDDRDAEAIAEAATRPTMRFVELKREEQLDLQTLHRVRDRLVGLRTMLTNQLRAILLERGLVFPKGRRKLELAIDALLLETHPALGVRMQKLIGDLREEWRGIDQRIGSLDTEFVARARADSVTRRLMTIPGVGTLTATALVAAVDDAAAFRRARDLPAWLGLVPRQHTTGGKPKLLGISRRGNSYLRRLFIHGARSALPTLSKTDTPTGAWLRALLSRAHANVVVVALAAKMARIAWAMLRRSTEFTPEPGLAMTRLVAPPR

SEQ ID NO: 426225 - protein, 369 aa, unidentified
MDEGIKFFVGLDVHKDSIAVAVAEAGRTPARLLGSIAHDVGKLRKLLARYGEPGAVQVVYEAGPTGYGLQRELARRGYQCQVIAPSLIPKRAGDRIKTDHRDGVRLAELARAGELRAVWIPDPVDEAIRDLARAREDAVNARTQVRQQLKGFLLRHDVRYAGKTSWSKTYYRWLATLNFGLSGAQTAFTEYWQAVTAADERVARLTGALANSIEGWRFESVVRALQALRGIDAVSAIGLVAEIGDIGRFAHPRQLMAYLGLVPSEHSSGERVVRGSITKTGNTHARRLLTEAAWNYRFQPRIGRRAQQRAEDLPQAIRDVAWKAQLRLAGRFARLRARGVQINKICVAVTRELAGFVWAIASAQAKLTN

SEQ ID NO: 426226 - protein, 292 aa, unidentified
MNATTVGLDIAKTVFEVHGIDARGQMTLQRRVRRGQLVSFFANLPPCLVGIEACASAHHWARELCKLGHEVKLMPPQFVKAYVKTNKNDARDAEAIREAVARPNMRFVAIKTLARQELLMLHRARQRLIQARTAQANQLRGLLAEFGIVLPQGLARLEREVPEILADAENSLSSRLRERFSCLLSQLRELDDRVRDWEQEILAWHRENPLSRRLEKIPGIGPITASALVASIGDARMFQKRAPARCLVRTRTAPRLFGQQDASPRDQQTRGPISAYAPHPWLALYSTTTRFP

SEQ ID NO: 426227 - protein, 395 aa, unidentified
MFIVEIDIAKRSHEAIIIAEDGQVVRKAFSFRNNCTGYNLLLEQVRRLTLVKSQIVFAMESTAHYWLALYARLLKDGYAVMVLNPIQSHSLRELYIRKAKTDARDSLIIADLVRFGRCKASNVPQDKILALRELCRSRAYLVDMAADLKRKLIALLDRIFPEYESLFDSVFSKASIAVLSKYSTPQKVKNANLRKLTDLLMESSNGHFGEWKAHQLKEAACSSFGIDDSGGVYSTLLGVFLEQILSLTAQADSLEKQISVFFQEFNNPLTSIPGVGTVLAATILSEIGDITRFSSADKLLAYAGLDPSVKQSGEFKSNQNRMSKRGSPYLRRAIWLASTVAVHRDPMFQTYYEKKISEGLHYMNVIGHVSRKMTAVIFAVLRDGQPYQPILQSAG

SEQ ID NO: 426228 - protein, 354 aa, unidentified
MQLVSDRPIKKVSFGIDISKDNFEVSVGLGYDYSEEPQIRNIGSFNNTGAGMGRFITHSRNLLTGLNLTPEAKIQFVMESSGVYYECLAYRLYQEGLSVHVALATKMKNYTKTLKNKSKNDKQDSLAICRYGLEKNLQDWKPMSDEMKKLKELTRELALHKDDIVAAKSILHSQKAAYKTNPEGINRMKSKIKYLERLIKKVNEEIKATVDNNPELKEKVNMIIKNFRGVGYQTVVILLAETDSFKQVTNSKQLVSYSGLDIMENQSGNKTGKARISKKGNSVIRRALYMPALSAIRFNDRMKELYQRICDGHTGVSKKIAIVAVMRKILCIIYALWKNNTEYNPNYLLMPMAC

SEQ ID NO: 426229 - protein, 356 aa, unidentified
MPTIAQLEPVRVTMGVDTHKDTHVAVAKDHLGRHLGENSIPTTPRGYRDLLAWAQSHGEVEAWGIEGTGSYGAGLMRFLRSQDQAVIEINRPDRKARRRKGKSDPVDAEAAARAVLSGEATALPKSGDDRVEMIRALRAARSSAVKARTQAMNALRALVVSAPVELREQLRGLSATKLVRVSAGLRPGDITTPVAATKLALRSLAGRHEAFDAEIKILDPQIARLATEAAPALVEIFGVGPDVAGALLVTAGDNPERLRSDAAFSHLCGASPIEASSGKTVRHRLNRGGDRQANAALYRIVIVRLRYDDRTKEYVERRTKEGKSKAEIIRCLKRYVAREVFAVLSDIGKKNLAAAA

SEQ ID NO: 426230 - protein, 317 aa, unidentified
MTDTTMIAAGIDTAKHKLDVAIHGDRQRFAFANSPPAFGDLIKLMRRRKVTRIGIEATGGYERDVVGALRKAGFTVVVLQPIQVRAYAQFVLCRAKSDKIDAALIAACIAHRDTLREPPDPRLVPLADLLTFVEQTEEDIARSKVRLEHARNPDQRRLLEADVKRLAKRRTQMLAKLSAKLEAHDDLARRRDLVLSIDGIGERTALAMIIRMPELGRLSREEAASLAGVAPFVHDSGEHKGERHIAGGRARLRKSVFAASLPATFFHNPQLGALYRRLVANNKAHKVALIACVRKLIIYANTVLARGTPWVKTAPAS

SEQ ID NO: 426231 - protein, 401 aa, unidentified
MNYVLVLDVAKGKSMFMLSSDVGEVLLEPTEYAHNKDNLGLIDSNINKLNIKDNLTVVMEATSIYHKAPERFFKENNYHVIVFNPLIGKEITNTIRKTKTDKQDCIKLTNLFWKGSIPDRNYTEDEIYTKLNELSRQYYHLDEGLTRHKNRYKELLHLCFPEFELCFKDGKIYDLTALNFIKEFPHAYIIKEKRVDALAYNMANTNGRHINYYKRKANTIKEYAHNSYPGVNENSKNVDNLKQLANIIIDITEQKNDVKNQMIELAKQIKNYKSIVSVFGIGDLSASLIIAELKDITRFNNIKQINASCGLDPTIVQSGKSINYHGPISKRGNRYARRILFNCSRNIVTLSAKCDKENPIYVYYQKKKQEGKHYYACLTACSTKLIRIIYALCMNNSTSQN

SEQ ID NO: 426232 - protein, 339 aa, unidentified
MNITTIGIDLAKTSFSLVGTDKHGKVVLRKTLSRKKLLPFIAQCPPCLIGLEACSGAHYWAREFEKLGHELRIIAVKFIEPYRKGSKNDNNDAEAICEAVRRPNIWYVPVKTADQQALLCVHRVRQGVVRERTCWINRLRGLLSEFGIVIPKGRYAVQSAIPAVLCNEDNGLPELARQMIHDLWLGIQQANEQVLGYDRALSRLAREDETAKRLLTIPGVGEQTATGVVASVPDPRLFKNSRQFAAWLGLVPRQYTTGGHVRLGRITKRGDKYLRMCLVHGARAVVAKLGDKQDHVSCWVRDLIQRRGYLRAVVALAARNARLIWTLMVKRENYRTIDV

SEQ ID NO: 426233 - protein, 357 aa, unidentified
MERYIGLDPHGTSCTFGVIGPSGRKLRHDVVETSGAALVSYLRSIPGKKHLCLEEGTHSAWLYEILSPHVEEIVVAGISESRGQKSDVLDAFRRAEELRTGTIKTPVFKAPRRYRRLRELARVHSMLVRDVVRVQARLKVMYRARGIATPGKSVYSPSGRDQWLKRLPVSSRWATEKLHEEYDRLLDLKQELEQELKAEARKHRISRILATAPGLGPIRVAQLLPIVVTPHRFRTRSQFWSYCGLGIVMRSSSDWVQTRTGGWVRAQIQQTRGLNRNHNSTLKDIFKGAATTIVTRLDTDPLYEHYLRLTSAGTKPNLAKLTVARRVAAIVLRMWKDEKEYDPGKLKQQTLLASAAS

SEQ ID NO: 426234 - protein, 315 aa, unidentified
MEAMIERCAGLDVHQETVVACVLFGPLDQKPKTSIETFSTTTTGLLALSDWLATLQVSDVVMESTGVYWKPIWNILEGSFHLVLANARHVKNVPGRKTDVKDAEWLAKLLRCGLIESNFVPPEDIRDLRDLTRYRKKLIHHRTSEQNRIHKILQDANIKLTSVLSDIFGVSGRRILEAILNGEKIETDGLRKMVDWRTKASITDIASAINGRIRRHHRDMLRYHWEHMSYLEKAIEELEKQIDQLLSPYRKEVELLDGIPGVNKAAAATFIAEMGVDMSVFKSAKHLASWAGVSPGNYESAGKKKRVKPHKVTKL

SEQ ID NO: 426235 - protein, 311 aa, unidentified
MTEQVIGIDVGKAKLDVGLSTEKRVRVWANDADGRAELSDWVVAQGASLVVVEASGGYEAALVSELVARGQEVALVNPTRVRAFARAEGTLAKTDKIDAGVIARFGATMKPQARVRRDEVQVALNEQVTRRRQLVLMLTAEKNRLHTASPVMQAQIARHIAWLKAEIEALEAQISQAIKANPVWAETAKRVDSVPGVGFITASTLVADLPELGQLNRQKIAALVGLAPFNRDSGNQRGKRRIFGGRTSVRSVLYMATLSAIRHNPVIKAFYQHLLDKGKLKKVALTACMRKLLVIINTMVKTGQDWRPSIA

SEQ ID NO: 426236 - protein, 487 aa, unidentified
MIPDSECLVLPVVAVAVVDVNSTKGDIKMKIRVGIDIACRSPHVAAIADELGNIMSRRHRFRTVASELEAFWALVPADATEVLVVMEPTRNAWVPLAAWFRRQGAKVVIVPSEQSADLRDYMSKHTKTDRLDAELLARLPVLHPEGLHPAEHLGPGDPLKRAVKIRAGLVHRRSTAMHRLDSLLEILGPGWTDTLGTRMTQTTFKFLTLYANPHQVKRLGAARLARWFQHHTRKAWGPERAQHMIDAANETIALWGNDGLDYDALAADITAEATIALEVSEQIALLDRRIRDLYAEADPAGIVLSAPGVGDILAGQIMGRLGDPHRFTSLAAARSFTGLIPRQNSSGLTNQAGGPTKRGDACLRAALFQAADRARLVDPQIAARYQRLMCDTGRHHNSAICTIATVLLTRIVSCLRNGTTYQLRDVDGRPITDTEGRAIVADRYQIPSKVREARRSISKAHSAKRRDERVKKEVAERSKTPPAPTPA

SEQ ID NO: 426237 - protein, 413 aa, unidentified
MTYRIAGIDVHKKMLAVAVADAADEEELRFQRRKFPAGADGLRLLAEWFAALGVEEAVMESTAQYWKPVWSALERQCRLELAQAQSNRGPRGRKSDFADAERLVRRFLADELILSFVPDPEQRLWRAISRTKQTVTRDRTRLQNRLEALLEEMRIKLSSVVSDLLGVSARRILTALSEGETDPTKLAALAEPELRATPEQLRDALNAAPSVHPSYRHLLKQYLERIQWNERHIAELDKELAVCLQAHDSAVSRLAEVPGLGADSAQQIIAEVGPKAAVFPSAAQLCSWVGTCTGQEESAEKSKSDRSPKGNRFVRRILDQAAHAAIKTKGSVFEAHYRRIRSRDPKKHNKAVWAVANRLCRIIWKILHDGVCYQERGNRPNQKAVRQRAARLIRQLRNLGYAVQASPQPPLPA

SEQ ID NO: 426238 - protein, 358 aa, unidentified
MRMIGVDLHTRQQTIAMLDPETGELVEKTLKHEGETVREFYAALPHPVLVGIEATGSMYWFLELLEELGIERQVGHPTEIRAAEPRKQKHDRRDAALLLKLQVENRFPSIWMPSAELRDLRALLRHRHQWVRMRTRVQNTLQAIALSHGLRRGQSLWSQAGQQAIASLPLAPHAAHRRTELQTLYGQLSKQIDELGEQVMDQALLRPGAKLLMTHPGVGPVTALATDVFLGDPARFDDGKAVVSYVGMIPSEYSSGGRQRLGGLSKQGNPLLRFLWCEAGIHAVRRDPELKRFYRRKLPQKGLGKTRVAVARKLGIRLWIMLRDQIDYQEFCRRGQMRQKSGGARAGMPEGVHSPVGS

SEQ ID NO: 426239 - protein, 340 aa, unidentified
MGDRTSRYCLLDEEGVVIGEASTPTTKAGIAKVFGAMARCRVALEVGGHSPWVSRQLEEFGHEVIVANPRNVRLIGESTRKDDRLDARTLARLARIDPMLLSPVRHRGAEAQADLAVIRARRVLVRARTMLINAARGLTKSFGERLQKCGAGQVGSTLAAELSTQIRAAILPLLAEVEALNQRIAAYDRQIEQLVKEHYPEVDRLTQVKGVGTLIALTFVLTVDDPNRFQRSREVGCYMGLRPGRRNSGKSEPQLHISKEGDCYMRSLLVQGAHYILGPFGIDCDLRRWGLKMSERGGKNAKKRAVVAVARKLAVLLHKLWVSGEAYDPLRNSRPLARAA

SEQ ID NO: 426240 - protein, 399 aa, unidentified
MLNRQSLQLRVGVDVGSRCHTVAVGLTDGSLLEEFEIPHTAEGFRDFFAAIEGHAKTHPYPIAVAMEGYNGHVRPLDSLVRARGWRLFNVNNLKLARFKEIFPAAAKSDRIDTRKTLELFQLRDHLPMAGDVLQEVMATPEENDILKRLSRRRRRLVNERGRVMNSMQADLQAVAPGLLQITRYVGNLWFLNFLTCRKDIRKLARLRRASLLKLPAIGPGYAGRIQTWQNGAWFGHDARLVGDMIRQDAERILELNRQIKALKVEMARFAAQSTIACQLASIPGYGSICTAELAGEIGTIARFRSEAGLALYLGMATLDNRSGKVRGSKAPKHVNARAKAAMMAAVDQHRKRVPPSQRYYKRKRAEGKKHNQAIRALGRHLCRVIFKMLSQERPYRIDP

SEQ ID NO: 426241 - protein, 352 aa, unidentified
MSIIAFDSHKRYTFVRVENNNGEHPEESRIEHQRGNIAGFLSRQQPGSPVAVETIGNWYWIIDEIEQAGMVPKLVHARKAKMMFGCINKTDKLDAKGLNILQRAGTLPTVWIPPAEVRDKRELPRTRMVFAGERTKLKNRIHSVLDKYGLQDVFEDISDIFGNKGRQVIGGVLGQLPSHTRYTTELLMEQLDQTEQKIRAIEARMTKLFKETEQHTLLKTMPGIGFILAVVILQEVGDIRRFGSAERLASYSGVTPRVHASGGKVRYGRLRPDTNHYLKWAFSEAGNSVAVNRKRFPARHVSQLYNRIRGRKGHAKAVGAVARHLAEATYWILTKNEVYQDRGLSEVSPTGA

SEQ ID NO: 426242 - protein, 310 aa, unidentified
MDAIYVGIDVSKDRLDVHVRPGGEAFAVARDGKGLEQLVERLRALAPTLVAVEATGGFETIVAAAIAGASVPLAVVNPAQVRHFAQAVGKRAKTDPIDAEVIARFAEAVKPQPRALPDEAARLLAELVGRRRQIIEMLVAERQREKRVDAVRVRKSLARHIAALEKELPIIDHDIDTMVRGSQVWREKENLLTSFPGVGDTLARTFLAEVPELGSLHRREIASLVGVAPFTRQSGRWKGKSMIGGGRAAARSAVFMAALSAIRCNPILRAFYQRLLAAGKPKMVALIAVARKILTILNAMLRDKTPWQIA

SEQ ID NO: 426243 - protein, 369 aa, unidentified
MDGPRRHRLCQNEVVADLKQKGPSVEQISRIGMDTSKHFFQLHGLNAAEKVVLRKKLRRKEMVAFFEALAPTVIGIEACGASHHWARILRSFGHEVKLIAPQLVKPYVKRGKNDTADAEALCEAMSRPTMRFVPVKTAEQQAAVMMAGLRDRLIRNRTQLSNAVRGYAAEFGFTAARGMAHIDPLLDRIQADESVPVLARELFAAQAEEYAQLQAQIAEVDAKLMAWHKADECSRRLANIPGIGPIGATLLLLKTPAPEMFRSGRQFAAWIGLTPKAHSTAGKVRLGVITRAGDEALRSVLVVGATAVIQHVRRGGRGSPWIVGLLQRKPPKLAAVALANKMARIAWKLMVTGNSYAAKSAPAALMGAA

SEQ ID NO: 426244 - protein, 301 aa, unidentified
MVDVPCCVGIDVAKAQWDIALRPAGERWAVPNDASGIAPLVDRRQALQPTLIVLEATGGLERAATAALAAAGLPVVGVNPRPARDFARATGPLAKTDALDARTLAHCADVIRPTPRPLPDAQTHELRALLGRRQPLIVMRTAERNRLAGTSERLTKDITAHMTWLNARLATLDDDLETLLRASPLWRENDDLLQRAKGIGPVSAHTLLLELPALGTLTRQQIAALVGVAPLNCDSGTMRGKRTIWGGRAHVRTVLSMRTLVATRFHPQIKAFYERLLAAGKVKKVAWTACTLHSPHQFPIS

SEQ ID NO: 426245 - protein, 385 aa, unidentified
MPASNVSTPIAGHSGTIFVSIELSQRCWLVTMHSPDKNRFSRHKLDGGDEVGLLGLIERIRVRAAAALGGLPRVVSCYEAGYDGFWLHRRLEAAGFTNFVFDPASIAVEQRARRAKTDRIDGELLLRTLMAHCRGEPWVVRIVRVPTPEQEDARRATRERERLIKEQTAHTNRLKALLRLCGLAAGNPRRRDWMAWLERQRERNREPLRPQLMAELGREHARLMLVGEQLKELSRASEAEPVSAAAAEMAQRSATLQRLKALGPVFTGTLASEVFYKDFHNRREVAAYVGLAPSPWRSGQTNREQGISKAGNPRARAKAIELAWLWLRHQPESALSRWFHERTGQGRGRIRRIAIVALARKLIVALWRFLTTGLVPEGAVLKAAA

SEQ ID NO: 426246 - protein, 394 aa, unidentified
MLYSVGIDIGKREHHLVILDDTGQRVGKPQTIANTRSGFDSCLLTLRALDGTIHVALEATGPYWLALYEYLTHAAVPVAVFNPLQVHAYRKTGVRRTKTDRVDAFWIADLLRVGGAAVNPQPDGTLLQLRELARFRWQLIDQIGDNKRKVLNVLDRVFPEYETLFSDVFLASSRTLLKQAANADEFAAFDLGELTALLRTHSRGRFGLAHAQKIVDTAKTSIGVSFLADAAQLEVACLVAQIEFLQTQVEQVDAALAELLTHVPQHLTTIPGLGPVTAATVLGEIGDVTRFATLEKLVAYAGIDATVHQSGQFNASQMHMSKRGSPYLRRALWLSAFVSSQHDAELQAYYERKRAEGKHHNTVIGAICRKLLARIFVVLKEQRPYEVRPSAPTA

SEQ ID NO: 426247 - protein, 457 aa, unidentified
MAKRRRKAMSRKFKITKLPAELQHINLNAAGIDVGSERHLVAVPEGRDVVSVREFGTFTSDLEALATWLKKCGVTTVAMESTGVYWIPLFEVLERRGFEVKLVDARHVKNVSGRKSDVLDCQWIQQLHTYGLLAGAFRPPDEICVLRSYLRQKEMLTQASSMHIQHMQKALQQMNLLLHNVVSDITGATGMKIIKAILAGERDPQVLSRNRDERCKHSATTIAKSLVGNYREEHLFALRQAVDLYETYQTKIADCEQAIIKELEKQPNVSDDEPPPADKETQARDRIRAGVDVRDMLYQKSGVDLFAIPGLAADTLLILTSEVGFDMRPWKTEKHFSSWLSLCPGTRRSGGKVLDSKTKRNPNRAAQAFRMAASSLSRSTTALGAFYRRIKMRTSGQQAVTATAHKIARIYYAMLTKGASYIELGQQAYEQRYKQRRLDQLKNQAKSLGYQLIPCAS

SEQ ID NO: 426248 - protein, 443 aa, unidentified
MHVVHMRCAGLDVHKKSVVAAVRLLSTDAILTTHVRTFGTTTKALLDLVAWLLTFEVTHVAMESTGEFWKPIYNLLEGSLEVLVVNAAHIKHVPGRKTDVKDAEWIAELLAHGLLRPSFVPPAPQRALRDLTRQRTHLIQERASVVNRMQKVLEWANIKLASVVTDITGVSARAMLQALVEGQTDVAALAELAKGRLRTKQAELEQALRGSLQPHHAFMLAQHLALIDVFDEQIAAFDARIDQAIEHTRPSPPPPDGRGEPDQEHSGSEAASAPEGSWAASVIVDAIPGIGERIAEVIVAELGTDMNRFPSQAHVSSWAGLAPGQHESAGKRKSTRIRDGNRYLRSALVQAAWAAVKKSESSLAGFYRGVAARRGKKKAIIALAHKILVIIYTLLKTGQVYQERGATALDDRQKERLLARMQRRLEKLGYKVMLEPIAATATT

SEQ ID NO: 426249 - protein, 351 aa, unidentified
MKILKQVAGIDVAQNELAVSVGRLKEDLTSEIYGYKVFPNTQKGFQKGFKELTEWAKKKTVVDVAVRFVMEATGVYHESLAYYLSDDKHLVSIVMPAKISNYQKTLEIKTITDKTASEVIARFGLDRNLESWQKPRKVYRDIRQVTRERDQLIAQRTVLKNQLHAELAEAYPNKKTLQRTEAHIKFVDSHVKEIMQEISDFINQDAEVKKLALLIGSVPGIGLLTAAIILSETNGFDLIRNKKQLTSYVGLDVKEKESGTSVKSRPKISKKGNRYIRKAMHFPALTAIRHDERFKAIYARIVQKHGIKMKAAVAIQRKLLELTYTIYKTNKPYDKEYLNQSNDNSPNKAVA

SEQ ID NO: 426250 - protein, 317 aa, unidentified
MAQSFFAGIDVSKARLDVAFSQGDEITESFSIPHTEDQISGLIEKFKKTLPQQIVIEASGGLERFLAAYLDEAGLPIAVINPRQVRDFARATGQLAKTDKIDARTLARFAAVMKPPQRPIKDAQRQQLADKVARRRQLVHMLAQEKNRRSRAPGPVRADIEHHIKYLQERLQNSNKDIEQIIMRTPIYQETVELLRTVPGIGPVTTASLIADCPELGSLNRRQIAALIGTAPFNRDSGTRCGTRCVWGGRRTIRNMLYMATVSAIKCNYKIRSFHVRLIAAGKKPKVAITACMRKLITILNAMVKQQRPWDVGPATN

SEQ ID NO: 426251 - protein, 341 aa, unidentified
MNEVTTIGLDLAKNVFQIHGVDASGRIVVRRQLRRSQVLPFFEKQAPCLVGIEACATSHHWARQIAKFGHEVRLMPARYVKPYVKRNKNDAADAEAICEAVTRPTMRFVEVKTEEQQSVLMLHRTRQLFVRQRTTLINAIRAHMAEFGIVAGIGRNGVERLLRLIDEGSDGRVPAVARECLQALRAQLVLVKRQILEADRRILAWHRSNELSRRLETIPGVGPLIALVASIPDPHAFGSARDVPAWIGLVPKQNSTGGKARLGSISKAGNRYLRSMLVVGALSVIRRAKQVGYTRRAWLAELMARRPTKIAAIALANKIARIAWALMVSGTRYREPAPQAI

SEQ ID NO: 426252 - protein, 428 aa, unidentified
MTKKPSGLKRSARPSSMDTVHPHAAGLDVGSTFHVVAVPAHLSQEHVRTFRSFTGDLHLLAEWLEGVGITTIAMESTGIYWIPVFEILEACGFEVLLVNARDVKNVPGRKTDVNDAQWLQQLHQFGLLRGSFRPHERVIQLRALIRHRDRLIESGATHIQLMQKALMQMNVQLQHAVPDITGLTGMRIIRAIVEGQHDPTVLAQYRDGRCKASVETIREALTGNYRPEHVFALRHALAIYDFLHGRIAECDAEIASVLEVLNTDRAAPAEPLPAVRHQRGKNEPRFEVRRALCTLLGADLSQIHGLGPYTVLRLIAECGDDMSKWPTAKHFTSWLTLAPATRSPAAVSSARKRAAPQTGPPSCSGWSPSTSGRPKRHSVHSTAASPHVSERPRPGRNGALAARGRALQTHLHGRISCGPTYLKRLSER

SEQ ID NO: 426253 - protein, 403 aa, unidentified
MRNTPFVFKKQVAQTPQALSQWCNSLIAEFPNQKLAIIIEGNRSGLIYHLLAYPAFVIYPINPKSAAKYREAIYPNGSKSDPLDADLLLDYLIHHRDRLRAWVPDTVQTRTLGQMAEDRRTLVDSRTGLLNTLTSRLKLVFPQVLELFDNIGLPMIAAFLGKWPSLSKLQKARPAQLRAFFYAHNSRSEELIQKRLELIAQATPLTEDVATLTTATMMIEALVLQLTKLHQIIAGYDKQLMELTRSHALAPIFESLPGAGKVMVPRLISALGTQPERWSEAYDLLCFSGVAPVEISSGKQYTVAWRWNCPRFFRQTFVEFAGCSLKVCAWARAYYDDQKAKGKEHHKAIRALAFKWIRIIWKCWKDQVPYNELTYLNALKKKNSPLLSKLNKPENTPIISTSA

SEQ ID NO: 426254 - protein, 354 aa, unidentified
MPRKTTSLEAVATIGIDIGKNTFHLIGLDKVGAIVLRQKLSRSQVDTRLANMPPCLIGMEACVGAHHLSRQLKALGHDARLMPAQYVRPYSKGQKNDFRDAEAIAEAVLRPTMKFVAIKTVEQLDLQGLHRVRERLVCQRTSVINQIRAFLLERGIAVRQGLRALRTAMPNVLAMTDKLSPRMIHMIEDLCTDWRYFDARIATVSNEIETLSEQDDGAKRLMTVPGIGPIISTATVAAIGSGDVFSKGRDFGAWLGLVPRQMSTGGRTVLGPISKRGNRYLRMLFVQAARAVLLRPQSWEKHGLKSWIEAAARRLNRFKLAIALANKIARIAWGVLHGGRNFEVRSMRTAPQTG

SEQ ID NO: 426255 - protein, 346 aa, unidentified
MLYAGLDLSRKRLDFHLLDPEGATVEVGASPPDADGLRGLSERLARHGAPIRGAIESMNGARFVHDRLEMAGWQVEIADAQKVKGLAPLACKTDRIDAWVLAELARRDLVPAIWLPDPRVRAERERARWRLHLVRHRSSLKQRVHAVLLAHGKPCPVTDLFGVRGRQLLASLGLPEPWQGTIEASLRLIDELEREISECERELRRLGANHHYIPLLCTVPGIGWVLAYTIAAEIGDITRFPTPRKLTGYSGLCPRVYQSGERDLRGPLSKQGPRYLRWALVEAATHACTHPAYRERYQHTKARIGKQRGAKVAQIDLARRLTEAIWHMLSRGEAFAPKGATDPLAA

SEQ ID NO: 426256 - protein, 402 aa, unidentified
MNAVGIDVSKGKSMVAIMRPFGEIVSAPFEIKHTASDINSLVELINSVEGESRIVMEHTGRYYEALAHQLSEANLFVSAINPKLIKDFDNDSLRKVKSDKADAVKIARYALDKWQNLKQYNVMDELRNQLKTMNRQFGFYMKHKTAMKNNLIGILDQTYPGVNTYFDSPARSDGSQKWVDFASTYWHVDCVRKMSLNAFIDHYQNWCKRKKYNFSQSKAEEIYGKAKELVPVLPKDDITKLIIKQAVNQLNSASTTVESLRTLMNETASKLPEYPIVMAMKGVGASLGPQLMAEIGDVSRFTHKGAITAFAGVDPGVNESGSYEQKSVPTSKRGSSDLRKTLFQVMDVLIKTHPQDDPVYQFIDKKRAQGKPYYVYMTAGANKFLRIYYGRVKEYLSSLPES

SEQ ID NO: 426257 - protein, 334 aa, unidentified
MKKFEFFLGIDISKNTLDYCLLDDQCKVLEKGKVNNEPASLSKFFLKFENEYCCKTTLLIVFENTGIYSKPVARFLNENKWCYSEVSALEIKRSKGVSRGKSDRVDAHQIAQYGFRNLDKIMLCTEPELIHQQLKILNTEREKMLSAISSFSRTGEAEEFLGKEVFKVVKTHNRQTLSALRKQLKQLDDKISALLRSNEDLKKKQELLKTIPGIAEVGSLYLLLATKGFTRFKNWRKFACYCGIAPFEYSSGSSIRGRNRVNPLADKKMKSLLHLLALTSIRHDPELKLYYERKKEEGKHSLLVLNNVKCKLVSRIFAVIKRETPYVKTHQFAN

SEQ ID NO: 426258 - protein, 419 aa, unidentified
MTTKKDSTVLSVVHPVCCGLDVHKKKISACLLGAGDAADTILIKEFGTFTDEIEQLRTWLAEHECPIVAMESTGVYWRPVHNILEGEVEVILVNARHIKNVPGCKTDIEDSRWLAGLLQHGLLRGSFIPAKEIRYWRELGRSRRKNTEAIGDYKRRVHKLFESANIKIDSVVSDLFSMTGRNLISRLLSGTFTLSLTDVQECARGRLRDKAQELYRSIQGFFEEHHRFLLAGMMRILKTLEQENEEISARMKELMQAQQDLLNRLDEVPGISELSAQYVLSELGPELDTFPNAAALAAWAGLCPGNNESAGKRKSGRSPVTKHHLKSIMIEIAWAAVKKKGSYYRDKYWRLRYRLGPKKAIVAIAHRIVKALFAIIKHGERYKELGEDYLAQRGNVNKLVKIRKEAKALGYDLVAIAAA

SEQ ID NO: 426259 - protein, 391 aa, unidentified
MNSLTTAVSKIKEAEELYSLESRIFLESTGIYHYPLFCYLRDKGFNCSVINPIITKNSTNINIRKVHNDRFDSKKAALVGLKPDLKVSLMPSDLALNCRNLCREYYDLMDNRSAYVNKLQGELRMVFPQYLGIFSKVTINTSLTLLETYTSPSAFLKADKQEIIDIIKSTARFGLTYAQNKYNAIIQAATDANQFGYIIDSNIKRIRLYISFIRKYDEEINNILESLHELVDANEDADFVKQIHLIETFKGAGFLSAVSIMGEIGDFSAFSKPKQLFAYFGLDPAVKQSGKFEGTKVQISKRGSAIARRVIHTLTLQSISISRNGEAKNPVLREYYLKKCDSKPKLVAMGAVSHKVCNMIFAILRDNKPFKIIAPQEHIKQYNAAKCDIAA

SEQ ID NO: 426260 - protein, 344 aa, unidentified
MEIMTIGLDLAKSVFQVHGVDAAGKTVVRKALRRAQVLTFFSKLPPCLVGIEACGTSHHWARELIKLGHDVRLMPPAYVKPYVKRGKTDAADAEAICEAVTRPTMRFVPIKSPEQQAALSMHRSRDLLVKQRTQLVNMMRGILAEFGIEIPQGLHRALEMARAIVGGEAPDVPSDAVKVVARLSQQALDAHAQLREIERDLLAWQRRSDLATRLLTIPGIGPIGATAIAASVTDPRQFRSGRQFAAWLGLTPLQSSSGGKERLGRITKMGDKYLRKLLVVGMTSMVRRAKNKPQAVDPRLLALMARKPMRVVTVAMANKTARIAWAVMVRGEVYKERHVPALAA

SEQ ID NO: 426261 - protein, 501 aa, unidentified
MAAKKNAKTKADSAGEGVQAHGGVAAEVTDEVTQVVEYAAGIDVAKGFGMVCTRVPGSRRGSKRQKVWRVNATFKEITALMDHLVCEGIQRLVLESTSDYWRIWYYLAEAAGLDVWLVNARDVRHLPGRTKSDRQDAVWLCKLNERGMLRRSFVPPRAVRDLRMLTRTRSRLAQDQARHQSRVEKILEDALLKVSAVISDLFGVSGRRFLDALVAGERSPAALAALGDYRLKASKAKLEETLTGQFRDIHATEIAVHLRLIDAINAEITGLDAEIEKALPQVPRTAPVCTACGVAGGGHAPDCQNLGVPLLGLADRLDEITGIGPVNARVLIAELGTDPSQFPTPGHAAAWAKLTSRLMQSGESSWNGRAGKGNPHLRGALGQAVMSAAKTDTRLGAMYRRIARKRGKQKAIVAVARVICEIAWRLICDPGARYIELGPDYYQPRSARQRTRSSIRQIEKDNPGKKVVLIDDPAIAGTPGSAGPAEPAALPAVLSRLPVTY

SEQ ID NO: 426262 - protein, 377 aa, unidentified
MKRIKFVGLDVHAETISVAVAEQGGEIRSLGVIPNREESIRKLVKKLGPVEELRFCYEAGPTGYALYWQLTRMGAKCEVVAPTLVPVKAGDRVKTDRRDALKLARNYRAGELTPVWVPDAAHEALRDLVRAREAAKKDELRARHRLNKLLLRQGRRPPMGVKLWTIKYLEWVKREVHFEQMAQEATLLDYLHEVEHAAARIARLDGAIAEAVKLAPPKMRAVIAALQALRGIAHVAAVTVVAELGELSRFARAKQLMGYGGIVASEHSSGEHTRRGGITKTGNAHLRRVVVEAAWTYRHRPAVGTSLRKRQEHVSEEVKEIAWKAQQRLHQRYKKLLANGKNKGVVVTAIGRELLGFIWAIGIKVEAAQKESLQRAA

SEQ ID NO: 426263 - protein, 355 aa, unidentified
MTTMARTPTDLQYDQYVVIGGVDTHRDSHTAAVIDPVGRLLDHRTFGANPTGYQQLLAWLQSFGTVQRIGVEGTGAYGSGLGTYLTSQGMTVTEVDRPDRKTRRSAGKSDPIDAEAAARAAAAGTRTGTPKSRTGHVEALRNLRVARRCAISHRADCVRRMKTLVITAPEPLRGHLRHLSTRELIATCAALRPDPARISRPDQAAKAALRSLARHHNQLTEQITELDTYIQPLVAAINPQLLELNGVGADVAGQLLVTAGQNPQRIHSEAAFAMLCGVAPIPASSGQTHRHRLNRGGDRQANAAIHRVVICRLRWDPRTRAYMTRRTTQGLTKQDIIRCLKRLIAREIYYALTTT

SEQ ID NO: 426264 - protein, 466 aa, unidentified
MKDNRRLGKPRVSPSVLEHINPNAAGIDCGSAEHYVAVPPDRDATPVRSFKTFTSDLVRLADWLMMCGITSVAMEATGVYWIPLYEILEARGFDVRLVNARHVKNVAGRKSDVSDCEWLRDLHIVGLLRGSFRPTDAIVALRAYLRHRQTLLESAATYIQRMQKALLQMNLQLPVVVSDITGATGLRILRDVVAGEHDPQRLAAHRDHRCHASLADIIAALTGNYRPEHLFVLQQNLDLFDTCQTQLAACDRAIEAHVQGLLVTIEVPTAALPAPRVTRTARARDNAPRFEIRSSLHHLTGGVALTQINGIAPYTALKLISEIGTDMARWPTEKHFTSWLTLAPKNKISGGRLLSSRTQPSANRAAGILRMAAMSLGRTQTALGAFYRRLAARIGKPQAITATARKLAILVYRALQGDLLYQDPGADAYDKQQRTRVLGRLRQRAATLGFELVNRDTGEVLPAGVS

SEQ ID NO: 426265 - protein, 406 aa, unidentified
MDVIYPRCAGLDVHKQTVVACSRLSGDGAPRQEVRTFATTTSGLLELADWLESLGVQHVAMEATGVYWKPVWHVLEGHFVLVLANAAHVKNVPGRKTDVNDAMWLADLLAHGLIRASFVPPVAVQELRTLTRTRKQFVRERGSHAQRIEKILEDANLKLSSVISDILGKSGRAVLKALIDGETDPQALVSHIGRVKATHSELLEALRGRITAHHRFMLKLHLDHVETLDKAIAQIEKEVGLGLEPFRQAAQLLSTMPGLSSVSAHVVVAEIGIDMSRFATPGHLLSWACLCPRNDESAGKRRSTRLRRGGKWLKTTLVQAAWAAIKVKGSYLQAQFHRLRARRGAKKAIIGVAASMLTAAWHMLRNGTEWHDLGAAHFDRADATKTANRLIRRLQQIGYKVQATPA

SEQ ID NO: 426266 - protein, 351 aa, unidentified
MLLIGVDYHPSFQQVAFLDQGTGECDELRLNHSDGEAERFYRDLKSRGISVRVGMEATGYSRWFERLLAELGFELWIGDPAEIKAKRVKKQKYDREDARLLLRLMRENHFPQIWVPSAENRDLRQLLWHRHRLVQMRTRIMSQLQALAMNENRCWKKKLWSERGRAEFEKLPLGFWASRRRQELLELLDRMNPKIEELTAAVEQEAKKRPDALRLMTHPGVGPLTALAYVLIIGTPARFSRGKQIGAYVGIIPSEESSGGKQRLGHISKQGSSLLRFLLVEAAQAAARSHPEWRRRYIHLAMRRHKSIAKVAMGRRLAVQLYWMWRNGCEYSQSVKCGSYVGQLGSGHGVK

SEQ ID NO: 426267 - protein, 320 aa, unidentified
MMAQNARVVVGVDVAKDKVDACIRALGLRQTFPSTTQGHRKLVAWLRKHQVNKAVMEASGGYERAWAKVLREAGIEVRIVDPKRVRSFALSAGRLAKNDTIDAEMIAWFAETFSDAPGQKHDAAHEELQVLVKARLSLIDLRMRLVSQSEHAAPGLVQKAHARILKNLACEIAKLEAAICAKIKFMPDFAERAEIIESVPGFAETSSANLVAGMPELGQVSNKIAAALIGVAPYDDDSGKRRGERHIKGGRRWVRNAIYMPCVGAATLNNPVLKAYYQRLIAKGKEPKVAIIACMRKLIIILNTMIARRQKWDPSRYALS

SEQ ID NO: 426268 - protein, 324 aa, unidentified
MTDAILGIDVSKETLDASCARGQRRQSRTFANSPDGWKMMLAWLKAMGSKRAHACMEATGRHSLGLALALHDAGHVVSVVNPAQIRDFGRTKLGRNKTDKVDAALIREYAELLKPGPWTPPSLAMRTLNELQTVRAGIVGSRTEWKNRIGSGLGDSTATKLAAATIEHFTIQLEAIDKAISETIDGDAELRGRCDLLLSVVGVGETLAALLLAEMPEPGILRRSGELVAYAGLNPSHHRSGTSIDRPTRISKIGNAALRSSLYMPALSAMRYNPAIAALVARLKSAGRLKPKQIVVAAMRKLLVICFGVLKTGQRFDPALAMPA

SEQ ID NO: 426269 - protein, 332 aa, unidentified
MYLGIDVHKQYAQVAVMDEAGEIAEEVRVENANLDELAQQYAGSQAAIEATSNYYHIHDTLSEHLDVVVAHPKELTQIVNSDKKTDRVDAKELARMVRLNSVPESYVPTPEIREARALVRGRQTLVENRTKYANKIHSLLSDHGITENVKPLGVKGREFLRELSLPTPWDTLLESYLELIETLTEEIQKIEKAIEERAGSQKETQLLMTIPGISYYSALTIYAELGEISRFDGHKQVVSYVGLNPVIRESGDSRIEGGISKRGSSRVRWLLVQATHTAVHTCNDRYLSRFYDRLASRKNSQKAAVATARKMLVSMYHMLDREEPYDPPGVSG

SEQ ID NO: 426270 - protein, 378 aa, unidentified
MKVSKPGSSPVGEWVFNVVGIDPHKRTLTATVVDARGGILASEHFRVSGDGHRALEAWARSFGPIARWGVEGASGWGRHTAVFLTGRDHDVRDVCPTRTARSDRARQRGKSDMLDSERIARETLAHPLLPRAFKRASGGRGPDEQRELLALWHNARRSILTSRQHLLNEAESLLADLPLDVREQLPDSKAVRPRLAALTQRNRRRRHDAPTTLRLRLLDAHHARIAQLDREEHNAVKQLQALVRVSASTLGELCGLSTRSVAELLVEVGDPRRFTEGGFARFNGSAPLAASTAEGPGEPVRHRYNPGGNRRVNAVLHRMAVTQLRCEPRAKAIYERARARGHTKREARRILKRHLSDVIHRRMMRDLKAANASALLAA

SEQ ID NO: 426271 - protein, 355 aa, unidentified
MNDEKYIGLDVHQATIVVAVIDSTGKLVMESILETEAATILQFFAGLRGTLSVTFEEGTWSVWLYDLLNPHVDKLVVCNPRKNALLKDGNKSDRIDARKLAELLRGNQLKPVYHGETGVRMLRELSRSYLTIVKDLSRVMNRLKAVYRSWAIPCAGRDVYYRRHRAQWLAKIREAGVRRRAERLYEQLDMLQHLRQQARRELLAESRKHAITAKLRQIPYLGPIRSALAVALIQTPHRFRSKRQLWAYSGLALETRISAEYRLVEGQVRRSKKLLSIRGLNKDHNHDLKGLFKGAATMASVRPGPFQDFYQAALAKGIKPTMARLTLARKIATITLTLWKKGENFDAEKLKSQAA

SEQ ID NO: 426272 - protein, 337 aa, unidentified
MIVMGLDQHRGQISAEWIETETGEVSRARVSPAHREPVRRFLGRFAGRELEVALEATTGWRFVVEELRAIGAGVHLAEPAETAARRGNKKRAKSDRADARHLRELLMIARLPESWIPPDHLLDLRARVRLRHTLSDQRGEWQQRIQAVLYHHGCPRRRELMTRDGRAWLAEQALPATAREQITVAIAMIDALDRQLAPITKELRVYARRQVGCRALMAHYGIGALTAVTILAELGDCRRFSSSRHAVRYAGLDITVHQSDQRRAPGHLSRQGPPALRWALFEAAQVARRPASPDRDYYTQAADRLGANRACLAIARKLLKRSYHTLSELGEEALAPA

SEQ ID NO: 426273 - protein, 342 aa, unidentified
MEITTVGIDLAKSIFQVHAVDAAGQVVVRKALRRAQVVPFFAKLPPCLVGMEACGTSHHWARELIRLGHDVRLMPPAYVKPYVKRGKTDANDAAAICEAVTRPSMRFVPVKSTEQQAALALHRTRDLLVKQRTQLVNMIRGLLAEFGIEMARGLRHALELAAWLSAGDAAEVPPLAQRVVTGLADQIGAVQIQLTRLEKELLAWHRDSDLSQRLATIPGVGIVSATALAASVSEPERFRNGRQFAASLGLTPLQNCSGGKERLGRISRMGDRYLRRLLVVGMTSLVRRAKATPTSVDPRLPALLQRKPVRVVTVAAANRTARVAWAIMTRGGTYRAPAATAA

SEQ ID NO: 426274 - protein, 376 aa, unidentified
MSNVRFIGLDVHAETIAVAVAEPGGEVRSLGGIPNRPESIQKLVKKLGPTKQLRVCYEAGPTGYVVYWQLTALGVTCEVVAPTLVPVKAGDRVKTDRRDALKLARSYRAGDLTPVWVPDTAHEALRDLVRAREAAKKDQLRARHRLGKFLLRQGRRPPTAMQAWTQKHLRWVKTVHFEHAAQEATLLDYLHEVEHMADRIGRLEGAIDEAVKTAPERMRAVINALQALRGIALVSAVTIAAEVGELSRFAKPRQLMGYSGAVSSEDSSGRRIRRGAITKTGNAHLRRVVIEAAWAYRYRPAVGAPLRKRQASVSDEVKAIAWKAQHRLHTRYRHLTAQGKCKQQTVTAIGRELLGFIWAIGVQVESATGHAKPVAA

SEQ ID NO: 426275 - protein, 373 aa, unidentified
MPKYSTAFGMDVHLRSTTVCALDADTGEAVTRRFPGNPWGEIAGWMDGFPGPSLAAYESGYLGFAPQRELAGLGVECVVAAVSKIPRSAADSASKNDRSDAARMAKAILAHDISPVWVPSPEVEGIRDLAGAYDGATARLATAKQRLLAFLAKRGFVYGGTTPAGNPRKYWTYDFLRWLDKVRPEDDGGVRALAALRNEVEAAAEARADLLSEYGAAVDASPIAAEVAALQSIKGCAFALAAAFSAEVGDFTRFRSGRQVTAYFGLAPSQRSSGDSVRLGGISGAGNALVRKLAVEGSWCYAAARHQPKLMPRDTGVPLEIRMHGRKGSERLLRRREEMLARGMPAAKANAATAAELVRWLWALGMMCREGAE

SEQ ID NO: 426276 - protein, 393 aa, unidentified
MNEARYFCGVDVAKDSFVVSVKNGRFLAKNRTFTMDRSGFRDFERIISDFKEGVVIGMEPTGIYHHNLLNFLQERDYNSVVVNPYMLHQFFKFTNNKPTKTDKKDSKTIAEFLEFKQDELKESPKTVDERYSARYFVREKERITQDIARTKTEIKRMLSLVFPEAEKLSGVYSQEFLSVLLEFGGAAKIRRTSKARFVSIAKQLSDKGRGRKSKFSPEKIYELASSSIAGEWPDYEELLKIKIRRLYRLLEEKEQITKLIEEKAEKFFKREIEILSSIPGVGKESAIYLMAELVNIKRFEDYRKLVGFCGLDPVIKQSGRFKASWRISKRGNAHARRIVWIMAGCVKRSCPYFREYYLKKRNEGKSYKEAVIATSTKLLRTIFALLNENRVFK

SEQ ID NO: 426277 - protein, 373 aa, unidentified
MRSIIGCDAHKQFSVFVAIDKTGKTSSPICVGHDREEYIRFLRTLPPGSEIALEATGHWYWMVDEMESTGHHPHLANPTEAKKRMGKTNKTDALDAKGLAILLHNGTLPESWIPPGDLRDQRELLRTRMALRDLRTSLKHRIHAAIDRYGLHATGISDLFGVRGRVYIDRVVDQLPSHTASMIQMQLASLDQLEAQMESIESRIAAVLKPSPSVRLLRTIPGLGEILAPLVWLEIGDVSRFPHAENLASYAGLVPRIIASGGRIRHGGTCRNINPLSQMGICRSRYPILRSTGQSVCSGPLPPHCQSPLAPRSPTAESEGTRPVGADATAHPPLAASGPYLPSLSFAPSARHHLRQEPDAGNPPVRICAGGTA

SEQ ID NO: 426278 - protein, 448 aa, unidentified
MSKIKTKNETVKRISQLTVINPTVAGIDVSDKELMVAYPIGSEQLEVRSFGCFTSDLHTIAKTLKKFQITSVAMESTGVYWIPLFLLLQEYGFEVYLVNAKHVKNVTGRKDDESDAEWIQKLHSCGLLKASFQPDNMTRTLRSMVRHRKSMVSTSSTYLNRMQKALELMNIKLHTVISDIDGKTGLLIIEAILSGERNQEVLADLRDRRIKASREDIIKSLEGHWTTEHLFELRQCYQLYCTHREMIDECDKEIEKQLIEQIASKNEGVIPDIPKAKRKVSGKHKVPFNLTSYLKEILGVDVTEVFGISELSALTIFSEVGTDMSKWKNEHHFTSWLGLAPNTKISGGKVISSRIKKKKHHAGQAFRMAANGLYNSKSPLGDFYRRIRAKAGAGKAVVATARKLAIIFYKMVANKEAFNPLALENFQEKYKQKKINQLKRKLEILEAA

SEQ ID NO: 426279 - protein, 354 aa, unidentified
MIIIGCDYHPGFQQIAFVDTETGDYGEQRLEHSEGAEKFYRDLAAQGEKVRVGMEASGHARWFERLLAKLTFELWIGDASEIRARRVRKQKTDRQDAQHILQLLMENRFPKIWVPSGENRDLRQLRWHRHRMVQARTRIMNHLQAVALNEGLRCKKRLWRDAGREQLESFRLSPWASRRRRDLLELLDRLTPTIAELTAAIEQEVEQCPDAQRLQTHPGVGALTALAFVLIIGRADRFQCGKQIASYLGLVPLEDSSGPRRRLGHITKQGNSLLRFLLVEAAQVTVRSDQEWRSKYFHLAMRRGRKIVKVAMARRLAVRLYWMWRKGWNYGQLKKFGSHAGEPGNRDGVKSNTE

SEQ ID NO: 426280 - protein, 361 aa, unidentified
MPSAKPVSTPLKYVVGIDIAKSSFVACLGRLDGNQQLVFGKETTFENTPSGFASLLSWVARQQEAAAPLWFVVEATGVYYEELAYFLADNQQLLSVLLPNKVKHFARSTELKSKTDQLDARLLCRLGLERLLPAWQPPTPALRQLRALARERQVLTKQGAQLKARVHAYQHSYQPDSRTLARLAAQQQLLLQQLAALDQDLTELLAAEPELARKLAQLTSIPGIGLTTAVVVVAETSGFALVENERQLASYAGLDVVRRQSGLSAHATRISKRGNTRLRTALYLPALSSLRHNPRQIAFYTRLRTRHPSGKPGVIAVMRKLLVLCYSLWKNDRAYDPNYPPAHQVSQEIAPASEVGRGYAG

SEQ ID NO: 426281 - protein, 338 aa, unidentified
MKLKRIGVDLAKNVFQVHGVDSHEQVKLRKQVKRRDMLNFFRRIEPCVVAMEACGGSHYWAQELGKMGHEVRLIAPQFVKPYVKSGKNDANDAEAICEAASRPAMRYVRVKGPAQQAGQALHRVRSRLIGACTALVNEIRGLLSEFGIIGPVKGVAACRRLLADVLEDAENGLPGVMRELLAQLLEELGQKDAHIARLDAQIKCQCAQDARIRRLMEIEGVGLISASAMVAAVGDARQFKSGRDLAAWLGLVPNQHSSGGKERLGSISKRGDAYLRTLLIHGARSAVNVCREKTDRKSQWIKGLVMRRNKNIATVALANKNARTIWVLLSRGEDYRTA

SEQ ID NO: 426282 - protein, 440 aa, unidentified
MAAASDPHCLLTSVKEGVLLEETQDREEIIERVAALDIGKAELVCCVRVPGTSGSGRRSQEVRTFATMTRSLTTMAEWLRGLGVTRVVMEATSDYWKPAFYILEAHGFDVWLVNARDVKHLPGRPKTDKLDAVWLCKVAERQMIRPSFVPPPPIRLLRDLTRYRADLVVAAGAERNRAEKLLEDAQIKLSVVASDIFGVSGRQMMKALIGGQRDPKVLAQLARTSLRRKIPMLQEAFTGRFSDHHAFLLGKMIARIEAIEADIAEVDARIEAQLAPFAQAAARLTEIPGVGPAAAAAIIAEIGVDMTRFPTPAHLAGWARFAPGVKQSAGRRKGRGSTGHGNPYLARVLGQIALSTARTDTFLGERYRRIARRRGAKRAIVAVGRSTLTIIWHLLSDPDTHFHDLGADFYPNRTDTERRKRNHIHQLETLGYRVTLELAA

SEQ ID NO: 426283 - protein, 384 aa, unidentified
MSEATPTKATALERALYMAFELSERTWKVLFGTPASPKLIERNVAARDLETLWREIAEAKRRLGLPANAAMVSCYEAGRDGLWLHRALEAAGIENLVVDSSSIEVPRKKRRRKTDRIDVRKLYGLLARHLRGEKNVWSVARVPDPETEDIRRLSRAIERLKAERARHRTRMKALLATQGVRLARVGGADWEARLADVRLWNGEALPPYLMAELAAEGERLALVERQLAEAKAEREALVADGREPIAARAGQLALLCGIASESSFVFSAEMLGWRAFANRREVAGAAGLTPTPYASGADAREQGISKAGNPRMRAMMVEIAWCWLRYQPQSALSVWFRERFANAGGRARKCAIVALARKLLVALWRYLEHGIVPEDARFKSQAAG

SEQ ID NO: 426284 - protein, 314 aa, unidentified
MANIEVHIGVDVSKDTLDVFNPSDNKWSKIRNTRTAALGFVRKIKDRHPGAMICCESTGGYERTLMDACHEEEHPFCIMNAQQVRHYAQHLGLLEKNDKVDARTISMAANDKKPAPLVPPSPEQRKRKELWTLRATLISAREAMANQLEHLREKDAVATVRKLVKAYDKEIEKIEKLCHRFILQDERDASLFKRSQKVKGIGKLTSIGVITLMPELYTLDDKKLSKLAGVAPLCDQSGKIDGARHIQKGRTLVRHALFMAALVASRRNETLSKFYIRLVKAGKAKKAALVAVMRKLLCLFRRIAQDPGFTPLGT

SEQ ID NO: 426285 - protein, 424 aa, unidentified
MNTNWTEQPYFAALDWAKDHHDVVVVDRIGTIVAEFQFAHTAAGWAQFEQQMQACGRCPIAIETSSGPAVDQLLPRQYPVYPVNPKAAERYRERKAPRGNKTDRHDAWSLAEALRPDGQGWRPLRPQDEATATLRLLCRDEQALIEQRTALVNHLQAALGEYYPLALESFADWTQPFAWAFVQAFPTPAGLQQAGKRRWEKFLHLHKLWRPDTAAQRLAAWDQGQPLNASAAILSAKRLLALSLVRVLQSLHKQIDEYRARIRAAFQAHPDHDIFGNLPGAKDKLAPRLLAELGSVREIFPDAQSLLCYAGVSPVSFQSGQICKARIRWACDHFLRHTVHLWADQSRRRCAWAQAYYQAKRDKGHSHASALRCLGKRWLKLLWRLWQDHLTYDESVHLQSLRTQGSFVANILALQPAEPAAPCE

SEQ ID NO: 426286 - protein, 344 aa, unidentified
MDHFAGLDVSVKETSVCIVDDVGKIVREVKVASEPEALLAVLKNPAYRFKRIGLEAGPLSQWLFSAVAEAGLPVICVETRHMRAALKAQINKTDRNDARGISQMMRVGLYRPVHVKTLRSQKLRMLLTHRKLLQSKAIAIENDLRGTLRNFGLKVGMVGTVKFEARIKELVENQPDVAALVEPLLIVRRVVREQTVILHRRLLAIVREDEVCRRLMTIPGVGPVVALTYRATVDVPARFRKSKAVGAVFGLTCSKYQSGEVDWSGRISRCGDEMMRVMLYEAAQSMLRSKKWSWLKAWAMQIARRRGMKKAIVALARRLAVIMHRIWVDGTEFRWTREQVVAAA

SEQ ID NO: 426287 - protein, 342 aa, unidentified
MSLSSWLVAGIVPGVERQPLKKLAVDESALLKLLNRWREEAEKAGCRIERIAVAFEAGRDGFWLARWLRARGIEAHVIHASSVAVSREHRRAKTDRLDTELLKRAFLGWLRGERDHCKMVAIPTTKDEDAKRPNRERQSLVGEQTRIVNRMKAALIRLGIRGFNPKLKKAAGRLEDLRTPEGEPIPPNTLAELRRDLERRRLVSDQIRQIEEARLERMEQAPGDGPHAMVRLIARVIGVGIETADMLVHEVLSRKLRDRRAVARYAGLTGAPDESGSKRREKGLAKAGNARVRGGMIQLAWRFLLFQKDSALAQWYRTRTEGGRNRKTIIVALARKLLIAYW

SEQ ID NO: 426288 - protein, 353 aa, unidentified
MELDKYIGIDVHSSTLVVNARDAFGKVVLQSVVPTRTDAILQCIGGLSGRLHVTFEEGTHAQWLYEVLRRRVDDVVVSDPRENRLIQDGSKGDGIDAGKLSHLLRMGAVKSVYHGRHGTATLKELVRSYDGLVEDSVRAMNRLKAIYRSRAIVTERKSVYQPKERERFLAQLTEPGAGKRAGSLYEQLDTLLKLRGQSERAMVTEARRQGAYRLLRSIPQLGPVRIAQLIAIVDTPHRFRNKAAFWNYCGFAVVTHTSAEQKFIDGKLVRSQKPVATRGLNKDHNPKMKQIFKSAAIKARARGPFAEYYASLVDGGMKPELATITLARKMSAITLSIWKKGEAFDAKKLKKTT

SEQ ID NO: 426289 - protein, 426 aa, unidentified
MKNSQNKKIEVITSKTLIVGVDIAKKVQWSQFTDFRGLELSKPLKFNNDFTGFKSIIQKIEEIKKNFNFNNVFVGMEPTGHYWKPLGAFLESNGIKVILVNPLHTKRAKELDDNLQTKSDKKDALTIAKLVKDGRYSEMYLPKKEYAELRALTLTRIEVSKIQNATKNRIRALIDEYFPEFETVFKTFIEGKAALHLLKNFPFPKDLLEMGENKILELLKQVVKKTVGKKKITELLNVAKDSVGMTQGTEGAKIRLMILLENFEQNTKHLETIEKEMEKQLLQTGYFEVLTSIPGIGIVSASSFLGEIGDPKRFQSAQQIIRLAGYNLVENSSGIHKSKTRISKRGRKNLRSILYKMAMVTVCKNKDMKLLYNYLKTRKENPLKCKQGLIVICEKLVRVMFSLINTNNKYDATKVLGTLRMEQIAA

SEQ ID NO: 426290 - protein, 344 aa, unidentified
MAIVGGLDIHRRQITYDWIDTTTGETRRGQLSPATRLELRAWLEQFHRQPADFALEATTGWRFVVEELERAGFRAHLAEPADTRALRGPKRRAKTDRTDARHLRELLRAGTLPESWMPPPHIADARTQVRLGRALVGERTGWYQRIHAILFHHGLPERSQLLTADGRAWLASIHLPAVARQAVDLALRMIDHLEVELDTLDAQLAHIARVQPGCQALQRRYGVGWLTAVAIWAEFGDVRRFANSRQAVRFCGLDITISESDGKRARGHLARQGSPVLRWALHEAAMCAARPSSPDHAHYLQVKQRLGAKRAALSVARKLAREAYHTLCELGDQALVPADLPTAA

SEQ ID NO: 426291 - protein, 395 aa, unidentified
MFIVGIDVAKRSHEVCMITSDGQTVQRPFSIRNNCTGYNLMLEKIRKHTNIKSQIAFAMESTAHYWLALFTRLRKDGYHVILLNPIQTSAMRDMFIRKIKTDAKDSFIIAELIRFGRYAESNVAQDRLLALKELCRNRFYLVDMAGDLKRKLIALIDRVFPEYEAQFDTIFCKSSVALLKKYPTPQKLSNAHLDKLTELLWNSSNGHFGEWKARELRELARNSFGVEDCDGAYSTLILLMLDQIQSLSGKADALEKEISRLFQSFDTTVTTIPGVGPIIGAVILSEVGDISRFSSADKLAAYIGVDPSVNQSGEFQAAHAHMSKRGSPYLRRCIWMASQVAVQRDSMFRAYYEKKTAEGLKYMTIIGHVTRKMTAVIFAILRDHKVYEPVLPTAA

SEQ ID NO: 426292 - protein, 427 aa, unidentified
MAGVVTARVNRGKKVMTEESFTWFAGVDWGSEKHHACIIDTRGTVVGERQFPHSGVGLAELGDWLLSIAGTTATVAVAIEVPHGPVVDSLIDRGFVVYAINPKQLDRLRDRFSVAGAKDDRRDAYVLGDGIRTDRRLFRRLHVADPRIVELRAWSRLTEELQEERVRLGNRVQQQLWRYYPQMQKITNDLAAPWFLELWAMAPTPGKARQLRKSTVEQILKKHRIRRIDADTVLRMLREPAIKVAEGIAEAASIHLRSLIARLHVVNRELRQAEQKLDQLCAGIGETEGAPGECLQGQDIKILKSVPGIGRINLATLVCEASGPLRSRDYPALRTLCGAAPVTKRSGKSQIVVMRYAAHARLRETVYHWARTATQHDAKSRCRYAALRQRGHSHGRALRGVADRLLGLTCVRLQRQTMFDPHFGQAG

SEQ ID NO: 426293 - protein, 381 aa, unidentified
MSNRTATTTTPAKESSTTTATTATMSMLAIDLGKFNSVACRYDPASGNHAFETIATHPSAVHDLLIEAAPQLLVIEACGVCGWVHDLAESLSIEVRVANTLGEAWKWKRVKRKTDRDDALKLAKLAASDQLPLVHVPQLSVRQHRSLIRHRHALIDRRTGIKNTIRSLLDAQGLSMPTRSRGWTTESIRELKTLSRPLDRCDGNTLWRGQLDLELRLLEAVSTLIKEADKRLDQLASQDERVTRLRTIPQVGARLAELVVATLDDARRFKNSRQVSAYAGLVPKQYQSGQMNRLGRITGQGPGLLRRVLVQVAWGLQRRTETRGHAVFERLCHGQRTRRKQAAVALARKILIWCWAMLRDGSTWDDSRGGGGGDRRLPAAT

SEQ ID NO: 426294 - protein, 378 aa, unidentified
MNRIIKIGMDVHTTNYTLCIFEPSFEHDGTVHCITQVKPEIKNIIHVIETFKKKHENEELNIVCGYEAGCLGYSLCHELKEKGIECVILAPTTMKTEKGGRKLKNDYRDAKMIAECLAYGGYSAVHVPTELDNSVKEFIRMRDDIKENLKSIKQQIIAFLTRNGKQFEGKSFWTRKHIDWINTVSFSEPLLQDTLKEYMIEYNHLCNRIETLDRQIEEISLKEEYVEKVQQLQCLIGIKTHTALSLIVETSDFNRFKKGNMYSAYLGLIPGDDSSGGHENKLGITKAGNSHLRRLLVEAAQGYTRGRVGFKSKDLKSRQEKCSSEVVAYADRANERLRRKYYRMTLRGKKFNVAKTAIARELACFVWGIMTDHIDLCN

SEQ ID NO: 426295 - protein, 351 aa, unidentified
MDKITTVGLDLAKQLIAMHAVDARGQVVLRKVLRRDALLRWSATLPPCEIAMEACGGAHHWARELTQQGHSVRIIAAEFVRPFRKSGKNDANDAEAICAAVRQANMRFVAIKSVEQQAALCVHRLRQGLVEERTALINRMRGLLTEFGVVAPLSPEKLRRELRLCLDEEKTHVPLMVRQLVTDELAALDALEQRIADYAAQIAAQVRDNVSAQRLQGIAGVGALTAAAMVATVGQPQAFRNGRQFAAWLGLVPRQHSTGGKSRLGRITRRGDAYLRTLLILGAKSALQAALRKPPPLRHRLRQWIVDVFTRIGYHKTLVAIANKHARIIWALLVKGEDFDVQRLTLTAVAA

SEQ ID NO: 426296 - protein, 357 aa, unidentified
MESQEVKYVGVDCGKKSIEVVRINSENSLERRQFSTTESGINNLLQWLTLNDIVGLEAGSQSFRIAKSILNKGVQVIVLNPGNLATIYQSLKKTDKEDSLKIARLIQRHPIEELPTVPIPNDEEEDNRRLCSEHENWTKQLTQGKNRLHSLFTQAGLTHITKKHLRTKANREISVALLPSRYQKEAERILKVLDLVEQNLKLIEKEIQEALKKNKAYVQTIMSMPGIGMITSLAIMSYMGDCKRFSSAKQAAYYAGLVPRVDISGDTVRYGRIINRGCHSIRRVIVQAAWSLVRCQHGGKVKEFYQRLYLKKGAKKSIIATSRKMIEVLYAMIRTGKLFDSMPENILNRKLTQYGLM

SEQ ID NO: 426297 - protein, 316 aa, unidentified
MSNIAFEQVIKVGCGADVHKETIVATIRSSDIDFETRTFSCYTSSLIELREWCQSCGVTHFAMESTGIYWKPVFNILEESDMKIILVNARHVKNVPGHKTDKKDSIWLSKLLLSGLLKGSFIPPEDIRELRDLVRYKKKVTEQRSSEKNRVIKTLEDCNIKLSSVLTNVDGAVGDRLISDIIEGESDPEKLIKHYHGRIHKSRAEFKLALAGRLTPHHWLMLKMVKRSIEDKDKLIADLEKEIDKKVEKYNDQIIRLQTIDGVGRDSAITIISEVGVDMSQFPNEKHFSSWAGMSPGSNESGGKKKVPKQSKETPT

SEQ ID NO: 426298 - protein, 422 aa, unidentified
MLEQTMDDEQIIERVGALDIGKAEVMCCVRVPGDGPSGRRRQEVQAYSTMTRSLLVLADRLRELQVTRVVMEATSDYWKPVFYLLEASGFDPWLVNAKDVKHLPGRPKTDKLDSVWLCKVAERQMIRPSFVPPPPIRRLRDLTRYRVDLVSARTAEKNRAEKLLEDAQIKLSVVASDIFGVSGRDMMAALIAGERDPKVLAQMARMRLRAKIGQLEEAFHGHFTDHHAFLLAKMLARVDAITADIDDIDAHIEDQLAPFVDAATRLQQIPGVGPVAAAVIVAEIGVDMSRFPTAGHLASWARFAPGVKESAGRNKGNGSTGHGNPYLGRVLGEAVVSAGRTSTFLGDRYRRLARRRGKQKAIVAVGRSMLIVAWHLLSDPDAQFTDLGPGFYDSRIQPDRKRREHIRQLEALGYRVTLEPAA

SEQ ID NO: 426299 - protein, 263 aa, unidentified
MQVSTIGVDLAKNVFQVHGVDSAGKVVITRQLRRKQVIDFFSKIPACLVGMEACGTAHHWAREVSKLGHTVRLMPPSYVKGYVKRSKNDAADAAAICEAVTRPSMRFVPIKSADQQALLMLHRTRDLLIRQRTQLINALRAHLAEFGLVASTGREGLAQLAAIITDESNREALPSAMKQALQAIVDQLAALELQIGTLDRAIHAHHRANDMSCRLETVPGIGVIGATAIASTVTDPNDFKSGRDFAAWIGLVPRQHSTGARSD

SEQ ID NO: 426300 - protein, 338 aa, unidentified
MISEGIDVSKEKSTVCILKPYGEIVSKPFEVNHVEKELSELSAMLIRLNDDVRVVMEATGIYYLPVLNYLQKKGLFVAVANPFEMKEYRCQGLRRVKTDKQDSVTISNYGIDHWYRLKNYKADAGIYEDLKLLGRQYRHYMRMRVESVLELTHLLDYTMTGIKGLLKGWNETNGKDKLGEFAEEYWHYDNITQQTQEQFMESHLTWAKKKGYHQNQDKAAKIYALAKESIPTIPSSTPSTKMLVQEAVRVLREVDNTLMTILTQMQGLAKTLPEYPVVRAIGGVGNMLAPKLIAEIGDVRSFHNGKALIAHAGIDAPPINQVSLQEHRGRSPSVDQPA

SEQ ID NO: 426301 - protein, 284 aa, unidentified
MFYAALDVSLRSVAICIIDQEGKVRFERSVPLDVPDLVRCLREFGEPIHQVGLEVGTLTQHLGLKEAGFDVVCMEARQVNAALSAMRNKTDKHDARGIAQILRSGWYSRVHVKSVESHYLRALLSSSKVMQRKCIDLENEIRGLFKVFGVKLPMHLSRGSFDAAVRDTIESDLALCNALLSMLQAGQMLLETFLELDRRVRRAARGDAICMRFMSIPGVGEITAPSFKAAVDDPTRFKSSRTVGAHFGLTLRRFQSGEKDNQGRISHAGDADVGRHFMPPQMRC

SEQ ID NO: 426302 - protein, 356 aa, unidentified
MSTITIGVDLAKVLFSACEVDGIGRVLRRQDMHREPFGLWLAQLPVGTVVAMEACSGAHHWARRCLECGLQPRIIAVQFVTPFRKSSRSKNDRNDAEAIATAARQGNMRFVPVKDVDQQVRLSWHRVREGYKAESLAIGNRIRGLLAEFGVIVAQSDLALRRLLGDLDAQIGLPAEFKELLRDLADHWSQLRPHLDACDARIEAHARQDERCVRLRAIVGIGPITADAAVATVGNACEFKHGRQMAAWLGLVPTQHSSGGHARLGEISCRGDAYLRTLLIQGARSSLQRAKAVATEKATPEQLWIRTLDGRMPFGKVIVAIANKHARQIWAMLAHDVNYDPHACLQYPMHRHTHAA

SEQ ID NO: 426303 - protein, 422 aa, unidentified
MKKRVYRAETIKQVKFEKLAALVAEQRIVFGVDVAKVDFFGVFMDEEREVLKTIKWKHPIEASDLLMLLKRLPASKLEVAMEPSGTYGDTLRHLLEESGFSVSLVSPKRSKDACEVYDGVPSSHDAKSAAIIAKLHWDKASKPWPKRTDEERCLAAKIDMMVVHDEQYGRNLNRLEAKLARYWPELPTIFKLDSATLLRTIQEYGGPHAVAKQADGALLKMKKIGGSSLSMEKCRQAVDSSKNTIGVPMLDAECVSLKELATEILRNREAAHKVKSETEHAVSNSPKMAPMSKLVGRVTAAVLFVELGDPSNYHCAAAYQKAAGLNLKERSSGKHQGRLKITKRGSGVVRRYLFLAALRLTQRCGICRAWYHKKIVRDGGKHKMIAATGLTRKLITALWHVGQGAEFDPTKLFDVSRLNLEQ

SEQ ID NO: 426304 - protein, 418 aa, unidentified
MKLFVGLDVSSEKLDVCFLSDDDQLTILLEDSLGNDIEGASQIKQKILAFQKVYSFSQIVIGMESTSMYSFHPATFFNEDRELQRINTVVTIENPFRIKQFSRIFDEDKTDKNDAMRIADFLRIQRYTTSPIKEEKYMALQRLTRTRYQLIGQLVETKQHFLENLTYKCNALTRELKNSDTNSSVFGATLLALMTEDYGLDELAHMPLTDFISLLQEKGNGRFKNPEGLAKTIQRAITMSYRLGEVAQESINIILSVLAREIRALEASIKDLDKAIEQLVIVLPEYQCLTSIPGVGKVYAAGLLAEIGQIQRFEDQIKLAKYAGLSWKIKQSGNYQSENTPLTKQGNRYLRYYLVEAANSVRRYLPEYQAFYQKKYKETPKHQHKRAIVLTARKFVRLVDTLLRNHQLYTPPRSVIEK

SEQ ID NO: 426305 - protein, 356 aa, unidentified
MAGVLKKSARADPAVQTNANSNQSTPSQSRMNSTCSSLAILGLDVAKASVQAELQSASGSKVRFAFANNPTGFKKLARVLEQHPPAMLHAGLEATGPYSQALARWLHEQGYRVSLLNPRRVKDYARSAGLRNKTDALDARVIADFVRAHRERLPGWRPAVAEVQQLQELVRRRHQIEVILLAEKNCLEATPDTVRCSIERLISMLRAEKASLERALAQQIDSHAQLARNHQLLRTIKGIGPLSATVLLAEMAGPDQVQRARQAAARAGLSPRREQSGTSVRRNKGIGKEGSRYLRKALYMPALVAIKHNAPLRHFARKLQAAGKPKMAIVCAVMRKLIHISFGVLKHQQPFNPSLA

SEQ ID NO: 426306 - protein, 269 aa, unidentified
MEQGKGRFVGIDLAKKSMEVCILGEGKAAARSSYKTDAVGRTRLGKILTSDDIVAVEACALAFVVARQLRREVGCTVLVLNPGKLAMIWQSTRKTDKEDARKLASLVQRYPEEELPVVAVPDEREEAMRSTVSMKHYLVRLRTSLLNRLHTLYVQAGMTFVKKSELDSGAARERMAGRLDGFLARFAAVIGRELDATEEEIASLEKELREMVAQHELAPYVMSVPGVGPGVAAAFLAYVGDGSRFSSPAQVANYIGLVPRLDCSGETNR

SEQ ID NO: 426307 - protein, 317 aa, unidentified
MHSEPVFVGIDVSKDQLDIAIRPGKDRFRESNNDSGIQALIAHLLSLKPQLILLEATGGYEILAAASLRQAGLPAHIINPRQVRDFARSSGKLAKTDTIDAAVLAHFAEALKPALRPWPDEQQQELAALMSRRRQLVEMLVMEKNRLSMTFSPRVRRSLQTNLQSLKEQLQELEQDLDDFIRQSPIWLEKDQLLQSVPGIGPLTSQSLLAWVPELGTLSRKKIAALVGLAPFNRDSGQMRGKRTIWGGRARVRPPLYMATMAACRVNPVIRAFYLRLLAAGKSKKLALTACMRKLLTILNAILKQHQPWCPHAPVNP

SEQ ID NO: 426308 - protein, 342 aa, unidentified
MWIIGCDYHPRFQQIAFVNTEGGECGHRRLQHVAEAEQFYRALQGQTVRVGMEAGGHARWFERLLAEVGHELWIGDPRKIRAAETRKQKTDARDAAHLLELLRNGQFETKMRIWVPTAEARDVRQLVLHRHRLVGMRTRVKNQLRAVALNEGMGPKPGLWSQKGQAQFRALPLPVWSERRRADNLELLAELVRRTEPLDQAVLAEAERRPEAVRLMTHPGIGPITALTFVLTIGDPLRFASRRKLTSYLGVIPAEDSSGGRQRLGHISKQGNVLLRSLLVEAAHSAAQREPELGRCYRRLAMRKNPAIAAVAVARKLAVRLWWMWKRGLNYQQFRASGSHAG

SEQ ID NO: 426309 - protein, 345 aa, unidentified
MKKGITIGMDLGDKKHQVCILDKTGKIIAEEEVAGTRAAVTKFFKRYRGAVVAMETGTHSRWVSQIAEAEGLEVLVGNARKLRMIWQSRQKSDTRDAVMLARIARMDPKLLYPIRHRGEQVQMDLEIIRARDLLVGERAKMVNHVRSVVKSMGERLAASSTASFGSKAKIPEALNEALKPMLEMIRELTKKIRAYDLMIKEAATEKYPETERLRQVGGVGPLTALAYVLTLEEPERFTKSRMVGSYLGLVPRLDQSGQTDKQLRITKHGDGYLRRLLVGSAHYVLGPFGPDCDLRAFGLKLMQRGGKNAKKRAVVAVARKLAVLLHALWRNGQQYEPKRKQPLAA

SEQ ID NO: 426310 - protein, 345 aa, unidentified
MPIVGGLDIHRKQITFDYLDTETGQVRRGQICPADREHLRAWLARFAGRDDVAFAVEGCTGWRYVAEELAAAGVTAHLAEPADTAFARGRKRHAKTDKTDCRHLRLLLAEGRLPQCWIPPGRILECRALLELYHDLRAEHTAWVQRIHAVLFHQGAPALGEGTLRTGQGLAALRDVLAAHLSPAGQLQVATALAVLEALEARLHAVRHQLLAEARHLAGAKVLAARLYGVGPFAALAMTCWLGGAGRFSSSRQAVRFAGLDVTVWSSDRKGPPGRLSRQGPPVLRWAVYEAGKTHARASAPDHAYYAQVKDRCNGKRAALSEARKILRQACHILAELGDDAFAAA

SEQ ID NO: 426311 - protein, 482 aa, unidentified
MAKRKLSTFERLQPGRLNRQQRRELGQRIAATDPGLDVVHPDAAGIDIGNASHFVAIPPDRDPVPIREFGAWTAALQEMARWLTGHGIRTVALQATGVYWIAVQDVLEQAGLEVYLVNARGTKNLPGRKSDVQECEWLRKLHTYGLLRNSFRPPEAIRAVRTIWRQRDRWVAEAGRAVQHMQKALTTMNVQLANAISDLSGVTGQAILRAIVAGTRDPWALAKLRDPRIAASEEEIAHSLQGTWREDVLFALRQALEAYDFYQQQLAACDRELAKYTAAVPSRERPAPPELPEGASPVPSAKPARRAKSRRKDQPGFDLAGELHRTMGVDLTRIDGIDVLTAQVLFSEIGPDFSAFPDENHFASWLTLAPQRDISGGKVLRHVPAAGRNRVANALRMAAQSLCRSDSYLGARYRRLRARLDGPVAVKAMARYLACLVYRLVTKGRAYVDRGAAHYERKRQERERFALERRASHLGLKLVPAT

SEQ ID NO: 426312 - protein, 407 aa, unidentified
MKKKNIIEFEQVVERGCGMDVHKDLIVATIQGKGIKMQTKSFNAFTSSLIKLKEWLLKNGITHVAMESTGIYWKPVFNILGDDFTILLVNARHVKNVPGHKTDKKDSRWLSKLLLSGLLKSSFIPERPIRELRDLTRYKTKLTNQVSSEKNRFMKILEDANIKLSSVLKDVFGATGTKIINHILGHESYRPEELLQYVHGKVKSSREDIKEALTGYITPHHRFMLKTILGNIARIESTIAEVDTQIGSCIVPYKAQRELLESIPGVGKDGATCIIAEVGVDMGQFPDQNHLASWAGVCPGSNETAGKNKSGRITYGNKYLRSILVECGWAASRTKNTYLSAKYKSLVGRRGKKKTIIALAHKILIATYFILKDKIEFKELGPDHLSNFKKDRLIAYYRQQLERLMVA

SEQ ID NO: 426313 - protein, 445 aa, unidentified
MAMRKRDDEVVFPNAAGIDVGASSHWAAVPRHLAEQAGCEPVREFGAMTDDLNALADWLLACGIDTVALESTGVYWIPVYEVLEQRGLKVWLVDARQLKYVPGRKSDVQDCQWLQKLMSLGLLRAAWRPGGEVCVVRAVARQREVLLTEQASWVQRMQKALVQMNIQLTEVLSDVMGQTGQAIIRAIVAGERDPKILARHRHSRIKASAEEIIKALTGNWREEHLFVLGQALAMYDDIGRHLVECEAKLRELLAERSERRVDLGKAPKAGAKARMEFDVRQALANWAGVDLTRINGLGVTVVMKLLSEIGPDLGRFANVKHFCSWLGLCPGTKISGGKVLSSGTKRSANRARQALKMAAMSLSHSDSALGAFYRRLCARMDKPRANTATAHKLARMVYFMLTRGEAFVDQGQQRYEEQQHQRSVASLRRRAAALGFQIHPVEVAA

SEQ ID NO: 426314 - protein, 347 aa, unidentified
MLNDTAIAVDVAKNVFQVGVSERPGRLRQTLRLQRPQFLLFLATQPACTVVMEACGSAQFWAGRIERLGHRVVLLPAHLVRPYVRGNKTDRTDVKGILEAYRNEDIRPVPIKTPGHQALVALHRLRSAWVADRTARLNTLRGLLRELGIFIPVGSRKVIPEVWAQLEDADSAVPDSVRPLLAEACEEVREMEHRIGLVERQLEALAEQTPVVTRLRTIPGVGLLTATALFGLVVDIHRFPSARHLASYLGLTPRERSSGNTRRLGAISKRGDVYLRTLLVHGARSVLARARQKTDASHLDRLRDWAARIEKSRGHNKAAVALANKMARMVWAVWRNDVDYKPEAVAA

SEQ ID NO: 426315 - protein, 342 aa, unidentified
MSEKRYIGVDLHRKVFTCCIRLENGRQFLSEWRLEQLPQFVKKLRATDEVAVEVTSNTRLFYEAVAPHVARVVVVDPHQFRVISQSVKKTDPNDARNLALYLAKGLLPEVRMKEKQQAQVASLTQTRDRLVKLRTALKNKVNNLLSARGIALEKEELSGEKGLTRVLAMKVEELTRFELQVLVEQIRSLNHSIAELEKVIDRQGKKLKGHGNLTSIKGIGSLGASILLSVIGDIRDFSDEGRLASYFGIVPRVHNSNETEHSGHITKRGSKLGRTALVQCALIAKRYSPYLANYYERIRSRRGTGRAIIALARKLLGIIYRTLKNNWVFEDFPNFVLREATA

SEQ ID NO: 426316 - protein, 345 aa, unidentified
MTESKIVAFDLAKRIVQACVIDGTGAVIAEERMGPERVLSFTARHPHATVALEACGGAHHWGRALERQGHRVLLLPPQRVKSYGDPACKDDRRDARAIAEAASRSYLRPVPVKSEEQQALQSLDRVAALLARQRTQTVNALHGHLSEFGITLPKGPHLLKRRFTELEASPRWRELPEELRAAMGELFAVFLALEDRLSVLKARLAKGAKQSKLGRLLLEIPGIGPITAVSLEAAIGDDPGRFASGRQFAAWLGLTPRVSASGERRQLARITKRGSARLRSLLVVCAQAMLRQYRQGRHGDPLACWARHLLARKRWNVAVVALANKLARIVWKVASSGAAYQARTA

SEQ ID NO: 426317 - protein, 322 aa, unidentified
MTKYKEIFGVDISKDVFDVHGNISGHNQYKNDASGFKKFLKELPSDCLVAMEATGYYHYRLAQFLFKHGVEVSVINPLSIKRFIQMKLAKVKTDKSDSKAICDYALLNEVPIYNALTDVQSECLQLFRLMDTYLKHRTATKNKIHGEEVLGIPSKSVYRSLKRNKKHLDKEIKGIDQQLLSLVKEDQQQQLSLLKSIPGIGPKTALFLIVITDGFSKFENASQLCSYAGITPTIRESGSSVRGRSRISKVGNRKLRNLLFLCSFNACKHNKACRAIYERIVNKGKSKKLALIAVTNKLLKQCFAIAKSGRPYDETYVSVLPR

SEQ ID NO: 426318 - protein, 369 aa, unidentified
MKKVTYVGLDVHKDTISVAVAQDGRGGEIRFFGTIAHTADSVLRLTKQLAAAGNTPSFCYEAGPCGYGLHRLLTKLSFECAVVAPAMIPRKAGDRVKTDRRDAEMLARLWRAGELTPIWTPDEEQEAMRDLIRTRKQAMDAVKVAKQQLLSFLLRHGLRYENGSYWTKRHRRWLAELRRFRFSYQQLAFEELKRAVDQAETRVATLDLAINEAVQDWRFSSVVDALRALRGVNTIIAATVVAEIGDITRFENPRQLMAWLGLVPSEHSSGSTTRRGRLTKTGNALARTMLVEAGWSYRHPPKEGQQFLKRSAELPQEIKDIGWKAQTRLCKRFRHLSNTGKPQPRVLAAIARELAGFIWDIARKTPLPA

SEQ ID NO: 426319 - protein, 329 aa, unidentified
MDYFAGLDVSVKETSVCIVDDTGKIVREARVASEPEALLQVLTNTNYRFKRVGLEAGPLSQWLFTALAEAGLPVICVETRHMRAVLKAQINKTDRNDARGVAQMMRVGLYRPVHVKTLRSQKLRMLLTHRKLLQSKAIAIENDLRATLRNFGLKVGIVGTVKFEARIKELVENLPDVAVLVEPLLVVRRVLREQVGMLHRRLLAIVRDDDVCRRLMTVPGVGPVVALTYRATVDVPARFRNSKAVGAVFGLTPSRYQSGESDRIGRISRCGDEMTRMMLYEAAQSMLVRSAKWSWLKAWAMKIARHRGMNKAIVALEQIQVDFTRSLHA

SEQ ID NO: 426320 - protein, 420 aa, unidentified
MRAVALDVHRDFCEVAIVDQGRLRSAGRIKTRPDELELFAQSLDPRDRVALEVTGNAWAIAAILEPHVARVIVVSPTDTGIRQARAKTDRLDARALAKLLWAGELDGVWTPDERIRAMRRRLSRRTQLVRARSRTKNEIHAVLMRGLKDRPPASDLFGVKGRRWLAAQQLALCERETVDSALRQVDFLDAEIAAVEQLIAAEALSWPEVKRLMTVPGVNVIVAATFMAAVGDIRRFADRRKLTAYLGLDPKVRQSGAAPATHGHISKQGSASARHALVEACWSTVRQPGPIAAFYARIKAKRGHSIAIVAAARKLACLFWCLLTRGEDYAFAQPSLTKKKMRRLELTAGAERWKGGRDVWSTNKAMRQAERELALQAQRAYERTVKDWQHRGASATPGRASNGSSKEQVARQTSRPKSAL

SEQ ID NO: 426321 - protein, 419 aa, unidentified
MSFKIIKNNCCGLDVHKTWIFACIGITDSNNRTQYKQARFSSFTKGLNELCDWLAKYNCKDVCMESTGKYWIPVFNILEQHNLWVTLSHPKYTKPMKGNKTDRKDAKWICDLYMCGMVKPSFIPSADIRELRDLVRYRYKLTCMITGEKNRAQNCLTVSNLKLDEVFSDVFGKSSRSITEQILQHPGEAFDVAHFVHGRCKTPIKEIQAAVDGAISKEQAVKLRQCLDHIDELNKHISEIEQEILRLSDKYEVALNLIRTVPGFDKNPLTAVQVLSEIGGDMSVFPTAKHLVSWAGCCPRNDQSNQKIKSTRISRAGSYFKPILVQVANALIKSKKHPEFTTRYKRIKARRGHKKAIIAICRMILTAIWHILSDLEPYTPEGFLESRPVKEEKVLSTSQALNLLRQRGYLIKDEPSPVS

SEQ ID NO: 426322 - protein, 375 aa, unidentified
MSKIRFIGLDVHADTIAAAVAEPNGDIRPLGVIPNRLESLRKLVNKLGPVNQVKACYEAGPTGYVLYWQLSSLGVACEVVAPSLVPVKAGDRVKTDRRDAAKLARSYRAGDLTAVWVPDAAHEAVRDLVRAREDARQDQARARQRLGKFLLRHGWRPPEDVKKNWTQKHMDWIKRQVRFEQAASQAAFLDYVHEVEHAADRLERIEKAIDDAIVAAPPEVQQVVQAIQALRGVGKIVAVSVVAEVGSLSRFTNPRQLMAYAGMVSSEYSSGNHIQRGGITKTGNSHLRRVLVEAAWAYQHKPWIGGWLAKRQQGLDEETKAMAWKAQWRLCTRYKKLSARGKNKPQIVTAIGRELLGFIWAIAVRTEARAGFAAA

SEQ ID NO: 426323 - protein, 464 aa, unidentified
MRTLSVINPKAAGIDVGSEKLFVSIAGDEPVVFGTVTEEVYRLRDFLKQEGVTTVAMEATGVYWLYAYAVLEAAGLEVIVVNGRYVRNLPGRKTDMSDCQWLATLHAHGLLRGGFVPPAEIRRLQDYQRLRADHISEAASQVQKMQQALERMNIKFHDVISDLTGVSGMKVIKAILAGERQPERLLELCDKQIQKNKSERVLKSLYGVWAPEHLFALGQALSVWEFYQKLLAQCDRQIEAVLKDLAGPPPASAPSSPESGETKAKGPKPPGKNAPQIDDLHALLVQICGGRDATSLPGVADYLWLQLVAETGTDLSAWATEKHFVAWCGLAPGTKQSGKRKGSVRRQCNRAGRLFSAGARSLVQSVDKGLGGFVRRISRRKGGLVAIKALARKLAGLYYRVLRYGLEYAERGLREYEQKYEESQRRLLAKLAAKHGFQLVSQQALALKAAISQAASPNPSQSHA

SEQ ID NO: 426324 - protein, 353 aa, unidentified
MKSDKYIGMDVHQETTVVAVVDCDGKVILETIVATEASAIVRLLNGLSGPLHVTLEETTQAGWLYEVVRACAGDVIVCDPRRNGLLTEGSKGDKPDARKLAELRRAGLVRAVYHGHDGTRKLKELVRGYETLSIDTERTMVRIKAVFRGRGIRTPGTAVYQAKQREQWLGLLNEEGVRQRTTWLYAQLDHLRALRKEAKRTMLAESQQHRATALLKTIPQLGPIRSALIVATVDTPHRFRTKRQLWSYSGLGIVTHTSAEYEIQAERVVRRRKAVSTRGLNRNFNRRLKNVFVAAAIGGSHCEPYRKYLEGLTQKGMRAEMARLTLARKIAAVALSIWKKGETFDPKKLNWTT

SEQ ID NO: 426325 - protein, 342 aa, unidentified
MYYAGLDVASSGSYVYVVDRRGRKVEGREIPTNRKVYARYFRQWKEKLITVAVEAGGHTRWIFDTLKGMGIEVYVVNPNKVKLIAETKRKTDKVDAKVLAELLRIDGLPERIHMVEGQSRELRDLLRARQQLVKSATSLMNHLRGLLRQEGIRLEAEVFRDEKVFEQLKKNKDVPQHLKPVIESYRRSISELLKERVEMDKEIGKHQNKDIDLLKSVPGIGEVASKTIYAAIDTIRRFGSAKKLTSYCGLVPSVRSSGERTEYGHITREGRSEVRRVAIQGAHAILRSKNSESKPLRQWHERVAKRRGKKTALVGLARRMLQLVFYILRDKREYDHRLLQAR

SEQ ID NO: 426326 - protein, 459 aa, unidentified
MKSTLVLGLDVSKGYGDFVLLDTCKKVVEESFRLDDNKQGHDILKRQLLHWKKEHSVARLLLVTESTGGYEDNWLRVSKDKALCSFVESYRINAKIIFHEYEAQRRNSIDDGISALTIAEHVVKNLENFSVTKSFHETAYTPARSLVRHYASLQQERSSHKNGLLKLIYQYLPSLEAIKPSEWPSYWLEIFVRYGSRKSIQIAASKGFKQLKRVPKGKAKEIAEALANGIDVRHTPQMVVFAIRSKARQIKRINEELQEIKKMIIDQAPVDADQVDLLKSIKGMGDITPVILLSFIEEVSRFKDAKHMASFFGVQPRVKRSGDGSYKTKMSKQGAGLVRRELYLLAFRTLSQEPYLRAIYAKARAKGMVHDAALGVLMHKILRIIYGMLVSNTRFNAGIDQLNQHQTGAESKLQKQKKNAARRFQPASTVAPVSFRQRKKRKRDHELQADGISESTESS

SEQ ID NO: 426327 - protein, 345 aa, unidentified
MTMLADQIEFVVGVDTHKHTHTAAIVDRLGGVSETLEFPADPSGYRGVLARMGACGGSRVWGVEGTGSYGAGLTGFLQEAGEHVVEVERPGRPLRRNGAKSDAIDAIRAARQVLASEHQIEPRQRGEREAVRVLLATRNGAVVARTKALNHLQALVVTAPPRIRTRLDGLSTTELARRASRLRLSADRPIEDQATIRAMRACARRAIACESEANELETELKRILTDQVPHLLAEPGVGPISAAAIYLAWSHPGRIRNDAAFAALAGVAPIPASSGQTTRHRLNRGGDRQLNRALHTITLSRLACHPETKAYATRRLTEGKTSREIRRCLKRHLARRIYKLLENTP

SEQ ID NO: 426328 - protein, 423 aa, unidentified
MDVVFARCAGIDVHKKTVVVCRLMVGADGQRHGETQTFGTTTDELLRLSDWLAAGGCTHVGVESTGEYWKPVHNILEGSFEVWLLNAQHIKAVPGRKTDVKDAQWIAELLSHGLVRPSFIPPRPQRDLRDLTRHRTKFVRERASLVNRLQKVLESANIKLAGVASDIMGLSARKMLAALVEGEEDVVRLAELAHGKLREKRAQLEQALSGCVRPHHRFLLSELLAQIDGIEDTIRHFDAQIHQARAADAEVAALLDTIPGIGSGTAEVLLAEIGTDMRRFPSAASLAAWAGLAPGNNESAGHQRNGRARKGNVWLRTALVQAAQAAAHTKGTALSAQYHRIAARRGAKKAVIAVAHTLLVIAYYVILRHEPYHELGPDYADRQRPAATATRLVRRLQQLGFQVALSPLEPSRSSPVASAAMTP

SEQ ID NO: 426329 - protein, 347 aa, unidentified
MNTVMAGIDLHSNNAMVGLLDGEGRRLAHQKLPCDLKKIAAFLEPYKEGLQSVAVESTYNWYWLVDGLKAQGYPVVLANPAKIDQYSGIKHADDKNDAFFLAELSRLKILPTGYVYDPILRPVRDLLRRRMSLVHQRTALMLSFKSLFTRTTGQPMTLGRLKTTTVAEAKTLYEHPANQLIAQVQKQHIEGLTESIQKIEKVVLNAVSALPYYPKLKTLPGVGIILGLTITMEVGDIGRFADAGQFASYCRTVDSKRLSNNKKKGQNNQKCGNKYLAWAFVEAANFARRTDEKCRRWYERKAAKTSNVIATKALACKLAKAAWHLMAQGSEYDARRVFPELAVQAEN

SEQ ID NO: 426330 - protein, 343 aa, unidentified
MECYVGLDVSLKQTSICVVSGTGSVVREGVVDSAPDAIAAFVRSKAPGAIRVGLETGPTSTWLWTELRRLGLPVICIDARHAKAVLKMQINKSDRNDAAGIARIMQTGWFKEVRVKDLDNHAVKALLASRALLVKIKRDLENQVRGLLKNVGLVIGRAKFNVFAMRAEELIEDRPELIAVVGPLLKARKAIEQQTDDLDRKVLKLARNDAQVRTFMTVPGIGPITALCFKATIDDPTRFKRSRSVGAYVGLTTRRHASGEIDWTGRISKCGDAMLCSYLFEAAGVLLTRVPKWSALKAWGMRLAKRNGLRKATVAVARKLAVILHRRWMDRTEFNWSKKEVAA

SEQ ID NO: 426331 - protein, 346 aa, unidentified
MHYIGMDCHITTLDFAVVNEAGRLVKAHRVATSVNGFMGFVKTVPRPRTIYIEEGTLAAWALETCVRYGEKLVITDAKKNYWIGSSGQKDDSIDALKLAQLARGGYIKEIHHPVGQRRRFRELMIAYHDAVRSTTRIKNKIKARFRQNGIQCTGTAVYSETYREEWKGKLPQEMTLLLILDNLWRQLEQSERTEKELLAAARAQAKHYPEIKLFQAIPGVGFIHAATISAILETPYRFADKRKVWMYAGLGIMTRSSGGKTYSEKLSADYNRLLKCSIKQAAESAIRAEDNSFRRKYLDMTLLHGIAPHRAKLTIARDMLATMWAMWRKGEKYNPEIRGKAACKQG

SEQ ID NO: 426332 - protein, 346 aa, unidentified
MGKSIINLSSVTTVGLDLAKHVFQVHGVDALGCVVVAKPIRRNKLLEFFASLPRCLVGLEASGSAHHWARELIKLGHEARMMPPAYVKPYIRRQKNDASDASAICEAVTRPSMRFVAVRSLENQAALMRHKAREMLVSQRTQLLNGLRGHLTEIGVIAAQGPRHARELAELIEACDETIPFVVCEALAPLVVQLRNLDEAIARLDRTIAKLAQKDETARRLMSIPGFGPITASAMAATIQDTSSFAGPREFAAFLGLTPKQNSSGGKPKLGRISKMGNRNLRKLLVVGAHAVLFHRKPHTDPLRMWAKKLIEKKPFKLVAVALANKMARIAFAILRGKTVYREIPA

SEQ ID NO: 426333 - protein, 342 aa, unidentified
MEQIATIGLDIAKSVFQVHGIGKNGSVVVQRRLRRSQVLGFFSKLLPCVVGIEACASSHFWAREIGALGHDVRLMPAAYVKPYVKRQKNDAADAEAICEAVTRPTMRFVPVKSPEQQSIMVLHKTRQMVMRQRTKLANTIRAHMAEIGIVAPIGRKGLELLLEIIGQDEDGRLPEVSRSCLRMLADQFSMVKAHILELDRAIVADVRRSESAKRLMAIPGVGPLLASAMVAAVPDPAMFRSGRNLAAWIGLVPRQNSSGGKERLGGITKQGNRYLRQLLFVGAMAVIRYAERHGTRRPWLVRLMARRQTKVAAAALANKTARMIWAIMTTGERYREPLLQTA

SEQ ID NO: 426334 - protein, 286 aa, unidentified
MECYVGLDVSLKQTSICVVDRTGSVVREGVVDSNPEAISAFVRSKAPNTVRIGLETGPTSTWLWTELKRLGLPVICIDARHAKAVLKMQINKSDRNDAIGIARIMQTGWFKEVHVKDIDSHSVRALLASRALLVKIKRDLENHVRGLLKNLGLVIGRAKFNVFAMRAEELIEGRPELIAAIRPLLEARNAVEQQVSELDRKVMKLARHDAQVRRFMTAPGVGPITALAFKATIDDPARFARSRSVGAYVGLTSRRHASGEVDWTGRISKCGDAMLRSYLFEAARFC

SEQ ID NO: 426335 - protein, 412 aa, unidentified
MQMASSGLTCGIDWAEAHHDVALVDDNGTVVAKKRVSADLSGFTELLELIAEHGGDPSGTPVAIETDKNLFVVGLAAAGFTVFPINPKALARYRERHSQSGAKSDPADAATLANVVRTDRHVHRPLPAITEQGLAVKALARQHQEAIWALHQTISRLRSVLVEFYPQAVKAFPKLQQHAATEILAAAPTPAAGQRLTRRRIESLLRRCGRRNDPSLVEQLLTDLRAPALRQPEPVEHALGITVEGLVRIVVAMRDVVDRLEAELAVAFDQHELAPILRSAPGLGPVLAARVLAEIGDDQARFATAAALRSFAGTAPVTRASGRSRYVKARKIRNKRLADACHWWAFATLTRSPGARAHYDRRRAAGDHHNAALRNLANKLLGRLWWCLHHNEPWDETAAWLLPEPDLAAAAA

SEQ ID NO: 426336 - protein, 389 aa, unidentified
MEARTVNNLPPATPHDDAVRRLLAIELSKKSWIVAVNTPLSDKISRLTLKPCDGKELLDLCERIRTRVARETKQRVEIVSCYEAGYDGFWLHRLLEAHGIRNYVIDPASLQVDRRARRAKTDRVDVERLLRSLMAYLRSEPKVWSVVRVPSVAEEDDRRLHRERGRLINERIQHVNRIKGLLAIHGIYDYQPLRRDRMQQLDRLRTAESRTVPPRLKAEILRELQRLELVIGMIKTIEAERDAIASAKIETVHASAKKIQDLAKIKCIGPEFANTLVGEVFYRSFDNRKQLASYVGLTPAHFQSGSMCRDQGITKAGNAKARTVMIELAWLWLRHQPDSPLSVWFRERVGKFKGRIRRIMIVAVARKLLIGLWRYLETGLVPESAALKV

SEQ ID NO: 426337 - protein, 356 aa, unidentified
MNDAKYIGLDVHQATISVAGLDSAGKFVMEAILETKAETILQFMRGLRGSLHVTFEEGTWAAWLHDLLKPHITRVLVSDPRKNDLGKNGNRNDRNDSRELAALLYRNQVKPVYHGEHGLRTLKELARSYLTLTRDLTRVMTRIKAIYRSWAIPCAGQQVYGASHRAGWLAKLSEAGVYRRAEFYYQQFDALAPLRQAARRELLAESRKHSAVELLRQIPSIGPIRAALLVALMQTPYRFRTKRQLWAYIGLALKTHTSGEYRFERGQLKRFKKTPAIRGLNRNHKNHDLKNIFKGAATWAASNCGPFQNFYQACLARGMKPHMARLTLARKIAAITLLVWKKGVDFDAEHLKQQAA

SEQ ID NO: 426338 - protein, 325 aa, unidentified
MENFNYVGIDISKLTFDVAIESNGKYVHHKFKNNAEGFAKLFSKLSPDLHCCVMEASGPYYLKLAFYLAEHGIAVSVVNPLVIRRFSQMRLLRSKTDKKDALTIANYGKTERPELWEKTAAYILELKQMQAHSQMLNKNRSALVRQIEAFSANPVQSAMVMQSCNDQVRSIDQQLKLIEKGMRQIIEKEHKEQYKQLKSIPGIGLKTAMELIVLSGGFTKFTSAKQLCSYIGLSPRIFESGTSVKGKARICKMGMSRVRAILYVCTWSAKKSNKACRELFDRLVEKGKPKKVALIAVANKLLKQAFAIATGNQYYDENKLNFSCI

SEQ ID NO: 426339 - protein, 348 aa, unidentified
MTIVEDARAITGGVDTHADVHVAAALDPIGGLLGVREFPATAAGYARLLGWLGEFGTVCLVGIEGTGSYGAGLARHITAAGVRIVEVDRSDRQDRRRQGKSDPLDAVSAARAAQSGRARGASKGRDGSVEAIRTLMVAKRSAAGERTRTINQARALVLTGPDDLRARFAAHTPAALVAGLASLRPRPGGDVAGHATRVALRELGRRAQFLDSQLDRLDELIVPLVTAHAPGLLALYGVGPNTAALLLIAAGDHPGRLRSEAAWAHLCGAAPIPASSGKVARHRLNPGGDRQAGHALWRIVFTRLGSDPATRAYAERRTAEGKSKAEIIRCLKRYVAREVYRYLRPAAR

SEQ ID NO: 426340 - protein, 342 aa, unidentified
MDEYDGRQFVGIDLHRQRSVIVRQSESGEQLSAVRIVNDPVALQLQLEEAGADPEVVLEATYGWYWAVDVLQAGGARVHLAHPLGVKGFRYRRVKNDVRDAADLADLLRMGRLPEAWIAPPETRELRELVRYRAKLVAIRSGLKAQIHAVLAKAGVLIAVSDLFGVTGRQRLAKVPLGPAYAQRIRSLLELIDILDSHEARFAAMIAERLDTHRGYQAIQQVPGIGPTLAAVFVAEIGDVHRFTDSAHLCSWAGLTPRHRESDTVVHRGHITKQGSKAVRWAAIEAVQRHPTTAKIAADKQRIEARRGKNIAKVAAARKLLTLVYYGLRDGQIRALDRARAA

SEQ ID NO: 426341 - protein, 309 aa, unidentified
MKEELVYLGVDIAKSYLDAAIGNEKHRFTNDVVGHRQLIKWVKQTKAAVQVICESSGGYERKLVQALARGQVKVSLVQANRVRQFARAAGILAKTDRIDAEVLCEFGKVMQPQTVTAATLEQEHLRELESQRRHLTHLLVMEQNRGARLSDASVVRLNRSLINQIKKQIEKLDLLIKEHIEQSPRLSAKAEKLTSIKGVGLRTAALLLAQMPELGQLNRREVAALVGVAPFNRDSGKMRGKRAIYGGRRFVRHGLYMAALVAARHNPILRQFYLRLRAAGKPAKLALTATMRKLLIVLNSALKRDLRYA

SEQ ID NO: 426342 - protein, 396 aa, unidentified
MYSLFIGIDVSKDSFSASGLDEGGNKLFSLVVNMDRAGFSEFMKAISSHSKDLSDVVVAMESTGSYHMNLFSFLTSQGIRTIVVNPLLIKNFSKLSLRKTKTDKKDAHTIARFLFAQRDSLDQFSAHHHKDLKDIARERESILKLIGSTKNDIKRMLKSTFPELERICDVFGDVMLLFLQKYPSARLVRETNPESIIQAFQHRDKRFKVSTPKEEIIKAAQNSIASDHPALEQILPAKIQTLLFLNDRLDEVTKMLIQWCESTMKEDLKIITSIHGINTKTAAPFLAEMGDHRNYKTYKNFIAFSGLDPSVNESGTFIGMSKLSKRGNRHLRRIIYLMTFCAIRIKGPFKSYFLKRRNEGLPFKKALFATAHKLIRTIFAMLTKRTYYVSGEMITG

SEQ ID NO: 426343 - protein, 322 aa, unidentified
MSLLGPLCVGIDVSKATLDIAASSAIAQFSVANDADGFDSIIAELRKHSVSLVLMEATGGLEAAVACALQAEGFELAVVNPRQARDFARAMGYLAKTDHIDERALAQMAEVINRHPERGRFIRALPDAERQVLNAIVVRRRQLIAMLVAERNRLYLAHPQSRKSMNIIIKALKDELARIDDDMNNHIRSHFKVLSEQLSGIKGVGTMTVAALLAEVPELGHLSRREISALVGVAPVNRDSGTMRGRRTIFGGRAGVRTALYMAALVATRFNPVIKAFYTRLVAAGKPKKVALVACMRKLLTILNAMFRKNEEWNESYHRVAP

SEQ ID NO: 426344 - protein, 397 aa, unidentified
MYIVGIDIAKRKHEAAVIDGEGAVIIKPFSFTNNCSGYNRLLAMLAKAKLPLDEVSFAMEATGHYWLALFTRLQKEGFRVQAINPVQTNSIRSFYIRQAKTDPRDALLIAEVIRFGHFSESTLHPENIYELRELCRGRHAIVSMQADVKRKVIALLDQVFPEYETAFTNMFSDTSMAILQTCPTPKELSEMPLEELCHLIEVSSHKRFRMAKARELQELARNSFGFAMAGDVFSTMIRLYAKHLDFLKQQVREMDRKIAEIMETLDTPITTITGIGPTLGAYILSEIGDISRFSSAAKLAAYAGIDPTMRQSGEYNGVRNRMSKRGSPYLRHAIWLAASSAVLHDPALKLYFQKKRDEGKPYMASVGHACRKMVSIIYAVMRDNKAYTPCIPNEISA

SEQ ID NO: 426345 - protein, 478 aa, unidentified
MTPESNVQPENPPTAKFSKQLDIINPHCAGLDLHKDIIWACTAPFRDGIAPEVVTFPTHTEGLQQLVSHLKTRRVTTVAMESTGVYWLMPYLTLLDADLAPCLVNPSDVKNIKGRPKSDRADSVWICRLHTYGLLRASFIAPPQILNLRNLCSTREKLIVEAGSAIQRMNNELVKMNLRLDGVLTDIGGKSGMLVMEAIIRGERSPDALYALLASQIKDRGKEKIIPLLTGRYDEFSIFSLETWYSLHKSIQQNIERVNEKIYQLLQSLPKKASASNLPPVKKNYREDYLNFPHPLRPIFYEIFGHDLTQLPGVGADLLLTLVSTVGTDLSAWPDSKHFTSWLGLAPVNRESAGYRKSGKTRRTSNPLANAFKMAAMSAARTQTYLGENARRLRIRITPKKAKVATARKLAEIVFNIIRHDMPMHVKTMEEYEMRRKKREIQHFVKSLNKFSKDGELMPEVLEEIQRQNTNFTTTVAI

SEQ ID NO: 426346 - protein, 431 aa, unidentified
MSKFFYRSTVGIDVSADFSVAAILSPDGEVHRKPFKINHNRNGFDYLVDQIKKAEKEFNMKTAIFMESTGVYHLTLFHFLKDTFETCILNPLITNCNKNVDIRKVKNDKKDALTIAKIGKFQDVKYSCNFDIEIYTLKSLCGDYYKFTDSKSTFKKKLSTDLRVIFPTYNTVFSNITSKTLIAILKTYSSPEAILNADKNKLIKLISAHSRKGQVYSENTYKKLIDAAGEAVYIGLNSPSLFVKIINTISIMEALEIQIENLLKEIHLLMCSNRISAEFKKNVQLIYSIPGVGELTATTIMSEIGNIKSFVKPKHLVAYFGIDPSVSQSGKFNSNKNVMSKHGTRIGRRALYAVALASIRKIRNDEPINKVLLNFYKENMKGKSKKVDLVAIMHKLINYIFSVLKNQKEYELRDPKIHVKMHLNKQSNSAA

SEQ ID NO: 426347 - protein, 433 aa, unidentified
MHEAEDEPLFAERAAGVDIAKAGIEVTVRVPSETRRGGRQQDTRSFRTTRKDLLALADWLRVWGVAKIGMESTGDYWKPVLFLLESEGFDCVLYHAAQVKALPGRPKTDKLDSAWLAKITERGALPGCFVPPEEIRRLRTHTRYRRHLTQARTAEKSRVEKLLEDAHLKLSSVISDIHGVSGRAMLEAIAAGERNPGTLAQLARGTMRGKIARLVEALDCSFVTEEHAAVLTMMLSTIDYYTAQIGELTAKIAVLCQPYEQQIAQLDAVPGTGVITGQDIIAEIGTDMTVFPTAAHLVSWAKWCPQVAQSGGRRKGANASGRGNRYLSAALGEAAVNAGRTQTFPGAKYRRLVRRMPKKKALVATGNSLLAIYYALLSDPAAAYTDLGADYYERRANIRRQARNHVRGLERLGYKVTIEPADPATGATGEPAA

SEQ ID NO: 426348 - protein, 429 aa, unidentified
MKIIYPRVCGIDVHKQFIVAVICISESVEPIYLKKRFSTFHNDLIRFRNWLIQNDCQNVCMESTGKYYIPVYNILESHISNIVVANPKWVRAVKGEKDDDKDAKWIADLFKFDIVRSSFIPQKDFRILRELTRYKYKLVNMRSSEKNRFQNALTSGNCKLDMVFTDVFGKSASNIIDLILSDNPYTDEDILSKVHKKCKASPDMILDSVNGTDLTPVQKSRIELVNDHIKQLSSNIQRLDKLIDLMIEPYEDYISFLCQIPGVSRNSAITILSEIGVDMNQFTSTRRLTSWAGLTPSSNQSAGKKKSVRISRAGVYLKPCLVEVAHAAVKDKNHPYYANKFNKISKRRGKKRAFIAIARKILVAAYHMLLTGEIWNPADLAEVETPVEQRIKYVKNNLKSDIKQLLDIGLTVEELTLMIQQNANIIATQ

SEQ ID NO: 426349 - protein, 347 aa, unidentified
MNYIGVDCHISSLDFAVVNEKGTITQKAKVNTGVKEFMVFVKSIPKPRKIFIEEGELAGWMLETSLKFGEELIITDPKINKWIGKAGQKDDTIDAEKLALLARGKYIKEIYHPINNRRRFKELVFAYHDTVKSQTRIKNKIKANFRRNGIRCSVDTVYSDKYRDKWREKLSKNKVTHLIVEELWVQLDQLRESKEKLKRNIRVRSKQYSEIKRFMKVPGIGLIHASTISAIIETPHRFANKKKVWMYAGIALMERSSGEKVYSRKLTREYNRPLKNAVKKAAEAAISSKDNQFRRQYLRLTIEKGIASHKAKLTVARSMLAALYGMWKKGEEYDPEIDVKRGKGDKK

SEQ ID NO: 426350 - protein, 344 aa, unidentified
MTYYTGIDVSLRSVSICVIDDKGEVRLEAKVAADVDAIVDRLRRFSADVTTVGFEAGTLTQYLTYGLQAAGFEVICLEARRVSLSLAAMRNKTDRNDARGLAQILRTGWYRRVHVKSLHSHQVRALLASRKAILKKFVDLENELRGLLKVFGIRLPSRVGHGSFDAELRETVSSDEMLACALVPLLDARTVLYKTYLKLDNAVKALVRVDPICQRLMSIPGIGPVTALTFKAAVDDPSRFKSSRTVAAHFGLTPRRFQSGELDNPGHISRAGDADVRSTLYITAHSLLTRNAQWSTLKAWGVRLAKTRGHRRAVIAVARKLAVILHRMWVDGSEFRWGAAETPA

SEQ ID NO: 426351 - protein, 344 aa, unidentified
MVIGIDAHKRSHTAVTVDEMGRQGFVKTVGTTTQDHLRLLKWAVSLAVERLWAIEDCRHLTRRLERDLIAAGESVVRVSPKLMAHVRDSARSYGKSDPIDALAVARAALREPNLPIARLDGVEREIRLLVDHREDLVAERTRIIARLRWHLHELDPGWTAPTKLERHSAFDKLEAHLSDLTDGAMVRRLALRLVEHLRLLTHEINELAAEITARVTTIAPSLLAIVGCGALSAAKIIGETAHAGRFRSKDAFARHNGTAPLPVWSSNKQPHRLSRTGNRQLNAALHRIALTQARSYPPARELLDQRKSNGDGGMEALRILKRRLSDVVYRAMLADQTDQPPVAS

SEQ ID NO: 426352 - protein, 451 aa, unidentified
MDRPQELEVDEEREVVERVAAIDVAKATGMVCARVPHSSVPGKRVTKVWEVRATTRALTELAEHLVNEHVERVVLESTSDFWRPFLYVLEGAGLCVWLVNAKQVKNGPGRPKMEKLDAVWLAKLAERSMLNPGFVPQEQMRHVRDLARARFDLVEDRTRVKQRVEKVLEDALVKISSILTDLHEVSGRAMLEALIAGERDPMVLAELAKGRARARLELLAEACDGRFTSHHARLCWMLLDQADDITRRIEAVTTLLDEAISVLEAPPGEPPTAALDPATGEILPAPVAYLSAIERISQIPGAGPQTARAVIGEIGLDMAVFSTPQRLCSWAKCSPRTVQSGTKTKGAPTGKGNPYLKAVLGQMATGAAKTDTFLGERYRRLVKRMPKKKALAAIERSILVIIFHLLSDPSATFTDLGTDFYPKRIDAKRRTDHLVRQLEALGHQVTLVPAA

SEQ ID NO: 426353 - protein, 350 aa, unidentified
MNVNHYIGFDVHKKSISYCVKLADGQIVEESKLRATYDALRQWAGRRREPWHGAMEATLFSGWIYDTLKPFAAELQMGHPALMKAIGASKKKNDRLDARKIADLVRCNLLPACYVAPAQIRELRQILRYRNLVVEQAVRMKNKMSGLLMEAGAEYSKQQLHGKKYFTKLLDTVKEVPESVKDLLRLSRGAMEMFETTQQQLLGRLRSDPRLAERVILLRSIRAVGEVTALTWILEVGDPQRFTSIAKAVSYCGLTSALVSSADHQKRGPISKQRNAHLQTVLIEAAKLAPRWNPQLAAVHAREVERGNRNRATLAVARKLVAYLLAVDKSGQPFQPRTPLAAETEVEKVA

SEQ ID NO: 426354 - protein, 529 aa, unidentified
MSDGGRGRASLRVKMWKSSEMWTHSGLPFAYVTGVDRLESLEGELRGRFWFNHFGRSSLSPFAMPRLREHWMENRPADYFLTGPAMSFDRLKHPLERLLGHKLKPSRTNLLVQNSKPHLSMKQTYILGIDVAKHKVRAALSRGAHEPLLFEKDLPVNAGGLTELLARLRQHVAEPEALLVLIEATGMLHLNWAAALCQAGYAVVVINPLMARRLYTLENSIRDNKSDPIDARELCGIARTQGEKLLALYRFKIKSEQFCLQRLQSVRKAVRKSLSNLKKSYRSLLDVSFPELGGLLEIDGVGIRQLLSQAPTPAAIARMRRSTLEKNWMLRPKAAELKTLAADSMADPELAAASRPALLAMLQSMAAMEARLRELDRQIETLAAQSVDQKNKALLETIPGFGPINAHKVLAFLPDQILQTGSNRKAAARLQAFMGNDPRLRQSGQWQGQTKMSKRGVEMLRTAFFQSAFSASQHDPELRAFYLRKRAQGKHHEVVLSHLMRILTRRLVAVLRSGKPYQSNHTLRLQNAA

SEQ ID NO: 426355 - protein, 365 aa, unidentified
MTDQSVLDESDTRRVIGGVDTHKDVHVAAVLDELGRLLDTASFGADTAGYRQLCRWLYGFGEVLAVGIEGTGSWGAGLARHLRTRGMNVIEVNRTNRQTRRRKGKTDTVDAEAAARAVLSGDATVIPKSGDGPIESVRQLRVARNGAMKARTAAANQLHSLTDTAPDELRERLRTGTTRARARTCSRLRAGDLMTPAGAAKKALALVGARWVALDAEIRELDKAIKLVLDQIAAPLLRRHGVGYETAGALLAAAGDNPDRISNEAAYAALCGSSPVEISSGRTNRHRLNRAGDRQANSALWTIVMSRLASKHAPTIAYLERRTNDGLSKRDAIRCLKRYVAREVFSDIRAIATANTNRQTQQIAA

SEQ ID NO: 426356 - protein, 435 aa, unidentified
MEEVEDEPLFCDRVAGIDIGKATVMVTIRVPSEARAKGRQQETREFGTTRRELLALADWLRGWQVERAGMEATSDYWKPVLFTLEQEGFDCLLYQASQVKALPGRPKTDKLDSVWLARITEQGSLAGSFVPPEEIRRLRTHTRCRRKLVQMRTAQKERCEKLLEDAHLKLSSVISDIHGVSGRDMLRAIAAGERNPKVLAQMARGVMRSKIARLEQALDCSFFTGEHAFILTMMLDSIDSLTAQAGVLDARIADMCQPYQRQLEQLDEIPGFGTTTAQDLIAEIGTDMNVFPTAGHLASYARQAPRVKESAGKRKGKNATGRGNPYIGGALGEASISAGRTQTFIGEKYRRLTRRMPKRKAQVAIMRSQLVIAHALLSDPDARYQDLGPDYYERKADIRRRARNHARALERLGYKVTLEAIDPGTGELHLIATAG

SEQ ID NO: 426357 - protein, 384 aa, unidentified
MDQATPSTASANILHCALELSKKSWLLAIQFPDREQPSLYPIAGGDAEKLMAKLTQARDRWAKTSGALPMITLCYEVGYDAFWLARCLKARGVECVVIDPGSLQVSRRGRRVKTDRVDVKTLLRTLIAWCRGERHVWSLVRIPSIDEEDLRRSHRERSRLVRERTAHINRIKGLLFAQGIRDINVKSRYKTLAVDELVTGDGHRLPPRLAGEIAREIRRLATVQEQIAEIERERDAAPTTCEATERKRDLLSQLKSIGPAISAFLSREVYYRQFANQRQVGSFLGLTPSPYDSGDEERCQGISRAGSGHARAVMIETAWLWIKHQPKSALSRWFVERTAGQSKRVRKIMIVAVARKLAIALWRYVELGLVPQGAILNPRMKARS

SEQ ID NO: 426358 - protein, 456 aa, unidentified
MKQKTTSQSSRTLPIVGEVEPNAAGLDVGARKVYVAVPADRDAQPVRSFDTFTEDLERMADWLLECGITSVAMESTGVYWIPVFDILERKGLRVCLVNAHHVKHVPGRKSDVQDCQWLQYLHSVGLLRGSFHPEDQVRALRAIMRHRDSLIEMAAAHTQHMHKALTQMNLQIHHVLSDITGVSGLAMIDAILKGERNPQVLAGLRDGRVQASEEIIRKSLVGNYRREHLFTLEQSLKAFRQYQALITACDQELAQYVKDFPSRMDGDQPPLAKEPNKHRPRKNELRLELRSELYRLFGTDLTAVPGISTLTWFTLLTELGPEIGKFPSSPAFTSWLCLCPNNRQSGQRILSTQTRRSKNRINHALRVAAQTLHHSNSSLGAFYRRLRARLGAPKAITATAHKLARILFHLITTRQPYDESVFALADQQQQQRHERYLRKQAQAMGFSLVRTEVQPA

SEQ ID NO: 426359 - protein, 318 aa, unidentified
MSHGYDKYVGIDVAKESLDVSGLTAGSPSQFENTAAGRAKLLSLLPAAGACLLVAEATGGYERDLVAEVVAAGHHIAVVNPRQVRDFAKAVGLLAKTDRIDAGVIARFGEATRPTPQGFSEQQEQLRELIVRRRQLVDHRTAEKNRCEQAHSTLVRNSVRKSIEGIDKDLKRIDRAIIQLVESNDDWRGRYERLKSVPGVGAQTAATLMAELPELGRLHRQQVAALVGVAPFNRDSGQFRGRRTIWGGRATVRSGLYMAALSAKKHNPVIRAFAARLLAKGKPPKVVLTACMRKLLVILNAMLRSDEMWGPRLATLTP

SEQ ID NO: 426360 - protein, 349 aa, unidentified
MDFYAGLDVSLEATNICVVDGDGKVMREAKLETDPDAIELFLAEWGIHLKRVGLEAFSYSAWLFTALAEKGLPVICIETRHAKAALNAMLNKTDRNDAKGIAQMMRTGWFRAVHVKSEAAQTLRALLAGRKALLGKVLDVENMIRGLLKPFGLKVGEISVGRFATRVREIVAGKKELEAIVTPLLDARNAMRLQLAKLHRLALTAARSDRAVRRMMTVPGVGALVALTFRATVDDQTRFRKSSNVGAHFGLTPRRYQSGQTDRIGSISKCGDELTRAMLYEAAIAILTRIPKNFKLRLWGLRLARKKGLKRAATAVARALAVLLHKIWIDGTTFRFGAGGKRGRVAAAM

SEQ ID NO: 426361 - protein, 338 aa, unidentified
MNYHNLIAIDLAKNVFQVCTMSTNNHVLMNKSFNRQGLTEFMLNQPTSVVAMEACYSSHYWARLFKSFGHQVKLLPAQHVKPFVRGNKNDHNDALAIAEASQRPGIKAVPIKTVAQQDIQSLHRLRERCVSQRTSLSNQTRGLLSEYGIVFPAGFKSFKQTLAVLIDPSNTQLTEPLKQQLRYVADEFDRMSARLTELNQVLAQIAQTNPHCQRLMSIPGIGYINATALYSAIGNGGQFNNARELSVWLGITPKQYASGNKQVMAGITKRGNRYLRKQLIHGARALMRYCKKRDDQLSQWLQAIEQRRGKNKACVALANKMARLCWTLLQTNQMYRSR

SEQ ID NO: 426362 - protein, 324 aa, unidentified
MDHNNHVIFNNKITRKKLLQSVLEAKPETIVMEACYSANYWGRLFESHGFKVSLIPAQHVKPFVKGNKNDHNDALAICEASLRPGIYFVPVKSIEQQDIQALHRIRQRKVRDRTALVNQIRGLLSEYGIIFNQGYVKMAASIPLIIEDMSSGLSFPMRDMLHSLLEELTVINKQVKNLETQIKQLADQQLNHKQLIQIPGIGLLTSSAAIAQVGDAKHFSSSRGMAAWLGLPPRHSGSGNKITNQGISKRGDRYLRTLLIHGARSVVSMYKDQNDPLKQFANRIEKRRGKHIATVAVAHKMARIMWAILSKNQPYNPNHALTKR

SEQ ID NO: 426363 - protein, 370 aa, unidentified
MKYVGIDLHTNRFTCCYLFDNPREKHTETFDLNKEGLSSFYSTIGKDTYILVEATINTFAFVSLFKDLVREVIVANTYQLKSVGIPGKKTDKLDAAKLAEKLKAQVISGVKQIVPVTVPPREIRDLRALFASYRTLRKEIGRTKNRIHSLLKENLYPYTKEYIFGKKARKEIRTISDDYLLSFQINLLMDTLEHLEAAFERLVVEIKKAGALFMPQIEILTSMSGISVVTAIAVIADVIDASRFRNSKHFASYLRSVPRVESSNDKTIIKSTTKAGRKLAITLLSQSLNHFRDGNKKLNHWVEKVSKYKKKGVVRMALCRRVITEIYQMLKKEEYHYFYNSVLHGKKMAEYKKFLEKDTKYFLKEPRISA

SEQ ID NO: 426364 - protein, 315 aa, unidentified
MLAIGIDMSKATFHAALDDLLVRKFKNTREGIDTFTGAIKSLGHAPGATTIGIESTGVYHLLFCTKLMEAGYSVMLINPLESHRFIKARSLRELKTDRVDAIAIRAMVRVGIGRPFVETDEVLALKALVTERDGLIHIRSIMKNHREARNVRTRVISKPLHDPSPSVMAALDMEIHILEAHLLSYAPATQYLLRSIPGIGAISAASLVAHIGDIRRFSSPEKLVAYVGLDCRVHQSGTSVNGRGFISKRGNHQLRAVLYNAAFSARQTNPDLKAYFEKKVSEGKHYVSATTAIERKLLHIVFAVWTRGTPFEARA

SEQ ID NO: 426365 - protein, 338 aa, unidentified
MEVYAGLDLHSTNTYVAMIDQENKVLYKQRHKNEVPVILSALDPYRKDIQGVVVESTYNWYWLVDALMDAGYRVHLANVSAIKQYEGLKQIDDRRSSLWLANLLRLNILPTGYIYPKEERPTRDLLRKRLQLVRHRTSHVLSVKNILARNLGVRMSTYDIKKLKGPEVKALFSDKEMRLMVMSSVGLIQHCQEEIDEIENLIAKKFKMKKEFTRLLTVPGLGLILGLTIMLEVGDINRFPTVGDYSSYCRCIRSIKTSNGKVTGYGNSRNGNKYLAWAYLEAAHYARRYHETIRSYYEKKRAKTNKIVAIKTVSHKLARASYYVMRDGVDYDEARVFV

SEQ ID NO: 426366 - protein, 349 aa, unidentified
MTIVESRPITGGVDTHLDVHVAAALDAIGGLLGVEEFPTTPAGYKALLNWLADLGPVARVGVEGTGSYGARLTRYLQSLGISVIEVNRADRQDRRRQGKSDPLDAISAARAAQSGRAAALPKGSDGEVEAIRMLLVAKRSARRDRTSAINQLRGLLAAGPDDLRERLARHGVSALVAETAALRPRAGDIVEHAARVTLRELGRRARSLDEEIVRLDKLIGSLVAARSAGLLGLFGVGPDTAATLLVTAGDHPERLRSEAAFAQLCGVAPIPASSGKVTRHRLNRAGDRQANQALWRIAFVRMGSDPRTYVQRRTAEGKSKAEIMRCLKRYVPARSIPSCAPDAPSLGTA

SEQ ID NO: 426367 - protein, 341 aa, unidentified
MDHYAGIDVSLECSSVCVVDANGKIVREGQVASEPEALIGWLRSVGLGLTRVGLEAGPLSQWLYVAMRESGLAVELLETRHVRHALDTMPVKTDRKDARGIAQLMRLGWFRAVHCKSMGAQETRVILTARKLLQQKLRDVEASLRGTLRGFGLKVGRTTPKRFAGRVKELVVGHASLEAIAEALLAVHAVLLREFNGFERRVRTMARHDAKARLLMSAPGVGTMVSLTFASAIDDPGRFKSSKQVGAHFGMTPKKYQSGETDYTGRISKIGDKQVRTALFEAAHVILTKPVKGSALKSWAMRLAKRAGMKKAKVALARKLAVIMHRMLVEGTTFDFAAAAA

SEQ ID NO: 426368 - protein, 307 aa, unidentified
MNITYLGLDISKEKLDLAGPTIKHHTFENNSKGISQLLKFLSTIPSLHLVLEPTGGYEQSVLLALLKANIPVCRVDPYQARSFARSLGKLAKTDKIYALLLAHFGKERQPRPLKHYDESLESLRILYRRREHVLRSKNQESNRLETAPAPLQELLQASIEFFSQQLAQIEALIKKEISLNQEAKSKTQLLSSVKGVGHQTALTLLLSMPELGSLNDKEAAALVGVAPYNKDSGKHSGYRSIRGGRAQVRKVLYMAALAASRFNPILRAFYQRLLSNGKKPKVALTAVMRKLIILLNKLIKQPNFSLA

SEQ ID NO: 426369 - protein, 344 aa, unidentified
MPTIDYIGFDIHKKTISFCDKAQDGTILEEGTIPALRKKLLAWAKTRPRPWIGAMEATLFTGWIYDLLKPLAQALQVAHPPMVQAIAAAKKKNDKVDARMIADLLRCNLLPECYMAPVAIRDLRRVLRYRNLVVRQATRMKNRIAGLLMETGTAYNKERLHGKAYFSELLGSLQEMPRSVVELLQLSRGQVELFAAIQRRLLQGLRKHPELSQRVMRLQSIPGVGEILALSWALEVGEVDRFPSLAQAVSYCGLTSAQHSSAGKEQRGPISKQRNRHLQTILIEAAKLAPRYNPQLAAVHQRELQRGNRNRATLAVARKLVAYLMAVDKSGQPFQMRASGEEAA

SEQ ID NO: 426370 - protein, 344 aa, unidentified
MDHFAGLDVSVKETSICIVDDTGKIVREAKVASEPEALLAVLKNLAYHFKRIGLEAGPLSQWLYSALAEADLPVICVETRHMRAVLKAQINKTDRNDARGIAQMMRVGLYRPVHVKTLRSQKLRMLLTHRKLLQSKAIAIDNDLRGTLRNFGLKVGMVGTVGFEARIRELVENFPDLAALIEPLLIVRRTLREQFCILHRRLLAIVRDDEVCRRLMTTPGVGPVVSLTYRATVDVPARFRKSKSVGAVFGLTSAKYQSGEIDWSGKISRCGDEMMRTMLYEAAPSMLRSKKWSWLKAWAMQIARRCGMKKAIVALARRLAVVMHRMWVDGTEFRWTREQAAAAA

SEQ ID NO: 426371 - protein, 390 aa, unidentified
MKTENATENETDAVHTTLGAIFLSLELSRSTWLVTSLLPCNGAKMSKRAVKAGDTAGLLDLVRQLKATVRGRTSRDVPVITIQEAGLDGFWIHRILEREGIESHVVDAASIATSRRKRRAKTDKLDGETLLRALLAYKRGEPRVCAMVVPPTPEEEDRKRNSRERRALIAERIKIVNRVKGLLFSQGVVGFEPLKRDRRARLEELRTGDGRELPQNLKTEIVRALDRIELVLRQIKDVEAVRDEVARNDCDPSKVANGMSMLKQLRGVGADFAEVLWSEGLYREFANRRQLASYAGLTPTPWQSGSISREQGVSKAGNPRLRTVMVQLSWFWLLHQPRSALAQWFQERVALDGGRRRKSAIIALARKLLIALWKYVHHGAAIEGAVMKPA

SEQ ID NO: 426372 - protein, 423 aa, unidentified
MEAMHERVAGLDVHKDNGVACVRTVCGGKTTRECRTFDTRTDGLLALLEWLRLCRCELVVMEATGVFWMPVWKILSDGAFKLVVANAAHIKAVPGRKTDMKDAEWLAELAAFGLIKASFVPDEEQHELRALMRTRKQLVREQTRHVQRIQKTLTEANIRLDSVISDIMGRNGRRMIEAMIAGVRDPRKLAALADQRLKATPKELYDALHGRLTEHHRFLLQLHLGQWDILDMTIRNIDREVETRVSRLDAEVAADKAKFSDLIDQLATIPGVSRLSALTILSEIGSDMSRFETAGHLVAWAGMCPGQNESAGKRKRTRLRKGAPWLKTMLVQCAWAAKRKKDSYYKAQFFRLQSKRGPQKAICAVAASLLTAIYHMLKGGTVHHDLGAGHFDQRAPHLKVKRLVNQITKLGFEVTLQPITKTA

SEQ ID NO: 426373 - protein, 346 aa, unidentified
MEQIIRIGMDTSKHIFQLHGVDAAERPVLCKRLGRQQMVAFFAKLPPTVIGIEACGAAHYWARVLGEFGHEVKLMAPQHVKPYVKRNKNDRRDAEGLCEATGRPTMRFVPVKTAEQQAALMLAGLREQMVARRTQLSNAIRGYAAEFGVTAAKGLDKVEPLLAQISRDESVPALARELFAMQGGEYAQLQVELKAIEVKLRAWHRGNADSRRLAKIPGVGPIGATALVMKTPDPRAFPSGRHFAAWLGLTPKDHSTAGKTRLGKITRAGDERLRSLLVAGATAVIQQAKHGRGHPSPWVVALLKRKPPKLAAVALANKIARIAWKLMETGESYDDAQMPGASTFAA

SEQ ID NO: 426374 - protein, 458 aa, unidentified
MGEYMMKGKKNRTNTHKKRLQQHLEHVNLYAAGIDIGSREHYVAVPPSLDEDSVKKFGCFTPDLEAMADWLVKIGITTVAMESTGVYWIPAFEILESRGLKVILVNARHVKNVTGRKTDVKDCQWLQQLHTYGLLHGAFRPEDDYVSLRAYMRQRETIVSHLASKIQHMQKALRLMNVLLDNVVSDITSQTGMAIIRDILSGIRDPKELAKNRDCHCKNSAEIIAKSLVGNYRDEHLFALKQSVELYDFYNAMLDECDQVICQYLSTLRTQADASEKPAQKKRKKCNSNALRFDASINLYELCGVDLTAIDGMEEHGLLKIIAETGIDMSKWATENRFTSWLGLSPNNKISGGKVLSSSSIKTKNRAKQAFKMAAFSLSNSRSGLGAFYRRLRARIGAPKAISATARKLAVIFYKMLKNKTEYRKQSQEEYDELHKSRVLKQLKHKAKLFGMELIASE

SEQ ID NO: 426375 - protein, 307 aa, unidentified
MIKEGRIRTEKEDIEEFFSDLEDLEIAFEASGNYEYFYDLLESLGHKVVLAHPLKTRMIAESRVKTDKVDAKTLAELLRGGFLPTSYVPTKEIRELRHLVRHRIALGRFRARVKTQIKTELRRKNIKYPDGGGIFTGKGKKWLRSLKNTVIDSYLAIYEVLEKEIKEAESRIEKAGKEYEEVKLLTGIKGIGVYSALIIFSEIGDGSRFPTEEKAFSYAGLVPRVHQSGEESYYGRITKEGSKYLRWILVEAARVHVQWCPDSKITKHYNKIKRKRGENIAAVAAARKLLQVIYHMLKNNEEFRIEG

SEQ ID NO: 426376 - protein, 429 aa, unidentified
MSYRIAGIDVHKKMLAVVVSNVEIESEYQFERRMFGSNPEQLRSLAAWLLEQEAEEVVMESTAQYWKPVWEVLERYWKPIREKREGARRRSGTLHLAQAQSNRGRRGRKRDFVDAERLVKRLVARELTLSFVPDAEQRLWRTVTRKKYQLRCDRVRLQNQLESLLEEAHIKLSSLVSDLLGLSARRMLKALADGETNPAALAALADERLRATPEQLCDALGACTELNAVYRRLLKMALEELRLIDEQIGQLDQEMASLLSQHQDAVERLAEVPGLGVDSAQQIIAEVGPTAATFPSEKCLSSWVGASPGDEESAGVNYSHRSPKGNRHMRRLLNQTANAAVKTKGSIFEIVYRRSVPRLGHNQAIGAIAHRQCRLIWLILHQGVRYEERGPAVTKQSKQRRTARIIRQLRSLGYQIEAPNPQPSQAQAQ

SEQ ID NO: 426377 - protein, 419 aa, unidentified
MFKIFKKNCCGLDVHKTWIYACIGIADENDRVDYKQQRFSSFTNGLNSLAEWLKSYNCSEVCMESSGKYWIPVFNILEKTCKVTLSHPKYTKPQKGNKTDRKDAKWICDLFMCDMTKPSFIPPADIRELRDLFRYRFKLTNIVTGEKNRARNCLTVSNLKLDDVFSDVFGKSARSITEYILAHPGEKFDVAPFLDKHCKHSAEEIQTAIDGKISKEQAVKLREIMSHMDELNKHKASIEAEILELAKPYEKELSLIRTVPGFSSDPMTAIMLISEIGADMSVFPTVKHLVSWAGCCPRNDESGGKRKSTRISRAGVYLKPLLVQIANAVVKSDKHPEIKARYRRLKANRGHKKAIIAICRMLLTAIWHMLTKSEPYSNKGYLTDHETGESKILTKSQALQMLRMRGFIIKDDAPTVMTG

SEQ ID NO: 426378 - protein, 475 aa, unidentified
MNLKGKKTKNQVVTVNIFEQQELLKKAEVIREKLTASTWHELETNGKFDKNAKLSFISDDMLILGCDVDSETHYLRAIDTRGRELSKSAYSFRNNCEGFQSAKEWAVELAAKNEKKQIVLGLEPTGHYWFCLATWMIANGISVVQVNPYAVKQTKEVEDNSQLKDDTKDPKLIANLVKDGNFGMPYLPEKVYAELRRLSMFRDQLNEDRIRAINRMHREMKIYFPEYKEALGRVEGAFSLELLKQTPFPEEIQTLGEDGIRQIWHDAKLRGRGYSRAREIIGYAKTSVGMKDGAEASAMAVKWFVKEIRELDEKLAEIEKLMREKYQEIPYAKNILEISGIGENTLSGILAEMGDISRFDDVKEIQKLSGLGLVACSSGKHKGETKISHRGRKRLRYWLFQAAKSAVAHAEEFKELHVYYTTRADNPLKKMQSLIVIACKLLRIIYGILKNGTVYDPKKMLRDIRRPEKKEVIAA

SEQ ID NO: 426379 - protein, 391 aa, unidentified
MSMYFIGIDISKYKHDCCIISASDQKVVSKFTFKNDKAGFEELLTVLNSLSNPEDIKIGFESTAHYALNLELFLESSLLTFMEVNPVLISEYKKSKTLRRTKTDSVDCESIARWLMTVEYKPHSKGFYHAYSLKSLTRLRDKLIRQRSFYLVKITNVLDHTFPEFKPFFNERFSKTALYLLENYGSAEKMARMNSASYEKLRSLSRGKFSPQQFLKLKALAANTVGVNNSIFDVELNSLLSLYKSLAKEIDTIEKEINKLIEEVHPHYMSIPGIGSLSAAVIYSEYGDISNFSNPGQMLAFAGIEPGVNDSGTESHGGRMVKRGSSQLRYTLINCCLPLIRFDMTFATYYSKKRGEGKPHRVAITHVAKKLIRVIYALERQDIDFNAQKLR

SEQ ID NO: 426380 - protein, 372 aa, unidentified
MKLSKQFIGVDLHTNRFTCCYRDEVSEGKSEKRTQTFRLDSLGLAEFYQTLTSESYVLIEATITTFAFVRLIQPLVKEVIVANTYELKQISLARKNTDKVDADILCRIIKMQVLSGENAVSPVTIPPFEIQELRSLFTTYRFYKKQSVQIKNRIHSLLKERLYGFTQEEIFDKKSRKRLREMESDKVLSFQINSLFDSLEYLEGKIFSLKDMIQEQAEPWFREIEILTSMKGVSVFIAIAVIADIIKVDRFKNSKSFTSYLRSAPQVVSSNTSSRILGTNKMGRKLSSTLIIQSLNHVLNSSPKLDKWYKNLTQYKKAGLVRTGLRRRVFAEIFQMLKKGEYHYGRDKQNHEAKLLQYRNFLIKRKNLLETA

SEQ ID NO: 426381 - protein, 417 aa, unidentified
MSRTLTKKMESVKPGSLQVGVDLGLDRNYVVVLTERGERVDRFSFSNDRAGYDYFFSRIRRAKGEEAGRSVLVGMEPTNYLWKLLATELEQQQQGYCLVNAFTVKKHREGDQLDRSKDDPRDAFTIADLLRTGKFTQTHLLHGGYAELRGYGKECERLQVQVSRQRNLVWAAARQAFPELQQAFKDLGGLTVRAMLRHQACALQIARLSQAEFIQAVRQDFTGKRIELSKLRRVYQLAPTSVGVRDGLIALQMSLLSDLKVLETLEEQLQVARQLLLGQFLALPEAQWMLSIPGLGALTAALILAELGDPHTFRGSQEWIKLAGTQPTPDSSGRHSATKTPMSHKGRSSLRLHLFMACLRLVQFNPSFAGWYGYYQHRPQKPLTKMQALGVLMNKLLKILWALIHHQTSFQSLPAAL

SEQ ID NO: 426382 - protein, 399 aa, unidentified
MSKKNTLVALDPSISYAVIGLDLAKADVAVAAVPCSDDEIGLIDRMDYESLYEQAAKLEPTLFAMEPCCGYSTIALRLESLGHQVKVISGNAVKHWIATHRSSQKTDLNDATALAKLALNDSDLRPIRVKNLYECRIASIQASRRQLSTQATATLVCFKSLCQSWGVVIPQGSKSIKKLADTVDANVELLGIDVANTFKRLLENYKRLNAEINAMDKTLQKLVQQDERGRLMQSVLGIGTQTAARLLVVTGEIGRFENSRSYVAYFGLAPRNIISGHCGTPDLRRRNQAVYNRGQGKVSRRGDKIARSLIIQGAGSIYMLNCKNQLPECQLKRWLDQQMASRKAYGKIIVSLAAKLLRIIWALLTRKEEFDIHKAGVSRSALAAMEKPIQCEVAVESAA

SEQ ID NO: 426383 - protein, 366 aa, unidentified
MLYLGIDQHARQITVSLRGEDGDVLQARQVSTQPEKVHAFFRQLTRQRLRADESFVAVLEVCGFNDWLIRMLRDYRCHKVILIQPDERKRCKTDRRDAAALSELLWVNRDRLLQGKPVRGLRQVDIAGGTDQENRRLTTLRKEAGQARTRLVNQVRHMLRRHNLQWQMPTKRLPTKAALAWLKQLALPEIDRLEMDHLLADLERAQQRLRELERVIARRCGVSEEAVLLSSMPGVSYFTAVSLACRVGRVGRFPRARSLANYWGLTPGCRNSGETSQRLGSITKAGSGMARWLLAQVTHKVLRKDARLREWFRRVKRRRGSTIARVAVMRKLATIIWHMLSKRKTYAECRAVTEAGTNEREKQECG

SEQ ID NO: 426384 - protein, 349 aa, unidentified
MPAKSQTAIAVVGIDIGKNSFHIIGLDDRGAIVLRQKWSRGQVEARLANMPPCLIGMEACVGAHHLSRKLRTLGHDARLMPAKYVRPYSKGQKNDFRDAEAIAEAVQRPTMKFVATKTADQLDLQAMHRVRERLVSQRTGIINQIRAFLLERGIAVRQGQRFLRAELPRILATPPEVLSPRMVRLIEGLAGDWRRLDERIESLSSEIEVLARRDAGCERLMSIPGIGPIISSAMVAAIGTGDGFSKGRDFAAWLGLVPRQISTGDRTILGKISKRGNRYLRVLFVQAAWVVLIKPKIWERHSLKPWIEAAKKRLHHNVLAIALANKLARIAWSVLARGRGFEARKLQAA

SEQ ID NO: 426385 - protein, 344 aa, unidentified
MEKSNLIGIDLAKNVLQVCKVSKHGELVTNKAVSPSKLKQLLAKSTPSIVVMEGCGTCHYWGRLALSFGHEVRIINPKKVKGFLQGQKTDANDALAIATAATQASVKFSRVKSEEQQTLQTLETSRKFLDRELTALNNHIRAYLYEYGITMKRGRKSLRETIVLVLDHLDTRLPQCLKNTLSLLWERYQSTLVQLKQAKVFKADLVKQIEPCKRLLALESVGEVGAAMLYANIGDGKEFKNGRGASACIGLTPKQHSSGGKVVMLGINKKGGNKELRAVLYQGALSVISRLPAEPQTVKQAWLIALVRRVGIKRACIALANKTVRTAWALLATGESYKPVLLSK

SEQ ID NO: 426386 - protein, 424 aa, unidentified
MKVTYQTCCGVDVHKSFLVATIVKTTGGIEPSYQKKRFSTFNNSILEFKQWLINNNCHDVCMESTGKYWIPVFNLLEDQINVTIANPKWVKAVKGNKDDTKDSKWIGDLFRLGLVKGSYIPCKAIRILREYTRYRYKLVSCRSSEKNRYQNALTVCNVALDSVVSDIFGKSSTSIIDYLLEQSGTSINHEEIASKLLRSLKSKEDAVIESVEGYQMTDTQKYRMRLVRAHMDYITAEINDVDKMIENMISSNPDFENTVRFLCTIPGVKRDSAITIISEIGTDMSQFSSSKRLCCWAGLTPGSNESAGKKKSVRITRAGVYLKPALVQCAHAAVKSDKSPYYKKKYESLVKRRGKKRSIIAIARMILTAIYQMLSTGEQWNPSDLYKIDMPVALVEKQKAKAIKQAKKLLQREGLLPPDEPLAS

SEQ ID NO: 426387 - protein, 311 aa, unidentified
MVKDKVYVGIDISKDGLDVAIHASDKSWHFSNDNHGINNLRKMLVKLKPVLVIFEATGGYELPLYLSLDKAGLPVSPINPRQIRDFAKSTGKLAKTDVLDARVIAHFGYAIQPSPHHIPDTHEIKVAQARRAQIIEMITMETNRLRGAPQPIKRRIEAHITWLKKELEDADKELRETIMNDPIWQEKDALLQSVPGVGPVLSATLIAEMPEMGTLDRRQIAALVGVAPLNRDSGNFHGHRSVWGGRAHVRAVLYMATLVATRRNPLIREFYLRLCAAGKKPKVALTACMRKLLTILNAMLKHHIPWSYSPC

SEQ ID NO: 426388 - protein, 427 aa, unidentified
MAGVVIGIDPHKGSHTAVALDVHEKQLGRLRVRASSRQVDGLLEWASGWPRRRWAIEGARGLGQLLAQQLIASGERVLDVPPKLAARVRLLDSGQINKNDPNDARSVAVAALRAHELPELAAEDHAMVMRVWARRYHDLARLRTQVVCRLHAVVCELVPGGVRKYLRASQATDVLDRIVADSPVAQAKLELARELVADLERIDAQRREAKGRTARAVAATRTSINDVYGVGPIVAGTVLGYVRDIRRFPTRDRFASYNGTAPIEVSSGDRKIYRLARRGNRQLNHAIHMAAISQIRHHDSRGRAYYEKKIAEGMTGKTALRALKRKISDALYTRMIDDARRLAAKDPGGHTGNDSASSAAGSHPETPALRKSHSRATANSKTGTGQRPLRLRPAPDRRRTSRRATGVQVEPAWVCTAGAGRTDLMGR

SEQ ID NO: 426389 - protein, 315 aa, unidentified
MTSPPCHVGIDVSATTLVTCVLPTGDTATVPNTPTAIARLVRHFQRLQPARLVVEATGPYHQPLARACYAAHLPLAVVNPRQTRRFAEVLGRLEKTDTVDAATLAEFAARIEPPVRPWPDAPTEELQALVRRRRQVVGMHSAEGNRLLAALPVVRPSIRAHRAALARQRARLEAALDRALAADPALAAREALLQSVVGVGPICAATLLAELPELGTLTRREIAKLVGLAPLCRDSGDWHGRRRCQGGREAVRTILCQVMASALQHNAWLRATYVRLLAAGKPKAVARTACMRKLLVLLNALLRDGRPWTPPASEA

SEQ ID NO: 426390 - protein, 369 aa, unidentified
MADRITYVGLDVHKESIVVAVAAGGLRGEVREYGRIANTAAALDRLMRKLSSEGVGLRFCYEAGPCGYGIQRHLSAHGHECMVVAPSLIPKRAGDRVKTDRRDAASLARLHRAGELTAVWVPDAGHEAMRDLVRARLDAVHALRRARQQLSGFLLRQGCHYRRPAWTKLHRRWLAGLKFAQAVHHIVLEDYIAAVEAAETRRNRLTGQIEAMLPDGTLAPVVAALQTMRGMALVNAATLIAELGDLSRFANPRQLMAYLGLVPSEHSSGASIKRGRLTKAGNSAARRLLIEAAWTYRFPARVSRELLLRQESQPKLIRDIAWKGQLRLCARYRRLARTGKPANIVTTAIARELSGFVWAIARQVTVTTD

SEQ ID NO: 426391 - protein, 366 aa, unidentified
MKKTITVQTFKNEIFKEQKLTIGLDLGDRWSFYCVLDEAGQVILEQKLPTTPEAIKQTFGKIPRSLIALETGTHSPWVSRLLSELGHEVIVAHAQKVQLITKSNRKDDRHDARTLARLARIDPALLGPVRHRSVQAQLHLTVIRARAELVSARTALVNAARGLVKSYGQRLPKCGTYQVSRELAAALSPELRDVLEPLLKEIESLNERIKEYDERMEKIAKQVYPEVALLKQVKGVGTQIALTYVLTIEDPYRFPKSRQVGCFLGLRPGRRNSGESEPQKGISKEGDRYLRTMLVQGAHYILGPFGEDSDLRRWGRKLSERGGKNAKKRAVVAVARKLAVLLHRLWVGGEVYEPLRNSQKAMREVA

SEQ ID NO: 426392 - protein, 464 aa, unidentified
MKNTGKSGKTRSIGPKGLPAIRPMVAGIDIGSREHWVCGPALEDGTPNVRVFGTTTAQLSELVDWLAAQGVESVAMESTSVYWIPLYELLESRGIEAVLVNARQLHNVPGRKTDFHDCQWIQLLHSCGLLRGSFRPGNAIVAMRAIHRQLVNLGEERTRCVQWMQKALNQMNVQVHHAVSDLAGMTGMAIVRAIVAGERDPSRLSALRDHRCRKSAQEIARYLTGTWREEHLFNLAAALELYDAVEKLITSYQAHLDAAVAALQPEERKDAPVPAHPNPNKEKDIKRHGDQAARTALWRFSGVDLTRIDGIRIAAAQIILTEVGPNLAAFPSEHHFVSWLRLCPRTPISGGKPLKKTRNAMGANRVAGALRMAASSLQRGKTALAAAYRRIARNKGAKVAIFATARKLAELVYRMLRYGQDYIDVGEVAYELKFQARRIASLKEAARSLGYSLTQTPDSSRTPG

SEQ ID NO: 426393 - protein, 338 aa, unidentified
MDRQYVGIDLHRRRSVIVRLSGDGERLGVHRIVNDPCELTAVMTEAGDAPQVVIEATYGWYWAVQLLQDLGATVHLANPNALNWGDRRVKNDVIDATDLANMLRLGRLPKAWIAPPALRELRELVRYRAKLVKLRSGLKAQVHAVMAKEGVLPNVSDMFGPAGTRQLDALELGAPFAYRVASLRELIATYDREINKLERDIHQHLKQHQGYNAVQAINGVGKISAAVLVAEIGDVSRFPTPQHLSCWCGLTPRHRESDLKTRRGRISKQGSRLVRTTLIEGISRYHGGPVLDAKYKTIAKRRGKNKARVALARKVLTLVYYGLRDGEIRCLAQVKAAA

SEQ ID NO: 426394 - protein, 411 aa, unidentified
MSLEVMYERCAGIDVHQRFLVVCLILVEGGKRRQSIRTFRNETADLLALRAWLLQERCTHVGMESTGVYWMPVYRRLEGFFELSVANAQHIKAVPGRKTDVGDAEWIASLLQHGLFRPSFVPSQEQQDLRDLTRLRVSLVRERTRLVNRVHKVLEEAGMKLATVLSDIMGLSGRAILHALCEGESDPERLAKRVHPSVHASQEQIVAALTGEMREHHRFLLRELLSLIAVQDRSITHLEEEIERHLHPFEEQITRCEKINGVSRHVLYVLMAEVGTDLERFPDAEHLSSWAGVCPGHKESAGKRLSGKCKKGNRYVREVLVQAAHGVRRCRTYLGERYRRLKKRRGSKRAALAIGHDILVIYCQMMKTGQEYQEKGVEFFQQRDRSKVEHQLVRRLEHMGYQLTRPSQPVS

SEQ ID NO: 426395 - protein, 329 aa, unidentified
MFDNIIAIDWAKSNVAVARIKTGSKRIKVFERESDLEYLKKIIDALPGTKQLVFEVSSSARKLYFELHNHADDIIACDPLKNETVKQGAKNDRIDAVKLAEAARDGKLKNIFMDISENFKLRRLTGGYEDTIKALVRYKNQKADAKNGFVDSEYDRFVLECKFKEIKNATSIKEAYDKKFYEVYKKNKDVRRQATIPGIGKTNAIKLVAIVVDATRFHNIRDYWGYCGLAKHKIISGNKFYGTRSTRYNRTMKSIYKTAALAAIQSTDEFKEMYDLLRRIKLLPDYKARNAVARHIAKISLLMFKNKTKYNPELVKKVKATMKTAYKLV

SEQ ID NO: 426396 - protein, 345 aa, unidentified
MNHYAGIDVSLECSSVCVVDASGKIICEGKVASEPEALISWLALVGVSLARVGLEAGPLSQWLFAAMRQAGLAVELLETRHVRDAFKAMPVKTDRKDARGIAQLMRLGWFRPVHCKSLPAQEVRALLTARKLLQTKNHDVEMSLRGVLRGFGLKVGPTTPRTFPGRIRELVAGHTTLSTVVEALLAARNALFEQWQKLEKRLRSLARENGRVRRLMTAPGVGIIVALTYAAAIDDPGRFRSSKAVGAHFGLTPKRYQSGETDVTGRISKIGDGSVRTALYEAANVILTRPVKGSMLKSWGMRLAARAGMRKAKVALARKLAVVLHRMLADGTNFLAEKAAVAAAH

SEQ ID NO: 426397 - protein, 350 aa, unidentified
MIIIGCDFHTRYQQIAMMDTETGELVERRLEHENGEARAFYASLPKPVVVGMEATGYAQWFERMLAELGHELWIGHASEIRAGVVRKQKTDARDALHLLHLLLEKRFPRIWIPSPAERDTRQLLRHRHKLVCFRVSVKNQLHALAMSQGVCRKKKLFTARGREVLEKLSLGPWARRRCQELLGMLDQLNTVIEELDRAVQQQAESHAEAARLMRHPGVGPVTALAFVLTLGPVTRFRRSKHVVSYLGLNPKERSSGGKQRTSTISKQGNTMMRWLLVEAAQTAARYDPELLRLYQRLKFRRGANVAKVAIARKLAVKLYWMLRATASCAQRAPMQGSSRGTLVPQAGSSF

SEQ ID NO: 426398 - protein, 403 aa, unidentified
MNSVGIDISKGRSTIAVMRPFGEVVISPFEVRHTGSELSKLARQLKSLDGETRVVMEATGNYHASVAKLLHNAGLYVSVINAKLVHGYGNNELRRVKTDRKDAVKLANYGLDRWLTLPRYIPEEDTRLLLKNCYRQYRQYSKVQTVLKNNLISLLDTVFPNANRLFSSPIRGDGSEKWVDFVAEFWHCRCVSEKSERAFTSKYLRWCRKHGYNFSEAKAHTIYAEASGHIGVMPKSETTKLLVEQAVAQLRATSTALAALKLEMQTLASQLPEYLAVMDLFGVGPTLGPQLIAEIGDVRRFYSKKALVAYAGLDAPPNDSGDVTGRHKSMSKIGASSLRRTLFLVMSVYLQTAPLDEPVYQFMDRKRAEGKPYRVYMMASANKFLRIYYATVKAYLESLEHTA

SEQ ID NO: 426399 - protein, 350 aa, unidentified
MLIIGCDFHSRFQQVAMVDTETGELMERRLEHGNGEAKKFYAELDKPVRVGMEATGYAQWFERMLARLGHELWVGDAAEIRAAMVRKQKTDSRDALHILDLMLQNRFPQIWIPSPEERDLRQLLRHRHKMVCLRTSVRNQLQALAMGQGVYRRGKLWGAGGRTELEALGLDPWARRRRQELLDLVDRLDPTLAELDRAVAKEAEQCSAACCLMEQPGVGPVTALMFVLTIGPVERFRRSKQVVSYLGLNPRESSSGGRQRLGSISKQGNSMARFLLVEAAQTAARYDEELRRDYQRLKFRRGTAVAKVAIARKLAVRLYWKLRKLSSPAPPARMQGSSENLLVGASLSSI

SEQ ID NO: 426400 - protein, 340 aa, unidentified
MHKSNENLSEKQIFVGCDVSKDTLDFAIFEHGVSYRLFKHICVENEAEGFKKMLKWLKDNGVKKFSSVVIAFEHTGYYSLALAEWLFKKKITFCLLHPLDVKNYISTGRNKTDADDSRLIADYIYTMKEKCSSSTPEHPKVKKLRELRKERNMAVKSRTRYLNMLKTIDEASSRRRIESIINDLTTAIKAIEKELMEVVKSDKAIQNNYQLLNSIPGIGMVNVINTIVATGNFTRFSTARQYAKFCCVSPLSHESGTSVKGGNHVSKKGHNELKSDLTEAARSAVAHDSQMRTYFERKKVAGKEYGCIMNAIKFKLICRMFAVIERQTPYVNFEAYRKTS

SEQ ID NO: 426401 - protein, 538 aa, unidentified
MLRQGTTRFTLRSSLCADTVFKLNHSDSSEPGAVNKFAAAEAKTVNKSSNIAKTLPPVKAVAGRMPHRSSRSLCCHPARVHRRKPAQRRGPVQKSERTSPHEGFCISVTGDRTFGGRQKPPMKNWNEITHYLGFDWAKDHHQVVIVDRQARIVAEFQFEHSLEGWNTWRERIGDYPALAVAIETNQGAAVEQLLQSSVSIYPINPRSAKAYRQRKVPTTNKTDRLDAWSLAEALRMDGQSWRPLQPLDPLIQELRLLCRDELNLIAQRTSLINQLQQALMEYYPSALEAFDDWTVPATWKFLERFPTPDALTAAGLQKWNAFLHCHKLYRQNTHERRIAAFSKASQWHIAPALQRAKSFLVLSLVQCLIVLEKQLQQYRKRIEELFASHPDHDLFGSLPGAGPKMAPRLLSELGDDRTLFPDADSLRCYAGTAPVSYQSGQVHKVYLRRQCNKPLRCAIHLWADLSRRWCQWAQTYYQQLRKRGKSHAQALRCLGHRWLKIIWKMWQTRTPYDEALHTRNQTEHGSWVLQLMDQKPRE

SEQ ID NO: 426402 - protein, 364 aa, unidentified
MKRKVYVGMDVHKETIQIAYFTSNSKEILKEQQIKHNEVQIKKFIKKLKTEWNEIHCCYEAGVTGYPLYRYLKSLGVNCILVAPGKIPRQNTDKIKTDKRDAIKLARLMRSGELESIHVPSEEDEAVRDYLRSRDSLRLDLGRNRQRLMKFLLRKDIKYSTTKYWTVSHYKWLNNLHFNNEILQETFNDYYSRVRVQEENLNSMDKKIQEIAESEPYREKVRILRCFRGVDYLTAMFLLCEVNDFKRFKTAGSFMSFLGLVPGEYSSGSKRKQTGITKTGSPRLRRILTEAAWQHRFPGTGSKIITARRSGQPALVVALAEKASLRLHKKFRNLQLRGKTPQVMITAVSRELSGFLWAAMNLVA

SEQ ID NO: 426403 - protein, 392 aa, unidentified
MTTFVGIDIAKEVHWVCAIDAAGAVLLNRKLLNTPEDLLRLMDELRQLPAPVRVGIDVLGGIAALAQAVMLQAGLTVVHVPGLAVNRARQGTVGGESKSDPRDARVIADQVRTRADLRAVTAETELDIELRLLVSRRHDLTTDQTRRLARMHDLLVGIFPELEHALDLTSKTALTLLAGYVTPPELRNAGAAGIAAQLGPLARRSFGRELIEVALQCAERQRITVPGQTLTARLIKELAIEALANIDKLKTLDSQIEQRLALHPDAALILSLPGMGAILTAEFIAQAGSIERFKSPDSLAAAAGLAPVLKQSGKTRWLKRPSGGSKGLKRVFYQSAFASLRCPDSRAFYARKRQEGKRHHQALIALARRRVNVLWAMLHSRQPFIASVTKSS

SEQ ID NO: 426404 - protein, 380 aa, unidentified
MSSSSSSIIWIGMDVHKDSVMLAVYLGNAKEPELEVRLPNDLRKLKRFFDRWSRRGEIRTCYEASGAGYVLHREITDWGYHCDIVAPSLIPIRPGDRRKHDRKDARQIGRLYRAGELTAIRIPSAAEEEVRDLVRCRQTFQREILRSRHYVTKFLARRGLVFRKGTNWTQKHRVWLGALLQDERLGPQDRSVFSEYLALLDYKISRREDLDDQIEKLAFSDAYKPLVDRLRCFRGVDTLAAMTLVTEIGDWRRFERPGQLMAYLGLVPREHSSGDRTSRGSITKAGNSRCRHVLVQAAWQYRTHPRLSIALKERQRGQPLDVIEHSWKAQHRLYKLYHRIGAKKSSLVAVVAVARELVGFLWAVMHDLEYQLPASLRDAA

SEQ ID NO: 426405 - protein, 327 aa, unidentified
MDVCILNQAGETLLHRHMQTTPEAFLNVMAPYRPAIVVAVACLFTWYWLADLGADAEIPFVLGHALSMKAIHGGKAKNDQIDSQKIAVLLRGGMLPQAYVYPAEMRATRDLLRRRMHLAHKRGELLAHVQNTNSQYNLPAIGTNIAYKANRDGVAERLADPAVHKSMEVDLALVSYYDELLRDVELTIVKTARQHDANTLYLLQTVPGIGKILSLVLLYEIHHIDRFPRVQEFASYCRLIKCAKESNGKRSGTSGAKIGNAHLKWAFSEAAVLFLRDNPAGQKFLASLEKKHDKGKALTILAHKLARAVYYMLQRKVAFDMKRFLND

SEQ ID NO: 426406 - protein, 272 aa, unidentified
MLYDGIKGRIKTRNIQNNRHSVENILRWLRLQHCGPEDVHVVMEATGVYHERLATELHDAGFRVSLANPHRSREFARGMGIMTKTDKVDAYMLACYAFLKKPHRWEPPAPEIRYLGALLQRRDVLLVDALREENRLEKYLSTDTPADIISSCRRLAQLIREEVSNIERQIKAHIKACPALRRDYTLLTSIKSVGPLLGMHMLVALGSHNFASAEQAAAFLGVVPIEKRSGASVRSRPRMSKIGPPQLRAKLYMSALCGKIYNKRMRVMLPTY

SEQ ID NO: 426407 - protein, 361 aa, unidentified
MKKPKQHLIAEVPRRDSKVGMTIGIDLGDVWSHYCTLNEDGEVVDRGRFRTNPSGVERWFTDLPPVRIAMEAGTHSIWISEQLQELGHHVIVANVRELRAISHSDRKSDQVDAEKLARYARLDPKILRPIAHRTVAQQEALTLIRARNLIVRLRTAAVNAVRGLAKPCGYRLPASSTLCFAKRCVAVLPPGLALALGPVLEQVAEMTVKIKHYDRAIKRLTEAEYPETQALIKVYGVGQLTALTYVLTLGSKERFQRSRDVGCYLGLRPRRSQSGDRDPQLGISKAGNIYLRCLLVECANHVLGPQGKDSGLRQWGLHLASRGGKQTRNRAIVAVARKLAVLLHRIWVTQEPYVPFHAVAA

SEQ ID NO: 426408 - protein, 342 aa, unidentified
MEEVSIIGVDLAKNVFQLHGAAADGAVVFRKKLSRLQFGRFMADHPACEVAMEACPSAHHWARELTAHGHRVRLIAPHYVKPFLKRQKNDAADAEAIAEAALRPTMRFVEPKTAEQQARAVVFRAREQLLKQRTEAINALRGHLYEFGHIAPEGIGYLPRLAQVVEDPGSGLPGLARDICRMVLEQVELLTVRLTALTAKIAALSKQAAMPRQLQTMPGVGPIGALAIETFAPPMDQFRRGRDFAAWLGLVPRQHSSGGKQRLGKTSKMGQRDIRRLLVTGAMAVIRWALRRGAPGNPWLARLLERKPPMVAAFALANKMARGIWAMLTRKEDYRDPVSVGA

SEQ ID NO: 426409 - protein, 355 aa, unidentified
MNSSKYIAMDVHKDSISLAVRNAAGKIVMESLIETKASMILQFIDGLRGDLHVTFEEGTSAAWLYDLLKPHVTRVVVCDPRKNKSMREGNQSDKIDARRLAELLRLNHLTPVYHGEHGLRTLKELVRTYLTVTKDVARVMTRVKAIYRSWAIPCSGKQVYARCHRAEWLGKITEPGVRRRAEFYYLQLDALRVLRQDARRDLLAESKKHKAWKRLCEIPAIGPIRAAVLLGILQTPHRFRTKRTLWNYGGLAIEMHSSADYRSVDGELQRSRKNVLVRGLNRNCNHDLKNLFKGAAAVASSKPGPFEEFYAALVAKGMKPEMARLTLARKIATIVLIVWKRGVSFDAQYLKPQTA

SEQ ID NO: 426410 - protein, 352 aa, unidentified
MTVAIVEARAETRAITGGVDTHADVHVAAALDPIGGLLGVREFAATTAGYARLLDWLGGFGTVCLVGIEGTGSYGAGLARHMATAGVRVVEVDRSDRQDRRRQGKSDPLDAVSAARAAQSGRARGAPKGRDGAVEAIRALMVARRSAAGERTRVINQARALILTGPDDLRARFTRRTPAALVAGIARLRPRPGDVMGYAVRIALRELGRRAEFLDGQLECLDELIAPLAAARAPGLLALYGIGPHTAALLLIAAGDHPGRLRSEAAWAHLCAVAPIPASSGKVTRHRLNPGGDRQANHALWRIVFTRMGSDAATRAYVERRMKEGKSKAEIIRCLKRYVAREVYAHLRPAAG

SEQ ID NO: 426411 - protein, 321 aa, unidentified
MQTNNAVVYAGVDVAKATLQLHLQGQQSEFRNTPKGLLQLVAQLQTVPSVQVVCEATGGYERALVKVLHQGQIPVSVTNPARVRAAAQAQGQRAKTDRIDARGLTDYGQRYQPKTTPPVSATQEQLVNLTQWLKQLIHGRALAKTQSEHHQNPFVRRQHAKLMTHLDSQIEAVEKQIEALLEQDAALQQRVTCLDKIQGVGPRTAWMVLAHMPELGQLNRQEVAALAGLAPWTRESGTMKGMRCIGGGRPEVRLALYMAALSAARCNPVLRILYKRLRAKGKLPKVALTAVMRRLLTYMNHCIKALPSETAGARTEELKAA

SEQ ID NO: 426412 - protein, 345 aa, unidentified
MTRFVGLDVSQRLTAICVVDETGRRLWRGQCATDPGQIERTVKGQAGEDARIGVETGPMTPWLVHELRARGLNVVCLDARHASAALKMQMNKTDQNDAEGLAQIMRTGWYRPMHVKSLDAHRARALLGARAQLVGMATRLSNHVRGVLKTFGLLPGAMRGLPFDRRIEELLADRDDLAPIVRPMLAAWRQLREQVAAFDKAVRALAKADPTCRLLMSVPGIGVLSVLAYVSTVEDPARFARSRSVGAHMGLTPRQYQSGEVDRSGRISKCGDTLARTLLYEAAVVILTRVKRASSLKDWAQAIAKRSGPGKARVALARKLSVILHSIWRSGEPFRWSEQEQIQAA

SEQ ID NO: 426413 - protein, 429 aa, unidentified
MGFMSEIEVMGQEPQFAALVGIDWADQKHAWCLQAAGTTQRESGEVEHTPEAVEAWVGQLCQRFGNRPIAVAVEQVKGALVFMLSKYELLHLFPVAPAMSASMRDALYPSGAKDDPRDAELLLDLLMKHRDKLRRLAPDSEATRRVQNLVEERRNLVDEKTAQTNRLTNHLKIYFPQMLGWFDRLDTELVCALLERWPTLEELQKVPPARLRTFFRKHRCRDQELIERRMVGIQQAIPATRDKAVIEAKSAVVKVSAQLIRSLARGIADLDRKIEEAAAAHPDFFIFESLPGAGAALAPRLLVAFGSQRERYANAEEVQAYTGIAPVTERSGKKKWVHFRWACPKFLRQTFHEWAGHSIAHSQWARNYYQQQRERGKGHHAAVRGLAFKWIRIVFRCWKDEVVYDESRYLAALAKRNSPLAAVAAGTIL

SEQ ID NO: 426414 - protein, 411 aa, unidentified
MSASEYQFFVGVDWGSETHVVCVLDCDRRPIAERSVPHTGMGLNDLADELMSLASSEPGRVAVAIEVPRGAIVDTLLARGIHVFSINPKQLDRFRDRHTVAGAKDDRRDAFVLADSLRTDRPAFRRVQPDHPRVVELRELSRIDDDLGQELRRLSNRLREQLHRFFPQALTLCPAADEPWFWALLDRVPTPAHAQRLPVKTVAAVLKVYRVRRVTAETIRDTLQTSALHVAPGTVEAASAHIALLLPRLRLLQEQRTAVAGRIEALLEELGKEEVPGEHRDVTILRSLPGVGRVVAATVLAEAARPLAERDYQTLRAHGGIAPVTRQSGKRVSISMRYGCNPRLRNAFYHWARTSVQNDPHCRAHYDRLRQHGHGHARALRGVADRSLGVLVAMLTSRTLYDSERRREIAS

SEQ ID NO: 426415 - protein, 462 aa, unidentified
MPVQKQPKKSSQKSGQQSALRLLNPNTAGIDIGATMHYVAVPPDRAEAPVRGFGTHTADLHAIVAWLRQGRITSVAMESTGSYWIALYQVLERAGFTVLLCNARQVKNLPGRKTDVADSQWLQQLHSYGLLSGSFRPADQVCVLRAYLRHRDNLTRACGAHIQHIQKALIEMNLKLHHVLSDITGLSGMAILRAIVAGERDPHQLAALRHERVKKSEAEIVKALEGEYRDEHLFTLRQALELHDCYLARIAECDQAIEQTLRGWEKKLDASAAPLPGHARRKTAFAQGQYELRTQLYALTGVDLTTLPGMEVLSVQALLSETGTDMTRWKSEKHFCSWLRLCPDNQITGGKRSRSKPHRGHNRAAQILRLCAQSALKSKSALGAFGRRLRARMDAPRALKALAHKLARLIYRMLSAGLAYKDIGEHYYEERYRAHLIARLQKQAAHFGFHLAPQPATETSVS

SEQ ID NO: 426416 - protein, 385 aa, unidentified
MVKGSIVDTSFGEASVANRAERRGRREIGRVLVHETVTERDPRCHCGTNPNSRRNRRPTGPTSSYLQDWEKTMQEPLFIGIDVAKDTFHIASCPRLINISLPNSSTGTKQLIKTLQPHSISLVVLEATGGYERPIVAELLEANLKVVVASPRQVRDFARGIGEFAKTDPIDAAVLARFAQVVQPKPKPPSSPQTDELADLVRRRRQLTDLRVQELNRSHTVLHPRVRKSVRKMIKTLDYQIAELDELIEQQIKSDDDFRKKDEILRSTPGVGPHTSATLLSQLPELGQLNRQEIAALVGVAPYDFSSGRFAGKSRIWGGRKDIRCVLYMAALSAIRCNLAIHRFANRLREKGKVFKVVITACMRKLLIILNTMLRNQTLWHPEKI

SEQ ID NO: 426417 - protein, 373 aa, unidentified
MNYSTVYVGMDVHKETFSLCCYTNEKEQAEYSQKVDGHYSKVLNYLEAMRFHYGDDAVFICGYEAGCLGFTLYHQLTSHNVKCVILAPTTMPKPAGKKKVKTDKRDAALIARCLAHRDYSPVHIPTEQDEQVKEYIRMRQDHKLALKKVKQQILAFCLRHNYRYDATKNHWTQAHLQWLRSLKPDGLYQEILSEYLSSYDQLTDKLERLDRRIEELAAQPEYQEKTRHMSCFLGIKTQTALSTLVEVGDFKRFASAQQFASYLGLTPGEDSSGGDQNRLGITKAGNSHIRTLLIETAQSYTRGQIGYKSKTLKARQYGNPADIITYADKANERLRRKYYRMVLNQGKKANVAKTAVARELACFIWGMMTGNTQ

SEQ ID NO: 426418 - protein, 427 aa, unidentified
MCGCVDDSRLEQFRQFRKEVRGSNDYLIVGIDVAKDKHHAFFGTATGKTLLRRLIFDNTIEGFNKLLDQTKAIQVTHKLKKVVFGLEPTANYHKPLGEHLIRCAKMVVLVSGVSVKRNRGLLDGRWDKHDDKDAANVADLISQGKCQFYEYPVMGIRDLRDLLMLKRKLRKQEHGYQVRIRNQLIAQFFPELDRYSGYAETEAIVRWCLDPSEIAGLENDQFETIVSSGKQTLAKKKRLDDIKKLAIASIGCQMGEGANFDAKIMVEGLRYIRKAIKATEDKIEETCQQFREYSCLLTIPGFGPDVSSKVLGALGNPHRFFNQKQVLKTAGLDLSANRSGKTSKNAVPVISKQGKADLRYALYQAAWIATTRNKNFMAYFAEQLQGREKEKGIKTKRWVKLSAKLLIIAWTLMKKQEAFDIRYLSQV

SEQ ID NO: 426419 - protein, 349 aa, unidentified
MSRPLSNAIAVIGIDIGKNSVHVVGQDDRGAIVLHQKWSRGQAEARLANLPPCLIGMEACVGAHHLSRKLKALGHDARLMPAKYVRPYSKGQKNDFRDAEAIAEAVQRPTMKFVATKTADQLDLQALHRVRERLVSQRTGIINQIRAFLLERGVALRQGLRFLRVELPRILTTPPDVLSPRMVRVIEGLAEDWRRLDERINHLSDEITTLARQDVGCERLMSVPGVGPIISSAMVAAIGTGDVFSKGRDFAAWLGLVPKQTSTGGRTILGKISKRGNRYLRVLFVQAAWVVLIKPQSWDRHGLKPWIEAAKKRLHHNVLAIALANKLARIAWSVLAHDRSFEASRLQTA

SEQ ID NO: 426420 - protein, 389 aa, unidentified
MLDHLSAGPAAIRTHFGAIFVSLDMGRSKWIVTSLSPETGERMSQHTIPAGDVGGLLALFADLRHRAKARSGLDYPVVTIQEAGLDGFWLHRVLEQEGIESHVVDAASIATPRRRRRAKTDKIDGEALLRALLAFKRGEPRVCAMVVVPSLEEEDRRRLCRERQTLLAERGAHTNRIKGLLFAQGVFDYEPIRRDRRKRLDDLRTGNGRPLPPHLRTQIKRELDRLELLLDQIKAVEVEQQALLASQVSRSEPDTSAANVVAMLLAIKGIGTQAAAVLWVEGLCRTFANRRQVASYAGLAATPWRSGAVVHEQGLSKAGNPRLRTLMVQLAWLWLRHQPQSELAKWFRARGERGRKGLIVALVRKLLVALWKYVAHGITIEGAVMKPAV

SEQ ID NO: 426421 - protein, 412 aa, unidentified
MDVLVERCAGLDVHRDSVMATVRLPGTRRRQREQHKRAFASTTAELHALGDWLQGFGVTLVGMEATGVYWRPVFAVLEPRFQCWLINAQQLHNVPGRKSDVIDSAWLCQLLEHGLVRPSFVPPPEIRRLRDLTRLRRAQIEERTRAIQRLEKVLQDAGIKLTSVASGTYSVSARAMLEALLAGVSDPAELAELAKGKLRAKIPRLREALAGRFDLAHHGVLVAQLLGHIDSLDLAIANLDARIAQETEPLTELVELICTIPGVKLRTAQVLIAECGIDTSVFPTVAHFASWAGICPGTNSSAGKRSSGKTRPGSKWLRQALTESAKAAARSKGTYLASHHWQIRGRRGEAKAIGATRHDILVAYYHIVRDRVPHRELGPDWLARRYSPEHRARRLLRQLEALGFNVSVEAAA

SEQ ID NO: 426422 - protein, 387 aa, unidentified
MIYLGIDVAKNSHVAAAMSSEGEVLLMPFSFANSANGFTLLREKLNSLPKLPLLVGLESTAHYGENLIYFLCGNGYHVAMINPLQTAAIRKSAIRKTKTDKVDAFVIAKALMMEGYTELQQADIQILKLKGLCKTRQNLILMRTRCKIQLASFVDQLFPELNQFFRSGLHINVSYTLLKAHPRPAEVCSLHLTYLSNLLRKASRGKYKKEDAIRLRELARNSIGTDSPALALQIRQAVSQIELFSSQLKQVENEISTIMNSLDSPIMTVPGIGHLNGAMILSCIGNIQRFSSPAKLLAYAGLDPAVVQSGNFSAKNTRMSKRGNSMLRYALINASHNVVRNNETFAQYYNSKIAQGKSHYCALGHTAHKLIRIIFTLLTNNIAFDLA

SEQ ID NO: 426423 - protein, 353 aa, unidentified
MFSNHSKDRGSDMQITTYGVDLAKRVFQLHWVEAQTGEVKRKTLMRSEVSEFFAQREPGIVAMEACGSAHHWARMLKRLGHQVLLVSAQFVRPFVKTNKTDAADAQAIWEAAQRPQMRFVAVKTVAQQDVQAVHRVRAEVSKQRKAKGNQIRGLVSEYGLVAPKELVHLRAAIPTWLEDAENGLTGRFRRLLNALWHDLRALDQRMLELDREIALIAAADPVVKRLQQLRGVGPVIATALVATVGDVKQFANGRQLAASLGLTPRQNSSGGKERLLGISKRGDAYLRTLLVHGARSALRTAKNKEDRLSRWVSRIAATRHYNVAAVALANKTTRIAWAMMKNGTEYEPDRAAA

SEQ ID NO: 426424 - protein, 333 aa, unidentified
MQNFYFIGIDVSKKKLDICVMSNSKVLKEEQVSNHPQAIATVIAGIKEELSMSNDCFIICAEHTGQYTYPLICACKSVGSKLWLENASQIKYCSGVTRGKNDKVDARRIAEYAMRFFDKAKPYQRPIEELMRLKQLEAERSLYLTDLAKYKAQLSDQEGFMEDKIFKRKAKRLKEMIKSLEKTLKEIAQEMADVIYSSEELSRQMRLFKSVEGVGPVVAMNMIIATEAFTRFDNPRQFNCYVGVAPFAYTSGSSQHSRNRVSQRAVKYIKCLLHMAAVAIAHKKTGDLKTYFERKVAEGKNKMTVLNAVRAKLVARMFAVIRNNRVYQPILSV

SEQ ID NO: 426425 - protein, 387 aa, unidentified
MIYYIGIDISKYKHDFCIISNAGELIVENYSFLNNKIGFQCLLEHLKPYNKSDVRIAFEATGHYSLNLELFLINNGYTYIKTNPLIIHQFLKARSLRRTKTDKADSLTIAKYLMSVPYEPNSDLLYNIFTLKSLCRSREFLIKERSKFAIMLTNELDKSFPEIKPFFNNMFSTTLLYILEKYTNTKHIATMKDYESIRKISHGKFTYAKFTKLKELAKNSIGFHNENSDLLISTYVSLYKDFSNKIDPIEKQISTIIKVLNPRMLTIPGIGELSAASILSEYGDIKKFSNPNKMLAFAGLEPSISQSGTLESNGKMVKHGSGHLRYTIMNSAMTILKFSPEFYDYYLKKRSEGKCHRVALSHVCKKLIRVIYSLEKNGFDFNPSLLK

SEQ ID NO: 426426 - protein, 411 aa, unidentified
MLKIAYPVCCGLDVHRDFVYACIASTDEHGVTTYKSNRFSTYTKGLKKLSEWLADNNCSDVCMESTGKYWIPVYNVLEITCKVVLAHPKYVKSIRGKKTDKKDAKWIADIFKLDLVNGSFIPPPPIRQLRDLIRYRFKLTSYFTGEKNRAQNCLTVSNFKLDDVFTDVFGKSSSAIIKQILEHPNEPFDVSQFLKKGCKTPIEEIQAAVDGVICPEQAEKLRIIRAHLQDLDKAKANLESAILTVAQQFISQINLVSTVPGIKSFAAVAIIGEIGVDMSVFPSAKHLCSWAGLTPQNNESAGKKKTTRIGRAGAYIKPLLVQCANAAVKSDKHPEIKNRYLKLKKRRGHKKAIIAIARMLLTAIFNILKKNEPYNAELYKKSDTPPKNLSVSLDYAIRVLQSKGYAVSPPG

SEQ ID NO: 426427 - protein, 343 aa, unidentified
MNEVITIGVDIAKSVFQVHAVDAAGEPVIRRQLRRRQVLPFFKKLPPCLIGIEACATSHYWAREIAKFGHEVRLMPPRYVKPYVKRNKNDAADAEAICEAVTRPNMRFVPIKTPEQQSVLMLHRTRQLFVRQRTSLINAIRAHMAEFGIVAGIGRNGVEVLLKRIAEGKDDRLPAPALECLMALAMQLDLVKRQILEADRRVLAWHRSSETSKRLEAIPGVGPLIASALVASIPDPSVFRSGRDLSAWIGLVPKQHSTGGKERLGGISKAGNRYLRTLLVIGALSVIKRAKQLGYTHHPWLVSLLGRRSVKIAAVALANKIARIAWAMMARNEKFEPSRLSPT

SEQ ID NO: 426428 - protein, 346 aa, unidentified
MLYAGLDLSRKRLDFHLLDGEGATVERGATPPDADGLHRLSERVARHGAPVRAAIESMNGARFVHDRLELAGWQVEIADAQKVKGLAPLACKTDRIDAWVLAELARRDLVPAIWLPDPLVRAERERARWRLHLVHHRSSLKQRVHAVLLTHGKPCPVSDLFGVRGRQLLARLGLPEPWQGTIEASLRLIDELDREISDCERELRRLGAEHRYVPLLLTVPGISWVLAYTIAAELGDINRFPTPRKLAGYTGLCPRVYQSGERDLRGPLAKQGPRYLRWALVEAATHACTHPIYRQRYTQTKARIGRQRGAKVAQIDLARRLSEAIWHMLSRNQPFAPKGATDPLAA

SEQ ID NO: 426429 - protein, 337 aa, unidentified
MKNASSEKVFKDCLGIGIDVSKADLAVVGMTPSESYFKSVSNDMKAIKAFMQRLHKSGYQGKLICESTGHYHLKLALVCHEIGLELIVLNPLQSSKHSKAKIRKTKTDPQDAYMLATMCITEPDLPQAAQLTIPKVLIRLKMGQLASIEKHLQQLQQSLAQYEETYKGLDLELSVYQQALRDHCNSLKRLRKQMEKDLEGLLSQAVADDERLDDLQSLPGFSKIVAGLVGTFDRQVKGAQSWTAYVGLDVSVRQSGTWKGRGRITKRGNAYMRKRLFQAAWGACLNYDYVRAYYDRLKLQGRKHVEAVCIIARKLLQIAYHIVVNKVQFDPKIAFPG

SEQ ID NO: 426430 - protein, 418 aa, unidentified
MSEELIASLSRRYMALDIHKHYCVVAAVNREGQEVLQAVRVEHQDLEAWLKKNLRVSDHVVIESTTNAWHVYDLLEPLVERVLVANPIKVKQIAYARVKTDIRDTLILARLLAANLVPVVWVPPLHVRQLRQLLSQRRQMVETHTQIVNRMHSVAHRHHLSHPKGKRFNEKNTAWQKDKILSQLEQFQLGLEMENRAYIEKQINKIGKEITKMSHHKPWAEGMTYIMQLPGFGVITAMTVLAAIGEIGRFETPKKLGSYSGLTPGLEQSGTKNRGKGITKEGRRELRWALVEVAQRAVKSDPLWKRRFQELQHRMHRNQAIVVIAHRLLELVWYVLTRRQAYRHFSQERIAYKYLTWGWQMDDEARDGLTRQQFARYYLMRLGIGHDLTRVALNPKYPRRLASEAELLALRPELKQIE

SEQ ID NO: 426431 - protein, 366 aa, unidentified
MATNISNHKQEKNHNSSLKNSYVGKRVFVGIDVHKRTYSVVTVVEGMVVKKWRTVASPEKLAQQLARYFPGASIKTAYEAGFSGFVLHRVLETAGIHNIVVNPGSIEVAIHNRVKTDKRDALKLATLLEAGRLKGIRVPSLQQEQQRLLTRTRQQLMEERSAIKNKIRMKCHQMGLIDPDDTREMSHKLVVEMLARTPGPEFSLIIEAYWSIWKSIETQMNKIEQKLKEQAQVDPNETIYRSAPGIGSLSARILSNELGDLRQFTNERQLFSYTGLTPSEFSSGDTVRKGHITRQGNKRVRYILNQAAWRAIKKDRDLKEFFERLAPRTGKKRAIVAVARKLIGRIRAAFKNRQPYQMNPISLESA

SEQ ID NO: 426432 - protein, 393 aa, unidentified
MICVGIDVAKDKHDCFILSSEGAILADVFTIPNNAEGFDTLLHTIRRCARPEDKIKVGLEATGHYSYNILGFLLNKGLPTFVINPLHTNLYRKSLSLRKTKTDRVDARTIAAMLMSDVDLKSYTDTAYHNEELKSLTRYRFDKVRERAKLKQSVSRLVTILFPELEKLVPTLHMASVYALLSEFPGAKQVAEAHLTHLKTVLSDASKGRYRRDMATTLRDTARCSIGSVMPAKSLELRHTIRLIHELDAEIEDIETAIQSIMYEIHSPITTIPGIGVRMGAMILAEIGDFSRFDSPDKILAYAGMSPSTYQSGQLSLSGTYSHMEKRGSRYLRYALYNATKYVCLWDPTFAAYLSKKRAEGKHYNVALSHAAKKLVRLIFAMEKSQQSYRSAA

SEQ ID NO: 426433 - protein, 345 aa, unidentified
MQIKSIGIDLGKTTFHLVALGSRFQVVIRKKFSRTQRLEYRANLPSSLIGMEAGVGSHFLGRALREQGHEVRLIPAQFVRPFVKSNKNDYRDAEAIAEAVERENMRFVPIKTEDQLDLQALHRVRDRLVARRTSVINQIRAFLLERGICFRKGPASLRQQMPEILENADAKLSPGMRRLLDFLWQEWKGLQLQIESLNTELEQIASSDPSCVRLQQIPGVGSLVSTAVVSAIGNGAAFKKGREFAAWLGLVPRQWSTGGKAQLLGISKRGNPYLRKMFIHGARAAVLRVKREGSSLGMWMSGLETRAARNVVIVATANKLARISWAVLASGNDYQPLHKAAIFSN

SEQ ID NO: 426434 - protein, 414 aa, unidentified
MERLYTCCAGLDVHKQTVVACLLHPDGATERKEIRTFGTTTAALEELRDWLTAAGCTHVAMEATGVYWKPIYHVLEGQYELPVVNAAHMHAVPGRKTDVRDAEWIADLLQHGLLRASFIPSREQRALCDLTRTRTSLIDERSAAVNRVQKVLEDANIKLASVATDIMGTSGRDILAALIGGETAATAMADLARGKLQRKHEALEQALRGRMSDHHRMLIALHLEHVDLLDEQIDRLSAEIAERLRSSEVVLLCLETIPGVGRRTAEILAAEMGLDMSRFPSAGHLASWAGMCPGVYESAGRRKSGKRREGNKALRRALTEAAHAAARTKKKDQTYLRGQYRRLVVRCGKKKAAVAVGHTILRIAHHLLVQETTYQEQELVYLDERRRARTQQRALDQLKALGYEVTLTPKAPAA

SEQ ID NO: 426435 - protein, 367 aa, unidentified
MKQQTSATSETLIKDRTIIDFTGKTIYVGIDVHQKDYQVAKVYDGIYLGNHRMAANGDLLINHLHSRYPGAEFKCVYESCAWGFNLQRKLTAAGMQCMVVHAADVSTSDKERKRKTDKVDALKLARNLAAGELKAIHVPDETIQKERNLIRYRAKLVGDINRSKNRLKSLLKYQGIGIPAQYAKNNWSRNFLVWVEEQATKDKLLGDTLLLMLEQMKLLRQLLLKTEKKLRELRNGKYESKVKLATSVPGIGPTTAMLFLLEVGNVRRFKGFDALNDFVGLCPDTNSSGETARDCGITARRHKQLRSAFIEAAWQAIRIDPVLMNSYQELTKRMRGTHAIIRIARKLLRRLRAVLLTGVEYQIGVVA

SEQ ID NO: 426436 - protein, 410 aa, unidentified
MEVILGCCAGLDIHKDSVEACVRRTSAGGKVEHEVRHWGTTTRELMEMSDWLSSLRVTHVAMESTGVYWKPIFNILEERFEILLANAQHLKNVPGRKTDIKDCQWIAQLLQHGLLRGSFIPPRSQRELRDLTRQRTQLVDEANRISNRIQKVLEDANVKLGSVASNVVGASGRLMLEAMVAGQDDPAQLADLAKRRLRAKIPQLEQALYGKLTEHHRWMLGLLLDQLKATEQFIARLDERIAEPTRPQLPVLEKLDAIPGVDRRVAEVLLAEIGPDVTPFPTDAHLASWAGICPGNNESAGKKRSGKTTKGSRWLRQALVQAAWAASHKKDSYFQAHARNLMHRRGRKRGLVAVAHSLLTVIYHMLKEGTAYRDLGSQFLDRMRAKHLIRFHVRRLQSLGLQVNLTSETA

SEQ ID NO: 426437 - protein, 425 aa, unidentified
MSSSDVLSSPLDASGFASVVGIDVGSQACVYTVLQPDKRIIVKPTEVANRDTGFVQVHASLSHLGVPPQRILIGLEATSRSSENWYQFLAAQGYVLCLLHPRQTHQFAQQRGLRAKTDRLDAATIARVLLSGEARPGSVPDELIATYRELERLHSQLTDDGARYQNQIQALLVVLFPEFVQVFADPCRPTALALLKGYPSARALVKAGVEAVAATLREVAPRRYGRKTAQQLVALATQSSASGLATDARALSLKILCDQLQHTLANLAQVEHELDQVLDRDMGATGLKSTPEFGRNTVAVLRAELGDVTRFQRVDQVVAYAGLDLEVKQSGKWKGEVKLSKRGSGRLRRVLSLAALRSICLPASAFGAYYQRLVARGLKARDALTAVMRKMLIVAYHLLRSNETYDPTKVCAVAGPPPHTPSSGS

SEQ ID NO: 426438 - protein, 403 aa, unidentified
MNMNAVGIDVSKGKSMVAILRPYGEIVSSPFEIKHTSSNIQSLIEQIRSIEGESRIVMEHTGRYYEPLARELSLAGLFVTAVNPKLIKDFGAHSLRKVKSDKADAVKIARYTLDSWTELKQYSLMDELRNQLKTMNRQFGFYMKHKTAMKNNLIGILDQTYPGVNTYFDSPAREDGSQKWVDFATTYWHVDYVRKFSLNAFVDHYQKWCKRRKYNFSKDKAEEIYGAAKELVPILPKDDLTKLIVKQSIEQLNTASRTVEELRTLMNDTAAKLPEYPVVMGMKGVGPSLGPQLMAEIGDVTRFTHKGAITAFAGVDPGVNESGTYEQKSVPTSKRGSSSLRKTLFQVMDCLIKTKPQDDPVYAFIDKKRAQGKPYYVYMTAGANKFLRIYYGRVKEYLMSLPE

SEQ ID NO: 426439 - protein, 386 aa, unidentified
MQKLNDLSRSPSPLDPDGTLIAVIELSLSSWLVAGIVPGVERQPLKKLAVDESALLKLLHRWREEAAKAGHRIKRIAVAFEAGRDGFWLARWLSAHDIEVHVIHASSVAVSREHRRAKTDRLDTSLLKRSFLGWLRGERDHCKMVAIPTIKDEDAKRPNREHENLVGEQSRIVNRMKAALIRLGIRGFNPKLKKAAGRLEDLRTPEGEPIPPNILAELRRDMERRRLISDQIRQIEAARLERIEQAPGDGPNAMVRLLARVIGVGIETADMLVQEVLARNMRDRRAVARYAGLTGSPDESGIKRREKGLARSGNARVRRGMIQLAWRFLMFQKESALAQWFRARTETARGTRKTMIVALARKLLIALWRLVREGVVPDGVVLRPAR

SEQ ID NO: 426440 - protein, 360 aa, unidentified
MHATTVAVDLAKSVFQIAVADDQWRIVETQRLTRTQFERWFANRSVDLVVMEACGSAHHWARWLNGLGIEVRLLPAQYVRAYVRRNKTDATDAAALLEAARASDIRPVRVKSVEQQALQGLHRIRSLWMGTRTSRINALRGFCREFGITIPQGARTGVEAIGRVLADPRSTVPDLIRHTAGMLLEEIRLLEARITQLERELAAVARHSPACTLLLSVPGIGLLTATALVAATSGDVTHFQDARHFSSWFGLTPREYSSGSSRFLGRISKKGDRYLRMLLTHGARSVLRAAKVAEGAGKDVCGIRRWALDVQGRSNHNKATCALANKLARICFATLRDHAPFDEATRLTKKQSRQSFVMPA

SEQ ID NO: 426441 - protein, 340 aa, unidentified
MQIDVLGIDLAKHVFQLHGASRGGAVLHRSKVSRASLLLAILRLQPRLVVMEACASAHHWARHLLRQGIEVKLISPQFVAPFVKTNKNDRNDAEGIVEAASRPTMRFVPVKSIEQQDIQALHRLRELYVHQRTATINHIRGILAERGVAVAKTPAAFHRAIPTILSADAGEHTANCRCLLVDSLQYLEVIELRIKDADARVTQLMSASDLCRRIGAIEGVGPLTATAVVAAVGDAKEFKNGRHLAAWLGLVPRQHSSGGRSRLSGISKRGDAYLRTLLIHGARSMLRWLGDKRDPRSQWLRELIERRGFNRAAVALANKNARVIQAVLSSDRDYRRPAAA

SEQ ID NO: 426442 - protein, 410 aa, unidentified
MKRDKHIYIGLDLHKFQHTAVIVDCWFEKLGEKTIQNKPTAFPSLLEYVNKYLTEGLTPVFGLEDVGGYGRDLALYLIEQGYIVKFVNSSLSNAERNSYAMTVKNDNWDAQCVADVLIRKLPYLPDATPSDIHWIISQLVGRRNALVKAQTALKNQLHMQLNYHYPSYKDFFSEVDGKTALAFWESYPSPSHLKGATMEGLRAFLLEASNNACSTRKAEQILSLVQADGEVKREYQTSRDFIIQSMVRNISYTKQEIKKMDKELKVTIQKLGMQLETMPGIDTVTSSALIAEIGDIHRFTKSDKLARYAGIAPIKMGSGGKETMKKTKQGNRKLYDIFYNLAVQQVQVCKGSKIPRNPVFYDYYNRKLNEGKSKSQALLCIMRRLVRIVYGMMRNKTAYFLPEMPETKVS

SEQ ID NO: 426443 - protein, 388 aa, unidentified
MIYVGIDIAKLNHFASAISSDGEVLFQPFKFTNDADGFQLLSSHLDSLPDDSFIIGLESTAHYGDNLVRYLVNNGHKVCVINPIQTSTLRKNNIRKTKTDKVDTYIIAKALMLQQSHRFVTTLDINLMDLKALGRFRQKSLKQRTRLKIQLKAYVDETFPELQYFFKSGLHQKAVYALLKEAPSAKDVASMHLTHLAHLLEVASHGHFKKETASQLRVLARKSVGSPDSALSIQVVHAIEQIELLDSQIDHVEDEMTDIMKYLDSVIMTIPGIGYINGGMILGEIGDIRRFPGPKQLLAFAGLDPSVYQSGNFQAKRTRMSKRGSKVLRYALMNAAHNVVKNNSTFKAYYDAKMAEGRTHYNALGHCAGKLVRIIYKMLTDKVEFNLA

SEQ ID NO: 426444 - protein, 392 aa, unidentified
MQVKADRPEAPSAIRSDLGSIFVSLELSRSIWLITSLSPGAGEKMSKHSAPAGDIGALLARLSEFQQKSFARTGRSFPIIVIQEAGLDGFWIHRVLQNEGIESHVVDPASIATPRRRRRAKTDRIDGETLLRALLAYKRGEPRVCAMVKAPTPEEEDRRRLCRERKALIAERVQHVNRIKGLLFCQGVSGYEPLRRDRRQRMGELKTGDGRALPDHLRAQISRELDRLELLLEQIKVVEAERDALFFAAKVAASTPTPAPVTMLLEIKGIGPEFAAILWMEAFFRSFANRRQVAAYAGLAPTPWQSGSVDREQGVSKAGNPRLRTTLIQLAWLWLRHQPQSALALWFKARVAHNGGRFKKTTIVALARKLLVALWKYVTAGVVIEGAVMKSA

SEQ ID NO: 426445 - protein, 422 aa, unidentified
MNTNTNDYAAFIAIDWADQKHVFSLQVAGQTKKETGVLEQKPEVIGPWVAKLQERFKGRQVAIAIEQSRGALIHSLLAYDFIVLYPLHPTTVSKFREAFKSSGSKNDPLDTDQILEILTKHLDLLKPLCPDSEETRLLHRLVQDRRTSVDLRTGHLQALQATLKEYFPQAIEMLNGNLSSRLACDFLKRWPTLEAVQQAKPATIRKFLYGHNLRRPALIEKVLHLIETAQALTKDPAIIESGRRIAQMHAQMIAALNPVIAAYDQRIEEVFHNHSEVKLFSGIPGAGAAMAPRLLAFFGTDRTRFESAESVQSFSGIAPVTKSSGRSRIVYVRCACPKFARQTFHEFARLSVGFCQWASNYVEYYTAKGKKYHTIIRALAYKWIRILFRCWKTKTPYNDTQHLEMLKKRGSIFATLHLKPTP

SEQ ID NO: 426446 - protein, 378 aa, unidentified
MNRIIKIGMDVHTTNYTLCIFEPSFEHDGTVHCITQVKPEVKNIIHVIETFKKKHENEELNIVCGYEAGCLGYSLYHELKEKGIECAILAPTTMKTEKGGRKLKNDYRDAKMIAECLAYGGYSAVHVPTELDNSVKEFIRMRDDIKENLKSIKQQIIAFLTRNGKQFEGKSYWTRKHIDWINTVSFSEPLLQDTLNEYMIEYNHLCDRVEILDRQIEEISLKEEYVEKVQQLQCLIGIKTHTALSLIVETSDFNRFKKGNMYSAYLGLIPGDDSSGGHENKVGITKAGNSHLRRLLVEAAQGYTRGRVGFKSKDLKSRQEKCSSEVVAYADRANERLRRKYYRMTLRGKKYNVAKTAIARELACFVWGIMTDHIDLCS

SEQ ID NO: 426447 - protein, 331 aa, unidentified
MKNYLNSVGVDISKSFFDAVLFLSGEHEKFTNEKKGFIHFEKWLKKHGSNSNNVLVCFENTGYFSTNLAIYLTEKHYDYVQEHPLQIKRSIGLRRGKSDKADATDIARYAWLNRENLRLSKAPSKILLILQQTKTARDLLVKQAVAIKNQLKGLEVVGDRQIYGIACKSLNRVLSTIKKQILKLEGEIREKINQDEELSAKFKLCRSVTGVGLILALEMIIHTQNFTGFSEWRKFAAYSGTVPYPYQSGTSIKGRARIHPSSNQRMKSLLTMAAIAAIRVDPELRQYYKRRVEEGKPKMSVINMIRNKMLARIFSTVQRGTPFVTMSKFAA

SEQ ID NO: 426448 - protein, 409 aa, unidentified
MNTGTITAVGIDVSKHKSTVSARRPGGEVVLLPFDVEHTAEGLKKLITKLRQLDGEIRIVMEHTGMYWRPIAMTLKEAGFYVSVVNAILIHNFSDNSIRKVKTDRADAMKIANYGLTFWIYLQEYAGEDENRQLLKIQSRLYERTATTAGMLRNGLISLLDQTFPGANKLFRDDSRNSRGHVKWIDFVLRFWHKECVAALSLATFTDTFQKWCKRTGYKFSASDAERIHAIARNAVATLPKNDSTKLLITQATNSLNAIYDSLQAIRTEMDRLASMLPEYELVMGMEGIGKVTGPQLMAEVGDVRRFSHKGALVAYAGVDASPYQSGSFDSKSCHVSKRGSPHLRRVLFVIMSMTLIRANTANPVFCFMDKKRAEGKHFYVYTVAGSAKFLRIYYAKVKEYLNALEETA

SEQ ID NO: 426449 - protein, 402 aa, unidentified
MNAVGIDVSKSKSVVAIMRPFGEIVSTPFEIKHTASDIHSLIELINSVEGESRIVMEHTGRYYEVLAHQLLEANLFVSAINPKLIKDFDNDSLRKVKSDKADAVKIARYALDKWQNLKQYNVMDELRNQLKTMNRQFGFYMKHKTAMKNNLIGILDQTYPGVNTYFDSPARSDGSQKWVDFASTYWHVDCVRKMSLNAFIDHYQNWCKRKKYNFSQSKAEEIYEKAKELVPVLPKDAITKLIIKQAVDQLNSASTTVESLRTLMNETASKLPEYPVVMAMKGVGTSLGPQLMAEIGNVSRFTHKSAITAFAGVDPGVNESGTYEQKSVPTSKRGSADLRKTLFQVMDVLIKTHPQDDPVYQFLDKKRAQGKPYYVYMTAGANKFLRIYYGRVKEYLASLPES

SEQ ID NO: 426450 - protein, 337 aa, unidentified
MDQQQQYVGIDLHRRRSVIVRRNEAGQTLETVRIDNHPVALAAELAKAGEHPEVILEATYGWYWAADVIQECGANVHLAHPLGNNWGHRRVKNDERDATDLVDLLRMGRLAEAWVAPPPLRELRELIRYRGKLVHLRTSLKAQVHAVLAKEGVTVPMSDLFGVSGQVLLDKVHLAEAYRVRVESLRDLIDSVNREIAMLEEHSAPYFAGDLGYHAVQAIPGVGPVLAAIFVAEIGDVSRFTSARHLCSWAGLTPTHKESDVTVHRGHITKQGSRLVRWAAVEAVARQRTDTPIRRHHRNVGERRGTQIGRVAAARKLLILVYYGLRDGEIRCLAQTG

SEQ ID NO: 426451 - protein, 312 aa, unidentified
MDTPTVGIDVSKDSVAVAVHPSGRTWQSPTTPEGVEALMRALHAEAPTLIVLEASGGYEAPIVAACAGAGLPVAVVNPRQVRAFAHAIGQAAKTDAIDAQLLALFAARVAPTPRPLPDADTQALAALIARRRQLLEMLGAERQRLAHATTARIGRDLTAHIRWLEHRLRDTDQHLQRTIEASPVWRAKEDLLRSVPGIGPITARTLLADFPELGSLPRRQAAALAGVAPFNRDSGRWRGYRRIGGGRATVRAALYMAALVASRHNPTLRAFYQHLRTAGKPAKVALVAVMRKLVTILNAILCHDRPWVPTPA

SEQ ID NO: 426452 - protein, 346 aa, unidentified
MLHVGLDLSRTRLDVHVMDAMGAPVLVTSAAPDTGGLASLVSRVGEFGQPVTAAIESMTGARFVHDQLELRGWQVEIADAVKVKGLAPLAAKTDKIDAWVLAELSRRDLVPAIWLPDPAVRAERERARWRLHLVRHRTALKNRIHATLMAFGHPCPVSDLFDVAGRRLLAGLELPEPWAGDVAAALRLIDDLDTEIDGCEAALRTAGADHPYVPLLTTVPGIGWVLGYTIAAEIGDIARFDSPKKLVGYTGLCPTVYQSGRTDHRDSLAKNGPKYLRWALIEATTHAARHPVYAERYQRTKTRLGKQRGPKVARVDLARRLAEAIWHMLTTNKPFAPAGAATALAA

SEQ ID NO: 426453 - protein, 453 aa, unidentified
MSRNRQPRRDELPPQLEQVNLNAAGIDIGSEFHFVAVPPDRDKQPVRRFGTFTPDLEALADWLQACGVDTVVMESTGVYWIPLFELLESRGFEVLLVDPRRLKTVPGRKTDVADCQWCQQLHTFGLLSGAFRPAEEIAVLRSYLRQRAMLLQYAAQHIQHMQKALQQMNVRLDKVLSDITGLTGMMIIDAILAGERDPQKLAELRDERCKKDEETIAKALQGNWREEHLFSLRQAVLLYRAYHTEIQECDRKIEQHLSTMTDKSGGTTLPPKPRLRTRHRNEPAFDSRNAVHRMTGVDLTRIDGIDGHTALKVISEIGTDMSCWKTVKHFTSWLGLCPGNKRSGGRNISGRTKPCANRAARALRLAAFGLHRSQSALGAFLRRMKARLGAPKAITATAHKLARLIYFALTKGMEYVDKGAAWYEAQFQKRLLNSLQTRALQLGYVLVPKTPAD

SEQ ID NO: 426454 - protein, 389 aa, unidentified
MERPFSCLPNRPIGVQANEMVAPSQNGIKVPKWNILINHKTKEATKMKITTIGVDLAKNVMQVHGVNERGEPVLKKQLRRHKVTAFFANLGPCRVGMEACGSAHYWARELERLGHEVKLMAPQFVKPYVKSNKHDAADAEAICEAVGRSNMRFVPIKDTEQQAVLALHRARQGFVKSRTAQANQIRGLLGEYGIILPQGISHIGKRVPELLEDAEKGLPDTFRALLARLAEQLKILDQQVGELEAEIERWHRANEASLRLAQIPGIGALTASALVASIGDARQFENGRQLAAWLGLVPRQHSSGGKVLLLGISKRGDGYLRTLLVHGARAVMRVVQGQAGETPSWLRQLIERRPANVVAVALANKNARIVWALLAHNRDYQEDYQASAV

SEQ ID NO: 426455 - protein, 382 aa, unidentified
MSYVTSIGLDVHARSITAVAFDPATGEVRSKRFGYAPAEVAAWTLAFDSPKAVYESGVTGFHLVRALRGLGVDCIVGAVSKMHKPAADKRKKNDRNDAEFLARQLAARNIKEVWIPDEECEAARDLSRVLEDVREDLTRAKHRLTHLLIRHGYAFDEIGPDGKRKGKWTRAHWEWIRSIELSEAAARDALDFYVSEVRHIEAQKKAIEKEIADYARADRWRGRVEALRRLKGIETMTAFSLVAEAGVFSRFESARAFSSWLTPSEHSSGERVSRGGIIKAGNTHLRKQLVESSWHYTRATTKRKRDQRGEEVPLAIENHAARGREAPCREAGSLLPARHLPTVRCEAQSSPGGGQRGHRKRALLLGMGCGLHVGRGSRIETR

SEQ ID NO: 426456 - protein, 343 aa, unidentified
MQTVTTIGLDIAKSVFQVHGVDAEGNVVIRRQLKRRYVMTFFRKLPPCLVGIEACASSHHWSRELQALGHTVRLMPPAYVKPYVKRHKNDATDAEAICEAVTRPNMRFVAIKTEEQQSCLTLHRTRHLFIRQQTSVINAIRAHLAEFGIVAPVGRNGVEQLLGVAADASDKRLPEVARVCVAALGAQLRMLKAQILQFDRMITAWHRSSEASRRLDDIPGIGPVLATALVASVADPKVFRSGRDFSAWIGLVPKQNSSAGKDRLGSISKRGDRYLRSLFTTGALAVIRYAKIHGTKHRPWLTALLARRPTKVAAIALANKIARMAWAIMAKGERYKEPAALAA

SEQ ID NO: 426457 - protein, 352 aa, unidentified
MISTQTTAIPKLFIGMDVHKKSWTVHFKTDLFDNKTVTMPADPLSLINYVEKNFSGHQVSCCYEAGCCGYWIARVLKEKRWQVSVVNPADVPRNNKQDWQKTDKIDSRNLCKHLSDGNLKGIFIPGEEQEQLRSLLRRRIHLSRHLRSIKNHIKSQLLYYGIQLPEQYDNPNWSREMKTWIGNIKWKFNSAEESMKSRLKQLEFIWYEELHISSELRAYCRKYYKKDYYLYKSVPGIGGITAAGILSELGDIRRFNRLDELAAIVGLVPGIYQSSENKINLGLTKRSNHQLRSLLVEASWVAVRTDMALQQYYRKHARKEPNKAIIKVAHKLLSRIRAVINSGIPYQTGLIK

SEQ ID NO: 426458 - protein, 456 aa, unidentified
MRTSQRVDPQVKKILPQQFQHVNLNAAGIDVGSEFHFVAVPPDRDKQSVRKFSAFTGNIITMADWLQKCGVDTVVMESTGVYWIPLFELLESRGMKVLLVDPRRLKHVPGRKTDVVDCQWLQQLHAFGLLSGAFRPEEQVCVLRSYMRQRGMLLQYAAHHIQHMQKALHQMNIKLDKVITDITGVTGMAIINAILAGERDAERLAALRNERCQNTEATIAQALQGNWREEHLFALQQALTLYRTYHEQVAQCDRKIQAHLSTFEDKSGGEPLPLRPKKTKRNRNDPALDSRTLMYQASGVDLTRIDGIDGHTAMKIISEIGLDMTPWRTYKHFTSWMGLCPGNKESAGRKMSGRTKPCANRVATILRIAAQTLHRSKTALGAYYRRMKTRLGASKAITATAHKLARLVYFILKHGWGYVDPGQDWYDKQYQERIMKSLQKRAKDLGFQLVPLIQAI

SEQ ID NO: 426459 - protein, 463 aa, unidentified
MRKKESPRNRAENTAVLKQINHNAAGADIGSDTVWISVGEHAAEQPVGKFGTTTAQLRASAEWMVSAGVETVAIEATGVYWVPAYEIYEEYGLNPILISSRAIRTFNGMKKSDFVDCKWIQLLHTFGILQPSVRVESLMIELRGYMRHRKTLTEQCSEQIQRMQKALTLMNVRLDQAVSDITGVTGMSILRAIVKGERDPKKLAELRKPGCAKSEAEIAEALTGHYRDEQVFCLNHSIQQWDFFQRQMAECDKKIEAVLRKMPVKSEPTEVKATRKARKNQVRFDGKTLLEEKLGIDLTQIRGLDALTVLTVISECGVNLSRFPTSKHFKSWLGLCPGTKKSGHRVLSSRSRRTTNRGATALRVAAQSLLRSDSELGAVGRSLRGRIGPQKTVTAVAGKLADRIYLSLKSGRVMEDRGSEYHDLKYRERSIASLTKRARRLGLQLVPVAEKHIQNPSREVTVS

SEQ ID NO: 426460 - protein, 350 aa, unidentified
MTTIAEPRPVVTGGVDTHSDMHVAAVVTAVGGVLGTAEFPTTTLGYRRLSAWLREFGDVDRVGVEGTGTYGVALARHLRGEKVTVVEVMRPNRQVRRRHGKSDVIDAIAAARAVLSGEANSTPKTHDGPVEALRTLKLLQRSATKARTQALNQLRALLVTGPDELRARLRDLSQRELLATCAAFRVAREDDSLAAITRFALRELAQRIQFLSERSREVTLRLKRITEQVAPALTALTGVGPDVATTLLLAAGDNPERLANERSFASLCGVSPVQASSGKTRRHRLNRGGDRQANAALWRITLVRLHCDPRTKDYLAKRVRDGKTKTEAIRCLKRYIAREVFRALPTPARA

SEQ ID NO: 426461 - protein, 344 aa, unidentified
MLYVGLDLCRKRVDFDARRRDGELVERGSLPPDADGLRVLVRRLGDADVVAVIESMNGARFVHDQLELQGWDVRIADAAKVKGLAPLACKTDAIDARVLAELARRDLVPEIWLPSPEVRAERERARFRLHLVKHRSALKNRVHAILIAYGVPSPSSDLFGDAGRRLLARLELPEPWRSTTAASIALIDVLDEQIAVCERELRTLGADHRYVPLLMTTPGIGWILAYTIASEIGDVGRFATPAKLVGYSGLTPSVSQSGERDRRGPLRKNGPNYLRWALVEAAHTASRNPVYQPILERHRARHGRKKGTKTAALTIARKLAEATWHMLTKNQPFAPAGAPARLAA

SEQ ID NO: 426462 - protein, 351 aa, unidentified
MGEYIAFDSHKRYTWVDREDHSTGKSSCCRLEHAPGAVRNYLQGSAAGTGVAVEATGNWYWIVEEIEQAGLRPLLVHPLKAKLMMGLTNKTDKLDAHGLNRLQRNGTLPTVWIPPGALRDVRELTRTRLVLVAQRTRLKNRLAATLAKYGVPAGEMSDPYGKRGRVELEKNLERLPEQTRWVSGQLLAQLDFVGAQVQQLERRLEELVEVTAEMQWLMTMPGVGVILAATIALEIGEVQRFPSAMHLASYAGTTPRVHASGGKVRYGKLRVDVNRYLKWAFAEAGNSVAVNHLRRPERHVSQLYRRLRQRKGHPKAVGAVARHLAEAAFHVLRQKEMYRDPVLGRGRTSEV

SEQ ID NO: 426463 - protein, 348 aa, unidentified
MTMVCGLDLHRRQITFDAMHVESGQAWTGRVWQPDRERFRRWLRDDVAERAHGGPVAMAVEGCTGWRYVVEEVVAAGFEAHLAEPADTQAARGRKRRAKTDRSDCRLLRELLQDGRLPASWIAPTMVLEWRERARLYKTLVDQRSTWVQRIHAELFQHGVTLPETPIRWAKTRELLEVDGLEISPAGRQRVLTAYRMIDAITIESRPLKADLQRFGRRQPGCRALVDNQYGIGGLLAVTLWSELGDCQRFARSEQIVRHSGLDVTVDQSDRRRAGGFISRQGPQTLRWALYEAAKNASHQRSPDHDYYADVKDHLNGKLATISMARKLARRCFHILRAVDPDVVYATP

SEQ ID NO: 426464 - protein, 416 aa, unidentified
MLFIGDDWAEDHHDVELEDEGGRRLARARLPEGLEGITRLHALVAEHAPAGWSELSSEEVAGRVAVGIETDRGPWVSALRAAGYQVFAINPLSVARYRERHSTSGAKSDAGDAHVLAEIVRLDRGHHRAIAGDSELADAIKLLSRAHQTAIWERTRHVLRLRSVLLEFFPAAVEAFDDLAAADALSLLGRAPDPARAAKLTRAQVTAALRAARRHHAEARADAMLTVLRAPGLRQPPVTEGAYAAVVSGQVRMITALNEQIAGLQEVMAGHFGRHPAADIYLSQPGFGVVLAARALGEFGDDSQRFSDARARKNYSGQSPITRASGKKTVVLARYATNRRLGAALHLQAFAALGASPGARAYYDTLRGRNISHHAALRQLANRLVGILHGCLKTSTLYDEDTAWQHHRPDTQTAAA

SEQ ID NO: 426465 - protein, 314 aa, unidentified
MTVQTQKCYVGIDVSKDRLDVFVLPQNTYCTFENKASAIKQLLKEIQKLPEVLVALESTGGYEKPVAYALANASIPVVLINPKRVRDLAKSKGKLAKTDRIDAEMIAWFASDNHPKANVNCDQNQRTLKDYAARRRQLVDMITMEKNRLDKASLAIKKSIRHIIKLLEKELDQVNQHLHKSIESKPLTARKAELLQTIKGVGMTIASMVIAELPELGQLQAKQISALVGLAPMNQDSGRLRGKRTIRGGRASLRQTLYMAALVASRYNPVIKAFYQRLCATGKKKKVALTACMHKLLIIMNAMIKQNKVWAYAP

SEQ ID NO: 426466 - protein, 338 aa, unidentified
MLYTGIDLHKRTVVIATVDEKGKVHSEASLPTSRSAVARYFHGLPEPTTATVEATSSWYWLRDLLEQQDVPLTLAHAKFVKAIAYAKVKTDAVDALTLAQLHRADLIPRAHMVSPELRPLRALLRTRLHLVEKRTSAKNSVQRLLEQYNVPEPLRLPDEATLQASLYAEQIELLGNQIHRIEKRLEPELIPNPDIQRLLWIPGVGKIVAFTLYLEIDGIERFPTVRQFFSYCRVVPGADNSAGKRRHGRRKDGNRYLKLALSHAAIRAVQYFPDIKRFYQRKARQKNPAIARTLVQKELARSAYIVLKEQVDFNHTFKGQPLSKRKASKWPRQASPDI

SEQ ID NO: 426467 - protein, 374 aa, unidentified
MIYVGIDVAKDKHDCFITNSDGEALFKAFTISNNLDGFSELYQKIESVMDDVTKIKVGLEATGHYSYNLLGYLIDKGLPTYVINPLHTNLYRKSLSLRQTKTDKVDARTIASMLMSDVNLKSYSDTSYHNEELKSLTRYRFDKVKERAKLKTSISRLVCILFPELEKLVPQLHMASVYALLSEFPGAKHIATAHLTRLTNLLSESSRGRYGKDTAIMFRDAARSSIGSNMPAKSLELKHTIKLIQELTSEIDEIETKIKSIMDEINSPILTIPGISYRMGAMIIAEIGDFSRFDSPDKILAYAGMSPSTYQSGQLDNCYSHMEKRGSRYLRYALFIMQPNTSVTGMNPLGLILKRNEPKANITMLLYPTPQRNW

SEQ ID NO: 426468 - protein, 349 aa, unidentified
MKIIGCDFHPGYQQIAMLDKNTGEYIERRLTHSNGGEEARKFYGALAGPVLVGLEASGQSQWFERLLAELGHELWIGDAGKIRASAERKQKTDRRDAELLLRLLDEDRFPRIWVPSAAERDTRQLLLHRSKLVRMRTQVKNQLQALALNQGVQRKRKLWSTVGRQQLESLPMLPWAGRRRAELLKLLDELGESIRALDEAVCQEAHQRPAVRRLMTHPGVGPVTALAFALTLGPAERFRRGKQVASYFGLIPSEHSSGGKQRLGHISKQGSSFVRGLLVEAAQSAVRHEPQMRREYQRLSQRRCRALAKVAMARKLAVRLYWMLRDEVDYAQLLQGSYAGQPESSCGRS

SEQ ID NO: 426469 - protein, 354 aa, unidentified
MTLLVIDLAKTKSLACWYQTSDGSHEFRTVDSRPQDFLALLTDRPVDRVVIEVCDMAGWVVDLCRTLGTPIQVANANTEGWRWKNTKRKTDRDDALKMARLSAMDQLPLVHVPQRPTRQWRSLILYRHKLVERRTAIKNAIHAILVSEGMAMSAGGAWGAESISQLGKLARPLEQCSIDQLWQGHLQMELDSLQELEKRIMELETKLNAIGDADPRVIRVQTIPGVGPRLSELVVAMIDDPHRFNNARQIGAYAGLVPRRYQSGEMDRSGRISRAGCGKLRKVLVQVAWGMLRNNPHASGVFNQISKGQKSRRKQAIVAVARRVLCWSWAMLRDQTDWKAPPSLGSAMPRRATG

SEQ ID NO: 426470 - protein, 447 aa, unidentified
MTHRIGPSRGDRRRNARKARLRGLIPREFAIVGVDLADRKQVFAVCDHDGGVHGRRSVNKRAWQLDETLRWAKAAAVEAGFAGVVVACEPTGHRWRVMLDQCDELGLTMVCAPPMLVHREREREDLTPDRSDAKDAVLIAGLAAQLRCYEPERPTAQWARMRHLGARRSELTTACGVVRQRMRSLLECVWPAALATAADPLASMTWRATMAVICARSVDGDPAAIRRMGWPRFQAAVRRELPRWGGHRVTWTIARELWDATTDPTGVMVHRHGALERVADALTDWQRLRVQRGAVEARMVHLLDELNLTSLVTTIPGLSAVGAAAILAETGDPHRFDSGRAVVKHAGLAPRDNESGTFKGTSRVSGRGRPELRLAVWRAVWGALPHNAVLSARHHHLRTREHNRLTDHQARVAVAGSLLRQLHAVIVGGVAWDARTAAGRQEVIAAA

SEQ ID NO: 426471 - protein, 411 aa, unidentified
MDVIYKTCCGIDVHKKKLVACLRKGRKQEIKEFGAKTKDIKLMTKWLVENECEMIAMESTSIYWKPLVNIFEIMDLNYMVVNAKEFKAVPGRKTDILDSEWLADLLRHGLLKASYIPTREQRELREATRYRKVMTEERARALNRLQKMLEGANIKISSVVSDITGKTSMNLIDYILTNDEQMDEKIAETLIISRISASALEIAEAMDGIMTSFQKVLMKEVLIHLEELSKRIEAMDKIIDEYMIEYCEGIKKLEQIPGIGKKSAQIILAEIGLDMDRFPTAAHLASWAGVAPGNNESAGKRKSGRTRKGNKTLKSILTQVAKSSAQSKNSFFHAQYQRIAVKRGKNRATMAVAHSILIAIYYMLKNNEDFHDLGSDYYNQFNTDKKINSYLKKLEELGYKINANSLNQKVG

SEQ ID NO: 426472 - protein, 342 aa, unidentified
MRIVMLGIDLGKNLCSLAGLDETGAVLLRRRMKRASVLPFTAQLEICTVAMEACCGAHHLGRQLVAQGHVVRLMSPAYVQPYVKAQKNDERDAEAIAEAATRPTMRYVEIKSEAQLEVQSLHRVRGRLVAERTALINQLRALMLERGIAVPQGRCKLARYLPEILADERNGLGPRLRQLIEDIREEWRSIDQRIKGYDDELAEQVRNEDTAKRLISIPGIGVLTATALVAAVGNAQTFSCGRDLAAWLGLVPRQATTGGKPRLLHISKRGNGYLRMLLIHGARTALPGLAKKDTPLGRWVKALLARAHRNVVTVALANKLARIAWAVLARDRQYVTVQAIGK

SEQ ID NO: 426473 - protein, 427 aa, unidentified
MSTTQNEKIRQVTETTMVIGVDIASEVHWARAFDWRGLELGKVIHFENSAEGFASFQNWASELSAKAGKDQTIVGLEPTGHYWFTLAASLKETPMKLVLVNPYHVKRSKELDDGNPTKNDRKDPKTIAKLVLEGRYQIPYIPESLYAELRTVMNLRWRILKELTSAENRIQRWLKIYFPEYSQVFASFTGAASIALLKEAPLPGDISALGAGKINALWRKLKLRGVGMKRAERLLKASRESVGCTQGLSAAKLEIRLLLEDFEAKHKQYQEVMAQAEALCGQIPAAAELLKIKGLGLITVAGIFAEIGDVRRFESPRQLQKLAGLALKENSSGKYKGRTQISRRGRARLRAILFQAALPLVKNNPEFRKLHHYYTTREKNPLKKKQSLIAICCKLLRVFFVIATKGCAYDREKLLADIRKNQPQKAA

SEQ ID NO: 426474 - protein, 343 aa, unidentified
MKQFVWVDVGKLSLYIYDAMTSTDVKIKNDFTEIKKFFNKYSGKKEVTVVLEPTWIYFQKLVKVLNDLTIDYFLIPLDVIHNLNKILGEANKNDTIDARKIANYWALIKEHEEKWSYKIRTVKKIPNEVMIIKTTYSQIFSLEKVLTRIKQLKHNTENNAFQKELWYIRDGYDYQIEMMENMIKKLYEEVEHMIEKLWYKAQMETLETCPWVGKKVALIMTVFFIELEHKWLRRWDGKQVRKYSWLSPQQMQSGEVLHKTKISKRGNKFVRYAIMFSAMNWKTHLDYEKRANTTIGKFWLRMKEKFENWNKKWGLSTNCAIASKLVTTLWVMFCDNTLLSGKN

SEQ ID NO: 426475 - protein, 346 aa, unidentified
MKFYTGQHKFYCGVDLHARTMFLCVLDHRGYPLLERNIKTEPELFLKSIAPYREDLVVAVECMFTWYWLSDLCSREKIPFILGHALYMKAIHGGKAKNDRIDANKIAVLLRGGMFPVAYVYPPKMRSTRDLLRRRMFLNRKRSALITHIKCTFAQYNLPEPEQNVSRVSQREGVAEQIPDPGASRNVQLDLDLLAFYDQTLTKLEQELTVIAKDHDPDSYFRLRTVPGIGKILSLVILYEIHDINRFPSVQDFASYCRLVKPAKESGGKRLGSGGAKIGNVHLKWAFSEAAVLFLRKNEPAKIYRARLVKRHGKAKSLTILAHKIARAVFFILKRRTVFEAESFFA

SEQ ID NO: 426476 - protein, 425 aa, unidentified
MSYRIAGIDVHKKMLAVVIADVATAGEYEFQQRKWGANPSQLQALAQWLVDEAVEEVVMESTAQYWRPVWQSLERYWQTERRKREGSGTKSGTLHLAQAESNRARRGRKNDFEDAERLLKRLVAQELVLSFVPDAEQRVWRAVSRRKNQLTQDKVRLRGQLEGLLEEAHIKLTSLVSDLFGVSGRRMLEGLAAGETDAGALASLADFRLRATPEQLRDALGACAELNPVYRGLLQMSLAELKLMEDHIAQLDRQMCRLLEAHHEAVQRIAEVPGLGPDSAQQILAQVGPAAEAFDSAQQLASWVGVCPGREESAEQSRSDRSPKGNRTLRRILNQAAHAAIRVKGSIFEVTFRRLVPRLGYQKTVWAIAHRICRLIWKILHQGVRYQERGPSVSAKSKNARIIRMIRELRSFGYRVDALQTECGR

SEQ ID NO: 426477 - protein, 338 aa, unidentified
MRLYCGIDLHSNNSFIVIIDEDDQVVCRQRQPNDLDVILATLEPYRDELVGTVVESTFNWYWLVDGLEDAGFRVHLANTTAIQQYSGLKYADDSTDARWLAHLLRLGILPTGYIYPREQRALRDLLRKRISLVQLRTSNKLSLQNLSQRNLGRRFSSSELKSLNTEGIQERLDDANLVLAMDSTLQVTACLDQEIQRLEREIRIQTRPHPAFEPLKSVCGVGNVLAQTILLEAGEIGRFPSVGKYASYCRCVGSKRLTNNKFKGKGNTKNGNRYLAWAYVEAANFAIRYYPEIKRYYQRKAARTHRIVALKTIAHKLARASYYVMRDLQPFELKRAFG

SEQ ID NO: 426478 - protein, 369 aa, unidentified
MRDSITIVGMDVHKDSISIALAETGENREDRSLGPIGGTMTALDAFVRRLVSKGIKPRFVYEAGPCGFEIYRHLTKKGFSCKVIAPSLTPKKAGDRIKNDKRDAMALARLERSGDLTEVIVPSEEDEAMRDLTRAREDAVKAQTMARQHLKAFLLRHGERPPRSGRWGRDYMRWVEGISMDLPALQVVLEDYIAAVIAATGRVRQLEEEIERMLPGWRMGPVVKALQAMRGIGPVTAATIAAETGDMNRFSSPRQYMAFLGIIPSEHSTGNSIHRGKITKTGNSHLRYVLIESAKQYIHKARVTRVLMKRQEALPKGILAIAWKAQKRLCKRFTALIMRGKHRNKTAVAIARELAGFVWDLARQVPIAA

SEQ ID NO: 426479 - protein, 319 aa, unidentified
MDKEGAREMAERVRIAGMDVGKQYLVIDSPALGVSVGVTNDTRGHEALLAWCAEHQVAVVALEASGGYERAVAVRLRDAGVIVRCLNPLRVRRFAQARGKLAKNDRVDACTIALYAEAFADERVAVPQDNRRVSLREHLLVRVQTLDIISTIISQLEHIHERSLRAMLQARLQGLKRSLVALDRRIAKLVASTPDLAALADRLRSVPGVGPVLAHTLLALLPELGHLTRRQVASLAGVAPFDDDSGKRRGARQIDGGRAGLRRVLYMAALVAKRRNPEIRTFAERLKGKPGKAIITACMRKLIVILNAIARDGTVWQPI

SEQ ID NO: 426480 - protein, 326 aa, unidentified
MTNSSELIFVGIDVAKATLELALDDNSKTQCFGNDDAGVQAVIAKLKPVANRVAVVLLEATGGLEQRAAVALCTAGFAVMVVNPRQAHDFAKALGYLSKTDSIDARALSHFARTLHGSDRRERLLYKLPTAEQEALQALVTRRSQLVGIRVAEGNRLDTAHASQRKSIQALIKVLDRQIGQIDDDIGHRLKSHFKDKLDLLKGLKGVGVGTQAVLMATLPELGNLTQREIAKLVGVAPLNNDSGKFKGKRTTWGGRANVRSALYMATLSAARYDPTIKTFYQRLLAAGKPKKLALTACMHKLLTIINAVIKSGKPWQAGYPQPSQA

SEQ ID NO: 426481 - protein, 421 aa, unidentified
MEDITEETAELVARVAALDIGKAELTACVRVPHEDKPGRRQQEVRTVATTTRSLLELRDWLICQGVTLCVMEATSTYWKPPFYLLEDAIECWVVNARDVKNVPGRPKTDRLDAVWLAKLAERGMLRPSFVPPPWQRELRDLCRYRRTLVQERTREKQRAEKLLEDTQIKLSSVISDIFGKSGRDMLDALIAGQRDPHVLAELARGSMRGKKSVLQEALTGHFRDHHGYLLAMMCDRIDALTAQIEELTGRIDEAIAPFAHQVAQLDEIPGVGKTGAQELIAEIGTDMARFPTAAHLVSWAKFAPRAKQSAGKSKPAATGKGSPWIAGTLGEAGIGAARTKTFLGSRYHRLARRRGKQRALVAVGNSILTITYYLLSDPAARFTDLGPDWHDRLSPLRRKRQLIAELERLSGKKVLLQEATA

SEQ ID NO: 426482 - protein, 394 aa, unidentified
MKLVGIDIGKNSHHFCVMDKETGEFNVTPSSFSNNKEGFDFLINSLKPYSKKSILLGMEDTGHYHVALLKFLLSNGYTVALINPKTTDLTRKMEGGITKNDKLDTITICNVLDTPERKKQYRITKVDRFDLYEQRQLTRHHHNLKEELNIYCNRLQKSIDLVFPEFNTLFGSKYGVVYMNLLKTFGSAEAIASTDIRTIRKCFEIKGRGGRISLTAEKLKECAKNSIGISSEVETIQIKHLVSQITLIKEQIAEIDKKIEEFSITNNSPILSIPGISHFSGTSILAELGDIGNYSKPSQIIKFAGVAPYHYESSQYNAQHTGITKKGSKYLRKTLYQIILPVINNNPVFKKYYRLKISQGKGHRCAQGHCIRKLLRIIYHLLETGQSFNPALLR

SEQ ID NO: 426483 - protein, 315 aa, unidentified
MYQNFIGIDISKNDFSAIAYDQKKAKFYSNTQSGMAEFFSEYKEKLGNGLVILETTGGYELDLIRFLQQRNCAVHRANARKVKHFIRSFGKLGKSDAIDAAGLAQYGYERHSTLELFEENTRQKLLKLVQRRIELKKMLVQEKNRRQAPGQDGLKKSFDTIIAVVESEIKAIDLDIDAACKADDLLEKQKQALKTIEGIGDITAMQLLALLPELGIINRRKIASLAGLAPHPNESGKKTGYRSTRGGRADIKPILFMAAMTAARSKSRLGEFYMHLVAAGKKKMVALTALMRKILVIANARLRDLGNLNQTPQHG

SEQ ID NO: 426484 - protein, 391 aa, unidentified
MAKVFIGVDPHKLSATIEVVDEQENVLATGRFSTDKTGYAAMRKHVACYPDRVWAVEGSNGAGRPLAQRLLADGEPVVDVPAKLSARARELDTGHNRKTDAHDAHAVAVVAVRTPALRVLAYDAELEALRMLADRRDELSKTRVQAANRLHRLLAELVPGQRKKNITTGQAKTILATVRPRDIAGKTRRRLAAEQITELVAVEKKIKTLTKELKEMVLASGATLMELPGVGPVVAARTLADVGDVARFTDRNRFASWTGTAPIEASSGEVVRHRLSRAGNRRMNHMIHIAATTQIRLDTEGRAYYRRKLAAGKSRREAMRCLKRRISDALYRRLRADAAIGVELAFSTGKFRLSLPQRLLRGLASARRGEAVQPFHPFTGARVRAALPLPR

SEQ ID NO: 426485 - protein, 346 aa, unidentified
MKILALDLGKYKTVGCAYESESGAHQFKRGLTTVAGLAGMVQEIKPDRVVIEICSIAGWVCDLMWGLGVEVQVANTSDDAWRWRKVKQKDDRRDALKAARLSAVNQIREVYVPAIEVRQWRALISYRQQLVRRRTKIKNHIRDLLLREGQLLGRGSSCWSEAGLKQLREQARPFSECGPAELWRGELQVELEQLQEMQRQVATVTAQLNKMGAGEARVQLLRTVPGVGPRLAEAIVALLDQPQRFRKASQVSGYIGMVPKALDSGETERRGHITRQGSRVVRSLLVEVAWAGLRHNAWVRQTYQRLSGGKKARKKIAIVAVGRKLLVKCWAMLRDHRAWDWQPQIT

SEQ ID NO: 426486 - protein, 400 aa, unidentified
MNPVIGLDISKGKSDGQVFLDKGKPFGNSFCFQHNQNGLSQLLDIITNVQDKTGKTPTVILESTGHYHQAVIQFLEEHGILSLVVNPLISHQAKKSSLRKVKTDAVDAFRLCELYYKEEFEDHKQRGVQLLNLRHLTRQFDSLTQMYVQVKLQFQAVLDQVFPDYRGIFGDLYSRVSLRLLKQFTTPEAFQTAGESSIGYVIACLCPSRSERWATDKACRILAAAINNPFQKVNYSSHLISLVLYIDLLLQYQEHLSHLQSQIDALAEEVEAYEIIQSIPGIGSKIAAPILSEIGEIHRFNHAKKLVAFAGIDPSVYSSGKFTATNNRITKRGSKKLRHALYLAVLCGLRKTGTKKLREFYDKKREERKPYRVALIACVNKLLHWIYTLLVKKESFVDIA

SEQ ID NO: 426487 - protein, 429 aa, unidentified
MTTTSTLYVGIDISLDTNQVCVMNFDQHKFFNRSFENSSTSSDELIHDLSSIMNSHDFSHIIITMEATSVYFFHIANKLSNAEELKLFTTQVFCLNAKIAANYKKSFLGMPKNDPLDAYSLCDFARVGRTKSLHEWRGANLVALQRLTRYRYHLASELTREKNYVLNNIFLKFSQLRKKQGKNDDTNPFSDLFGATASSILTDFATLDEIVDMPMDELVEYLDTKGKHRFTDPHEVAVLLKKCANGSYRLDRMAYDAINIAIASSLRMIKTFQREIKDIDQQISDFVKGLHSNDLTILTSIPGIGPVFAAGIIAEIGSIECFSNQNKLAKFIGLTWNEHSSGSFVSEDNELFRTGNSYLRYYITEAANKFKNHDSYYHEFYTRKYNEAKTHKHKRALVLTSRKFVKLIYAMLRRQQLYSETGEVLLITA

SEQ ID NO: 426488 - protein, 361 aa, unidentified
MCPPTLGLEVSQRMLADQLDYVIGVDPHRDSHALAVVHVLSGAIVFEANVAANSEGYAHALELVDQHAVGRRAFAVEGAGSFGAGLTRFLTGRDERVLEVGRLRRERRSGGKTDALDAVRAARSVLAQQKPATPRAGGERQALQALVAAREGAVNAKRAGLCQLRDLLITTPEPLRSELRPLTRARLLHQLAAIRPDGRRDPELRGSMLALRSIARRVLTLTAEERGLAREIETITRKLAPQLLDQPGVGPHAAAQLVLSWSHRGRIGSEAAFARLAGAAPIPASSGQTVRYRLDRSGDRKLNRALHMILVTRKRSHPATIAYIERRVQEGKTRREANRCLKRYLARSLYRLLEHGPLPAT

SEQ ID NO: 426489 - protein, 351 aa, unidentified
MVVVGADVHKHTHTFVAVDAVGRQVGQRTVAATTAGHRKALAWAREQFGEELTWAIEDCRHLSARLERDLLSAGQVVVRVPPKMMAEQRRTARTRGKSDPIDALAVARAFLREPTLPVASHDGISREAKILTDRRESLVNTRTRTINSLLWRVHELDPGHAPKPRSLDLAKHQQALRAWLVTLEGIVAEMALDELEDIIALTGRIKAFDKRLAVLARKHTPALLALPGCGELTAAKLLGESAGITRFHSEAAFARHAGIAPIPVWSGNTAGRVRMTRSGNRQLNAAIHRIAITQARMPGTLGRAYYEKKLTEGKSTTEALRCLKRRLARVVFQLLTTDHNNRQTTAIPAAA

SEQ ID NO: 426490 - protein, 369 aa, unidentified
MKTHRAIVGLDVHKTAIVAAVLPAERERVTETVRIENHPQAVERLVNRVARAGAVEFVYEAGPCGYEVQRQLAGMGYRCAVIAPGLTPVRPGDRVKTDRRDAEKLARLYRAGELTEVRVPAPAEEAARDLVRGREAAVTDRLRARHRLAKFLLRQGRVYRETKAWGVKHRAWLKTQRFEWAPLQQAFDAYVRTLEEAEARLQTLDQQVEDLAQHASYRIPVQYLRCLKGIDTLSALTLTVETQEFRRFERAPAFMSFTGLVCSEHSSGETVRRGSITKVGNAHLRRVLVEAAWCYRHGPLISRQLRERRQGCPATVVQIARKAQDRVRRKFWRLLHRNKPPQVAVVAAARELAGFVWAMAQQFPVAPAI

SEQ ID NO: 426491 - protein, 423 aa, unidentified
MDVMHERVAGLDVHKETIVACVRIMAGGKVTRECRTFDTTTAGLEALLSWLTESGCSQVAMEATGVYWKPVWNILSDGKFELLVANARHIKNVPGRKTDMNDSMWIVDLVSFGLIKASFVPEQEMQELRSLLRARKQLTREQTSHVQRIQKTLEEANIKLDSVISDIVGLSGRRMIEAMINGVRNPWELAELAHHRIKATRKQLYDALHGRLTDHHRFMLRLHLRQYDTLEDAIKEIDQQVDAAIARMDAEVAAGQATFRSLIALLCTIPGVSDLAAKTILAEIGADMSRFPTAGHLLSWAGLCPGQNESAGKRKSSCMRKGSPWLKTLLVQCGWAASRKKDSYYKAQFNRLRGRHGAKKAICAVAASLLTAIYHMLKDGTQHQDLGANHFDRRSTEIKARRLAAQIAKLGFKVELRPLPEAA

SEQ ID NO: 426492 - protein, 354 aa, unidentified
MKRTTKYVALDVHQATTSASVREESGRVIARSVLPTDGAAITEFVRGMRGAVHVALEEGTQAQWLHDLLAPLVDRVVVCDRRGAPRQGNKADQVDADQLSEQLRRGGLRAVYHGSVDRTTLKELTRTYRNLVEDATRVMLRLKALFRARGIPASGKRVYHPRARAQWLAQLQDPGARLRAEALYAELDVLRTLRPRAKAAMVTEARRDPAWPVLRTIPFFGSVRVALLLATMQTPWRFRTKRNLWAYAGLAVVTRSSADYALVAGQAVRRRRPPLTRGLNRNHNRVLKDVFKGAATAATARPGPLQDFYHSVIARGTREELARLTLTRKLAALTLRLWKKGERYDPTKLTTPAR

SEQ ID NO: 426493 - protein, 334 aa, unidentified
MLYAAIDIHKHAFQAAVLDPDSGEVVEERFSADRESLARWAEQWRGRLEAVAIEATTGWRWVWRELVARGFEVRLAEPVQTRALLGRRRSAKTDRLDARWLARLLAKEMLPESWIPPEQIQELRDRTRLRKALAEDRRRWGQRLHAYLLHEGWPCSRSNLLRPPGLRWAAALQLSEHARLQVDSLLAVMAALQEQLDTVDTELRRFAHGDERCQALQSIYGIGPILACHLLAEIGEASRFQRAEQITRLAGLDPVVDESGETRRRGHLAKAGSPHLRWALVEAAVHAHRATAPDLALYRATRQRRDTTVARLTIARKIGKRAFHALRELELTAA

SEQ ID NO: 426494 - protein, 379 aa, unidentified
MKAAAARGQYSEAKETLYLALELAWTEWKLAFTVGLGQQPRLRTIRAGDLESLEKEVARGKARFGLAESARVVSCFEAGRDGFWLHRYLVSQGIENRVVDSSSIEVSRRRRRAKTDRLDAAKLVAMLVRYEQGERRVWSVVRVPTVEQEDQRHLHRELDTLKKERTRQSNRIKGLLAGQGLRLLVDKHFLERLESARLWDGSPVPGGLRFRLEGEFERLEFIAGQIEELEHERRRLMKESRSVGAEKARRLTRLKAIGENSAWMFSLELFAWRKFENRKQLGGLLGFTPTPFNSGESSREQGISKAGNPRLRAMAIQIAWGWLRFQPQSQLSLWYQERFANGGPRLRKVGIVALARKLVIALWRFVELGIIPDGAELKA

SEQ ID NO: 426495 - protein, 474 aa, unidentified
MAEAKLLCVGIDVSSRSLDVGCCDGRGAPIGRVQSFPNDAVGAAALCEAVVASARAMGRGTQVMAAVESTGEYHRVAAKALRAETRRAIQVHVLNPREVKWFRKLELKDTKTDRVDAELIARFLAKIRPQPRAPMPEGFEALQDATRTRRRCVEERTSLKNRLHRLLRTHFPGYREALGAKFSVRTLVALAACPSPQDVLRRGVARLGEVRNSDGKRIGAAFAQKLIALAKAAPTRQLPVMARLSLQDAAVRILQLNRFLQGMDAAVAQELERLFPDTVLASVPGLGPVSVASILAEVADIHRFPHKETFVGYCGLYPIAWESGDTKLRFRMTRKGNRMLKMTLLVASAAARQYNPAIRHFYARLRARGKSKKAAGGAIARKMAEIVWAVLTSNQPWSEEIALRGIARGEEMAQQPKGERRLTGDAAGQAPTESGPPLKAASRSRAPQRDSTMCAGRSKSHSQLIRHARGAPTP

SEQ ID NO: 426496 - protein, 316 aa, unidentified
MQAQQVFIGVDVAKDSLVSCIHGLAKPQVVANEERAIKGWLKTLAPQAVIGMESTGRYHQSLARLAHQAGPRVYVLNAKDVYFYAKALGARGKTDPGDARVIARYIAEHHAALHAWAPGTAAQLRVQELLQRRARVAVHRASLRQVLAGLEELAPDVLQLEQHFEQLLQHIDDEVQALVASETQLSQGSALLQTICGIGPQGAALLAALFNRIEFANADALVAYSGLDPRPCDSGTRSGRRRLSKRGSPSLRRQLYLAALAATRSKALGPTYRAIRARGFKSTPAVVILARRLLRIAWAVWKSGQPFDAARLQSAP

SEQ ID NO: 426497 - protein, 355 aa, unidentified
MTSTKYIGMDVHKESISIAVLNFAGKVVMECVIETKASTILQFIHGLRGDLQVTFEEGTWAGWLYDLLKPHVTELVVCNPRKIALLKDGSKSDRIDAHKLADLLYMNKIKPVYHGEHGLRMLKELSRSYLTITKDLGRVMNRLKALYRSWAIPCAGTQVYAPRFRSEWLAKIHEAGVRRRAELYYQQLDALRLVRQQARKELLVEARKHRATKLLRQIPGIGPLRAAHLVAVMQTPHRFRTKRQLWTYSGLGLETHDSAQYRVVERQLQRSNKPVTLRGLNTNHNHDLKDIFKGAAMRASTAAGPLHDFYEALLAKGRKPTMARLTLARKIAAITLIVWKKEVRFDANYLKQQAA

SEQ ID NO: 426498 - protein, 476 aa, unidentified
MAALQKADEKLNRQQRKDLVRRLWSSNPGLDVVHRNAAGIDVGNEEHYVAIAPTQDEVPVQRFNCFTAELIRMAVWLKGRGVQTVAMQSTGVYWIPLYDILEEHGIEVYLVNARDTKNLPGRKTDVQESQWLLKLHTYGLLRNSFRPASEIRVLRAYWRQRDQHVKTAGQCVQRIQKALTQMNLQLANVISDLSGKTGLQILRAVVNGERDPAKLADFRDPRIKASREDIIASLRGNWRAELLFQVKQELARYDFCQTQIAECDRELEQQLQSLPELRAGEENSGTKETQRPPKKRKRRKDGNIPRFDLHHELQRISGVDLTRIDGIDVMTGQTVISEVGLDMSRWPSENHFASWLGLCPSNELSGGRILKKRTRKVVNRAATAFRMAASTLRTSQSYLGAKFRRLRSRLGPPKAITAMARTLAILFYRMLKFGQDYLDRGTEFYEQRQRDQQLQYLQKKAAQLGLQVVALPETPK

SEQ ID NO: 426499 - protein, 412 aa, unidentified
MQAIIERCCGLDVHQETIVACLLVGAPGAQPTKEVRTFRTVTPELEALRDWLREAGVTHVGMESTGVYWRPVYTVLEGHFELIVGNAQHMRNVPGRKTDVKDAEWIADLVRHGLIAKSYVPPRPLRELRELLRYRRKLVESQAAERNRLLRLLETANIKLASVASDVFGVSGRAMLRALIAGEASPEAMADLARGLLRRKRADLILALDGRVEEHHRFLLAMQLRRLEAIEADIAALDQRIGKRLEPYAAPHTLLMQIPGVDWVVAAVLIAEIGVDMSVFVSVYHLAAWAGVCPGNHESAGRQKSGRARKGNIHLRAILVGAAISASRAKGTYLKDKFHRLKARRGGLRAALAIAHKILVSAYHMLAKNLPYRDLGEAYLDQISQTRTVANLKRRLERLGYRVILEKNAQAT

SEQ ID NO: 426500 - protein, 353 aa, unidentified
MSKEKYVGLDVHKATIVIAVLNAVGQMVMQTIIATDAQVIREFFKGLSGTVTVALEEGTQSAWLYALLRPLVKEVVVCNPSHNKLIETGNKNDQIDAEKLATLLRLGSLKAVYKGNQPQRQLKDLARAHQNLVSDSTRVMNRIKAIYRGRGINCDGHDIYKPDQRQAWIERLEEEGARFRSRMLFEQLEKLTELRCAAKQEFLTHGKQQPEYPILCGLPGIGPLRASVLLAFVGTPHRFRTKNQFWPYCGLAVLTRTSADHQVINGTISKRQKVIGTRGLNPMHVPELKQVFKDAALTALRREPCQSWYQARIDKGMRPEMARLSLARRLAGVTLTLWQRKEKFDPQKFSTTV

SEQ ID NO: 426501 - protein, 549 aa, unidentified
MKLCLGIVEEESKLLCAPVVGREGRLIIGALCPSRSLVSGVSVFNIGDVFILQSGYDPVKEMAAVSAPLRPQLLAQSLVDKTRKRDPIISHPQKQSQRSAQNSISNLPQHLQHININAAGIDVGSDRHLVAVPEGRDTVSVREFATFTADLHAIADWLEQCGVTTVAMESTGVYWIPLYEILEQRGFEVYLVDARRVKNVSGRKSDVLDCQWVQELHTYGLLAKAFRPAEEVCVLRGYMRQKEMLVQTAAMHIQHMQKALQQMNLLLHNVVSDITGVTGMKILKAIIAGERNPKVLAKERDPRCRNSTETIAKSLVGNYRPEHLFALRQAVELYEIYQSKIADCEAAIVAYLEQQDHLTEDEPPAPQKPIAARERMRGGSDIRTKLYKMTGVDLFAIPGLAADTLLTLASEVGLDISPWQSEKNFTSWLALCPGTKRSGRRVLASKTRPSANRAAQAFRMAAATQARANTALGAFYRRIRARSGGREAITATAHKIARIFYSMLKNGTEYVEIGQAAYEQKFKERRLRYLKQQATAFGYQLTPIAAGSF

SEQ ID NO: 426502 - protein, 360 aa, unidentified
MRIIGCDLHARQQTLAMLDTESGEVVNRTLMHEGKELREFYSELPRPVLVGIEAIGPMQWFLNLLEELGIECQVGDAAKIRAAEPRKQKHDRRDAELILKLLVEKRFPAIWMPSRELLDLRALLLHRHQWVRLRTQVQNALQAIALANGLRRGPGLWSYDGQAKIAFLPLPPHASLRRSALQAMYGHMEEEIEKLTVQVAEQVEHRRGAQLLMTHPGVGPVTALATDVFLGDPQRFADGKALASYVGLIPEERSSGRRRRLGRISKQGNPLLRFLWNEAGAHAARRDPELRRFYRRKLMQKGLGKARVAVARKLGIRLWIMLRDQIDYQEFCCRGQKQSGAACAGMPEVGNGANRHRPVE

SEQ ID NO: 426503 - protein, 364 aa, unidentified
MKRKIYVGMDVHKETIRIACLTNNTKEIVKEQQIKHNEVQIKKFVNKLKSEWNEIHSCYEAGVTGYPLYRNLKSLGVNCILVAPGKIPRQSSDKIKTDKRDAIKLAKLLRSGELESIHVPSEEDEAVRDYLRSRDSLRLDLGRNRQRLMKFLLRKGITYSATKYWTVSHNKWLNNLQFNNEILQETFNDYYSRVRVQEENLKAMDKRIQEIAESEPYREKVGILRCFRGVDYLTAMFLLCEVCDFKRFKTAGSFMSFLGLVPGEYSSGSKRKQTGITKTGSPRLRRILTEAAWQHRFPGTGSKIVTARRSGQPALVVALAEKASLRLHKKFRNLQQRGKTPQVMITAVSRELSGFLWAAMNLVA

SEQ ID NO: 426504 - protein, 316 aa, unidentified
MTDLENFSTVGIDVSKDKLDVFIGPERKVYCFDNTLQGVKRFINQVKSLKASMFVMEATGGYEQICAQLLLKANLPVAIANAKRVRDFAKAMGILAKTDAIDAKVIATYAQTAKLRPLAKRSKEQVELDGLILRRAQLVKMISVEKQHQKTIATGKLEKQIAKSINWLTKQLEQINEQLKQAMEACPVMKRNYERLVKVPGVGNVLAMTLLADLPELGELSGKEISALVGVAPFNCDSGRMKGSRHVWGGRARVRSALYMSALSAARYNPKIKEFYDRLVASGKKKKVALVACMRKLIVILNAMVKSDTQWHGVES

SEQ ID NO: 426505 - protein, 371 aa, unidentified
MRDADGVAGIDAHKQVFSVAVLDGRGGRCAVASFATSPEGLTDMLALLDSFAFAVGRVGVEGSAGLGRHVTQALVAAGYDVREVQANRTAERRRRRRRHKSDREDAEAIARETLAHPDLPPAGKQRRPDPAWEELVAVRNRRKSLIGQRVRLLNEAEAVLTGLPLRVRAALPQTSRVRPRLRALHQGAASSVQLGAADQVNLAWLVETASDIARLDARVAELDKKIPPLLGRLGSTLTHEHGIAEVGAMELLVEVGDPTRFATEAQFARWCGAAPVAVSSGEGDQAPTHHRLDLAGNRQVNSVLHLMHVTQVRGYPPARDYLDRKRAEHKTKREARRAHKRHLANVVIRRMWADHARRHTTNAQPPTAAAA

SEQ ID NO: 426506 - protein, 357 aa, unidentified
MSVKETIMRQLVRIGMDTSKKVFQLHGVDAEERVALSRKLSRHQMIRFFEKLPPTVIGIEACGASHHWARTLGALGHEVRLMAPQLVKPYVRRSKNDAADAEALCEAMSRPTMRFVPVKTVEQQAALMLVGMRERLIGRRTQLANSIRGYAAEFGLTAPAGLSRVEPFLQQIASEETLPPLARDLFAQMAEEYEALMKHIRELDEKLATWHRSQEVSRRLSGIPGIGPLGAALLLMKAPDPYLFCSGRDFAAWIGLTPRDHSSGGKVRHGGITRAGDSRLRSTLVVGATTVLRHVRQNEQSRLATPWLVSLLSRKKPKLAAVALANRMARIAWKLMTSGETYRKPVEAAAMAAAAAS

SEQ ID NO: 426507 - protein, 326 aa, unidentified
MADKESIMAYIGVDISKNFFDCAYREDNQYRHARFDNNDNGFKNALAWAPQNGHWVMEATGPYYQRLAWYLDQCAGAVSVINPLVIKRFAQMRLHGVKTDPQDAILIADYGHLCQPGCWHIPSDAQSTLMQLQHWLDGLIRERTQLKNRMEALSQAPLINAFVNKKQRALLSSLNKQIAAAEKELDRCLKRYYPLLYERLQTIPGIARKTAGALIIVTDGFTRFDNAKQLVAYAGLAARVDQSGNRSWGSTAIVKRGNSHLRQLLYICSWTAQRCNPACKALADRLRAKGKPERKVKIAIAAKLLRQAFGVAMSGQSFNENIALGA

SEQ ID NO: 426508 - protein, 410 aa, unidentified
MKTYILRDTKPVEPQKSHRSPRPEPTVASVGRGAMPTNNAVLFIGLDVHNDSIAVSLAPSDTTEVRRYGIIGGEHDDVLKLAKKLATAHPGMVLKFCYEAGPRGFALCRCLRMHGLDCILVCPSKMPRKPGERVKTDRRDADDLARLYRAGELTGIYVPEPEDEAMRDLIRARFQVGKAQHRARQQLKMYLLRHNLRYGGQSSWSPAHLRYLAKIKMPFPVQQIVFQEMLEVITQATAQLERYDQEIERAVPGWRWERAVRALMSLRGMAVLHAATLVAELGDFNRFEHPGQLMGYLGLVPSEHTTGNDRQQGGITKMGNAPARRALIEAAWQYRAPARLSPHLKKRQEGLPKAITDISWEAQRRLHHRYTHLTRVGRKKSQVAVTAVARELAGFVWAIARQVKPRPAKP

SEQ ID NO: 426509 - protein, 406 aa, unidentified
MMVMIGVDPHKGSHTAHAIDDHEVKLGELRVRASAKQLVRLLEWAEQFAERTWAVENASGLGYLLAQQLVAAGERVLDVQPKLAARVRVLATESSEKTDPHDARSVAIAALRSTKPAAVRADDHAAVMKLWVKRQRDLAQERGRTACRLHAVLCDLVAGGVPDEITPGKAEQLLVTVEASTAVTAARIALAEELIADIERLDARIKQSRKRLAEAVAASGTTTSEVFGVGPVVAATVVGITGDVRRFANRDRFAAFNGTAPVQVSSGDRKVWRLRRRGNRMVNHAIHMAAVTQIRFPNTDGRAYYDRKIAEGKTGKEALRSLKRRISDVLYAHMVADARRLETAKQKAGPGGQPGNDSVASAAGSHPEQPALRPSHSRTRPKARTPNAAPRRTRPKTATTTARRST

SEQ ID NO: 426510 - protein, 265 aa, unidentified
MNYSCFIGIDLSKKTFDVSIISPEREELNYFQLPNTAAGTRRLVKRVHELCIPLSKILFCAEDMGELAIELCLASQSAGFPLALACPLSIKKSAGICRGKSDRIDAYKIACHASLHHRNLRLYSLPEPALTRLKLFITLREDLVKSKKRFSSVDTTLIESGKIADTGEHRQVTKEQLDLLDRQIKHVENCMLECLKESPLLYRNFRLLRSVKGIGLLNACLLICLTGNFTRFENHRKFACYCGVAPFEFSSGTSIRGNPNWETSK

SEQ ID NO: 426511 - protein, 387 aa, unidentified
MQKPHDDSKACLTAFVQDSTLTVVIEMSLRSWLVAGMVPGVNREPRKKIAPNPELLLQLLYRWRDEAIKAGKEITRIAVAYETGRDGFWLARWLRARGIDAHVIHATSVAVSREHRRAKTDRIDTAMLQRGFLGWLRGERGHCSMAIVPTVAEEDGRCPHRERETLIKQRTSTANRMKSVLIQFGVRHFNPSLRKAPKKLDSVRTPEGIPLPSNAVAALQRHMERFRIINEQIKAIERTRLQRLQRDPAEKFNAMVFLLVRIIGLGVETAEQLVREILSRNLRDRKAVARYAGLTGSPDESGSMRREKGLSRSGNGRVRNILIQLSWRLLKFQPQSDLVLWFKNRTANAQGSRKPMIVAFARKLIIAIWRYVNTGVAPEGFQLRSAA

SEQ ID NO: 426512 - protein, 339 aa, unidentified
MKFYSGMDLHSTNTYTAIMDENRKRVIDRRLANQPNLILAFLEPYKANLEGIVVESTYNWYWLVDLLQENGYRVHLANPSAIQQYRGLKHVDDRHDAFWLAELLGLGLLREGYIYPKEVRPIRDLLRKRAHLGRLRTSLLLSAQNIVLRNQAIKIGSEDMKKLTTDLLTPHLRESEELFLTGKISKELIDAFTRQIKAIEAWVMKQLQPNKVFSNLLTIPGVGEILAMTILLETGSISRFPKVGNYVSYCRLVASQWTSNDKVKGKGNERNGNKYLAWAFSEAAEHARRHYSMCRTFYNRKLQQKNGKVAHCALARKLSRAAYYIQKDQVVFNESLLFS

SEQ ID NO: 426513 - protein, 360 aa, unidentified
MVGITFSLREVTGGVDTHADTHTVAALDELGRLLGHQRFPATVAGYVQLEAWLRDLGDVVAVGMEGTGSYGAGLFRHLRQQGLRIIEVDQPDRAARRKTGKSDPADAVAAARAVQAGRATGTPKTRDGVVESIRALRVARNGASKAHTAAINTLRQTLITAPAELREQLNGLGPKALVNTCARFRPADIRDPGQAAKATLRRLARRCQMLADELAETDKDLTLLIGEKAPDLLAVYGVGTDIAGQLLVTAGDNPDRLKSEASFAALCGVSPLLASSGKTNRHRLNRGGDRAANSALHRVVIVRMKYHPQTRAYVERRTREGLSKRAIIRCLKRYVARELLPYINAAAQNQPDLKPPPIAA

SEQ ID NO: 426514 - protein, 339 aa, unidentified
MQLYAGLDLHSRNTYIGIMDKEFKRVFGKRVANKLPVILKTLAPFQDRLKGIVVESTYNWYWLVDGLMDAGYRTLHLANPSAIKQYEGIKHTDDQHDAFFLAQLLILNILPEGYIYPKENRPVRDLARKRLFLVRHKTSHILSLQSLITRCCAQRVSANEIRNFTSNNLQQLLKEEYIVLSAQANLNTIGFLTQQIRQIEKAIKKKVKLKKAFHQLQTVPGIGIILAMTIMLEVGVIGRFPQVGNFASYCRCVSSDRLSNGKSKGHGNRKNGNRYLSWAFTEAAHLSRRYNERFRSYYNRKVAQANTSLATKALSNKLARICYYIMRDQVPFRENLLSQ

SEQ ID NO: 426515 - protein, 372 aa, unidentified
MNYNTVYVGMDVHKESFTLCSCKYEDEKASHYQRTPASYKNVLRYLAFLRTIYGEDTRFVCGYEAGCLGYSLYHQLENFNVECVILAPTTMLEQRSKRRIKTDKRDAEIIARSLAQHNYSPVHIPTETDNQTKEFIRMRDDHKAELKKIKQQILAFCLRQGYQYDGSGNWTAKHVKWLRSLKTEGLYKEILDEYLLTYTILTDKLNRLDQRIEELASKEEYKESVSKLTCFLGIKTHTALSVIVEVGDFQRFVSARKFAGYLGLVPGQHSSGDDRNGLGITKAGNTHVRRLLVESAQSYTRGKIGYKSRVLRSRQAGNSPQIINYADRANERLRRRYYQMVLKDGKKYNIAKIAVARELACFIWGMMTDNIY

SEQ ID NO: 426516 - protein, 410 aa, unidentified
MDAIVHNCCGLDVHQATVVACLLTGSSGSKPKKQLRSFGTTLPQLLQLRAWLLEAGCTTVAMESTGVYWLPVYEVLEGQVHLVVGNAQHIKAVPGRKTDVKDSEWLADLARHGLIRPSFVPPPEFRALREMLRYRRKLVQSGAAERNRTLKVLERCNIKLASVASNVFGVSGLAMLKALLAGQMSPQQMAELARGQLRLKRAELADALTGTMREPYRFLLQLQLQRMEQVQADLALLDAQLQPKLQPYQPQLQRLCQIPGVQQDTAAVLIAELGVDMNVFPSAGHAAAWAGLCPGNNESAGRKRSSSVRKGNVHLKTALMMAAKCAVKKKGSYLRAKYYRLTPHMKPLQAQMAIAHKMLISAYHMLRDEQDNKELGAGYLDRKKQKQVQGALVRRLEQMGYQVKLEPKTA

SEQ ID NO: 426517 - protein, 344 aa, unidentified
MTLVADDLVVGVDTHKDVHVAVVLDRLGRRLVVRDFAATDAGNAQMADWLAGLGTVADAGVEGTGSYGYRLAQLLAGRGIQVWEVNCPDRSRRRRRGKSDPVDAENAARAVLAGEASAIPKDREGFVGELRFLLLTRRSAVKARTQASNQIKTFLLDADDDLRQRLRKVTFGRACAALEPSDPLRRAIASLGRRWLALNDEARALERQITALLTAHAPALLARYGVGPATAAQLLVTAGGNPQRLHGDAALAALCGASPVDASSGKTARHRLNRGGDRAANNALWVIANVRMTSDPRTRAFLAKRTATGNSRKEIMRMLQRYIARELYPLIIDALQPAVIDGLT

SEQ ID NO: 426518 - protein, 410 aa, unidentified
MVKENFIYVGIDLHKETHTAVMIDCYNQKLGEITFPNRPAAFPKLVTKVKKCNTDGKEVVYGLENAYGYGRALAVWLIDKGYLVKDVNTAISHRQAKHRGAMYRKSDSDDAKAIALATLNMLDKLPDACPNDAYWSLGQLVHRRDNIMKQRTRLVNQLHEQLCIAYPSYKQFFNDISRPTALYFWEHYPSRKYLKGKSVEDLRAELVPVSHNKCSTKTCEKILDAVASDKVKNNAYQDARDMVTLSIVSDLQHYDSQLTEVDKMLEQMYKMLGCTLTTIPGVNVITAVKILAEIGDIKRFSNANKLAQFAGIAPLHLSSSGKGKDVATKQGNRRLQATIYFLAIQMVQISSKGTPRNPVVRAYYEKRKAEGKTSQQALICISRRLISIIYGMLKHGTEYRMPVVESAGEK

SEQ ID NO: 426519 - protein, 331 aa, unidentified
MEIKETIGIDVSKLTLDAHIHSTGDRDRFENNTNGFKKLVAWAHKRSRFPKENVLFVFEHTGLYSRGLSGFFGERKLHCHIVAGLEIKRSLGIARGKNDQVDARRIALYAYRLREEIRPSKVADVQIRKLRTMFSLRSKLIKQRAGYKTTLKEQKGILNGKDYNIIFEIQNNMLDTLSGEIHKLERMMMEIIKGDKGLSDLFKLVTSVKGVGPMTAMLVIIYTNRFTKFHTWRKFASYCGVAPFPHQSGTSIKGRSKVSHFANKELKAILNMCAASAIQYNPEMKQYYERRTEEGKNKMSTLNVIRNKLIARVFAVVNRGTPYINVYRQAS

SEQ ID NO: 426520 - protein, 342 aa, unidentified
MKATTIGIDLAKHLFQLHGVDQHGKTVLKRQLKRDQMLSFFTNLPPSLIGMEACGSAHYWANKLQGMGHTVKLMAPQFVKPYVKTNKNDAADAEAICEAVTRPNMRFVPIKNGEQLAVLALHRARQGFVKARTAQANQIRGMLAEHGIIVPKGIAHISLRLPELLEDAENNLPGTFRQLIERLGEHLKELAKQVNELEEQIWCWHKENSASQKLAKMPGIGPLTASALVASIGDAKQFENGRQLAAWLGLVPKQHSSGGKQTLLGISKRGDIYLRTLLIHGARSVLRVAERKTEYAGSWLAGVMERRNHNVTVVALANKNARIIWALLAHEREYDADHAVAA

SEQ ID NO: 426521 - protein, 343 aa, unidentified
MQQSIFVGLDLGSSHCHQTVINADGALVRSRSVPTSEQHLRNAFAELEGDVHVHAEASELSDWVRSIINPLVSRFVISHPRSLAWIAKDSVKDDAVDARKLAELLRLNRIHEVYYEDRADRRSFKQVVVHHEQLSREQARMKSKIKARLRTLGIIRQDVRLFSEAGQIELFASITDPLVRQMFRQSFAVLNQLLVSLADAKTAMLEFSRRLPEVRLLQTAPGVGIITACRFVAYIQTPQRFSNKRKLWRYCRLGITRRESNGKRLAHPHLDAAGVGSLKDCSRKIFEAARRTKTDNSFKRFYEQSLDNTKNAVHARLSTQRKILSTLRAMWLSMKQYRGDDSG

SEQ ID NO: 426522 - protein, 345 aa, unidentified
MNITTVGLDLAKNVFQVHAIDEAGEVIVGKALRRHQMMPFFSKLDPCLVGMEACATSHYWARQLSQLGHQVKLMPPIYVKPYVKRGKTDAGDAAAISEAVTRPTMRFVAVKSLDQQSMLALHRTRDLLIRQRTQLVNMIRGQLAEFGIVLAKGIQHVFKFTGQLLGGEAPDIPPLAVSVIVTLAEQLRDLHARIGGLDKDIRTWSKDNEVVKRLQTIPGIGIVTASALAATVTDPHQFTSGRQFAAWLGLTPRANSSGGKERMGRISKMGDQYLRRLLVNGMTSQSQSVRRNPDAYPWATSLMRRKPDKLVAVAMANKTARIVWAVMTRGEVYRAPLPATVKEAA

SEQ ID NO: 426523 - protein, 380 aa, unidentified
MQQHSPTDPTGARPNDAVLFVALELSRASWLVAIQAPGRDKISRHKLAAGASAELLELVGRQRARAAQRTGGKLPVMSCYEAGRDGFWLHRLLVANGIENLVIDPASVAVNRRARRVKTDRIDVETLLRAMMAHARGERRVCSVVRVPTPEAEDARRLTREREALLEERVRHVNRVKSLCALQGVYDFEPLRPRAAERLDGLMTGDGRPFPERLKAEVRRHLERLGQVVHQIAEVEALRDKPASPLAKGVARLVALRGVGPNVASVLQAEILGRCFANRREVAQYAGLAPSPWASGRAQREQGIGKAGNARVRAAMIELAWLWLRHQPDSALSHWFRERVGQARGLVRRIAIVAVARRLLVALWRYATDGVIPEGAVARG

SEQ ID NO: 426524 - protein, 408 aa, unidentified
MEVLYPHCAGLDVHKDSVVACARLQEGAVVQQEVETFGTTTTALIALADWLKERKVTHVAMEATGIYWRAPWHVLEEDFNLVLANAAHIKNVPGRKTDVNDATWIADLLAHGLIRSSFVPPTPIQELRTLMRTRKQLVRERAQHVLRIQKTLEDANLKIASVVSDITGKSGRAILEALITGETRPEALLAVTRGRLKADRNSLIEALRGRVRPSHRFLLKLHLDQIDAFNQALAAIDVEVGALLDPFREQAKRLTTIPGVGEIGAEVILSEVGDDMTRFPSVGHLISWAGLCPRNDESAGKRRSTRLRPGAPWLKTILVQCAWAAVRVKTSYLRAQFFRLKSRRGPGKAIVAVAASILTSVYFILRDGVDYHDLGPDHFERSDKTRITSRLVRSLMNLGYQVELKATA

SEQ ID NO: 426525 - protein, 414 aa, unidentified
MEQVHDRVAGLDVHRDVVAACVRVAGPRGGVATEKERFQTTTVALERLGGWLADRQVSLVAMEATGVYWKPVYYALESRFEVWLCNAHHVKNVPGRKTDMSDAEWLADVAAHGMIRPSFVPPPPIRELRELTRYRKTQTDARAAEIQRLEKVLQDAGVKLTSVASKVLTQSGRLMVQALIDGQRDPAELANLAKGKLRPKIPELTEALAGHFGAHHAVAARRILDHVDFLNATIAALTEQIDARTEPFQAAKQLLSSVPGFDRLVIDTVIAETGADMSRFPSPGHLAKWAGVCPGNHESAGKRRRVGITPGNSWLRRALIEAARAAARTRGSYFGAQYRQIAKRRGPNKAAVAVAHSLSDLIWHQLTTGECFHDLGDDYFQRRRDPERETRRLVAQLEQLGFHVALTPSRDPAA

SEQ ID NO: 426526 - protein, 360 aa, unidentified
MFIIGCDLHTRFQEIAMLDATTGEIVTRRLQHENGEAEEFYSDLQQKGVVGIEATGYTQWFERLLERLGHELWVGDPAEIRARMVRRQKTDSRDAEHILDLMINGRFPRLWVPSVQERDLRQLLKHRDKLVQMQTSVKNQLHYLAMSQGVCRKRQLWSQQGLAQLQGLRLDPWASRRREELLELLQRLGPRIQELDHAVEEEAGKRPEAVRLRRQKGVGPVTALAFVLTLGPVERFANSRKVVSYLGLNPSEDSSGGRQRLGHISKQGNEMLRWLLVEAGQSAARFDPELRRKYRRLKLRRGKNVAKVALARQMAVRLYWLLREARLEAARKAGREASHEAIAVVPPMAMELGAAGSHVR

SEQ ID NO: 426527 - protein, 327 aa, unidentified
MAQKMDVVGIDVSKATLDAYALASQQAQQFANDPAGHRALVAWLQGLGVDVAVLEASGGYERAAAQALRQAGLAVHVVDPKRVRHYARAAGQLAKTDRIDARMIAAFGAAFLLAVPGGVAGADDPARRDLAELVGTRQVMVDHRTTLQQQADGVTSTIAKKLLRASLKQFDRRIETLDRHIAAAIARHAPFAALARRLNTVPGLGPVSIAALIAWLPELGQLGRRQVAALVGVAPFADDSGTRTGQRHIQGGRMKLRHLLYMATLAAATRHNPLLKARYRRLLENGKKPKVALIACLRTLLTILNAMVAHQRDWNPIQRPATEPTAA

SEQ ID NO: 426528 - protein, 422 aa, unidentified
MNEIEHSRLEDFRQLKKEIRGSKEYLIVGIDIAKERHHAFFGTATGKTLLKRLVFENTQEGFEKLLVHAEAVKAEHALEKTVFGLEPTADYHKPLGEFLIKADHKVVLVSGVGVKRNRELLDGRWDKHDTKDSANVADLISQGKCLFYDHPPLPLRELRALVSLKRRLKKQEHGIKARIRNHLLAQYFPELDRWYRQWGAEGLSIVRWCLNPSLMAAMDYGHFARLVAPHTRSLAQQERLRSIWQTAGESIGCEAGNALAFEAEVMVEELEHIRKAIRASEEKIEEICLQFPEYHSLLTIPGFGPDVSSKVIAAIGDPFRFTTGAQVLKMAGLDLSADRSGKGSESATPVLSKKGKADLRYALYQAALIASTRNRSFVLYFTNTLRGREKEKGIKTKMRVKLAAKLLIIAWTLMKKKEAYKS

SEQ ID NO: 426529 - protein, 358 aa, unidentified
MIRSVGIDLSRTGGHQVCCLDEQAKPCDSFSFDSTVEGLERFEKRIFSNGDTPTIVFEPTGLAWIPMAVYLRARHPECRLVKARLQKVAALRRYLRSRAKSDRVDGLTLAKMPFIDAEQLDEAYLPPSEYHSLQRLTRQRERLMKSITIRKNRIGSIIDGYLPGLRKAFSDEWSDRARLFYRQGLNPLAVVRDGKSALETFLVSVKAKGALTESHRVYQACQKLAEFYEKSKAAGMINEDFFDDLQNEIACELRLMETEEAEVERSGRIEELYGHLHPCDYLRTIPGIGVRTAQVFLAIIGDPHRFRSQSAFANWTGVVPGASQSADTEPPSFILEFDDVHIPPYHLRLQGESRQQWI

SEQ ID NO: 426530 - protein, 454 aa, unidentified
MARNGKKKTQKQKSLPFIQPDAAGIDIGATEIYVAVPEERDIRPVRKFATFTEDLHALAHWLIACQIKTVAMESTGVYWIALFQILERRGLEVCLVNARHVKGVPGRKTDIQDCQWLQYLHTVGLLRGSFRPAQAVCAVRSILRHRDNQLKSASRQVLLMQKALTQMNLQLHNVISDVTGVSGLAIIDAILSGEREPSKLCCLCDGRIKASRQVVAKSLVGDYRPEHLFSLQQALESYRHFQNQIAACDEHIERMLARFDSQEQCAEAPSTKYKAQGNQPAFNVPSEMHRILGVDLTAIPGMSAQGVLTFFCEVGPQITRFASSKHFASWLGLCPDNRISGGKILSSKTRNVRCRLANALRMAATTLYRSHSALGDYFRRLRARLGSPAAITAAAHKLARIVFAMLRDRRSFDPHLLGTLNEKHLRRRQNSLRKYAASLGFELVPIQNLAHSVS

SEQ ID NO: 426531 - protein, 481 aa, unidentified
MKPHKQEQQERASVRPAPIAWQQMNRKQRREWTRKMQAEEISLQVIHPDAAGIDIGNEAHYVAVPPNRDSQPVRRFGCTTAELKDMATWLKQCRIRTVAMQSTGVYWIAVYDLLEEAGFEVYLVNARETKNLPGRKSDVQESQWLMKLHTYGLLRNSFRPSQEIRTMRTYWRQRNDLVRSAGRHIQRIQKTLTQMNVQLANVLSDVSGVTGQAIIRAILAGERNPRKLAEFRDNRVKASEEQIARSLEGNWQEDLLFLLKQEQKGYEFCQKQIAECDGRLQQYLQQREDRSAGTSLPEEQRKGRLRKNENKPQFDLRAELFRITGTDLTQIDGIDVRTAATVISEAGWDMSKWRTEDHFVSWLRLCPDNRVSGDKVIGKGRLPTNNRLTVALKMAASCLRQSNSYLGAQFRRLRTRLGPPIAIKAMAAKLARLVYRMLRYGMQFVDKGAEFYQERHRQREINSLKRKAASLGFQITQATAA

SEQ ID NO: 426532 - protein, 320 aa, unidentified
MTYIGIDVSKDSFVAAYPAKSGYATKTFKNTSSGVHQFIQSLPAECHCVMEATGNYSMLLLYLLQQANIIVSMENPQKIKHFARAMLSTTKTDDIDAKLIAMYGEKMEPAPYKIPSESIMLLKQKRTVLRQLKKQLTMLLNLQHSLAVLPKQDPTAKVATEKTIKFLRKQISKLEEEITHLSNKEFKRQMDLLTSIIGIGKTLASALIVATGGFAFFSNAKQISRFLGLCPTYQQSGTSVHFKGHINRNGDTYLRSQLYIAAVSSIKFNAACKETFKRLKDKGKSGKVAVIAVANKLIRQAFAVVTNNRPYVDGYVSALP

SEQ ID NO: 426533 - protein, 457 aa, unidentified
MNKKKSKPKIDRQMPMVHPNAAAIDVGATMHMAAVRADRTPKPVRSFGTFTTDLHRLVDWFTECGVETVVMESTSVYWIPIFELLDARGFAVFLVNARDAKHVPGRKTDVSDAQWLQRLQSYGLLRASFRPKGQIAELRAYVRQRERLLEYAASHIQHMQKALTEMNLQLHHVVADITGTTGMRIIRAILAGERDPKVLAGSRHYSCHSSTETIEKALTGSYRAVHLFALEQALGLYDAYHEKVFACDVRIEAVLKELSVCRERTSDSLPSSRRRTDQANGLAFDARAALFALLGKDITQIDGLGPYLSLKLIAECGDDLSAWPSTKHFASWLCLAPGNKISGGKILSSRTRRSGSRAAALLRLAAVTVGRTDTALGAFYRRLSARIGKAKAVTATARKIAVLFYNAVRHGMQYVDPGSSFYETRYRKRVVDNLHRRARAFGFVLHPMEPAPSVSVS

SEQ ID NO: 426534 - protein, 496 aa, unidentified
MGCCALEGGDAVSAIPIRNLMNCAAQPFRWHQQEELEMNPKRSKSRHGRKMPMVHPNAAAIDVGATMHMAAVRADRTPEPVRSFGTFTADLHRLVDWFTQCGVETVVMESTSVYWIPVFELLDARGFTVFLVNARDAKHVPGRKTDVSDAQWLQRLHSYGLLRASFRPKGQIAELRSYVRQRERLLEYAASHIQHMQKALTEMNLQLHHVVADITGATGLRIIRAILAGERDPQALAALRHYSCHSSAETIAKALTGSYRAEHLFALEQALALYTAYREKASACDVRIEAVLKELSIHRGRDHGAVPPPRRRHRTDQVNALAFDVRAALFALLGKDITAIDGLGAYLSLKLIAECGDDLSSWPSAKHFTSWLGLAPSNKVSGGKMLSSRTRRSGGRAAALLRLAAVAVGRTDTALGAFYRRLSSRIGKAKAVTATARKVAVLFYNAVRHGMEYVDPGASSYETRYRTRVVNNLHRRAKAFGFVLQPLEPKAGAAVS

SEQ ID NO: 426535 - protein, 345 aa, unidentified
MNKVMAGIDLHSNNLVIGIMDMDGKRVASQKLSCKLKEVVAFLSPFKKRLEQVAVESTYNWYWLVDGLKELRYPVVLANPAGMEQYSGIKHADDTNDAFFLAELLRLKILPTGHIYKAQLRPVRDLLRRRLTLVHHRTALMLSFKSLYTRTTGQEMTLSQLKALEIKAAQELYDHPANQLIAGMQIKHIEQLTESIEKIEKAVLGCARELPLYTKLTTLPGVGRILGMTITMEVGDIKRFAEAGHFASYCRTVEAKRTSNNKKKAENNSKCGNKYLAWAFVEAANFARRYDEQCRKWSERKAAKRGKVIATKALACKLAKAAWHLMALGTDYDAKRMFGQPATTQ

SEQ ID NO: 426536 - protein, 331 aa, unidentified
MNEIIAIDLAKTVFQLHFVEGSPSVIQRKVLKRQQILTFFSNRTPCRVVMEACGSSHYWARKLRAFGHDVRLIAAQFVRPYVKSNKNDAADAEAIWEAAQRPGMRFVAVKSADQQSILALHRIRQQIVRIRVMQINQLRGLLYEFGFIFPAGRSASIKAIRDQLPEMEADVPRMLLDSVEEQLGRLALLDEQVARIEMRITEWRRNDEACRRISEIPGVGLLTATAAVAVIGDAKTFRSGREFAAYLGLVPRQTGTGGKVRLGGISKRGDVYLRTLLIHGARSVIACAKRLPDQTQKLLARRPTNVVAVALANKAARIIWALLAHDPPVSD

SEQ ID NO: 426537 - protein, 340 aa, unidentified
MNHIGMDLHSTTTDACMRNEKGEIILRRNLQTTPAELKKFLDGIPGAKRVAIEECQMADWVTRCLQPHVDEIIRSQPQFNRLIGESEDKEDRQDAESLSDLLYLNRLKPVYHPNLDYRNLREAVRAYWIASRELTRAKNRLKDFFLFHGVHRKGDEIYSARHRERYIKKLQGSPGTNLRLLKLLYARMDQCRQLKAQHIRLVRESAKPMMHLVRLLQTMPAIGPIYAYTLVAYLEDGQRFANKRKLWRYGGLSLRRHESRGIGKKKASRLGNQLIKHVALSVAATIVAHPDNALWARYEKDIRTNVKPNLAVRNLARKILAIAQCLLRAKKEYSDELLIN

SEQ ID NO: 426538 - protein, 425 aa, unidentified
MNYKQNEKINQVKESTLVVGIDIGSTTQYARAFDWRGIELGKVFTFSNSREGFEAFKAWMQHLQDKYRKSDVIVGIEPTGHYWFDLGAYLEDEGILLVMVNPYAVKQTKELDDNSQSKNDRKDPKVIAKLVTEGRYSAPYTPDGVYADLRIMVANRKRLIREMTQIKNRFARWFAIYFPEYTDVFGDYEAQSSMLLLKKVCTPEAIVELGAEKINKIWRDAKLRAVGMKRATTLCETAKRSIGLKKGSSAARYEMKLLLEDYEYKKAQLDAVMEEIEKLCRKIPESEQMLAIKGIGVITVAGFLAEVGDVRRFESPRQIQKLAGLSLRENSSGKHKGQTTISKRGRSKLRAVLFNAAIPLIAKNPEFKSLHEYYTTRANNPLKKKQSVIAISCKLIRVFYAILANGVTYDPQKMLSDIHRQPQAA

SEQ ID NO: 426539 - protein, 349 aa, unidentified
MTVYCGVDFHARMQTVSWMNNEDGEIKQKELNHCADDIRGFYRQFTGEVIVGIEAGGYSSWFEDMLERMGCVVWVGESSEIRRLAGRRQKNDKRDAAHILELMLSGKFPRVHRQSPESREVLGQLRYRHRLVKIRTMSTNCLKAIAIGAGLSEKKQLTTRKGRSKLENAGLSEVLSEQSKKWLELIDDVTKKIETVEGWLEQRAEGDQRVERLRTHPGIGLLTGLALVHTLEPVERFATTRKVAAYVGLDPMEDSSAEKKRFGKVSKAGSRLLRFLLVEAGQTAAKRDPQLKSFYRRVRDRRKSGKAKVAVARKLAVRSFIMLRDQIDYTEFLRRGVEARSSRKCTSTD

SEQ ID NO: 426540 - protein, 324 aa, unidentified
MSSLHLGLDVAKAKLDCALRLPTGKLRHKVLSNNAAGFGALCKFLAEHKAQEVHVCMEATGTYWEAVAEFLADRGYQVSVVNPAQIKAFGQSLHTRTKTDKVDAGLIARFCAQRTPPAWQAPSPAQRALRALVLRLDHLQSMHTQESNRLDVAREAVREDIVKHLQWLQQEMDGLKQRIDQQLGGGGDDAGLKAKRDLLDSIPGLGERTIAVLLAFYGDLRRFGNARQAVAFAGLDPRQHESGSSVHAPARLSKMGDAFLRKSLYMPAMVTLYRTDWGKAMRARLAGAGKPPKVIIGAMMRKLVQVVFGVLKSGKPFDSSLHMA

SEQ ID NO: 426541 - protein, 395 aa, unidentified
MYYCGIDIAKYKHTATVIDEAGKSLLDSISFSNSKEGCETLLSLFERLSIPKGDLLIGMEATGHYWLSVHGYLLEQGFEVKVINPIQSEAFRKMYIRQTKNDSKDSFIIAQIMRFGQFSATHLSEEVIVALRQLSRYRLALVDSCGDCKRRIIALLDQVFPEYNALFSDTFGVTSKEILSQYPTPEDMLTVSTRKLTSLLGKASRGRFGKEKAEQLKAAAANSFGVTFAKDAFAFQIRQLIEQLEFLEGQIQELEEQLSVLLKQTGSYITTIPGIGDTLGAIILSEIGDIHRFDAPNKLVAFAGLDVKVTQSGEFTGTRQKISKRGSPYLRRAIWLAASRAAFCDPILSEYYQGLRARGKHHLTAIGAVSRKLCNIIYTILKEDRPWQPTPPKGK

SEQ ID NO: 426542 - protein, 331 aa, unidentified
MGIQDIREEKVEKKNYAGIDVSKDTLDVAVHGDQRRWSFTNDQAGIKKTKTILQELNVGLVVMEATGSYEIPLAAELGIAGIPTAIVNPRQIRDFAKSVGILAKTDGIDAGVIARFAAAVQPEPRSLPDADSQELAAIIARRRQIVEMITEEKNRFASAKKVVRPRILAHIDWLSQDLADTNNDLQQKVKDSPLWREKDELLKSVPGIGPTVATTLLAELPELGTLNRKQIAALVGVAPFNRDSGTLRGKRTVWGGRATVRAVLYMGTLVATRCNPLIISFYERLVKAGKAKKVALTACMRKLLTILNAMLKYHTRWNCKDAQLNISCLSV

SEQ ID NO: 426543 - protein, 340 aa, unidentified
MVHVGVDLDKRSSQIAVLSEDGEIVQHRLANDAARLEKFFADLPPHTPIAIEASGTWWWLVDLLEELGHQPVLSNPKQTKAIAAARLKNDRVDAERLALLLRGDLLPRVWIPPTALREARELIRHRIQLVWLRGVLRNRLQAMLARRNLQPTSGQSWLTQRGQRELQRLPLGETPSRIREDYAALLPTLDAQIRRLDADLVTRWGADARVRRLTTIPGIGPFIAIVLVLELGDIARFASAKRVASYIGLTPRVRGSAGRVRAGHITKEGNRLLRWVLVLAATQAVRRPGPLRAWFHAVKKRRGKKVARVALARRLAEIVFHVWKQECDYFTVVRHGVVRG

SEQ ID NO: 426544 - protein, 369 aa, unidentified
MAKSITYVGLDVHKDTIAVALAEAGMRGEVRQHGKILNTPAALKALTVKLALTGRDLRFCYEAGPCGYGIQRQLAGMGHDCAVVAPSLIPRKPGERIKTDRRDATNLAKLHRAGELTPVWVPDQAHEAIRDLVRARQAAVRTLRQARQQLSGFLLRQGYHYHRPAWTQLHRRWLASLKFEQAVHHIVLEDCIAAVEAATARRDRLEAHIEAALPEWSLAPVVQALQALRGVGLVAAATLVAELGDITRFANPRQLMAFLGLVPSEHSSGGTRRQGGITKAGNGAARRMLIEAAWSYRFPARISREQLLRQERLAKPIRDIAWKAQERLCRRYRRLARAGKLPTVITAAIARELAGFIWAIAQQAQPATS

SEQ ID NO: 426545 - protein, 342 aa, unidentified
MDHFAGLDVSVKETSVCIVDDAGKIVREVKVVSEPDALLSVLSNPAYHFKRIGLEAGPLSQWLFSALAEAGLPVICVETRHMQAVLKAQINKTDRNDARGIAQMMRVGLYRPVHVKTLRSQKLRMLLTHRKLLQSKAIAIENDLRGTLRNFGLKVGIVGTVKFEARIKELVENLPDLAALVEPLLIVRRVLREQIIILHRRLLAIVRDDEVCRRLMTTPGVGPVVALTYRATVDVPARFRKSKAVGAVFGLTCSKYQSGEIDRNGRISRCGDEMMRVMLYEAAQSMLHSKKWSWLKAWAMQIARRRGMKKAIVALARRLAVIMHRIWVDGTEFRWTREAATA

SEQ ID NO: 426546 - protein, 361 aa, unidentified
MPTTHMPLPAACLETSVVIVIGIDPHKSSLTAVAADDTGHELAARRFVVNAGTFTQLISWAQRWPQHRFAVEGAKGLGRGIAQQLAATGAGVVDVPATLAERARLLTTGGGRKTDATDAASVARVALHHHRLNSVQPEDQSTILRLLTEHRDDLTHERIRILNCLHGLLRDLVPGGAPTGLSADKAAAALRGVRPATATDACRRDIARQLLAALRRIDAQLNTNETELSQAVTAAGSSLTELPGVGVIMAAKILGHVGNVTRFPNADHFASYTGAAPIDASSGPRRRHRLNTGGNRQLNSALHIIAVVQAHHSDLGRAYYQRKLGEGKTPAEARRALKRRLANVIYRRILKDQKQAHPTAA

SEQ ID NO: 426547 - protein, 313 aa, unidentified
MEERALKVLGLDVAQAFIDFARSDGAACGRVENERDGIGQLIDQGRNGIDLVVCEATGGYEKLVVAQLLAAGIAVAVVNPRQVRDFAKATGCLAKTDALDARVIAAFGVAVRPRIEVPKDELTQQLEELLNRRQQLVEMRVMEQNRLARAHKAVRRSLHKHIEWLSAQIEAADRDLEGTLKGSPQWQAKLNLLAGLKGVGPVMRAALFAWLPELGMLNRKQIAALVGVAPFACDSGTLRGRRMIYGGRHALRSMLFMATMVATQHDVRLRGVYRRLVAAGKPKKVALVACMRKLIVTLNAIFKTGQAYRPALT

SEQ ID NO: 426548 - protein, 351 aa, unidentified
MHYVGLDVHARRSSLCILDSCGKVVKRLEVKGSWPKLMERVAAEVPRPFAVCFEASCGYGHLHERLSALAERVAVAHPGKLRLIFRAKRKNDRVDAEKQAKLLYLDQVPLVHVPGADVRAWRGLIELRRKLVGRRTAVKSQLRALLRGAGCCDAPAGKALWSKRGLKWLAAAALGEADALRRDLLLEELAQADERVGRVTRELDRRADAHPGVALLRTIPGVGPRTAEAFVAYVDDVRRFARTRQVGCYLGLVPCQDSSAGRDRLGHITGDGPPTARMLLCEAAWQAVRRSPSVKAFFERVMHGEPGRKKIALVAVAHKLARSMAAMLRAGEAWREEVQEQGRGQGQEPGA

SEQ ID NO: 426549 - protein, 355 aa, unidentified
MKRGYYVGLDAHKLSCEFAVVRGDGQLVKRWPSRTAIDQLAAFLQTIPRPRYLVLEEGPMADWLWRNLRGFMDDVTVCDPFRNHLIAKEGEKDDPIDAAKLADLLRGGFVKAVHHPESFEQAVFKQHVQLYHDRVWHRVAESHRLRCLLRRHGVMAPASSFDNAEQWSTVLEKLPKSVTLRQDVQLLWEAYAAARAQEKALRQRLQKRAKENDVLRRFQEVPGIAWVRAATIYVFLDTPWRFRSKAALWKYLGIGLERRGSGAGVVRLQVPKRVNRLLKSTILGAAKTAAALDDNPFAVQYRRYLEEGLSKRLARRNVARNLSAVLWGLWKNGSAYCPDWVGVTAAAIGEGQVSR

SEQ ID NO: 426550 - protein, 349 aa, unidentified
MSAKFNSEITVIGIDIGKNSFHIVGLDRRGAIVLRQKWSRGQVETRLANLPPCLIGMEACVGVHHLSRKLTSLGHDARLMPAKYVRPYSRGQKNDFRDAEAIAEAVQRPTMKFVATKTAEQLDLQALHRVRERLVSQRTGIINQIRAFLLERGIAVRQGLRFLRAELPRILAAPRDVLSPRMVHVIEGLAGDWRRLDERIEGLSSEIEALARRDVSCERLMSVPGIGPIISSAMVAAIGGGDAFSKGRDFAAWLGLVPKQISTGDRTILGKISKRGNRYLRVLFVQAAWAVLIRPKSWDRHGLKPWIEAAKKRLHHNVLAIALANKLARIAWSVLARGRAFEAIRIQAA

SEQ ID NO: 426551 - protein, 338 aa, unidentified
MKITAIGIDLAKTVFQVHGENSRGKTILTKRLSRAKLLPFLANIPPCLIGLEACGGSNYWARQIKSLGHDVRLISPQYVKPYVKTNKNDYNDAAAICEAVSRPDMRFVSIKTIQQQDIQTLHRIRTRLIRERTAIVNQTRGILLEFGIFFPTSINAFRREVPLLLEDAENALSTVARDIVAEQYADLLQLDAKVQRYEKRINKVFKDYPVCQRLAKVEGVGPLIATAMVAAVGDATTFKNGRQMAAWLGLVPRQHSSGNHNRLLGISKRGDTYLRTLLIHGARSVVFRCESKRDRKSRWLTSLKKRRGVNRTSVALANKNARVLWALMAKDEQYLQSA

SEQ ID NO: 426552 - protein, 360 aa, unidentified
MRNEITKDSFHGQSFYVGIDYHKKSWKVTILGEQYEHKTMSQDPNPEILARYLKRNFPGATYKAVYEAGFSGFTSCRELNQLGIDCIVIHPADVPTSQKERLQKTDKADSRKLARALINKELEAIDVPDPELEADRALVRQRFRLVKDIGRTKNRVKSLLLQFGIYIPDQISCAQSRHWSKAYTNWLKELPIGMNSLRQVVDNYVSMAEVQRKELLMVNKQVRQLSLTQGYLSDYTLLLSVPGIGIMTAMTFLTQIGNINRFERLDDLCNYIGLVPTMYGSGDKMATGKMIHRGRKELKIMLIEASWEAIRKDPALMLKFNELSKTMHKNKAIVRIARKMLSRMRFVLKNQQPYELSVVN

SEQ ID NO: 426553 - protein, 341 aa, unidentified
MKSTTIAVDLAKNVFQVAVSRQPGKVAESHRLSRARFLRFFSDRKPAIVLLEACGTAHFWGRKLQSLGHEVLLLPPSHVRPYVRRNKTDQADTKGLLEAHRNDQIHPVPVKSIAQQTLTALHRLRSAWVADRTARINLVRGLLRELGLTIPVGSSHVVPQAWALLEDAKAEIPDPLRLALAEACLEIRDFEARILTIEKQLRILATQLPVVKRLESIPGIGIITATALVGFVGEVKRFPTGRHFASFLGLTPREHSSGMRRRLGAISKRGDVYLRTLLIHGARAVLVAAKNKKSVDHLHAWALQVEKRRGHNKAATALANKMARLAWSVWRNDSTYNSPAS

SEQ ID NO: 426554 - protein, 390 aa, unidentified
MIFIGVDIGKFKHQAVAINEQGKSLCTSFSFENTEEGFDFFLNQLAPFQEKDCICVGMEATGHYWLNLYSCLLGMGIELHVINPIQTDAVRRINIRKTKTDSVDCKYVAEVIRIGNYSDFKLQSKEVQQLKQLCRFRYGLVDEIGMIKNKITGILDILFPEYTKLFSDVFGVTSMAVLEKYTTPEELLKVPTKRLADFLSKHSRGRFGEEKALEIKSACKHSVGLMDNTFAFVFQMRMMIKLIAFEEQQLVDIDKQIENIYADCDCYLHTIIGVGITTAAVVYAEVGNIDNFDSPKKLLAFAGMDPSRKQSGNYESSHNSMSKRGSAYLRRAVWNSATVAAQKDPALNAFYLKKRDEGKDYMTAMGAVAHKLINIIFAVMRDKKPYVPAV

SEQ ID NO: 426555 - protein, 344 aa, unidentified
MSTIDYIGFDIHKKTISFCAKAQDGTILEEGTIPALRKKLLAWANARPRPWIGAMEATLFTGWVYDLLKPLAQALQVAHPPMVEAIAAAKKKNDKVDARMIADLLRCNLLPECYMAPVAIRDLRRVLRYRNLVVRQATRMKNRIAGLLMETGTAYNKERLHGKAYFSELLGSLQEVPSSVVELLQLSRGQVEFFATIQRRLLKGLRDHLELSQRVMLLQSIPSVGEILALSWALEVGEVDRFPSIAEAVSYCGLTSAQHSSAGKEQRGPISKQRNRHLQTILIEAAKLAPRYNPQLAAVHQRELQRGNPNRATLAVARKLVAYLMAVDKSGQPFQMRASGKEAA

SEQ ID NO: 426556 - protein, 325 aa, unidentified
MSLSIGVDVSKNKFDAALMTAQGKYRSKVFENTAVGFDRFLEWIQANVEHGRSNVQVCMEATGAYHEALANFLFDSQVKVFVVNPLRVKRFVESEGQRNKTDKGDAKALARFAGHNELDAWEAPSKGVRELQALVMRLQSLKSMRESELNRLEVAHPSVCDSIATVVAALDMQIETVRRLISKTIDDDPDLKRRQDLLATIPGLGQATIPSLLAYIGKPERFTTVKALVAYAGLTPAIRQSGTSLDKRQGLHPMGHSALRKALYYPAMTAGRHNPIVAAFWQRLKAQNKPGKVILVACMHKLLAIVYGVLKSGHPFDPSLAPEAA

SEQ ID NO: 426557 - protein, 358 aa, unidentified
MAKRTTKSENGKQTVLTAKDRVFVGLDVHKKSYHAAVRINGREVATRVLAPTAEAVLVFLESYRSGRLHVVYEAGPTGFALVRALREAKVSADVIAPSKTPQTPTKANKTDRLDCRQLTFYDEKAMLKTVAVPTAEEEADRQVIRLRDQVVDARRRIKQQIKSFLLQHGVAQPAGLANWSKESVEMLGRLPLVAPLRFCLDAMVAELKDFDERLVEVNREIERLSQEPRHAEAVTRLRKYSGVGVITAMQYRTEVFRPGRFANERQVAAYLGLAPRVSQSGERHRTGPLLKAGHGRLRALLVEAAWIWIQKDETARATYKRLLQNTGQPNKAITGMARRLAIQLWRTLVPPEERRGAA

SEQ ID NO: 426558 - protein, 374 aa, unidentified
MADYSEVFVGIDTSKLRNAVAIAEGGRNGEVRYLGEIANTEAATSKLVKKLAAQHRRLTFCYEAGPTGYGLHRLIKTLGHECVVVAPSLIPKKPGDRVKTNRRDALNLAKLLRAGELTAVWVPDARHEAMRDLVRAREAAVDDLKSKRQQVLSLLLRLGRHFTGKRTWTRAHMNWLVSQKLAHREQRIAFEEMLLAVRQADERVIRLERAIAAAVPDWSLAAVVTALMAVRGLDLISATIFLAEIGDLSRFASPRQLMAYLGLVPGEASTGDRVWRGGITKAGNHRARRILVECSWSYRHPPRVGKKKLAKVEAAPPAVQEIAWKAQARLTARYRALARRGKRPTLVVTAIARELSGFIWAVSRAVGQPATPAK

SEQ ID NO: 426559 - protein, 421 aa, unidentified
MTQSTPDTFAAFVGIDWADAKHDVCLQAAGSTKRECFQLEHTPEAIDAWGTTLRTRFHGHPVAVCLELTQGPLVFALRQYNFLILFPLNPLTLARYREAFTPSRAKDDPTEAELQLELLLTHRDTLQPLPPQSPAMRALEQLVEHRRRVVGDKVRLPTRLTSTLKNYFPHVLQWFPDKDTPIFCDFLSRWPTLKAAPLARRSTLETFFRDHHVRSADVVAQRLHAIKAATPLTTDEGVIAPNALLVQALVNQLRVTLEAIETFDNAIAQRAQSHPDFPLFQALPGAGPVFASRLLVAFGEQRARYATAAELQQYAGIAPVTERSGKKAWVHWRLQCPKFLRQTCVEWAAESIRHSFWARVYYQQQRDKGKAPQAAVRALAFKWIRILYRCWQDRTLYDESVYLNALNNRASSLIHNLAQGS

SEQ ID NO: 426560 - protein, 394 aa, unidentified
MFLVGIDVGKLSHMFCIMDSSNGEILVSPVSFKNNKQGFDFLMGNIKLYPKDKLLIGMEDTGHYHFNLLKFLLDSGYTVALINPITTDLTRKMQLNPTKDDNLDTMTICDVLASSPRKKGYRISEINNFEFYEQKRLTREHHDLKEQLNVYANKLQKCIDIVFPEYNSLFKSKYGTVYMKVLKAFGSADSIAHADIRNIRKCFETNRNGRTISLTPEKLKEAAKHSIGFPSKAEVIEMRHLIDLIELIKEQIKDVDIKIEEFSTQLNSPILTIPGISHFSGTSILAELGDLRNYSKASQIIKFAGVSPYKHQSSQYEAQHTAITKKGSRYLRKTLYQVILPVIRYNPVFNEYYHLKLSQGKGHRCAQGHCVRKLLRIIYHLVITNQPFDSTLLK

SEQ ID NO: 426561 - protein, 408 aa, unidentified
MYAVGVDVSNGWSTVAVLRSKTDIVIRPFNLTHNSQGFANLLEKLGALDGEVRVVMEHTGNYYESIANVLHENGLWVSAVNPLLIRNYGDNSLRSVKTDKVDARKIARYTLDNWEELRQYTPMDTIRYQLKTLNRQFQLASKNRTACSNNLIALMEQSYPGVRSLFSSPVRPDGSQKWVDFAQAFWHVDCVAKLSLNAFAVKYQKWCKRHGYNFSGPKAVEIHEHTKTLFPLVPKSDTTKLLVREAITQLNTISHTAEVFRAEMNRLAAQLPEYETVMAMTGVGPSVGPQLMAEIGDVRRFAQKGSLVAFAGIDPGRDDSGSKVSNKGRIGKRGSPHLRKTLFVIMSILLQLRPEDDTVYQFLDKKRYEGKPFYVYMTAGGTKFLRIYYGRVRDSLKEKGLWDEPVTD

SEQ ID NO: 426562 - protein, 457 aa, unidentified
MARKARRASQTGNLPSTLGHVHLNAAGIDVGSETHYVAVPADRDEHPVRKFSAFTRDLIHLADWLKACKIDTVAMESTGVYWIPLYEVLARRGFKVYLVSPQHLKRVPGRKTDVLDCQWLQELHTFGLLSGAFRPEDIEVALRSYMRQRAMLVSYASQHIQHMQKALTQMNVLVHHAVEDITGVSGMRIIREIIAGERNPATLAAMREPGCKKDAATIAKALEGNWREEHLFALRQAVELFDSYRDKIDDCDRQILAHLKTMEDRSDSSTGAPPRPEGRNPRKNELSFDGATEAYRISGTDLSSIPGIGGHTALKILSEVGTDVTHWPTAKHFASWLTLAPRNRISGGKRLSQRKTPANANRVAQALRLAAFSLHNSHSYLGAFYRRMAARAGKTKAIQATAHKLAILIYNALKYGTNYVEKGANYYEQSYRDRVLKNISRRARQLGFLLVKEELSV

SEQ ID NO: 426563 - protein, 450 aa, unidentified
MSKPKPQVIEDEEHQRVFERVAAIDVAKASGMVCVRLPGRDGRPRASKVWEVPAVTSAVTELGRRLLSDRVQMVTLEATSDYWRIFYYLLEALGLAVQLVSPAQARQLKGRPKTDKHDAMWLARLTEWGMLRPCFVPPAPIRALRDYTRARTDYVRERTRCYQRLEKLLEGALIKLSSVASKLTTESAKDMVRALIAGERDPHVLAGLARTRMKARHDALVEALTGMFDAHHGELAQLELDQVKFLDQNITQLEARIRGTLAAIPEAQGVDADGTTGPAAGTGPDAPVLPAAARLAEIPGISPDLAATIIAETGLDMTRFPTAAHLVSWAGLCPAANQSGPRVRAGKKKHGNAYLRGALGQAALGAARTGTFLGERYRRVARRRGKAKAQVAVARSILTIIWHLLADPAARYTDLGPDYVASRTDRDKKIRNHVRQLQALGLQVTLTPAA

SEQ ID NO: 426564 - protein, 409 aa, unidentified
MELVVARAAGLDVHKKTVVATVHTPERRETRTFGTMTVDLEGLAAWLREQSVTHAVMESTGSFWLPVYNILEQDEQDAFKLVVVNAQHVKQVPGRKTDVKDSEWLCDLLRHGLLRASFIPDKEHRERRELVRYRKALIRERANEVNRVQKLLEGANIKLASVATDVLGVSGRQMLEALVAGTTDPQAMAALAKGKLKRKQAALEQALAGLVGAHQRFVLREQLGHIDDLDARIARLSAELEARLRPFAAAQAALDTIPGVGRLTAEVLLAELGPDLGRFPSAAHLASWAGLCPGNHESAGKRFSGRTRKGNPWLRDALVEAAWAAARTKHTYLGAQYHRLAARRGAKRALVAVAHTLLVIVYHVLTTGEVYRELGADYFDQRNKDALARRLVKRLSTLGYAVALEPLAA

SEQ ID NO: 426565 - protein, 331 aa, unidentified
MTKRSHKKTNNAKPNHTKPSHEKLSDHLGIDVSKRQLDFSFGQGLHRNSVPNDAEGHAHIIEVCRLRPGVRVVCEATGGYEKKLVKALGKEGIETHVVMPLKVKCLAIAMGLMAKTDRIDAEKLSLFSRTIELKAAHVASEHEEKLRDLVMCRKHLVERLVQLAGRKENAGEILCALIKKEERQIQRHLQRIEKQIEQCIAEDKASEDKIERMSQVKGVGRTVAACVLAHMPELGAIEDKTASALGGLAPYPNQSGPVERPSRIRGGRHEVRLALYPAALCAMRYNPTLRKFNQRLKDKGKPGMVRVVAVMRKLLCLLNRICSDPKFSPLT

SEQ ID NO: 426566 - protein, 319 aa, unidentified
MTQSDLVVVGIDVAKDKVDACIRTVMERKTCPTTAAGQRGLIGWLRKHEVGKAVMEASGGYERVWAKALRQAGIEVRIVDPKRVRSFAESAGRLAKNDKIDAEMIAWFAEVFSEAPSQVDDPAQEEMKALVKGRQSLIDVRARLEMQKEHEAPALVRKARARLLKKLAGEIAAIETAIAATIKTTPAFARRAEIIQSVPGFAEGTAMTLLGGLPELGQVSDEVAAALVGVAPYDDDSGKRHGERCIKGGRRWVRNGLYMPCVGAATLNNPVFRAFYERLIAKGKPPKVGLVACMRKLIIILNTMIARSEKWDSKRYKVA

SEQ ID NO: 426567 - protein, 358 aa, unidentified
MNRKAGMSAGQVIGTVDGQQVFGLDIAKSVFQVHTVDMGSGEIVNQQLKRAKVLTYFANRTPCLIGIEACGGAHHWARRLTAQGHNVRLIHAKAVRPFVGGNKTDAADARAIWLAIQQPGTKFVGMKTLEQQATLVLHRQRDLLMKMKAMQSNALRGLLYEFGATFARGRNALFAEIETALEALVGDIPQYVADSLREQVKRVKDLAKDILAIEGRLAQRLRDDKDMQRVAQMPGVGLLTATAAIATMGQASAFKSGREFCAWLGLVPRQSGTGGKVKLLEISKRGDTYLRTLLIHGARSVLTHAKEPGPWLEQLKARRPANVVIVAQAAKMARAIWAVTAKQEDYQRGYCSVKPKAA

SEQ ID NO: 426568 - protein, 436 aa, unidentified
MEEVTDEPLYRDRVCGIDIGKAGMAATIRVPSDENPARRASETREFATTKRGVLALADWLRAWQVPAVVMEATSEYWKPVFYRLEAEGFECVLADARQVKNLPGRPKRDPSDSRWLAACFERGAVRSCFVPDPEFRIIRLHTRYRRDLTDERTREKNRTDKLLESAAIKLSSVVTDLHGVTGRDIMEHLIAGERNPKVLAQLARARARRKITELEHALDGAEFFTPEHAALLTTMLERIDRLTGDITRLSGVIEQLLAPYEEQLQQAESMPGWGRRSAEDAVAETGVDMSKFPTGGHLSSWVGRTPLDSQSGKRTGRARHKKGNKYLAAVTGETAVAAGKTATRDGARYRKLARSRGKGKAQVALGNTQLKVYHKLLSSPGMRYQDLGPDYYERQAAIRRKIAYHVREIEALGLDVTLTRPAPEPGPDEPANTPAA

SEQ ID NO: 426569 - protein, 311 aa, unidentified
MDEVFIGIDISKQYCDLAVIPDGIQKRFTNDEEGQQAILSFISPLRPARIVVEATGGYEMGVIRALADSRLPVVAVNPRQVRDFARATGCLAKTDTIDAGILAQFARAIQPDIRPLPEKEAEVLRALVARRRQLIQMLTMEKNRLEKSPPAGSEDIRDHIYYLTEALKKIDKDISRSIRKSPLWKEKETILMSMPGIGPVISCTLVAALPELGTLNRKAIAALVGLAPFNRDSGAYRGRRTIWGGRSHVRAVLYMGTISAIKFNPAISAFYKRLIDAGKAKKLAITACMRKLLTILNTMMKNKTPWIEVAP

SEQ ID NO: 426570 - protein, 366 aa, unidentified
MDAIYIGVDFHARQQTICYLKTETGELVISELKHEDKEQLRAFYQQFQGHVIIGLEASGYSPWFEAMLEQLGKEVWLGDATEIRRRARWRQKSDRRDAELIWDLMVHDEFPRLHQATAQSREILRMLRYRQKLIKVRTMSKNSLQAIALQAGLAKGNRLFTKDGQAEFKAAAMSPALQWQRDHWFELLKPLNEQLLETMVWFKAQSKDDLVIARLRTHPGIGLLTALCIWHTLQPVSRFRNQRKVVAYAGFDPMIRSSAERAIYLGISKAGSRMLRYLLVEAVHTALRYDDDLKRFYKRVAERRGRPKAKVAAARKLLIRAYIMLRDEIDYAEFRRRAVAVDLPDEVKGQAKVPEVLIRKSTSPGA

SEQ ID NO: 426571 - protein, 434 aa, unidentified
MPARVTGPRPGQRTGLIRSLATEVVLGVPRYSTAASVRAEDNNVHWAKGGRMSMLADEVDVVIGIDTHKYTHTAAVLSASTAGVLAKMTVASATAGYEELYRLGQRYGERRAWSIEGTASYGAGLTEFLQARAERVIEMDHPNRAKRRNGVKNDEVDAVRAAREALARDKLAEPRCQGQRACLATLLCVRASAVEAAKQARTQFQSLVVTSPEPLRERLGKPKGLALLRAGADLADQDGDSPELRLMAGALRALARRALSLYQEAKSYQASMRTIVEEWHPELLAQSGVGTIVAATVLCAWSHPGRFRSEASFAMLAGSAPLDASSGLSTHHRLSRCGDRQLNRALHVVVITRWTKDKATIAYCQKRRADGKSDREIKRCLKRYVARSLFRLLESSSTGTETMVSGQGESHPLALSEPGVKVSLHRAPTGRPGG

SEQ ID NO: 426572 - protein, 382 aa, unidentified
MTAAQKHSTTQRSRTLYLAFELGWEDWKLAFSPEAADNPRIRKISGRDTTALIREIATAKAKFKLPKDAPVVCCYEAGRDGHWLHRYLTAQGYICHEVDSSSIEVNRKARRAKTDNLDAAKLLSMLIRFANGEKRVWRTVRVPSVADEAGRHLHRELEDWQGQRTAHNNRIRGLLASMGLEAKVDKDFPQHLEALRSWDGSGVGEELKARLLRQFEGWQFADRKVKDLENQRARTIRKGTDPRLDQVRKLLQLKGVGASSAWMFVMEVFSWRQIANGRQIGSIAGLTPTPYTSSQTSREQGISKAGSRRLRAMAVEVAWMWVFHQPNSDLTKWFLKRFGSGRRLRKIGIVAVARKLLVALWRYLKEGKAPAGAVLVDWREKM

SEQ ID NO: 426573 - protein, 313 aa, unidentified
MTSVFYFVGIDVSKPFLDVHRLPDQTARRFDNSAQGHRSLIAWLKQHPVGLIVLEASGGYERAAVVTMVDAGLKVFVAQPQVIRGFATSFNLRAKNDQIDAAVLARYAQDRHADLNPITAIDPLHQALAAQVTRRKQLIEMHTMEQNRLQQTTDKTSLASIRRTLRNLEKEIARLEKAIDQSINADPQLAAKSKTLQQTAGVGPQTARVLVACLPELGNAGPKRLNSLVGVAPYAQDSGDKHGPRHITGGRMLVRNALYMAALSASRCNPVIATYYRSMRSRGLAHKTALIACIRRLLAHFDKQIRLSSPHAA

SEQ ID NO: 426574 - protein, 411 aa, unidentified
MNPVIGLDVAKGESQVQAFLEKRKPYKKSFKVAHTLDGLQDLYAFIKEVEEVSGSKPPLVLESTGHYHTPVVQYFEKRGYLLIVVNPLISYKAKSSNLRKVKTDVIDAYHLCELFYKEDLEPYKKRGIQLLNLRILTRQHENLTDMYVQAKLQFQTVLDQVFPAYVGVFGELYSEVSLRTLSAFSTSEKVLEAGEEILSKKIHELCKSRSHQWACNQANKLVKAASQNPFQQTLYQSHLISLEMLINILLEYKKHLSKLEEEIDALAKNIEEYQIIQSIPGIGEKIAATIISEIGEIDRFNHPKKLVAFAGIDPSVFESGTFKGTKNHITKRGSSRLRHALFTAVRCAIRDSRKTRTTKELIPRNKRLREFYDKKREEGKPYRVAIIACANKLLHWIYALLKSKSTFQDVA

SEQ ID NO: 426575 - protein, 405 aa, unidentified
MSLAGRVARLALCSERGLAAESQSLKHRRRAVVDDIALYVGLDVSKEKIAIGLAEAGRKGEVRYYGEIANRADAVRKFVDKLAGRHGRLCFCYEAGPTGYGLYRQLSALGYDCLVVAPSLVPTRPGLQIKTDRRDAVALAALLRAGELSSIWVPDETHEAMRDLCRAREAAVSDLRRARQHLLSFLLRHGRVFEGRTHWTRAHRNWLATQRFDHRAQQIAMEEYIRAIEQIEERRERLTRQMLALLPDWSLNPVVEAIQALRGVAQISAVTLVSEIGDFRRFNNPRQFMAWLGLVPKEHSTGASVSRGSITKAGNTRARRMLVEGAWTYRLPARVSQEILKRMEGLPEAIRATAWKAQVRLCQRYRRMQASGRPTNIVTVAIARELAAFVWAIATTVPIPPTKAA

SEQ ID NO: 426576 - protein, 341 aa, unidentified
MNETLFCGIDLHSNNAMYVITDAQDRQLFKKRLPNELPAVLAALEPYRQRLKVVAVESTYNWYWLVDGLMDHEYPVCLANPAKMEQYDGIKEANDLTDAAFIAHLARLNVLPTGYIYPQADRPVRDLLRRRRLLVGYRTGLKQSLQNMVMRQTGQQVGWRAVRALDEQGRAGMLGESDCLPFVATHQVELIERLDEKIQQFERKALEHAPLRPAYECLLTLPGVGVILGLTIMLETGDIGRFKRVGDYTSYCRCVRATHSSNGKKKGSNNSRNGNAYLSWAFVEAVHHAIRHCPRAKQFYDRKVAKRNGALATKALAAKWTKAAYYMMQRQEAFDLKRVFG

SEQ ID NO: 426577 - protein, 289 aa, unidentified
MRNAVGLDISKLTFDAAAIVGGIEESAKFGNDPKGFEAFKDWLDKFGSDAHVCMEATGNYYEEVADYIGSFYKVSVVNPLKISKYAESRFVRTKTDKQDAKLIAEYCRSAEAKDLIVRKPMKESDYRLKRLSALYGQLVEDCTVQKNRLETAKDDFVREICRKVIDCLQKQLKTVKAEMTELTKHNQYSGVVKRLETIPSVGRLTAVMLLNHLVASDFKTANQFVAFAGLAPKIKDSGTSVRGKGGLTKLGNRKLRAALFMPAMVAYRIKAFPYFIQRLEEKKSRRKLL

SEQ ID NO: 426578 - protein, 450 aa, unidentified
MSDTWPQGPDEMPQSTSAPEFAAFASIDWAARKHVWKMARRDAPSEQGEFENTPEAVQAWATGLFHRFGGRPIAVCLEQSRGALVYMLTRYPHLVLFPVHPTTAARYRETFCPSGAKGDPGDTASLLDLLLRHRERLRPLQLDTAPTRLLQLLTQQRRELVDEKTRQKLRLIASLKQYFPQLLQWFDDVDSPLVGALLQRWPSLQQLHRTNPSQLRDFFHEHNCRGEERIQQRIQAIYAATPATEDAVVLEGEGSKACDWVAVVATLRERIAKLDQRIAELVATHPDSVLFASLPGAGPVLLPRLLVAFGTRRDRYDSAYQMQCLSGIAPVTESSGNRQCVQFRFHCPKFLRQTFHEFAFCSLQKSVWAQAYYKLQRDKKKSHQAAVRALAYKWIRIIYRCWKDGKLYDEQTHLENLQKRNSPLRGGIASATGKRWNRVGGLRKISENFS

SEQ ID NO: 426579 - protein, 404 aa, unidentified
MMYAGLDWADDHHDVVVIDEAGHKLASKRVKHTKEGLEELILFLESFTGKTHQDQMACIVETNRGLLIAAILEAGFCVYPVNPKVADRRRAASGAKTDQIDAYLLAKLGRAELADLRQLHPDSPIIAELKELTRDQDALVHMQTRLVNQLTACLKAYYPVALQLFTKLQQRSTLLFLQAFPTPEKAAAASVQQMEQILKAGGHPTAHKVASKLYEILQQPHLRANAITTRTKSRLALALIAQLLPLLEQIAAYEKEIARLFLTHEDHALFESLPGAGKRLAPRLLAELGDDRTRYTDCTQVAALAGTAPVLSQSGNYQKAHRRHACLKPLRNALYQLARTSRQQESWADDYYRRKRAEGKSHTVALRALSNVWVRILDRMWNTKTCYDPAIFGAARQAHAPRAA

SEQ ID NO: 426580 - protein, 350 aa, unidentified
MIIVGCDYHPSFQQIAFVDTETGELKGQRLAHREEAEQFYRALAVAGQQVRVGMEASGHARWFERLLAELQFELWMGDAAEIRRKRGRKQKTDRQDAQHILGLLLKNDFPPIWVPSWENRDLRQLLWHRHRMVQARTRIMNQLQAVALNEGLLCRKKLWRERGRQQLESFPLAPWASRRRHDLLELLDRLNPTIAELSQAIAQEAEKRPAAQRLMTHPGVGALTALAFVLILGDADRFQCGKQVASYLGLVPLEDSSGNRRRLGHITKQGSSMLRFLLVEAAQVTVRSLPEWRRKYAHLMMRRGRKTAKVAMARRLAVRLYWMMRQGWDYQQWSKFGSHAGQPGPGDGVH

SEQ ID NO: 426581 - protein, 342 aa, unidentified
MNITTIGIDLAKSVFQVHGTDERGKAVVSKVLRRSQMMQFFTQLPPCLIGMEACGGAHFWARKLTVLGHTVKLMAPQFVKPYVKTNKNDARDAEAICEAVGRANMRFVAIKTPEQQALLALHRARQGFVRARTAQGNQIRGLLAELGLVMGKGRSQLERHIPDVLEDAENGLSGMSRELFARLLEHFRHLDAQVQALEAQIKAWHREDAASRRLEAVPGIGPLTASALVASIGDARNFKNGRQLSAWLGLVPRQHSSGGKPVLLGISKRGDVYLRTLLIHGARSALRQSKPSEHWGAALAERCHKNLAAVALANKNARIVWALLAHGRTFQADYRAVRNQAA

SEQ ID NO: 426582 - protein, 405 aa, unidentified
MDAAIPSRVAGLDWASRLHAVCVLDPDGQVRARFEVSHTGSELRGLTRRLVRLGVGQVAIERPDGPVVEALLAAGLEVVVIPGRQVKALRGRYGTAGNKDDRFDAYVLADALRTDGHRLAPLCPDAPETTALRVVSRARKSLVATRVALANELRANLEISFPGAARLFSDVDSPIALAFLRRFPSVTQAAWLTEARLAAFLRRMGYPGRKAAAELLRRLADAPAGLTGPEGQARATVTLGLVAALDTVRAQIDELEGEVVERLGTHPDAAIFTALPRSGRVRAAALLAEIGDCRARFPDAESLTSLAGAAPSTRQSGKHKKVVFRFACDKKLRAAVMDFAGDSRHDNPWAAHLYQQARARGHRHAHAVRILARAWLRVIWRCWQDYTPYDPARHGSYQRLIAQQA

SEQ ID NO: 426583 - protein, 475 aa, unidentified
MNVKGTKKKNQVVTANIFEQQELLKKAEVIKKNLTASTWRELETNGKFDKNEKLSFISDDMLILGCDVGSETHYLRAIDTRGRELSKSAFPISNDSEGFQSAKEWAVRIAADHDKKQIVLGLEPTGHYGFCLATWMISNGISVVQVNPYAVKQTKEVEDNSQLKDDTKDPKLIANLVKDGNFGMSYLPEKLYAELRRLSMFRDQLNEDRIRAINRMHREMKIYFPEYKDAFGKVDGAFSLELLKAAPFPDDLKALDENGIRQIWREAKLRGGGYSRSGEILGYARLSVGIRDGADAAKIAVQWFVKKIMELDEELAVIENLINQKCQEIPHAGNILEISGIGENTLSGILADMGDISRFDDVKEIQKLSGLGLVACSSGKHKGETKISHRGRKRLRYWLFQAAKSAVVHAEEVKELHVYYTTRPDNPLKKMQSLIVIACKLLRIVYTILKKGTVYDPKKMLMDIRRPEKKEAIAA

SEQ ID NO: 426584 - protein, 423 aa, unidentified
MEPQGLTENEEPIRVVHPRCCGLDVHKDAVQACLLVTAPGGKVRQEQRSFATVTEGLLALLDWLVAAGCTHVAMESTGVYWEPIYNLLEGTLAVLVVNAQHIKQVPGRKTDVNDAAWIAGLLRHGLLRPSFVPDREQRELRDLTRYRKSLVDERTAEVNRLQKTLEGANLKLASVASDILGKSGREMLDLLVRGTTDAALLAQCARGKLKAKIPELERALAGSFGPHHRFMVARQLAHIDFLDAAIAEVSAEVATRLAPFEAEVALLDTIPGVGRETAEALLAEIGTDMGQFPSAAHLASWAGMAPGNHESAGKRKSGKTRKGSRWLRATLVVAAQAAGRTKATALGARFRSLAARRGRKRAAVAVGHSILILAYHILLHHEPYQDDRLRASQGKRPPSPEQLVQQLRALGFDVAIQPAAPAA

SEQ ID NO: 426585 - protein, 396 aa, unidentified
MLYLAIDQHRKQLTVNLRNEDGDVIFQRQVSTEWARVRKFMDEVRIRSTPEGGFVAIVEVCGFNDWFLKLLAEYDCKETVLVQPEKRIKNKTDRRDANALGELLWTNRQRLLASKKVQNVRRIVPPSQRDAEDRQLTALRQRMGRLRTRAINRVQHLLLKHNLQQECPTKGLQTQGAKKWLTQLRLGTIDRMELDQLLAQWQLFDQQLKQLEAKIGERQAASQTAATIATIPGAGAYGSLALAARIGSIERFPHARSLAHYFGLTPGCRNSGDATGRLGSITKEGSGIARFILAQIVLHVLRRDRRMKEWFSRIKKRRGAKIARVAVMRRLATIIWYMLKHQQPYRTGGRAEESGGHDFACVPPDRNAFLEALQGRSRGGKQKGCLVLQTAAAARP

SEQ ID NO: 426586 - protein, 340 aa, unidentified
MRQLYVASDLHGNNNLVGIIDGEGKRIFKKKLPNDALLINDILKPFKEEIVGIVVESTYNWYWLVDALMEEGYKVHLANPAAIQQYSGLKHADDKHDAFWLAEMLRLGILPEGYIYPREERPVRDLLRKRGHLVRLRTSLIISLENIISRNFGRKLSVNEVKGLRKDRVTPLFEGKEDLALAGKVSKETIDFLTHQIRQIEGVVENRITLKEPYRYLLTIHGVGKILGSTIMLETGPIGRFETVGDYTSYCRKVPSQWISNGKRKGSGNKKNGNKYLAWAYAEASDFARRFYPESRAYYNRKMQKSNPAVAHSALSHKLARAAYYIMRDQVAFRPEKLFG

SEQ ID NO: 426587 - protein, 344 aa, unidentified
MVTTIGIDPHKATHTAVAIDDDETVLAEITIRADKDQATKLIDWAQSVNGDGRVWAVEAATGLGHLLSQQLVSRGEPVVDVPPVLASRIRVLSSGKSNKNDENDARSVAVAALRRGGLAEVRREDEAAILRMLAKRHRELTALRTQAVCRLHAMLAVLRPGGMGHRLSAKQASRMLGGIRGLDAVGEQRRQMAKTYIVDIRRLDRDLDANKTQIRRAVAAADTKVTDIYGVGPVVAAFLVGYTPPIDRFATADRYAAYNGTAPIEVSSGGKVRHRLSRRGNRTLNHAIHTAAVTQISHHTEGRVYYDKKLDEGKTNKEALRALKRRISNTVYRQLRADARRHSV

SEQ ID NO: 426588 - protein, 340 aa, unidentified
MHPYFVGLDVHKQVIAYCVKTRDGEIVSEGKIPATRAALDEWVKTLPGPWQGGMEATMFSHWIYHHLKPHAQRLEMGHSARMKAISAGKKKSDKIDARTIADLLRCDLFPSCFVIAPELGALRQQMRFRRLVVEETVMFQNKTAGLLMGAGVEYERRRLHGKRYFRDLVKDNQWIDEQMRPLLAFNREQIETLQGMEGRLIRMLERHPRLKARVEALQTIDGVGPVTALTWALEIATPERFPSVKAAMSYCGLTSALRESAGQQKRGPLSKQRNRHLQSTLIEAAKIGPMVNAKLRQVHHKAKEKGGHANRATLAVARKLVAYLLAADRAFLASQESVTA

SEQ ID NO: 426589 - protein, 302 aa, unidentified
MDVCIRSLSLRRTFASTAEGRRELASWLRRQKVGKAVMEASGGYEREWAKALRDAKIEVRIVDPKRVRSFAQSAGRLAKNDTIDAEMIAWFAETFDEARGQAYDATREQLRQMVHARQALKDMQAKLENQGEHALPAAVQRMHARILKTISVELVKFEAAISTMIQATPHFTELAEIIESVPGLGRTTSAALIAAMPELGQANNKIVAALLGVAPYDDDSGRRRGERHVKGGRRRTRNAFYMACLGAATRHNPVLKAFYDRLVAKGKEKKVALIACMRKLISILNVMITRRQKWDANRYALS

SEQ ID NO: 426590 - protein, 362 aa, unidentified
MSQSSWLVAGIVPGIERHPLKKLEPDEAALLRLLWRWRDEAAQKGRTIMRIVVAFEAGRDGFWLARWLRARGVEAYVIHSTSIAVSREHRRAKTDRLDTELLKRAFLGWLRGEQDHCSMAALPTLEEEDAKRPTREHETLVGERTRIVNRMKGTLARLGIRGFKPTLRKAPERLETLRTPESAALPPNTRAELQRDMARLHFVIDQLREIERTRLERLEQRPAEGQNEMVRLVARVVGVGIETADMLVHEVLSRNLRDRRAVARYAGLTGSPDESGSKRREKGLAKAGNARVRRGMIQLAWRFLLHQQNSALAQWYRARTAEARGGMRKTMIVALARKLLVALWSFVRTGEVPSGIVLRPIA

SEQ ID NO: 426591 - protein, 327 aa, unidentified
MDHFAGLDVSVKDTSICIVDDTGKIKREVKVASEPEALLAVLKNPAYHFKRIGLEAGPLSQWLFSALAEAGLPVICVETRHMQAVLQAQINKTDRNDARGIAQMMRAGLYRPVHVKTLRSQKLRMLLTHRKLLQSKAIAIENDLRGTLRNFGLKVGMVGKVKFEARIKELVENLPDLAVLVEPMLIVRRVLREQIVILHRRLLAVVRDDEVCRRLMTVPGVGPVVSLTYRATVDVPARFHKSKSVGAVFGLTCSKYQSGEVDWSGRISRCGDEMMRVMLYEAAQSMLRSKKWSWLKALARRLAVIMHRIWVDGTEFRWTREQATAAA

SEQ ID NO: 426592 - protein, 429 aa, unidentified
MNSTQNKKIEQVKETTMIVGIDVGSEQHYFRAFNWRGIELTRKPVAFSNSMEGFNSFYNTIMELMQKSGLEEVLVGIEPTGHYWFDLGQFMGEKNIKFVMVNPHHVHKTKELDDNSPSKNDRKDPRIIAGLVRDGRYFYSYMPTGVYAELRNASNRRFVLVEEQTRAKNRLQKWIAVYFPEYKGIYTRIDAKGGLLVLKQAPTPEEITKLGEEGIIKIWKDAKLRGSGHKKAMKILNAAMRSIGLKAGLTEARMEIQDLIEDYELQTRRLERVNDLIKELCQQVRYADKLLEIKGIGITTVAGFIAEVGDITRFDSTKELQKLAGLELVADSSGKHNGRTKISKRGRKRLRYLLFEAAISVVGKNKEFKEIHRYYTTREKNPLKKMQSLIAVACKLIRVFHVILTKGVSYDASKMLKDIQHPGEQLKAA

SEQ ID NO: 426593 - protein, 347 aa, unidentified
MRFYTGQHQFYCGIDLHARTMYLCVLNQAGEILLHRNMPAGPEPFLKAIAPYRADLVVCVECLFTWYWLADLCARERIPFVLGHALYMKAIHGGKAKNDRIDAQKIAVLLRGGMLPQAYVYPAAMRATRDLLRRRMHLMRKRAELLTHIQNTNSQYNLPEIGKKIAYKANRAGVAERFPDPAVQKSIEVDLALIDHYDHLLRDMELAILKTAKQHETNTLYLLRTVPGIGEILSLVLLYEIQDIQRFPRVQEFVSYCRLVKCAKESAGKRYGTSGSKIGNAYLKWAFSEAAVLFLRANPAGQKYLARLEKKHSKGKALTVLAHKLARAVYYMLQREAAFDLPTFLRG

SEQ ID NO: 426594 - protein, 341 aa, unidentified
MEQKLSVLGIDLAKQVFHLVGMDAHGTMLVRKRLYRAQMMAFIAQLPPTLIGMEACGGAHYWARRFREHGHEVRLMAPQFVTPYRKANKNDMRDAEAIAEAMTRPTMRFVPVKSVAQHDLQALHRVRERLRKARTALINETRGLLHAYGIIVPQGAATLRQHVLEKLTTEDAKLTPHSLELFRQLLEELAALEARVATYDAQLAQVAQTHPVCQRLMTIPGLGELTATALVAAVSDATQFKNGRQFAAWLGLVPRQHSTGGKSRLLGISKHGDSYLRKLLVHGARSCLRWVGRKRDRRSQWAQSLMERRGWNKAAVALANKNARVAWALMGTEQVYRVAEA

SEQ ID NO: 426595 - protein, 400 aa, unidentified
MHLTENISVPQKNFIAIDLHSDSAVICVRRNALNKAGELVGKNIWCGLVSIRDGLDSFVKALLPYCQDFDHVAVVESTYNWYCLADVFEEQGWLLRIADPSTVSQANLKSSEDRTDAQYLAERLRVGSLKHYLPLSYSSRALWDLCRYRMAMVQDCASLKIKLINLYRNQLSKNLLVADLLDRCRNHMQSNYRFDPDILEEFKDPNIRLRVAFEVSRIAMLEEMIEECNAEIQKQCKDQELVKLCKTIPGCGPVLSAVICTEIGTMQRFKSAGDFVSYCRLCSTSKLSNGKSKGLGNAKNGNAYLSWAFTEVAQYASRNPVIREILQRLLRKYGGLRVKAIRTQAAKIARVTFYVLKNKQPFNAAKCFGIELTKSIKKKLTHKTLREDAAVVLPTVAGQA

SEQ ID NO: 426596 - protein, 451 aa, unidentified
MMKSKRLSPERDFVPTHPNAAAIDIGSRMHVAAVPPDRDPVPVRSFGTCTGDLQQLADWFERCSVRTVAMESTGVYWIPVYEMLEQRGFEVVLVNARDAKHVPGRKTDVSDAQWLRRLHEYGLLRASFRPKGELAALRAYLRQRERLLDYSASHIQHMQKALMQMNVQLHHVVTDMTGETGMRIIRAVVAGERDPAVLATHRDRRCHASEAEIAAALAGNWREEHVFALGQALELYDAYHAKVVECDLRIEAVLRRLRDAAAKPVGWLPPARHRDKTANAPNFDARAALHAVLGVDLTQIHGLGPSLALKLIGECGTDLSAWPNAKHFTSWLCLAPANKISGGKVLSTRTRRSGSRAAALLRLAAVTVGRTQTALGAFYRRLSARVGKAKAVTATARKIATLFYNTLRHGLDYADPGASYYEDRYRARVLANLRRRAKSLGYMLHEMPAPG

SEQ ID NO: 426597 - protein, 436 aa, unidentified
MQVNTRSSRVSIGIDAAVVAPHQIAVRGEVREDFRVSSTLAGLAKLTTRLEPYAGSMVVAEPTAGTWLPLAHAVTDAGCGIGFVANRDSARLRKAIVGASKTDVIDADMLAHCEDVLGVVAAPLPAPGQIALRRAMRRRHVATVDAHRVECRLWALAAWAFPDLWRATGGHTLAQPLLARWPHLDRLAHARVSSITEIVAAHSRDQQPDRRADRIRDAARGWNAFWAHRLDLDALCWEVTAMLDDIAAADRRHRHATTHAVGLWQRHWPGDPLITIPGLGPICASAIRGWWGDATHLQTAKAAAAHAGLNPSTWSSGLTEAPSRKITKQGPAELRLTLYQAANVARRRDPQLAEFYRRLMTERGHNHISANTAVARKLACRAWAIATTGRRYQPRDLDGNPISLDNAAALAVELAVPEHIRSRRRGHTRRGRLNPT

SEQ ID NO: 426598 - protein, 319 aa, unidentified
MQGQEMTEAGPVYLGVDVSKARLDFCRLDGVCHGVANDRAGIAVLVRRARRAGRGHLVMEPTGRLHHDLWPALDRAGVAVTPVNPARARSFARADGLLAKTDEIDAAALARFGAATAPAPVPWPGGKIIEIRELEAAHRALVTERGKLKTRLGEASLALIRRQLRDRIAQATRQIAALEAELDARIKALPELARRRNILVSIPGLGATTARAIIAGLGEIGTASHKPLAALTGVAPMNWDSGKMRGKRRINGGRAALRATLDMAALAASRCNPDLRTFYQRLISAGKPPKLALTAVMRKLIILANTLIREDRQWTPSRP

SEQ ID NO: 426599 - protein, 290 aa, unidentified
MGKGIQTETRTFGTTTSSLKELGEWLERLQVTDGAMESTGIYWKPVLHVLREYPLNLLVVNARHIKNVPGRKTDKADSQWICKLLISGLLKGSFIPPENIQALRDLHRYKKKLVGTVASEKNRIIRVLEDANIKLSSVVSDTSGVTATYLIKGLIEGRKDLEKLVSECYHKKLQATPEQIVEAINGRLTPHLTFLLKAMQKHIQSVEEQLAEIDAEIERHIKDFEKEVELLQTIPGVGREGAIGIVAEIGVDMGVFPSEHHLASHSGMCPGNNESAGKKKAQEHDRGTNT

SEQ ID NO: 426600 - protein, 365 aa, unidentified
MNKNSNPAKTNSQSKEVFAFYIGIDLGDKYSDVCVFDAGGEVSKQFRLAMKEADIRKHFSSIGRSRVAMEAGGQSRWVAEVIESCGHEVYVSNTRKVPYIHDSDDKDDAGDAHKLAELVHFKPRLLHPIQHRSKQAQADLSWIRARQALVDVRTQLINTVRGISKSFGERLGRCSTEAFTAKMAEKIPGAIGGAVAPLLELIDQINERIRYYDEMEEHIARERYPKYGLLEQVNGVGVHTALSYMPTIGDPERFEKSRAVGCFLGMRPRKRDSGSSQPQLGITKAGDEYLRKTLVNCAHYILGPHGKDSDLRRAGQRICKRGGKNAKKRAVIAVARKLAVLLHRLWVSGEVYEPLRNSKKVAAAA

SEQ ID NO: 426601 - protein, 375 aa, unidentified
MSEITRAPIARVGIDLAKRVIQVHAVDGAGRRLVARTLKRDQFIAWCATLPPGCVVAMEACSSAHHWARRLRAMGLDARLIAANFVTPYRMEGKGGKNDAADAAAICEAASRPSMRFVPIKSCEQQGVMSLHRVREGLKEERTACVNRIRGVLAEFGLVFGKSPKVLRAVLTDVLEDASNELSTTARLVLQRAFDHWRELDAHMQWCDQQVGLHVRNTPAAQRAAKIIGIGEIGASALAAGVGDFKQFKNGEQFGAWLGIVPRQDSSGGKIRLGRITKRGDDYLRTLLIQGAKTAVMSADKRDDPISRWLVQLTARVGWQKACVAMANKNARILWAVMTREEGFDPKHVSVKPDAKRPVHERSAAASELATACPA

SEQ ID NO: 426602 - protein, 370 aa, unidentified
MLIHVPPGVGVLAMDVHKSSISAAVLSPEATSPVVDKISSDDESVRRLVGRFEDPGRVWACYEAGPTGYELARLLRGLGVRCEVIAPSLIPSRPGDRVKTDRRDAARMALLLRAGQLSAVRVPTVAEEAVRDLCRARADMVIDQTRARHRLGKFLLRHGQVWRDGDNWTLKHHAWIRAQRFDDAALTATFGHYQATLTAREAAVSAIDADLSRWYSRAPFADAVSRLAAYRGITELGALTLASEVCDWRRFPTAATFMGFCGLVPSEHSSGQRTQRGGITHAGNTHLRTQLVESAWAYKSRPTAGAVLRKRQDGLEPDVVARAWAAQLRLCGKFRRLDERKTNRKTVVVAIARELAGFVWAEMTADTTAA

SEQ ID NO: 426603 - protein, 387 aa, unidentified
MYYIGIDISKFKHDCAVIDDSGEIVTPSWSFTNDAKGFSQLKLLLNSLDTETRIGLESTGHYGMNLKLFLESNNFSFMEFNPLLINRFVKSKSLRKTKSDSIDCMMIAHYLMTVEYKPYPSSFYHTEKLKSLTRFRDSLIRLRSRQLVELTNILDKVFPEFKPFFGSRFSVTALYILSNYSSPEKIANMNSKSYEALRKLSRGRFSTVDFAKLKQLAKNTIGTTEDYLLLQMQIVLDIYRQLDSKVDETEVSIKECVSDMNPPMLSVPGIGIESAAVILAEFGDFSKFKNASQMLSFAGLEPGYFQSGTSETTGKMVKHGSSYLRYALMNCARTVVNYEPTFAMFYSKKRAEGKPHRVALSHVVKKLLRVIYTLQTKNIAYDADFVR

SEQ ID NO: 426604 - protein, 358 aa, unidentified
MNDAKYIGLDVHQATISVAVLDCSGKLVMEAIVETKAETILQCMHGLRGSLHVTLEEGTWATWLHDLLKPHVSRVLVSDPRKNDLGRDGNRNDRRDARELAELLYRNKVKAVYHGEHGLRTLKELARSYLTITRDLTRVMTRLKAIYRSWAIPCVGPPVYALGHRAEWLAKLSEPGVRRRAEFYYQQLDGLAPLRQQARCELLAESRKHSAVKLLRQIPSIGPIRAALLVALLQTPYRFRTKRQLWAYIGLALKTHTSGEYRFEHGHLQRSKKAPAIRGLNRNHNHDLKNIFKGAATWAASNGGPFQNFYEARVARGMKPHMARLTLARKIAAITLLVWKKGVRFDPEHLKLQAVSVG

SEQ ID NO: 426605 - protein, 368 aa, unidentified
MSEYTWIGLDVHADSITAAILEGNREEPEVIRLSSDLRKVRRLFHRLSKKAPVRACYEASGAGFVMQRVLTNEGFHCEVIAPSLIPRKPGDRRKTDRLDAVMLAKLYRSGHLTPVHIPTEDMEALRRLLRLRYTYQSYCKSTKNRISGILRARGFVFTEGKSTWTIKHRQWLFKLRLALEGPIQTALAIELEHLEYLETQREALDAELERFARSSTCRQRVEAICCLRGVRTLTALTLICEIDDVRRFRTPRALMAYFGLVPSERSSGDRERKGPITKAGNTHARRLLVEAAWNNRHRNSADLILKRRRQGQSPAVVAIAMKAQHRLYKKFWRLDQRKHRQVAITAVARELCGFIWAILKAVPQHTTN

SEQ ID NO: 426606 - protein, 343 aa, unidentified
MDYFAGLDVSVKDTSVCIVDGTGKIVREVKVASEPQALLAVLRNATYCFKRIGLEAGPLSQWLYGALAEAGLPVICVETRHMRAALKAQINKTDRNDARGMAQMMRVGLYRPVHVKTLRSQKLRMLLTHRKLVQSKAIALDNDLRGTLRNFGLKVGVVGTVKFEARVRELVENLPDVAELVEPLLIVRRVLREQLGILHRRLLAIVRDDDVCRRLMTIPGVGPVVALTYRATVDVPVRFRKSKSVGAVFGLTCAKYQSGEIDRTGAISRCGDEMVRTTLYEAAQILLVRSTKWSWLKAWAMQIARRRGMRRAIVALARRLAVIMHRIWVDGTEFRWTRKAAAA

SEQ ID NO: 426607 - protein, 473 aa, unidentified
MSKGSGLSRSERRRNARKERLRALVPRGGAVVGIDLGEDKQALALVDHDVRVLWRKTARVKVHELGEALDLAVGAARAAGLAAVTVACEPTGPRWMQVQRLCAQRGLVLVCVQPLASHIAREQQDYTSHKRDESDAVLIARLACELHCYVPEELDEAWALLRQLGRRREQLVRAATAAVQRVGDFLSVAWPAAEAAARVPFESSTWLACLEVVTGRCGGDPARIADLGEEEFFALARDAARGWGAGRITRRIARGVLAVLDDPGAVGWSRRGLFRRIAGELGDLRRARAQLAAVEAEMRAVLGGELGLARLGGIPGLTLTGAAVILAEAGDPRRYETAKSLVKHAGLSPADTSSGAFEGASRISRRGRPGLRTAAWRAVTPLLLHNPVMAAKYQAMVRAAEDAAAAAAAAARPGPAQAAQAGRAARAARARARVACAAALLRWICFMTVHDAGWDPVAASGGRITRDGLPEAA

SEQ ID NO: 426608 - protein, 464 aa, unidentified
MRRKKGERPTGSRRRRRVQVQVINPNAAGIDVGSELHVVAVPPDRDTEPVRSFGCFTADLNALAHWLEQCGIETVAMESTGVYWIPLYQILEARGFEVILVNARHVKNVPGRKTDVLDCQWLQQLHTYGLLRGSFRPEDRICVLRSYIRHRDTLIKSAAAHLNRIQKALEQMNVQFHKVISDIAGVTGMRILKAIIDGERDPVVLAQLKDYRVKSSCETIAKSLEGDWREEHLFALRQEFELYEIYRQKIIECDQKTLAYLSTFESKVEPGQKALQKYKHGRKKAYGNEPVVDLRTPLYRISGVDLTALAGFDVLTVLTLISEVGLDPNRWPTEKHFSSWLGLCPNNTITGGRVYNTKSRKVVNRAANAFRMAAQAVGKSHTALGAYYRRMKTRMGPAKANTATARKLACIFYRMLKYGKEYVDPGVQYYEKKYRNRVLKNLKRRARILGYELIETQEPTPAVS

SEQ ID NO: 426609 - protein, 373 aa, unidentified
MPRYSTAFGMDVHLRSTTVCALDAETGEAVARRFRGNPWGEVAEWMSGFPGPSLAAYESGYLGFAPQRELSALGVDCVVAAVSKVPRSAADLSSKNDRSDAARMAKAILSHDVTPVWVPSPEIEGLRDLAAAHDAATARLAAAKQRLLAFLARRGYVYGGTTPAGNPRKYWTYGFLRWLDGIRPADDGGIRALAALRNEVEAADETREAVLAEYRAAVAAGPLSAEVEALQSIKGCGFALAAAFASEVGDFSRFRSGRQVTAYFGLAPKQRSSADSVRLGGISGAGNALVRKLAVEGSWRYAQAGHQPKLMPKGSGVPLEIRMHGRKGSERLLRRREEMLERGMPQAKANAATAAELVRWLWALGTMCGEAGE

SEQ ID NO: 426610 - protein, 371 aa, unidentified
MKKFSMFVGLDIHKTSIEIALAEAGRDGEVRSYGGIDGTLDALDKVVRKLVSKGCNLHFVYEAGPCGYEVYRHLTAQGFDCVVVAPSKIPRQSGNRIKNDRRDAQMLARLHRAGELTAVYVPCVEDEAMRDLTRSREDAKAMERKAKQRILAFLLRHGHCYSGKSPWSRAHFRWISILKMPHPAQQIVLQESLDTLAECTRRVDRLTEQIQTLSPQWRLFPVTQALQAMRGVSLIVATTTIAEIGDLTRFKKPTELMSYLGLVPSEHSSGRTTRRGSITKTGNGHVRRVLVEDAWAYRLPARVSRKLLIRQEGISQEVCAISWKAQLRLCARYKRFTTKGKSHQLVVTAIARELCAFMWAIANEVQGSVKL

SEQ ID NO: 426611 - protein, 404 aa, unidentified
MDPYAEVAYGGMDVHYKFSRVTFRDRKLRVVRRERLEHKDRQELLRILSRWPRDVPIALEASFGWGWISDVMLQCGLSPRLSNCYKVEQMRKARGWAKNNRMDGDLTSLLPAEPDEWWRVWLAPPEVRDRREWVRYRMDLVQSQTRLKNQIHAVLHRHGIVQEFSDLFGTGGRKFLADLCCDGGGVLDGGALGALRGLLGLLQQVRARLAGIDRKLRKDLKTDGLVSTLKTIPGFGLILSHVLVAEIGDMTRFGSTKNLASYSLLAPRAHDSGEEDAEETPLGRHIGQRGNRTLKWAFLEAAHGAVRKGGTWRKVFDGYTGGGKKNRNRGYIKVARALAGVVRRVWLTGEPYQEQALSRPGSQKRRHRGRRGRGGTRSGTGWPYHPMVDVESPLSSGPKPTGSR

SEQ ID NO: 426612 - protein, 326 aa, unidentified
MRKPGSHTSRLKTQIALDISSKSLDVHFKSDGNAFSVPNTEEGLNRILKSLTAYDVSLVLMESTGGYEDLAACFFQDHGFDVVVVNARHARNFARAMGKLAKTDRIDAAVLADMAFMIDASHDRDRYIKPLTDEQRKRLSVMTVRRRQVVGLISTEKQRLTRADDWTRASIKKTIKALTTELRHIEQQISAHVKKNFVDLSKMLLSIPGIGEQAMTILIGEVPELGKADRRTISALIGVAPFNHDSGNFRGRRRIWGGRQSVRNVLYMGIISATRFNPVIRSFYNRLVSAGKPKKVALIACMRKLLTIINAMMRTGKPFDVALHGG

SEQ ID NO: 426613 - protein, 413 aa, unidentified
MDVLHSRCCGLDVHKSSISACILLREAGRVQKHQRRFGAMTQELQELAEWLRQFGVSQVAMESSGVYWKPVWNILEGQFTVVLANAQHIKNVPGRKTDQKDAEWIAQLLQYGLLRPSYVPCEIIRDLRDLTRMRASLSQEASRISSRIQKVLEDANVKLASVATNVLGKSGRAMLEDIISGEDDPEHLASLALGHLRVKIPQLRLALEGKIRSHHRFLLRRLLDQVQFVEHEIALLDERLEDIGRQRPELAQAVARWDTIPGIDRVAAWALLAEIGDNMAQFPTAEHLASWAALCPGNHESAGKRLRGTTRQGSPWLCRMACQCAWAAARTKNTYLSSQFRRLAARRGKKRAIIAVAHTLIVIGYHLQKNQSNYEDLGGNYFDRIHSDGLKRYLVKRLQQLGHKVTLEPMEAA

SEQ ID NO: 426614 - protein, 341 aa, unidentified
MIEFSTIGLDLAKNVFQAHGADAAGAPVFRRKLRRDQVLAFFAAQPSCIVTMEACPGAHHWGREIGKLGHTVKLIAPAYVKPFVKRQKNDAADAEAICEAAQRPTMRFVAVKSEAKQASAVIFRTRDLLVGQRTQLINAIRGHLAEYGQIAPQGPAHVERLIAQIEDPASDLPPAARASLAVLVGALRHLQEQTAALDAEIAARAKADDTARRLMSVPGIGPLIATAIEALAPPVETFRSGRDFAAWVGLTPVQRSTGGKERLGRTSRMGERTLRRLLIIAASAVVRWAKRKGVPADSWLGQMLARKPPMLVIVAVANKNARIAWALLTKGGIYRAPAVTA

SEQ ID NO: 426615 - protein, 438 aa, unidentified
MSNKVIFNLDELFISVGIDVGADFSWMSIALPNQQFVGKPYKILHNSIDSLTTAVSKIKEAEELYSLESRIFLESTGIYHYPLFCYLRDKGFNCSVINPIITKNSTNINIRKVHNDRFDSKKAALVGLKPDLKVSLMPSDLALNCRNLCREYYDLMDNRSAHVNKLQGELRMAFPQYLGIFSKVTINTSLTLLETYTSPSAFLEADKQEIIDLIKSTARFGLTYAQNKYNAIIQAATDANQFGYIIESNIKRIRLYISFIRKYDEEINDILESLHKLVDSNEDTKFVKQVHLIETFKGAGFLSAATIMGEIGDFSAFSKPKQLFAYFGLDPAVKQSGKFEGTKVQMSKRGSSIARRVIHTLSLQSISISRNGKAKNPVLREYYLQKCDSKPKLVAMGAVSHKVCNMIFAILRDNKPFEIITPQEHIKQYNAAKCDIAA

SEQ ID NO: 426616 - protein, 311 aa, unidentified
MVGVDAHKASFTYLILQLKEGGSLGEVAQGELPNTADGYAELLQALAGQQPRVFVVENARGYALGLSWHLLQQGQQVYDLPATQVATLRRRRQQAKNDTQDARLAALAWLEHPTQRCPLRLPTLPLQLQSLTRCREGLVQQRLSLQQQLVALQRQPYALAQVRQSLQVVMQSLSQEIAALEQSMQTLLEPYRGLQTETGIGLVSAAVLIGEVQYLERFRDEAAFAAYAATASLDHSSGQRQRVKVNPGGNRRLNRVIELITWNRLRLDPRTQAYHARKMCEGMARRQATRATKRQVTRDVDVYRALCRVLT

SEQ ID NO: 426617 - protein, 369 aa, unidentified
MGEVTTFVGLDVHKDSTVIGEAEAGGRDHPRFIGTVGPDVAQLLKALKNLGKPENMLVTYEAGPCGYELARQLRDRGYLCEVIAPNKIPRSATQRLKTDRRDALTLARLARSGDLVKVLIPDEADESIRDLARTREDAVRARLKARQQLNALLLRHGHRYTGGSHWTAAHKRYLADLKFPHPAQYIACAEYLQAAHECDARVTRITEALRAQTETWRLKPVVQALMTLRGMDFVAAVTVIAELGDLRRFAHPRELMGFLGLVPSEYTTGEHRRQGEITRSGNGHARRILVEAAWNYRFPARISRLLYTRQEGQPKAVRDIAWRAQLRLCNRFRRLRARQLHQNKVCVAVARELAGFIWDIARHVTVPAA

SEQ ID NO: 426618 - protein, 408 aa, unidentified
MNAVGIDVSKGKSMVAALRPMGEVALLPQEFLHTEVGLEQMAYAIIALGEDTRVIMEATGRYHEPVAAALHEYGIYVCVLNPLFIKQSGGGSIRKVKTDKADAMKIAKYGLDNWVDLREYTPMDTVRQQLKLCSRQYNLYMKTVVSLQNNLISLADKTFPGANELFSSPERADGHQKWVDFVMTFWHCDCICRVSEKAFTERYQKWCKRKGYHYSAEKALDIYAGSCGHFTTLPKNDNTKLLITTAAQQLLAGKMTLAALRAEMARLARQLPEYDTVHAMYGVGEITAAQLMAEIGDVRRFPRRSSIVGFAGVDPAVNQSGKHAAQSTPTTKRGSPHLRKTLYQIVCTYLRKAPEDEPVYQFLDKKRAEGKPYFVYMTAAQNKFLRIYYARVKECLEAFDAQQNSAQS

SEQ ID NO: 426619 - protein, 355 aa, unidentified
MHSTKTEGLADLSVVGVDIGKDTFHLVGFDGDGNLVLRTKIKRLALNQTFEKLPRCVVGMEACLSAHFVSRTLRGLGFEPRIIPAIYTKPFIKGQKNDYNDAEAIAEAALRPNLPTVSEKSQDQLDLQALHRVRSRLVSRRTATINQIRAFLIEQGITVRRGLRALKNSFDAILEQRQDEISPRMRDILLGLRSDWAWLDERIEAVSTEIESISLSEENCARVMTIPGIGPMISTAMVAAIGLGEAFDRGRDFAAWVGLVPRQYSTGGRTVLGRISKRGSRYLRMLLVQAAKVILMRPHNWPKFSFGEWLSCAAKRMHRNKLAIALANKLARITWSVLRHGKAFDAQTDEVMAGI

SEQ ID NO: 426620 - protein, 397 aa, unidentified
MYIVGIDIAKRKHEAAVIDGEGAVIIKPFSFTNNCSGYNRLLAMLTKAKLPLDEVSFAMEATGHYWLALFTRLQKEGFRVQVINPVQTNSIRSFYIRQAKTDPRDALLIAEVIRFGHFSESTLHPENIYELRELCRGRHAIVSMQADVKRKVVALLDQVFPEYETAFTNLFGDTSMAILQTCPTPKELSEMPFEELCHLIEVSSRKRFRMAKAQELQALARGSFGFAMAGDVFSTMIRLYAKHLDFLKQQVREMDRKIAEIMDTLDTPITTITGIGPTLGAYILSEIGDISRFSSAAKLAAYAGIDPTMRQSGEYNGVRNRMSKRGSPYLRHAIWLAASSAVLHDPALKLYFQKKRDEGKPYMASVGHACRKMVSIIYAVMRDNKAYVPCIPSEISA

SEQ ID NO: 426621 - protein, 320 aa, unidentified
MTTTNCTLGIDISKQKFDVALLRGNKLKHKKFTNNLKGHESLIIWLQQQNARGIHACMEATGIYGEALAEFLYDAGFPISIVNPGRIKGFAQSEQLRTKTDKVDAGVIARFCAALEPDLWQPQPREIRQLRELVRRLEALNGMHQQETNRLEAADGFIAEQLQDHIDYLNTEIKKVKKLARQHIDNHPELKYRKTLLESIPGIGEATINVILSEFGTITQFKNAKALAAFIGVAPKIRQSGTSLRGRGAMSKMGRSALRKAFFMPALVALRYNPILIELKIRLTRSGKSKMAIVGAAMRKLVHIIYGVLKNGVPFDEKFA

SEQ ID NO: 426622 - protein, 335 aa, unidentified
MNYKLFIGIDQSKKTFDVCMLDPEKPEQLHQEQFENNTKGLTKMMMTIQTKYKIEQQEILFCAEHTGLYCLPLSVFLSQKQAHLWLENPLHIKLSSGLKRGKSDSADAKTIAHYCYTHRHEVKLYQLPSKTIFALKELLSCRTRLIKQQTAWKITSKELAAFKVDGTSLIIKESKSLIKIFDRKIEVIEAQMLQLIKEDEQLQNQFELVKSVRGVGNQTALAVIVYTQGFTLFNDWRKFACYCGVAPFEYTSGTSVRGKTRVSHLGNKKLKALFTMCALNTIKTENEYKTYYNRRIQQGKNPMSTINIIRNKIISRIFAAVNRGTPYQQNYQQAA

SEQ ID NO: 426623 - protein, 313 aa, unidentified
MISMNPVVGIDCGKRYLDAALFPGTDRTRIENTPLGLATLVSWLAERSVGVAGLEASGGCERLARDALIEAGLSVRIFEPGRVRHFAGAKGRRAKTDAIDAALIAEFTAAFPESPPAVRDPAREQLAGLIRARRLVVTKKADLAKGLASAPEEAKPILEAVVAQLATAEEALETAIVKQVDADTRLAQLTTALVTAPGVGPVTAAALAALPPEFGHTTGARIAALVGVAPFADDSGEHQGKRQIAGGRGDARRALYMAALSATRTKGVLGEFYRRLVERGKPPKVALTACMRKLVVRLNAMVAAKATWQEHPA

SEQ ID NO: 426624 - protein, 411 aa, unidentified
MDLMYARCAGLDVHQATVVACVRMPGPRPDARHAETQTFATTLRGLEALAAWLTAHGVTHVAMESTGVYWRPVFAVLEGTVQVQLVNARHVKMLPGRKTDVRDCEWLAQLLECGLLRGSFIPPAAVRDLRDLTRLRKALIRERGHHVNRIAKTLELANIKLGSVVTDIMGKTGRAILQALSAGLEDPEQLAARAQGSIRKKQAALREAVEGRLTPHYAFLLQQHLALIDTLDAPLTTLDTRIEAAMAPFAETAALVHTMPGVATRAAQAILAETGMDMSPFPTAQHFAAWARLCPGNHESAGKRRPTTTGKGATWLRATLQEAAWAAVRTKKSYYRALYHRLKTRGGPKKAIVAVQHAMLVALWHMLTRRVPHQDLGADYFDRRNTTRIRRHHVRRLEQLGYQVLLVEPAA

SEQ ID NO: 426625 - protein, 404 aa, unidentified
MAAVCGIDWAAEHHDVRIADEHSGAPLAERRFAHDEDGIGALIDALIEHRVARVAIERPDGLLVGRLIAAGITMIAIHPNQVAAARDRFRAAAGKDDRFDAMVLCELARTDHHRFPALAPSGDETLVLRALVRTREDLVAARVALANQLRAHLDAFWPGAARIFADIDSPIALAFLARYPSPTDARGLGPKRLAAFLARHAYCGRKTPEALLARLRSAPVAAIGELETEARRTAVLGLVGALRPLVEQIGQLTSEIRGVIRAHPDGPIFLSFFRDPKSVVTAAGLLCEIGDNRARYPRDETLAADGGQAPVTKQSGKHRAVSFRWACDKRLRNHLAVLADSTRHWHPWAHHVYQRAIDRGADHPHAIRILGRAWTRVLWRCWQDHAAYDPTRHGNLTRLLQARG

SEQ ID NO: 426626 - protein, 340 aa, unidentified
MQITTIGLDIAKNVFQVHGIDAAENVVVRKQLRRGQVLKFFAALPPCLVGMEACASAHYWARELRKLGHEVRLMPAKDVKAYVKRHKNDAVDAEAGCEAVRRPTMRFVQVKSAEQQGRLMQHRARDLLLRQQTQVINALRAHLAELGIVAAQGREGLKQLLTIIADESDERLPIDARASLIVLAAQLQALHTMIGSIERRLLVQHRASEESKRVATVPGIGTLGASAITATVTDPKAFRSGRDFAAWIGLVPRQDSTGGKQKLGPISKQGDRYLRRILVVGAHSVLRRAKQNPEKYPWLTQLLARRPFKVVAIALANKMARIAWALLASGGHYQPRLAAA

SEQ ID NO: 426627 - protein, 352 aa, unidentified
MQHSIGSDIHPRYQKVAWIDEQTGEIRKRRLEHEGQEVKEFCAQFPPGTVVGIEATFPAYWFERLMGELGHELWVGDAARIRASEVRYQKTDERDAEDILDLLRTGRFPRIWVPSLEERDLRQLLVHRMKQVRARTQVKNQLHYLAISQGLCRKRKLWSVRGRKELESLVLLPWAARRRKELLETLDRLDEQVRELDRAVEEAGRERPEVALLRTHPGVGMVTALGFTLTVGPVERFPTSRKLVSYWGLNPRENSSGGRQRLGSISKQGNTMMRWLLIEAAQTAARLDPGLRRIYQRLKSRRNSGVAKVAVARRLTVRLFWMLRTRHNYAQLVHMSGSPTGAVVPPTAEPRV

SEQ ID NO: 426628 - protein, 392 aa, unidentified
MIYVGIDIASEKHDYFMIQGETGIVFSSKSVTITNTDEGYKKLHRDILAFCGATGDSKVHIGLESTGIYHTNIISFLLAQNYEVMMINPILTNMARKASKVHSPKNDNLDSQTICKYLIDNPDKFLPYTLSLYHNEALKSLSRKRFFIANDLRKAKLAVNNLVQLIFPEFKSLFSNIYGDSAVAILKEYKTPKVLAKARIAKVASLIHGRCRCTAEQLITAAKNSVGISSDFYAFQLIDAIEEMEHIKRRIEGYDAQIKAYVDELCPNLLSVPGIGYVTAGLIAGEIRDANRFHSAESLVSYAGIDVTVYQSGKYTAKNLIPSKKGSRYLRYALFQVSRVIWQHDPVFRSYYEKKQAERKHYYVILGHIQKKVVRVIYSIMKSGSAYEVRSV

SEQ ID NO: 426629 - protein, 544 aa, unidentified
MATKCKSRKSGKSCKSRPAFLGKPQGVIQPRVQKVGPEHFGIVAVDCALARSKWMFCDFYGRVLLPPKNVEHTRSDLQLAIAEIDQASTQYDIRDRIVAVEMTGTYHLPVKRAFRQAGWDTRLVHPFSSHHYLLPANPDNKTDDNDLEAIFRAAVNGFGLVEPACEETYQTLKYLVRARRDLVEKRSRLHCQIREHLQRCLPGYGALFPDDELWTSPVALRIARRAASAEAIRQTGIPGLTRWLREDRCRFQSRTVERVVAWAGNAAPADPLAPMLTRLWQKLDDDRQTKTQQILEMEREIAGFLVHTPYLLLLSHPGINVVSAGELAGEMGPIEHDANAKAITGRAGLFPSRYQSDEVDRADGPLARFRNHLLRAVWLRVASNLVKCNAHYRGMAQLWKLREVDARDIRTRIANRATRPIFHMVSGRKLYEHPSRLDRGYVLDKLRQFHLDHQTPPQQILRDLQHAIKQLPPEAYPQEAEPLQQAYQKNRRSRRSGPVHIGEILLATLARLGVLELESTESEAQGPARSCPTHEPDNVVVPMG

SEQ ID NO: 426630 - protein, 353 aa, unidentified
MEHFIGCDAHKKFSVFASIDEKGEYGETIRVPHDVEVFREFLKELPAGSKIALETSGCYYWMVDEMERAGHLPQLAHALTAKRRMEGRHKTNDRDAKGLAMLLRNGTLPVVWIPPAELRDQREMLRWRMCLSQMRTRIKNRIHGVLQRYNIDIAVSDLFGDSGRVKLLARQGELPPHSRQSVLEQLKTIDSLETQIGECERILEEILYPSAERDLLDSLPCVGKILSAVLALEIGDVRRFGGPDLLVSYAGVVPVARESANWKRKDKCPRDCNVYLKWAYVEAANLISAHTKHWADRHVVQLYQRVKESSKMHGKAAMAVARHLAEASYWMLSKQEVYREPQTRRQVLSSTHG

SEQ ID NO: 426631 - protein, 422 aa, unidentified
MVMEEITEEPGALTERVAALDIGKASLTACIRVPHEDKPGARRQEVRTYATVTRALLELRDWLVCQGVTLVVMEATSAYWKPPFYLLEDDITCQVVNARDVKNVPGRPKTDKLDAVWLCKLAERGMLRASFIPSRPQRQLRDLTRYRRTLTQERTREKQRAEKLLEDAQIKLSVVISDIFGASGRAMLDALIAGHASPHELAALARGKMRAKTSALQEALTGHFTEHHAFMLGMMLDRIDALTTQIATLTARIEQAIAPLAAQVAQLDEIPGIGTTAAQDLIAEFGADMSRFPTPGHLVSWAKFAPRARQSAGRAKAATTGQGNPWLGGTLGEAAISAARTKTFLASRYKRIARRRGKNRALVAVGNSILTIAWHLLSDPAAHFTDLGPDWHDRLAPLRRKRQLITELERLSGKKVTLHDAV

SEQ ID NO: 426632 - protein, 343 aa, unidentified
MAIVAGFDVHRNQITFDALDTETGELARGRIDSTPDAVRAWVGRFRGQHVDVAVEACTGWLFVCQSLAEVGATAHLAEAAEVSSRRGKKRHAKTDRADARHLRELLGEGRLPEAWLPPAHIVEWRTRTRLRKTLVEERTQWLQRIRATLFHHGVPAADVPQRLLSRTGRTFLERVRLPEAARERITVALAMIEAIEIQLAPLERRLRRLARRQPGCQALMREPGIGELIAPTLLCELGDVTRLSSSRKAVRAVGLDIGVYRSDRRSRVGKLTKQGSPTARWALYEAAQSACLRTSPNNAAYLELKARGLTHTRASLTIARKIARRSFHTLRELGPQALEPVND

SEQ ID NO: 426633 - protein, 336 aa, unidentified
MSHYCGIDLHSNNHVVVIIDEEDRRVFEKRLSNDLSLTLKALSPYRKSLQGIAVESTFNWYWLVDGLQEQGYDLQLVNTAAVKQYDGLKYSGDHQDAFHLAHLMRLGILPTGYIYPKEQRAIRDLLRRRLSLVRTASTQLISAQSQIWRSTGIRIKSGELRKPAFVTPSVDRYTLQAVHAVLAVYQSLQREIDGLEESVYQAVKLTDDFAILQTVTGIGKILGLTIMLETGDIHRFASAGNFASYCRCVDNTRTSNGKKKGEGNAKAGNKYLSWAFSEAAHFAVRFEPLAQRFYERKKAKTNGIIAIRAVARKLARASWMMLKHQVPYDARRMFPG

SEQ ID NO: 426634 - protein, 336 aa, unidentified
MTILYVGVDVAYASFEGVAWSKRTPRQVERYDNTPSGFRQFAKRVEALRRAEGASAIHLILEPTAGYQAALVLFAHRRGWRITQVNPLQVRRWAQGAGRRAKTDVQDALLLAEYGERMQPAPQEQTPPEIQELDLLLRRRQDVEDLLQRERNRLFTLKKHPHPPASVRQSLERTIQQLEQELAQLEEALEAFLKAHPALQAQQRRLRSVPGVGARSVLRLLVLLYRFYALTAAQGTAKQLVAFLGLDPVPHRSISSVYRPPSISKKGDKSMRTLLYMAAFGGVSGHNPLGHFYRSLIARHKPKKVALVAAARKILVWAWAVFRSAQPFQTALKPVP

SEQ ID NO: 426635 - protein, 407 aa, unidentified
MNAVGIDVSKGKSTVAVLRPFGEIVVSPFDVSHSPKELSKLVTLLKTLNGDTKVVMEYTGNYYLPIALFLRNNGFFVSVVNPILVKDYSTKSLTVRKVKTDKKDALKIASFALDRWNELSPFSAQSEARLLLKSYNRQYNQYNKLKIILKNNLIALLDHTFPGANTLFSTPTRKSDGHEKWVDFVLKFSHSECISKKSFSFFLKSYLSWCKKFGYKFSKSKAQAVYDFACNCSPSLSFSDSSALLVSNAIIQLNSINETLASLASEMNKIAATLPEYDSVMSMFGVGSVLGSQLIAEIGDVSRFPNKKALVGFAGLDASPFQSGNFNPQSRSISKRGSAALRKTLFQVMSVVLQRAPTNNVIFQFMDKKRSEGKHFYVYMTAAANKFLRIYYARVTEHLNLFTTTTA

SEQ ID NO: 426636 - protein, 339 aa, unidentified
MTVVGLDISKHVFQVHAVDGEGGVVIRKRLRRSEVLQFFEQLAPCLVGIEACGTSHHWARELTALGHEVKLMPPTYVKPYVRGNKNDAADAEAICEAVTRPTMRFVPIKGVEQQAVLVMHRVRSVLVRQRTMMANALRGHMAEFGIIAPQGLRAVRELGRLLENPQICVPDAARATLRTLIGQMADLETSIREIEKRLVAWHRADETSRRLATIPGVGPITASAISATVSDAKQFRSGREFAAWLGLVPRQKASGMKNVLSGISKRGDKYIRRLLISGAVATVRYSRAKPTLERVWINSLLERKPAKLAAVALANKTARIAWALMVKKEAYQLLPSIAA

SEQ ID NO: 426637 - protein, 371 aa, unidentified
MTEAVKYVGLDVHKETIAVAVADGERGGEVRFVGTVANEDDAIRKLVKRLTGPGVTLNVCYEAGPCGYGLHRLLSKLGQNCIVIAPSMMPRRPGDHVKTDRRDAMTLARLLRAGELTAIWVPDEAHEAVRDLIRARRSAQDDAIGAKQTVRSFLLRHDRRFGGKAAWTKVYWRWLSEQRFEFPHQQLAFEEMQKRVLEAQARVARLEAALAEAVDAWCFAPLVRNLQVLRGIRLVSAATLVAEVGDLTRFDNPKQLMAYVGLVPSEHSSGAKTKRGRITRAGNAQARTMLIEAGWSYRLPAREERRYRERVIDLPEDIQAIGWKAQVRLCQRYRRLAATGKPQPKVTTAIARELVGYAWDIARRVSPAIAG

SEQ ID NO: 426638 - protein, 419 aa, unidentified
MERQYVAVDLHSRRSMIVRENEAADERQVTRIDNDPMALAEALAEAGPDPEGAIEATYGWYWAVDVLQAAGATVHLVNPSGLVWEERRVKNDYRDCCELIDRMRLHKLPEAWIAPPELRESRELVRYRAKLVTLRTSLKAQLKSVLAKHCLHPPVDDLWGVAGPQWLDTLELPDAYTTRVESLRDLVATIDREVAMLERTIHQRLRHDRGYQAIQSLAGVGRVLSAIFVVEIGDVSRFSSPEALCSWAGLTPKHRESDRKTRRRKVTKKGSKLVRWAAIEAVSHVRSGPKLKVDYHRIAQRRGANIARAAVARKLLTLAYYVLSTTGRRVAVPDHLAEPVEVACATARSATSRWSRQGETGTSQPGRELAKRHDPHAPGAVEELIEPAWLWPKTTMRHPRREEMPGSRTPACPPLLVDW

SEQ ID NO: 426639 - protein, 376 aa, unidentified
MASSNLFLGLDVHKDSVTIAVFVHHASEPERVDRLPNDLPKLRRYFQRLASRGTLNACYEASGAGYVLQRHMTAWGYRCELAAPSLIPTRPGEHRKHDKRDAIQLGRLYRAGELTLIHIPTEAEEQVRDLVRCRETFQREILKSRHYILKFLRRRGFVFRGGTNWTHRHFVWIRQLLQPGVLSAEDRLVLSEYLALLEYKIARRDELDRQVESYALRPLYKPLVDRLRCFRGLDTHGAMVLATEVVDFRRFDNPRKLMAYFGLVPSEHSSGDRRRQGAITKAGNARCRHVLVQAAWSYRHRPNQSVALTRRQTGQDPAVITHAWKAQHRLHKLFHRVHQRRPHQVAVVAAARELVGFLWAVLQDPVLYEHTTENAA

SEQ ID NO: 426640 - protein, 327 aa, unidentified
MARMQGKTTSDITQLFAGIDVSKAHLDLQLSCERRSRRFTNDPAGFAAIDAYLRARVDAPCLVALEPTGRYHFPVWRALHEAGHGVAPLNPLHVRRFAESDGELAKTDALDAAVLARMTAQRLPAAKRPPSEEQLRLKALTTSIADRIDRRAALKGQRAEARDPLIACFDEAEIAQLSDAIDTLKAERARLITANPESARVSEILCSMPGIGEASAHRIIAEMPEIGALDKKQAAALLGTAPRANQSGKRDKRRRTKGGRRRLRAALHMPALVASNANPDLKAFKQRLKAKGKSNGVILTAILRKLIILANALVAQNRKWAPKMTLT

SEQ ID NO: 426641 - protein, 446 aa, unidentified
MAALARWVGRAIGLDVHRDFCVVAICEDGRVRSAGRVPSTPEGIRTLAESLLPSDRVALEVTGSCWEVARILEPHVQRVVVVSPDDTGISSARAKTDKLDARTLASLLWKGELEAVWMPDERCRILRRRLARREQLMRARTRVKNEIHAVLQRRLQERPPCSDVFGVKGRQWLAGLELPVEERESVDAGVRQIEFLDSEIAAVERLIAQQALSWPEIRRLMTVPGVNLVCAATFIAAVGNANRFLTSRKLVAYLGLDPKVRQSGEAPARSGRISKRGSASARWALVEAAWTAVLQPGPLHAFYERTKARRGHGKAIVATARKLAILFWCMLTRSEDYAPTTIADPQETPPPGDHRRRGEEHSSRRRDLVHQRDDARSRTRTRAPSRGLLQADGHRPTGRCASEESGRGRDTGARINKALEGQSRAADHKLLTSALRFVSHPRPPTT

SEQ ID NO: 426642 - protein, 385 aa, unidentified
MNRIIKIGMDVHSKTFNLCAIEANIAGEDKILGSTQVTADYHEVVKFIEGLKKKLNTINPVDTFDIECGYEAGCLGFSHSNQLTAMHIKCHILAPSTILQPNGKRVKTDARDAEWIAKQLAWGSCTFVHIPTEKDAGIKEYLRMRDDHKSDLKKNKQRINALCLRNGYVYSGTKWTARHWEWLKKLELLEFVRETLDEYMATYQLQQSSIERFDARIEELAADGEYAESVKKLGCFLGIKTHTALSVIVETSDFSRFAKGSTYAAYLGLAPGESSSGEHICRTGITKAGNCHLRRLLVESAAGICKGKIGAKSKALKARQSGNTSEVIAYADRANIRLRSKYYHMIRNGKKRNVAVTAIARELACFIWGMMTGNTLPRNDLRVVA

SEQ ID NO: 426643 - protein, 344 aa, unidentified
MRIAVLGVDLGKNVCSLVGLNASGAVVLRRRAKRETVIALAAKLSPCIVGMEACCGAHHLGRVFAAYGHDVRLMSPEYVRPYVKAQKNDDRDAEGIAEAATRPTMRFVELKSQEQLDMQTLHRSRDRLVGERTALINQLRAILLERGIVAPQGKRKLEQFLFNLMDEQGGPGLSPRMITLVTDARAQWAELDRRIAAFDAEFVRWTKENEDARRLATIPGVGATIASALIAAIGKGETFERGRDLAAWLGLVPRQFTTGGKPKLLGISKRGNSYLRKLLIHGARAALPYVAERDVPLGRWAKSLLSRAHPNVVVVAFANKLARIAWAVLRRGEPFAAKGLPVAA

SEQ ID NO: 426644 - protein, 360 aa, unidentified
MRYSTIVGIDTHSKKNAVCAIVPATGEMREAVLSEDPGQLLSWISGQGFPEPVGCVYESGPTGFGLARALEAGGVACTVAATSKLSYRVDRQKNDRADAKWLARQMLAGGVRAVRVPTPEEESLCHLSRLRGEVAADLRKAKQRVSSFLLLTGTEYTLTKKKWSKTFRKWAESHEFDQPADTFTFRCKMSAVLRLEERLAEVEAEILRTIASSPKLSERMSRFTCIHGIGKVSAFSLVCEVHDFDRFNNGASFASYLGLVPSESSSGKKVSRGAIAKQGNSHLRRILVEAASCDSKQFKAVRSEDAAVPEAVRAKAEKCAARLRKRRAALKKRGVSANKAKVAVARELAEWIYHIAVMPA

SEQ ID NO: 426645 - protein, 424 aa, unidentified
MFVGGDDLLDTLVMETICNDPQVCRIVDLPVYYELETNNGNRDYRIQIGGHYMNYNTVYVGMDVHKESFTLCSCKYEDEKASHYQRTPASYKNVLRYLAFLRTIYGEDTRFVCGYEAGCLGYSLYHQLENFNVECVILAPTTMLEQRSKRRIKTDKRDAEIIARSLAQHNYSPVHIPTETDNQTKEFIRMRDDHKAELKKIKQQILSFCLRQGYQYDGSGNWTAKHVKWLRSLKPAGLYKEILDEYLLTYTILTDKLNRLDQRIEELASKEEYTESVSKLTCFLGIKTHTALSVIVEVGDFQRFVSARKFAGYLGLVPGQHSSGDDRNGLGITKAGNTHVRRLLVESAQSYTRGKIGYKSRVLRSRQAGNSPQVINYADRANERLRRRYYKMVLKDGKKYNIAKTAIARELACFIWGMMTDNIY

SEQ ID NO: 426646 - protein, 361 aa, unidentified
MKSTTIIAFDQHAATTVAAVLLPSHRTPALHSLASDSSTILKFLARLRRESPLSCCYEAGPCGFELQRALQARDIPCEVIAPALIPRRAGDRIKTDRRDAGQLAVLYRAGALTAIHIPTEQEEAARDLLRCREDIRADLLRARHRLSKFLLRHGRRFTATKKAWSKRHDTWLRAQTWPIAALDQTHRAYLRAVDEVLTRLRDVENDLRALLDLEPLQSRVQRLRCFRGIDDLTALTIAAELGDPRRFATAPSTMAFVGLVPSEHSSGSKRAQGGITKTGNAHLRRVLVESAWHYRHHPFVSATLRARQRGAPADVIARAWTAQQRLHRRYARLAARGKPKQHIVTAVARELTGFVWAALTQ

SEQ ID NO: 426647 - protein, 325 aa, unidentified
MIHQVLGMDVSKETVDISIYNGSYHSHKVLKNTPRALLSYIKKYDKQTLHLVMESTGIYHLRLAMAASEHGYMVSIVNPLIIKRYGEMKMRRVKTDKADAKLIAEYAYEQKPPLFRPASKERSQIQQLLKGLEDLHQSKSQMKNRLEAYDHGLGITPALRESITKIISTIDEQIDKLTDELNDNMDKYYPELKEKLTSIPGVGAKTASTIIAYYGEFENFQTAKQAVSFAGLNPNPRQSGTSVNRGSNISKKGHSIIRKTLYMCSLSLVRCNPEFKCYYEKMVSEGKAKKKALVAVANKILRQIFAILKYDREWTPYYSLKYKNA

SEQ ID NO: 426648 - protein, 306 aa, unidentified
MNKNSMFYIGLDLGDKFSYITIIDQEGESVEETRLPTNKASFQRKFSTLQPCRVAMEVGTHSRWASHLLKDLGHDVLVANARKLRAIYHNPRKGDRADAETLARLARLDPELLSPIHHRSPRAQADLAVLRSRDAIVRCRTLLINHARDIVKASGSRLPSCSADSFAHKVAPDIPEPLRPALAPIIDTIASITQQIQSYDQTNEELCRERYPETRLLRAISGVGPLTALAFILTIENPDRFRRSREVGPAIGLVPRRDQSGDQDPQLRTLAPAPQVQVSQKRGTPTCTACWLDPHNTSWGLSRSTL

SEQ ID NO: 426649 - protein, 360 aa, unidentified
MAYEFDGPCQRPMQGDHPMKTVTTIGIDLAKNSFSVYGVDAKSKPVLSRTLSRASVVRFFANLPSCLVGMEACASSEYWARTIESLGHEVRRIHPRYVKAYLLGAKNDANDAAAICEAVQRPNMRFVPHKSPEQTDIQCIHRIRQGYVKSRTALVNQTRGLLAEYGIIIRQGICAVRNQLPALITDEKNELSGLMRRNLTSLYESLCFLDDRVHEQDKLLKVVAKENEACQRLMKVPGIGIMTATILLTIAGVASNFKNGREFAAFLGLVPRQNSTGGKVRLLGISKRGDCYTRTLLIHGARAALCRMISGYTPEYRRNLWAVELAARRGKNKASVALANKTARVVWSLLTQGGEYKHAA

SEQ ID NO: 426650 - protein, 405 aa, unidentified
MDIQPMFRCAVGIDIHLALICVCIIVAEPGLEPVVHRREFGGFQRDRRAMADWIASFTPDIVVMESTGIYWKSPYAALEKVGIRAQVVNARQVKKVPGRKTDTSDAEWLAMLARAGLLRGSFIPPERLHTLRQVSRHHQKLTAMRAMEKNRLVKVLSDAGIRISAVVSDPHGVAASAIIDCLLDGGTPEQALALAGRLQAPREALLAALQGELSADHLFVAKTIRHHLRALEAQLADLEHYLVDALQPHEAALELLMTIPGIDRLAAAKLLVEIGVDMAAFGNAGRLCKWAGVCPGNDESAGKRRRGDTAPGNRYVRALLCQIAWAAVRTTSQFKSRFQNLVSRRGTKRAIVAIGHKVLKTVFVLLSRQVPYHDSTVDYEALAVKRNAPRWIKQLRKFGYLPKMA

SEQ ID NO: 426651 - protein, 420 aa, unidentified
MDVVVARCAGLDVGKRELVACVRVPADGARAGTVIGSRRQVIKKFATFTGSLRRLAGWLAGHGVTEVVMEATGQYWKPVWYALEDHGGFELKLVNAQHVRFLPGRKTDVADAAWLAELLEHGLLRGSFVPPAPIRELRDLTRYRKKLIQAHTAESQRVSKTLEDAGIKLDSVASDVLGVSGRAMLGALLAGERDPAVLAELAKGRLRAKIPILVEALTGRFGAHHAVLLRLSLDHLQHLEQAVATLDEQIDAVITPFAAARDHLDSIPGVGKRAAENLIAEIGVDMAVFPTAAHLASWACMCPGSNITGGKRRSGKTRPGSPWLRDALVEAAWGASHTKNTDLGAQFWRLARRIGKKKAAVAVGHSILTAAWWMITNDVDYHDLGSDHYTRHHDNTDRRRDRALRDLHALGYRVTLDPAA

SEQ ID NO: 426652 - protein, 344 aa, unidentified
MKISTLSIDLAKNVFQVAGFNSNHKRECNKRLNRAKLNAFLANTPPCRVVMEACYSSHYWGRVFSSYGHTVDLIPAQHVTPFVRGNKNDSNDALAIYEASLRPHIKFVPIKTEAQQEILMLHKIRERLLQNRIAATNQLRGLLVDFGYVFPVGIKAFEQGIIALESDSELRPQLRIMVSDIYTEYKTLVKRIKAIEAMLTAHVERDTNAKILHSIPGVGVLNASAYAASIGNGQAFKSAKELGVWLGLTPKQYASGDKSKMSGITKRGNSYLRKQLIHGARALIARSHHKTDALSQWINQLREKKHFNCVVVATAHRLARLMWILLTKQTLYSPQYVQNTHKDA

SEQ ID NO: 426653 - protein, 350 aa, unidentified
MVVVGADVHKRTHTFVAVDEAGRKLAGKTVAAVTAGHAEAVMWAREHFGTEVVWAIEDCRHLSARLERNLLALGQKVVRVPPKLMAQTRASARTRGKSDPIDALAVARGFLREPDLPIASHDDVSRELKLLVDRREVLVAQRTATINRLLWRVHELDPERAPKPRSLDLAKHRRLLGDWLDTQVGIVAELARDELADITRLTEAINALAERIGERVRVVAPVLLAVPGCGELTAAKLVGETAGVTRFKSEAAFACHAGVAPVPVWSGNTRGRVRMTRSGNRQLNAALHRIAVTQIRLDGLGQTYYRHRLTHGDSTPEALRCLKRRLARVVFHHLTTDHNNRQTACQPAAA

SEQ ID NO: 426654 - protein, 346 aa, unidentified
MIIIGCDFHPSWQQIAWLDTETGEVTERKLVHATGEARAFYGQLSAPALIGMESMGNSHWFEDMLSAMGHEVWIGDAAKIRSKEVRKQKTDRRDAMHLLGLLIKNDFPRIWTPSVEQRDRRQLLIHRYKLVTLRARVKNELQHLALNQGVQKKARLWSTAGQKILRELPLQPWAGVRRADLLGLLAIFDEQIATLDRAANQAAQEDKMAQLLMTQPGVGPITSLAFVLTMGDVKRFAGSKQVASYLGLIPSEHSSAGRQRLGSISKQGNRFMRMLLVEAIHTVVRCDPQFRKEYLHRCHRKPKGVAKVAAARKLAIRLYWMLRTQTPYPEVVRIESSPRVALVSRS

SEQ ID NO: 426655 - protein, 370 aa, unidentified
MLDTTTFIGLDVHARSIKAVSLDVMTGEVRAATFGYDAGAVAEWVRSVDPRARCVYESGVTGFDLQKRLSGLGVDCVVGAVSKMIKPSADRRRKNDRNDAEFLARMLSVGNVVEVWVPDDECEAARDLTRALEDARDDLSRSKQRLSKFLLRHGLAFDERTPTGRRKGNWTRAHWSWIESIRFAEGADNDVLAYYVDAVRRAAEEKARLEGLVEAEARKPRWRKRVDSLRCLKGVDTASAADLVFEAGEFSRFRNARSFAAWVGLTPSEHSSGESDRRGAIAKAGNKHLRKTLVEAAWHYLTCSARPKDLAKVQAADRVARRHAAKGVRRLAERREALLARGVHKNKANVATARELACWVWAVGLMAEEA

SEQ ID NO: 426656 - protein, 408 aa, unidentified
MQVAHPVCCGIDVHKDTLTACLRRVDANGQVSKERREFATTYTSLLTLSDWLVEQHCPIVAMESTGVYWKPVYHVLVGTVEVYIGNAHELRSRPGKKTDKRDAAWLAELFAHGLIQPSFVPPPEICALRDVTRTRVALVQTRSQSKNRVHKLLEDTNLKLGSVVSDLFGVTGRRMLAALVAGARDPQVLASLALGALKHKRPQVELALTGQFTAHHGTLLGLLLELIELLDRQIATLDQQIGELMMPLHAQLAQLDSIPGVDIIAARDILAEIGTDMSRFGDAARLASWAGVCPGNHESAGKRYRGKTRKGNRYLRRVLGPCAWGARKTPTFLGRTFRRLEVRIGKKKAALAIAHKILVIVYHLLATGSCYEEARYDHYHPKQEARERQRAIKALERLGYTVTVERAA

SEQ ID NO: 426657 - protein, 390 aa, unidentified
MERPMQKLNDLSRSLTALEPDGTLIAVIEMSLSSWLIGGILPGVERQPLKKLTVDEGALLKLPHRWREEAEKAGHRIERIVVAFEAGRDGFWLARWLKARSIEAYVIHAASVAVSREHRRAKTDRLDSELLKRAFLGWLRGERDHCKMVAIPSIMDEDAKRPNRERESLIGEQSRIVNRMKAALIRLGIRGFNPKLKRAAGRLDGLHTPEGEPIPPNTLAELRRDMERRRLVSNQIRRIEQARLQRLEQEPDDGPHAMVRLLARVIGVGIETADMLVREVLSRNMRDRRAVARYAGLTGSPDESGRKCREKGLARSGNARVRRGMIQLAWRLLMFQKNSALAQWFRARTENARGTRKTMIVALARKLLIALWRLVHEGVVPDGVVLRPAQ

SEQ ID NO: 426658 - protein, 336 aa, unidentified
MKKLSKTQRQMDVETIGIDLGDKISHYAVVDRDGEVVEEGSFRNQASSIEKHFGGERRRIALEAGAQSAWIARELEKLGHEVIVANARQVKWITASDQKNDRIDAKKLALLARADVRLLSPVEHRSAEQQAELCVIRARDAMVRARTLLVNAARGIAKGFGQRLPATVTATFGKRAVAVVRQMLSAALEGILTQIDELGRQIQEYEKRIAEVGALHPELERLVSIPGVGTLTALTFVLTLGRAERFAHSRDVAGYLGLRPKRRQSGGQDPQLGISKSGDKYLRKLLVQCAHHTLGHWGLDSALRQWGLAKTGGAKGATKRAIVAVARKLAVLLHRL

SEQ ID NO: 426659 - protein, 330 aa, unidentified
MTNACTYPSEGHVTWFVGVDVAKDEFVWAVHGSSQTTSCPNDSAGAQALFSALAEHNIGLVVLEATGGHERALAGFLLERGVAVAVVNPRAAREFARSMGHLAKTDQIDACALAHYAQTLAAKADQAGIRFAPPPPHIEALQALVTRRAQLLNMRTAEKNRLAGAVRVLRSSIEDVIRTLDRQIKRLDKEIDDHLDSHFSQQRKRLESIKGIGVTTCATMLAFMPELGHVSAARVAKLAGVAPLNQDSGKMRGRRQIWGGRSLVRCTLHMAMLSAVRYNPVLQAFYQRLVAAGKPKKVALVACAHKLLRILNAMERSGQHWNEAMHTNPA

SEQ ID NO: 426660 - protein, 419 aa, unidentified
MSFKILKNNCCGLDVHKTWIFACIGITDSNNRTEYKQARFSSFTKGLQELCDWLAKYSCNDVCMESTGKYWIPVFNVLEKNNIWVTLSHPKYTKPQKGNKTDRKDAKWICDLYMCGMVKPSFIPPADIRELRELVRYRFKLTCMITGEKNRVHNCLTVSNLKLDDVFSDIFGKSSRSITEQILQHPGETFDVTPFVDSRCKTPIEQIQAAVDGAVSAQQAVKLRQCLNHIDELEMHKAEIEREIFRLSDKYEDILTLIRTVPGFNKNPMTAIQVLSEIGGDMSVFPTAKNLASWAGCCPRNDQSNQKIKSTRISRAGSYFKPVLVQIANALVKSKKHPEFTTRYRRIKARRGHKKAIIAICRMILTAIWHILTDLKPYTPEGFLEPRPVNESKTLTTSQALNMLKQRGHIIKDEAVPVA

SEQ ID NO: 426661 - protein, 334 aa, unidentified
MSFKILKNNCCGLDVHKTWIYACIGITDSFKRTEYKQARFSSFTKGLQELCLWLAKYNCIDVCMESTGKYWIPVFNVLEKNNIFVTLSHPKYTKPQKGNKTDRKDAKWICDLYMCGMVKPSFIPPADIRQLRDLVRYRFKLTCMITGEKNRAHNCLTVSNLKLDDVFSDIFGKSSRSITEQILQHPGEVFDVAPFVDSRCKTPIVEIQAAVDGAISHEQAVKLRQCLKHIDELEMHKAEIEREIFRLSQKYESVLDLIRTIPGFDKNPLTAIQVLSEIGADMSVFPTAKNLVSWAGCCPRNDQSSRKIKSTRISRAGSYFKPVLVQIANALIKS

SEQ ID NO: 426662 - protein, 374 aa, unidentified
MYLKTNINRHLKGMAMKKRLSKKQMFFNKINLTKDDEIYIGLDVHKKTYNVAMWLNDAPAIDFVTPADNEKLLKMLDKVRIAIKRIVYEAGPTGYALARSLQKASLPIWVIAPSKTPRQSARDSKTDRLDSKTLAKYAAKGLLRPIAIPTSQQEADRQLVRTREQLVSKQTRVKLQIKSFLLQHGINQPPSLKSWSKNAVKELKALKLSKQLRFCLDILLQQLLFLQEQLYKIAGRLQETFAQERHANKVKVLLTHPGIGPVVAREFTAEVFKPDRFEHKTELAKYVGLSPMIVQSGQSLRDGPVTKTGRAELRSNLIEAAWIWIRNDTGAYKSFLRILHNTGQKNKAIIAMARRLSIHLWRMICENKPYIAGA

SEQ ID NO: 426663 - protein, 356 aa, unidentified
MQTSEAIQSVIGIDLGDRYSYLHELDLRTGETLSQTRLPTSPETFGNHFASISSARITLEVGAHSPWSSRLLQGLGHQVIVANPRTLALIHSSNRKRDELDAEKLARLARLDPQLLSPIRHRSLQAHVDRTRLKVREALVRSRTSLIIHTRNMLKAFGIQLPKCATTCFHKRVLEHLPEQLKPAVTPLLESLKVLSRQIYEMEKDIEKLSKARYPETIRLRQVVGVGPLLSLAFVLTLDDPSQFTKSRDVGAYLGLVPKQRQSGERDPALGISKQGDKLLRTLLVQAVQYQLARHGPDYDLKRFGLKLIEKGGPKSRNRAVIAVARKLAVLLHRLWTTGEVYDPFFNSNRQLAQAA

SEQ ID NO: 426664 - protein, 333 aa, unidentified
MQDLSSKQHFIGCDISKNTLDIALYQRKTDYRNFEHIRVSNDVTGYATFLKWLRNKKITISETVVGMEHTGFYSVAFSEWLFKKKITFRLLHPIDVKNACARGRNKTDMVDSQFIADYLYTMREKLSPSDPEPKVIKTLRELRNERALAVKMRTAYINQMKTGSDSTTIKRMKKMIEMITNQIHQIETEIKSVIQSDESINTNFKLLMSIHGIGLVNAITVIVATGNFTRFKTARQYAKFCSVSPLSNQSGTSVRGGNHVSKAGHNELKSVLSEAARSAIMYDSQLADYYARKRAEGKTHGCVMNAVKFKLVCRMFAVVSRQTPYVNIEKYKS

SEQ ID NO: 426665 - protein, 346 aa, unidentified
MAISRWNPLGAFTEKKLRCPRWGSERDRWPNAGIDVSKQHLDLCLEATRLRVANDAQGWSELTAKMVAAQVDLVVLEATGGYERGVVGTLQEAGIAVARVNPRQARDFAKSMGVLAKTDAVDAAVLRDFADVLARHAQRHKYITAPQQEHRRVLAELMTRRRQLIEMRVAEHNRLEHAGMASARSITSVIKTLDQQLAAIDGEIDEQMDRHFADQRSLLDSVKGVGPVTILTLTAALPELGQLARRQISKLVGVAPLADDSGKRSGKRYVWGGRADVRAVLYMAALVAIKHNDAIRVFHSRLIAAGKPKKLAIVACMRKLLTIINAMMRDGTPWNAAKHVHGSAVA

SEQ ID NO: 426666 - protein, 339 aa, unidentified
MKRYIGIDLHKDNFVVCYLGQKDNVLKKKYQLSSLNWFKKTLNPEDEIAVEAVTNSRFFCEELVTLVEKVVMVAPSKFKIISDSDNKNDFKDAQDLAEFLKMGKLPEARIMDKQQALIKSLLKTRDKFVKQRTQCKNKIHNILTSLGIIIKKQKLFTKEGLKNLSQMDFDPLVKIEVDLLIKHIRVLNESIAEIDKEFEKPENQLPGHQNLISIKGISNIGASIFLSAIGDISDFPDKKKLNSFVGIIPSVRQSNNKVIYGRITKRGSRMVRATLVQCTLSAINHNQILKQFYFKLKERKGSGKAIIAAARKMLELIHYTLSNNIIWEDSNHGVIKSNS

SEQ ID NO: 426667 - protein, 418 aa, unidentified
MTSTLSKKLASVKPGTLYAGVDLALDRNVAVVLSERAEQLDRFGFPNERGGYDYFHHRLETLRECWRAPAVLVGMEPTNYFWKLLAADLEQRQVSYRLVNPYTVKKHREGDQLDRSKDDRRDAFTISDLLRTGKYTETRLLHGGYAELRQYSTLYEQLRRDTGRQKTIIRNTAGQLFPELPRVFKDFTGLTALAMLNNHAPTTVIREMSQDALISGVRADFQGTRLQVSKLCRAHVLAANSVGLQDGVQALQLSLRLHIEALETLQRQLEEARIAFVDTLLALPESRYLLSVHGLGVVTAATILAEIGDPSHYSNARQLIKLAGTQPVLNTSGRKTRSKTPMSHKGRPRLRTALFFAVMRLIQTDETFAREYQRLQLRQENPLIKMQALGVLMNKLLRILWALMRHQTFYDPAFQPGD

SEQ ID NO: 426668 - protein, 498 aa, unidentified
MVEGLSIGIRNGTSWSGRCEELTEREVREMGNYAGVDWASEKHDVLVADAAGVRLLSATFAHDEQGVRSLCRQLVGLEVELVAIERPDGLLVERLLDAGLRILPLHPNQVAATRDRFRVSGGKSDRFDAFVLCELARTDHHRFRVLEPDSDQTKALRALTRAREDLVGARTALSNQLRAELERFWPGPLGLFTDLHSRISLAFLARYPSPVDARGMGEARLRGFLARERYTGSQKPAQLLAKLRRAPAARVGELELGTRRALVLSLVATLKVLNEQIHSLERQIAAALREHPDGEIFLSLFRSPRSVICAAELLAEIGDCRARYPTRDTLAADAGQAAVAIESGKRKAACFRWACNKRLRGAVCTLADTTRHHNPWAQDLYASARGRHDHPRAIRTLGRAWCRIVWRCWQDRIPYDPARHRALQRHITVTIPTPSGPVIDQAATERMAAGVTASNPPDPGRLQVANRSPHPNRTSAEHRAGRRGCHRAKRGKGPAKRP

SEQ ID NO: 426669 - protein, 360 aa, unidentified
MTQSPNPTPPTFAAFVGIDWADQEHAVCLSPADTLKPEQFTIHHTPEAIAEFVAMLRCRFGGQPVAIALEQARGALLYALMGHEFVRLYPIHPATSKRYRDAFAPSGAKDDPVDARLIWELLVKHRDQLRPWQPQDATSRQLALLCEHRRDLINQRTRLVQQLQAALKTYFPQALDWTGEDLASVMATDWLVRWPTLEQLQRVPPKTVRAFYYAHHCRRPDLVQQRLHQIKTAQPLTTDAAVIAAHSLRVQSLAHQLRPLLASLAAYDQQIQALFATHPDAAIFTSFPGAGECLAPRLAAAFGTDRDRFPDADSMLRWSGIAPVTRRSGKFQTVHRRYACAKFLRQTFHEFARCSIKFCE

SEQ ID NO: 426670 - protein, 343 aa, unidentified
MGEVITIGLDIAKSVFQIHGVDDDGAVVIRKRVSRGKILEFFADLPPCLVGIEACPTAHHWSRELQSLGHTVKLMPPSYVKAYLKRAKNDANDAAAICEAVTRPSMRFVATKSKEQQGALMLHRTRQLFVRQRTMLSNAIRGQLAEFGIIAPVGRLGFVRLLEMMDGPEELGVPKTAWVCLMGLAEQYQRIQGEIGKLEQCIQAWHRSSELSRRLEEIPGVGPIVATALVGTITDPHAFASGRHMAAWIGLVPQQKSTGGKDRLGGITKQGNRYLRWLLVAGAMAVIRYAQKHGTAKRPWLARLIERKPTKVAAVALANKIARIAWVIMARGERYRAPALLAA

SEQ ID NO: 426671 - protein, 343 aa, unidentified
MQTVTTIGFDIAKSVFQVHGVDAAGEVVIRRQLKRRSVLAFFQKLPPCLVGIEACASSHHWSRELQALGHTVRLMPPAYVKPYVKRQKNDMADAEAICEAVTRANMRFVPTKTPEQQSCLMLHRTRHLFIRQQTAVINSIRAHLAEFGIVAPVGRKGVTELLHVVADPGDKRVPEVARACLAALGTQLLRLKQQILEFDRMIMAWHRSNQTSKRLHYIPGVGPILATALVASVADPRTFRSGRNFSAWVGLVPKQHSSGGKDRLGSISKQGDRYLRSLFVAGALAVIRYAKIHGTKHRPWLTALLARRPTKVAAIALANKIARMAWAMMAKGEHYKQPVALAA

SEQ ID NO: 426672 - protein, 362 aa, unidentified
MRIIGCDLHARQQTVAMLDTTTGEVVNMTLTHEGDNVREFYSKLPRPVRVGIEATGSMQWFVNLMEELGIECQVGHPAEIRAAEPRKQKHDRRDADLILKLLMEDRFPAIWRPSKELQDLRSLLRHRHQWVRMRTRIQNALQAIALTNGLRRGPSLWSQAGQHTIASLPLAPHTAYRRSELQALYVKFETEIEKLNQRVEEQADKRSGARLLMTHPGVGPVTALATEVFLGDPARFADSKALASYVGLIPREYSSGGRQRLGGLTKQGNPLLRFLWGEAGAHAVRRDPELKRFYRRKLIQKGFGKASVAVARKLGIRLWIMLRDQIEYNEFCRRGQKQQKSSEACAGMPETRYGAKSHWPVD

SEQ ID NO: 426673 - protein, 415 aa, unidentified
MALKIVYKICCGIDVHKNFVVACIAKTDKQGVTTYERHHFSTYTKGLKQLLKWLLDRNCKDVCMESTGKYWIPVYNVLEHDCSIVLAHPKYVKAIRGKKTDKKDAKWIADLFKHDLVAGSFMPPADIRQLRDLMRYRFKLTCFKSSEKNRYQNCLTVSNIQLGNVVSDTFGKSSQKIIAKILENPDDTSFDIGSLIHGSMKDKLPELELAIDGYITPEQAAKLKIIKEHFDNLEARKAELEELILALANPYQQEISIILTAPGFKNTFTAIGIISEIGTNMEAFPSAKHLCSWAGLTPTNNESAGKKKSVRFSKAGCYIKPLLVQCANAAIKSKKHPEIRDRYLRIKKRRGHKKAIIAIARMLLTALYHMLKNGENYNSDLYQKSDILPTTREITVEQAILMAQFQGFRIKSATE

SEQ ID NO: 426674 - protein, 366 aa, unidentified
MRPSITPIGIPVGVDVHKRRCKVVEFDHGEIKVRKSIANTREEWLELLTELPPEAEIGLEVSTAGYYAMSVLEEAGWRERAHWVHTAGIDSNRRQKNDRLDAERLARKLAAHHLDPLPEAWFPPPEIRALRLRVRQRCWLALLRTQTKNHMQSLLQMHGLIPPGSDPFGAEGQAWLQQQELPAPLRESIPQIQQVLKLLGKQLEISEKHLQAREEQFPEFALLRSIPGIGPLLAPVIWSEIGDIGRFASAKALANNTGLVASFYDSGDVQVSGPITRQGSRWLRWALVTAANVAIQHRNPFADRYHRLRRKKKPNVAKAAVAHSLARCVYGVLKHGCPYREDRWGRKVGALEQETRGSHRSTQTVS

SEQ ID NO: 426675 - protein, 409 aa, unidentified
MDITPIYKRVIGLDVHQAQITGCAITEHSDGSVTYERREFGGFKRDRKALAEWARAIAPDAVVMESTGIYWKSPYAALEAVGITAWIVNARHVKAVPGRKTDVADAQWLASLARAGLLRASFIAKADLRSLRHIARQRQKLGGVLASEKNRLHKLLTDAGIRLGVVVSDLHGQSARAMVKALIAGKSVTDVLSLASNHLRASREDIFEALQAEEITSAHRFVLAEIMAHIEELEARMVRFDAELLRSLHSAGYGVPLRLLQTLPGIDLMGAAMLLVEIGADMSVFGNAQRLASWVGMCPGNNESAGKRKSGRIRKGNAWVRRLLCEFAQAAGRSRCALKDKFQALNVRKGHKRSIVALGHKMLRTIYAMLSKNKPYVDKTVDYEALMVALNAPRWIQMLVKHGFVPTPA

SEQ ID NO: 426676 - protein, 351 aa, unidentified
MLGLTYLVSAIQQTFRKETQMRIRKLTGHEPKVKSSTRDYDYCVAVDWSERTMATAVMAADEALPLVWEGRSDVARLQTMVQDLPGRVILTFEESTAAHWLYGKLLPYVERLVVCNPGYNRLLCRGPKNDTIDAIKLCLLLRQGSLKEVYHSTSKLYELRELVSAYEDTVRAGVIAQNQFKACDRGRRTTGRSGIMITEQLRARIEQYRHEKQQFEEAFTRWAKRIPVLRQLKRLPGIGLRGAVKILGHVIDGRRFPNRSHYWSYCGLVWHHKMSGGRRYGRRRPQYNHQLKAVYKTAALVAIKGSGPVADYYRNLVAQGRAEHNARHAVARYLARLSYGILKQGVQHNNS

SEQ ID NO: 426677 - protein, 344 aa, unidentified
MRVYVGMDVHRKRSQVALVDEHGGQLLNRNLPNNSAELTSILGCLEPGTPVAFEAAYGWGWLAELLNELELEPHLVHPSRCKAIASARLKNDRVDARTLAQLLRAELLPEAWIAPQAVRDQRALLRHRAALVRMATALKCRVHAILADRGVRVEEPLWGPAGRVLLAELPLPAVQRAIVTDCLALIDAISPLVTRLERDLVARARPDPRVQALQALPGIGPITAMTLVAEIGDIARFPTARKLCAWAGLTPAVRNSDRKVRHGHITKMGSPWVRFVLQEAAQRAKTRPPFAAFYAKTAARRGKHIATVAVARKLLARSFHVLTDLQPTAGEGQPAGCARPIACA

SEQ ID NO: 426678 - protein, 337 aa, unidentified
MKFSGIDLHSNNSVVVVSDEEDRIVYRKRLPNDLRQIQAALEPHREQLAGVVIESTYNWYFLVDGLMDAGYRVHLANTTAIKKYEGLKYSGDFADAAYLAQLLRLGLLPEGYIYPREERAGRDLGRKRMQLVRCQTMQILAIESILARQTGGRMSSERVKRLTAEQIKELGLVPDVALALEANRAVSETLQRQIEALEERLKERVKLRPEYRLLKTVPGIGETLATTIMLEMGTIRRFASVGNFSSYCRCVDSRRESNGKKKGEGNAKNGNKYLAWAFVEAANFALRYCPEVKRFYERKKRKTNGIVAIKAIAHKLARACYYMLREQKPFDVQRCFV

SEQ ID NO: 426679 - protein, 316 aa, unidentified
MSELVYVGIDIAKNSFEVAVTGELQTLNLANDEAGHAQLCQCLAPLAPRLILMEATGGYEQDLALALAGAGLRVSVVNPRQARDFARCVGKLAKTDRIDAQALRSFASMLDAQGHQPRALADDERRELTALVVRRRQLLTMLVSERQRLGVAHRKAKPSILAIMDAIAAQLHDVDDELKAHVQTHHADLAKLLTSVKGVGPTTACTLLAQLPELGQLNRKQITALVGLAPMNRDSGTLRGQRHIFGGRADVRRVLYVAALVGTRFNPVLKAFYAKLLAAGKAKKVALVACMHKLLVILNAIARTRSPWRDDFAERL

SEQ ID NO: 426680 - protein, 420 aa, unidentified
MSKNLFCGCDTAINTFTTWLLLDDGTEPVKSFTLDNNQLGAQTLVEKLGSLAKEHCVSNILVATEATSMYDWHLLEFLSESKLASQFNLKLYRFNPKWIRNFKKSLTPKGKTDPVDSFAIAERLRLGRLPREYTPDFQYQPLRRLTRFRYHLMQSMAREKNFFLSNLFLKASSYSSVKPFTSNFSATSLATIEEFFSVDELANTSVDDLLEFVKKQGKDHFADAKDVVAKLKKVSRESYRLRPELKPVVNLVLASCLNNIRCYKETIKRVDDAIKEQLKAFRTTLDSVPGLGPVYCAGLIAEIGDIRRFDSQAALAQFAGLTWPRYQSGKFEAEESYLAKTGNEYLRYYLVEAADSVRRHNAIYSEFYQKKYAEATKHHHKRALVLTARKLVRLVYALLSRQELYQPEKCSLDNFSKIGS

SEQ ID NO: 426681 - protein, 366 aa, unidentified
MKKVSTVRVNGNMIFKGHKLTIGVDLGDRWSCYCVLDEAGEILLEQKVSTTPEAMKQIFEKIPRSLIAMETGTHSPWVSRLLTELGHKVIVAHAQKVQLITKSSRKDDRHDARTLARLARIDPELLGPVRHRSAKAQIHLTVIRARAELVSARTALVNAARGMVKSYGQRLPKCGTQQVSRELTAGLKAELREVLEPLLQEIESLNERIKEYDVRMEKIAKESYPQVELLKQVKGVGTQIALTYILTLEDPHRFPKSREVGCFLGLRPGRRDSGESQPEMHISKEGDPYLRTMLVQGAHYILGPFGADSDLRRWGLKLAARGGKSAKKRAVVAVARKLAILLHRLWVSGEVYEPLRNSDKALRAVA

SEQ ID NO: 426682 - protein, 409 aa, unidentified
MELMIARCAGLDVHQATVVATVRVPDEPGGRRSVTETFGTMTADLLALRDWLQAYGVTQVALESTGVYWKPVYYVLEDGFALSLINMQELKRVPGRKSDVQDSEWLAQLLECGLLKASFVPPPPIRELRDLTRYRVQQVRDRAQEVNRLCKVLEDAGLKLTSVVTDVMGASGRAMLRALVAGTTDPVVLADLARGALRKKLPALRRALVGRFRPHHAFLIEQIFAKIDFLDETLDRLGAEIDRRLVPFEPMLAALDTIPGVDRVGAISIVAETGGDMQRFPSAGHLCSWGAMCPGQHESAGKRRSGKTRKGNRYLRATLIQAALGAMHKKDSALQARYHRVKRQRGHKKAVVAVGHQILEIAYYVMRDGVTYNELGADYFLRRHAERAVRRHLRQLEALGYHVTIEKAA

SEQ ID NO: 426683 - protein, 472 aa, unidentified
MGKGSGTTRGDRRRNARREQLRGLLPRDGAVIGIDLAEDKQAIAVVDHDVRVLARKTVRVKAFRLGEVLDWAVAQARAKGFTAVAVACEPTGPRWLQVQRLCGERGLPLVCIQPLVSHIAREQQDYTPHKTDESDCVLIARLACELHCYIPEELDETWAHLRQLGRRRAQLITAATASAQRIRDFLSVAWPVVIEACAYPLESTTWLAGLQVVTSRCGGQPGRLAEMGPEAFTALVRDAQRGWGGQKAWGPICRRVFAALTDTEGAVVSCRRGLLRRCADELGDLQRARAQLRAVEADMAGVLAELGLARLAGIPGLTAVGAAAVLAETGDPRRYDSSSSLVKHAGLSPSENASGVFSGQAHISRRGRPGLRLAVWRAVWPMLRFNPVMAAKYAAMTGPAAAAADAAAAAEAGSRQVSAAAARARRAKARVACAASLLRWICSMTVHGTSWDAAIASGDACQRAPRRPAEAA

SEQ ID NO: 426684 - protein, 340 aa, unidentified
MRQLYVASDLHGNNNLMGIIDSEGKRIFKKKLPNDPLLINDILKPFKEEIVGIVVESTYNWYWLVDALMEEGYKVHLANPAAIQQYSGLKHADDKHDAFWLAEMLRLGILPEGYIYPKEERPVRDLLRKRGHLVRLRTSLILSLENIISRNFGRKLHANDVKGLRKDHVTPLFEGKEDLALAGRVSKETIDFLTHQIRQIEGVVEKRIQLSEAYRYLLTLHGVGKILGLTIMLETGPIGRFETVGDYTSYCRKVPSQWISNGKRKGSGNRKNGNKYLSWAYAEASDFARRLHPESRAYYNRKMQQSNPAVAHSALSHKLARAAYYIMRDQVAFRPEKLFG

SEQ ID NO: 426685 - protein, 321 aa, unidentified
MAYFREVVGIDVSKGNLDLYVLSSQQWRTVANTVAGHAELVSWLKSLGVRMAVMEASGGYERAVAGALRAAGLDVRIVDPKRVRHFAKAAGRLAKNDRIDARMIAEFGAVFAAAQRCEIPADAKRDHLAGLVTARQALMDHQTALQNQISACPAGAARRALTTTLKPIAAAIKKLDRLTAEAIAAHPPFVELAARLDTVPGLGPVTIAALIAWLPELGRLDRRALASLVGVAPFDDDSGKRTGQRYIKGGRCKLRNIAYMAVMGAATKHNPVLKAHYDSLLNRGKLKKVALIACLRKLLTILNTMVAKQQDWNPALTSVAA

SEQ ID NO: 426686 - protein, 468 aa, unidentified
MTEDVEWFAGVDWASQTHQVCLVDAGGKIVGERGFAHSGAGLAELCSWLLTMTRAAATAIAVAIEVPHGPIVEALLERGFRVYAINPKQLDRFRDRFTVAGAKDDRRDAHVLGDSLRTDRHCFRQLSAEDATVIELREWSRMSEELQQERNRLANRVREQLWRYYPQALAISDDLAADWFLQLWAAAPTPATARRLQESTVEGILKRHRIRRITAAEVLVLLRQKPLTVAPGTAEAASAHISTVAQRLTLVNRQIKQAHQRLDALCDRIAENEGDSATGQKSEQRDVTILRSLPGVGRIVLATLVAEASEPLRRRDYHALRTLSGVAPVTRRSGKYCIVVRRQACHMRLRSAVYHWARVATQLDQRSRHRYAELRKRGHSHGHALRMSAIACWQSRARCSPAGRHSILTTRSNRWPHDTRPSLVRPRRSSLRPDLAATRARRAGAVEDAACGTGEAGVSSTAPSTALC

SEQ ID NO: 426687 - protein, 333 aa, unidentified
MKDLSTLQHFVGCDVSKSTLDFAIYERGKDYRMFDHISVANTTEGFQAMRKWLRSFKINVKDAVIAMEHTGSYSNALAEWCFKKGITFVLLHPLDVKNAGARGRNKTDKTDAQFIADYAYTMREKLTPSLPEPQSIKTLRQLRNERQLAVRARTAYMNQLKTVTDKSTLHRMEKVTATFNAQIKAIEASIRTAVEADSRIKNTYDLLVSIPGIGMLNALTTIIATGNFTRFQTARQYAKFCCVSPLSRQSGTSVRSGDHVSHAGHNEIKSILTEGARSAIHHDANLKSYYERKRAQGKTHGCVMNAVKFKLICRMFAVVQRQTPYVNVERYRG

SEQ ID NO: 426688 - protein, 410 aa, unidentified
MEAIVRRCCGLDVHQATVVACLLVGDPDKRPRKEIRTFGTMTCDLIRLREWLEAEGCTHVGMESTGVYWMPVYVVLEGRFELVVGNATHIKNVPGRKTDVKDSEWIADLLRHGLIRRSFVPPKPFRELRDLLRYRRKLVDSQTAERNRLLKLLETANIKLATVATDVFGVSGRRMLRALLEGTATPEEMAQLARGRLRKKIAILSAALDGRVEEHHRFLLRIQLERLEQVETSIATVDERIDEKLVPYATQHARLTQIPGVDRVGAAVIIAELGVDMSVFPTPQHAAAWAGVCPGNNESAGKRKGQPGRKGNVHLTTALVQAAFGAARTSGTYLKEKFWRLKARCGPQRAALAIAHKILVAAYHMLRNDCDYKDLGAAYLDTVSATAVKANLVKRLERLGYRVTLQARAA

SEQ ID NO: 426689 - protein, 321 aa, unidentified
MDKNSKIAGIDISKSSFDVYSETEGHQKFENTTSGFKKLVKAYGKQTHYVMESTGCYHVLLALYLSNEGILVSIENPLKIKRFIQMQLLKVKTDKADARMICKYAMSQDLSIWNSPNSFQRRSESLFSLLQFYEKQRTSIKNKLHREQALGTPSSSVLKSLKDVLLQIDSEVFILETELEELVKKLYREKLSLLRSIPGIGIKTSILLVMLTDGMRSFEDSGQLCSYAGLTPVIRESGKSVRSRPRISKMGNGLLRRHLFMCSFNAVKYNSGCKSLYERITAKGKSGKVALMAVCNKLLKQSFGILKSRKPYCENFSSISA

SEQ ID NO: 426690 - protein, 352 aa, unidentified
MRFYTNTHRFVCGIDLHTKMMYVCILDQGGETVVHENVPTDKPERFLTLIEPYKADVVVACECTFSWYWIADLCCAEGIEFILGHALYMGAIHGGKVKNDKLDSLKIAKLVRGDTFPLAYVYPSQWRALRDLLRRRHYLVHIRSEILSHIQIVNYQYNLPAFNKKLDRANNRLGIEERFTDPSARMSIGINVQLLDVFEKTIKSIEHFILRHIQGLDRRLLFRLKTVYGIGDILALTLMLEVQDIKRFDSVQQFCSYGRLVKGQKESAGKPAGKTNSKIGNPYIRWAFAEAAILFIRGSDKAKRYIEKQSKKHHKAKAISILAHKLARAVYHIWLREDSFDEDCFWQQLSFK

SEQ ID NO: 426691 - protein, 368 aa, unidentified
MFTERTGVGLDVHARSVAAAAIDTVTGEVIERRLDGDYGSVIDLAHRMEAGHGPLRITYEAGPTGFGLARELAAAGLTVQVAAPSRLLRPAGQRVKTDRTDAMLLARLTINDDIVAVRVPTMSQESARDLVRARDDARADLMRARHRLSKMMLRRGWVYPGRTTWGPAHDAWLRRIRANDVPALGSGAAAAFDDAYDAVAHALARRDRLDEAITALAADCEFTDTTTRLSCLRGISTLTGFALAVEIGDWNRFTGATIASRLGLVPCEHSSGQTRSQGGITKTGNTHARRLLIESAWQHKPAYRPGPTLRAAWAKAPAVVAERADRGNRRLHRRWTALAARHKRHAVANTAIARELAGWCWSLATMDA

SEQ ID NO: 426692 - protein, 489 aa, unidentified
MKRAKKTSNTKTRSSSRKRLKALQIVHPNAAGIDVGASSHYVAVRPDAVPAGKPAVRFLGTFTVDLDALVEWLKKCAVDTVAMEATGVYWKPVFEKIEAAGIEAILVNARHVKHVPGRKTDVKDCQWLQQLHSYGLLEGSFCPTQDICRLRTLVRHRANLVSDAAQAVLHMQKALTQMNVQLHHVINDLCGETGLRIVRAILNGQRDPEQLVKLRDCQITRSTPKEMEQALQGDWKEELLFVLRQSLKAFEFCHEQMDECDLEIEALLKSLPKATPVAKPEQAPAKDPLAAQDPKPKRPQSRKRNEPEQDLGPELARICGTDLTKAHGLRILSVLVIISEIGIDMNRWRSAKAFCSWLGLCPNNKISGGRILSSRTRQVVNRASTALRMAASGVAHTETWLGSFYRRMRARLGPAGATTATARKIATVVYHLLKNQEPFVDRDLELYEKRVYQNKLARLRKQAHTLGYKLVELTQDQDVTTTATCELSE

SEQ ID NO: 426693 - protein, 412 aa, unidentified
MDIYCGIDWSEDHHDIALVSRDGALLARRRISDDAAGLAAVLSLLAEHGDTPDDLIPVAIETPRGLLVACLRATGRKVYPINPMAVARYRDRHAVSGGKSDTGDSVVLAHVLRTDMHAHRPLPADSELAQAIAVLARAQQDAVWDRITAHNKLRSHLREYFPGFLHAFASARGGILRPEARTILAAAPAPADAARLTPAQLRSLLRKAGRRRGIDAEATRLREAFRAGQMRQLPLVEQAMGRQTLALLRQLDAACTAADDLERAVTESFNQHPDAGIITSFPGLGPLTGARVLAEIGDDRSRFQDAKGLKAYAGAAPITRASGKTKTVTRRHIKNNRLNAAGYTWAFSALTASPGARAHYDRRRDKGDRHAAAQRNLFGRLLGCLHRCLTTRQHYDENIAFPKTTKKVPAAA

SEQ ID NO: 426694 - protein, 334 aa, unidentified
MLYVGLDVHSKQSSLCILNSGGGMVNQIQLNGPRATVVDQLRQLKEPFSICYEASCGYGHLYEQLRPLAAHVSVAHPGKLRLIYGSKRKNDRVDAQKLAKLLLLDLVPPVHVPNIDVRGWRSLILLRQRVLQQVVRAKNQIRGVLREHDISGAKWLWSKKQLAWLESLELHPIAKLRLELAIEEFKSLNAKMKRIERELQRYADAHPAVALLMTIPGVGIRTAETFVAWVDDITRFRNNRRLGSYFGLVPCQDASADRNRLGHITRDGPPVMRKLLCEATWTAIKKCDVFKRFFDRIVGGKPERRKIALVATMHRMTRVMGAMMRSGEAYNGAH

SEQ ID NO: 426695 - protein, 391 aa, unidentified
MFFLGIDIGKNNHVASLLDHDGKIVFKAFSFSNTTDGAESLIDKLNLFVTDVSSIEIGMEATGHYWLALYSFLIEKEFVIHVVNPIQTDGWRKGIEIRKRKTDIIDSVLIADLIRYGDFVETHLSDENILSLRNLCRFRNYLVDSIGDLKRKIICVLDQVFPEYESVFSNIFGKTSKEILLQFSSPSELEKLSVDTLAELLASLSRNKISHEKAEILSDKAAHSFGVTFCQESFVFQLKMLITQMQFIEQQVKDTENEIKSYMKKINSPITSIPGIGLTTGATIISEIGDISKFDNPSKLVAYAGIDASVAQSGEYESTNNRMSKRGSPYLRKALFQAALVASNTNPELIAFYQKKRKEGKHHLTCLGAVSRKLCYIIYAILKENRPYQPR

SEQ ID NO: 426696 - protein, 361 aa, unidentified
MAGTMTWVGLDVHARSTHAAAIDAATGELSRVRFGAGLDAPVAWLSELPGPVSACYEAGPTGFGLYRAAVAAGLDMRVIAPGKTPRGPSDRVKTDMKDAELLARLLLAGSLTPVVVPPVEVEAARDLMRAHDACRRDLMNARHRVSKMLLRHGRVYPKPTTWTVEHRRWLAAQQFDQPASELTFADLVAAVDGLAARKVALAERLSRLATDEQWWPTVARLRCFRGIDTLTAFALHLELGGDWDRFARASQLGAWLGLTPSLSQSGQSSTQGAITKTGSTLARRLLVESAWHYGRDPRIGTIVARRQAGQPDHVLQIANRAQQRLHRVYTQMRKRGKHHNIVIVAVARELACFCWAAATAD

SEQ ID NO: 426697 - protein, 343 aa, unidentified
MSEISIVGLDLAKNVFQVHGVDASGGVVLRRQLRRGAVEKFFAQLPPCTVGVEACGSAHHWARVIGRYGHQVRLMPPAYVKPYVKRNKNDGRDAEAICEAVSRPTMRFVPVKSVEQQATMAVHTTRGLLVRQRTMVANSLRAALSEIGIVAAQGIEGLRELMAKLEAPHEEVPEIMRGALLLLAKHWQALDADERVLERQIAKAVRSDREARRLMEVPGVGPIIASTVLAKVPDAKVFRSGRDFAAWIGLTGRDHGTGGKHRPGRISKQGDRMLRALLISGASAYLRHQRTRGVSDPWLRDLLARRPYKVVMVALAAKTARILWAMLVKGEPYRDRASASAAA

SEQ ID NO: 426698 - protein, 458 aa, unidentified
MGRNKSKDKDRRTMPVVHPNAAAIDVGATMHMAAVNADRTPEPVRSFGTFTTDLHRLVDWFAECGVDTVVMESTSVYWIPIFELLDARGFAVFLVNARDAKHVPGRKTDVSDAQWLQRLHSFGLLRASFRPKGHIAELRAYLRQRERLLQYRASHIQHMQKALTEMNVQLHHVVTDITGATGLRIIRTILGGERNPAVLARMRDRRCHATVETIEKALAGNYRAEHLFALEQALALYDTYQQKASACDVRIEAVLKELSVRRGRKAGPLPSPRQNRSRQQNSLHFDVRAALFALLGKDLTQINGLGPYLTLRLVAECGDDLSAWPSAKHFTSWLCLAPSNKISGGKVLSSRTRRSGSRAAALLRLAAATVGRTDTALGAFYRRLSARIGKAKAVTATARKIAVLFYNAVQHGMEYVDPGASSYETRYRARVIDNLHRRAKAFGFVLQPIDPTPSIAVS

SEQ ID NO: 426699 - protein, 278 aa, unidentified
MTNGSSLNETMGLDLSDKTGVYVVLDHEGEVCREGKVALTRQALSRAFGGGSPCLVAIEVGTHSPWVSRELALLGHEVVIGNPRQVKLISQNKKKSDREDALLLARLARLDRRLLRPVQHRGEQAQADLAMLRARSLLVAGRTSLINSVRGMVKTTGLRLPRCSAESFAARAQPHLPRELVPALEPLLAEIASLTARIKQITHAIEHAAAERYPETQQLRQVPGVGLICSLTYVLTLEEPQRFRRSRAAGAYLGLVPRQRQSGERGMRVLDVRRAGHE

SEQ ID NO: 426700 - protein, 465 aa, unidentified
MRTDKKLWRNRKARKELARRLHSENPGLEVVHPHAAGIDVGNGAHYVAVRPDRDPQPVRRIECFTADLYRLAGWLQSCGVETVALQSTGVYWIPLYDILEEHGFEVYLVNARHTKNLPGRKSDVQESQWLLKLHTYGLLNNSFHPPSKIRTLRTYWRQRLQHVTGAATCVQRMQKALTQMNIQLANVISDLSGVTGQLIVRAIVAGERDSWKLAELSHPRIQASRAEIAKSLEGNWRPELIFVLQQELEMYDTYQRRIAECDEQLQKHLARFADTVALPRKEDLPPKKKKKQNKNNPHFHLADELQRITGVDLTRIDGVDVFVAQTIISEVGLDMSRWKTEAHFASWLGLCPDNRISGDKVLARGTRHVLNRAANALRLGASTLLKSQTYLGAQYRRLRSKLGAPKAITAMAHRLARLVYRMLNYGQQYVDKGAEYYERRNRQQQIEFLRKKATRLGLQLTPAHP

SEQ ID NO: 426701 - protein, 326 aa, unidentified
MNLSVVLGIDIAKLKFDVCLIKENGKAKHKIFANTKHGFEQLVIWLNSHTVSNLHACLEATGSYGEALALYLFDAGYRVSVVNPAQVKAFAASRLTRTKTDKVDAELIARFCLLQQPSAWQPPAPAVRGLQALVRRLESLIEMRVAEDNRLSSGISTDPVRLSLEAHIAYLAAEIKHTERLIRGHIDNHPDLKEQSDLLDSIPGIARTTAARLLAEITDFKQYQSARQVAAYAGLVPRERRSGSSVRGRTCLSKIGNARLRKALYFPAMTALRCSSFFQAWASGMRERGKSKMAVIGAAMRKLIHLAYGVLKTGKPFDPNWTTKTA

SEQ ID NO: 426702 - protein, 352 aa, unidentified
MPKGTRIVIGGVDTHGRTHHAAVLDEQGRLLGDQEFPANRGGYRQLLSWLGHHGQVGVVGVEGTGSYGAGLARYLLDQQVRVVEVDRPDRRIRRQRGRSDPIDAEAAARAVLAGTATAAPKRRDGIVESIRALRTARSGAVKARTAAINQLKALLVTAPANLREALDGRSTPALIAACGRLRPDQNALADPAHATKAALAMVAQRIQLLEAEITLADQRLAILVGRAAPRLLGLLAIGNDHAGQLLTTAGQHPERLRGEAAFAHLCGVAPIPASSGKTHRHRLHRGGDRDANRALHLAVVVRMRFCPRTRAYVQRRTREGLSKPEIIRCVKRYLAREVYHALVADFEALHTT

SEQ ID NO: 426703 - protein, 407 aa, unidentified
MDLLKTVFGIDVSSQKSNVCIMVNGQKVNDYAISNDMVGFNQLLGDLKQVTNPQIIFEATGVYSRRLQAFLDMHELRYVMMNPLEAKRKTKDDLHQNKTDKLDALYLAKLQSEHPQRLAYVQSEEYQELMANNRIYEQASHDLITNRNRLHKAIQLTFPEIEHLMVNPRGKNYWSIVLRFPHPDIVLETKEVDIIDFLKGLTGIGKKRANDIAQSLIRLAKVACPAVKKNSAHIRGLKMAINNILSAEEECQTALQEMAKLAPKRDLEILTSIPGIGENTALRIISELGDIRRFNNPSQLNAFVGVDPQVYESGNLTAHLSISKRGTAIGRKVLYLAINQIQSAKKVGNPCHIADYYEKRKRSSETASHKKAAIASIHKLLRTIFALIKNDQLYSYDVAKHNQRLLS

SEQ ID NO: 426704 - protein, 351 aa, unidentified
MNSMNYIGLDIHKKSISCCVRQADGTIIQESTITATRHALDGWMRQLPDPWIAGMEATLFTGWIYDHLVSGGALVKVAHPAMLQAIAAGKKKNDRVDARKIADLLRCDYFPECHMASREIRDRRRVLRYRNLLVRQAVQMKNKVSGLLMEAGVPYNQQKVHQKKYFAALLQTQKQEMPPSMPELLRLSRSTVEALTGMQRQLIRALESDALLAARVERLASIPGVGRVVALTWALEMGDISRFASVKKEVSYWRIVRSREEFGRQDRADTDLKTKKQALANHVDRSSETGAALERGTGTGLRARETERKSQPGHTGRGAQTRGLPDGRRPRRTTVRHTPQCGRQRRLRAQE

SEQ ID NO: 426705 - protein, 393 aa, unidentified
MTARTLNSSGGGGCQYAVNGMDAHFLKRHLSAKLVAALLPLKQKGASEMKITTIGVDLAKEVFQIHGVDAHGKTVLRKQLRRAEMAKFFANLEPCLIGMEACGSAHYWARKLDGYGHTTKLMAPQFVKPYVKTNKNDMADAEAICEAVSRPNMRFVPIKNVEQQAILSVHRARQGFVKARTAQANQIRGLLYEFGIVIPQGIRSIKNRIPDILEDAENSLPGTMRHLIDRLTDHLKELDRQVEDLELQIKLWHRESEASRKLETIPGVGPLTASAIVATIGDAKEFKSGRQLAAWMGLVPRQHSSGGKQTLLGISKRGDTYLRTLLIHGARSVIRRAESADPDGWLRKLIARRNKNVALVAVANKNARILWALLTKDTEFRPDYTTSSVASMA

SEQ ID NO: 426706 - protein, 387 aa, unidentified
MKERASAPMLTPDPLGRWKTSDLEGGSDVVYLGVDLHRKVSHVVALDESGEVLLSRRFGNDPAEFRRVFGELEPAPIEVVFEATYGWGWFADLLADAGIPAHMAHPLATKAISAGRVKNDAIDARTLAHLLRTNLLPEAWIAPPEVRAARRLVRMRTSLMRIRSRLKCQVHAICADLGVPIPVSDLFGARGRELLTTLALPVVTAGRLEANLRLIDTLTAEIRLADRETVRYFRADPRIRRLTPIPGIGFLTAAMIVAEVGDVGRFETPERLCSWAGLTPTERSSADHVQRGHISKQGTRWLRWVLVEAAVTASRGPSLAGFFGPIRERRGTKIARVALARRLLTLAFYALRDEAGCRAYPILPRPSRSTRARSPYGMASPDGRDVD

SEQ ID NO: 426707 - protein, 315 aa, unidentified
MSETVIFVGVDVSKARLDVAVRPSGDTLTVLHDEAGIAGLVMRLHAWQPAAVVLEATGDLQLPLVSALIAAGLPVHVVNPRQVREFARATGRLAKTDRLDARVLAQFAEAVRPAPRALPDEATQTLSAVLTRRRQLIEMLTAEKNRLSQARLSLRKRIEAHIEWLTSELRRVEADLDTAIRHSPVWREQDDLLQSMPGVGPGLSRTMLAELPELGTLSSKQLAALVGVAPHNRDSGTLHGKRTIWGGRAVVRTALYMAALAATKWNPVIKAFYHQLLARGKAKKVALVACMHKLLIILNAMVKHRTPWRANVQQA

SEQ ID NO: 426708 - protein, 354 aa, unidentified
MTADTILAIDLGRYKSVACAYSRSTRAHAFRTFDTAPDDLGQLLARHPGAVVVVEACANAGWVHDRAVAAGHPVKVANTAAESWKFQHLKRKTDKDDAKRLAELEAIGQLPTVALPDPATRQRRMLIAFRQELVGRRVACQNRVRALFAGQGLATPRGHRAWTAAGLEGIEAQARPLADCGPDELWRGMLHLALAEYRALAERIGEVEGALDRLAGSDGRTKLLETIPGVGRRTAEAVAAHLGDPGRFASAKQVGAYAGLVPRQYQSGVTDRKGRITRRGPGLLRKLLVECAWCMLRYNPWARAQYVRLTAGGATRKKPAIVALARKLLVRCWAMLRDGKPWRADPAPAAGASG

SEQ ID NO: 426709 - protein, 325 aa, unidentified
MAKRITVCAGIDTGKRKLDVAIDGNGEPLQVENTAEGHKVLVEWLQRHKVKRIGIEASGGYEQPVVAALRRKRFVVIVFQPAQVRAYARFHLQRAKNDKIDAALIAACTAAVKKIYPAPDPRLSPFAEQLTMIDQIGEDIMKLKNRIETCRNERIRAVWKEEIARLAKRERTELKALVAAIRQYPDLAERFELIYSVGGAGLPTAVAILVRMPEIGQLTREQAAALAGLAPYDDDSGTQVGARHIDGGRERLRRALYLAALPASFRWNPQLIALYQRLRAAGKEHKRALIACARKLLIFVNTVVARGTPWQSELPAARTANPATA

SEQ ID NO: 426710 - protein, 405 aa, unidentified
MSELEKDLVFAGVDTRKDTHTLCLLDHMGRAIGTFRFAADAKGYDALAGKIGGPATCVGVGIEGTGSYGAGLTRRRLELGYCVYEVMVPGRARRKPGRPKSDPADAEVAARQVLARANLSKPKDQSGWTEELRQLMIARDRLVQAASAMINAAKSLIVTAPEDLRRSLEGLSRKNLRSALSTLDPAAGGIILALGSLGKAWDLQDREADAIEERMKRVLEANAPALLAVYGCGAVSAAALAVAGGGNPERLRSEAEFASLCGVAPLLASSGKTERHRLNRGGDRRANRALYQIAVTRMSYDQRTKDYVGKRKRDGKSKKEAIRCLKRYIAREVFRALRNPLEIKGPSWKDLRPARQALGITLVEAGKALNVGFQRVSYAETGRLMNVRFLEEYDAWLKSQAKRES

SEQ ID NO: 426711 - protein, 310 aa, unidentified
MTNLKKSKSKVNVGVDVGKWFLDVCLYEKDLHWQVENTPEGIKKLLGRLARYQVERLVMEATGRYQHLLVEKAFEKDLPVCVVKALSVRRYAQAIGQTAKTDRIDAQVIAEFSARLKPPVTMRKSKNLLAIRDFLSRRRQLVSMRTRELNRVKIMGKALETSCKRIIRVLDQEIGRMEKKLQTYIEQEAEWSEKRTVLKSAPGIGDTMVYTLLADLPELGSMTNKQAAALVGVAPMNRDSGKMRGKRRIKGGRYEVRTTLYMATLSATLCNPVIKEFYQRLVAQGKHKKVALTACMRKFIVILNAMLRDC

SEQ ID NO: 426712 - protein, 339 aa, unidentified
MTILKQIVGVDISKGTFNARFGTIDTAQNNVLSSDTCFKNQLSGFKQLLTWVKKSILSMDVPLVFVMEATGVYYERLAHFLIQNNCSVAVVLPNKIKNYTKSLSSKSKTDPLDAAAITRFGLERQLTLWTPASGSFKALHDLSREHRAVKLTITEIKNQIHALKTSFQPQKHSLKRKTQLLTLLELQARQIEQELHDIVDLEPDLADRISHICSAKALGFITVVSVIAETNGFAQVSNRKQLTSYAGFDVVFNQSGIKKGTTSISKKGNKFLRHALFMPALSAVRHNPQLKTFYQRLLSKGKNKKLALIAVARKLLLLIYTLWKNKTLYDPNYQPVARS

SEQ ID NO: 426713 - protein, 427 aa, unidentified
MKYNQNQKINQVTEATLIVGADIAKKKHVARAQDFRGIEFGKALTFQNTRKGFIKLLNWMKSLAIEHGKREVVLGLEPTGQYWMTLAEFLCHNGIKIVVVNPLHVKRSKELDDNSPTKNDVKDARVIAQLVKDGRYSEPNIPTGIYAELRVGMNLRDRLTEDLRRVKGRIDNWIDRYFPEFWTVFKNLDGKAAMLTLQSFPLPQEIVDKGVSSIVATWKQEIKRAVGEKRAIKLVSAAEESIGLTEGVIMARQEIMTLLSQYNALKQEIDQLMIQIENMINKIPGAEEMMSIPGVGMATVAGFLAEVGNLEDYRHPRQIQKLAGLNLRENSSGKHKGQTRITKRGRPRLRALLYKCIMPLVSKNQEFKILHHYYTTRAENPLKKKQSLIALCCKLIRVLFALGKKKIAYDGRRLMTNPLLSSLQNVA

SEQ ID NO: 426714 - protein, 397 aa, unidentified
MSMFFVGIDVSKDYSSAQGLDREGKKLFYLEFAMHGGRFSEFLKVLKTHCEDLSGVTVGMESTGCYHINLFAFLCSEGIVCVVINPLLISNFARLSLRKTKTDKKDALTIAQFLLAHHRKLSQVSYSQSSQDLKDLARERESLAVMIAGLKNDVRRLLQMTFPELEHRCKLFTETMLRFLMKFPSARAIHSAKAKEIAKALIHVEGKRKRVWISAQEIIAMAKSSVAAQSVAKEWILSDKIETLLYLEGKKERITEVLVEACRSTRVEALDIITSVDGISTITGSTFLEELGDIQMFSSSKHVIAFAGLDPSIRQSCQYEGISRISKRGNRHLRRVVFLMTLCVVRSQNIFREYFLKRKAQGLPPKKAILATAHKLLRVLFSMLSNKSYFRKEVVEA

SEQ ID NO: 426715 - protein, 339 aa, unidentified
MAIVGGLDLHRKQVTFDVVDTATGAYERGRIAPADRESFRRWLADFQSRPMDLAVEGCTGWRFVVEECQAAGARAHLAEPADVAGLKGRRQHAKTDRLDARHLRELLEAGKLPECWIPPRHVLEIRAKVRLYKDLLEERGGWQQRIHATLFHLGAPAQPDLLGPDPDRLARLEALSPATRQATAVALRMIDALDRELTALRAELVAFGRRQPGCKELQHEYGIGALTAVVIWSELGDARRFANSRNAVRHTGLDISVYSSDGKCSRGHLTRQGPPMLRWALYEAGRCAARQTSSDHAYYEQVAARVGKQRAALSVARKLARRCHHRLRTLGDDALAPVA

SEQ ID NO: 426716 - protein, 352 aa, unidentified
MAKIYAGVDLHKTQFTVCILRNGLYEKEGQYPTSNEGYKAFVSDIQTMNTPSDEVELAIESTGNARHFKTVMEAAGFRVTVVNTLKFKVVNLSTRKTDKNDARTLADFLSKEMLPTSHLCSPVNEGIRRILKCRSLMVQDCVALKNQAHAIMLAYGKVTKPTQFQSKKNRASLLNSLSKRDESLKYSLETLFETLDVIEAQVRNMEKRLNEMTRSDRNVRLLMTIPGIGIVNACTISAYIDDINRFESPGHFSSFCGIVPWVQSSNESSYYGRITKRGPQELRTALVQCVVAMIRMGDRTRNTRLMKQYAVLKENKSSGKAIIATARKLSTIIYVMLRDSVPFDISKLCVTC

SEQ ID NO: 426717 - protein, 393 aa, unidentified
MLTTVMVNNSLIGKAGAGEASVASRASTSRRREFGRVRAIKAVTEREPRRRYGTSPNSRLSRRKTASSHLQVREKTMSEKIYVGIDVSKDTFDVAACPAILKTCLPNTPDGHRQFCQSLKNHNIALIVLEATGGYERPIVAELLEANLPVVVVNPRQVRDFARGLGQFAKTDSIDAEVLAKFAQLVQPAARSHKTAETTDLTELVRRRRQLNDLRTQESNRLSLVHHRQVKKSIQKMLEMLDRQISEIDKLIEQHIQNNDDFQQKDKILRSTPGVGPQTSAMLLAQMPELGRLNRQEVAALAGLAPWDRSSGKWFGKGHIWGGRKDVRSVLYMAALTARRCNPVIRRFAQRLEDEGKVFKVVITACMRKLLIILNTMIRNQTLWTEEIILKNP

SEQ ID NO: 426718 - protein, 385 aa, unidentified
MKKVSKSTTPQLYIGLDVHKSSISIAYADTQGSKPVFHTKTGGTNLCAERHLLGLCKKFGVTKDSLRICYEAGPTGFVLVRRLIKLGYDCIVIAPSKIPTKSGDKVKTDKKDAKKLARLLRAGELEGIHIPAPIDEAIRDLCRARTDAVQARARAKKQLLSFMLRNGMSYTGRTNWTQGHMNYLRKIALPSPVQQIVLEEYIMEIDALEQRVARLLAHMQEQLATWHRKPMVDALMSLRGFQIVTAMTVIAELGDLDRFETPRQLMGYLGIVSAEDSTGERRRQGSITKTGNGHVRWMLVESANAYESKEMVSAALSKRQEGQTREVITLSWRAQTRLCYRRRKLSARNVTRNKVTVAIARELCGFLWELDALVRKQAKPAASAS

SEQ ID NO: 426719 - protein, 407 aa, unidentified
MGITCGIDWSESHHDVALIDEHGTVVARTRIDTGATGFHVLLALIAEQGGSVDDTPIALETDKNLLVVALAEAGFTVYPINPRAVARYRERYGQAGGKSDPGDAAVLAHILRTDRHLHRPLPAVSEEGRAVKALARQHQEAIWALHQTVSRLRSVLLEFYPQALQAFPNLKHKAALTVLAAAPTPAAGQRLTRGRVVALLRRSGRGNHPALVEQILTDLHTPALGQPPRVEEAYGHTVRGLVAIVIAMGQAVDDLETELAREFDQHPQAAILRSVPGLGPVLAARVLGEIGDDPARFDNPQGLRAYAGTAPVTIASGRLRYVKARKVRNKRFGDACHWWAYTMLTKSAGARAHYDRRRAAGDHHNAALRNLANKLLGRLWWCLVNNQPWDEHGAWPDHGHTENPTAA

SEQ ID NO: 426720 - protein, 341 aa, unidentified
MDHFAGLDVSVKETSICIVDDAGKIVREARVASEPEALLLVLTIYRFKRVGLEAGPLSQWLYSVLARAGLPVICVETRHIRAMLKAQINKTDRNDARGIAQMMRVGLYRPVHVKTLRSQKLRVLLTHRKLLQSKAIAIENDLRATLRNFGLKVGMIGTVKFETRIRELVQNLPDLAVLAEPLLIVRRVVREQLGILHRRLLTIVRDDDVGRRLMTVPGIGPVVALTYRVTVDVPARFRNSKAVGAVFGLTPAKYQSGEIDRTGAISRCGDEMMRMMLYEAAQSMLVRSTKWSWLKAWAMKIARHRGMKKAIVALARRLAVIMHRIWVDGTEFRWTREVAAA

SEQ ID NO: 426721 - protein, 342 aa, unidentified
MNKVAIVAIDLGKLTFHVHEQDDHGHPLLRKKFKRVELLQHLANLEPCIVVMEACGGAHFMAQEVAKLGHSPKLIAPHLVRPYVKSNKNDFADAEAICEAASRPTMRFVPVKNQTQQALAMLNSVRDSLIKDRTATVNRIHAAFLEVGISLTPGYKSLKDIPALLEASSFHGLIRKLVADLYEHYLYLNLRIKVLDKEVDCQAAGDDLASRLMTMPCVGPITSSVLAAEVGDGKQFKCGRDYSASIGLVPKQHSTGGRTVLLGISKRGDRNQRRLFVQCAQTYVNRLDRQEGKLADWARKLLASHRHRNLVVCALANKFARIAWSIAANHTVFDAGPSAMNA

SEQ ID NO: 426722 - protein, 403 aa, unidentified
MSSVFAGLDWASRTHAVCVIDERGTVYKQWDVAHDADGLRDLLRQLRALRVVRIAIERPSGLLVDALVEAGFEVVPIHPNAVKASRPRYRSHGGKSDASDAYLLADLLRTDGHRFKPLAAQSDEIRALRALVRGRDDLVATRVQLANQLRALLESYWAGAADVFADVDSPIALAFIQRYPTPEAASRLGPKRMAAFCAQHAYCGRRSAEELLQRLRQAPSVSVGELEMDAKGELATSLARTLSTLVDQIRLLSSRIEHHVAASDDGRILMSFPRAGRICAAQILAELGSVRERFDSDEHLAAEAGVAPVTYASGKHKAVVFRWACNHRLRRALTTLADNSRHASAWAAAIYTKAKARGCDHPHATRILARAWLRILWRAWIDHKPYDPALHGGLQSLLKTVGG

SEQ ID NO: 426723 - protein, 357 aa, unidentified
MAALSIADVPANVTVGVDTHKHSHIARAKDGLGRHLGQLEIGTDPRGYAGLLAWAQGFGPVVTFGIEGTSSYGAGLTRFLRAQGQAVIEVLRPVRRDRRFGSKSDPIDADAAAGAVLSGKATAVPKAGDAGVEMVRALKIAKQTAIKARTQAVNAVKGLIVMAPDPIREQLRNLKTPALVRTCSAYRVDGASDPTSAIKLSLRSMCRRYVVLDQEVRSLEKELDALTIRLVPQLRQLFGVGQDVAAALMLAAGNSGDRLRSEASFSMLCGASPIPASSGMVQRHRLNRGGDRQANAALHQIVVVRLRYHEATKAYFSKRKADGKSKKEIFRCLKRYVAREVYRTLVDPREEAVRSAA

SEQ ID NO: 426724 - protein, 410 aa, unidentified
MEVLYQRCCGLDVHKETVVACLRIVSGGEAVREVRTFETTTASLMALSEWLAENGCTHVAMEATGVYWKPVWHILDDGDFKLILANASHVKNVPGRKTDVNDATWLADLLAHGLIRASFVPDTQTQELRTLLRTRKQLVREKSSHILRVQKTLEDANIKLDSVITDVMGMSGRAMIEALIAGESNPAKLACLANYRLRASQEKLREALRGRVTKHHRFLLRLHLNQIDALDAAIATIDQQVQAGIAPFRFAVELVTSIPGVSDIGSQVIVSEIGTDMSRFPSESHLISWAGMCPRNDESASKRRSNRVRKGAPWLKTTLVQCAWAAVRKKDSYLKAQFLRIKARRGPKKAIIAVAASILTAIYHMLKDGTLYQDLGSKHFQTRSKGQQTKRLVKRLADLGYDVALTPLAS

SEQ ID NO: 426725 - protein, 415 aa, unidentified
MALKIVYKICCGIDVHKTFVVACIASTDKHGVTSYERHRFSTYTKGLKNLLQWLLEHNCKDVCMESTGKYWIPVYNILEKDCSIVLAHPKYVKAIRGKKTDKKDAKWIADLFKHDLVAGSFMPPADIRQLRDLMRYRFKLTCFMSSEKNRLQNCLTVSNIQLASVVSDTFGKSSQRILDKILENPDDTSFDIEPLIHGSMKKKLPELELAIDGFITPEQAGKLKVIKKHFEDLESRKAELEKLILALASPYQQELDLILTAPSFKNKFTAIGIISEIGVNMEAFPSAKHLCSWAGLTPTNNESAGKKKSVRVSKAGCYIKPLLVQCANAVVKSNKHPEIRNRYLRIKKRRGHKKAIIAIARMLLTALYHILKNGENYNAELYRKSDLPPVDREITVEQALMIARNQGYKIKSATA

SEQ ID NO: 426726 - protein, 361 aa, unidentified
MGLILAKTVIGMDIGKKYSWCEALSTETGEVLKERRLTNRKEDFVSFVEALPKPVRLVMEATGNTPHLYECWEDLVEEIQIAHPLKTKAIASAKIKTDRIDDGILAHLGMADLVPQAYFPPREVRDLREILRHRAFMVALQTRVKNRIHSYLWKLGIETEDTDLFGKSGLSWLKGLATREPYRTLLDQDLKILEVLQQEIKTATHTIEHLAKEDPRVSLLLTIKGIGKYSAMLILAEIGEIHRFPEPKKLVSFSGLCPSTFQSGKVSYHGKITKQGSKWLRWILVEAAQKYARTPGRLGDLFRRIEKKKGRKTAKVAVAREILVCTYHCLTKGVAFEETPKRVKRVESQHAPLVSGCSDTP

SEQ ID NO: 426727 - protein, 344 aa, unidentified
MEQHKTFYVGIDISSETFTSSNGSAEQGWTVLGKAETFVNTQEGYKDYLQWLARQGVKPGNSVICMENTGVYSEQIAYFLQSKEYQICIETPIKVKRAFDVDGHKTDPVDSRQIAEYAYRFYDELRIWKPRREVLEQVKILLATREQLVIEKTGHINSLKALRRKVVRADIAERVLESLISTLKDQIKTMETEMNKLIRQEADLAQEQALLTSIPGVGKLLSAQALVLFHQMDGELSDKKLAAFIGICPYEHSSGTSVKRKAKTSQHGPEVIRKLLNLAARSVCTHVPDYQQYYLRKLAEGKAKSLAINNVGNKLLSVMVAVFKSGVPYIPGYRSVHPRFLTKS

SEQ ID NO: 426728 - protein, 346 aa, unidentified
MKITTIGIDLAKNVFQIHGVGEHGKVAVRKQLKRAEMAKYFANLEPCLIGMEACGSAHHWARKLEGYGHNVKLMAPQFVKPYVKTNKNDMADAEAICEAVGRPNMRFVPMKNVEQQAILSVHRARQGFVKARTAQGNQIRGLLSEFGIIIPKGISSVITQIPEILEDGENGLPGTMRNLIDRLTENLKEMNRQVKELEAQIQKWHRDNAASRKLAEIPGLGPITASAIVATVGDAREFKNGRQLAAWMGLVPKQNSSGGKQNLQGISKRGDTYLRTLMIHGARSVVRVAEHKAEPESWLRKVMGRRNKNVAAVALANKNARIVWALLAHDRMFRLDYTPAAVVAGM

SEQ ID NO: 426729 - protein, 320 aa, unidentified
MTTVYKRFIGVDVASRKLDLFDSVAKVHQTIDNTPEAINAWIKLLRRKRAKTIVVMEATGGYESNLVDALHEADTDCCVCNPAQVRSFAKGIGLIEKNDPIDARMIARFGEVVTPKLREKPSPEERKLKALVHRRDQILSQQSAERNRLAQARDEEVREVIQEALDFYKRQIAGIEKKIAALIDASQPLSERAALLASCPGVGTATVAMFLAELPELGSLNRGQIAKLVGVAPIVRDSGQKEGKRSTFAGRSLVRKVLYMAALVATRYNSIMKAFYQRLLAKGKPPKVAIVAVMRKLLVTLNVMVREGTPWRESTLAPAG

SEQ ID NO: 426730 - protein, 354 aa, unidentified
MIIIGADYHPTFQQIAFVDTETGELQERRLDHPEAAEKFYRELAAQGKKVRVGMEASGHARWFERLLAELNFELWIGDAAEIHRKRERKQKTDRQDAQHILHLLLKDDFPRIWVPSWENRDLRQLLWHRHRMVQARTRMMNQLQAVALNEGLRCRKKLWREAGRKQLEAFRLAPWASRRRHDLLELLDRLNPTIAALSQAIEQEVEKCPEAQRLMTHPGVGPLTALAFVLIIERADRFQCGKQIASYLGLVPLEDSSGNRRRLGHITKQGNSLLRFLLVEAAQVTVRSLPEWRSKYVHLTMRRGRKIAKVAMARKLAVRLYWMMRKEWDYEQVKKFGSHAGQPGHRYGVKSNIE

SEQ ID NO: 426731 - protein, 444 aa, unidentified
MLRFVGCDVHKRTAVFTILVEDGTVLASYTVPVTREALAAFARQQLAREDRLAMEATTNTWAVTELLRPFVAEVVISNPLRVRAIAEAKIKTDKVDSRVLAELLRCDYLPRVWQPDAETQRLRRITHRRAALVSDRTRLKNRLHSILHHTLVPLPACDLFSRRGIAWLKQVPLEEEEAQSRESDLRLLEQTEREIAAVEERLVRTAWDDEKVRLLMSIPGIDYTVAQTCLAAIGDVSRFSSGKKLAAYLGLNPSTRQSGPHCYHGPITKQGNTHARWLLVQAAQHLGQYRGPLGHTFRKIAKRKNRKVAVVACARKLAVLVWQLLSSGEPFRYAEPRSLQAKFSRLRVRATGHRRRGGVPRGTPRSAQYGHGRTRALPSLDQVLEANGLPETTPLTKGERRMLDEKRLHSFFSELQVASRVEVKGAGTQIEEPKENATTQLTQS

SEQ ID NO: 426732 - protein, 402 aa, unidentified
MNCVGIDVSKGKSMIAVMRPFGEVVVSPFEVRHTASELSELARLLKSLDGETRVVMESTGNYHAPVAWLLHDAGLYVSVVNAMLVHDYGNNSLRRAKTDKKDAVKLANYGLDHWLTLPRYVPDEDTRLMLKTCYRQYQQYSKVQTMLKNNLISLLDTAFPDVNRLFTSPPRADGSEKWVDFVATFWHCECVCGLSEKAFTAKYQRWCRKHRYNFSEEKALDIYASACGHFGVIPKTDTAKLLVEQAIFQLRATSAALAALKQEMQSLAASLPEYPVVMEMFGVGPTLGPQLMAEIGDVRRFHSKKALVAFAGIDAPPYQSGQIDVRSRSISKRGSASLRRALFLVMGVILQCAPGDEPVYQFMNKKRSEGKPYRVYMMASANKFLRIYYASVKAYLDSLEHA

SEQ ID NO: 426733 - protein, 355 aa, unidentified
MNQEKYIGMDVHDATISAAVKNAQGKLLMECVLETKAATILEFIQGLRGTLALTFEEGTLAAWLHDLLKPHVSRLVVCDPRKNALLRDGNQNDRVDARNLAELLRTNQVKAVYHGKHEIRALRELGRSYLTLTQDSTRVLNRIKSVYRSWAIPCAGTSVYSRRHRAEWLAKLVEPGVRIRAQHLYQELDSLEPLRQAARRELLRESGKHAAVKLLRQIPAIGPIRSALLVALLQTPHRFRTKRQLWAYSGLAVQTYDSGEFRFVRGKLQRNRERITVRGLNRNHNHDLKNLLKGAAISAIQRPGPLQDFYAALVEKGMRPSMARLTLARKIAAITLTMWKKGVSFDPRQLPRPAA

SEQ ID NO: 426734 - protein, 482 aa, unidentified
MKKKNIFQNRSQQLLRLFEKAGNRLKMMCVPIDYAKKDHIVMFCNGHGDILRKPFSVKNSLEGVKYLIGQVMRSCRQRHIKKEHVFFGGEDTNSYAENFANALRAKDWLVANVNAHDAKKQRDNLQASTDRIDLMGIATMLLNLRAKCSPAQEGIYRNLRTLVRHRKKLVVMKTEVKNRVHTLVDRLFPGFLNEKNTGINAFSKSSLFLMENRFSAQQIRRRQKPTLIKILKRCATPDAQSIAAKLHSYAAQVITTPDEYAATLQLSLEHHIKHYRCLQENIDQLLSEIGLLLAQTQGAFLTSIKGVGIVLAAGVSSEIGSPFEQKPLNNLTSYCGIIPRVNQSGGIEGHTHTGRVSKRSNHILKDYVVQSALQMGLRGPEPLLQDYKRREAAGQHAGFGIGRRFLRMAMCLMRSSQVYLPPTLRSPQTQMQERAGYYLTTWPLLRDKWKKAHAHQAAFAKDQPLGQWRQIVQELYDIKLKL

SEQ ID NO: 426735 - protein, 303 aa, unidentified
MLWADRKYRSKVVSNHPDGFAQLRQWLQKYDAGQAHVCMEATGVYWEELAWALRAQGMPVSVVNPAQIKAFGESCLVRTKTDKVDARLIAEFCRAMQPPLWQPPSPSAQALRALVGRLEALQRMRIQESNRLGVARDAVRSNIEAHLHWLDEQIKALTQQIDRHIDQDPDLRRKRDLLDTIPGVGGRTSALFLAFCSRTEAFANARQCAAFAGLNPQQHQSGSSVRRKARLSKIGHALLRKAMYMPAVVTLYKTAWGKAFRSRLSAAGKPPKLIIGAMMRKLIHVAYGVIKSNKPFDPTLHAT

SEQ ID NO: 426736 - protein, 327 aa, unidentified
MQITTIGLDLAKHWFQIHGVDAKGDVIVRRRLWRSGVIAYFRSLEPCLVGMEACATAHYWARELTALGHTVKLMPPAYVKAYVKRNKNDAADAAAICEAVTRPSMRFVPVKNAEQQSVLMLHRARSLLVRQRTMLVNALRAHMAEFGIVAPQGFRHVGILTKTIARQQEGLPELARSILQTIIDQLNGTMARIREIEGRLAIWHRQSRVSRLLATVPGIGIMGASAIAATVADPSLFRSGREFAAWLGMTPRQNSSGGKERLGRTSKRGDKYIRSLLTAGAVAVLRHARNRPTRDGDGFARCWRANRPNLLQSQSHWPTRPLASSGR

SEQ ID NO: 426737 - protein, 348 aa, unidentified
MSKHSVPAGEVCGLLRRFADLRRKAAARTGRDFPIIVIQEAGLDGFWIHRVLQSEGIESHVVDAASILTSRRRRRAKTDRIDGETLVRTLMAYKRGEPRVCSMARAPTPEEEDRRRVCRERRTLVGERVRHVNRIKGLLSAQGVFGYEPLRKGRRERLEDLRTGDGRPLPVRLKVQIIRELDRLEVLLEQLKTVEAERDTLLKPASDEAASPAAMLARLKGIGPETAAVLWTEGLFREFDNRRQVAAYAGLAPTPWQSGSIDHEQGVSKAGNPRLRTTMVELAWLWLQNQPTSALSLWFHERVRRPGGRMRKTIIVALARKLLIALWRYTTAGVVIEGAVMKAAPATI

SEQ ID NO: 426738 - protein, 309 aa, unidentified
MDAKYVGIDVSKDRLDVHVQPTGEAFAVARDGEGLVALVARLKPLAPSLVAVEATGGFEMTVAAAIAGAELPLAVVNPAQIRHYAQALGRHAKTDKIDAEVIARFAEATRPEPRRLPDEATQALSELVTRRRQIIAMMVAERQRAGRLPKRLKRSCERVVRVLEKELAALDQDIDTTVRGSPAWRAKEDLLASVTGVGDITARTLIADLPELGTLDRRKIAALVGVAPFTRQSGQWRGKSFIAGGRPTVRAALFVATMAAVRHNPIIRAFRQRLLANGKPKMVAMVACMRKLLTILNAILRDQTPWQHA

SEQ ID NO: 426739 - protein, 398 aa, unidentified
MTESSDYESVQVFIGVDVGKDTHHAVAINRSGKRLFDKALPNDENKLRSLISDLKQHGQILLVVDQPATIGALPVAVARSEGVLVGYLPGLAMRRIADIHAGEAKTDARDAAIIAEAARTLPHALRTLKLADEQIAELSMLCGFDDDLAAQTTQASNRIRGLLTQIHPALERVLGPRLEHPAVLDLLQRYPSPEKLASLGEKKLAAQLCKLAPRLGKRLAADIAQALAEQTVVVPGTNAAAVVLPRLALQLITLRKQRDEVALEVEQRVIAHPLYPVLTSMPGVGVRTAARLLTEVACRAFASAAHLAAYAGLAPVTRRSGSSIRGEHPSRRGNKALKRALFLSAFAALRDPLSRAYYTRKMSQGKRHNQALIALARRRCDVLFAMMRDGTFYTPQGS

SEQ ID NO: 426740 - protein, 370 aa, unidentified
MAEPTPLFVGLDVHKDSIAVAHALGHSADPPVFVGTVGTRQADLSKLVRRLQAKNPDLVFAYEAGPCGYGLYRDLTAQGFRCQVVAPSLIPKKPGDKVKTDRRDAVELARLLRSGDLTRVYVPTVDDEAIRDLVRARDAARLTLKNAKLRLKSFLLRLGLHYVGRADWTAAHLRYLAKVVCPTAAQQIVFQESVRAVDEQVDRLGRLEAELLERAPAWRLYPVVQALQALRGVQWLVAITVVAELGDLTRFDSPRQLSAFVGLIPSEYSSGLARRQGGITKAGNGRARRALIEGAWAYRHPAKVSEHIQRRIDGLPKPIQGLGWKAQVRLCKRFRRLVARGKHPNVAVTAIARELIAFMWAIAKAVPVTV

SEQ ID NO: 426741 - protein, 413 aa, unidentified
MEVLYPRCCGLDVHKSSISACALLRERRKLRKEHRRFTTMTQDLKNLATWLRELGVTHIALESTGVYWKPVWNMLEGQFTIVLANAQHVKNVPGRKTDTKDSEWIAELLQHGLLRSSYVPPEVVRDLRDLTRGRATLSQEASRIANRIQKVLEDANLKLSSVASNTLGKSGRAMLDAVIAGQTDPEQLADLALGHLRAKIPQLQLALKGKIREHHRFLLKRLMHQLRFVESEIDLLDQRLEELGQRDQNLAAAVARWTTVPGVDRVAAWSLAAEIGIVMEQFPTAAHLGSWAGLCPGNNQSAGKRLSGKTRKGSPWLARMACQCAWAAARTKNTYLSAQFRRLAAKRGKKQAIVAVAHSIVVIAYYLQKKQCDYRDLGSNYFDQLNADGLKRYLVRRLEALGHKVTLDTAEPV

SEQ ID NO: 426742 - protein, 343 aa, unidentified
MQVVTTVGLDIAKAVFQVHGVDAAGQVVIRRQLKRRYVLAFFEKLPACLVGIEACASSHHWSRELKTLGHTVRLMPPAYVKPYVKRQKNDTADAEAICEAVTRANMRFVATKTPVQQSCLTLHRTRHLFIRQQTAVINVIRAHLAEFGIVAPVGRKGIETLLDVVANPTDKRVPVIARACLAALGAQLRRLKEQILEFDRMIMAWHRSNEASKRLDAIPGVGPVLATALVASIADPKAFRSGRNFSAWIGLVPKQHSSGGKDRLGNISKQGDRYLRSLFMAGALAVIRYAKIHGTTHRPWLTALLARRPTKVAAIALANKMARMVWAMMTRGERYKDPIALAA

SEQ ID NO: 426743 - protein, 351 aa, unidentified
MTIIGCDLHTRYQVVAWIDEETGEIRTRRLEHENGEARAFYTSLPRGARVGIEATFPALWFERLLTECGHELWVGDAARIRASEVRQQKTDTRDAEHMLDLLRANRFPRIWVPSLAERDVRQLMVHRMKLVRARTMMKNQLHFLAMSQGVCRKHKLWTVKGRTELAGLALLPWASRRRKELLEMLDQLDAAIEPLDQAVKQEAQARAEAVRLMTHPGVGPVTALGFVLTLGPVERFRNSRKLVSYLGLNPREHSSGGRQRLGAISKQGNSMMRWLLVEAAQTAARYDDDLRRAYQRLKFRRVSGVAKVAIARRLAVRLYWMLRARMDYAQLVRMSGSPSSAVVPQEKGSKV

SEQ ID NO: 426744 - protein, 482 aa, unidentified
MKKRTIFPYQSQELNTLFEEAGNNAKVMCIPIDYAKKEHVVMFCNGHGNILRKPFPIKNSPKGIEYLTQQVLSSCHHRGIDPKYAFFGGEDVGSYAENFINTLRSGGWLIAGVNAHDAKKQRANVQASTDVLDLMGIASMLLNRRANCSPAQTGIYRNLRGLTRHRKKLVDMSTEEKNRIYTVVDQIFPGFLDEKNTGISPFSSSSLYLMTDRFSPAQIRRRKRQKLIETLRRYGTVKPEVGADKLQLYAAHVLNTPTEYLSALQISLAQHIKHFQCLKESIEQLEKEMALWLAQTQGAFLTTLRGIGIVLAAGATAEIGDLTKQKPVANLVSYSGIIPRVKQTGGPEGQTRTGKVSKRCNRILKNYVVQSAHHIGLHGPEDLMADYKRRDANGQHADFGIGRRYIRTAMCLMRNAQIYIPKRLRSKGINPEERAGYFLMIWPSLRDKWAKLGALEAAFANDNPLCRWRNMVQELYEIKLKL

SEQ ID NO: 426745 - protein, 343 aa, unidentified
MSEISIVGLDLAKNVFQIHAVDGSGKVVLRRQLRRGAVEKFFAQLSPCTVGIEACGSAHHWARVIGRYGHQVRLMPPAYVKPYVKRNKNDGRDSEGICEAVGRPTMRFVAVKSVEQQATMAVHTARALLVRQRTMTANSLRACLSELGIVAAQGMEGLRQLMTKLEAPSEDIPEVMRSALLILARHWQALDADERALEQQIAKAARGDRQARRLMEVPGVGPIIASTVLAKVPDAKVFRSGRDFAAWIGLTGRDHGTGGKHRPGRISKQGDRMLRALLISGASAHLRQQKRRGVSDPWLRDLLARRPYKVVMVALAAKTARILWAMLVKGEPYRDRASAPAAA

SEQ ID NO: 426746 - protein, 411 aa, unidentified
MHNRQNYLYVGVDLHKEHHTAVIINCWQEKLGEIQFENKPSAFSKFLLEVETYVSAGVSVVFGLEDVGGYGRALAKYLVDHEQVVKEVNPALSFLERKSHVTTQKSDSWDAECVARILINKLNQLPDAKPNDLFWSIQQLVSRRNALVKAQSALKNQLHIQLNHHYPSYKKFFSELDGKTALAFWQQYPSPSCLEGANIKQLTAFLLDVSNNTCSVKKASDILKLVKEDGQTMKEYQEMRNFLVRSIVREIEFKKKEMKYIERELKQLVNLLDYQLETMPGIELVTASALIAEIGDARRFPNANKLARFAGIVPVYFGSGGKGKTHKSKQGNRALHALFYNLAVQQVQVAKGSKLPRNPVFHAYYQKKLKEGKTKGQALVCIMRRLVNIVYGMMKYKTAYELPVVKEKEVV

SEQ ID NO: 426747 - protein, 318 aa, unidentified
MKKAFFCGVDVSKDKIDVCFLTSITSEKAKFETLPNNYELIKVYFDSFKNDEILVVFEATSNYHLALQRALSDLGIRYCVTNPYKSSLFLKHLSTIKTDTSDSYGLAVYARTFKSEIAPDKYNAEYLEIKSYNSTLNLLQKINTQLKNFKSSQKTLNNKVIDNVIANLIKEIAKLQAMLQKLAFDLVKKAIPETEEIIKENKGFGIDLALNLFPQLHFNRDKSEKQFISFIGLSPRIFQSGSSVHKSQKINKMGNSNIRRILFMTALCAIRFNAKFKARYERLLANGKKKMTAIVAVMCAIVRYLKSLFPFNPEIKAI

SEQ ID NO: 426748 - protein, 343 aa, unidentified
MQITTIGLDIAKNVFQIHGIDGDEKVVVRKQLRRSQVLAFFKALPPCVVGMEACATANYWARELTKFGHQVRLMPAKDVKAYVKRNKNDAADAEAICEAVRRPSMRFVQVKSAEQQGQLMLHRARDLLMRQRTQVINALRAHLAELGIVAAQGREGIKELLRVIASEGDARLPVDAHTSLVVLAAGLQAVQTMIGAIDKRIMVQHRSNEASQRLESIPGIGVIGATAIAAMVPDPKVFRSGRDFAAWIGIVPRQDSTGGKQKLGPISKRGDRYLRRILVVGACAVLRLARQKPEKYPWLTQLLARKPFKVVAVALANKIARMAWALLARGGTYRTPGLTAAAL

SEQ ID NO: 426749 - protein, 411 aa, unidentified
MEQLNYVFVGVDTHKNQHTACVLSCFHENLGIIQTPNNPAHFESFIQDINSSKSPDKKLVFGLEDTQGLGHSLAQWLLEQGYTVKEINPALTKRERHHSPNPDKSDEIDAEAIANVLIVDFNKLPDAIYDANFKAIRQLNNQRQTLVKERTKLKNRFHNTIHQQYPEYEKFFSDPFGKTSMAFYEKFPHPADLKYYGESRLQDFLNDQVKSIGNDKAATILSLVDKDKQKTADAEARNTIIIGIIKQLRLLSKSLEKINSQLEKAVEKSQYQLTTMPGIDFKLAALFISNIKNIDRFESASKLARYAGLAPVEHSSGTSKNMSYKKYGCRDLNHAFHLLAVQQIGISIHGKIENPVSYKYYQKKLQEGKSQKVALTCLERRLVDIIYAMMRDRSAYRLPENIDYEVLDKAG

SEQ ID NO: 426750 - protein, 446 aa, unidentified
MNQTKLNRIASGQGDFAALIGLDWASQKHALCLCDCATAKRENSILEHTPEAIAHWARGLEQRFGGKKIALCLEQAKGPLIYALLEYSFFVLYPVNPATVARYRRAFKTSRAKDDPADAQVCLELLLHHREKLTPWLGNDGATRELSRLLEARRSLIDLRTLLTNMLRDALKSYYPQALELAGQDLFAPLGCQFLLKWPSLEQLQKARTESVRKFYYAHNCRRMDVIEKRLQAIAQMKPLCRDRALIEPALIQVKMLVRQLLQLRTALKEYDSSIEHLFAQHQDATIWQSFPGAGPTLAPRLCCAFGSERSRYQSVLAIQQYSGIAPVQEKSGKNQHWVHRRWARPHFVHQSFFEYASQSALHCPWAKLFLKEQIARGKTHPTAVRARWPSNGNASCSCAGVTASLTTKLLTSKLSNTEAHISPANSTRSYSKPHETPTNNSYPNP

SEQ ID NO: 426751 - protein, 372 aa, unidentified
MSANQNSIYVGMDVHKATINVAVTVRGRREPEAEWQLANEPRSIKKLVKQLKGMARGGAVSAAYEAGPCGYALQREMCEQGIECSVVAPSLIPVKPGEHVKTDRRDARKLAAMLQAGLLTEVHPPTPEDESVRDLTRAREDTKQDQMRARHRLGKMLLRHGFVYREGKNWTMRHRNWLKQVRFGDEIAQRVFEGYVLVLEQVEERLKRIDEQLEAVARSERYVERVGWLRCLRGVETVTAMMILAELHDFRRFTSPRELMSFLGMTPSEHTSSSRVRRGSITKAGNTHVRRVLIEAAHHYRHRPSVSSTMRQRRNGQPARVLAIADRAQERLHSRYFKLKEGYKKPHNVAVVAIARELVGFIWAVLRETEAA

SEQ ID NO: 426752 - protein, 391 aa, unidentified
MKSSHHIDTPAAGDKDGTLYVAFELSKSKWLIGTVLSGESKLSRHLVAGGDTAAVWQLISKKRAQAEKKLGRPVRVVSCYEAGFDGFWLDRWLAEQGVENRVLDPSSIEMPRRARQAKTDRLDLERLMRVLIRHDGGEPRVCSVVHPPSPEQEDDRRLSRERERLIGERTAHGNRIKGLLHGQGVRDVEPRRKDFREQLARARTGDGRALPPKLVTEIVREHVRLKLIVEQLAEVEGLMKAEREAAAPDSRAAQVNHLIELKSIGAVGGETLVNEVFWRDFQNRRQVGAYFGLVGTPFDSGQSAREQGISKSGNGRARTLAIELAWLWLRYQPDSALSRWFKQRVGDQKGRVKRIAIVALARKLMVALWRFLTQGLVPENAIVRAAAPAGR

SEQ ID NO: 426753 - protein, 372 aa, unidentified
MDKIIRIGMDTSKSVFVLHGVGAAEQVALRKKLRRRQVVEFFTKLEPTEIGLEACGAAHYWARELTALGHEAVLLPPQYVTPYVQRGKNDAADAEATCEAMSRPRVRQRFVPVKTAEQQAALMLAGMRDRLIGNRTRLTNSIRGYAAEFGLTAAKGLAKIEPLLARIAAEATLPELARDLFAAYGREYAELQVQLAKIEARLMAWHKDNEPSRRLVAIPGIGPIGASLLVMKVPDPQAFRSGRDFAAWLGLTPKDHSTAGKTRLGVITRAGDEALRRVLVVGATAVIQQVRRGRGRASPWLVDLLKRKPPKLAAVALANKMARVAWKLMVSGERYDPAARAGRGAALAHGFAPHPALPSRTTAREATAMTHR

SEQ ID NO: 426754 - protein, 337 aa, unidentified
MSSNSIYVGIDLHKRSFAFVMLDGDGRRLTQGSCSTEGGEVCDFARRLDRRHQVVLEPLANSFWLIEQLVPYAGGVYLANPYKVRLIAESRLKNDRIDAWILADLLRVGYLPVVYIPTAEVIGWRRLISHHIRLVRDRTHWRNRILGLIDHEGLRVTVSDAFGKRGRAEVDQLPLSPQTRRFVDDLLVSHDLVSRQLDDVDAEIEAISGSDTICRLLQTMDGIGPFTALAIRAAVGDMKRFKSPKAFAAYTGLIPSYRQSAETIHNGSITKQGVSTLRWALLQGVNHAVRHTDYLQRLYRRLCFRSSVAQARVAVAHAMARMIYHVWMEARPYYRSR

SEQ ID NO: 426755 - protein, 344 aa, unidentified
MNIASIGIDLGKTTFHLVALGERNKVLVRKKFSRVPLLTYTANLPASLIGLEACAGAHFLGSALRAQGHQVRLIPAQFVKPYRKSNKNDFIDAEAIAEAVTKQNMRFVEIKTQEQLDWQAMHRVRDRLMQRRTALINEIRGFLLERGLTFAARPICLRKNLPTVIEDAEQNLNPRLRWLLDRLWQEWKQTEIDIKAITDEIERISNDDARCRRLRQIPGFGPLVSTATVAAIGNGAAFRRGRDFAAWVGVVPRQYSTGGKQKLFGISKRGNVYLRRMLIHGARAVLLRVKYDTGGFGQWVHRLAQRAPRNKVVVAIANKLAPMAWAVLSSGKEYRHQAPQLAAA

SEQ ID NO: 426756 - protein, 383 aa, unidentified
MRNYTTYVGMDVHARSIQASAVVPETGEVFNRSFAGCPQAADVAEWLAALPQPAYCAYESGCTGFALARGLRELGYDCDVIAVSTLPRSAKDRKQKCDRLDARAIRREIANPDSGYSVVWVPDERTEADRDLVRCYRVAVDAAKRAKQRLLMFLLRHGHVWDEKTKAGKPKKAWTRDFERWLDSISFAEPSAERAFAAYRRQVRDACREVKELRALVRELAAQPEHRPYVEALACLKGMEVENAILARVEFGDFSRFRSGRKVSCWLGTVPADGSSGQSRRHGKITKAGDKYLRRALVEGYSGIATWRSGRKAVPRGADPSAACRSIAARANERLYARYDHLARERHKGHNKAKVAVVSELVRWIWVIGLQVQREQRGEGAAA

SEQ ID NO: 426757 - protein, 316 aa, unidentified
MICGVDVSSQFLDVRVGRDGVSARFDNDAEGIVQLAEFCQLHQVQLVVMEATGGYEQLAFGLLWARGIEVAIVNARSVRKFAQAMNILEKTDQIDSGVIAWYAETKKLVAMRPASVEQQRLKALVTRLRQLTEIRAMQRNQRLLVTEAEVLDHFHQLLVFLNQQISTLEKAIAGLIGSDPIWQKLDQSFRSIKGVADRTVARLMAELPEIGTLSNKKISKLAGLAPLADDSGKSKGKRRIYGGRHGVRDILYVVATCVSRYNADFSAFQARLTQAGKPKKVIRIALAHKLLVRLNAKAREVRQLHQPVAAISALLP

SEQ ID NO: 426758 - protein, 346 aa, unidentified
MKHYAGLDVSVKETAVCIVNETGEICREVKVVSHPDDLTTVLKDPAWDFDRIGLEAGPLSQWLFEGLAKAGLPLICIETRHTKAFLKAQPNKSDRIDARGIAQMMRVNLFRPVHVKTMTSQKRRALLTARKLLQEKAIAIDNDIRGLLRNFGLKVGMVGAVKFEQRIRELVDGMPDLAEIIEPLLDARSKLRRNSAALHRKLLVIVRNDQVCRRLMSIPGVGPVVALAYTATIDIPARFRNSKAVGQVLGLTPVLHESGESRRIGRISLCGDGMMRTLLYEAAQVLLTNVRKWSWLKAWAMNVAKRRGRQKAVVALARRLAVIMHRMWSDGTQFRWTRKEIMPVAV

SEQ ID NO: 426759 - protein, 335 aa, unidentified
MSKKRNQVGIDVSSQTLVVEMKRASDNCIATGEFDNTTTGHKKLLKFITKNGGTARVCMEATGNYHFELALLLAKSGKVEVMIVNPKAMHHFGTAILQRAKTDSCDAHIILEYLLRMDFKQWQIPSDNKVALNRLARRLVQLKKMMVQEQSRRSAAEFQGKDGKEIIKSINKTIAVFEKQIAKLQGLAAKLINDDEELKNTYALLTSAKGIAEVSATQLLAEFIMLPEGLTAAQWVAYAGLDPKPIESGSSVNKPRRISKHGNKYIRAALYMPALVAIRHEPNIKAYYEKLLAAGKKKMQAIVAVMRKLLLAIWGMLNNNKVWDGTKFYKIENNS

SEQ ID NO: 426760 - protein, 459 aa, unidentified
MKIRVGIDIACRSPHVAAIADEAGNLLSRRHRFRTVASELDAFWALLPGDATEVMVVMEPTRNAWVPLSAWFRRRGAKVVIVPSEQSADLRDYMSKHTKTDRLDAELLARLPVLHPEGLHPAEHLGPGDPLKRAVKIRAGLVHRRSTAMHRLDSLLEILGPGWTDTLGTRMTQTTFKFLTLYANPHQVKRLGAARLARWFQHHTRRAWGPERAQHMIDAANETIALWGNDGLDYDALAADIAAEATLALEVSEQIALLDRRIKDLYAEADPTGIVLSAPGVGDILAGQIMGRLGDPHRFTSLAAARSFTGLIPRQNSSGLTNQAGGPTKRGDACLRAALFQAADRARLVDPQIAARYQRLMCDSGRHHNSATCTIATMLLTRIVSCLRNGNHYQLRDIDGRLITDTEGRGIVAARYQIPSEVRAARRSISNARSAKRRDERVTKEVAERSKTPLVPIPA

SEQ ID NO: 426761 - protein, 348 aa, unidentified
MAHFVGLDVSVKETSVCVVDDAGKVILEQKVPTEPADIIALLTSLGVSYGRIGIEAGPLSQWLVNALTAADLPVICVETRHMKALLTAQQINKTDRNDARGIAQMMRVGLFKPVHVKTLVAQEQRLLLTSRKLLQRKLLDLESELRGTLRNFGLKVGTVSGGRYEARVRELIAGFPGLAAIAEPLLNVRRVMRQQFAVLHKMLLDTVRSDRVCRRLMTAPGVGAVVALTYRATIDQPQRFVHSRAVGAHVGLTPKRYQSGEVDYDGRVSKCGDALLRTMLYEAAHSLLIQSRKWSWLKAWGIRVAQRRGIRRAIVAVARRLAVVLHRMWVDGSEFRWSKNSTAVPKAA

SEQ ID NO: 426762 - protein, 315 aa, unidentified
MKQVNQVGVDVDSEKLVCTMQRAGQRMPLATFANTAAGHQKFVRWATKGARPARVCLEATGVYSLAFALALHEAKNVEVMVVNPRAIKDFARACMQRAKTDAVDAGGILDYLERMPFTAWQPPAPEILQLQAINRRIVQLTTELAREKNRRHAAEFAGTSAEAIAHDIEVNIHHLERRIERMHDSGVKLVRGVPALAAKSAHLVSTKGIAESSAMRLLAELLVLPDDLAAPQWVAHAGLDPRPYESGTSVHRPRRITKVGNRYLRAALYMPALVAIQHEPNVKAFYNKLVAAGKKPMQAVVAVMRKLLHAIWGMQ

SEQ ID NO: 426763 - protein, 330 aa, unidentified
MAQNGRIVGLDISKLKVDGCIRSLGQRRSAPSTPEGHGEMISWLEANGVGLAVMEASGGYERSWARALRAAGIAVRIVDPKRVRHFAKSAGRLAKSDPIDAEMIAWFAETFPDAASQPQDADREELAMLVKARAALMQAKTDIGNHGEHSQPRAAEKAFAAVRRSLDTQLMQLEAAIAGKIAATARFAALAEIIESVPGLARHTAAALIAWMPELGLVDQKAIAALIGTAPYDDDSGNRRGDRHIRGGRKSMRNLLYMPTMGAATQHNPVLNAYYQRLRAKGKEAKVAIIACMRKLIVILNTMLARGEKWDPSRHQATAAPSGRRIAATA

SEQ ID NO: 426764 - protein, 353 aa, unidentified
MRRMQDWLVKGKPIFVGLEDSKKTWKVCVRCDRMIVHQTSMPAEYDVLQAYLMNHYPECTITVMYEAGFHGFWLHDLLEEDGIACIVTPANKVTCAKDDRVKTDKRDARRLAQNLENGDYVSCQVPDRERREDRQISRTLSQVQKDITVEKNRIRRFLEYHGLDRELPAGAWTDRDYLMLKDMSLGPSLRVSLNAYLRILTELLEVKKNLLKELRALCDKERYKVGVRAKKNCPGIGWLTALRLTLEWGEMRRFPTGKHIASFAGLTSREYSSGDTVHRGRITGQSSEYVRSWLIECTWRAIRKDPALLTKFNAVWRNSGSKKKAIVAAARKLSVRLWALETTGKPYCTGVVE

SEQ ID NO: 426765 - protein, 331 aa, unidentified
MDGEKRFVGIDIAKAALDVFIGSGEAAFSVTNDEVGIRELLRHLAPGDFVILEATGGLEMPAASALAAAGIAVAIVNPRQVRDFARAAGRLAKTDRLDAEVLARFGEAVRPEARPLADEQAQALEALVTRRRQLVEMLTAEKNRRARAPKILHRSIDEHIRWLEKRLAGFDDELAELIRDTPLWRERDELLRSVPGVGKVLSSTLLAQLPELGMLNRKQIAALAGLAPFNRDSGSMRGSRCIWGGRAQVRRVLYMATVAGVRSNPTIRTFYLRLRAGGKHAKPALTACMRKFLVILNAMLRNKTNWQASALDSSNILLSPLLGAVSQHGCC

SEQ ID NO: 426766 - protein, 379 aa, unidentified
MIENITYVALDDHKRRHQVALLLPGSERDEALTWRVENTRSGIRKMVRKVLKMAPGDVRFCYEAGPNGYVLQRQISGFDRVSCVVVAPSMTPRRPGDRVKTDRRDARKLAGLFRAGELQSIVPPMEEEEAIRDLCRCRRTAQMRATASRHHLDKFLVRNGYIYRDGKNWTRRHWEWLRSLNFDDWRRERTFQAYLFGIEQDEDRVKRLDLEIVRAAEEEPYRTLVGFVRCFRGLDTLSAMVLTSELYAVGRFTTAPSLMGFVGMVPSEDTTGWDPHRGPITKAGNGHVRRILVEAAKHYRHPARVSKALAERRKGQPDWVIAIADKAQTRLHQKYWKLVMGKGKHPNVAAIAVARELVGFIWAVLIRAATTQSVDELVA

SEQ ID NO: 426767 - protein, 321 aa, unidentified
MNKDKEIHGVDISKDVFDVFDHEGVHHQYPNTLKGFRDYFRCLNPNSLVVMEATGYYHYLLAQFVFEQGMAVSVVNPLSVKRFVQMKLSKVKTDKSDAKAIAEYARVNDIPLYDGKGEDQAESLQLLALMDIYLKQRTQVKNKLHGEKVLGIPSRAVYSSLVRSLKSLDRELEGLQSRLLGLVKKTQQRQLTNLKSIPGLGDKTVALLIILTDGFTKFENAGQLCNYAGITPTTRRSGSSVRGKSRISKVGNRKLRNLLFLCAFSACKHNKACREMYERITAKGKSKKLALIAVSNKLLKQAFAIAKSGIPYDENYVSRLA

SEQ ID NO: 426768 - protein, 413 aa, unidentified
MTDESLSWFAAVDWGSEKHQACILDAKGDVAGEREFPHSGTGLTELCDWLLSVACDTSAVAVAIETPHGPVVDALLDRGFAVYAINPKQLDRLRDRFCVSGAKDDRRDARVSADGLRADRHLYRLVQVSDPAVIELREWSRLLEELQQERVRLCNRVRHQLWRYYPHLLDLTDDVGADWFLELWALAPTADKAGRLRETTIARLLKQHRIRRLNAETACRILRQPAIKVAAGVTEAAVLHLRSLFARLRVVNRERHQAERKLDELCTELSEKASEGQSGEPCDVAILKSLPGIGRVTLAALLAEASGPLSRRDYPALRTLSGVAPVTKRSGKSNIVVMRYAAHARLRNTVFHWARAAVQNDPKSSCRYAALRKRGHSHGRALRGVADRLLQVACILLQRQTMFDPDRCQPAAA

SEQ ID NO: 426769 - protein, 389 aa, unidentified
MPTVADRPDAPTAIQSNLAAIFVSLELSRSIWLITSLSPGSGEKMSKHSVRAGDVAGLLARFSELKQKAFARTRKSFPIVVIQEAGLDGFWLHRALEQEGVESHVVDPASIATSRRRRRAKTDRIDGEALLRTLLAYKRGEPRVCSMVRAPTPEDEDRRRLCRERKVLIAERVEHVNRIKGLLFSQGISSYEPLRRDRRQRLEDLTTGDGRTLPTHLKIQISRELDRLELLLAQIKLAEAERDGLLAEGQAAAPESPARMLLEFKGIGAESAATLWLEALFRHFDNRRQLASYAGLAPTPWQSGSVDREQGVSKAGNPRLRAILIELAWLWLRHQPQSALALWFKERVKRNGGRMKKTTIVALARKLLVALWKYVTTGVVIEGAVMKPA

SEQ ID NO: 426770 - protein, 407 aa, unidentified
MIFVGVDWAEAHHDVFVEDEDGRRLAGGRLPEGVDGIARFHEMVGSFAEEPEEVVVGIETDRGLFVGALVAAGYRVFAVNPMSTSRYRDRHSTSGAKSDPGDAKVLADMVRTDRHNHRPVAGDSELAEAIKVLARAHQTMIWSRTRQTNFLRSTLREFYPAALVAFDDLTSGDALEVLKAAPTPTLGAGLSRSKIAAALRRGGRQRRIDQRTEEIQEALRAPQLQGSALVATAMGSSVSATLAVIATMNAQVAELAQELEVHFEQHPDAEVVRSLPGLGTILSARVLGEFGDEPNRYATAKSRKNYAGTSPITRASGTKRIVLARFVRNMRLADAIYLWAFASLSASPGARAFYDYRRAAGDTHHAALRHVGNRLVGILHGCLIRHTNYDENTAWGHRAELELARAA

SEQ ID NO: 426771 - protein, 343 aa, unidentified
MEQISTIGLDIAKTVFQVHGIDGSGEPVVRRQLRRRQVLSFFGRLSPCLVGLEACATSHHWARELEKLGHEVRLMPPHYVKPYVKRNKNDAADAEAICEAVMRPTMRFVPIKTPEQQSVLMVHRTRQLFVRQRTTLINAMRAHMAEFGIVAGVGRNGVETLLELISKGEDERLPSSARECLMALAAQLELVKRQILEADRRVRAWHRASKTSKRLEAIPGVGPLVATALVASVPDPHVFRSGRDLSAWIGLVPKQNSTGGKNRLGSISKAGNRYLRQLLVVGALSVIRRAKQLGYTRHPWLVQLMARRSTKVAAIALANKIARIAWAMMARNESYRTPLPQSA

SEQ ID NO: 426772 - protein, 386 aa, unidentified
MIVVGMDVHVRNSYLCVSDESGEIFKRGRVTNRLGELAEFLAPFEGQAMRVSLENTTNARAIHRLLHTYASETDTELTAQVLDARKLRVIAESVTKCDRLDAEIINELTRSNLKLPTCYVPDDEVFGLREHLRARADLVRVQTMTKNRIHALLHRRGILRPPGGVFTANGRAWLAQIELDEPGRSVLMQFQHILEELEETIKQSSRRLREIAREPRWEKAAALLRTMPGVGLITSLTVLAELGDLGRFRSPASVSNFVGLVPVLRASNEKRYQGGITKRGSAHLRSVLVEAAWTAIRRVPRYFHLYERIKERRGAQTAIVAVARRMLEDMFVMLKKEEAFRYASPPHELAATRGDETPPPLNPPTPRKGTEGAAVKGTRCLEEQAG

SEQ ID NO: 426773 - protein, 313 aa, unidentified
MPTPLNFGIDVAKDTLQIAWAESPAELCLANRRRAIADWLAKLAPGSRIAMEATGRYHLLLAELAHAAGMIVYVLNPCDLLHYARAVGLRGKTDRVDARLIGRYIVREHAELHPYVPPTPVQREIDQLLRRRATVVETKTRLRLSLHGMVGLAADLRIALKRLDGLITKLDQRLRQLATHQAESLRRVESVLGVGPLLGVALTNTFERVPLRNGDAAVAFVGFDARAKDSGQCIGRRRLSKRGPAELRRLLFNGARSASKTKLWRPLYERYRARGLSTIEATVVLARKLVRVAFSIYRHGTTFDPARFARGLT

SEQ ID NO: 426774 - protein, 421 aa, unidentified
MSQVIIGMDPHKRSATIEVMTADESVAGGGRYGTDAAGLAAMVAGVRQWPDRIWAVEGSRGAGRQVAAWLAGAGEQVVDVPPKLSARMRVFTSGQGRKTDAADAHAIALAATRIKGLRPVTGDAQLEVLRVLADRRRALGEDHTRMICQLHQLLADLIPGGAKKALSAAQARALLARIRPRDPAGRARRRVAAELTADLERTYQRKKAADKELAAAVKATGTTLLALDGIGPSGAARLLVEIGDITRFPDRGHFASWNGTAPIDASSGDHVRHRLSRAGNRQINRVLHIMAVVQLRHRTKGRAYYDRKVAAGKTPMEAMRALKRRLSDVVFRQIMADARAARTGPGGHAGAATVSSAAGSHPDAGTSDKSLPGPATSDHTPASHLISPVTPAAPDRRRTAAAVKRAGLDSGEDRRTLTRRE

SEQ ID NO: 426775 - protein, 343 aa, unidentified
MQVSTIGVDLAKNVFQVHGVDSAGKVVITRQLRRKQVIDFFSKIPACLVGMEACGTAHHWAREVSKLGHIVRLMPPSYVKGYVKRSKNDAADAAAICEAVTRPSMRFVPIKSADQQALLMLHRTRDLLIRQRTQLINALRSHLAEFGLVAATGREGLAQLAAIITDESNREALPSAMKQALQAIVDQLAALELQIGTLDRAIHAHHRANDMSCRLETVPGIGVIGATAIASTVTDPNGFKSGRDFAAWIGLVPRQHSTGGKERLGGISKQGDRYLRRLLVIGATAVVRHARQHPQKHPWIMRLLAKKPAKLVAVAVANKMARIAWAIMAKGGCYRAPELAAAA

SEQ ID NO: 426776 - protein, 403 aa, unidentified
MNMNAVGIDVSKGKSMVAILRPYGEIVSSPFEIKHTSSNIQSLIVQIRSIDGESRIVMEHTGRYYEPLARELSLAGLFVTAVNPKLIKDFGAHSLRKVKSDKADSVKIARYTLDSWTELKQYSLMDELRNQLKTMNRQFGFYMKHKTAMKNNLIGILDQTYPGVNTYFDCPAREDGSQKWVDFATTYWHVDCVRKLSLNAFVDHYQKWCKRRKYNFSKDKAEEIYGAAKELVPILPKDDLTKLIVKQSIEQLNTASRTVEELRTLMNDTAAKLPEYPVVMGMKGVGPSLGPQLMAEIGDVTRFTHKGAITAFAGVDPGVNEFGTYEQKSVPTSKRGSSSLRKTLFQVMDCLIKTKPQDDPVYAFIDKKRAQGKPYYVYMTAGANKFLRIYYGRVKEYLMSLPE

SEQ ID NO: 426777 - protein, 395 aa, unidentified
MRFIGIDVASQTHVVAALSDQGEVLLAPKPFDEDQGGYQKLKQLLGSPENSLVLFEATGHYWKNLAASLSAWGFQLVLLNPLRTRRFAESDLERTKTDAIDALTLARLGLEKRPAPTALPDAATEELRELVRHRDRIKQDFDDRVRQLHRLVDLGFPELPRLIKDLGCRMATGVLAKYPTALALTRARPKELSNLKYDGIHTVGVKLANELLALAKTSVGTHHGPAYQLQVLHTCEDLDLWRSRLNQLEGDIEKTVDGHELGKLLTTIGGIGPLTSARLLAELGDPSHFKSPNALAAYVGTVPALKQSGLSRGTRAGLTNIGNARLRAKLYMPVLTAVRKNPWLKHHYERLRAAGKLPKVALLACMRKLLHAVYSVAKSRKPFVPRLPAPAEVPT

SEQ ID NO: 426778 - protein, 340 aa, unidentified
MENDHVVSQCVGIDVSKEKLVATMCMFSQAEQAIYSKATEFDNGKTGFNQLVKWSRKEAVKELPLRYVMEATGVYHEHLANHLVRIGCTAVVMMPTKAREFAYWEGMISKNDTIDSRVLALVGCVKRNMRPWKPTIPLYRELRTMTRFSQDVKKLRTELKNHLEALEHSHEAEKSVIKHYESLLASLDKRIEKNLENMKKKVASDEELNKKIENIITAPSIGFLSAVTVIAETNGFALIQNRKQLTSYAGFDVRDNQSGTVNGVSRISKRGNSRIRAILYMPAVQCRLHNKHLKRAYDRIVAKHPDKKMIAVTAMERRLLLLIYALWKSDRPYNEDYDKE

SEQ ID NO: 426779 - protein, 419 aa, unidentified
MAFKIFRFNCCGMDVHKTWIFACIGITDANGRTEYKEKRFSSFSRGLRDLAAWLTSYNCTDVCMESTGKYWIPVLNVLEKTCNVVLAHPKYTKPQKGNKTDRKDAKWICDLFMCDMIKPSFIPPANIRHLRDLVRYRFKLTNMLTGEKNRAQNCLTVSNLKLDDVFSDVFGKSSRSITEHILAHPGETFDVSPFVDSRCKTSIEEIQAAVDGAVSPEQAIKLRQCLDHIDELEKHKKEIEREIVRVSDPYLDTLELIRTVPGLYKNPFTAIQILSEIGGDMSVFPTDQHLVSWAGCCPRNDQSNFKIKSTRISRAGSYLKPVLVQVANALIKSKKHPEITERYRRIKSHRGHKKAIIAICRMLLTAIWHILTDLKPYTDEGYLAPRPVKGKKVLTTSQALNLLKLRGYVIKDDLPATAS

SEQ ID NO: 426780 - protein, 391 aa, unidentified
MVSVGIDVAKDKHDCFILNSEGEVLANGFTVPNTMGGFQCLLQKIRECTTPQDKIKVGLEATGHYSYNILGFLLDNGLATYVLNSLHTNLYRKSLSLRKTKTDRVDARTIAAMLLSDVGLKPYTDIAYHNEELKSLTRYRFDKVKERAKLKQSVARLVCILFPELGNLVSSLHTASVYALLEELPGARQIAEAHLTHLKTLLSDVSRGRYGRDVAVAIRDAARNSVGSRMPAKSLELQHTIRLIRELDTEIAEIEDTIDTLMDELQSPITTIPGIGTRMGAMILAEVGDFSRFDSPDKLLAYAGMSPSTCQSGQLKNCYPHMEKRGSRYLRYALYNATKYVCLWDPTFAAYLAKKRAEGKHYNVAISHAAKKLVRLIYALEKSREPYRPAA

SEQ ID NO: 426781 - protein, 340 aa, unidentified
MVHVGVDLHKRVSQIAVLSAGGELTQHRLENDRLQVQQFFARVPAPARVAIEASGTWWWLVDLLEQLGHQPVLSHPKQTRAIAAARLKNDRVDAERLVQLLRGDLLPTVWIPPTTVREARELIRHRVSLVRERTGVTNRLLALLARRNLQPTLSQSWSTVPGQRELKALPLPPIPSTIREDGLALRRLLDEQIRRLDKELVKRWGDDVRVRRLTTIPGIGPFIAILVVLELADISRFPSAKHLASYIGLTPRVRASADRVWMGHISKEGNRLLRWALVLAATQAARRPGPLRTWYRLVQRRKGKKIARVALARRLAEICYQVWKEETDFLAVLRRGGVRG

SEQ ID NO: 426782 - protein, 344 aa, unidentified
MDYFAGLDVSVKDTSVCIVDDTGRIMREVKVLSEPDALLTVLKNPVHHFKRIGLEAGPLSQWLFSALADAGLPMICVETRHMRAALKAQINKTDRNDARGIAQMIRVGLYRPVHVKTLRSRKLRMLLTHRQLLQSKAIAVDNDLRGTLRNFGLKVGMVGAARFEARIRELVEGLPDLAALVEPLLVVRQVLREQVAVLHRRLLAVVRDDEVCRRLMTTPGVGPLVALTYRTTVDVPARFRKSKSVGAVFGLTCSRDQSGERDRAGAISRCGDKMMRTMLYEAAQSMLVRSTRWSWLKAWAMQVARRRGKKKAIVALARRLAVILHRIWVDGTEFRWTREAVPAA

SEQ ID NO: 426783 - protein, 326 aa, unidentified
MTDSIHGILGIDVSKLKFDVALLVADKIKKTHVFENAPDGFKALSNWLIRQGISSVAACMEATGCYGDALATYLYDQGVTVSVVNPAQIRSFSGAQLKRAKTDKADAKLIAQFCQQMNPAHWTPPPMHIRELQALVQRLAALMQMERQEHNRMETAPAVVRPSIETVLTTIKAEIKTVETMIRDHIDHHPDLKNQSELLESIPGIGQTTIARVLAFVGDIERFDHAKSLAAFVGLNPTVHQSGSSVRGKPHLSKKGNSALRSALYMPAIVARRYNPVIKEFADRLKKAGKPNMVIIGAVMRKLLHIIYGVLKSGKPFDPAWSVNHA

SEQ ID NO: 426784 - protein, 409 aa, unidentified
METVIERCCGLDVHQGSVVACIIVTDQRRKPRREIRTFGTMTKDLQALCKWLEAEGITHVAMESTGIYWRPVYNLLHGSFALIVANAHHIKTVPGRKTDVKDAEWIANLLRHGLINASYVPIPEIAELRDLTRYRRKLVGTASAERNRTLKLLETANIKLASVAADVFGVSGLAMLRALASGASTAEETADLARGRMRRKLAPLATALDGRVTEHHRFLLTVALGRLDAIERDIALLDERIAAKVAPYDRQIALLMQIPGVDRLSAIAVIAEVGVDLSHWATARKLAAWAGLCPGNYESAGRAKGSGIRRGNVHLKAALYVAASAAARQRGSYLKDKYHRLRARRGARRAGVAIAHKIIVSAWHILTREVPYQDLGDTYLDRLAEHRVTRNLVRRLQGLGYQVTLNRAG

SEQ ID NO: 426785 - protein, 412 aa, unidentified
MDIVHYRCAGLDISKRDVKACVRVQQPDQARAKSKVTTWGSTTNAILALREFLVAEEVTLVVMEATSDYWKPFYYLLDEGPFEVMLVNARHVKNLPGRKTDVSDAAWLAQLGAHGLVRPSFVPPEPIRQLRDLTRARTIVIRERSREIQRLQKLLEDAGVKLSSVATTITGPSGRSMLEALIAGERDPEVLANMARFRLRAKIPELTEALTGRFNEHHAFLVRLHLDAIDQRTEAIDVITERIEVMIEPFRAARDLIETIPGISTRAADVIIAETGADMTRFPTAAHLASWAGVCPGSNESAGRVKSTKTGPGNPYLKGVLGIAALSAIRSPDSYYCAKYRRIASRRGPIRAVVAVEHSMIIAIWNMLQSGESFTDPGGDYYTRLRPERAKYRALQQLRQLGFSVILEPSVA

SEQ ID NO: 426786 - protein, 413 aa, unidentified
MQYVGIDIAKRSHVAGARLEDGTPHGRPFKFANDQQGFASLLRRLKELGCGTDDTLLVMESTGHYWLALWEFAVAHGYDVAVVNPVLTDAFRKADTLRKTKTDDIDAFLIAEYARFKRLGPSRVSPEDAEGLKQLTRYRASVVAERTSLKNRLTSVADRTFPELSGLVGGNDSQTMRALMGRYGSAQAIARANVLQLEKVVREASRGHFGRAKADEVKEAAKSSVGTSFAAEALAVEAESVVGLIKILDEEVRKLDKQIDSLLDPEVGAILKSVPGIGPVCAAQIAAEIGDPDRFETPKQLVAYAGMDATKAQSGQLDGESGQHMSKRGSAHLRNALMTAADRARMYDPYFGDYYDHLTERRGKHHYVALSAVARKLCGVILALLRERRPYERRDPVPYGEGRPSQDPAATGA

SEQ ID NO: 426787 - protein, 387 aa, unidentified
MYYIGIDISKFKHDCAVIDDSGEIVTPSWSFTNDAEGFSQLKLLLNSLDTETRIGLESTGHYGMNLKLFLESNNFSFMEFNPLLINRFVKSKSLRKTKSDSIDCMMIAHYLMTVEYKPYPSSFYHTEKLKSLTRFRDSLIRLRSRQLVELTNILDKVFPEFKPFFGSRFSVTALYILSNYSSPEKIANMNSKSYEALRKLSRGRFSTVDFAKLKQLAKNTIGTTEDYLLLQMQIVLDIYRQLDSKVDETEVSIKECVFDMNPPMLSVPGIGIESAAVILAEFGDFSKFKNASQMLSFAGLEPGYFQSGTSETTGKMVKHGSSYLRYALMNCAQTVVNYEPTFAMFYSKKRAEGKPHRVALSHVVKKLLRVIYTLQTKNIAYDADFVR

SEQ ID NO: 426788 - protein, 318 aa, unidentified
MDPVVGIDVSKAKLAVVLIAASGKPLHKSCANTPAGHAELVRWLARHGGDPVRIGLEATGGYHEAVAVALHETGHHVSVLNPSAVEAYGRSQLRRAKTDRTDAAVIADFMRTQTPPRWVPAPPEARQLQALVRRLDALLEMRTQERNRLELAAPIVRPSIEATVAHLDTEVVAIKRQIAAHIDQFPTLRTQRDLIVSIPGIGETTAAIVLGELLDIARFTSARDVAAFSGLVPHVRQSGTSIRGRGTLSRLGAARLRKALYFPALTAIRHNRPLQRFAARLRAAGKPKMVIVAAVMRKLMHQIFGVLRSRRRFDPTCA

SEQ ID NO: 426789 - protein, 346 aa, unidentified
MMIIGCDFHPSWQQIAWLDSETGETREQKLVHGSGEAKQFYQQLAAPALIGMEAKGNSQWFMEMVEDLGHTIWIGDAAQIRASYVRKQKTDKRDAGHILKLVVEGRFPRLWSPDREQRDLRQLVLHRHKLVEIRTRVKNELQHLSMNKGMQKKRALWSRAGMQLLRELPLKPWAACRREDLLGLLAMLDEQIGKLDGAVQQAADEHPQAKLLMTQPGVGPNTALAFVLTIGDVGRFPRGKQVASYLGLIPREQSSGGRQKLGAISKQGNRWLRCLLVEATHNVVRLDPGFRKQYLHRCHQKPKGVAKVAVARKLAVRLYWMLRTQTGYPEIVRIESSPAVPLVGAS

SEQ ID NO: 426790 - protein, 387 aa, unidentified
MYYVGIDIAKLNHFASVVSAEGEVLVKPFKFTNDNDGFCKLLSAIDSFDRSSLIIGLESTAHYGDNLVEFLVARRYQVCVINPIQTSTMRKNNIRKTKTDRVDTLIIARTLMTQPHRFFSQEDLDCMHLKNLGRFRMKLVKERTRTKIQLTAYVDRVFPELQYFFKSGLHQKTVYALLKEAPTPELVASMHLTHLTHLLEVSSHGHFSKEQARELRVLAQKSVGSSDKALSLQVTQSVEQIELLDRQIIDVESRMTDIMLGLDSVIMTIPGIGYINGGMILGEIGDIHRFAKPKQLLAFAGLDPSVYQSGNFNASHTRMSKRGSRTLRYALMNAAHNVVKNNATFKAYYDAKMAEGRTHYNALGHCAGKLVRIIHKMLTDDVAFNLE

SEQ ID NO: 426791 - protein, 377 aa, unidentified
MPDVISLAPADVRMFVSLDVHKFSIVAATLPPAGGQPKVERIETTEKAIRRFIGRLGGGEGLAVCYEAGPGGFALWRLLTSMGVACDVVAPSLIPVRAGDRVKTDRRDAKKLVSLYRAGLLRFVQPPTPETEGLRDLLRCRDDIRCARTAARHRVGKQLLRHGHVFREGKKSWTAKHQAWVRRQRLADPLAHEALVQMLIHLDGLDRQLAALDAKLEQIAGDERWGWQVEKLRAFRGIGTLTALGLIAEIGDFARFGHPRELASWLGITPSEYSSGEQQHRGHITRAGNHHARRLLIEAAWHYRHAPRRPSSGPQPSDRAWQAQVRLFHRHRHLTAQGKRSTVVTVAVARELAGFLWAELTDQPPREDKLAAQPAAA

SEQ ID NO: 426792 - protein, 367 aa, unidentified
MKKVSTAGKQQSKNISQQRLTIGLDLGDRNSWYCVMDETGQIQLEQRVGTTAKGLREVFGAMPRSRIALEIGTHSPWISRLLKELGHEVIVANARKVRLIGESRKKDDRLDAQTLARLARIDPELLYPVKHRSAQAQADLMMIRARASLVRVRTGLVNTARGLAKSYGERLRSCNIRNVNPEKAESLSPELQAALQPLLAAIESVSERITEYNERIEALAQESYPQVGLLKQVKGVGTLIALTFLLTLEDPHRFSMSRDVGGYLGLQPGRRDSGQSQPQLHISKEGDPYLRTLLVQGAQHILGPFGPDCDLRRWGLKLAERGGRNGKKRAIVATARKLAVLLHHLWVSGEVYEPLHNSCQLAVTAVA

SEQ ID NO: 426793 - protein, 346 aa, unidentified
MTMLAELVDVVIGVDTHRDTHTAAVVMAPTGAAIATATVSADPVGYTALVALADRHGRRRAWSIEGTGSYGAGLTRHLTGIGEHVIEIERPNRARRRNGAKDDTIDAVRAGREALARSDAAQPRAAGQRAALATLLAARRSAIDAATDAQRQLNALAITAPETLRTRLRGQKTRALLNTAAKLRIQSRWDLETTTAAATMRSLARRSAALEAEAAEHEAALRSIVERWRPDLLDQTGIGPIVAAAILCAWSHPGRFRSEAAFAQLAGVAPIPAPSGLTTRHRLNRSGDRQLNRALHVIAIQRLRLDPRTIAYRDKRRADGKTDREIRRCLKRYIARDLYRMLEHPA

SEQ ID NO: 426794 - protein, 387 aa, unidentified
MHAADQSLAPTTIGADLCAIFISLELSRSTWLVTSLSPGRGEKMSKHSVSAGDIAGLLARFSELRRKACARTGKSFPIVIIQEAGLDGFWIHRVLLSEGIESHVVDAASIATSRRRRRAKTDRIDGETLLRALLAHKRGEPRVCSMVRAPTPEDEDRRRICRERKVLIMERVQHVNRIKGLLFSQGASGYEPLRRDRRARLDALQTGDGRRLPPHLKAQVCRELDRLELLLQQIKAVEAERDALLNAEQTKASAPPPMLLGVHGVGPEFASVLWSEGLSRHFDNRRQVAAYAGLAPTPWQSGSVHHEQGISQSGNRRLRTMMIQLAWLWLRHQPRSALTLWFKDRMERNGGRRRKTTIVALARKLLVALWKYASAGVVIEGAMIRAA

SEQ ID NO: 426795 - protein, 337 aa, unidentified
MEQVIRVGLDTSKQVFQVHGVDAAERVVLRRQLRRGELGRFFGALGQTLIGLEACGGSHHWARVLRGLGHEVRLLPPSYVKTYRKRRSKNDARDAEAICEALGRPSMRFVPVKTEAQQAALMLHSARELLIKQRTMLVNAIRGHAAEFGIVGAQGLGKLLELLERVRSSDIPELARRMIELLASQIDPLDMKLREIDARLRDWFSTSPQSQRLATIPGIGLIAATALALKIPDPGAFRSGRHLAAWLGLTPSQRSTAGKHRLGKISRQGDETLRSLLIVGATAVVRWARPGRASPWLLELLARKPRKLVAVALANKTARIAWAIMMRGERYRRQMPA

SEQ ID NO: 426796 - protein, 311 aa, unidentified
MGTTVVGIDVSKDRLDVHVRPGGDAFAVPRDGEGIAALAARLGALQPKLIALEATGGFETVVAAGLAGAGLPVVVVNPAQVRAFGRALGRHAKTDPIDAAVIAHFAEATNPAVRRLPDEAAQVLADLVARRRQIVAMITAERQREARAPAGIRKSIARLLKALERELASVDGDIDTAVRGSAAWRQTEDLLASVPGVGKVVARTLVAELPELGTLDRRQIAALVGLAPFTRQSGQWRGRSFIGGGRAAPRAALYMAAMVAARFNPTLKQFRDRLVQAGKPKIVAIVATARKLLTILNAILRDKTPWNPKNA

SEQ ID NO: 426797 - protein, 415 aa, unidentified
MNYLGIDVSKSSHRIAVLDGEGELLAKSFSVESSQEGFNSLLEKLKSLNLSPDILLCGLEATGNLWENIYSLLTAAGFKIIVLNPYQTNKYHQLLAKKAKTDDIDALVIAGLLRSKEHINSYVPDDLIQSLREHVKLRDKLLKDLKDYKRQTYSLLELVFPEYLKAVKNPFGIASSTILKNFPTATHLAQAKLKDLLNIVRHIQGNTYPEDFLSELIELAKKSIYSGKASKSRGLNVKILITQIEQTQNSIAELDAAIEQLLKPEDPESSLPDTPLSIPGVGKKTLAVYLAMVGDTLRFPSTKQLIGFIGLYPEIKQSGESQNSPHLTHRGCPILKHALYMAAVASLIHNPYLKSIYDKKISQGKKPKQALIVVARKIACMIHSMIKNNTEFEPERFFVSKTKIKNDSLCYLTTL

SEQ ID NO: 426798 - protein, 347 aa, unidentified
MRFYTHQHKFYCGIDLHARTMYLCILDQEGKILLHRDIKTDSDIFLKSIAPYREDVVVAVECIFTWYWLADLCAAENIPFVLGHALYMKAIHGGKAKNDKIDAYKIAALLRGGMMPMAYVYPVEMRSTRDLLRRRNHLARKRAELLAHVQNTNHQYNLPAIIKNLGKKGNRDGVARRFADECVQKSIELDLGLIDHYDQLLHRIEHEISLIAKKYDADSYFRLRSIPGIGRILGLTILYEIHDIRRFPSVQDFVSYCRLVKCAKESAGKIMGSSGKKIGNAHLKWAFSEAAVLFLRRNPEAVAYRNKLARKHGAAKSLTILAHKLARAVYKILKQKEVFQPEIFFAK

SEQ ID NO: 426799 - protein, 357 aa, unidentified
MRQQSNEISFKGQNIYVGIDVHLKSWSVTVLSENSVLKRFVQDPDPGALHKFLTRNYPDAEYHSVYEAGFCGFWIHERLTALGINNIVINPADVPTTAGERIQKTDAVDSAKLARSLRNKELTGIYVPDSTSLEVRSLIRLRSAIAKDMTRQKNRIKAHLRFLGYEIPVEYCNRDWPKRFIVWLRELDMKTQSGRQSLDFMLDLLENLRKEKLDMTRALRELSRTEQYEKPLELVMSVPGIGQQVGMALLAEIVDIRRFKSAESLAKYVGLVPMCHGSGEKDGVGDITIRKHAFLRTLIVESSWVAIRQDPALTLAFETYCTRMKPSEAIIKIARKLVNRIYFVMKWQKPYVTSVVS

SEQ ID NO: 426800 - protein, 361 aa, unidentified
MQYIGCDFHPSFQMIAQLDKKTGELVRRRLGHGEGQGEVQRFYQALPGSWVVGVEATGNTYWFERLLEKLGHQMWMGDAGKIRQQDGRKQKHDKRDARLILRLLLEERFPRIWIPSVAERDLRQLLLHRWHLVRMRARIKNQLQHIALNQGLQKKSKLWTKAGLEQLRKLELEPWARQRRDELLEMLEQMVERIEPLDQAVEQAAAAQPRTSRLQTHPGVGPVIALATVLTMGEVGRFPNSRSWVSYLGLNSSEKSSGEKRWLGAISKQGNPFLRHLLVEGASSAARGDKDLGRVYARLKARKHHGVAKVAVARKLAVRLYWMERTEKSYPEVVRMQGSLSHPVAAVRAETLNRPPASLQP

SEQ ID NO: 426801 - protein, 349 aa, unidentified
MASLPAVTRQVTVGVDSHKDVHVAAAVDQVGRVLGTIWVPTTTRGAAQLLGWARRLGAVQRFGIEGTGSFAAGLSRWLQQQGYQVVEVNRPNRQARRRRGKSDPVDAEAAARAVLAGEATTAAKTANGTVEMLRVLRVARRSAVKARGQAANQLHSLLVTAPDPLRQQLRGLPLAGLVQAAAGLRPGPLTDPLVATKFALRELARRYQLLTAELDRLDTELAALAPKAAPRLLTRRGVGAQVASALLVVAGDNPGRLRSEAAFSMLCGSSPLEASSGKTVRHRLNRGGDRDANNALWTIAMTRLSCDERTQRYLARRTAEGKSKREIIRCLKRYIAREIYRDITAAVGS

SEQ ID NO: 426802 - protein, 396 aa, unidentified
MTVVVAIDVGKNEFAVSVTDAARRRLLKPRLGCPMTAPSVREVVGRISRLLPTGAVVKVGIEAAGHYHLPLLAAAVWPTGWELLELNPAHVTEQRRVLGKRTIKTDVIDLEAMTELLLAGRGLPVTATEAVLVELTAWSAHRTRRIQIRSGLKNQLLGQLDRSFPGLTLALPDVLGTKVGRLVAAEFADPTRLVALGSSRLIRFGATRGVQIRKPIADKLLDAARDALPMPDAAIARQVLAADLALASDLDRQVAQAEVELARLLPLSPFRTLTSVPGWAVVRAGNYAGALGDPARFSNPRQVYRSAGLNPIQYESAGKRHDTRISREGSVELRRALIDLGMGLWLNEPAATARAVELRARGKKGGVIACAMAHRANRIAFAMVRDQAIYDPSRWT

SEQ ID NO: 426803 - protein, 429 aa, unidentified
MRAIGLDIHRNFCEVAIHEGGESRSAGRVKTTPEALEAFASSLGPEDWVAMEVSGNAAEIARIIEPHVARVVVVSPSDTGIRQARAKTDRLDARTLARLLAAGSLDAVWMPDERTRVMRRRLARRSGLVEARTRLKNEIHAVLIRRLIASPDVSDLFGQAGRRWLGKLELPLEERETLDSSMRQIEFLEREISEVERAIALDALAWPDLRRLMSVPGVNVICAASFLAATGPIERFHNPRKLVGYLGLDPKVRQSGPGPGTSGRISKQGSSSARWALVEASWSAVAQPGPMRAFYQRIRARRGHQVAVVAAARKLACLFWCLLTREEDYAYQQPSLTRKKLRRLEIAAGSPKYPGRTSIWSTNVAMREAERRLAEQAELAYKNTVRDWHATQTKRANTAATVEVGASVTPGHASNKPSKGKAARQTTSP

SEQ ID NO: 426804 - protein, 342 aa, unidentified
MSVYVGIDVHRKRSQVAVIDQAGQVLANRNVPNGVEPILKVIGGLPPGTAAAFEACYGTSWLVELLEDYGFDPHLVHPSRCKAIASARLKNDKVDAAILAQLLRADLLPEAWIAPPPVRQLRALLRHRVALVRLRTRLRNRIHAIVADYGHDRPAGGYWTGPGRAWLASLPLPAVSRELIGDDLGLIDALQQRIDRLDGEICQRARSDPRVKILTQLPGVGPFTALMILAEVGDIRRFASARQLASWAGLTPTVRGSDRVAHYGHISKEGSAWLRWVLCEAAQTAKRSPQFAATFQRIAQRRGKKIATTAIARKLATRAWHLLADTGPGAAPQPAAPQTAAR

SEQ ID NO: 426805 - protein, 309 aa, unidentified
MIYIGIDVAKDTLAVALSSGQEWSCANNARGIALLVERLEAANPALVVLEATGGYEEELLATLIAAGIETRRVNPREVHHFARAAGQLAKTDRIDARMLALFAERIRPPARALSDPEREQLKALVGRRSQLLQMITAERNRRAHAQRWLARSLQRTIRALERELKLIDREIAERLGRSTTLKPLHDLITSLPGAGPVLGATLIARVPELGRLSRRQIAALIGVAPFTRQSGQWGGRDMIFGGRAPVRATLYMAAVSAVRHNPPLAAFYRRLRGRGKPAKVALTAVMRKLLTILNAMLKHHTVWSAPCAV

SEQ ID NO: 426806 - protein, 372 aa, unidentified
MSQSSTLYVGLDVHKDSIEIALAEAAREVEVRRLGTVAGGTAAVTKALRRLVSAGHRLHIVYEAGPCGFVLQRHFAALGWHCEVVAPSSIPRPSGERVKTDRRDACKLARLARIGELTPVRVPDAGDEAMRDLVRGREDAVREQRNARHRLKALLLRNGIVYTGRSAWTGAHLRWLSTVKLAHAAQQIVFQEYLHAVSEAAARIARHEQALREALPGWTLAPVVAALQALRGVQLIAAITLVAEIQDFWRFASPRQLMAYLGLVPSEHSSGPKRRQGAITKAGNAPARRILVEAAHLYRYPARVSPVIARRQAELPKAVTDIAWAAQVRLCARFRRLGARRVPHNKLVVAVARELCGFVWAIAREVTPAPSH

SEQ ID NO: 426807 - protein, 343 aa, unidentified
MDHFAGLDVSVKETSICIVDETGRIVGEVKVASEPEALLQVLMNPAYHFKRIGLEAGPLSQWLFSALGEAGLPVICVETRHMQAVLKAQINKTDRNDARGIAQMMRVGLYRPVHVKTLRSQKLRMLLTHRKLLQSKAIAIDNDLRGTLRNFGLKVGMVGKVKFEARIKELVENFPDLAVLVEPLLVVRRVLREQLGILHRRLLAIVQDDDVCRRLMTTPGVGPVVALTYRATVDVPARFRNSRAVGAVFGLTPSKYQSGEINRTGAISRCGDEMMRMMLYEAAQSMLVHSARWSWLKAWAMKIARHRGMKKAIVALARRLAVVMHRIWVDGAEFRWTREVVAA

SEQ ID NO: 426808 - protein, 349 aa, unidentified
MNVYVGMDVHRKRSQVAVLDDDGVQQRNRNLPNDPAQLAPILGGLPPGTPVAFEAAYGWGWLVDLLEELELEPHLVHPSRCKAIASARLKDDKVDARTLAQLLRADLLPEAWIAPQQVRDLRALLRHRASLVRLSTTAKNRIHAVLADRGIQQQTGLWTGTGRVWLAGLPLPPTPRAIVEDYLALLDGLAEPIARLEHQIHALAKPDPRVQALMALPGVGRLTAMTLVAEIGDIARFPTARKLCAWAGLTPAVRNSDRKVRHGHITKQGSVWVRWILQEAAQTAKRSPMFAAAYAQLARRRGRQIATVAIARRLLARCFHILNQLEATTGEGQTAGCARNNRMRLQHGR

SEQ ID NO: 426809 - protein, 377 aa, unidentified
MKRIKFVGLDVHADTIAVAVAEQEGEVRSLGIIANREESVRKLVKKLGPIEPLRFCYEAGPTGYALYWQLSKLGARCEVVAPTLVPVKAGDRVKTDRRDALKLAKNYRAGELTAVWVPDAAHEALRDLVRAREAAKKDQLRARHRLSKFLLRHGRRPPVGVHSWTLQYLKWVQQEVHFAERAQEVTLLDYLHEVQHAAARIARLDQAIDEAVQSVPAAMRAVIEALQAMRGIAKVTAVTVVAELGKIGRFSGAPQLMAYGGVVASEDSSGERIRRGPITKTGNAHLRRVVVEAAWAYRHRPSIGATLRKRQEPVSEKVKEIAWKAQQRLHARYMKLTLRGKNKGVVVTAVARELLGFLWAIGIQAEAEQQESLSRVA

SEQ ID NO: 426810 - protein, 336 aa, unidentified
MALYCGIDLHSNNQVIVVIDDNDRILLQKRVANDLALTLQWLMPWREQLCGVAVESTFNWYWLVDGLMAEGFAMQLVNTTKVQSYSGLKHSDDEHDAFWLAHLMRLGILPTGYIYPAEQRPLRDLMRRRLYLVQQRSGNILSLQNQVWRSHGHKMACNEIKSLDDEFAKDEVPLLRQSLDSTRQIIVALDRQIHAIETMLKKHVLDCDAYRHLFSVPGIGFALGTTILLETGDIHRFKGPGNYASYSRCVDSVHTSNNKKKGEGNVKCGNRYLAWAYVEAANFAKRYCPEAKRFYERKKAKTNTAIATKALAHKLARACFFLIRDGVDFDVNKCFA

SEQ ID NO: 426811 - protein, 366 aa, unidentified
MAITHVALDDSKRVIVAGILRPEATQPDVREVPNEPRQVRRLFERLLQAGPVRACYEAGVSGYDLYRQLTALGVDCVVVAPALTPRRPGERVKTDRRDAAKLVRLFRAGELTSIHVPTEAEEGVRDLTRCRDDVRADVVRWRHRVLKLLGRHGRVYQAGKNWSQAHWSWIRSQRFDNPVLTRTLEASLEALDQALRRRADLDRAIESIASEPAYRVAVDALRCFRGINTLSAMILVAEIVDFQRFRRPRALMGYLGLVPSEYSSGDRHRRGALTKAGNTHARRVLVEAAWHYRHRPALSARLARQTAAQPPVVVAQAWRAQQRWHRRYRHLVGHGKRPTVAVTALARELVGFVWAAMTRTPADVAA

SEQ ID NO: 426812 - protein, 342 aa, unidentified
MYYIGLDVHKKTISYCVKDASGQIHREGKIGASRPELDAWIRTLPQPRVVAMEATIFTGWIYDHLLPHAEQVKVAHPLMLRAIAAAKKKNDRIDAGKIADCLRCDFLPECHMASTQIRDRRRTLRYRHLLVRQMVQMKNRISGLLMETGVSHNKQRLHKVGYFRDLLATNEEIDDSLRPLLRVSRDSIVRLQKTEYALVSSLQRDPFLAKRVQRLKTVPGVGPITALTWALEMGDVSRFRSIRQAISYCGLCSDEKSSAEKIVRTPLSKQRNKHIQRVLIEAAKLAPKQDHDLALVYEKEKQKGNSNRATLAVARKMVAYLLAVDRAQRDFVPAVDYRVAMT

SEQ ID NO: 426813 - protein, 415 aa, unidentified
MTMEDLLTCCMGLDIHKDTIVACLLTGATETKPEKEIRTFSTLIPDMLKLRAWVEETNCQHIAMESTGIYWTPIYEILEDCFDSEITLLVVNARHIKNVPGKKTDMKDAEWIATLIRAGLLSGSFIPDKEVRELRNLTRYRKSVVRDVSAQKNRIEKFLQSSGFRLSSFISDIFGASGRNIMNHLTIHGSIDLVALDACLKTKTRKKIDTIMIAVNGTLSSHQQSVLRMMLTHLEQLENHRKEVELAIEESVEQFSEAMFFLCSIPGIDVTASSSIIAEIGIDMSRFPTAQHICSWAGLAPGNNESAGKRKSSSITKGNPYIKSMLCEVAWVVAGKRNTYLANWYWRIKQNRGAKRAIIALARKLLVMIYTMLKSQQPFDDSRFEQRRQQCQEKRTSKLIKELNRLGYRIEAIPS

SEQ ID NO: 426814 - protein, 300 aa, unidentified
MDHFAGLDVSVKETSVCILDDAGKIVKEVKVASEPQALLKVLGNPIYSFKRIGLEAGPLSQWLFSALAEAELPVICVETRHMQAVLKAQINKTDRNDARGIAQMMRVGMYRPVHVKTLRSQKLRMLLTHRKLLQSKAIAIENDLRGTLRNFGLKVGVVGTVRFEARIQELVETIPDLAVLVGPLLVVRRALREQIVVLHRRLLAIVRDDEVCRRLMTTPGVGPVVALTYRATVDVPARFRKSKSVGAVFGLTCSRYQSGEIDWSGRISRCGDEMMRVMLYEAAQSMLRSKKWSWLKAWAM

SEQ ID NO: 426815 - protein, 377 aa, unidentified
MKRIKFVGLDVHAETIAVAVAEQDGEVRSLGVIPNRSESVRKLVKKLGPVEELRFCYEAGPTGYVLYWQLTALGAKCEVIAPTLVPVKAGDRIKTDRRDALKLARNYRAGDLTAVWVPDAAHEALRDLVRAREAAKRDQLRARNRLTKFLLRQGERPPPGVNLWMLKYLDWVRKEVHFEQLAQEATLLDYRHEVEHMAARIERLDRAIEEAVKLAPPQMHEVIEALQALRGLAQVTAVTVVAELGQFSRFAEARQLMAFSGIVSREHSSGESTRRGGITKTGNAHLRRVVVEAAWAYRHAPAVTKCLRQRQEKVSEEIKEIAWKAQHRLHSRYRKLTARGKNSGKVVTAMGRELLGFIWAIGVKVEAGQRKALGQAA

SEQ ID NO: 426816 - protein, 266 aa, unidentified
MNNIALIGIDLGKHSFHVHCQDNSGRALIRKKFTRTKLFEFLANTPSAKVVMEACGGSHFMARRISSLGHEARLISPQFVRPFVKTNKNDYVDAEAICEAASRPSMRFVQPKTENQQAMQAMHCIRDSLIRDKVKTTNQMHAFLLEFGIGLPKGTAVIKRLSAVLTENELPPYLVQMLTRLHAHYCYLESQIKELDQLLQQELKHDDTGQRLLTMPGIGPITASILSSQLSDGKQYASSKDFAASTGLVPRQYSTGGALLNKSNFC

SEQ ID NO: 426817 - protein, 355 aa, unidentified
MIGEKYIGLDVHQATISVAVMDSKGKVVMESILETQAATILEFFAGLRGTLWVTFEEGTWAAWLYDLLKPHVAKLVVCNPRKNALLKHGNKSDKIDARKLADLLRLNDLEPVYHGETGVRMLRELARSYLTIVKDLSRVMNRLKALYRSWAIPCAGRDVYYTRHRSEWLGKIPEAGTRRRAEQLYQQLDMLQHLRQQARRELLAESRKHTITAKLRQIPSLGPIRSALAVALIQTPHRFRTKRQLWTYSGLGLETRDSGEYHYVEGQVRRRKKQVFIRGLNKDHNHDLKGLFKAAATRASVRPGPFQDFYQRSLAKGIQPTMARLTLARKIAAITLTLWKKGENFDAEKLKAQAA

SEQ ID NO: 426818 - protein, 343 aa, unidentified
MSVYVGIDVHRKRSQVAVIDAKGEVLANRNVPNGVEPILKVIGGLPPGTPAALEAAFGTGWLVELLEDYGFDPHLVHPLRCKAIASARLKNDKVDAAILGQLLRADLLPEAWIAPPPVRQLRALLRHRVQLVRLRTLLRNRIHAVLAGHGHDRPAGCWSGPGRAWMASLQLPAVSREVVDDDLALIDALETVIDRLDWEIHQRARSDPRVKVLTQLPGVGPFTALVILAEVGDVSRFGSARKLASWAGLTPTVRGSDRVAHYGHISKQGPVWLRWVLCEAAQTAKRSPQFAAGYQAIATRRGKKIATTAVARKLLTRAWHLLTDAERAAPQPATAPAPDKQRR

SEQ ID NO: 426819 - protein, 400 aa, unidentified
MNAVGIDVSKGKSTVAVIQPFGVVIAEPFDVFHTDSGLKELVNFIKSLSGETKVVMEYTGTYYEPVANALHNAGLFVSVVNPLLIDDYDTNRVRKVKTDKIDALKIASYALDRWMNLRKYEPTETVRKTLKIMNRQCIKLNKILVMQKNSLIALLDCFFPNENTLFTSPRRESDGHEKWVDFVARFPHVDSVTKLSISAFATKYQSWCKKEHYNYSKSKAEQIHAYARTIVSTLPLTDAVKKLVSDAAKLLNSTLEALGTLHSEMDTLASQLPEYETVMNLYGVGKVFCSQLIAEIGDVTKLKSGKSLVALAGIDPPPNQSGKDDPKSRRISKRGSPALRKTLFLIMSIYLQRQPADEPVYQFLDKKRTEGKLYKVYMIAAARKFLRIYYARVKEVMSKE

SEQ ID NO: 426820 - protein, 426 aa, unidentified
MYVAIPPDRDSEPVRVFKTFTADLECLVDWLIARGITTVAMESTGVYWIPLYQMLEDRGVRACLVNARHMKNVPGRRTDWHECQWLQYLHAAGLLRAAFRPEQDVCGIRTLLRHRNELVRMAVQHVQHMQKALTQMNVHIHHVISDITGLTGLAIVDAILSGERDVAKLAELRHRSIQADEETIRKSLEGDWREEHLFTLNQSRQMYTTYRNNIEACDEKIAKMLGGFEAQVDIKLQPLPAHPGPSRKRRTKRTGDFRFEVRTEAYKLFGLDVTRIPGLNELAIPIFSEVGRDLAARFPTAGHFASWLGLCPDNDKSGGQVLWTGVRKINNRAAQMFRMAASSLHHNRSPLGDFLRRMKAKLGPAAGITATAHKIAIIFYTLVIKQIEYDDSIWAKRDEHRQKRFEQKLKRQARQLGYELVPVQPV

SEQ ID NO: 426821 - protein, 354 aa, unidentified
MKGELRNRNVVVKGKDVFIGVDVHKVSWHITARAGGEEVFNGGIPGQYLALRGILDRFKGCPMKLAYEAGPCGFWLHDKLAKDGIEVIVVPPSLIPIESGNKVKTDKRDSRKLARLLESQMLKRVYVLTEEDRADRELLRTRRQVLEHRSDVARQIKSKLLFHGIASPFSTNTWTQGYLRWLKDLTFEREVLRISFDFLIELYDYLTAQLIQLRKKIVELSRSDKYRHKLNLLKSVPGIGTLIAMELLVELSDIERFARADELASYIGLTPSEFSTGEYVRQGRITRCGNKRVRTCLVESSWLLIQKDPWMRSKYDRLKRIKGGKRAIIAIARNLIIRIRRILLNNEPYVVGVC

SEQ ID NO: 426822 - protein, 369 aa, unidentified
MDQHSTVVGLDVHKETITAAILPWEAARPEKTVTIDNHAKAIERLVKQLRASGAPVFVYEAGPCGYTVQRQLHHLGCQAAVIAPALTPTRPGDRVKTNRRDAEKLARLYRSGELTEIRVPTAEEEAARDLVRAREDALADRLRARHRLTKFLLRHGRVHHGTKAWGQTHYAWLRQQRFELALAQQTFEAYLRAVEETDARLESLTTHVLELAQLPGYARLVHALRCLKGIDTLSGITLIVETQDFRRFGHARAYMDFTGLVCSENSSGTRTRRGSITKAGNAHLRRVLVEAAWSYSHRNATGPTLTKRRHGCPTEVVQIARRAQDRLHRRYWRLTQRSKLPQVAAVAVARELAGFVWAIARSVSSTASA

SEQ ID NO: 426823 - protein, 347 aa, unidentified
MLIIGCDFHPGFQQVAIFDNRSGEIQERRLGHRAEAEQFYRGLAGQQVRVGMEACGHYPWFERLLVEPGFELWLGDAGRIRAQAVRQQKTDRRDAAHLLELLLEHRFPRIWVPSLEERDVRQLLVHRHKQVQTRTQVKNQLHALALGQGVQRKRKLWTQAGRAELEQLELLPYAAQRRKHLLQSLDRLEQEIAELNQRVEAEVAQRPAAVKLQTHPGVGPVTALAMVLTLGPAQRFASAKQVGSYFGLIPSEHSSGGRQKLGRISKQGSSFLRFLLVEAGQSAVRKDAELGRFYRRLAVRKHRALAKVAVARKLATRLYLMLREDWTYAQLCRAMVSASPSHSVVES

SEQ ID NO: 426824 - protein, 330 aa, unidentified
MSQPNLQCMGIDVAKLSLDIATTDTIEPFTVGNDEDGFAVITDKLKHTKINLILMEATGGLEAAIACKLQSEGYDVVVINPRQARDFARSMGYLAKTDKLDAAMLAQLALVIDRHPDRSRYIRHLPDEARAVLAAMVVRRRQLNHMLVAERNRLYPSHPQSRKSIDNIIDALQNELDRINEQMKQHMTAFFQEQARLIGSVKGVGDITVASLIAELPEQGKLNRREISALTGVAPLNRDSGKMRGKRTTFGGRAGVRATLNMAALVATQFNPAIKLFYQRLLAAGKTQKTCSGRLHAQTHHHSEYHAQKRGRVERLISITGNLMTAGHFT

SEQ ID NO: 426825 - protein, 291 aa, unidentified
MHSENIAAYVGLDVHKETLAVAIAAPERLGEVRYYGTINNEAQAVRRLFQKLQGLYGNILSCYEAGPCGFGLYHQLTAMNIKCLVIAPSRIPKSPTDRIKNDHRDAISLARLLRAGELTPVWIPDLTHEAMRDLIRARAADKRDSRVVRQRILSMLLRTDKHYAGKHWTGKHRTWLANQSFSQPSQQIAFQHYCQSLEQIEDRILQLDQEISRLLPEWSLCNLVCQLQALKDVGQLIAITLVAELGDFSRFSNPKQLMAFLGLVPGEYSSGNSIRPRGITKVGNSELRRLL

SEQ ID NO: 426826 - protein, 319 aa, unidentified
MPRILIGVDVSREFLDVHVRPTATQRRFANTTAGIAELVAWVRPLGTERILFESTGPYHLAAVGALLAAELPAVVINARQVRDFAKAMNHLAKTDTIDAAVIAHFAEVATTTVRPLESEELRTLREWSDRRGQLVHMLAMEKNQRHSATVARASAKVLRSIEQHIAYLEKQIRDLNGRLDRLIENSATYRARNEILQTLTGFGPQVSRTLLIHLPELGRCTRTAIAALVGLAPFHDDSGDHAGLRHIRGGRSKVRVGMYQAAIAAIRQCPRTRAFYAAMKARGKASRVVIIAIARKLLVTANAMVRDMAPYREPANSVC

SEQ ID NO: 426827 - protein, 350 aa, unidentified
MHATTVAIDLAKDVFELAYADPAGRILERKRLTRRAFTRVMENCPQLVVVMEACGSAHYWGRRFQALGHSVRLLPPRDVRPYVRRNKTDRADAAGLVEAARCEQIADVPVKSPRQQGLQALHRVREQLKGQRTATINLVRGLLREYGVVIPNGSSKVRAAVLEALEDAGNDVPMVLRATLTEQLEHIARLQADMAAIEKRLAEEAGRDVAVQRYLTVPGVGLLTATALRASAGDLSRFNSGRHLAAWIGLVPREHSSGHHRRLGRITKRGDAYLRTLLIHGGRAVLRSALMRRRAGQPLDRLQTWALDLAHRQGHNRAAVALANKLARRLWALDQYGAAFNPNHISHKPV

SEQ ID NO: 426828 - protein, 391 aa, unidentified
MYSDGSKHSSFSVPNNRNGAKIIVDRVTSVLLLQDIPQVVIGMEATSVYGDNLMRFLRESGSLGRFERSLHMLNPKQVKKFRDAYSDLPKNDHVDSYVIADHLRFGRINKEVYMDDYKYQALKMYTRARHQLVQELTREKQRFLNTVFISFSGLTQEKIFSNKFGATSMALIEEFSSLDELAYMSTDELVDYIRKKSKNHFENPEEIAEAVQRAAKNSYRPPQVIADAAKQMLAISMNTIRLLQKQIKEYDKAIEKMLEAFPQTLTSVKGIGNIYAAGIIAEIGDINRFPSQASLAKYAGLVWTQHQSSDFEAEDKRMIQGGNHHLKYYLCEAANALRRCDSEFKRFYALKYKEANKHNHKRALALTARKLVRLVYTLLKTNRLYIPPEEY

SEQ ID NO: 426829 - protein, 346 aa, unidentified
MKGKEVFVGLEDSKKTWKIAVRCERMVIHRTSMEAKYSVLIRYLRKKFPECTIHLIYEAGFRGFNLFDRLTEEGIDCMVIPPHLVTEPKVSRVKTDKRDANRLAMIRENHDFKEPCCVPDKERREDRQISRTLWGMQKDIVRTRNRIRKFLDFNGIEVSFPERWGEEEFRALKELPLGDSLKKSLTALITLLEQLWAHKEALHAALRTLCSKERYKKAFGIAMSLPGIGWFTAIRLILELGEDLSRFTSGKKIASFVGLTCSEYSTGETERKGRITGMGSGLIRAALIENSWMAIRKDSVLLAKFTRIWKGKGSKKKAIVAVARMLIVRLRACVISGTPYAIGTVK

SEQ ID NO: 426830 - protein, 339 aa, unidentified
MEVTTIGLDLGKDVFQVHGITADGTVIFNRSVRRNQLLKFFETLPSCLVGIEACGSAHHWARELTAIGHYVRLMPATYVKPYVTRGKTDAVDAEAICEAVTRPTMRFVAVKSKEQQALLTIHRVCQLIVRQKTQMLNVIRGLLREFGHVIGNGPVAAMRFIKTFQTDDCLDMPDLAKSMLKTLCEQVIALDERVTFYDKLIEYHSRIDERAKRIRTVPGVGPVTASAIVATIGDGKQFKNGREFAAWLGLTPLNRSSGGKERLGSISKKGDRYIRRLLVIGMTSQVQRARGYPERVHPWIMQLLERKPVRLATIAMANKAARIIWAILTKDTYYRQAAA

SEQ ID NO: 426831 - protein, 334 aa, unidentified
MLYAGLDIHKAVFQAVVLDPESGELSECRFEPSRQRLNDWAMQWQGKLAAVAIEATTGWRWVARELERQGFEVHLVDPGRASALRGRRRQPKTDRLDARWLALLLARDLLSECEAWLPPVEIQQLRDRTRPRKALAGDRTGWAQRLHALRAHEGWPCSRGRLLTAEGRRWIAALELDAHVRAQVDLIVAVIAALEEQLERVESELRRYARAERRCQALETIFGVGPILACHLLAEIGDPRRFQRPRQLVRASGLDPSVIESAYSKRRGRLAKQGSRHLRWALVEAANHSHRHTSPDHDLYRRTVRRCGRGRARLTVARKIARRSYHVLLAAEAA

SEQ ID NO: 426832 - protein, 344 aa, unidentified
MTIVEQRTAITGGVDTHSEVHVAAALDPLGGLLGTREFPATAAGYAGLLGWLGQFGDVALVGVEGTGSYGAGLARYLASRGVRVVEVDRADRQDRRRQGKSDPLDAVSAARAAQSGRAAGAPKGRDGAVEAIRTLMVAKRSARHERTQAINQARALILTGPDELRARFAGKRAAALAEAVAALRPRPGDAADYSLRVALRELGRRVQFLDAQVERLDDLIVPLVTIRAPGLLSLYGVGPDTAALLLIAAGDRPERLRSEAAWAHMCAVAPIPASSGKTRRHRLNRGGNREANHALWRIVITRMSAHPETRAYVARRTAEGLSKKDVIRCLKRYVAREVYPYLRG

SEQ ID NO: 426833 - protein, 375 aa, unidentified
MRAFGLDVHRDFCEVAIAEGGAIRSAGRVATRVGSLELFAQSLVAGDVVALEATSGADRIVSLLQANGIRVVVANTRKLRSITEAKAKTDRLDARTLARLLVSGLLDEVWTPDERTRSLRRLTNRRERLVRARTRAKNEAHGVLARNLCDRPPVTDAFGKAGRRWLARLDVPVDERLTLDGCLRQVDFLDAEIAALDSEIARAALAWPEVLRLMTVPGVNVQTAATFMAAIGDIRRFPSPRKLVSYLGLDPRVRQSGSTPARHGRISKAGASEPRHVLGEVAWKVMLTPGPLRAFFERVRARRGPQVAATATARKLTVLLWHLLTREEDYAFARPAMTRNKVRRLELLATAATYVGIPLLMFIRLPDLCWGEGAV

SEQ ID NO: 426834 - protein, 413 aa, unidentified
MSPGLLLREVPGDRLVVAIDPGKVSNRVWLTTGDRGLIGEPVSLPVLRDGVEELDRLIASSGVVGVPVIGIEATGALHRAWAAEVERRWPGSLRLFAPSETQAARAQLGSRRFKTDDRDCAALVWLLRQGAGRPSAPSAVEALLGAVRHRRQLVDARRVAQQRLHDQLNALCPGLSAPVGHGRALKLEDASGGAVLACAAAFAGRAPSMRSLLARSPGRLSEANARFWIARWKRLLAPPPDAELRAQRLGRDVERWLGLREDITALESQLAELLAGTDGQILTTLPGVAVVRAGAFAAHTLPIERWPDPDQLYSATGLAPASYQSASVTRRGRISRQGLAEHRDALMAIAWGLSQHSAAFAARDCEYRARGFRPIQARVALARHACRLAWRLMISQQPYDDRRYDQARHRRGR

SEQ ID NO: 426835 - protein, 384 aa, unidentified
MSRQVRRGPGRSSTLLTPDHAGNVVGVDPHKRTLTATVVDTRGGILASEHFRVSGDGHRALEAWARQFGPIVRWGIEGASAWGRHTAIFLARRGHDVRDVCPNRTGRQDRARQRGKSDELDSERIARETLAHPLLPRAFKRAGEEAGPDEQAELLAVWWQARCALMKRRQHLLSEAEALLHELPLVLIERLPDTKAVRPRLRALKQATYRRRLDPPSTLRVRLLSGYRDQLAKLDQEERAITRELAALVQASGTTLHQLCGLSTVSVAELLVEVGDPRRFTIGGFARFNGTAPLVASTGEGPGEPTRHRYNPGGNRRINAVLHRMSITQLRLEPRANRIYTQARGDGHTKKEARRILKRHLSDVIYRRMIRDAAAAPAQPLVAA

SEQ ID NO: 426836 - protein, 431 aa, unidentified
MADGMASLGRDTAQTVLCAPFVLGVAPGVIVAGFDVHRRQITVDALDTVTGELWRGQLDSTPAAVGDWAARFPEREVHVAVEACTGWLFVCRALEDAGAVAHLAEPVETSALRGRKRRAKTDRADAKWLRQLLCEGRLPESWCPPEHVRQWRSRARLRNTLLAERTSWIQRIRATLYHHGVDGAPDDLRTLAGRQFLAELELPLDARERVRVALELIDMLEIQLSAIERDLRTLARHQPGCQALMTQYGMGELSALVTVVELGDVTRMHASRQAVRMAGLDIGVHRSDRHAQLGKLTRQGSAPLRWALFEAAQSACKPTSPDYADYHALKARGLSHNRASLTIARKLARRSYHLLRALGPAALDPPDPDHRSHQAHTSPMRATRAASSRSARGTHAQRGGPPKTERPQSLHRNDQSTISSPTATTGSRAPR

SEQ ID NO: 426837 - protein, 408 aa, unidentified
MRRIVGMDIHRTFAEIVFWEEGRLRPAGRVDMTRSGLEGFGRLLTKEDEVVVEATGNSMAVVRVLSPFVARVIIANPLEVKAIAHAHVKTDKIDAGVLASLRAADFLPEVWLPDADTERRRRLVTRRNQVVRHRTRIKNEVHAILHAHLIPPCPHADLFGRRGRAWLAHQPLPEDELAAIERHLRELDRLGEDLQGLDREIAQAVCDDPAVRRLLTISGVNLTVAAGLVAAIGDIHRFDSPQKLVSYVGLNPRVHQSGLGLAQYGRISKRGRSHARALLVEAAWAAAKAPGPLRAFFLRIRARRGHQVAAVARKLAVLCWHLLTKDTDYQWARPALVAHKTRAMELQAGAPMKKGNRRGTAYAYNVKDLRDHEIAMAEQAQQAYEEFVSHWQPRRPKTAPPATKAAPA

SEQ ID NO: 426838 - protein, 577 aa, unidentified
MSASTTTPVLIAVGIDTARYGHHATFLNQQLEFAADQLEIIESRKGYLHLEQAMQGLVKRHGKVVFRIRIDAAGQYAQNLLQFLENLPFEKSISVGEPKRNKDYCNVHFPKRKADAVESHACARFAMVENPRAEHPVPEEFRVLRETLSALESQTKRTTRLVNQLHNRLSRSFPELAVITNDLKTLSILTLLAKYPTAERIAAARLKSIEAIPYLRAEKAQAIHQAAKESTASLQGAIVEGLIQQQVGELRGSLQAEKNLEELLEKAFEALSTGPHRHVVTIPGIGRLTAAALVANIISINRFETADSLVNYYGVFPEENASGFDRKGRPVPPTTMRMCQKGNDLIRKLLYMASTAGIRCNPALKALYARQMKAQKRGDVALGHCMRKLLHLVYVVWKTDKPFDPNHYDWGGLSAETNETTPGPQQLDSAENTSSPLPKQKKAAGRKGQSPNRKAVTAANSKVVQPDPPSNPEAVDFAAIKQHLSMAQVLEALGCLDRMQGGGPQRRGPCPVHRSENARSRSFSVHLDKNIFQCFAAECGAKGDVLELWAAVNNLSLRDAAMDLARRHLPQTEKRNP

SEQ ID NO: 426839 - protein, 349 aa, unidentified
MVANEVDYVVGVDTHRDEHVLAVVVAPAGAVVARQTVSASGRGYAQALRFAQRYAAGARVWAVEGAGHYGVGLARYLNGRGEAVLEVGRSSRNERRLRGKDDELDAVRAALTAFASEPLALPRSGERREALRLLLVARRSAVDVRREALVQLRSVIVTAPDRLREELRGLPVQRLLERCCRFRLSAAAAPDEQAARLVLRTLARRIEAASAEADELEQKILAHVQALAPQLLDEPGVGPIVAAQLLVAWSHRGRVRSEAAFARLAGVAPVPASSGQTSRQRLSRGGDRQLNRALHTVVLHRRQHDPVTKDYIARRIAEGKSRREATRLLKRYLARHLYRLLESREPLMA

SEQ ID NO: 426840 - protein, 335 aa, unidentified
MLDPTTGEVIERRLEHETGEARRFYASLCEPARVGIEATVNAQWFEKVLREYHHELWVGDAAEIRAMRVRKQKTDSRDALHILDLLLTDRFPRIWIPSPAERDVRQLVRHRHKLVRLRTSVMNQLHALAIGQGLCRKQKLWSKVGRLELEALVLDRWASRRRHELLQLLDQLNPWIADLDRAVMQEVRSRPEALHLMREPGVGPVTALAFVLTIGPVGRFQRSKQVVSYLGLNPSEESSGGRQRLGSISKQGNSMLRHLLVEAAQAASKFDPELRRDYQRLKFRRGNSGVAKVAIARKLAVRLYWKLREAAQPNTAARMQGSPANPVADESLSPK

SEQ ID NO: 426841 - protein, 341 aa, unidentified
MGDVTTIGLDIAKASFQAHGADASGAVVFRKRLSRGRLLAFFAAQPPCVVVMETCSGAHHWGRELTRMGHTVRLIPPAYVKPFVKRQKNDEADAEAICEAAQRPTMRFVAVKSAEQQALGVVFRARDLLVRQRTQIINAIRGHVAEYGTVAPKGVCYVERLVAQIDDADSELPQAARESLKILAGVLAKLSGEVAVLDQEIARRVKEDLTARRLMTIPGVGPITAAALVALAPAPEAFRRGRDFSAWLGLTPLQKSTGGKQKLGQITKMGERTLRRLLVIGASAVIKQTMLKGAPPGSWLAQIIARKPRMLAAVALANKTARIVWALLAKGGTYRAPAPAA

SEQ ID NO: 426842 - protein, 412 aa, unidentified
MEVLCERCCGLDVHQKSVVACLLTPDAQGRKQRETRTFGTMTAELLQLSDWLQETGCTHVAMESTGVYWKPIYNPLEGQFELLVVNARHLRTVPGRKTDVSDAEWIAEPLQHGLLRASFIPPAPQRELRELTRYRTRLGQERVRVSNQLQKVLASANIKLATVASDVLGVSGKAMVTALAAGREDPQELAQLARGQLQQKHAALVQALTGAVRAHHRFLLREHLAHIAYLEEAIERVSAEIAERLRPFEEALAHLDSIPGVNRRTAEVLLAEVGSGMRPFPDAHHLASWAGMCPGNDESAGKRRSGKTRKGSPWLKAALVESAHAATHTKETYLRAQYEHLVRRRGRAKAEVAVGHSIPVIAYHLLTRHEDYRELGSSYYDERQRDRTLRRLVARIEHLDLQVTLTPLAQAA

SEQ ID NO: 426843 - protein, 349 aa, unidentified
MTMVGGFDVHRKQITFDYVDDDGLVRVGEIRPATRTTLRHWLSEHCPAGDAEFALEGCTGWRYVVDELATAGVVAHLGDPAEIATLRGPKKRAKTDRADARLLRTLLLEGRFPELWIPPVHVLEIRTLGRLYCTLMDERRAWQQRIHAQLFHQGCPPIRALLSEAGRDALARVDLSAVGRQYVDTALRRIDELTAEIDPLRTQLVNFARHQRGCQALQARQYGIGGLCAAIIWAEIGDARRFTSSDQLVRFAGLDVTVYSSDAKRSPGHLSRQGSPELRWAAFEAAKCAARRGSPDYTYYHQLAANRDGHNGKNPTLAVERKILRRCYHRLRELGDAALALPIPEEVAA

SEQ ID NO: 426844 - protein, 348 aa, unidentified
MQLLSLDKKYYCGIDLHGKTMYTSVMDKTGSLLLHKNLPNSMPALLEAIGPYRHDIAVGVESTFNWYWLADGCKEEQIPFYLGHALYMKAVHGGKNKNDSLDSKHITDLLRSNLFPLAYTYPEGMRAVRDLLRRRQYYVELRSEAYRHIQLVYMQHGLVEEKLPAPNIKGARQSLMKPFEDNNVSLAVGADIRQMNVLDEMIHIIEGKVLDQAKKHDPNAFALLQSITGVGRILAYTLLYEIHTISRFPSPQAFSSYCRLVKPERSSGGKSVGAGNGKIGNPHLKWAFTQIMVHAQLYSPRLKRYYERMKQKHGLAKSKSIIGHKYAIAVYHMLKRGTEFDEQKFIGG

SEQ ID NO: 426845 - protein, 458 aa, unidentified
MAKRRKKKTKNVKLLNVIKLNAAGIDIGATEIYIAVPGDRDNKPVRHFDTFTADLHAAAKWLKSCDIDSIAMESTGVYWIPVFQILESYGFDVVLVNARHVKNVPGRKTDVQDCQWLQYLHSVGLLRGSYRPPQEVCAVRSLLRHRDGLIKTASSHILHMQKALTQMNLQIHNVISDITGVTGLAIIDAVLSGERNPQKLAALKHGRIKATKDTIAKSLNGDYLPEHVFTLKQSLQVYRHYQKMITECDQEIENHLNNFDSRIDVVKKPPPRATSTSRRGKRNEPNFDLRAHMYRIIGTDLTQIEGISAVTAHVFFSEVGCEVSKFPKAGNFVSWLNLCPNNKITGGKVLSSHTLPGKNRLAKALQMSAMSLWRSQSYLGNYYRRKRAKNGAPSAITDTAHKLARIIYHLVKTGKQFDESVFYAQEEAHQKRTLTNLTKRAKRMGFQLIECETGNLVT

SEQ ID NO: 426846 - protein, 354 aa, unidentified
MSQTVNAAISVVGIDIGKNSFHIVGHDERGAIVLRQKWSRGQVEARFTNLPPCLVGMEACVGAHHLSRKLNSLGHDARLMPAKYVRPYSKGQKNDFRDAEAIAEAVQRPTMKFVATKTVDQLDLQGLHRVRERLVSQRTGIINQIRAFLLERGVAVRQGLRFLRAELPRILAMPPDVLSPRIVHIIEDLAGDWRRLDERVESLSKEIVAIARQDASCERLISVPGIGPIVSSAMVAAIGAGDVFTKGRDFGAWLGLVPKQISTGDRTILGKISKRGNRYLRVLFVQAAWVVLIKPQSWERHGLKSWIEAAKKRLHRNVLAIALANKLARIAWSVLAHGRSFEASKLAAAVTQPA

SEQ ID NO: 426847 - protein, 396 aa, unidentified
MISVGIDVSKGKSTVCIMKPCGEILESPFDIGHTADELDSLISLIKSFDEETRVVMEDTGHYHLPVATYLSSHNIFVCCVNALRMKKFCSQSLRRAKTDKIDSIKIASFGITYWNELVKAYPSNVIYDELKFLARQYYQVTGMLVKSKVNFSNLLDQVMPKINDVLSNQGENHKLTEFVSRYIHFQNILDMGEMKFTSDYCKWAKKKGYRLNERKAAEILALAQNGIPTLPNSQSVKIAVSEAVKLIHSIEESRNTILAQMQDLCNTLPEYSVVKEMDCIGDTLAPRIIAEIGDVRRFKNKHSLIAYAGIDAPPYQSGAFHASERHISKRGNSYLRKTGYEIMQSLIKHNPADNAVYNFIQKKRSEGKCGKEAMIAGLNKFLRVYYGKVMEFYSEH

SEQ ID NO: 426848 - protein, 405 aa, unidentified
MERVFVGHDWAETHHDVHVADADGKRLAKARLPEGVEGVSGFHELVAPFVEEPDEVVIATETDRGLFVGALVAAGYQVLAVNPMSTSRYRERFSTSGAKSDPGDAFVLAELARNDRHNHRPVAGDSEEAQAIKALARAHQSMIWTRQRQVNQLRSTLREFYPGFLGAFDDLDAGDALAVLEVAPTPALGRALSRSKIASALRRGGRQRRIEERTVEIQTALRADDLEAPAPVAEAMGASVRALGAVISELVVQIHGLEGELTARFEQHPDAKVIQSLPGLGMILGARVLGEFGDDPNRYCDAKSRKNYAGTSPITRASGKHRVVLARYAPNKHLADAAYLWAFCAITASPGAQAFYKERRCHGDTHNRALRALSNRLVGILHGCLRYGTLYDEHTAWGHRITAAA

SEQ ID NO: 426849 - protein, 314 aa, unidentified
MNSPVYVGIDVAHAQLDIAVRPGTRFSVPHEEPGIVRVVEQLRALSPTLIVLEATGGVEVSLTSALAAAGLPVVVVNPRHVRDFARATGRLAKTDALDAQILAQFAEVMRPERRPLPDAQTQALAALVTRRRQLIEMLTAEKNRLSMAPPPVRKSLRAHITWLERELAHTDTDLAQTIRQSPVWREKDELLQSVPGVGPVLTSTLLANLPELGTLTSKQIAALVGVAPLNRDSGTLRGKRTVWGGRAQVRAVLYMSAIVAARFNPVIRAFYQRLQTAGKAKKVALTACMRKLLTILNAMLKHRTPSRTEGTAHA

SEQ ID NO: 426850 - protein, 316 aa, unidentified
METPQPFVGIDVSSQRLDVDSLPASHHFSEPNTEDGIASLVLRLRKLNPQIVLLEATGGYEVPAAYALYEAGLPVVVMNPKALRHFAKAIGKLAKTDKLDAQVLALYAQSIRPPVRPLKDQEQLELANLMTRRRQLQGMIVMEGNRRRTCTPKVSGNIDQHLAYLRQLLKDLDREIHDSIRHTPLWQENSEILQSFTGVGPKVSASLIAVIPELGTLPRTKVSALAGLAPMNRDSGQYRGKRKIQGGRPAVRQALYMAALVAAHHNPVIMEFYQRLRLAGKPAKVALTACMRKILVILNAMLKNRTYLNPQLLLAA

SEQ ID NO: 426851 - protein, 346 aa, unidentified
MMIIGCDFHPSWQQVCWLDSETGETGERKLVHAEGDAERFYRQVPTPALVGMEATGNSHWLVDLLAEIGHELWVGDAAQIRASYVRQQKTDKRDAAHIMKLLAEGRFPRIWMPSSEVRDLRQLLLHRYKLVIIRTRVKNELQHLCLNRGVQRKRKLWSQAGQKLLRELPLQPWAARRRDDLLRLMAMLDQQIDPLDAAVKAEALRDKMALLLQTQPGVGPVTSLAYVLTMGDVSRFPRGKQVASYLGLIPREHSSGGRQKLGSITKQGNRMLRMLLVEAAQTTVRLDPGFRKQYLHRCHQKPKAVAKVVAASKLAVRLYWMLRTQTRYPEIVRIESSPRVPLVGAS

SEQ ID NO: 426852 - protein, 323 aa, unidentified
MNHKVGKDNTVARFIGIDVSKQWLDVACLPERETRRYGNDCAGLEQLCTWIVPLAPELIVMEATGGFETNAATALAAGGLALAVVNPKHVRDFARAFGILAKTDRIDALVLAGFAQKVHPPVRPLPDEERRELIDLVDRRRQLVTMRAEEKTRLTQATPAARQDIKEHIEWLNERLRRLDIDLTAKLRSSSLWKTKEQILTSAPGVGRVTVATLVARLPELGTLNRRAIAALTGVAPFARDSGQHRGRRMIWGGRADVRNVLYMATVTAARINPVIRSFYLRLKQAGKPAKVALTACMRKLLTILNTMVRNNQPWQIPPTQTI

SEQ ID NO: 426853 - protein, 338 aa, unidentified
MEQQREYVGIDLHRRRSVIVRITESGEVLETVRVDNDPLSVVHAVMHEDPNPEVALEATYGWYWAADLLQAEGATVHLVHPLGLHWDLRRVKNDERDATELAKRLSRGDLPEAWIAPPQLRELRELVRYRAKLTALRTSAKAQVHAVMAKEGVLPAYGRMFGPAGQRLLDEMPVEGVYRDRVESLRHLLEIYERELLLVESHLSRRLKHHQGYSAIQAIHGVGPIMAAIFVAEIGDASRFPSARHLCSWAGITPSHRESDVKVHRGHITRQGNNLVRWAAIEAVARYHGGAPIEPTFQRVAKRRGTMIARVAAARKLLSLVYYGLRDGEIRCLTREAS

SEQ ID NO: 426854 - protein, 307 aa, unidentified
MFVGIDVAKDRLDVHVRPADETFTVGRDGEGIEDLVGRLSKMAPALVVLEATGGFETIVAAGLAAAGLPVAVVNPRQIRDFARATARLAKTDALDAAVIAHFAEAVTPPARPIADEQSRLLGELMARRRQLIEMIGAESNRRRMLTVRRTLKTVDRVLATLKAQLEQIDDDIDSAVRGTPAWREAEDLLISVPGIGPRIARTLIAELPELGRLGRREIASLTGVAPFNRDSGTLRGRRTIAGGRPVVRAALYMSILVSIRRKLPLALTYHRLRAAGKPAKVAIVACMRKLVTILNAILRDRKPWANA

SEQ ID NO: 426855 - protein, 334 aa, unidentified
MDKVTTVGIDLAKRVFVLHGVDAVGRVVLRKTVRREQFVEVVAGLPPCRIGMEACAGAHEWARRFTALGHEVKLMAAKFVIPYRKNGKNDGNDAEAICEAVGRPNMRFVPVKSAEQQAVLALHRTRQGFIAERTAVINRIRALLTEFGVVLPQSAEVVRRQASSGAEALPVLARRMIEDLRSHLTLLDERIAVYDREIEVLAKQSEPTRRLMGIRGIGPLTAQAIVATVGNARDFKNGRQFAAWLGLTPRQHSSGGKSRLGHITKRGDAYLRGLLVQGARAVLHTAARHADRLSRWSISLQGRRGYRRAQVAIAAKNARIAWALLNKNQELRPA

SEQ ID NO: 426856 - protein, 317 aa, unidentified
MEQRQSITKVGGIDVSKAKLDVAVHGQEEVAEFSNGLDGFVALGAWLAARHVSRVGLEATGGYERAVAAWLQANDFEVVVHQPLEVRLFARLKRQRAKNDRIDARLIAAATTQVEAVKAAADPLLVELAERMTAYEQAADQLAQLKTCLEQVTLEDLRRGYERQIQVLAAWKRRLIQDLLKRIKARPDLARRYALLLSLPGVGPVVAASLVVRMPELGALTPAQAAALAGVAPFDFDTGQYRGQRHICGGRGRVRRMLYLAALAAKRHDPALHAFAQRLLAGGKAPKVAITAVMRKLIEAANLVLARQTPWQPSATR

SEQ ID NO: 426857 - protein, 350 aa, unidentified
MQHIMTVGIDLAKEVLAVCAMDVTGAVVYSKVMKRDAFIAWAEQLPPSTVVMEACGSAHHWGRWFAARGHTAKLIAAEFVQPFRKSTAAKNDRNDAESIAIASRQPTMRYVAIKSVEQQQILAWHRMREGWKEERTALLNRLRGLLGEFGHWPSRSADKLIRALPVLSTDPSLPDGMRAIIIEMQQQLTAIHERLARSDHTIAQHVKTHPQAMRMQEMTGIGTLTASAATATVVDATHYRNGRQFAAWLGLVPRQMSSGGKTKLGRISRRGDAYLRSLLVQGARSTLQSALKQTPERATRMQQWIIELYGRVGYHKTLVAIANKHARIIWAMLSRDETYDPQAWQRAMSH

SEQ ID NO: 426858 - protein, 342 aa, unidentified
MQSVVTVGLDIAKNVFQAHGVDEEGSVVFRKRLTRAKVVEFFAALKPCLVGIEACATAHHWARSLRELGHTVKLMPPAYVKPYVKSQKNDAADAEAICEAVTRPTMRFAEVKSIEQQSVLSMHRLRAQLIRHRTRLANTIRAHMAEFGVIAPVGRLGLERLIHIICDEADARITPIVRRALGHLVNQHDQQVMQILDLDRQIMIWHRGNETSRRLATIPGIGPLAASALAATIGDAKVFRSGRALSAWLGLVPRQNSSGGKERLGGISKRGDGYLRSLLVAGSLAVIKYAQRNGTKRPWLVKLLERRTSKIAAVAMANKIARMVWAVMIRGESYREPLLRAA

SEQ ID NO: 426859 - protein, 343 aa, unidentified
MHTVTTIGLDIAKSVFQVHGVDAAGQVVIRRQLKRRYVLAFFQKLPPCLVGIEACASSHHWSRELKALGHTVRLMPPAYVKPYVKRQKNDMTDAEAICEAVTRANMRFVPTKTPEQQSCLMLHRTRHLFIRQQTAVINSIRAQLAELGIAAPVGRKGVDELLNVVADPADKRVPDIARECLASLGAHLRKLKEQIVAFDRMIMAWHRSDATSKRLRYIPGVGPMLATALVASVADPKAFRSGRNFSAWMGLVPKQHSSGGKDRLGGISKQGDRYLRGLFVAGALSVIRYAKIHGTKHRPWLTALLARKPTKVAAIALANKLARMAWAMMATGERYKNPVALAA

SEQ ID NO: 426860 - protein, 421 aa, unidentified
MVFAWVVPDRPVQPSGAYINSEKPKPLCFREQPIKLVSKIPRRLWHQQCPFVPCSAAQRMKGTSPTRYGIGVPRLSVICSIYTRGEVMEQITTVGIDLAKRVFALHGVDAAGQVMLRRTVRREQLMEAVAALPPCRIGMEACAGAHEWARRFTALGHEVKLMAAKFVTPYRKSGKNDGNDAEAICEAVGRPNMRFVPVKSAEQQAVLALHRTRQRFVAERTAVINRIRALLTEFGIVLPQSPEVVRRQASGCAEGLPVLARRMIEDLRSHLGLLDERIRTYDRELETHARESEPARRLMQIRGIGPLTALAIVATVGNARDFESGRQFTAWLGLTPRQHSSGGKNRLGHITKRGDTYLRALLVQGARATLHTAMRHTDRISRWALSVQERRGYRRALVAIAAKNARIAWALLNKNESLRPI

SEQ ID NO: 426861 - protein, 341 aa, unidentified
MTHTTIVGLDLAKNVFQVHGIDEEGKKTFNKKLRREEVKEFFENLPACTVAMEAGSACHFWARKIGALGHRTLIIPGQYVKPFVKREKTDALDAQAIAIAATQPDIQGVPAKSAEHQTLTVLITTRALFVRQRTKAFQAFRGQLSEFGIIAGTGTAKLERLAMDLRAGALKEIPIAVRDVLLAIYDEIEALTMKIVRFEKELAALSKHEGDARRLQTVPGVGPVTAATIKAYVPDALLFKSSRQFASWLGLAPRAHNSGGKSRSGSISKRGNPVLRALLFISGMTLVRQAKAKPQSVDAWLTRLVERRPYKVAAIAAANKIARVIWALLSRGGIYQSPQHA

SEQ ID NO: 426862 - protein, 353 aa, unidentified
MTVYVAVDFHAREQTISYCDLTDGEIHRRQLRHQHDDVRGFYEQFSGEVIVALEASGYSAWFEQMLAEVGHTVWLGNPAEIRRKAPRRQKNDRRDAALMLELLLKGDFPRVHSFSAESRTVLRQLRYRHKLVKVRTIAKNSLHAIGINAGLPLQRRLLTEKGIAQLQALQLSPVLAQQRDEWLQLIALMNQRIALVEEALQQHAQGDTAVALLQTHPGIGLLTSLALRYTLLPIARFSTTRQATAYVGLDCMEDSSSERRRMGSISKAGSKLLRFLLNEAGQTAARRDPELRQFYKRLRQRRDPPKAKVAVARKLLVRSFIMLRDQIDYAEFVRRGVAARVARKAHSPKMTDL

SEQ ID NO: 426863 - protein, 384 aa, unidentified
MIARAAVWCNDEMDSSFHVNGIMVPTWFEFIAALKEESVEHPTTIAVDLAKSVFEIAVSKEPGRVCQRKRLTRSQMASFFANRPPATVLMEACGTAHFWGRLLRGYGHRVLLLPAQHVCRYRLRDKTDAADALALLEAHRNEKIVPVPVKDLSQQAIASLHRIRSGWIATRTARLNTVRGLLRELGINIPLGAKLVLPRLSQALSDPEGLIPESLHPVLLQAASEIRTLEQNIKQVERQLETLSRSLPAALSLRSVPGIGLLTSTALIASVGDPSRFRSGRRLASSLGLVPREHSSGSSRHLGAITKRGDSYLRTLLTHGARAVLWAAKHDKNPDTLRRWALALQRRRGHNRAAIALANKLARIAWAVWSKNTVYQPRTAETVS

SEQ ID NO: 426864 - protein, 406 aa, unidentified
MRFYIGLDWADAEHAVWVEDENATKIVGRIVPQTAEGLSEWGRWLDERRAEGIELWAAIEKPEGRIVDFLLDHGVLVFPVNPKALDRARDRFRISGAKSDPFDARVLATFLRTDHGHLAPLRPSSEAAQELKGLTRDHARQVRQQTRLLNQLTATLKAYYPRALEGCEDLKSQWARAFLREDSTPAAVAALTARQWQRWARAPRLSAERIAELWAILQRPQLPVPAHVVRVNARLVGALLAQLETTITAVEAYREAIPDFFASMPAAEWATSLPGGRSGTTVPQLYAELGDAPGRWQTFRHLPGHAGSVPVTDRSGKQVTVQFRFACNLHLRQAVHQFAFQSLGKSEWARAYYDRCRKRGHSHHHAVRALAAKWLKIIFVLWTRQVAYDETYHLATMARQHLRQTA

SEQ ID NO: 426865 - protein, 461 aa, unidentified
MAKRPDPASRRPPHRSTPKPQPALTVTNPRAAGIDVHDGVHWVAVPPDRDPQPVRCFGAFTVDLEAIADWFTHCGVDTVAMESTGVYWIPLYELLERRGFRVNLVDARAVAKVDGRPKTDIHDCQWIQRLHSYGLLEKAFRPQDDIVVLRGFVRQRQTLIAYASQHIQHMQKALVMMNLKLTLVVSDIVGKTGMGIIKAILAGERDPVVLSQWRDERCQHTHQEIAKALMGNWREEHLLALRQAAELYEFYHSKITECDQAIDAYLGRLPNRAGDRPLEKRPTKRKYKDNEPTFDARKRLYEMLGVDLTAIDGISIGVALTIASELGCDVGAFRNEKAFSNWLGLAPNHKITGGKIKGRKTRPGANRIATGLRMAAASLLRTPTALGAFGRRMRSRVGSPKAITAIAHKLAKLVYRMLKYGEDYVKQGAEEYEAKYRERQLGALRRTAAALGFRLESQATN

SEQ ID NO: 426866 - protein, 340 aa, unidentified
MEQVSMIGIDLAKNSFQLHGARSDGSVVFRKKLSRGKVLEFLDSHPRCAVAMEACAGAHYWGREIGDLGHSVRLIPPQYVKPYVKRQKNDAADAEAICEAASRPTMNFVAIKTAEQQARGMLFRTRDLLVRQRTQTINALRGHLAEFGVVAAQGPAHVGRLAPALEDPDSGLPDGVRELGSLLLEQIADYTAKIDGLEKKIHASARQDADARRLMSVPGIGPITAMAVQAFAPPMEGFRRGRDFAAWLGLVPRQHSTGGKPRLGKISKMGQRDLRRLLITGAMAVVRWAVRRGRTNDPWLARMLMRKPRMLVAVALANRMARIVWALMTKKESYRAPAAA

SEQ ID NO: 426867 - protein, 407 aa, unidentified
MICVGIDVSKRKSTVCFMAPGDKIIRRPFDVKHTKEELQPLVDEIRVQAKYDEIKVVMESTGVYHLSIAYFLQQNGIFVSVVNALKVANFNKAENFRHTKTDSIDSTNIARYGIAYWAKLPQFDLNGDKYFLLKRLCDAYLNFSEERSRILLQLQSQLEQTMPGIFDLFGGFDINSGKDKLLDFLERYCHIKDIIAKSEAEFVASYREWAKEKGYRSNESKAATIYAQAKNGIPSIPNNPIVRETIMWYVGLLRRADEALMASLTRMEDIAKDLPEYELVGEMGGVGRVTRVALIAQIGDVRRFKNKHSLICFAGLTPSIHESGKFRASQNHIVKKGPARLRKVLYQVMMSLVMHKIPKDDAVYRFIKKKEAEGKYKKVAKVAGMAKFLRIYYGRVMHLYRDLGLAA

SEQ ID NO: 426868 - protein, 363 aa, unidentified
MNEITTVGVDLAKEVIAVCAADRSGRTVFTRVFRRDTFAAWAVQLPPCVFGMEACGAAHHWARWLASHGHTPRLMAAEFVQPFRKSRAAKNDRNDAEAVLTAVRQPNMRFVTVKSVEQQACLSWHRLRQGFSEERTALINRVRGLLGEFGVWQGRSAALLTRALPALEHDEGLPLMVRRLVGEARQHLARLDEAIAGCEVEIKNHIQGNVAAQRITAITGVGALTAAAMLATVADARDFQNGRQFAAWQGLVPRQDSSGGKARLGRITKRGDSYLRGLLTQGARPALQAALTKEPLLRTRLQNWIVQLHARVGYHKTLVAIANKHARMIWAILAKGEAYDPDAWRRWTRTAPARASAMSGVTP

SEQ ID NO: 426869 - protein, 407 aa, unidentified
MDVVYVKCAGLDVHQQSVVACVRIGSGKAVTYEVRTFGTSTPDLLALSDWLSAHGCTHVAMESTGVFWKPVWAVLDGAFELVLANAMHIRNIPGRKSDVNDATWIADLLAHGLIRPSFVPPAPVQELRDLTRTRKQLVREIAQHTLRIQKTLETANVKLTSVLTDLLGLSGRAILAALVAGETDPTRLAALAHDKVRASRAELTAALHGRVTAHHRFMLKLHLGQIAALEAAVRDVEARLGEALAPFRAAVDHLITMPGVSEIVARVIVAEIGFDMARFPSAAHLVSWAGLCPRLHESAGKRLSTRTRSSNPWLKTTLVQAAWSAARKRDSYFRAQFLRIKSRRGPKKAVLAVAASMLTAAYHMLRDGADYRDLGADHFDRRDKAKLAKRLIARLHDLGLVVDIRAA

SEQ ID NO: 426870 - protein, 335 aa, unidentified
MNKSKEKKEVIGIDVSKSKLDITVHTTQVYFKCENNKKGINKMIKDIYKQSSFNQENILFVFENTGIYSYELAAILNEKEIPFTMVSGLEVKRSLGIVRGKSDKADSKSIALYGYQRREELKPSIMPSKNVEKLQKLLNLRRKLEKHLAGHKSYTKELKSVLNKKEHKVIFEETEKQMKALKTSIKNIEKEMFDIIKSDENINKNYKLMTSIKGVGKITSMLVIVCTANFTKFDNHRQLASYCGIAPFEHSSGSSVRGKTKVSNLAYKELKSVLTMAALSAIQHNNEIRLYYERRIKEGKNKMSTLNIVRNKLLSRMFSVVKRGTPYVDLTKYAA

SEQ ID NO: 426871 - protein, 349 aa, unidentified
MKKCSTVSFEGQVIFVGIDVHKESWVVNLRHCHRELDKFSMNPCPEMLAKYLRKNYPGAEYRSVYEAGFCGFWAHRRLCELGIQNIVINPADVPTSGKERDRKSDAVDSRKLARELENRTLEGIYVPPEDNLELRNLVRRETKLTGNITRVKNRIKGHVNFMGLKFEGWSGRSLKIMYADAEKRHDYALQSMLRELRFLREEKLHVVRDERQCLKRLKRDKIQEHLQSIPGVGFHTAVMLQAELWDLQRFEDKDALSSYVGLAPRLVGSGEHEVLKSAGNRKKKQLHAILIQAAWRSVLHNLEMRARYGALLHKGANPQRAISIIAKKLLYALRAVWLQERDYVVSANE

SEQ ID NO: 426872 - protein, 244 aa, unidentified
MTYIGIDVSKATFVVAYSSAKDSKTKTYANTASGIHKFIQTLPPEAHCVMEATGNYSMLLLYLLDKANITVSMENPLKIKNFARVMLSVVKTDEIDAKLIALYGERMQPKPFKMRSDSLMLLKQKRTVLRQLKKQLVANTNLQESMEALPFVDSISKKVLEKTIKFLQKQIKQMEEELASLANIEYKKQMSLLTSIKGIGVTLATALIVATGGFTYFDNAKQLTRYLGLSPTYQQSGTSVNVKG

SEQ ID NO: 426873 - protein, 334 aa, unidentified
MLIVGIDMAQNKFDAGLWIDHQGQTLGQFTNDNDGYALMEQNIRQQFPEAETIKLIIEPTGGYEMGLILYALEQEWQVSLPNPKMVKDWAKGSGWRAKTDKQDAMMLAQYGVEKHPPCYQPLSASMQELNDLVSRQEELKKLLRSEQNRLKQYEQRPRQNGRVIKSLEKVVETLEEELAAIEEEAKHFIKQDPKLHLMRKRLLTVPGVGPVLVNHLLVLLTHWAVRTNNEGTTKQLVAFAGLDPQPFESGHSVYKRPTISKMGDKMVRNKLYMGALGGIRGENVLADFYKRLVGRGKAKRLALVAAARKILVWSWAVFVNEVDFDATKATPKSF

SEQ ID NO: 426874 - protein, 387 aa, unidentified
MSKQNDLSRCRIAHQQDATLIAVIEMGQANWLVAGIVPGLDRYPLKKLGPDRDALLQLLHRWRNEAAKAGYAIDRIAVAYEAGRDGFWLARWLRSQSIEAYVIHPSSVPVSREHRRAKTDRLDTELLKRAFLGWLRGEPKHCSMAAIPTVEDEDARRPGRERQILVEERTRIINRLKANLARLGIRGFRPNLARAPGQLEALRTPEGVAIPMNALAEMRRDLDRLRFVKQQIKEIEKTRAERLAKAPDERRHVAARALTRVVGVGVETADMLVQEVFSREIRDRRALARYAGLTGAPDESGQRRRERGLAKAGNARVRRGMIELAWGHLTHQKGSPLSVWYRMRTADARRGVRKTMIVALARKLLIVLWRLATTGEAPEGLQLRPAA

SEQ ID NO: 426875 - protein, 412 aa, unidentified
MDVIHQCCAGLDVHKETVTACVRRLEPGGRVAKQVKTFGTTTGELLRLLDWLSAEGVAAVAMESTGVFWKPVWNVLEGSLKLLLANARHIKNVPGRKTDVKDCEWIAQLLQHGLLRASFVPERPQRELRELTRHRTQLVGEQTRVANRIHKTLEDANIKLGSVAADVLGASGKEMIRALIDGQTDPDELAELARGRLRSKLPALREALRGHLTAHHRFMLRQLVDHIEYLQRQVEQFDQRIEELMAPFAPRVAQIMTIPGMGLRTAHNVLAEIGTDMSRFPSDGDLCSWAAVCPGNRLSAGKRQSGRTTMGNRWLRAALTQAAWAASHTKKTYLSAQYRRLAGRRGKKRAIVALAHTLLVIVYHVLRDHVDYYELGHDYFDKLQPRRLTNYLVKRLESLGHKVILVPDEQAA

SEQ ID NO: 426876 - protein, 342 aa, unidentified
MNFIGLDIHKKTISYCVKDNSGKVLSEGKMPATRQGLQEWIGTLAKPWTVAMEATMFTGWIYDYLRPHAAAVKVAHPLMLRAIAVAKKKNDRIDAGRIADCLRCDFLPECYMAPMEIRQRRRTLRYRKLLVRQNVQLKNKIAQLLMESGVTYNKEKLHQQGYFHQVLPANPEIDPSVWPLLKLTREMIERTQKTERALLRSLEADPLLAARVERLMTIPAIGHVTALTWVLEVGEVERFHSVKQAISYCGLCSGEKTSADSSRRMPISKQRNRHLQTVLLEAAHLAPRLNPELAVLYEREAAQSNHNQATIAVARKLAAYLLAIDRGERAFVTHQVHSSVAA

SEQ ID NO: 426877 - protein, 351 aa, unidentified
MKKVLKQVAGIDVAQDELVVCLGRMYDDLTPELVSHKTFKNDNKGFSSLVAWVRKLTEADVPLRFVMEATGVYHERLAYFLAEGALEVSIVMPNKISNYARTLTVKTVTDKTASEAITLFGLERQLENWEPPKGIYKKLQQLCRERNQLVAERTIVKNQLHSEKAEAKPNKKSMDRAVKRIALLDKQEREIKLELSILIKEDADVKRIVLLICTIPGIGVLSAAAVLGETNGFELIRSRSQLASYAGFDVKEKQSGTTVKQQPCISKRGNKQLRRTMHFPALAAIRSDERFKAIFVRLVSKHGIKMKAVVAVQRKLLEMTYTIYKTKKKYDKDYLKTLIDNEQMVEEMIQN

SEQ ID NO: 426878 - protein, 423 aa, unidentified
MQVLYERCAAVDAGKDVIAVAVRLPGDGPEGRQTVKRTFKTFYGVLAEAARWLVSLGVTHVAMEATGIYSMPVYHALLEHGDFARVLVCNAGHVKNVPGRKTDMADAEWLVQLLECGLLAGSFIPEAKVKAARDVIRYRKKITESRTSEIQRLGNVLQDAGIKIDSVASPVAAKSGRAMIEALIDGERRGAVLADLAMGVMRKKIPDLSMALEGRFEDHHALMCRLHLDHTDHLEAMPGKLDAQIEAMMEPFRAARELLTTIPGIGALSAAGIISEIGADVRQYFPDAAHLASWTGLSPANNESAGKHRPARRRKGNEHLQSLLVESAWSAVRHDGYLKSLYHRHVMKWGGYRSKLAKKKAIVVVAHAMIVIIWHVLATGTPYDELGEDYFTRRQDPERETRRLLAKLHALGHNVMIVTEPAA

SEQ ID NO: 426879 - protein, 326 aa, unidentified
MDGDGKILSRANIRSKKEDISYYLKRQGSGKELSVAIEASYNWLYYYRILEGITDNIVVAHPLKTKIIGESRVKTDKIDSEALAYMLKADMLPRVYIPTRISMENKLLLRSRISLVRLRTSIKNKVHAIIDRNRDSYLSLENKSDIFCKTGMLVLRDTKIPEPAYMIITNYLDLIDELNKKIKEIEAEIDKRVVCDKDVELLKTIPGVGRFISFLLKSEIDSIDRFSSKEKFTSYAGLTPSVHQPGSKSYTGKITKQGNKFIRWALTEAAQVAIVHSEYFRYYYSKAKAKKGTNSAIVAVARRIAEIAYVILKEKREYIEKPINYS

SEQ ID NO: 426880 - protein, 347 aa, unidentified
MYQDNVIALDLAKNVIQVCILDKQNQIKSNRELRRQQVLGWLAKQSPSVVAMEACGSAHYWAKQARALGHQPVLLSARFVKKFVEGHKTDKNDAVAIGIAVRQPNVKPVAIKSNDQLALQALEKMRQHYQDVAIATSNMVRAIVYEFGMVIPQGEKAFRERIPDILEDAENGLPMMLRVPLHQQYQFWISLKQQVREAEKQLRAQLKTHEQCNELQKLDGVGPVNALNLYLALGTRGEAFKNGREAAACIGLTPKQHSSGGKVVMLGISQRIAKKQLRANLIQGALAKIKVVAKRPPKNTREVWMKQLIERRGLRRAAVALANKTVRMAWAMVHYQQRYQAPESVAS

SEQ ID NO: 426881 - protein, 349 aa, unidentified
MAGRTQEDDRGCLADGTASADVRFYGTIANTPDAVRTLGKKLSKAGQQLHLCHEAGPCGYGVQRQLTRLGHRCDVVAPALIPRKVGDKVKTDRRDAMMLAQTLRAGQLTSVWIPDEAHEAMRDLVRLRAQAMRDLRKTRQQLLSFLLRHGLDSPYGHWTKMHRRWLGELVFAHPAHHLAHEEMLQRIERAEALCDRLKQAILELVPQWSLAPVVQAIQALRGVSLIVAAVIVAEVGCFGRFDSPRTLMAYLGLNPSEHSSGATIRRGSITKTGNALARTCLVEAAWTYRFPARVTQIIRERLKALPEPIRNVAWKAQVRLSARYRKLIAAGKPAPKVVVAIARELVGFI

SEQ ID NO: 426882 - protein, 358 aa, unidentified
MDYYAGIDVSLKESSVCIVDAKGKIIREVKVASEPETLVRYFDELELPVCRIGLEAGPLSHWLHAGLVAAGRDVVLLETRHVKAALSAMTVKTDRKDARGIAQLLRMGWYRPVHAKSVASQDTRAVLVGRKLLQGKLLDVELSIRGILRGYGLKVGEVSRGRFEARIQELIVGHATLETVIGGMLAARTTLWSEFTRLHREMLRIARADKICHRLMSTPGVGALVALTYRSAVDDPTRFGKSSTVGAYFGLTPKKYQSGETDRDGGVSKVGDAMVRTALFEAAHIMLTRATRFSSLKRWALEVAKRRGMKRAKVALARKLGVVLHRMWMDATDFCWGATAMALEGRNADRGAPRTARF

SEQ ID NO: 426883 - protein, 417 aa, unidentified
MAMKIVRFNCCGMDVHKNLVVATIGITDRKTNVTEYFQRSFSTLNSDLYRLKDWLRSHHCSDVCMESTGKYWIPIFNILEDEINVHLTHPKYVKAIKGKKTDKKDSKWICDLFKHDLIKFSFIPPKEIRELREIARYRYKLVCMRSSERNRYQNCMTVSNVGLASVVSDPFGKTASNIMKEVMKSNVIDDDKILKLVHKNCKNKDKILDSLHGYRIESDQRFKMEKSLDHMEYLDQLIDSCEVELIKRAYPFRRSFQHITQIKGISALSAILIISEIGIDMSQFGSDKQLVSWAGLSPANNESAGKKKSVRISKAGQYLKPLLVQCALSAIKDKTSYFGRKYSNIKKRRGHKKAIIAIARMMLVSIYHMILTGEEFQPCDYESFMDPKPNANPSLTVEKALNFLKQSGIDISSILVN

SEQ ID NO: 426884 - protein, 328 aa, unidentified
MTDQYIGIDLHKAFFQACAVSPTGDRLWEGRFPRTPAGLAALTAQCTPATAVAVEASTPTWHFADGVIGAVGELRIVDPFKTKLKAGYAAKTDRLDARRLADALRRDSVVGIYYPPLPVRELRELCRARFALVQVRTALVNRLRAVLLRQGIADARRIAKTADVAWLETVELPPRARASVVALRQVLATVRSEVTEAEREVRRVSASDPITMALQELTGIGPILALTIRAEIGTIDRFATPAQLASYAGLVPRVEASAGRIRHGRITKRGSPWLRWALIEAAMHGTKRGDRVGRWGRGLAIRKGVLKARVALARVLCTEIHQRWSAVV

SEQ ID NO: 426885 - protein, 337 aa, unidentified
MDTSKRIFQLHGVNEAEQPVLRRKLSRVAMIAFFQRLEPAIVAMEACGASHYWARELKRMGHEVRLMAPQLVKPYVKRGKNDAADAEALCEAASRPTMRFVPVKTADRQAGLMLAGARERLVRQLTQLANAIRGHAAEFGITVAKGRSHIPELLARVKSDATIPALARGVFAGLEADLAHIEARLAEADGALRAWYKESPAAKRLAKVPGIGPVIASLLAMKTPDPHAFRSGRDFAAWLGLTPKDHSTAGKTRLGRITRAGDETLRSLLVVGATAVIWQTRRGASARDDPWLAGLLRRKPPKLAAVALANKMARIAWKLLTSGEDYNPAHACLAKAA

SEQ ID NO: 426886 - protein, 290 aa, unidentified
MFQLGIDVSKKTLDLCLLREGVKGSVKTRKLQNDINAVNAVIAWLSKQHCKPEDVHIIMEATGVYHESLAYGLHKAGGRISLANPHRAREFARGMGMLTKNDRVDAYMLACYGALKAPEPWLPPPEEVRHLSALLRRRDALVADSTREKNRLEKYLATDTPSVIAESVEAMIGQLNAEIKRLDRLIRSHLNQHPELKKDFDLLTSIKSVGYQLGLNMLVILRSHDFATAEQAAAFLGVVPVEKYSGTSVRGCPKLSKIGPPEIRAKLYLASLCGLRFNPLMKAMYERLCL

SEQ ID NO: 426887 - protein, 393 aa, unidentified
MRTSIGVDAGKEVHWVTAVTQDGHVLLDRKLDNTAEDIGRLVAELKALGGERLVGIDLLGGIATLVSAMLLAAGERLVHVPGLAVNRARQGGVGGQSKSDPKDARVIADQLRLRAGDFRPVALESEAIAELRLLVSRRGELVTDQTRRISRMRSLLNTIHPDLERALDLTNAGPLLLLARYVTAAEIRAARPKAIARHLRAKAVRAPEALAAAAFAAAQAHPDLRLPAEAVTADLVRELAAEAIAARARIAALDRRLAERVAAHPDGALIRSLPGMGVVLAAEFLAEAGDLSRFRSAPALAAAAGLAPVLRQSGKSARLMRPGYANNRLKRVFYQSAFCSLQHPLSRAFYDRKRREGKRHHQAIIALARRRIDVLWALLASRRPFDAEHRHAA

SEQ ID NO: 426888 - protein, 378 aa, unidentified
MSSSSMIWIGMDVHKDSVMVAVFADGAREPEVVQPLPNDSRKLRRFFERWSRRGEIRSCYEASGAGYVLHRQVREWGHHCEVVAPSLTPVRPGERRKHDRRDATQLARLYRAGELVTIRIPSAAEERVRDLVRCRQCFQREILRSRHYVTKFLARRGFVYREGKNWTHRHRSWLLSLVREGGLEPEDRSVFGEYLALLDYKISRREDLDEQIEKLAFSPAYQSAVNRLRCFRGINTLAAMTLITEIGDWRRFERPGQLMAYLGLVPSEHSSGHREHRGPVTKAGNSRCRHVLVQAAWTYRHRPAVGLQLKARQRGQPPTVVGHAWKAQHHLHKLYHRIAVRKCSAIAVVAVARELVGFLWAVMKELEVEQTPSLTEAA

SEQ ID NO: 426889 - protein, 350 aa, unidentified
MITIGIDAHKTVHVAVALDDSGQELASWRGPNSVRGWRELFEWSQPFGDTRRWAIEGAWGYGRGLAQSLVGRGETVHEVNTRWTALGRRSGRKDGKTDRFDARGVALVLRQEPDLPLVTADDDTVILDVLVTERAAALVEATRLRNQIHAIVMHIDPEYGRRMPRLASRAGVKALLRYRSAAHDPLQEQRAATVRRLAARLHLTIAHADDIATEIRARAGRFAPLTELCGINLLTAGALAKRLPGPSIAASDAQLAAYAGAAPLEASSAGTVRHRLNRGGNRRLNSVLYQIAITQAHHSPQARLYLDRRVREGKTRREARRALKRYIIRAIWRLWQECQSAAIPSTRAAA

SEQ ID NO: 426890 - protein, 345 aa, unidentified
MENVTRVGIDLAKRVFHVTGVDAAGAVLERRRLRRAQLQSYVARLPRGCVVAMESCGGAHHWARLAQWHGHEALLLSPQFVKPYVKSNKNDVADADAIAEASSRPTMRFVAVKSVEQEHMQQVHRARRLALKQCTAQCNQIHGFLLEYGIATPKGFGAVLKALPEVLEDADNELPDAARGLLGELGDELRRLRARVAQYDRQLAQMARGVPACQRLMTIPGIGEKTATALVAAVGDASQFRNGRELAAWLGLVPRQHTTGGRPRLLGISKRGERYLRTLLIHGGRAALQQAPRHSDRRSAWVLSVAQRRNRNVAAVALANKNARTAWAVLRGEEDYDAEHVQAVA

SEQ ID NO: 426891 - protein, 376 aa, unidentified
MDEYSSYVGLDVHKDTIAVAVAVAGREEAVYRGEIGHRRSSLRRLIGKLSPHGEVLSFCYEAGPCGYGVYREIIETGHHCVVVAPSLIPRKPGDRVKTDRRDALSLARLHRAGELSAVWVPGAEQEALRDLTRAREDMKAIELKARQRLGAFLLRHDRVYRSGKSRWTQAHFRWLEEQRFDHPAQQVVLQEYVDTVMQAQARVAGLEDRMRQALASWSLRPVAEGLMALRGVDLITAMTVLAELGDLTRFETPRQLMSFLGLVPSERSSGPRRRQGAITKTGNGHVRRVLVEAAWSYRFPARKTAHLRRKAAAAPPGAQAIAWAAQKRLCARYWHLYHAGKATCQVCTAIARELVGFIWAIACEVAGKPHASRAAI

SEQ ID NO: 426892 - protein, 344 aa, unidentified
MAIVGGLDIHRRQITYDYLDSDTGEARRGRIQPAGRAELRAWLARFVGKQADFAFEGTTGWRFVAEEVTGAGFGAHLAEPADTRALRGPKRRAKTDRADARHLRDLLLAGTLPESWIPPAHLADLRTRVRLRKALLDERTAWRQRIHAVLFHHGLPERPGLLSAEGRAWLARVELPGAARDAVDLALRMIDRLDAELDPLDAQLLRFARRQPGCRALMRRYGVGALTAAAILAELGDARRFASSRRAVRFTGLDVTVAESDGKRTRGRLSRQGPPVLRWALYEAAICAARPGSPDHAYWLAVKDRRGAKRATLSVARKLAREAYHTLRELGDQALRPVSLQPLA

SEQ ID NO: 426893 - protein, 339 aa, unidentified
MKLYVGDDLHANNNFLALADGKGKRVDQAKLPNDLFVIRDFLKPYQKDIVGIAVESTFNWYWLVDGLMASGYKLHLANPSAIQQYSGLKHSDDKHDAFWLAQMLRLGILPEGYIYPKEERPIRDLLRKRRHLVKLRTSMVVSLQNIISRNCGVSFRVNEIKRLKEDRVSPLLESNEDLALAGLTSKEMIDQLTRQIQRIEGTVVQRVQLKEAYRYLLSLPGVGKILALTIMLETGPIARFAQVGDYASYCRKVPSRWTSNEKTKGKGNQKNGNKYLAWAFSEAAEFARRFDRQARAYYTRKMRQTNSPVAHSALAHKLARAAYYLMKDQVPFMPEKLFS

SEQ ID NO: 426894 - protein, 342 aa, unidentified
MKITTVGIDLAKNVFQIHGVDDHGKPVLRKKLDRSKMLEFFIKLQPCLIGMEACGSAHYWARKLVAMGHTVKLMAPQFVKPYVKTNKNDAADAEAICEAVTRPNMRFVPIKTDEQQAVLSLHRVRQSFVKVRTAQANQIRGLLSEFGVIIPQGITHIAKRLPGIMENLDLPGSFRELLQRLYDHLKELDKQVDELDTKIQQWHRESPVSRKLAEIPGIGPITATALVASIGDAKSFKNGRQLAAWLGLVPRQHSSGGKSVLLGISKRGDTYLRTLLIHGARAVIRFAENKPATSWLNKLLDRRNKNICAVALANKNARIVWALLTRDEQRFRADYAPAVAGA

SEQ ID NO: 426895 - protein, 349 aa, unidentified
MSAKFNSEIAVIGIDIGKNSFHVVGLDQRGAIVLRQKWSRGQVEVRFSNLPPCLIGMEACVGAHHLSRKLTSLGHDARLMPAKYVRPYSRGQKNDFRDAEAIAEAVQRPTMKFVATKTAEQFDLQALHRVRERLVSQRTGIINQIRAFLLERGVAVRQGLRFLRAELPRILARPCDALSPRMLRVIEDLAGDWRRLDERIEGLSNEIEVLARQDAGCERLMSVPGIGPIISSAIVAAIGGGDVFSKGRDFAAWLGLVPKQISTGDRTILGKISKRGNRYLRVLFVQAAWAVLIKPKSWARHGLKPWLEAAKKRLHHNVLAVALANKLARIAWSVLAHGRVFEATKIQAA

SEQ ID NO: 426896 - protein, 369 aa, unidentified
MSNYVTAIGLDVHARSIKACALNPMTGEVERASFGYDPASVAERALGFESPKAVYESGVTGFHLCRALRALGLDCAVGAVSKMQRPAADRGRKTDRRDAEFLARMLSVGNVVEVWVPDDECEAARDLTRALEDARDDLSRSKQRLSKFLLRHGLVFDERTPTGRRKGNWTRAHWSWIESIRFAERADNDVLAYYVDAVRRAAEEKARLEGLVEAEARKPRWRKRVDSLRCLKGVDTASAADLVFEAGEFSRFRNARSFAAWVGLTPSEHSSGESDRRGAITKAGNKHLRKTLVEAAWHYLTCSGRPKGLAKGQAPDRGARRHAAKGVRRLVERREALLARGVHGNKANVATARELACWVWAVGLMAEEA

SEQ ID NO: 426897 - protein, 462 aa, unidentified
MPGREERETSDRSTRPIEGLPVIRASVAGIDLGSEQHWVCAATRDRSAREVASFGATTAELLRMAEWLKIRQVESVAMESTGVYWIAPHEVLEGQGLQVLLVDTRQLARVPGRDKKTDPTDCEWIQRLHSCGLLRGSFRPKEAVCMLRTLVRDKANLVAENGDWLRRMQKSLDQMNVRVHRAVSDIDGVTGMAILRAIAGGERDAQKLAKFRNARCSKTEQEIAEQLNGHWREDHVFSLQQALKMYDAVQERIVAYEQEILRRLGEMEADEPPQPTAPPLQNTNKAKAIKKRGQEAKRQALYRMSGVDMTQIDAVGVETVEVVLSEYGPDLSRFPTEKQFVSHVTLAPRVPQSGGKPVKKKKRNSASTRVAAALRMAALSLRHSQTALGSYYRRIAQRCGGDIAVFATARKLATLVYRLLRWGQPYVDEGAAAYENRYRQHRIARLAATAKQLGYQLTPVTA

SEQ ID NO: 426898 - protein, 352 aa, unidentified
MKKNTKTGDWQQEPGLVIGVDLGDKESQLCVLGADYEIRQQVRVRMTTPALQAWFAAVTQPAMVVMEAGSHSPWVSRLLEGMGHQVVVADPRRMRLISQSDKKNDAEDARTLARVAAAMPELLKVVKHRSAEAQRDLTVIRARARMVEVRTKLWCSLRGLAKSLGRRLPRRVTAETLQDLTILEPLWKALEDVSRRIGEYDRQIAALEKKYPEVARLQQIAGVGPLISLTFVLTLDDHLRFHKSRQIGSYLGLRPKQRDSGESQPQLRITKAGDGYLRSLLIQGAQYILGRFGPDTDLKRWGLKLAARGGKNAKKRAVVAVARKLAVLLHRLWRDGSEYEPLRHNRAAVAAQ

SEQ ID NO: 426899 - protein, 359 aa, unidentified
MTKTASPSLPTTYVGIDVSKDHLDACRKSGDQDPGDQNLGNQSPKEQRDARRFPNTPAGHRRLLGWLATSSSGKVQAVVESTGRCSLDLTLALYEADDTEVMVANPKALRGFAKAQMRRTKTDAVDAAVIADYARRMSFSPWEPPPEATRELRAIARRIQALTVERTREKNRLQSLTDSRSASSVVENDIEVNIRHLKRRINELLRQAMACVNSSEPLTKAYGHLTSVRGIAEKSAVLLLGELAMLPSNMSVREWVAHAGLDPKKWESGTSVNAPERISKIGNARIRRALYMPAHSAIRYEPRVGAFYEKLLRRGKAKMVAVVAVMRKLLHAIYGMLKHGQDFDGEKFYATPETAPSTP

SEQ ID NO: 426900 - protein, 346 aa, unidentified
MSSISCRQVVGVDLHLHRSVIGILDADGREVGWVRIDNDPKVLVRECRKAGRGAPVAIEATYGWYWAVDALQAAGFEVHLAHPYGMKAMRARKRVKTDSRDAFELANLLRLGSLPEAYIAPPELRELRELVRHRQQLVKLATSTKAGVRALLAKHGIRLAVTDLDGDAATDQLDALSLPGTYAIRLAAQRRLMLVLAEEIAATELEVAARLRHHPGYCQLLQLKGIGPVLAAIFIAEIGDITRFESAAALCCWSGITPRHYASDKTVRRGHISKEGAKLVRWAAVEAIQRSCEPAVKKVKDDIIARRGAGARNVAKTAAARRMLEAIYYTLHDGEARFLTATPTAA

SEQ ID NO: 426901 - protein, 415 aa, unidentified
MEVVHLRCAGIDVSKRDAKVCVRIQGVGGRRTSSTVTTWGAMTNQVLALRDHLAAQQVTVVVMEATGDYWRPFYYVLESGFQVMLVNARSVRNVPGRKTDVSDAAWLADLGAHGLVRASFVPPEPIRVLRDLTRARTVITRERTREIQRLEKLLEDAGIKLSSVASEITGVSGRLMLQALIDSHGTADPAVLAEFAKGKMRPKIPILIEALNGRFTAHHAFMTQLYLDRVDAHTRDVQALSERIEALMEPFLPARDLLESIPGFSQILAEVVIAETGGDMAQFPTPGQLASWAGVSPGSNESAGRVKSSKTRPGNRYLKGALGVAALSVARSKNTYYSAKYRRLAASRGPMKALVAVEHAMLVTAWTLLTNREFYRDPGADYFTRHDPAKTRARAVKQLEALGYQVTLQPQQRAG

SEQ ID NO: 426902 - protein, 381 aa, unidentified
MKKIIRFLGLDVHAETIAVAVAEADGEVRALGVIPNQPESVRRLIAKVGPADGLHACYEAGPCGYVLYWQLTELGVKCDVIAPTLVPVKSGDRVKTDRRDAIKLARCLRAGDLTPVWVPDPACEALRDLVRARLAAKRDQLRHRHRLGKFLLRHGRRRPQGMKVWTRKHLEWLKRSVHFEHAAQEATLAYYLNEVERAGERIERLERAIDSAIEGVPKRLRAVVDALQALRGIARVSAVTIAAELGELSRFSHARQLMGYSGAVSREHSSGNEVRRGAITKTGNAHLRRIVIEAAWAYRHRPAIGEAQRRRQEGLSEEVKAIAWKAQHRLHARYVRLVGRGKVKQQVVTAIARELLGFIWAIGVQTETTIDASGGSKRLAA

SEQ ID NO: 426903 - protein, 325 aa, unidentified
MVTCVCNKQIVKTATMQADPTALAARLPRWFPGATLYSVYEAGFSAFVLHRVLTTAGITNIIVNPASVAVAAHEKVKTDRRDSKKLAIDLADGRLRGLSVPTEAEALARLLPRTRAQIVTHRATIARQSKAKLPQCGRIAPSRRRMLRSRYVREIAAWSLPPERSVRLTLLAEQWRCATRQLLEMRRLRRDQAQAQEEIDKVYRSVPGLGEVVARTCATEWGDMTRVAKERALCSSTGLTPSEDASGASVRRGPMSRQGSSRVRPVLVETAWRAMPRDGVRKERFARIAATRGKKRAIGAMARRLTGRIRACFRQGTTYAVGTYA

SEQ ID NO: 426904 - protein, 340 aa, unidentified
MIGMDIAKRIFQVEGRDASGAVVLRRQLRRSGVLRFFRKLPRCVVAMEACATAHYWGREIAALGHAVRLLPPTSVKRFVKRGKKNDKVDAGACCQALLSKDIQFVPIKSLEQQAVLMMHAVRQHLVAEQTALSNAIRGHLAEIGIIARKGAAGFKALLELLAKPAGTPELALIRPIIAPLVMQWRTTGEQIKTIERQIARWHKANSDSLRLDTIPQYGPVISSAFVAKVSDPTRFARGRQCAAWLGNVPSQHSTGGRTCLGPITKAGDRYLRTLLVIAGSGLVRRVKADPSLSPWIAGLLRRMPAKKVNVAVANKLARIGWAVLVSGKPYDAAIGTLTAA

SEQ ID NO: 426905 - protein, 343 aa, unidentified
MQSISTIGLDIAKSVFQVHGVDAVGQVVLRRQLKRRYVLAFFQRLPPCLVGIEACASSHHWSRELQELGHTVQLMPPAYVKPYVKRQKNDTTDAEAICEAVTRPNMRFVPTKTVEQQSCLMLHRARHLFIRQQTAVINSIRAYLAEFGIVAPVGRRGVEQLLEVVADTADRRLPEVARACLAALGGQLRALKAQILEFDRRIMAWHRSNATSRRLDAIPGVGPALATALVASLADPRAFRSGRDFSAWVGLEPKQNSSGGKDKLGNISKQGDRYLRSLFTAGALAVIRYAKIHGTRHRPWLTGLLARRPTKVAAIALANKLARMAWAMMVRNERYRQPAALAA

SEQ ID NO: 426906 - protein, 405 aa, unidentified
MNAVGIDVSKGKSMVAVMQPLGVVAVKPFEVLHTAEALENLGYSLKELPGETRVIMEHTGRYYEPVAQALHERGLFVSAVNPILINQYGNNELRRAKTDKKDALKIAKYGLDNWASLREYTPMEAVRQQLKNASRQLDLYTKVKVALTNNLIALLDQTYPGANTFFDSPIRADGHQKWVDFVTAFWHADCVSSLSEEAFVEKYRKWCKRRGYNFSTAKASDVYIDSLGHIIMLPKNASTKSLIQQAISALNAVSATVESFRAEAQRLARLLPEYPVVMAMYGVGDSLGPKLIAEIGDVRRFASKRALVAYAGIDPEPSQSGKRNTKSNAISRKGVPEIRKTVFLVMECLLKKAPADEPIYQFLDKKRSEGKPYFVYMTAASNKFLRIYYARVKEYLDSLENADPV

SEQ ID NO: 426907 - protein, 368 aa, unidentified
MQELITGFVGLDAHAQSTAIAVAEAGRTAPRFVGTVGPRIAELTKALGKLGEPHSLYVVYEAGPCGYALARELIDLGYRCEVVAPSKIPRRPGERIKTDRRDALNLAGLARAGELVSVTIPDERDEAIRDLSRARVDAVRARHKARQQLKALMLRHGRRYSGKTSWSAAHERYLAAVSFAHPAQDIAFTEYRQAVSEGEARVQRLSESLTQEVEHWRRHSLVSAVMTLRGLDLVAAATVVAELGDLRRFAHPRELMGYLGLVPSEHTTGSKRRLGAITKTGNGHVRRVLVEAAWNYRYPARISPALQVRQERQPPEIRAIAWRAQLRLNHRYRRLRARGLQHNKICVALARELAAFVWDIGRHVTPSP

SEQ ID NO: 426908 - protein, 356 aa, unidentified
MTSTTKYIGMDVHKESISIAVRNAAGKIAMECVIETKASMILQFVDGLRGDVHVTFEEGTWAAWLYDLLKPHVTRLVVCDPRRNALLQEGNQNDRVDARKLAELLQNSQLRSVYHGDHGLRTLKELVRSYLTITKDLSRVMTRVKAIYRSWAIPCSGKQVYSSHHRAEWLGKINESGVRRRAEFYYQQLDALRSLRQEVRRDLLAESKKHKAWKRLCEIPSIGPIRAAVLLGILQTAHRFRTKRQLWTYSGLGIEVHSSADHHVVKGQLERKKKHIEIRGLNENCNHDLKNLFKGAAVVASTKPGPFEEFYAALLAKGMRPEMARLTLARKIATIVLIVWKRGVCFDAQHLKPQTA

SEQ ID NO: 426909 - protein, 372 aa, unidentified
MGEDSTVYVGFDVSKAKHAVAIAESGRTGEVRYFGEIEATPAAVERFVRKLEKKHRRLHVCYEAGPTGYGLQRQISAMGHVCEVVAPSCIPTRPGDRVKTNRRDAVTLARLLRAGELTGIWVPDPVHEAMRDLVRAREATSEDLRKKRQQLQSFLLRHGRIFTGRRSGSAAHSRWLAAQKFDHPAQQIVFQDLVDAVRAATERLAEFERHIEDLVPDWSMASLVAAYQALRGVSLIVAATFAVEVGDVRRFENPRQLMAFLGLVPSERSTGESVKRGGLTLAGNRRARRVLVEGAWGYRHPARVTETIQKRLEGLPKVVREIAWKAQIRLCKRYRHMTAAGKKAPIVIAAIAREMAAFLWAIGRAVAPLPAA

SEQ ID NO: 426910 - protein, 409 aa, unidentified
MRVMSERCAGLDVHQKTVVVCALVGQAGSDPELERRTWATTTSQLLEMGDWLRTRGITHVAMESTGTYWKPVWAVLEGQFDLTLCNAAHVKQVPGRKTDQKDAEWIADLLRHGLLKKSFVPPQPQQDLRELTRYRAQVSADRSAVSNRIRKLLEGASIKLGSVASDVMGVSGRRMLEAMIEGETDPYKLADLALGQLKDKRIQLIEALRGRVRDHHRTMLRLELAQWKFLDALVAKLEIAIEEALRPFAEAANLVKTIPGFSDVSAAATVAEIGAGMDQFADAGHLASWAGLCPGHNESAGKHYSGKSRGGNIWLKRILCQVAWAASHTRNTYFTALFRRLAAKRGKKRAILAVAHSILVTIYALLKNQQTYQDLGSDYFDKKNADGLKRYCLRKLEALGHKVTLEAAA

SEQ ID NO: 426911 - protein, 341 aa, unidentified
MNKASTIGLDLAKQVFQVHGADATGAVVFRKRLRRTAVLQFFASQAPCRVAMEACASSHYWGRELSRIGHEVRLIPPAYVKPFVKRQKNDAADAEAICEASQRPTMRFVQIKSETAQAAAVVFRARDLLVRQRTQIINALRGHLAEFGLVVPTGPAHVGRLLAEAEDYARSLPQAVRPILGVLIEALHSLDEKIAVLDVEISRRAEEDEDARRLKTIPGIGPVTAAAISALAPPAQTFARGRDFAAWLGLTPLQRSTGGKQKLGGTSKRGERTIRRLLIIGASAVVRWAARKGAPAGSWLERMLARKPRMLVAVALANKMARIIWALLAKGGIYRASIVAT

SEQ ID NO: 426912 - protein, 312 aa, unidentified
MEINVGIDVAKATLVGELRPSGERFEETNDDRGITGIVRRLQAVAPTRVVLEATGGLEVPLASALAAAGMPVVVINPRQARQFAQALGYLEKTDRVDAAVLAHFAESVHPAVRALPDAATQELGALLARRRQLVEMLTAEKNRLGSSPARVQRGIRAHIAWLEQQLAAVEHDVDTTLRSSPVWREQEDLLRSVPGVGRTLARTLLADLPELGRLSRRRIAKLVGVAPLPFESGQFRGQRHIRGGRAAVRTALYMPTLAATRYNPVIRTMYARLLRAGKKPKVALVACMRKLLTILNAMLKHHKSWKHVTQDT

SEQ ID NO: 426913 - protein, 335 aa, unidentified
MKIQFNVGTDISDEVLDFCVMENGLVVLEEQIPNKKRDIHRVIKKMRALGVAEKNSWFCAEYTGVYGNELRLVLEDHQFVYSMVPATEINKSIGMVRGKNDRIDAKRIAEYCRRFNDKLRPSKLPEKYLLELKQLFVFRKQQVKNRTRSKNYLKSVQKSWESAPQKMIISKVKKQIRDLDSLVLALEKQMIKIIHDKDEAKRNYDLITSTPGIALVSACYMIICTENFLLFNDARKFASYVGVAPFEYSSGSSIRGLTRTSKYRNKEMKSLLHNGMSSLLSSKNELGVYYRRRIKEGKQKDKVKNAVVFKMITRAFAAVKRETPYNQTNRHNNAA

SEQ ID NO: 426914 - protein, 340 aa, unidentified
MNITTYGLDIAKSVFQLYWVEPASGEIHNRKFSKQALLAFLATREAGLIALEACGSAHWWRRKLMAFGHEVKLIHAKFVRPFVQGNKTDAADAKAIWTAVRQPGMRTVAGKTEEQQAMLALHRMRQSLIKFRTMQVNQLRGLLYEFGITLKGGRQAGVEEILHRTDEFEEILPGMLFKALKEQLDRLESIETDLQNLERRIKEWQKEQAACQKIAAIPGIGVLTATALVATMGEASSFKSGREFAAFVGLVPRQSGTGGKVKLLGISKRGDTYLRTLLIHGARAVMFKAKDKGAWSEALLQRRPTNVAIVAMANKMARTAWAILAHEREYQKDYVSVVPA

SEQ ID NO: 426915 - protein, 430 aa, unidentified
MRRIVGMDIHRTFAEVVFWEDGRLRPVGRADMTRSGLEGFGRTLSKEDEVVIEATGNAMSVVRVLGPYVARVIVANPMHVKAIAHAHVKTDKIDAGVLASLRAADFLPEIWVPDANTERLRRLVARRNQIVRQRTRIKNEVHSILHAHLISPCPHAELFGRLGRSWLGRQPLPSDELMAIDRHLRELDRLGEDLAVLDREIAQAATDDSAVKRLLTISGINLTVAAGLVAAIGDVKRFASPQKLVSYVGLNPRVRQSGLGPVQYGRISKRGRAHARAMLVEAAWAAAQAPGPFHAFFLRIRARRGHQIAAVAVARKLAVLCWHLLTKETDYLWARPALVATKLRAMELQAGMPAKKGNKRGPAYAYNVKELRDREIDVARHAERAYECFVSQWQPRRPNVRRTGAAKEERPYSWRSRAKPGDPISQTTAM

SEQ ID NO: 426916 - protein, 354 aa, unidentified
MIVIGADTHKSSHTLVAVDSVTGRRVGVCTVASTTAGTLDALSWARRVCGGADRVWAVEDCRHVSGRLERLLISAGEAVVRVAPRLMAGARSSGRERGKSDPIDATAVARAAIREGVEQLPVARLEGAELDVRLLLDHHDDLVKARSQSQQRLRWHLHDLYDDLSIPAGALDRTVWLDRVLGRLRRSPQTTRVRIARDLVCEIRGLTRRIRELEQEIRLLVCELCPQLVAMPGCGPLTAAKLLAEVAGADRFKSDAKLARAAGVAPVPASSGRQDRHRLDRGGNRQLNLALHRLAVNAARHDPTTAAYLARKQAQGMSRMEALRCLKRHLVRRLHKLLTSPPTTRPEHQKPPWP

SEQ ID NO: 426917 - protein, 448 aa, unidentified
MTTTPTPTLPVLDALAAFVDVGSEQMHVSIAGGPPEVFGTVTRELHRLRDWLKERGVRSVAMEATGVYWLPLYGVLEAAGFQVLMVNGKYTRNLPGRKTDMSDCQWGSTLHAHGLLRAGFVPPAQIRRLQDYLRLRADQVQSAAASVQHQQKALERMNVKLHDVISSLAGASGQKVMAAILTGERDPHRLLALCDVQIQKKKAERVKEALRGTWAEEHLFALRQAVENWQHFQRQIAACDQQIEAVLRQISGPDQPGGGTPAAAPVKRSGVNAPQIEGLHGLLVKLCGGKDVTVLPAHTDYSLLQLLGEVGTDLRPWPTEKHFTAWLGVAPGSHQSGKRHRAVGRKRNRAGRLFCVMARSLARSKHVALGGFYRRMAGRKGGLVANVALARKLAVLFWRVMVRGVSYVEHGLAQYEAQVLETKRRALQRLAKQLGRVVLPSLAEFQQA

SEQ ID NO: 426918 - protein, 399 aa, unidentified
MHYLGLDISKNQSYIAHYEDQKLINEFLLTHTKQSFQKFRVYVSSLDNPIIIYESTGVYSRPIYDFCTNNRFKFYELNPLEANFKTKSLRANKTDKADAHKLALLGSSLPSLTSKHQNRELYDELKEYARFYLELEKQENVLKVQLLETMHQTFPFFEKLFKNRYSTISLNLAHVFPHASMVSDLTKEEITEVISNASLKGMSAIKIENYGDKLIHLANESFPCVSKDHFLVKKVRFVAKSLLHLQEERKHYSQEMINLAQQLPEFEILLSIPGFGRLTTALFIGELGDIRRFSSHKKLNAYVGIDIRRYQSGQSHYKDTINRRGNKKARKLLYLIVLNIIRGQSRFRNHINDYYYKLKSQPYGKPHKTAIVACINKLLKTIHYLIMNNCTYDYEMSPH

SEQ ID NO: 426919 - protein, 337 aa, unidentified
MKPSLIGMDIAKQVFQLHALDPQSGQIERLKLKRAQLLEFFARRAPSIVVMEACGSAHDWARRLQQLGHDARLISARSVRPFVLRNKTDAADARAICTAAQQPDARFVAIKSEDQQAILAIHRMRAQLMKFRIMQTDALRGLLYEFGEALPESYRAFTKAFPAALAGVAERLPGILIDSLREQWNRVQATDKEIAVLERRLATAFRNNGDCQKVADIPGVGLLTATATVASIGDARTFKSGREFAAWLGLVPRQTGTGGRVRQVGLSKRGDTYLRTLLMHGARSVIIQGTRSATLNGLLKRRPFNVAVAAVANKLARTIWAVLARTQGYQASPSGAV

SEQ ID NO: 426920 - protein, 355 aa, unidentified
MTRTVYCGVDFHARMQTIAYCDSSDGEIHLIQLDHRKDDVRDFYSKLTGQAIVGLEAGGYSSWFEAMLEELGHTVWTGHATEIRRRANWRQKNDRRDAELILEIMLNGDFPHVHRHSRESVEVLRMLRYRARLVKMRTMISNNLQAIAISSGLTERSRMLSRAGQQRLKNARMTPAIKHQSENLITLLEPLNERIGKVDRWLKEQASTDDRVKLLMTHPGVGVLTALGVVHTLEPFNRFKRQRAVVAYVGLEPMERSSAERKRYLGISKAGSRLLRFFLGEAAHVAMRVDPELKQFYERVGKRRGKSIATVAVARKLLIRCWIMLRENIDYTEFRSRGVEARLARNTSRPSVPEK

SEQ ID NO: 426921 - protein, 372 aa, unidentified
MRDDSEVYVGLDTSKLKISVALASAGRGGEVRFFGDIDSTPEAVEHLVRKLAKRHQRLFFAYEAGPTGYGLQRQIVALGHDCAVVAPSLIPKRPGERVKTNRRDALTLAKLHRAGELTPVWVPDPAHEALRELVRAREAAMEDLRAKRQHLQSFLLRHGRVYSGRKAWSRAHTRWLCGLQFEHPAQYLVLAEYRQAIADAEKRLERLSEQVAELVPAWSMAPVVAAFQAMRGVALLTAVTLVAEIGDARRFETPRQLMAYLGLVPSESSTGEQVRRGGITKAGNSRVRRVLIEGAWTYRFPARKSRLLEERQAGLPKAVCDIAWKAQLRLCGRYRRLMARGKQRGVVVTAIAREMAAFLWAIGREVEPLRAS

SEQ ID NO: 426922 - protein, 341 aa, unidentified
MEQVTTIGLDLAKHVFQVHGADAAGHVLFRKRITRAKLLGFLAAQTRCVVAMEACAGAHYWAREIAKLGHHVRLIAPAYVKPFIKRQKNDAADAEAICEAAQRPSMRFVPVKTEEQQANGIVFRARDLLVRQRTQCVNALRGHLMEYGYVFPKGITHVEALVALVEDLQSSLPDSVRVILKLLVDTFTALEAQISALDAEINQRSKSDPTARRLMTIPGVGPITSTAITALVPAAEGFPAGRDFAAWLGLTPLQKSTGGKQKLGAVSKRGERTIRRLLIIGASAVVQQASRRGAPKGSWLAQMLARKPKMLVTVALANKMARIIWALLVKGGTYRTPTAAA

SEQ ID NO: 426923 - protein, 313 aa, unidentified
MLPSLVYVGMDIAKATLDLHAPTTPCPRSRQFANIPAGHRALVRWLQGLGPVHVVCEASGGYERSVVMALQQAAIAISVVNPRQARDFARAQGRLAKTDRLDAQVLAEFGQRLQPAATPAPSAAQRQLVELVSRRQQVQQVRIAEHNRLEHTTHPAVRRQVQRHLLGLDRQLKQLQAWITELVQAEPSLAHKVARLCEVVGVGQITAVVLLATMPELGALNRRQAAALAGVAPFNRDSGPRRGHRLIRGGRSVARRALYMAALVAAFANPRFKVFYQRLIAAGKAPKVALVAVMRKLIILLNQLLKNPEFQLT

SEQ ID NO: 426924 - protein, 396 aa, unidentified
MLETRGDFDYFVGIDISKDKFDACGIRKDETKHFQISTAMDRKGFEKLKKHLVGLHSSILIGMESTATYHVNLFSYLVSEGFDVILINPLLISNYVKMQLRKTKTDKKDAAIIALFLLANGHSLMQRISSSSLADLCDLSRQRESLIAEMTALKINIKRLLNITFPELEHMTPVFAKSMLKLIRQYPSAAALRDADIGRISEMLISDSYGYKGEAFAAGLVKAARKSIGTSSSVKEMILKQKADLLLYMEDSLQEITGMLIEISRKLMEDDINIMTSIKVIGDTTAVNFLIEMGGDIHQFERSGKIIALAGLDPAVYQSGKHEGRGRITKRGNRHLRKIIWTITTRVIQYTDIFHAYYQKRRKEGLPYKKAVLATAHKLIRVIYAILTKRTIFCPQ

SEQ ID NO: 426925 - protein, 345 aa, unidentified
MLYLGLDVHSKWTTLKGFDPETGEIVERVRISNQPEVMTAVLGELPGPLHGVMETGTNAWAMYRALEPCFARLVIADPAQLWDRRWDQSAKTDRRDALRMAQKLQRGEITGIYVPDEHTQDLRVLVRGKVRATRWVTKLVNEIGSLLRCWGYLPSKSLLSKRGKEHLEAVQLSGHSARVLELWREMLEKAQEIKAELEAAIEEEAEHDAVCAQLRTMPSVGPFTALAVRAEIGDIGRFPSSPTLISYAGLAPRVFQSGEHCRYGSLGHRGNPWLRYALVLLANRMASHGKGSRLHQLYWRIRLREHRNGAKIAVARKATHLIYHLLHTGQPWRELTPEEQVKVTA

SEQ ID NO: 426926 - protein, 350 aa, unidentified
MQQFIGCDAHKRFSVFVAVDERGTATKPVRIEHVREDYAHFLSQLPERSEIAIESTGHWYWLVDEMERAGHHVHLANPMEAKKRMGKTNKTYALDAKGLAILLRNGTLPESWIPPGPLRDQRELLRTRMALRDLRSSLKHRIHAAVDRYGLHTDAITDLFGIKGREYLASRLPEFPPETARMVKVQLSALDELAAHIETIEQRIHAEIAPTAEVHLLRSVPGVGEILAPVIGLEIGDVNRFPRAENLASYSGLVPRVFSSGGHTRLGGISRFVNQYLKWAFVEAANSAVRLKAHRQSHVGCLYQRLLAKRGHGRAIVAVARHLAEASYWILRKQEIYRAPHQNKISSRNG

SEQ ID NO: 426927 - protein, 412 aa, unidentified
MEVVYPCCCGLDVHKKSITACVLWAEAKGKSRKEKRRFGTFTHDLLQLADWLGESGVTHVAMESTGVYWKPVWNILAEQFKVLLVNAQHIKAVPGRKTDQKDSEWIADLLQHGLLRGSFVPPQPTRELRDLTRYRVSLAQEINRIANRIQKVLEDANIKLASVATDALGASGRAILEAMLAGEQDAARLAELSKGLLRNKIPELKLALEGRMTEHHRFLLRQLFDHLRFTESKLSQIEQEIDRRMRPFQDEVIRLCTIPGVDQVTAWGILSEIGLDMNQFPSAEHLSSWACLCPGNFESAGKRLSGKMRKGNVSLRRCLSQAAWAISMTKNNYLSALYRRIAARRGAKRAIMAVAHALLVIVYHMLKRKEDYRELGADHFDRIDMNRTRRSLVRRLERLGHKVTLEPLAQTA

SEQ ID NO: 426928 - protein, 419 aa, unidentified
MSFKIIKNNCCGLDVHKTWIYACIGITDSHNRTEYKQARFSSFTKGLNELCDWLAKYNCNDVCMESTGKYWIPVFNVLEKHDLWVTLSHPKYTKPMKGNKTDRKDAKWICDLYMCGMVKPSFIPPADIRQLRDLVRYRFKLTCMITGEKNRAHNCLTVSNLKLDDVFSDIFGKSSRSITEQILQHPGEIFDVAPFVDGRCKTPIEEIQAAVDGAISEEQAVKLRQCLDHIDELEKHKTEIEREIFRLSEKYEAALNLIRTVPGFDKNPLTAIQVLSEIGGDMSVFPTAKHLVSWAGCCPRNDQSNNKIKSTRISRAGSYFKPVLVQVANALIKSKKHPEFTNRYRRIKARRGHKKAIIAICRMILTAIWHILSDLKPYTAEGYSEPRPVKESKVLSTSQALNLLKQRGYIIKDEPAIAS

SEQ ID NO: 426929 - protein, 412 aa, unidentified
MKDLLEISCGLDVHKEKIVACILTGPLGKPTRSEIREFSTLIPDMIALRNWIVSKNCHHVAMESTGIYWMPIYEILEDAFYGDITLLVVNARHMKNVPGKKTDMRDSEWISTLLRAGLLNGSFIPEKRIREFRDLNRYRKSVIRDITSQKNRIEKFLQSSGFRLSSFISDIFGASGRNIILHLIEHGQIDKTALDSCLKTKTRNRIDEILMSVNGTLSEHQKAFLRILMTHYDSLKKHLAEIETSLEENMAPFALQVEQLNSIYGISTTASCAIIAEIGIDMKPFKTAEHICSWAGLCPGNNESAGKRKSTSVTKGNPYIKSMLCEIAWVIAGKRNTYLSAWYWRIKQKKGAKKAIVALARKLLVIIYTMLKQGTLFDEACFETRRKHCEQKQLSRYIRELEKHGYHVEAQS

SEQ ID NO: 426930 - protein, 457 aa, unidentified
MYTIGIDLAITAAHKAIVAGAGGKFVTPLLSFHTRWCDIQQLVARIRKDVPSDVPMRAVMEPTGMVWFPVSIALRDLGVTPYLVSGQRTYDLRRYFKRHSSSDRVSARVLAKMPFVDEESLYPLEIPTSIQFACQRACKELDRVQTDIAAIKNRLRDTDRFSWPGLEEVFSNIFSPVARLFRETWYDPFCVVSAGVETVQETFLPLSEHENDLLWVKNLVDLASEVTKLYGPDALDYARLQEEVCREQEHLDYLEKRKASLWRDTIRPIYRQLHPSRNLETLYGVGELSGAVHASYIGNAERFPSSRHFRGWHGMIPDSRQSGEFESKGLHISQAGPDLIKKFSYIGADVARRYAPQIAAIYYDQIVNKGKHHKQAVCACATHFLDRVYLVLKEDRPYELRDVDGTAVTAEEARAIIAQRYTVPGEVRTRNNQRVRKERKERRVERKYKKRGKRSSS

SEQ ID NO: 426931 - protein, 354 aa, unidentified
MQNDRQSSETVILGVDTHLDIHVGAVISQAGKLLGTHIIQTNQAGYLELLDWARSFGSLERAGIEGTGTYGAALTRYLIKNSIYVVEVNRPDRSKRRLEGKSDPLDAENAARTVLSGSSKAISKMQSGACEALRIISVARRSAVKACTQAINQLRALLVSAPQDVRDKLWKSKPHECVTACINSEVSEHSPLRIALCSTLRSLAKRWMALTEELNELDESLDKLTRKYASNLRSQFGVGPQTAATLLAVAGDNPERLKNEAALASLCGVNPLPASSGKTVRHRLNRGGSREANNALWTIALVRMRSDPRTRIYVDRRTGEGLSTKEILRCLKRYIVRELYPLILSDLAYANRRS

SEQ ID NO: 426932 - protein, 346 aa, unidentified
MSITMIGLDTAKSVFQVHAVDGAGQVVTRRKLRRDELIAFFEKQAACTVVLEACGAAHHWARVLTGLGHDVKLIAPEAVRPFVKKGKKNDAADAAAICEAASRPGVRFVPIKSLEQQGVLALHSARSLLVKQQTMLANAIRGLATEFGLTVPLGMGKLGELMALVDADEAVPAKARQALTALFDQCSALHESVETFEAEIVAHARHDDTARRLATIPGIGPITASLIAATVADIGVFPSARHFAAWLGLVPRQHSTGGKTRLGRITKAGNREIRRLLVLGATSMVRRAAGWNSAAGAWAREVLERRPVRLVTVALANKMARIAWAVMTRKEVYHATGRVAAADAVA

SEQ ID NO: 426933 - protein, 369 aa, unidentified
MEKDTTYVALDDSKRKIVVGILRSGDTQPELREIANDPRQIRRLFERLKREGPVAACYEAGVSGYDLHRRLIALGVAGAVIAPALTPRRPGQRIKTDRRDAAKLVRLFRAGELTAIHVLDESEEAVRDLVRCRDDIRRDVLRWRHRVLKLLARHGRAYLTGKNWSHAHWRWIREQRFELPPLQRAFEATVFALEQALARQAELDKELEALAATAPYREPVGWLRCFRGIDTLSAIILLAEVVDFQRFRRPRELMAYLGLVPSEDSSGETQRRGALTKAGNSHARRVLVEAAWHYRHRPTIGRALANRSQGQPDEIVSHAWRAQQRLHRRYRHLLGHGKRTPVAVAAVARELVGFIWAAMTRHESRRQAA

SEQ ID NO: 426934 - protein, 420 aa, unidentified
MQETQSWFAGVDWASQKHDVWLTDASGKRLGKRTFEHSGEGLAQMCDWLVATSSGGPEDIHVAIEVPHGAVVETLLDRGFNVYAINPKQLDRFRDRFTAAGAKDDSRDAETLSSSLRTDRRAFHKVALASPAIIQLREWSRMAGDLSADKIRQANRLREQLRRYYPQMLQLGSDLTEEWIFALWEAAPTPAEAARLRQARVEKLLKCHRIRRIDAAKVVAILRQPALIVAQGVAEAAVAHIRVLIESIRLFTRQLKEAHRQLDKLCSLLAEPLPSDCGGTGREQEQVHSAVAILQSLPGVGRIVLAMLLAEAFDVLQRADYAILRILCGVAPVTRRSGKSRMVTRRLACNPRLRNAIHYLADTARQFDEKSKAKYLALKARGCSHARALRTIGDRLLYVACTMLKNGTLFDPCIESQKCA

SEQ ID NO: 426935 - protein, 404 aa, unidentified
MEVLYERCSGLDVHKRTVVACVRTAAGQQTRTFGTTTEALLALGDWLVAQGVTHVAMESTGVYWQPVYNLLESLDLQVLVVNAQHVKAVPGRKTDVKDAEWLADLLRHGLIRGSAIPDRPRRELRELVRYRVGLVRQRAQVIHRIHKLLEGANIKLASVVTDITGVTGRAILDALANGRTDPLEMANLARGSLRTKREQLATTLRGSFGAHQRLVLASQLRHLDFLTAELDRLNTEVAERLRPHEGVIERLDAIPGVGRRVAEQVLAEVGPDVARFPTAAHLASWAGLCPGNHESAGKRLSGRTRKGNGWLRAALVEAAWGAAHTRQSYLAAQYRRLAARRGNKRALIAVAHSLVVIIYHLLREGTIYQDLGPNYYDERHRDATVHRSVRRLERLGYRVTIEVA

SEQ ID NO: 426936 - protein, 422 aa, unidentified
MDVLVEVCAGLDIGKREVQACVRRPDGSGGRDGEVLTFDTFTGSLEALRDWLVAEGVTEVAMEATGPYWKPVWYVLEDVGAFELRLVNSRHVKILPGRKTDVSDAMWLAELLEHGLLRGSFVPPRQVRELRDLTRYRKKLIQAHTAECQRIHKNLEDAGIKLDSVASDVLGVSGRAMLRALLAGERDPEVLADLAKGTLRRKIPELQQAMRGRFGEHHAVLIGIILDHIEHLEAAIAALDARIDELMDRPDPDDRGGVPFARARDHLDTIPGVGKRAAEVIVAEIGTDMSRFPTAGHLASWAGMCPGNNITGGKSRSGATTKGNVWLRDILVQCAWSAARTKDTYLSAQFWRLARRIGKKKAAMAVGHSILVAAWHMLTDDVDYDELGPDWFARKVNDDHRRDQAIRNLHDLGYRVTLERVA

SEQ ID NO: 426937 - protein, 345 aa, unidentified
MTYYTGIDVSLRSVSICVVDDKGEVCLEAKVAAEIDAIVDRLRRFSGDVKSVGFEAGTLTQYLTYGLQAAGFEVICLEARQVSVTLAAMRNKTDRNDARGLAQILRTGWYSRVHVKSLHSHQVRALLASRKAILKKCVDLENELRGLLKVFGIRLPSRVGHGSFDAELRETVCSDEMLACALVPLLDARTVLYKTYLKLDNAVKGLVRLDPICRRLMSIPGVGPVTALTFKAAVDDPNRFKSSRTVAAHFGLTPRRFQSGEVDNPGHISRAGDADVRSALYVAAHSLLTRNAQWSTLKAWGVRLAKIRGHRRAVVAVARKLAVILHRMWIDGSEFRWGSPAQTVA

SEQ ID NO: 426938 - protein, 332 aa, unidentified
MFVGMDVHRNRTQVCVLDRKGNEVRNRNVANDRQALRKELAGLRRGTPVAFEAAYGTGWIAELLGDLGFEAHLAHPAGCRAIADAKLKNDRVDARTLANLLRTGYLAEAWLAPKEVREQRLLLRERARLVRIRTSAKNRIRAQIADEGVAAPGHGLWTKRGAVFLESLDLSPMHRWVVTDCQVLIEVLESRISLLEAEIRRQAKPDKRVDALMAIPGIGLLSAMTLVSEIGDITRFATARKLCAWAGIIPSMRNSDRTLHHGHITRAGPAAVRHVLAEAAQTAIRKEPYHSDFLATKRRRGTGIALIRVSRKLLTESFYALHALEDEQRQCS

SEQ ID NO: 426939 - protein, 357 aa, unidentified
MNALSSKLLNFTDKSIFIGLDVHKKSWAVTLYSDEFELKTFTQPPKPDVLVNYLNQHYPGARYKAVYEAGFSGFWVQRELSRHGICCEVIHPADIPTSDKERRQKTDKMDSRKLSRVCKGEDYKAIYIPGEEQQEERNLLRVRQKIIRDITRVKNRIKFYLMYQGVDTYNFESRKWTRKYISFLKGIKLTTPSGTFALQTYIEELENLEKQAAKLDLEIKKLSKTDRYRENAELLCSVPSIGITSAMILITEIGDITRFNTFDELCSFFGLIPNTHSSGENLRVGHMTKRGNRFLKSLLIECSWIAIRNDPALLQCYKELTVRMNGNKAIIRIARRLLSRINHVLIKKEKYQTGILS

SEQ ID NO: 426940 - protein, 411 aa, unidentified
MKVVHEICCGIDVHAKMLVACLLLANGEKESRTFSTMTDDLLRLRDWLQSKQCTHVAIESTSVYWKPVFNILEDALTVILINPEHAHVLRGRKTDVKDAEWLADLLRHGLLQASFIPPLEIRELRELTRYRDSVVREQSRVANRIQKVIESGNVKLGQVASDALGASGRAMLWALARGETDAAKLAALAKKQLKEKVPELQRALQGRLTINQRFVLKELLQRWEELEQADKRVTQEIAQYVQERPKLARAREIVDSIVGIGPRVAEVIAEIGIEMGAVFPSDAHLASWAGLCPGNKQTGGKRLSGRTRKGNTYLRSALVQAGWGATMKKNSYLSSQYFRLVKRLGRKKALVAVAHSLLVIIYHVLQNDQTYTDLGGDYFDRKYVEQQRDYYLRRLKMLGLSVEVQELPVAA

SEQ ID NO: 426941 - protein, 354 aa, unidentified
MSNVNSAIATIGIDIGKNSFHVVGQDERGALVLRQKWSRHQVEARLANLPACLVGMEACVGAHHLSRKLQALGHDARLMPAKYVRPYSKGQKNDFRDAEAIAEAVQRPTMKFVATKSTEQLDLQALHRVRERLVGQRTGIINQIRAFLLERGIAVRQGLRFLQTELPSILATRSDALSPRMLRLIDDLAGDWRQLDGRIEDVSEEIEALARQDQACERLMTVPGIGPIISSAMVAAIGTGDAFSKGRDFGAWLGLVPKQISTGDRTILGSISKRGNRYLRALFVQAAWVVLVKLGKKWERYGLRSWIEAAKKRLHHNVLAIALANKLARIAWAVLHKGRAFECAKIDALSARPI

SEQ ID NO: 426942 - protein, 345 aa, unidentified
MELHTIGIDLGKTVFHLVGLDLRGEVVVRKKFSRTQLLRFTANVHVGLIGMEACGGSHFLGRALREQRHEVRLIPAQYVKPYVKTNKSDYIDAEAIAEAVARPTMRFVPIKTDDQLDLQSLHRVRERWVMRRTAVINQIRGLLLERGITLRKGRHHVDAALPLILEDADANLSGAVRLLLTQLKLDLDQLSVRIDEADAVIQKTAHENEACRRLVAIPGIGPVTATALIAAIGNGGAFHKGREFAAWMGVVPREHSTGGQQKLLGISKRGNSYLRRLFVQGARAVLQQRTKQSSGLSAWLAQLTSRTHRNVAAVALANKLARIAWAVLAKNEPYRPPVLADVAAA

SEQ ID NO: 426943 - protein, 391 aa, unidentified
MIFVGIDVAKNKHDCFITNSDGEVLFKSFTISNNLDGFDELYQKIESVMEDVSKVKVGLEATGHYSYNLLGYLLDKGLTTFVINPLHTNLYRKSLRLRQTKTDKVDARTIVSMLMSDVNLKSYSDTSYHNEELKSLTRYRFDKVKERAKLKISISRLVCILFPELEKLVPTLHQNSVYELLYEFPGARQVANAHLTRLTNLVATASKGHYTKDTALVFREAARTSIGSNMPAKSLELKHTIKLIRELDAEIEEIENEIKTIMDEINSPILSIPGISYRMGAMIIAEIGDFSQFASPDKILAYAGMSPSTYQSGQLDNCHSRMEKRGSRYLRYALYNATTYVCLWDPTFKAYLAKKRSEGKHYYVALSHATKKLLRVIYQLEKTGQQYIKAV

SEQ ID NO: 426944 - protein, 343 aa, unidentified
MDKELYIGVDVSKQTLDLAYYDGESIDWKNAHIKVSNNNAGFKKIGSWVAKVSKRFDIVLFCMEYTGLYTQNFRLWLEEKHYIYRMVEPRKMHRFEPDLDDGLRSLDRIKTDELDSFRIAIYCEQNHRKILRNPSKLPPPVYFKLKRLLAERKQSVLYKQQLHDICAYDTDLSVERKNGQLKTLNDALKGIDNEIDMYIKEDADINKNFSLLTSIPGIGRVVALETIVLTENFMAIDNPRKYACYIGVAPFKKESGTSVRKGSSVSKKGFKQAKADLSIACLVCMQHIPNIRDYWERKRKEKCSGIVFNAIKFKMILRMFAVIKRGTPYVETDNYRNGKNKQP

SEQ ID NO: 426945 - protein, 414 aa, unidentified
MEIIHSQCAGLDVHKKTVVAAIIVVDETGGLRKEVRTFGSMTGDLLELSDWLMDFEVTHVAMESTGEYWKPVFNILENNFEVLLVNAQHIKAVPGRKTDVKDAEWIAELLRHGLLKASFVPPLGQRELRDLTRARSTFVRTRATLVNRVHKVLEGANIKLTSVATDVMGVSGRAMLEAIVEGQGKPEEMAELARGRMREKRDMLAKSLEGRVQAHHRFVLTELLTQIDSLDETIERFNEQIREYCRPFEQAVALLDTIPGVGRETAEIIVSEIGTDMGRFPTADHLASWAGVAPGNHESAGKRHSGKTTQGNKLLGAGLNQAAHAAAVTKNTYLSAQYRRLAARRGKKKAIVALEHTILVIAYHLILRNEPYHELGGNYFDTRRPETTAKHLIKRLEQLGFAVSLHLSTSLAPA

SEQ ID NO: 426946 - protein, 352 aa, unidentified
MHYIAFDAHKHDTPAAVATTEGRTIREERVHHDRDALRQFLERYHRGSPVAVETTGNWYGIVDEIEAAGCVPKLVHARKAKRMLGMINTTDKLDARGLNRLQQAGTLPTVWIPPGVLRDQRDLPRTRMVLVRQRTQLKNRIHATLAKYALHDTEVTDLFGRRGLTVLRARLAQLPPHTAYATRQLLAQVEHLDRQVREFEQQIRTVFRPSPDVARLMTLPGVGLTLAVVITLEVGDVARFPTGEHLAAYAGTTPRVHSSGGKTRYGPLRSDVNRYLKWAFVEAANVVCRIRRRHPGRHTSRLYERQVRRKGHAKAIGAVARPLAEATYWMLTRQQPYREPTGPRRLASSTEA

SEQ ID NO: 426947 - protein, 400 aa, unidentified
MISIDGAGVFLGLDVGKQTHHGHGLTPAGKKVFDKQLPNSEPKLRAVFDKLRAKFGTVLLVVDQPASIGALPLTVARDAGCQVAYLPGLAMRRIADFYPGEAKTDAKDAAVIADAARTMPHTLRTLDLADEVTAELTMLVGFDQDLAGEANRTSNRIRGLLTQFHPSLERVLGPRLDHQAVTWLLERYGSPDALRKAGRRKLVEVVRPRAPRMAERLVDDIFTALDEQTVVVPGTGTLDVIVPSLAKSLAAVHEQRRALEARIEALLEAHPLSPVLTSMPGIGVRTAAVLLTTVGDGSSFPTAGHLASYAGLAPATRQSGTSIHGEHAPRGGNRQLKRAMFLSAFAALHDPASRTYYDRCRARGKTHTQALLRLARHRISVLFAMLRDGTFYEPRSPRTA

SEQ ID NO: 426948 - protein, 331 aa, unidentified
MVKKQIMTDKLSCCGIDVSHLTLDVTYQNNLGELFYLQVGNNNAGFKKLLEHTGPNCHFVMEATGVYYIRLAFFLDSLGCKLSVVNAMSIKRYIQMHLERNKTDKKDSRWICQYAIEQRPPFWEKPDSEYFECKQIYNTIREYAEQIKRFNNQLHSLKLLPFPSKETIKSIEKMKSYLEKEMDHLEVKLQVLLKKWQPEQYKSIHSIKGLGKRATALLIIFTQGFKHTTNHRQLISFAGLSPTEYSSGTSIKGSNRIYKKGGKPIRDVLYMCAMNAKQTNEACKLLFDRLKANGKTGKQALIAVMNKLLKQVFAVVKNNSLYQPNYCSTLH

SEQ ID NO: 426949 - protein, 308 aa, unidentified
MQCVGIDIAKSTFTACLCMYEFDMGCSTAPVVFNNNKTGFNQFVKWSRKEALKGYPLRYLMEPTGVYYEALACHLYKLGLDVCVVLPNKARDFAKYEGILTKTDDMDAYTLGMMGCLDKRLKTWTPPSPIFKELRQMTRFVADINKVKTELNNHLESLAHSETAEKSIVKHYNKLIDKIDKQLASNEKAIREKVKQEPGLAERIDRIVTIKGIGYMTVITILAETSGFALITNRKQLTRYAGLDVPAHQSGPVAPKRHISKQGNVHIRTALYFPAIVSTQYNPQMKEFYARLCKKNPQSKMVGVTDLD

SEQ ID NO: 426950 - protein, 349 aa, unidentified
MALFVGLDVSVKETGVCVVDGTGKVVCEQKMPTEPDEIVRLLASIGEDYGRVGIEAGPLSQWLVNGLTAAGLPVVCVETRHMMALLKAQQINKSDRNDARGIAQMMRVGLFKPVHVKTQMAQEQRMLLTSRKLLQRKLLDVEGDLRGTLRNFGLKVGVVSTGKFEARIRELVAGSPRLALVVEPILAVRRVMRQQFAVLHKMLLDTVRHDPVCRRLMTAPGVGVVVALTYRATVDQPQRFVHSRAVGAHVGLTPTRHLSGEIDYDGGVSKSGDSLLRTMLYEAAQSLLSQSGKWSWLKACGMRVAQRRGMRRAIVAVARRLAVVLHRMWVDRTEFRWSNSTTAVVPQAA

SEQ ID NO: 426951 - protein, 420 aa, unidentified
MRHLIGRELPAKTLVVAIDCGKATHRVMLATGEQGVIGEPVSLPTLREGVEELQRLILAAGSEGRPVIAVEATGSLHHAWVAELERRFAGSLRLFAPSETQAARTGLGSRRTKTDDRDCAALVTLARQGLGRPPEGATVAAMLSAVRHRRALVEVRKIAQQRLHDQLNALCPGLSAPVGHGRALKLEDSSGQAVLACAVEFAGRAPAPRSLLARAPGRLTKTNARYWSSRWGALLPPPPDAELRARRLGGDLERWRSLQRDIADVEGQIAALLAATPGQILTSLPGVAQTRAAAFAAHALPIERFPSAERLYSATGLAPATYESATLRRRGRISRAGLAEFRDALMGIAWGLSQCSPAFAHRDRELRGRGMAPIQARVSLARHACRLCFSLLQKQESFDEERYVRMRHGASGDGVSSYAA

SEQ ID NO: 426952 - protein, 347 aa, unidentified
MVIVDSARLIVGGVDTHRDVNVAAVVDMNGGVLGVESFATTADGHRRLGSWMSGFGTIERVGIEGTGAYGAGVARLLMRAGVVVIEVDRPDRQKRRRRGKSDQLDAVEAARGALSGRCEGIAKSGDGAAEALRALLVAKRSARSTRIRTIVQLRHLMFTAPDDLRARLGALTATQLVNEAARLRPRPGGDVAVRGVKTAAAILARRVHALDAELALIDAQITPLVTAAAPDLLKVFGVGADTAAVLLVTAGDNPERIGSEAKWAMLCGIAPIPATSGLHDDQFRLNRAGDRHANNAIWRIVITRLGQHEPRTIAYMNRRLAEGKSKRHIIRCLKRYVAREVYRTLPR

SEQ ID NO: 426953 - protein, 339 aa, unidentified
MTHTIVGVDIAKNVMQVHWVDPETGEIVNRPVKRAAFLEYFANRRPCLIGMESCGGSQHWARRLIEMGHRVKLMPAKFVKAFNIRNKNDAADARAIWMATQMDSKEVAVKTEAQQAVLAMHRMRQQLVKFRTMQINSLRGLLTEYGEVMGVGRAALDKAVVCVLERLSGRLPAFLIDTLREQWKGLENLDRQICQIERRLHAWMKGDQATKAIAAIPGVGLLTATAAVATMGHAKAFRSGREFAAWLGLVPAQTGSGGKIELQGISKRGDTYLRTLLVHGARSIIYRVKEPGPWVTQIKQRRPLNVVIVAMANKLARMIWAMLAHQRPYRKDYESVKPA

SEQ ID NO: 426954 - protein, 419 aa, unidentified
MAQRPVIWIGIDVGKRTHHACAIDTDGKVVFSRKVSNDQAAIEALLARAAEAAQDVRWAIDLTCSYAALLQVVLTAADQQVVYVPGRVVDRMSGVFRGEAKTDARDAKVIAETARMRGADLTTVTATDETTAELARLVAHREDLMADWVRGVNRLRDLLGSIFPGLEAAFDYSTRSALVLVTGFQTPQALRDAGEAGVIEYLRAHRAWAPGIAAMAATAVEVAHAQTVALPSETRTAILVAGLARRLLELDREIKDTDKLITTVFRSHPDAAIIESLPGLGPILGAEFLTATHGGVGPELGGFTSPGRLASYAGLVPVPQDSGRISGNLRRPRRYNRRLRRVFYMAALSSLKVNGPSRAFYQRKRSERMLHTQALLALARRLVDVLWAACCVTGGCSPSPHHNPLSRLDTVIRIPPVTR

SEQ ID NO: 426955 - protein, 383 aa, unidentified
MQILTFGAPTAANIGTIFAAIELSQKTWLVTVHSPDQGRMSRYKLEGGDHAGLLALIAKIRVRAAQKLGSEPRVASCYEAGYDGFWLHRLLVAAGIDNLVFDPASIAVEQRARRAKTDRIDGELLLRTLMAHLRGEPRVVRILRVPTVEQEDARRISRERDRLVTEQTAHTNRIKALLRLSGLQVGNPRRRNWLTWLEQQRDWQDQPLPPHVMAEVKREHARLMLVREQLAALEQSQDTTQASAVPARMATRREQLQRLKGVGPAFAITLVGELFYKEFRNRREVASYCGLTPSPWKSGGIDREQGISKAGNPHVRQKAIELTWLWILHQPDSALSRWFRARTLNAGKRARRIAIVALARKLIVALWRYLETGLVPEDALMKA

SEQ ID NO: 426956 - protein, 455 aa, unidentified
MRIVYQRCCGMDVHKDSVTACVLLIDEYGEWRSEKRKLRTMTRDLREMSAWLASLDVEAIAMEATGVYWKPVWNILEAEKKFHLLLVNAHHIKQVPGRKTDQKDSEWIADLLQHGLLKASFVPPPVIRRLRDLTRMRVKIRQMLATFANRIQKVLEDANIKLGSVASDVLGVSGRHMLHAVVEGQQDPKQLAELAQGRLREKLGELQLALEGHITDHHRFQLKFLLEFVQFGEKQLSQLEAEIRCLLAQVEPASVPPEDTVTAELAAPGAGAEAPATAQKSPLQTVVELWDTIPGVDELTATTLVAEMGANMDQFPSAGHAAKWAGICPGNKESAGKRLSGKTPKGSVWLRRALCQAAWSASRTKDTYLAAQYHHLIVRKGKKKTIVAVAHTMLTIAYYIAKRRCPYQELGGDYFDRLNADTMQHRLVKKLKSLGYEVTLTPITPIVREPIAQSC

SEQ ID NO: 426957 - protein, 353 aa, unidentified
MIIIGIDPHKSTHTATALDPVTNSEVGTLRIEASVFDYRRLMTWAKAWPQRRWAIENAQGLGHHVAQWLLGLGEEVVDIPTTATARVRELSRGGGRKNDRIDAAAAASVAALQGDARPVRAESTADSLALLDERRVNLSQSRTRAINQLHALLRELMAGGAPTSLTAATASKVLSGFRPRTATDRVRVALAKDSIADIRRLDQQLAASIASITAVLDEHGTRLRETDGVGPVLAARLLGRTGTPSRFASEASYANYTGTAPIQIASAETDRHRLSRYGDRQLNSAIHTIAMVQIRMPDSLGRAYYNTKIDEGKTPRAAARSLKRHLARHLWRVMLADEKRSTRQVPETAAHTT

SEQ ID NO: 426958 - protein, 372 aa, unidentified
MLIHYIDIAKRNFVIAVSSLSKTKTETNNPKGIAHTIEYLKKHKVALVVTESTGGLEIPAAKAIHRAGIAVIIANPRQTHQFAQSQSLTKTDAKDAKMPAFFAQMKAQKEDWQTMPYHPPTEAEEVLEALVNRRNQSADMRTAEKNRLHQVHETQVGSVKQLIAHFDRLIDESDKQIDDHTHTHFDGKAQVAEQIKGIGSITTATLMAMLPELGRLSHKRIASLVGIAPHPRKSGEAKFKSRCFGGRSAVLKALYMATVAATRFEPLIRDFHQRPLSEGKPYKVAVTACMRKLLETFAKFLSLPTAETQTQVFGCFRPKYLLILPKRPLNPPRIPDNQASVLPFRRQQAHLACWRLSTGSNTSPSDGFAHSL

SEQ ID NO: 426959 - protein, 350 aa, unidentified
MEQVSVNVPARSIGLDLSDETSTFCMVDGHGKVVREGPVHTSEAGLRRLFGDLDASRVVLEACTHSSWVAKLIRSFGHQVIVINPRRLQLISESVSKTDRNDARLLARVARMDLGMLRPVHEKSEKSHAIRVQMRARTQLVRTRTKLINLVRSSMKLFGAMPPSCSSDCFYKKARLPEILRPALEPVLKMLGTLQLDIERYDKAVAEHCEKQFPQTGIFRQIHGVGPVLALSFVTAIEEPKRFKSSRTIGAYLGLTPKTYQSGKNDPRLRISKHGDGVVRSLLVTAATLILRRSAPDSDLKRYGKRIAMSGTKRDKARARIAVARKLAVLMHRLWLTGEVYDPLRSTQTA

SEQ ID NO: 426960 - protein, 335 aa, unidentified
MKHYAGLDLSMETTQVCIVDENGRKVVSEKGESSPEAIAMVLERYSPIARAGIETGRMSPAICIGLRELGIPVVCIDARQAHQSLKAMKANKTDPHDAAGLAQLARTGFYKEVHVKSPAAHGVRSVITARSHLVEARVRLDNTIRGLCATFGYRPGAGQGKAFLERVMQAAHIPGLGEAIASLLSVRAELVEQIKEMDRRLRLIASQSQACEILMTIPGVGVQTSTAFAAAVDEAGRFRQSRDAGAYFGLVPRRHQSGELDWTGRITKQGDGTVRKLLYEAANSILTRSRETFALKTWATKIAKRRGLKKARVALARRLAVIMHAMLRDGTLFKA

SEQ ID NO: 426961 - protein, 343 aa, unidentified
MTFVGCDLHTRQQQVAVLDTTTGEIREQQLRHEGTTVEDFYAALPRPVTVGIESTGYAIWFHALLQRLGHTVLVGDAAKIRAMVVRKTKTDRRDALHILDLLRHDRFPAIWIPDPATRELRALLMHRLRLVRIQTMLKNGVHALALNQGLARGSKLLRRAGLAQLQALPLPPYTAQRRDQSLDLLATLRTHLDHLDDAIAAAALTHPDAPRLLTHPGVGPVTALATVVVLGTVSRFPDSKHVVSYVGLAPALSASADKYRLGKITKQGSALLRFVLGQAAAHASRLDPELTRTYRTLAQRRGRAKAKVAVARKLLVRLFIMLRDHIDYDEFRRRGRAPVVAPG

SEQ ID NO: 426962 - protein, 353 aa, unidentified
MKRGKYMGMDVHQAMTVVAVMDADGKVVLETMVPTEASAIIGLVQLISGPVHVTSEETTQAEWLYDAVGSFATEVIVCDPRHNKLLSEGSKGDKIDARKLADLLRTGMLRRVYHGNEGSRRLKQLVRGYEALSEDTKRTMVRIKAIFRGRGICTPGRQVYQPQHREQWLQLLTEPGLRERVGWLYEELDHLKPLRRQAKNAMLAESRKHRAMKLLRTIPQLGPIRAALIVATIDTPYRFRTRHQLWSYSGLAVVTHMSSEYEMKDGRVVRSRKPIATRGLNRNCNRRMKEVFIGAATAGSRTEPYRSYLQALEQRGIRREMARLTLSRKIAAVALTIWKKGETFDPKKLNWTT

SEQ ID NO: 426963 - protein, 423 aa, unidentified
MNRLHYELHVGIDLGQWLHQACVVDANGELLEERGFEHSVDGLGTTLAWLLSLAGKDAERIAVAIEKPHGAVVETLLESGVAVFAINPKQVDRFRDRHSMSGAKDDRRDAFVLADALRTDGHRFQRLQLPPPEMVALRELLRTRDQLVKNHVALSSQIRDLLARCWPHLVTLAPKDKALDAFFCELLQLFFDHHPTAELSLQNIQKLVHQHHIRRLQPEHILEVLRKTPLRVAPGTTQATSAHLNLLLHQLLLVRQHRRDSDQHLERWFKQLQPTSDQPYSDAAILASLPGVGAVVLASVLSYAHDPVRLRNLDAFRSLGGIAPVTKKSGKRGKQRPQILMRRARSLPLNNALHHWARIAVLTDPRFKEHYGRLRDRGHSHARALRGVMDRILAIAVAMLRDQTLYDPSKRANFNKGAKKVSS

SEQ ID NO: 426964 - protein, 418 aa, unidentified
MDTLNTTSFTAFIGIDWADAKHDICIQSADDEREFDVIPHKVELIDEWACTMRQRFGSPIAVAVELSKGPIVYALQKHDCFVIFPVNPSTLARYREAFQPSRAKDDPTDAELAVDLIIRHHERFKPLQPQSVEIRMLVSLVEQRRNLVADKIRITNRLRVALKQYYPQMLEWFDHIDTLLFCDFLTRWPTLLQVKRARQSTLRKFFHEHSMRFEHVLEQRLIAIKAATPLTLDEAVVVPHRLQALVYVEQLRVLLDAIKRFDIQIESVAKQHDDYALFTALPGAGPSLAPRLLVAFGEQRERYKSAAEVQKYSGVAPVTERSGKKHWVHWRWQCPTFMRQTFVEWAAQTINKSYWAGEYYRQQREKGSTYQAAVQALAFKWIRILYRCWQTRTPYDEVTYLKALERRGSPLLAARKLT

SEQ ID NO: 426965 - protein, 356 aa, unidentified
MQLQDALIKPKIFIGLDIHKKSWTVSIQTDLFFHRTYSMPSVAEDLFQYVEQTFPNHEVDLVYEAGCCGFSPARYFLNLGWNVLVVNPSDVKTGDKQRYQKTDALDSKNLSNQLKAGVLKGVYIPTEEHEQFTTLARHRTQITKKLRQSKLHIKSMLLFHGIKVPDEFDTPNWNKDFIVWLEKTKFSSNCGELALQGKLRMYKFIRSEYLEIANQMRAHCRKTYKNDYNLLKSIPGIGGYLASVILAECGDLRRFNNEGQFSSYIGLVPGIHKSGDSEKCLGITPRSRSQLRSYLVEAAWVAIRKDIEMQQYYRKHQGKNVKSVIIKIAHKMARRILSVIKTETPYQINRNLVLEK

SEQ ID NO: 426966 - protein, 341 aa, unidentified
MRYIGLDVHKDNITACVLTSTGKPKFEKNFIKDSESWNLSELMEYGDKEGFCVMMESGTYAYQPFRYFSDRGVETHVVHAQALKVITQSDKKTDRKDAQTIARMLRLWKKGDIDLQMAFMPTREQCELKDICRYREEISKKIGDETRRIKSHMSRNCEHLPEAYDNFQTQRARNYVKFNFSSDITLMSRMAELERLFEERGSIQKEVESRLPGSRDVELLTTIPGVARQTAVQIMSMIVDIDRFDDSEKLCAYFGMVPRVRDSGGKEHHGRMTKNGDRMMRAIMERVTESHVRNCDSSITRYYKRKCSEMGTKKALITASRKMLSVIYAMLKSGSDFRLAA

SEQ ID NO: 426967 - protein, 364 aa, unidentified
MTKHSTKPPAGKTQSSAFAIGVDVGDRFSRVCILDSDGVPCREERVRTSQAGFRQYFERLAPSQIALEAGTHSGWVSRLLQACGHIAIVANARELRKIHQSDRKNDRADAEILARMLRFDPQLLCPIRHRSAQMQADLAVIRARDTLVGARTKCVNAARGLVKSVGARLPKCSTHSVAAAALDHVPVELHAALTPLIATISNLSEQIRQYDRSIEVLAKEYPATDVLRQVSGVGALTALTFVLTVADPQRFRKSRDIGPYLGLVPRQDDSGNRVSQLSITKAGDAHLRRLLVGSAQYILGPFGPKCSLRSYGERLTQRGGKNAKKRAVVAVARKLAVLLHRLWTTGEVYEALRSEPTQRRGRAA

SEQ ID NO: 426968 - protein, 445 aa, unidentified
MDVMFTHCAGLDVHKKTVMACRVTPDPTGAQADGIMELKEFGAMTVDLLALSDWLAAAGITHVAIESTGEYWKPLYNILEGDFTVFLVNAAHVKQVPGRKTDKADARWLAKLMRYGLLRPSFIPPVEQRDLRDLTRYRTKVVQEHSREVNRVQGVLERANIKLAAVATDIMGVSARAILAALVEGRADPATMAELAKRRMRSKIPLLEQTLTGLVRDHHRQLLAMQLAHIDFLDEQIEALSAEIMHRRAALSGDTLPGASPGATGEAGSVATSDTADAFMTFARAVTLLDTIPGVNQRGGELLVAEWGIDMGRFGTAARLAAWSGVAPGNDESAGKQRSGKTRQGNQALRTGLTQLAHAAARTKGTYLSALYHRLATRRGKKRAIIAVAHSIVVSAFHMLIRGEPYRELGAHYFDERRQAQLVDQLTRRIERLGYRVTLEPVAAA

SEQ ID NO: 426969 - protein, 393 aa, unidentified
MRPYFRLGRTLSGYPTGPVRPHRSMPPASHPEVTPVKYVGIDVHKKMCQVAVIDDDGELLDETRFRNTLEGIEEFAQRLTGFNDEVRGVVESTGNLWIQVHDRLEAHGIDVALSNPANSRLITEARLKTDKTDARALARLLRAGVLSTCYVPGEEQRSRRELLRHRLKLVKIRTEVRNRIHALLDKHGLRIPYKTKFSKKAVAWLKMQSLGFMDNAILRSDIALLEVLDEQIGLVEEKIAALAADDQQVHLLMTMTGIGYFTAMLILAEIGTIDRFSSDKRFSSWMGLAPIVHQSGEKTRVGGVGGPGNRRLRWVMIQCAHNARRYDPRLMRFYERYSRRKGEKSAVVAVAHEMARIIYFMLKRNEPYRGMREGLTERKIKEMKRRALHGLRN

SEQ ID NO: 426970 - protein, 319 aa, unidentified
MYLGIDVAKDSLAVYLLKAEGGMHHEVRNEPAGFRELHRWLKKQQASRAHVCLEATGIYGMDVAQFLHDNGYRVSVVNPARIKGFATSQMRRSKTDRLDAEVIAAFCKALEPSVWTPPEPAWYELRALLRHLEDLQATRQQQVNRLHAATTEVVRSQLKQHIAFIDEQIRQLKQQVRTHLQQHPNLQDQVHLLTSIPGIGELTAWRLVAEIQALATFQDVRQLVAYVGLDPTRHDSGSSVRGGHSISRQGRAALRAALYMPALVAMKHNPILHVFAARLSAQGKLPQQVIIAVMRKLLHLAYGILKSGLPFNPNHPVPA

SEQ ID NO: 426971 - protein, 394 aa, unidentified
MGASEARSFDAASAKALAALAPTPSLVCKEARVAVVYRRSSRAGDRPSQGPSPRGSKDPRPRLSGPEQSPGPLRRARIRKDGAMESAVYVGIDVSKDRLDVHVRPSGEHFVVASDDKMLSRLAERLRGLEPRLIVLEATGGLQVKAAGLLAAAGLPVAVVNPRQVRDFAKSSGRLAKTDRLDAAAIAHFAEAIKPEPRPLPDEAQRGLAALVERRRELVALRVAERNRRSQIQSSWVRKDIEASLADLAVRIEAVDAEIESHVKASPIWRSQENLLKTVPGVGDVVARSLIAELPELGTLSRRKIAALVGLAPYANDSGQFSGKRSIRGGRMAIRTVLYMAAVTASRCNPAIAAMYKRLRAAGKKPKVALTACMRKLLVMLNAIARDQKPWQTA

SEQ ID NO: 426972 - protein, 491 aa, unidentified
MANRKKSTFERLTNGQLNRKQRREWMRKLSAEDPGLEIVNRNVAGIDVGNESHFVAVPVGRDAQPVQEFGSWTADLERMADWLKDCGIETVVMQSTGVYWIALFDVLEARGFKICLANARHTKNLPGRKSDVQESQWLQKLHTYGLLRNSFRPPDEIRALRSLWRLRDRHVKEAARTVQHMQKSMVTMNIQLSNTISDISGVTGQTIIRAILAGERNAGKLAKMRDKRIKATPAEIERSLEGNWREDMLFELKQAVDTYDFIQKQMAECDQRLQKLMAELPAREGQAALVAAAAAGEPAGQNGKPARKNKKKSRGSKKNVPRFDLRAELERVCGVDLTRIDGIDILTAQTVVAEVGADFSRWKDESHFASWLGLSPCRDISGGKVLKQGSLKVKNRVATALRTAASSLLFSDSYLGARFRSLRTRRGAPKAIKAMARYLACLIYRMFTRGQAWVDRVAQEFENKRTQRELAALQYKAAAHGFKLVNLQASA

SEQ ID NO: 426973 - protein, 343 aa, unidentified
MKDTIYDHYIAIDWSIKNMAIARMTKKSNKITAIDVPSDIEDLQAYLTNLRGTKIVALEETTTSQWLYAELKEYVDRIFICDPNRNKLLNEGPKTDTIDASKLVQLLKAGLMKEVYHSTDKFLYLRRVVSGYEDLVKSGVRLKNQRYALLRACGKRGKEKAGSAIDSQGEQFVLDCLDRQIEAYEKEKQCYENEFERLARKNPEIKHQKSLPGIGTINAVKIVARVVTPYRFSDKGRYLSYTGLIKLEKTSGGRSYGKRSPRYSRQLKSVYKSGILAAIGGNNPINDYYDYLIRENGYPEHNARQKACRRLAILSLGVFKSGKKYQPFRRNHVKNNKEVTSGL

SEQ ID NO: 426974 - protein, 355 aa, unidentified
MIIIGVDFHPEFQQIAYVDTETGEFKERRLQHREEAERFYRELAARGVAVRVGMEASGHARWLERLLKDLQFELWIGDAAEIRTRQARKQKTDRQDAQLILKLLLEDRFPRIWVPNAENRDLRQLLWHRHRMVQARTRIMNQLQAVALNEGLRCKKRLWRERGRQQLESLQLAPWASRRRSDLLQLLDRLSPTIAELTQAIQQEAERRPDARRLMTHPGVGALTALAYVLIIGDPERFGCGKQVASYLGLVPLEKSSGNRRRLGHITKQGSSMLRFLLVEAAQATVRSDPNWRSKYFHLLMRRGRKTAKVAMARRLAICLYWMWRQQRDYEQLVKFGSHAGQPGNRDDVQKTSRY

SEQ ID NO: 426975 - protein, 356 aa, unidentified
MSKRNTVNGGLTIGLDLGDQHTEACVVDGSGEVVETFRVRTTEPALDRALSRFEASRVVLEVGTHSPWVSRRVTALGHEAVVANPRRVRLIAENDSKSDGFDAELLARLGRLDPSLLSPLVHRGEPAQRDLVLIRARAGLVRARSQLINQVRGFAKSLGRRCPSSSAEAFPRGVRATLAKDLFPGLSAMLAMIEQLTAEVRSMDRAVERLCREQYPETAVLRQVKGVGPITALCFVLTLEDPHRFPKSRSVGAYLGLRSRQRDSGEQRPQLRITKAGDALLRRLLVTAAHYILGPFGPDTELRRFGLRLAERGGKSGKKRAVVAVARRLAVLLHRLWITGEVYQPLDYDAAMAKAA

SEQ ID NO: 426976 - protein, 418 aa, unidentified
MSYKVAGIDIHKKVLMVVVATAGNEVADAAGEALEFECRRFGAGASERKHLCSWLRERNVSEVVMESTAQYWKPVWMDLEPHFGKLHLAQAHSNRAPKGRKNDFRDGKRLTRRLLADELMLSFVPASEQRAWRTITRGKQQLVRDRVRLQNQLEALLEEARIKLSSVISDLLGLSGRRILQAMAAGQTDPERLAALGDDRLRCSQQELVDALNGSLEPIHCQVLKLYLKRLELLDEQIGTLDQMIATALVQHQDAVIRVAEIPGFGVDSAQQLIAEMGIDAEAFPSAGQFTSWAGLCPGTEVTAEQNHSSRSAKGNRFVRRILTQAAQAAVKKKGSHFQSLFRRFLPRLRYNGAIWAIAHRLGRLVWKVLHDGIRYIEQGQETNPKAKKRRAQKLAQALRKLGYAVVLTAITPEPATA

SEQ ID NO: 426977 - protein, 346 aa, unidentified
MRYSTTVGVDLAKNVIQISVVSCRGKELVNRSLTRRKFAEFLGKQKPALVAFEACASAHYWARTAQRYGHTVRIIPAKAVAPFRQGHKTDSNDALAVAEAARRPNIKEAPMKTLEQQGLQAVQRSRDLLVQECTALSNHIRGLLMEFGVVIPQGFAALRRKLPEILEDGDNEVPDMYRPTLHRLYVRFLELREDIQEMNQQMKTLVKQHPGCNRLMALEGVGPISAVLLYASLGTGEAFSGSREFAAYLGLTPRQLSSGGKTNIVGLSKKIGNCRLRSVLIQGARAYVHKLKEPKTSKDRWLMELIERAGHGKAAVALANKNVRTAWAMLTQGTEYQRRPQLKVAA

SEQ ID NO: 426978 - protein, 389 aa, unidentified
MYLIGIDISKYKHDCFIATEAGEIIKDTFSFTNNQQGFTDFLGVLQSLDPNQTKRIGLEATGHYGRNLKMFCDKHGYTYMEFNPFLVKKFSSSLTLRKTKTDKVDSRLLSLILLSVEYKVYPVKSYHIEEIKSLTRYYKVLTKKRSKEIVNLTNILDYTFPEFKPFFRNKFSKTALFILENYQTPEKISNMNSKSHEKLHNVSRGKFSYARFIRLKILAKETIGSSSLVLNSQFQSSIRVYQVLEQEINITSDQLLDLSKDINSPVFSIRRIGPISALSIISEYRNFTSFNSPAAMLSFAGLEPSVIQSGTIEKKGKMVKRGSGYLRETIINVVPFFYMYNPKVYDYYHKKRNEGKSHRVALTHVAKKLIRIIFHLVKNNESFDDDKLK

SEQ ID NO: 426979 - protein, 445 aa, unidentified
MKHARKRYVGLDIHKDVVEYCILDAAGKKIDGGRIVCEQSVLQRFATQTLSPKDHIALEATANTWSVVDILEPHVAKIVVGNSMKTKAIAEAKVKTDKIDAMILAQLLRCDFLPTVWIPDAKTRVLRRLSSFRKSLVQDSTAVKNRIKGILNHHLIQHAVAWSKDGLVELKELDIPSHERTIMDCEIAVLEHLQKQIEKVESEIKKLAYEEDNVRLLMTLPGVDYNTATAVIAAFGDISRFKDADHAASYLGLVPRVKQSANSCHHGPITKSGASLARSLLCEAAQCLSRNEGPLGVFVRRLLQKKTWNKAIVAGARKLATIAYHMLKNKEPYRYAAVARTQVKLGLLRKSVTGKRLERPRYCYDKKLSEHIKNREDVSVRFIPPLSEVYKKEGLPAARSFDELSIGEQRAIKEVGLTEHVRKTEVVQVIVKPKKAPAKTRTKVE

SEQ ID NO: 426980 - protein, 430 aa, unidentified
MEIIYPRACGVDVHKSFIVAVICICESVKPKYIKKRFSTFNNQLIQFRQWLIENNCHNVCMESTGKYYIPVYNALEGHISNVVVANPKWVKAIKGEKDDNKDAKWIADLFKFGIVRSSYIPEKDIRILREFTRYQYKLVNIRSSEKNRFQNALTVGNCKIDLVFSDVFGKSASSIVDTILSDEPYTSEDILSKVDKRCKSSTEEILSAVEGTDLNHFQKERIRIIQKHMEYVDSLLNEIQQHIDVMVSAYENYIQLLCSIPSVDRKSAIILISELGIDVTQWSSARKLAAWAGLAPGRNESAGKKKSVKISKAGVYIKPCLVQVAHAAVKDKECDYYANKFSRISKRRGKKRAIIAIARKILIAIYHILKTGEVFNPSDMADVETTKQQRIEYIKNNLRNAFNQLSRTGLTEEEILQIIIKKSNNSPQTE

SEQ ID NO: 426981 - protein, 325 aa, unidentified
MDVLGIDVAKATLVVVLLVGQRQQRAEFANTPAGHAKLLNWLAKRRATPVHACLEATGTYGDDLAQVLYDAGHTVSVVNPARIAAYAKVQAARHKTDQADAALIARYCQREQPAAWTPPPPELRELRALVRHLDTLQQQRQAEQNRLGAGGHPSVVTQAIQAHLTFLSEQIATVEQQIAAHFDQHSDLKRQRELLDSIKGIAVRTATRLLAELGDWKQFTNARAVVAYAGLNPRQYRSGSSVQRRTRLSKSGNAAVRAALYFPAIVAKQHNPLVQALCARLTARGLCPKAVIGAAMRKLLQIAYGVLKSGQPFDPNYAQAVTAQG

SEQ ID NO: 426982 - protein, 367 aa, unidentified
MKKGSTAAVRQAKNFSEQKLTIGLDLGDRSSWYCVLDEAGVILLEQRLSTTPKAMREVFDGMPRSRIALETGMHSPWVSRVLNELGHEVIVAHARNVRLIGESRKKDDRLDAQTLARLARIDPQLLCPVKHRSARAQADLTVIRARAGLVRARTALVNTARGLVKSSGERLRGCNVRNMNPEKAEGLSPELQRALQPLLTGIESLSERIRECNEGIEKLAQENYPQVALLKQIKGVGTLIGLTFLLTLEDPHRFRKSRDVGCYLGLQPGRRNSGQSEPQMHISKEGDPYLRTLLVQGAHHILGPFGADSDLRRWGLKLAERGGKNGKKRAVIATARKLAVLLHRLWVSGEVYEPLRNSNQRAMPAAA

SEQ ID NO: 426983 - protein, 348 aa, unidentified
MSTIQIGVDLAKTVFEVALSEAPGVVTARRRLSRAAFPRFLAAQAPAEVLLEACGSAHHWGREAQRYGHRVTLLHPADVARYRDGNKTDRADAKALLEASRNHALTPVPVKSIEQQAVVALHRIRQSYLRTRTARINALRGHLRELGHTMPVGARRVTLDARSALADEAVPEFLRQALFEVIAEIRSLEEKADAVRTALTALLHEMPEAKRLMTVPGIGVLTATAMVACVGDIRRFRSGRHFASWLGLTPREHSSGSSRKLGSITRKGNSYLRMLLIHGARSALRAGAVTNTPDDLRAWAKEVALRHCHNVAAVALANKLARISWKVWRDGRDFARRMPQEEGHTTNC

SEQ ID NO: 426984 - protein, 411 aa, unidentified
MQVVYNRCAGLDVHKKTVVACVITPKSSSGWHKEIRTFTTMTQDLLKLSDWLTSHNCTHVAMESTGEYWRPVFNILEGNFEVMLVNARHIKAVPGRKTDIKDSQWIAELLQHGLLRASFIPPVEQRDLRDLTRHRSNFIRERVNLVNRVQKVLEAANIKLASVASDVMGVSGRAMLAAIVEGSASPELMADLAKGTMRKKHDLLIQALLGRVRPHQRFILAQLLCQIDSVDETIQCFDQQIEEYCRPFEQAVELVDTIPGIARRTAEIIVSEIGIDMSRFPSAQHLAAWAGVAPGNYESGGKTLSTSTRKGNRSLRTILVQAAHALAHTKTYLAAQFRRISGRRGKKRAAVAVAHSILTIAYHLISCQEPYKDLGVDYFDKQRPESVKKRLIKRLEKLGYQVSVEPVPAAI

SEQ ID NO: 426985 - protein, 339 aa, unidentified
MKLYAGIDLHSNNNFIGIIDEQDRRLFQKRLPNRIEEVLQALEPFRESLEDIVVESTYNWYWIVDGLKEEGYKLSLANPSAIKQYEGLKHTDDKWDSFWLAHMKRLNILPEGYIYPKEERHVRDALRRRLMFVRQRTSHILSLQSDITRNFGSKMSASEIKKLDGTGADLLFDDPFLTLISRGHVSVIDFLSDRIKEIEKAVIEHVKIKPEFEVLLTMPGIGNILGLTIMLEVGDIGRFPEVGNYSSYCRTVKSEKISNNKKKGKGNQKNGNRYLAWAYVEAANIAKRYYPEIEKFYNHKKAKGGNTVAIKALSNKLARASYYVIRDQVIYDEKKLFRS

SEQ ID NO: 426986 - protein, 347 aa, unidentified
MLHAGLDLSRKKLDVCLLGGEGEHLDQLAVPPDVDSLRALAGRIEEVHREPVCAVVESMTGARIVHDTLEQEGWDVEIADAQKVKGLAPLACKTDRIDSMVLAVLSQRDLVPAIWLPDPRVREERELARFRLHLVKHRSMLKHRVHSTLINFGRPCPVSDLFGVEGRALLARLDVPEPWRGNVAASVALIDDLERQIEDANRRLREGHANHPYVPLLLSVPGIGSVLAFTIAAEIGEIERFQSPEKLVGYTGLCPRVVQSGESDRRGPLSKHGPTYLRWALIEATMHALKHPAYSERYQRTKRRLGKQRGAKVAQIDIARRLAHAIWHMLTRREVFAPRGAAFRLAA

SEQ ID NO: 426987 - protein, 439 aa, unidentified
MNTKVIEEKRHFVHNKIIIGIDPAKHFHQAMVINEMGIPYCKSFSFNNTFNGFNEELWIKLSKVLKVIDPQTVVFAVEVSINLWQKLCHFLNKKGFNVLMVSPLYTKHERPKMDNSYSKSDPKDALAVANCARQGYFNFYKEYSNSSDAMHRLSITYDKLKKHMAQTKQRIRSQVELIFPELQSAVDIDSDTARELLRRYLAPMEFLDMNIYSETIIIEKVSQRQHGLKTLKRIQEAAVNSIGISLSEDLLFSEKLTMITWLNQFQLLKEQMKLLLDNLIKLAEHSPLFPLLKSLKGISDISASRFIAELRDPLLFTNYKQIESFAGTNLKLSQSGKFTGYRRITHIGNHRLRTIIYSMAQETKNHIPEIRIRFIKRQMKQARYKKNVVASSSNMLKLIMSMFKNNHTYQFNDESLEELKLLEVKYQDFKNKKKIKKSA

SEQ ID NO: 426988 - protein, 322 aa, unidentified
MSVSNQRCAGIDVSKGTLDIAISNIASQFTVPNGTDGFTQVLRELKRNETKLILMEATGGLESCVACYLQSEGFDVVVINPRQARDFARAMGYLAKTDRIDARVLLQMSEVINQHPERERYIRPLPDAHRQILAAMVVRRRQLTIMLTAERNRLHPSHPLSHASIRSIISALKGELARIEGEMAIHIKEHFSELSELLNAVKGVGSATVAVLLAEVPELGSLSRREISALIGVVPVNRDSGTMRGRRTVFGGRTSVRTALYMSALVGSRHNPVIKEFYTRLVAAGKPKKVALTACIRKLLTILNAMLKKNEAWDPMYHQHAS

SEQ ID NO: 426989 - protein, 387 aa, unidentified
MAQVNDLSRSVSAFDPISTLVVVVEMSKASWLVSGVVPGVDRQPLKKLEPDATALLRLIERWRNEAVRAGRPISRIALAYEAGRDGFWLARWLIARGIEAHVIHSASVAVSRERKRAKTDRLDAAMLMRVFLGWLRGERGHCGMVAIPTMEEEDARRPSRERESLVDERSRITNRMKSALARLGIRGFKPHLRKAPERLADLRTAEDTGLPANIIEEFRRDMARLALVREQISSIEKTRAERLGRAPDTGPHAMVRLLARVIGIGIETADMLVQEILSRKLRDRRAVARYAGLTGSPDESGLKRREKGLAKAGNARVRRGLIQLAWRFLMFQKDSALAQWYRTRTEGPSGARKTTMIVALARKLLIALWRLVTTGEVPDGVELRPAA

SEQ ID NO: 426990 - protein, 330 aa, unidentified
MTVFFGIDVAKERLDCAATIHDRQRPIGQKSFPNTLDGIERAAAWVTRISRAEFLEIHAVLEPTAAYHELAARLLAAKGMTVSLINPAQIRSFAKGMAVLNKTDQIDAVLLARYGCLAQPKAWTPPAEPLVELQALLARLDDLESDLRREQNRYEQACVRGCSGAIKRSFVTTIRALKAQCKLLQEAITEHFAAHEDLEADLRRLRTIPAVGPKTAMRMLALLRSHPFDTARQAAAFLGLVPIERPSGRSVRGRPRLSKAGNSRLRAALYMAAVVATKLNPDIKAQQQRLLERGKAKMSTLGAAMRKLVHICFGVLKSGNVYEFPVAHRP

SEQ ID NO: 426991 - protein, 303 aa, unidentified
MMGLPNSLCVGIDVSKMSLDIDSASNDVDGFDVIIAELKQHSIALVLMEATGGLEAAVACSLQTQGFDVAVINPRQARDFARSMGYLAKTDRVDAAMLAQLAEVINRHPERARFLRNLPNAEREMLNTMVVHRRQLITMLTAERNRLYPSHPQSRKSISTIIGVLQDELKCINKSMEVHISTHFKTLAEILGGVKGIGAATIATLLAEVPELGHLSRREISALIGLAPFNRDSGNMRGRRTIFGGRANVRSALYMATIVATGHNPVIKQFYNRLVESGKAKKSRTGSLYAQTPDNPECDDKEK

SEQ ID NO: 426992 - protein, 365 aa, unidentified
MLHRLNSAVKLIQRTTTEAPRQHMYYIGLDVHKKTISYCVKDVSGRIQQEGKVGSTRRELDCWMKTLPQPWSVGMEATIFSGWIYDHLLPHATQIKVAHPLMLRAIAAAKKKNDQIDASKIADCLRCDFLPESHMMPREIRDRRRTLRYRHLLVRQMVQMKNRVSGLLMETGVEYNKQRLHKVSYFRELLTTNEEVHPSIRPLLKLSREMIERCQKTEYALVSSLQRDPVLAERIRRLSTVPGVGPITALTWALEIGDVSRFRTIKNAISYCGLCGDERSSADKAMRMPLSKQRNKHIQRTLVEAAKLAPRQSHELAVIYEREKQKGNSNRATLAVARKVVAYLLAVDREQRDFIPAEKRRPAAA

SEQ ID NO: 426993 - protein, 416 aa, unidentified
MKREGKTREVRYIGLDVHKHYITVGGMNARQEMVLRLRNVEMERFKRWAEENLCQSDEVVLESSTNTWDIYDTVAPLVKRVVVANPAEVKQIANARVKTDNQDVIRLLRLLIAGMIPEVWVPPVEVRELRALISYRWRLVKMATAIQNRMHSLLHRHNLQAPDGKIDTGQNREWWEQVQLSELERLRLNQELKTLRLVRDHIVEVETELGRLSTSERWTNQATHVMQLPGVGIIVTMTVLSAIGDIRRFPNARKLVGYAGFGAGVHDSGQKHQDKGVTKSGRKELRWALVEAAWQAIRSNSRLRTQYDELCKRKHPNQAIVAIARKLLVILWCLLNRQESYNPATDEDLAYKMLTWAWHMDQSAKRGMTNQQFAKYGLIQLGRGEHLTRIVKGGQPRRIAPKEEVLALMPDLSLKQ

SEQ ID NO: 426994 - protein, 404 aa, unidentified
MKGPIVSIDVSKGKSDYQAFKNLNVKYTGSRSIKHTKEGFDEIVNLVREMEKKLETEVCVVYEATGVYHRVLKKVLEDNNIKQFIINPLLSAKTRKNDSLRSPKTDKLDPKSIAKTYYSHSLHNSHKQETIYHELRELSRYYEDILVHIRKDKVAFRAQLDIVFPGYDTLYDDLYGPVALAVIEKYPHPEMLQKKKINTVSKVIQSKTCHRQATSDTMADKAIEYSKTIYSGCDKNDIEVLILQRFIKKLNEDMAEAERTIGEMIKLAQELPNFNIIKSIPGIGDNLAARIIAELGDMTRFKKKNELEAFAGLDPRISESGKNDGDHMHITKKGNKRLRCLLYLAVTCSIRLKRDDNSIKDFYIKKKQQSNPMCSKAAKTACASKLVRIIYSMCKTGELYQYNK

SEQ ID NO: 426995 - protein, 335 aa, unidentified
MTTLAVFVGLDYHQAFVQMCVLDANGTLLMNRKCGNSALALVEAVAALAPGAVVSATVESCCGAADLAEELVAAGWQVSLAHATYVHKLKQSPDKTDWSDARLLADLLRVGYLPKVWLAPARLRQLRHVVRHRQQLAQARRAAKLRVTALLRAERVEFTGSRWTKSWIAAVRNCEALGEQGQWVANQLLDEIEHLQSRIAQVESRLAALSQDDPFVAKLIEMPGIGLVTAITLRAELGTMSRFRSGKQAARFCGLTPRNASSGLKQADAGLICASNAALRAVLIEASHRLMRFDPRWSALGHSLKSRGKPSCVTAAAIANRWVRWLYHQLLPLAV

SEQ ID NO: 426996 - protein, 362 aa, unidentified
MHNHRTLVGLDVHARATIAAGLELESGELWFRRVGGPPRSVVDYLEQLPGPVLATYEAGPTGYGLARAAAAHRIEVRVCAPGSIPRKPGERVKTDRRDAERLVRSLLAGELSFVRVPSVEEEQFRDLARCREAARADLMRSRHRLSKFLLRREVEFPGPGASWSDPHHKWLRALEFADHPSRSVFNDYLAAVVSLEQRRAGLDAQIQIAAPTSPWAQTIANLRCLRGINTVTAYGVCCEVGDFRRFEHPATLTAYLGIVPSEHSSGETIKRGPITKAGSPHARRLLVEAAQHYRHKPAIYKTLAARQRGQDPRACEIGWRCQQRLHRQWQRLRVQRGKPGNVVVIALARELATFVWEVGQLH

SEQ ID NO: 426997 - protein, 352 aa, unidentified
MQTAASFPKITIGVDLGDRKSHICEIDESAQIVKETSIPTTQSGVERYFAGRERCRVVLEAGTHSPWFSRQVKALGHEDVVANPSKVYGKQRRTKRNDRSDSRYLARQGRADIELLHPIQHRGAEAQEHLALIRARDQLVRARTKLINHVRGAVKSVGGRIRKCSAEAFAARARHEVPAELRMATEPVLDVIADLTRRIHEMDTRVERIAEKYPEVERLQQPKGVGALTALAYVLLVEDPKRFKASRDVGPYFGLVPQLDESSDSSPQLGITKTGDELGRRLLVSAAQYILGPFGPECDLRRFGEAISARGGKNAKKRAVVAVARKLAVLLHRLWVTGADYDPDRQLKRRSA

SEQ ID NO: 426998 - protein, 384 aa, unidentified
MTKHNILFIGLDTHKAFVEVAYIEDNCGAQPIHFGRISSAKIAIKKLIRKFESKYPHATLHFVYETGPCGYWIYRLITSLGHCCYVVAPSLIPKKPGERIKTDKRDALKLAKLLKSEDLTPIYVPEPEDEAIRDLSRAREVAMKDLKDAKYQLKALLLRNNINYTGTANWSFKHLRWLTEIVLPHPAQQIVLQEYLQTINERLARLKRLDNELEHHVKSWRYYPVVKAIQAMRGVRLLVAAGVIAELGDLTRFDHPRKLMSYLGLVPSEHSSGGKRNIGAITKCGNGRARRLLVEGAHSYRYQAVITTALQKRQEGLPKDIVDIAWQAQLRLCRRYQQLLHKGKHYNVAVTAIAREMIAYIWAISREVVLSPVNPKLRIARVPA

SEQ ID NO: 426999 - protein, 482 aa, unidentified
MAKRKMSTFERLRSGRMSRQECKEWQRRLYSEDAGLEVVHPDAAGIDVGNASHFVAVPPDRNQPAVREFGSWTADLRGMAEWLKQCGIRTVAMQSTGVYWVALQEILEREGFEVCLVNARGTKNLPGRKSDVQECQWLMKLHTYGLLRNSFHPPEQIRAVRTIWRQRDRLVKEAAREVQRMQKALTTMNVQLANAISDVSGATGQAIIRAILRGQRDPQQLAKLRDYRVAASEAEIAHSLEGNWREDVLFELQQVVDAYDFHQKQIAACDVQLQKYLSALAVHSGPGAGEQSTAEVSSEKPRKQRRHKLQKNQPAFDLAAELQRTMGVDVTAIDGVDVMTAQVILSELGPDLSASFPSENHFASWLELAPRRDISGGKVIRQKSRKSNNRVANALRMAAQSLWRSDSYLGARYRHLKARLGGQKAVKAMARYLACLIYRLLTKGQAYVDRGAAHFQSKRSERELLALRRKAAELGMEVVAIS

SEQ ID NO: 427000 - protein, 424 aa, unidentified
MGKFTKTLCISERKEYHIMEGPIITVDVSKGSCHYQPFIENGHPMRKPKQLSATIDGFQKLGQTIKDLEAKTEREDIPVIFEATGVYHRPLQKYLEDHKIRYYIISPLLSATYRKTDLHSNKTDALDCAHIAKAYYCEKELRQYQAQPQEYKRLYQLSRIYESELVHLRKRKVSLRSMLDIIYPRIDKTFKGNQNLYDPIPMEILKRYPHPSLLLSHREDTIVKTVGHRTGHLKGYTERIVHKIYEKAKECYSGCEINDIEVLKLPSLIENVQEQKKKCDSLLKEMIEIARTCPYFASVVSIVGIGENLAARIIAELRDVNRFDNRAAIVAYAGLNPKIQQSGDIDGLHLKISKKGNKHLRCLLYLGAQCNYRLRKEDPLYEFTKKKRQQTQCPLSSKAAYTASAHKLLVIIYSLCKNGTLYHS

SEQ ID NO: 427001 - protein, 362 aa, unidentified
MAQVRSFVGLDVHAAKVVAVSADRESGELRSRRLPGRTGEVVEFCAGLPGPVRVAYEAGPTGFTLARALGDVGIECVVAAPGKIERPSQDRVKTDRRDAERLMRLLMVDGLHPVRVPGTEEEALRDLVRAREDVRGDLMRARHRLGKLLLRHDIAFAGPGANWSVAHRQWLGRLELPERGAQVTLLDYLGAIDALLVRRGALEATIGELVLLSPWAQTVARLRCLRGIDTLSAVGLCAEIGDWERFERAGQLMSFLGVVPSENSSGEQRRQGAITKSGSRHARRLLVEAAWHYRRMPAKGLALRRRQEGQSQHVIALSWKAQQRLNRTWRRLDSERGKRRTIVAVAVARELAGFCWAIANAD

SEQ ID NO: 427002 - protein, 371 aa, unidentified
MNSIVYVGMDVHKEQYTLCCYSYDTDKVEYKQTIPSDYKLVLKYMEQIRSRYEGEVSFVCGYEAGCLGYSLYHQLKDHAVDCKILAPSTMAITNTHHVKTDKRDAANIARCLAFHTYSEVYVPNNDDNDVKEYIRMRDDQKLYLKKVKQQILAFVLRQGKRFEGGKTYWTIAHLKWLKTLELSDLQREALDEYLLTYEYLTEKISRFDERIEELASVERYEEKVKHMSCLLGIKTHTALSMIVEVGDFGRFEKAPKFASFLGLVPSEDSSDTRVNRYSITKAGNSHLRRLLVEAAQSYTRGNVGHKSVALKQRQKGNPPEVIAYADKANERLRRRFYKMTLNKGVNRNVAATAIARELACFIWGMMTEHVS

SEQ ID NO: 427003 - protein, 356 aa, unidentified
MDQIRQLDFRDQRFYIGVDVHKKSWAVTIRSHQMELKTFSMNPSPEDLNIYLQRHYPGGRYYSTYEAGFCGFWIHRKLHGYGIENIVIHAADVPTSHKEKTTKTDKIDSRKLARELENGSLKGIYVPEEFYQQLRSLRRLRRSSVQNQTRVKNRIKGHLHYYGIIIPSQWQNSYWSGHFINWLGTLSFAYTSAKDYLFFCLEELQQHRERTANITRKLRQYCKDHDLMEQINYLRSVVGIGFVTAITLFTELIDINRFPTLDHLAAFVGLVPSVDSSGDRRSERGLTERRNRFLRHVIIEAAWVATRKDPALTLVFIELTKRMKKQDAIIRIARKLLNRIRFVWKNQQNYVTAVVQ

SEQ ID NO: 427004 - protein, 348 aa, unidentified
MKGCFENKDIYVGLDVHKKRWVVSVRTYDLELKTFSMMAVAEELEKFFVDNYKDALLHIVYECCFSGFWIYDYFHNKGFDIIVTPTNRIYRDGSIVKTDKIDSRKLAFQHSRGLLRAVKVPTEKIREYRSIFRIYDKEKMREGQILRQIRCILEVRNHPLKWERWNKEFIEKLKEINFQEDIFNRKFKQLLQEYEYVKQQIKDSEQRIKEIGEDQELGHKIKRIEKINGIGIISSVRLVVFLFDMKGRFETGEKLAHYVGLTPGEHSSGEEIIRSRTGLIGNKQLRSIIIQLAWVAVRKDGSLLDKFERVYKKNGSKQKAIVAVARKLMMKVYAITEKEEEYEINKAA

SEQ ID NO: 427005 - protein, 424 aa, unidentified
MKSINQFAATVGWDWADRKHDLWLRPAEGSKGEHLQLAQTPEAIHQWVAKLRERFQGQPVAICLETSRGPVVSALQAYDFIVFFPVNPKALKNYRAAFSVSGAKDDRSDAQLLEEYVRLHRDKLRALEPDTVETRTLAGLVETRRNLVDERTRLVEQLHSVLKIYYPLAEDLLGEQMTKVMAADFLARWPDLESLKRADANTLRSFFFKHNSRSHKTIEERLSAIAQATPLTTDPAIILPSSLRVLALAAMLKPLHRMIAKLDQQIEKTMDQHPDAHLFRSLPGAGPCLAPRLLVAFGTDRTRFESATEVAQFYGIAPIVRQSGTTKTVHFRHRCPKFGRQTFHENAGCTLREELWTHCFHTQYKHKHDDRYHQACRSLAYKLIRIYFACWKHRQPYDPQRYLQALQKNGSPLHKMLQKLTQEM

SEQ ID NO: 427006 - protein, 375 aa, unidentified
MDNCILVGCDLHDKSMMLKYAVGCGEVKRRVFGNTRAAHAELIRWLRRQSAEAGNAKVYFAYEASGLGFVLYDRLTAAEITCYVLAPTKMKRSVKSRTSKCDERDAEAVLQELRSGVLLGGGIPAVTVPDATARDDREATRGREAVAVKIAGLKTEIRTLLKRYGVEKPKAVGDSWGVGHRRWLEHLVGVGGELGCYGSVCLASLLAQLKALEVEAKHFDEHLKSLSKTERHGAAVKRLMTVKGVGLLTALTFRLELGDPERFRNRRQVASYTGLVPTQSESGETTDRKGHITHQGPPRLRRVLCQAAHVWVRFAPAAKATYERLVARNPKKRKKIALVAMMRRLAIRLWHLSKGDGLPEDRAAATPSAGVSGQP

SEQ ID NO: 427007 - protein, 457 aa, unidentified
MKQKMEMDIVNPNCAGIDIGSKSHFVAIGQSLDAVREFGVYADDLTEVCLWLKKSGVTTVAMESTGTYWQNLYVELVSHGFEVVLCNGKFTKNAKGKKTDVKDCRWIQKLHTLGLLTGSFLPDFTTEQLRSYCRQRTNWIELSSEASQKMQKYLRLLNFRLDVVVNDICGLTGLTIIEDICKGNLDATKLASHRHYNCRKSEEEIEKALKGNNRQDYLFGLKQEFESYRFYQKQIDACDRQISLFLKTQINIHPEKKKLKTENKPHKRINKNTVRNLDINQAAFQYFNGIDLMRIEGLSFSTVLTIMSEIGPDGFDKFKTAKQFTSWLRLAPNNKISGGKILSHHIPRGSNRLKIALRQAANAIGNLKDTHLSNFFKRVAYRKGRQAAVSATARKLAVIIWNMVTRKIQYQPPTDYLFLDQKRKLKLVSRIKQNIVKFDLKPEDVGFGNSLKLSTEF

SEQ ID NO: 427008 - protein, 397 aa, unidentified
MIAVGIDISKAKSTVAVIDSDGTVLASPFTMAHTQPEMEAFVTYLKGLGEPTTILMEYTGHYHYPVLKKLQDEGFPVCIVNPYQMKKYGDVEIHKAKTDKKDALRIAAYALEKSYKLVPYSSMEQKYEDLKFLSRQYSQRITYVAKLKVQLIALLDQTMPGIARILPLNSRNPEKCALLLFIKRFKSFDEIQRIGKARFLASYDVLAKKASERSASSKGLSIYELAVDSITTRGENPYIWLSQNQCVDLLSATQNAADEIISQMRNIAETIPEYKVLRAMRGVGDRLGPIILAEIGDIRRFHSGKALNSYAGNDAPPYQSGQFESRNRHISKRGSSTLRKACYEVMQALKLTKPQDDPVYLFMLKKEQEGKPFNVAKMAGVNKFLRIYYARAMELYK

SEQ ID NO: 427009 - protein, 354 aa, unidentified
MPGIALTRHDVIIGVDTHKDQHVAVAIDGLGGQIGDSRQVAANPDGYAELLTWACSLGNLHAFGVEGCGSYGLGLARFLRRHEYVVREVARPPRKGQRRLAGKSDPIDAEHAARTVLSGTGTATPKLACGQIEAMRLIKIARDSAVKARTTTIISLRAVLVTASDELRLELEPLSEHKLVLACAALEVGDNLANPRVAMRHTLSYLAGRWLALHEEIKVHTTHLKTLTKAAAPQMLERPGVGFDSTAEMLIAAGDNTDRIRSEAAFAKLCGVCPIPTGSGKTSGRHRLNCGGNRRANAALYRVVLVRMRWHAPTIAYVERRTLEGLSKKDIIRCLKRFVAREFYQLLPTVSENP

SEQ ID NO: 427010 - protein, 328 aa, unidentified
MNSCPTAVIFGADVSSTEIVTACADNKQAVKKIANQVQPIKTWLKQLPKDAVIGMEATGRYHALLADCAVEQGLRVYVINPKHLSQYAKGVGQRGKTDPLDARVIARYVAREGDMLHPYTAPTTTQRTLRNLLSQRAGIVKHCSAIRQCLVATELLGNAKLKRAQKSALLSLKKLITVIDTQLQAEVKQDAALAQKCTRLQTITGIGLLNGLALTHRLDRTPFANSDALVAAYGLDPRPKESGSKVGKRQLTKQGNAEDRRLIYLAAQSAAKTQTFKPLYLSLREKGFATTEAIVIIARKLLRIAFAVWKTNQPFDPNKLAFRAGGKP

SEQ ID NO: 427011 - protein, 342 aa, unidentified
MRIIGCDLHAGQQSIAILDDETGETTEATLKHEGDTVRNFYAALPRPVMVGIQATRSMGWFLKLMEDLGIPCYVGHPATIRAAEPRRQKHDRRDAVLLRDLLAEHRFPSIWQPSTELRDLRALLLHRHEWVRMRTRVRNALQSIALAHGIRRRAGLWSRNGQATLRALPLAPHAADRRAALQMLHVELMRHIQKLDQRVSTHAQSWPQACRLMTHPGVGPVTALATEVFVGDPSRFRDSKALASYVGMIPSEYSSGPRQRLGRLTKQGNRFLRFLWCEAGQQAARYETGLRRFYRRKLQQKGVGKARVAVGRKLGIRLWILLRDQIDYPEFCRRASSRATAS

SEQ ID NO: 427012 - protein, 378 aa, unidentified
MTATTHPTQSTGSQTLFLSLELSKSTWRVTSSLGPGVAPRERRIVAGSAAAFIAELAHAKRRFGLPAEAPVRSCYEAGRDGFWVHRWLTHLGVDNVIVDSSSIEVPRRARRAKTDQIDGRKLLALLLRVAGGERGVWKVVRVPSEAEEDRRHLARTLRTVKSDRTRTINRIRGLLATHGVTVGGALIRCAVTHVRDWNGQPLLPGLQRRLARECDHLAQLTAQLRACDVEQRAAVRCQHDIAAEQARRLRQLKGVGWNAAWLYATEIFSWRTIRNGRELGALAGLVAAPYQSGATHRTPGITKAGHRQWRTMAVQLAWGWLRYQPTSALTRWYLARFHASGPRAHRIGIVALARKLLIALWRYVDQRIVPDGAQLKTT

SEQ ID NO: 427013 - protein, 391 aa, unidentified
MIYAGIDVAKDKHDCFITNSVGEVLFKSFTIPNNREGFETLFQKIQSVSDDLTKVKVGLEATGHYSYNLLGFLLDKGLPTYVINPLHTNLYRKSLSLRKTKTDKVDAHTIASMIMSDVNLKSYSDTSYHNEELKSLTRYRFDKVKARAKLKSSVSRLVCILFPELEKLVPTLHMVSVYSLLSEFPSAHAIASAHLTRLTNLLSESSRGRYGKDTAICFRDAARSSIGSHIPAKSLELKHTIRLILELTSEIDEIEAEIKTIMDEINSPILTIPGINYKMGAMIIAEIGDFSRFDSPDKILAYAGMSPSIYQSGQLDNCYAHMEKRGSRYLRYALYNATKYVCHWDESFGTYLAKKRAEGKHYNVALSHATKKLVRTIYAMEKSGQAYTNAA

SEQ ID NO: 427014 - protein, 331 aa, unidentified
MAGLNNVGVDVGARELVVSIDRNEMRESGVVFTNDADGHRKLIRWATKKGARAQFVLESTGVYGLDLAFALHRAKRVVVMVANPRAISAFAKASLQRSKTDALDAETILEFSMRMPFVAWNPPAPSILELRALSRRIEAMSKTVTQEKNRLHASQQSKELSDFVKEDIRELVELLKGRIGRLRKQALLVIEQDPELAKAFGHITSIKGIADAAGIQLLAELATLPKDMTTRQWVAHAGLDPRQHQSGTSVHKPARISKIGNAHLRRALFLPAMVASRWEPNVKAFYEKLLAKGKAKMQALVAVMRKILHSIHGMLEHDQDFDGEKFFVVKG

SEQ ID NO: 427015 - protein, 369 aa, unidentified
MDHYSVAYVGFDTSKTKHAVAVAESGREGEVRYLGAIEASPAAVEQLLRKLERKYKALHVCYEAGPTGYGLYRHIRALGHACDVIAPSLVPTRPGDRVKTNRRDAVTLARLLRAGELTPIWVPDEVHEAVRDLVRAREAAAQDLRHKRQQVLSFLLRHGRIFTGHRHWSRAHLRWLAGQAFNHPAQQIVFQDQVDAVADAQARLERLDRQLAELVPTWSMAPVVAACQAMRGVSFLVAVTFVAEIGDVRRFESPRQLMAFLGLVPCERSTGDTVRRGGLTLAGSRRVRRALVEGAWSYRHPARITERIRSRLEGLPKAVREIAWKAQVRLSARYRRLIAAGKRAPVAIAAIAREMAAFLWAIGRVVEPA

SEQ ID NO: 427016 - protein, 355 aa, unidentified
MDNKKYIGMDVHQATISAAVRDASGKLVMESIVETKAATILEFIQGIHGSLWVTFEEGTSAAWLYDLLHPHVAQVVVCDPRRNALLKAGNKNDRVDARKLSDLLRAGLLTPVYHGQSGVRTLRELARSYLTVTKDATRVMNRLKGLYRSWAIPCGGDKVYSVRHRNAWLEKLSEPGVRRRAEWLYQQLDILLDLRREARRELLTESQKHPAHQLLRQIPRLGPIRVALIIALLQTPHRFRTKRQLWAYCGLALQTHSSGEYRVTGGRVQYTKRAPALRGLNANHNHDLKNVFKSAATQASASGDPLGDFYQNLLAGGMRPAMARLTLARKIAAIALKLWKKGERFDPGQLKRKCA

SEQ ID NO: 427017 - protein, 341 aa, unidentified
MKNLFIGVDFSKEKVDVAIIFADGLTETAARVFNEFKTTVSGYKQLVKWVEQNSYGIDSSLWLFCGENTGDYSKGLCNFLYGKGYDMWLENAKSIKDASGLRRLKSDRADASMIAEYAMRNYDKAVMYEPLSESLAQLRELFLYRQMVVRHRCSFQVRRGEKRLTMEKSPIKTMISQSGRHIVSELNKEVEKIEKRIAELIKSDEELTEVFTIVTSVPGIGTQNAVCLMVYTDNFRRFNYDSRKIACYYGIAPFGKDSGTSVHSDPRVHYMANRQIKAMLTQAALAAVNFNPIMARYYMRLVERGKKKQVALNNVKNKLVHLITAMVRNRQLFTTEYKITA

SEQ ID NO: 427018 - protein, 350 aa, unidentified
MTPILAMDLGKFKTVVCSYDPACPESARFRTVPTNVETLEKLLGTVQPGLVVFETCTIAGWVHEVCERLSVPCLVANPNGEAWRWKNVKRKTDRDDALKLARLAAGDELAVVTMPCTVVRQKRALLKYRQAVIGQRVAVQNHLRHLVEAQGRRLAPGYKAWTQIGLAVLSDWARPLTDCSEEELWRGQLHQALLWFRHLDEQEAALRIQLERLAETDAAIRRLRTIPGVGRRIAEVVVNYLPDPKRFRNAAEVSAYAGFVPRQYQSGEKDRRGRISKRGPALLRKMLVEGAWGLLRFNAWAARLFERLTKGQKTRRKVAIVAVARKLLVHCWALLRHGTDWCEPAVALGS

SEQ ID NO: 427019 - protein, 484 aa, unidentified
MAARKNTKKNTKKDAASGSLTASPRPGNDGAEVAEEHVEVVTYAAAIDVAKGSGMVCARVPGSRPDRRRQTVWQAGATYASVVALMDHLRCQGIQRLVLESTSDYWRIWYYLAEAAGLEVWLVNARDVKHLPGRGKSDREDCVWLCKLNERGMLRRSFVPPQATRDLRSLTRTRSRLAQDQVRHQNRAEKILEDALLKISVVISDLFGASGRRFLDALVAGERSPAALAALGDRRLRATPAELAAALTGRFREVHAFEIATHLRLIDTINDEIARLDARIEQQLTSIPGVAPACTGCGLIGGGHAPGCASDAAPVLGLVARLDEITGVGVRNAQVLIAELGTDMSVFPTPGHAAAWARLTSRTLQSGTTTKNGRTGKGNPYLRAALGQCVMATARTDTRLGEQYRRIARRRGKQKAIIAVSRVICEIACILIADPAARFAELGAGYYSSGNPQRQTRSRIRELERLNPGMKVTLTPIEPATAAA

SEQ ID NO: 427020 - protein, 413 aa, unidentified
MNFIGVDLHKKSITVCVMDQNRKVLARRTIPCTETNKIVDFFRKFRPFKVVVEATASYPWFVELVESMADEVILANPKKLRVIAESTKKTDRLDAQILAEFLVLDMIPRAYQPTPRQRQHRALVRHRQYLQGRITSVRSKIRHILSNYNADRKDLFSTKCGPAYFKEVPLSDADRFVIKQLWALWQEFVAQREALTKKIKAFVAKAPQREAEDRALLKTAPGVGFVTAEVVLSELGDYGRFRNSKAVSAYAGLAPAVRQSGDKRSKDMRITKEGSGLLRWALVESAWRLVGTSPKWSAMYARLKQRKGSKRAIVAVARKLLCVLYAMLRTRTPYKIVATETKAAQKTRKRLVLVRTSTAEQTRTTETATARTTRKRSAKAPVVEQTTITQAAVPRVTRRRSSRTLAPKQTTTA

SEQ ID NO: 427021 - protein, 386 aa, unidentified
MIVIGADTHKGSHALAAVDDGTGKVRGSRQIKAEEPGHLAAVRWARELDEERVWAIEDCRSCSRRLEQALLAAGERVVRVPPNRMGASRKGEREPGKSDEIDALAVARAVVKDGVERFPVAYLNEQAMEIRLLVEHRNDLVAERTRTVNRLRWHLLELSPELEASLKRKALNQPRTLDRVERQLRKLPAGARVRIAREQISNLRGLNRDIERLAAELAELVTAHRPRLLAEQGCGALTAAILIGHTAGNERFRSEAAFALQTGTAPIPCSSGKRTQHRLNRGGDRQLNHALHIIAVTRAQHDPATKEYLARKEAEGKTKKGALRSLKRHLARRFHQLLSEPPADQQPTPEPAPIIEPKLPSIPDRPKPRREVEQIAAAPSPMVCIS

SEQ ID NO: 427022 - protein, 441 aa, unidentified
MNVAFRKVEHAEQTITPQVRCCVHLEVDIVKPILESCCGLDVHRDQVTACIASGPLDRAKEKLVVKEFSTMTYGLRELSSWLKEYDVETVAMESTGVFWKPIFNILEDDFEVLLANAARVKNVPGLKTDKKDARWIARLLRYGLVPASFIPPRNIRDLRDLTRTRKKLTEEGTRRKNRIHKILQDANIKLSSVATDVFGVSGKAMIMALLNEDEPSPEEIESMTKGKLRNKIGLLIKAMDGRVTDHHRFLLKMHIEHIESLSSQIDELDEEIYRKLEPYEKEFRLIRTHPAINKVTGASVIAEIGVDMSQFPDERHLSSWAAICSGNNESAGKMKNSRTRRGNNYLKTTLVEAAWVASRTKDTCISAKYYNIARRRGSKRAAVAIGHQILKDVYYILSTGEPYKEIGAEAAQNRKSEMRERSIIRELERRGYSVQKTETSA

SEQ ID NO: 427023 - protein, 462 aa, unidentified
MRIIGLDLALTSEHKAIVMDEQGRFLTPILRLNTTAEDLEKLFARARAGAAPDEPLVVIMEPTGMAWFPVAVFCERQSVTAYLVNSQQVADLRRYYQKHAKSDRIDARVLAKLYVVSREKLHPLHLATAQSLACQRGCKELDRLMTQCVAIQNRVQALDGFAWPGLAPVFPDPFCDHARWFRNHWYQPQTVCAAGAAALEQAWQAASGESDTPKPPTDWAAQLVTLAQRTLALYGSEAAHLDYAALHAEVQRQQARLAELEQQHHTLQLKTVRPLYRQLHPSRNLETLYGVGQDGAAVYVSFIGDPHRFADHGHFRSWSGIIPNSRQSGAHEVKGLHITQAGPNLIKKFAYIGAETARQYDPQIAAIYYAQMVKYGKHHSQAVCACATHLLDRIWTILREDRPYQMRDVDGTPVTPAHARTIIAERYTVPKAVRERNNQRARRARAEQRAERKEQRESRPGQ

SEQ ID NO: 427024 - protein, 341 aa, unidentified
MNQLNIVAIDLAKHVFQVCTVSPHNKVLGNKQLSRSKLAASLANISPAIVAMEACYSSHYWARTFQAMGHEVKLIPAQHVKPFVRGNKNDRNDALAIAEAFKRPDLRFVPIKTVEQQDIQSLHRIRDRLSQQRVALMNQTRGLLSEYGLIAAPGFKAFRELVTSAIDPANQGLSPVIKQEMNQVLEDFHHYTAQIKKTNRQLIQLANQHELCRILLSLPGIGVINATGLYSAIGDGSQFAHPRDLAVWLGLTPRQFSSGGKSFNGAITKRGNRYLRKQLIHGARAVVHRCARKDDKLSLWVNQLVARRGANKAAVALASRLARLAWILLQRRQCYEPQFSG

SEQ ID NO: 427025 - protein, 378 aa, unidentified
MKRILKIGMDVHTTNYTLCAMEPIIGEDDRVFATIKVTPDYKNILMFIENLKLKLGLNDEYDIQCGYEAGCLGYSLYNQLTAAGIKCVILAPTTMLTPQGVRIKTDMRDAYMIAQCLSYGGYHAVYIPTEDDDSVKEYLRMRNDHKLALKKIKQQINAFCIRHGFCYDGTKWTLSHLKWLKKLEITNGLYRETLDEYMASYEEQEAKIERYDKRIGEIAEQTRYHDKVKKLGCFLGIKTHTALSLIVETGDFERFAKGNQYASYLGLAPGENSSSDNIHRLGITKAGNSHLRQLLIEASGGICKGAVGHKSKELRARQNGNTAEVIAYADKANTRLRSRYYKFIRHGKKRNVAVAAIARELACFVWGMMTDNIEIKAA

SEQ ID NO: 427026 - protein, 416 aa, unidentified
MKKHNYRTKKVNEINWPELSRQLGGEAVTIAVDVAKAQQFALLTNGGQSLSILVKWALFETTDLIYELKQLNCPVTVVMESTGTYGDAMRHQFRQAGFAIWQASAKRVHDAKEIIDGVPSLHDAKAACLIAKLHQDGLTKPWHELDEAGRALNAARREYDMHQSQYERNQNRLEAYLSRHWPEALALFDLDSVTLEKLLITYGSPQAIAADTGQATRHMKAWGGHLPSGAHVLKPEKIARIIDSAISTIGQPCIEAERRYLQALAAEMQHSRCQSQAAKQLLEASVEADAGLKEMAALIGKLTTAILIGLHLDPRKFSSAHSFLKALGLNLTEKSSGQYHGQLKISKRGSATARKYLYLAALRLIRKDPVIAEWYQGKADPKLKMKTVIACLRKLAKALWHVARGERFDARKLVTL

SEQ ID NO: 427027 - protein, 372 aa, unidentified
MNYNTVYVGMDVHKESFTFCAYTIDAEKGSHFQRTEADYKNVLKYLEFLRTVYGNDANFICGYEAGCLGYTLYHQLIEHHVNCVILAPTTMLEQRSKKRIKTDKRDAEIIAKCLAQHNYSPVHIPTAADEETKEFLRMRDDHKLALKKVKQQILAFCLRHNYRYDGNSHWTAAHIKWLKSLKPEALYKEILDEYLLTYTTLSDKLERLDKRIEELASKDEYRESVKKLCCFIGIKTHTALSVLVEVGDFHRFASAQNFASYLGLVPGEDSSGDGQTRLGITKAGNRHVRMLLTEASQCYARGQIGFKSKELKSRQAGNSPQVIAYADKANERLRRRYYKMVLGKSKKHNVAKTAIARELACFMWGMMTDHIT

SEQ ID NO: 427028 - protein, 344 aa, unidentified
MMIIGCDFHPGWQQIAFVDTQTGETGERKLMHGNGEAERFYRGLCGQVRIGLESCGNSHWFLDMVTDLGHEVWVGDAARIRAKEVRKQKTDRRDAALILELLMKDDFPRIWTPSKQERDQRQLLIHRYKLVMLRARVKNELQHLAMNQGMQKGRALWSKEGQKLLEQVRLDYWAGVRRKNLLDMLKGMDQQITVLDQAVKKAAEENEKARLLMTQPGVGPVTSLAYVLTMGDVARFHRGKKVASYLGLIPREYSSAGKQRFGAISKQGNRFMRMLLVESAQVAVRYDPGFRSEYLHLCHSKPKAVAKVAAARKLAIRLFWMLRTNTPYPEIVPIESSSRVPLAG

SEQ ID NO: 427029 - protein, 402 aa, unidentified
MNCVGIDVSKGKSMIAVMRPFGEVVVSPFEVCHTASELSELARLLKSLDGETRVVMESTGNYHAPVAWLLHGAGFYVSVVNAMLVHDYGNNSLRRGKTDKKDAVKLANYGLDHWLTLPRYVPEEDARLMLKTCYRQYQQYSKVQTMLKNNLISLLDTAFPDANRLFTSPPRADGSEKWVDFVATFWHCECVCGLSKKAFTAKYQKWCRKHGYNFSQDKALDIYASACGRFGVMPKTNTAKLLVEQAISQLQTTSAALVALKQEMQSLAASLPEYPVVMEMFGVGSTLGPQLIAEIGDVRRFHSKKALVAFAGIDAPPYQSGQIDVRSRSISKRGSASLRRTLFLVMGVLLQCAPMDEPVYQFMNKKRSEGKPYRVYMMASANKFLRIYYASVKAYLDSLEHD

SEQ ID NO: 427030 - protein, 343 aa, unidentified
MQTVTTIGLDIAKSVFQVHGVDAAGQVLIRRQLKRRTVLAFFEKLPPCLVGIEACASSHHWSRELQALGHNVRLMPPAYVKPYVKRQKNDATDAEAICEAVTRANMRFVATKTPEQQSCLTLHRTRHLLIRQQTSVINAIRAHLAEFGIVAPIGRNGVEQLLGVVADANDKRLPEVARACVAALGVQLRMLKAQILEFDRMISAWHRSNETSRRLDKAPGIGPVLATALVATVADPRTFRSGRNFSAWIGLVPKQHSSGGKDRFGHISKQGDRYLRGLFVAGALAVIRYAKIHGTKHRPWLTALLTRRPTKIAAIALANKIARMAWAMMVKGEHYKEPVALAA

SEQ ID NO: 427031 - protein, 420 aa, unidentified
MTYIRIAGIDVHKKMLAVVVATGADDGSIRFQRRKFDNHQTDIHRMRDWFSACGVSEVVMESTAQYWRTIWLELEEMFSLHLAQAMSNRAPRGRKSDFADAERLVRRLVADELVLSYVPDREQRLWRLLAREKHLARRARVQQINGLEAFLEQIRIKLSSVLSDLSGVSAQRILRALASGVSDPAQLAALADPGVTATTEQIRGALASAAQLRTEERAVLKQMLDRMDLLAKQIEETDQLLATCLSQYEDAVARLSAIAGLGADSAQQMIAEIGPKAEAFPSPAQLASWIGVCPGREESAGVSKSDRSPKGNRPMRRLLAQCANAAVKAKGSAFELFYRRKVARLGHNKTLWAVAHKLCRIVWKVLHEGVCYEERGPRLHSKQEAKQLQRLKRTLRLLGYDPNSLRKLDPGILPPQPSTA

SEQ ID NO: 427032 - protein, 339 aa, unidentified
MKITTIGIDLAKQSYSVHGVDALGKVALRKTLSRTKLLELMAQLEPCLVGMEACGGAHEMARRLMAMGHTVRLMAAKFVHPYRKSQKNDGNDAEAICEAVGRPSMRFVPVKSIEQQSLLTVHRVRGELVQARTALINQLRGLLLEFGVAMPKGRYQFRAHVGRWLIDERIPSLAREVLSELNARIGSLDHDILGYDRRLEAIARASEPVQRIMAIGGVGPISATAMVASIADAKLFRNGRELAAWLGLVPRQYSTGGKPRLGRITKRGDVYLRTLLVHGARAALTMMARRNDRLAQWARALIARRGFKKACVALAAKNARTIWALLAKGEAYRKPEARA

SEQ ID NO: 427033 - protein, 321 aa, unidentified
MNKNTEIFGIDISKDVFDVYGLELGHHQFANNEKGFKQFIKKLSKDSLVVMEATGYYHYCLAQYLYEKGYVVSVVNPLSVKRFIQMKLSKVKTDKSDARSICEYALNNDVPLYTAKDKSQAECLQLLRLMDTHLKHRTTMKNKLDGEQVLGIPSKAVYRSLSRAVKQLNKELALLEARLIALVKEEQQEQLRLLKTIPGIGEKAAILLVVFTDGFSKFENSKQLCCYAGITPTIRQSGSSVRGRSRISKIGNRKLRNQLFLSSFTACQYNKACRELYERIVAQGKSKKLAMLAVCNKLLKQAFAIAKSGMPYNENFVSKLV

SEQ ID NO: 427034 - protein, 413 aa, unidentified
MAMFCGIDWAEDHHDIALVDHDGTLVAKRRIDDDAAGFAALLHLLVEAGDSPDDPIPVAIETSHGLLVACLRTTGRPVFPINPMSVSRYRDRHSVARRKSDAGDAFVLANILRTDLAAHRPLPEDSELAQAIAVLARAQQDAVWQRTDAHNKLRSLLREFYPAILAAFASKRGGLLRAEARALLAAAPTPHAAARLTKSQLRALLRRAGLQRGIDAEADRLHQVLRADYLHHPPMVEEAFGRQAIALLRQLDTACANADDLAAATAEQFTQHPDAAIITSLPGLAALTGARVLAEIGDDRARFADARGLKAYAGSAPVTRASGKTTAVLHRRVKNQRLASVGYSWAFAALTASPGARAHYDRRKSAGDRHIAAQRNLFNRLLGCLHHCLHTRQTYNESIAFPTTSNTAVEKAA

SEQ ID NO: 427035 - protein, 346 aa, unidentified
MKRYLGIDMHRESCTVVVLSAGGKETDQRVVPTEAAALVQYVRSLSGELHICVEEGEWSEWLVELLSPRVHRVVSCTARGRRGPRSDAKDARELAERLRTRQTGPPVYKPLAAQWGRLREAVRLESKLLGDEVRAKQRLKSLYRRRGVACVNAEVYSPRLRGEWEKKLPPSLRPSAELLGQELDQLAELQHIAEQQMCDAAGKFPMWRKLQTVPGIGQKRAAQLLAIVVTPHRFRTKRRFWSYCGLGVVTRSTSDWVRQADGQMLRVPVIQTRGLNKASNRQLKGIFVGAARTALSCRPPNPLLEAYERIVESGTKPNLARLTIARKIAAVVLAMWKTESEYRIMN

SEQ ID NO: 427036 - protein, 395 aa, unidentified
MYRDDRVAKVGLDSHRTFSSVTARDAAGKVVWRKRLEHADRGPLREELRTWPEGTPVVLEGTFGWGWWSDELSAAGLEPHLASSRKVAAWRDARGLAKSNRTDADLLSELWSQQPRWWEVWLAPPEVRSQREWLRYRMTLVRLQTGLKNRIHAILHRHGIVHGESDLFGTAGRRFLSLLVATNDATLPDSGRAMLKGYLQLLDQLRRQIANVTREVRGQITRTPAGERLRTLPGIDYILSYTILAEVGRIERFHSAKHLASYSLLAPRAYDSGDDDGEAPKGRHVGHAGRRTLKWAWIEAAHGAVRSGGRFREIFDRRTHGGKRDRNRGYIAVGHELCRIAYILWTKEIDYTETPPPRPGRGKRRRGYRPAAKGIPGRSRPGTGQPEHPMVAVLM

SEQ ID NO: 427037 - protein, 421 aa, unidentified
MQEEASTFAAFVGVDWADRKHDICLQIPGFDTTELSVLEHRPKVIQEWALKLRERFQGKPIAVCLELSQGPIVSALLEHDIFVIFPVNPSTLAKYRRAFTPSRAKDDPTDAAIALELLRRHRDKLKPLCRESADMRVLRRLVEARRALVQDRVRITNRLTFALKAYFPQVLDWFRDKETDVFAAFLERWPSLLDAQRARRETVVSFFHAHRVRRATVIDRRIEAIASERPLTSDPAVIEPSRLFVQTLLPQLRAISAGVAKLDAEIQKRCERLPDRSLFADLPGAGPVFSSRLLAAFGEQRDRFADAAAFQKYVGIAPVTERSGNKHWVHWRWSCPTFLRQTFVEWVASSVPHSFWARAFYESHKAKGASHNATIRALAFKWIRILFRCWIDRTPYDESRYLTALQKRQSPLLKFAAQPPS

SEQ ID NO: 427038 - protein, 465 aa, unidentified
MIRGTESALMKYPHRWDEKVDPRSRIALSYRDQRTLPGAITMDKEIDPLKKNSKSPLKKEPKAKPARAKRPVQPETKDVLAELVEKLRGKLEPKSAPPSPGKAGQRPELRPNIDRLTVGVDLGDQWSRYCILDLQGETLREGPLRTRQAELAEFFHALPPARVVIEVGTHSAWVQEVIAGEGHEVLVANPRLMDGSKRRKRKSDRIDAHKLARLGRVDPQSLHPITHRSREVRQDLVLLRARDTLVEARTQLINAARGLVKSLGTRLPPCSSRSFGHKVGDAIPAEAREALLPLVQLADEMSACIKVYDRRIEELASEKYGHTELLRQVKGVGSLTSLAYVLTLETPERFPKSRDVGPYVGLVPKQEDSGESQPQLGISKAGDTMLRKLLVGSAHYILGPFGPDTDLRRYGLRLCERGGKKAKKRAAVAVARKLAVLLHRLWVSGEVYEPLGYASTAAMAQKAAA

SEQ ID NO: 427039 - protein, 361 aa, unidentified
MIVIGADVHKSTHALAAVDAGTGQLLGEREIPAKEQGHLEALRWAQTLGQETVWAIEDCRDLSHHFEQALIAAGERVLRVAPKLMGVSRRGEREPGKSDQIDARAIARAVLRDGIERFPTAYLDEDAVEIRLLCDHRDVLVNERTRLINRLRINLVMLAPELEAEIPSRKLDYPGQLSRITRRLRAMPQSARVRIAREQTLRIGALTREAEQLKRELRDLIRVQRPELLAETGCGPLTAAILIGQTAGAERFKSDAHFARLAGVAPIPVSSGRHDRHRLDRGGNRQINRALHVIAITRGRLDPATRAYLKRKEAEGKTRMEAIRCLKRHLARHYYRMLSRSPTPMTVRPTIPISSAISLPV

SEQ ID NO: 427040 - protein, 403 aa, unidentified
MNSVGIDISKGRSTIAVMRPFGEVVISPFEIRHTGSELSKLAKQLKSLDGETRVVMEATGNYHASVAKLLHNAGLYVSVINAKLVHGYGNNELRRVKTDRKDAVKPANYGLDRWLTLPRYIPEEDTRLLLKNCYRQYRQYSKVQTVLKNNLISLLDTVFPNANRLFSSPIRGDGSEKWVDFVAEFWHCRCASEKSERAFTSKYLRWCRKHGYNFREAKAHTIYAEASGHIGVMPKSETTKLLVKQAVSQLRATSTALAALKQEMQSLASVLPEYPVVMDLFDVGPTLGPQLIAEIGDVRRFYSKKALVAYAGLDAPPNDSGDVTGRHKSMSKIGASSLRRTLFLVMSVYLQTAPLDEPVCQFMDRKRAEGKLYRVYMMASANKFLRIYYATVKAYLESLEHTA

SEQ ID NO: 427041 - protein, 303 aa, unidentified
MNVIGFDVSKDTIDATLITTKGSKDYIKIANNTEGFENLINWIKTKRIRKIAISMEATGIYYEQAAEYLSALYTIFVINPLKIKEYAKSQFSHTKTDKADSKLIAEFANRHLDKLTPFRPSENPILYKLINLLQQLKEQKKETQNRLHTAKDIYIKSTHEAIIELLEEKIDQTSKRIEGMIKQKESLNIEYQNLQTIPAIGKETAVILLRHLTDKNFETANKFVAFAGLSPKIEQSGTSVNKKGRLSRYGHRQLKRALFMPALVAYRMNAFPQLVRNLEAAKKPKMIIIVAQKPFDKARHQTV

SEQ ID NO: 427042 - protein, 318 aa, unidentified
MTNITYQFNIGIDIAKQKFDVSFSDQKVASFENNLAGFKLLLKEIKDKSQTRVVMEATGGYEKPLAHFLQAQGVAVSIVNAKRVRDYAKALGRLAKNDVIDAQVIRLFADAVNPKLLPTASETQQALDAQVHRREQLVKQRAMEKQHLETVGNKDAVRSIKRTIAFLDKEIKRIEKALKALIKADSTLTEKVDRLSGVKGIGDITALTLIADLPELGQLTNKEISALVGVAPFCRDSGTLKGKRTTWGGRAQVRSILYMAVLSAVQYNPPLKAFYNRLLMKGKTKKVALVACMRKLLIVANSMLRNNTEWNPNHGKLT

SEQ ID NO: 427043 - protein, 356 aa, unidentified
MKKQTQNQTVIGIELGDKKHLICVTGKGAEILKEYELANRRQDLERLAKEYPKARVALEVGTHSPWISRLLQKAGLEVWVANPRKVRAIYENTRKCDRLDARMLAKIARLDPELLAPVRHGSEQSQTDLLPIKLRDTLVRQHVAIISSIRACLKALGLRLEAASSSSFVRKAQEALQQERPDLLGLVAPALSALEALNTQIKLLEQAISQTARSYAPVQKLQQIGGVGPLTALAYVLFIEDPGRFANPRDVGAYLGLVPRRDQSGGSDKQLPISKAGNRYLRCLLVQCAQYVLGRFGPDCDLRRHGLRLAARGGRAAKKKAVIAVARKLAVLMLTLWRKDCGYQPLWAERPAPQAA

SEQ ID NO: 427044 - protein, 403 aa, unidentified
MNSVGIDISKGRSTVAVMRPFGEVVISPFEVRHTDSELSELARQLKSLNGETRVVMEATGNYHASVAKLLHDAGLYVSVVNAKLVHDYGNNELRRVKTDRKDAVKLANYGLDRWLTLPRYVPEEDTRLLLKNCYRQYRQYSKVQTVLKNNLISLLDTVFPNVNRLFSSPARADGSEKWVDFVAKFWHCECICERSEKAFVSKYQKWCKKHGYNFGEEKACAIYAEASGHIGVMPKSETTKLLVQQAVSQLRATSAALAALKLEMQSLASVLPEYPAVMDMFGVGPTLGPQLIAEIGDVRRFYSKKALVAYAGLDAPPNDSGDVTGRHKSMSKIGASSLRRTLFLVMSVYLQNAPLDEPVYQFMDKKRAEGKPYRVYMMASANKFLRIYYATVKAYLESLEHTA

SEQ ID NO: 427045 - protein, 342 aa, unidentified
MYYIGLDVHKKTISYCVKDASGQIHQEGKVGATRRELDSWIKTLPQPRTMAMEATIFTGWIYDHLLPHAQQVKVAHPLMLRAIAAAKKKNDRIDASKIADCLRCDFLPECHMASTQIRDRRRTLRYRHLLVRQMVQMKNRISGLLMETGVSYNKQRLHKVGYFRELLSTNEDVHESIRPLLKLSRDSVVRLQKTEYALVSSLQRDALLTDRIKRLRTVPGVGPITALTWAVEIGDVARFRSIRQAISYCGLCGEEKSSADKVMRTPLSKQRNKHIQRVLVEAAKLAPRQDHDLALVYETEKQKGNANRATLAVARKMVAYLLAVDRGKRDFVPAEDYPRAAA

SEQ ID NO: 427046 - protein, 319 aa, unidentified
METILHNCCGLDIHKESVYACIIKTKVTTNTNSKKEDYDKEFRVFEAFPESLRELKNWLITENCQHVAMESTGVYWHPVYNELETSFDGNIELLVANARHLRNVRGKKTDMKDSEWIALLYRAGLLNGSFIPPQEIRDFRKLARYRKNIVSDISKQKNRIEKLLQSAGFKLSSFLSDIFGVSGRNLINVLIKNGVLSESAVDIGAKHISAEKRHEIKRLLTSQLNKHERDFLKLQIKHLDQLQAHLDSVEKSIEKHAANFKDEIERLDSIPGIAKTAATAIIAEIGVDMSKFPTVEQFCKWAGLTPGNNESAGKKKVQE

SEQ ID NO: 427047 - protein, 407 aa, unidentified
MRLFAGDDWAEDHHDIEVMDEAGKVLVKRRLPEGAAGMTQLHALIGRFLPEDADDAEVVIGIETDRGPWVAALVAAGYVVFPVNPLQASRYRERHGVSGAKSDGGDAHMLADMVRTDSHQLRPAAGDSPEGQGIKVVARAHKTMIWDRTRATQRLRSQLREYVPAALAAFEDLDAPDVLELLGKAPDPDRARRLTRAQVAAALKRARRRDIAGKTDAILAALRGEHLGQPAALTAAYAATARSLIAVITTLNAQVKILEDQVRDHFGRHPDAEIYLSQPGIGAILGARVLGEFGDDPCRYVSAKARKNYGGTSPITRASGKKKVVAARFIHNDRLIDALMSWAFASLNASPGARAFYDEQRAKGLDHNDALRRLANRLVGILHGCLKTRTPYDEATAWSHRESSLAA

SEQ ID NO: 427048 - protein, 435 aa, unidentified
MSSKAYRATRVNEVNWEQIARGKEGLGVTVGIDVGKFDLSVICRWADGRFERPWRVRNPWEIPTLVGVLMQVKADRKLVVALEPSGTYGEALRQALGDNGIDVQRVGTKASHDYAEVFDGVPSQHDGKDAAVVAELAALDKAKPWTYQAADSWEEELAYWVEEMVAQRQMLTPWQGRLEGLLARHWPEASQVLKLSSGTLLRILKRYGTPQALAADACAATQLARWGRSLLSAAKIDKFLAGARSSVGVRAGPWERRQIQEYAERVLAARQQANRAQRRLRQLAEGHPVLEAQGKVVGVPTACVLWTSTGDPRHFDSAGAYRKAMGLNLAERSSGTYQGRLRISKRGRARARQWLYFAVLRLVQRCGVRPWYEAKKARHEGEARRVLVAVMRKLAVALYHVGVRNEGFHPRRLFGRIGRRSGRSARRSGASKQRA

SEQ ID NO: 427049 - protein, 337 aa, unidentified
MEYDHYIGLDWSQRVMAISRLGKTGGTPKTQEVDSSVRDLKTYLSGLRGKKILTLEESSASQWLYVELLDSVDELIVCDPYRNRLLSEGPKTDRLDAEKLCRLLRAGMLKPVFHTTDNFIEIRKLVSGYNDLIQAGVRLKNQRSALFLSKGKNAKTDELNSKFDQFVLDGLERGIEAYELEKERYEKAFLQLSKEHRFIKALQTIPGFGPINATKFAAIVVDPQRFQTRSGFLSYCGLIQLEKMSGGRSYGKKKSRYNRAMKAVIKSAAITAITGKNPFRNRYEFLLKEKNYPPHNARHAIARAIASVALAVMQKERDFDAGRFKCSQVTTTPIGIA

SEQ ID NO: 427050 - protein, 347 aa, unidentified
MVFYTKSHPYYCGIDLHARLLYVCILDQQGNKILHKKIKADSKQLLALLKPYIGQIVVGVECMHCWYWVSDFCRELKVDFILGHALYMKAIHGGKAKNDKIDSYKIASLMRGGNFPLAYNYPKEYRATRDLLRRRTHFMRHGASLKAHVVNTDSQYNLPAQSLNLKNVSAREGLRHYYDNPVIQRMITFEMNILDCYIRELKHVESFIEKEARDDFPALRYIIRTFPGIGQIIGLTILYEIGNIQRFSSVQKFASYSRLVKCKAESAGKTYGTSGNKIGNGYLKWAFSEAAVMYLRNNDKAKRYLTKLQKRMNKAKALSALAHKIGRCIFFMLRDKKVFDEDKFLKG

SEQ ID NO: 427051 - protein, 327 aa, unidentified
MKDSITVVGLDVHKNSIQIVTADTDGAMEVRHFGRIGGTMEALDRAVRKLVSKGSTLRFVYEAGPCGYEIYRHLTGKGFSCKVAAPSKTPKKSGDRIKNDRRDAETLARLERAGELTAIYVPREEDEAMRDLTRAREDAVKALRTARHQLNAFLLRYGKVYPGKASWTPSHMRWLSDVTLLHPSQQIVLQEYIMAVRVCTERETRLTDQIAKLLPAWRMFPVVKALQALRGVAPIVAATTLAEIGDMSRFQNPRQLMAYLGLVPSEDSSGESTHRGSITKTGNGHVRRALVEAAHAYGFPARVSRHLLKRQEGLCPSLSWILPGRLR

SEQ ID NO: 427052 - protein, 412 aa, unidentified
MEVLYRRVCGIDVHKRFLLACVLVLDHNDQLTKEVRRFETMFDDLLAMADWLIQHGVTHVAMESTGVYWKPVYNVLEGSCTVLVVNAQHIKAVPGRKTDVRDCEWIAQLLRHGLVRASFIPDQPQRELRELTRYRTALVRERTREVNRLHKTLEGANIKLGSVASDVLGKSGQAMLHALVTGLTDPAALAELAKGSLRQKLPALERALTGRFGAHQRLVVAEQLAHIDYLDETIARLSQEVQARLGPFEDLLARLDTIPGIGQLTAEALVAELGTDMSRFPTAKHLASWAGMCPGNDESAGKRRSGKTRKGNPWVRTLLIESAHAASRKKGTYLQAQYHRLAARLSKPKAAVAVGHSILVIVYHVLRDGGEYEDLGVQYFDERDRAATERRAVKRLEGLGYTVRLERLAQAA

SEQ ID NO: 427053 - protein, 475 aa, unidentified
MNVKGTKKKNQVVTANIFEQQEFLKKAEAIKESLTASTWRELETNGKFDKNEKLSFISDDMLILGCDVGSETHYMRAIDTRGRELSKSVYSFNNDSEGFQSAKEWAVQIAVEHNKSQIVLGLEPTGHYWFCLAAWMISNGISVVQVNPYAVKQTKEVEDNSQMKDDRKDPKLIANLVKDGNFGMPYLPEKLYAELRRLSMFRDQLNEDRTRTINRMHREMKIYFPEYKDALGKVDGAFSLELLRQAPFPDDLISLGEDGIRKIWHDARLRGRGYSRAGEILQYAKVSVGIKDGAIAGKAAVKWFVQKILELDAELAVIENQINQKCQEIPHAGNILEISGIGENILSGILAEMGDISRFDDVKEIQKLSGLGLVACSSGKHKGETRISHRGRKRLRYWLFQAAKSAVAHAEEFKELHIYYTTRADNPLKKMQSLIVIACKLLRIIYTILKKGMVYDPKKMLMDIRRVEKKEAIVA

SEQ ID NO: 427054 - protein, 360 aa, unidentified
MKLDAALDTSATTTAICIVNSRDGAVVLETTVPTDPDAIARALKPYLPRLHLVGHEATSWSAWLHRELESRGVSMVLLETHHTARMLEAQRNKTDKNDARGLAQLVRSGWFKPVHAKSDDSNRLKLLLAHRRTLKRKLMDIENEIRQSLKMFGLMAGKRVQRSTFPSRIRALVAGDALLEGSTDCMLRCWTVLWDEYHKLHALLVKLAGSDELLRRLCGIPGVGPVTAVTFKAAIDDPRRFAKSKTVGAHFGLTPKRLQSGTSVDVDGHISRRGDGQVRTALYEAASAMMTRSKQPSTLKAWGTQLAAKRGHKRAVVAVARKLAVVMHRMWIDGTTFRVSAADRDGERRIGTSAAVAHAA

SEQ ID NO: 427055 - protein, 431 aa, unidentified
MNCNTQNAKLGTITEKTLVVGIDVGSEMHYARAFDWRGYEYSTKAFQFSNTEAGFSSFYTWMQDIATENGKQEILPGMEPTGHYWWEIGKFLQDNGFRPVLVNPHHVKKSKELDDNNPSKNDRKDPKVIAGLINEGRFSYPYLPEGVYAELRSASNLRFQAQEELTRVMNRIARWFSIYFPEYKDVYGKSDAKSGLMILERAPLPADIKALGVDGVNQIWRDAKLRGAGLKRAKKLVEAAEHSIGSHEGLIAARMEIKNLMFDYQTYSQRLDELVELIDGLMAEIPYVDKVLKIKGVGIKTVSGFVAEVGDIRRFDNPKQIQKLAGYALVEDSSGKHQGETRISKRGRKRLRYLLFEVALSLVGKNDEFRELHYYYTHRAENPLKKKQSLIAIACKFLRVAYKILTTGVDYDAKKMLNDIKRPQKQLLQVA

SEQ ID NO: 427056 - protein, 384 aa, unidentified
MTEGRSANVEERQRARQTRRPEIHEIVPQLGRLASSVPSPNSCQSRHGGELASQGRAACRNSRRTGVGVSAEQQVHVGIDVSKASLDVAIEPSHERWQVSNDEQGIAQLIERLGPLEPERIVLEATGGYEVAVVAGLGCAELPVVAVNPRQVREFARAIGRLAKTDVLDAQLLAQFGARVKPVLRPLPDAATRELAGLLARRRQLIEMRTAETNRLQLAVEPVQAEIREHLRWLDKRIKQLDSDLHDRLRASPLWREKENLLRGIPGVGPVLTLTLLADLPEVGTISHARLAALVGVAPFNTDSGKRTGQRHIWGGRAAVRAVLYMATCTAVRHNPVLRALYQRLVATGKRKKVALVACMRKLLTICNAILTSGTPWRYLPLDN

SEQ ID NO: 427057 - protein, 310 aa, unidentified
MSGVNAAIEVGKHKLEIALGSAGELWSADNEARAIKGLVKRLVKAGCARVLIEGGSYQNVLVAALRSAELPVVIINPRRVREFAKSIGQLAKTDRIDARILALYGERVQPPLRELPDQQSQALRALSVRREQLIEMVVMEQNRLEHAPKALHHDLRAHIDYLRKQIKRADDDLDRAVRESSLWDKYELLSSVPGVGPVLSRALVSDLPELGRLNRGEIAALAGVAPFNQDSGTYRSQRKIEGGRPRLRRVLYVATVAAVRCNPVLKPFYQRLRTRGKSPKVALVAAMRRLLLILNAMLKTHSSWRPPCPA

SEQ ID NO: 427058 - protein, 466 aa, unidentified
MPIDKKQWQNRKERKELARRLRSEDPNLEVVHPHAAGVDVGNGAHYVAVRPDCDSQPVRRFECFTADLHRLAGWLQSCGVQTVALQSTGVYWIPLYDILEESGFEVYLVNARHTKNLPGRKSDVQESQWLLKLHTYGLLNNSFQPTSEIRVLRTYWRQRAEHARGIGTCILRMQKALTQMNLQLANVISDLSGVTGQKIVRAIVAGTRDPRKLAELSDPRIQASKEEIAKSLEGNWRQELLFVLKQEVEMYDTYQRRMVECDQQLQEHLTSFADTVAPQVKAGETQKKTAKQKNKNAPQFHLSGELHRITGVDLTRIDGIDVMVAQTLVSEVGLDMSRWKTEAHFASWLGLCPDNRISGDKVLSRGTRHVVNRAATALRIAATTLLRSQTYLGAQYRRLRSRLGAPKAITAMAHRLARLAYRMLKYGQQYIDRGAEYYEQRNRQQQIEFLRKKAAKLGLQVTAAHP

SEQ ID NO: 427059 - protein, 320 aa, unidentified
MSCVSEPSAVYGVDIGKAEITVCRDGHEAVQAKANQMRALSCWLRELPAGALLVMEATNTYHELLATLAAAQGLQVVVLDPRRSWHYARAIGQRGKADRPDARLLARYGAHEWRKLRPWRPPTEGNARLAKLLARRAKLMRAKVALGQSLSTVAELRALCAQTQRALQRMIERLDLLIVKAAQAAEFAPLHRLLQSIVGVGPLVAAQLAQALTRMPWERCESFIAHTGLDPRPQDSGKHRGRRRITKHGPPMLRHLLYLAAMSASKTTLWKPVYKALRDRGLESTEALVVLARRIARIAFAISRSGQPFDPKFLKQAGAA

SEQ ID NO: 427060 - protein, 331 aa, unidentified
MTQEYIGVDLHKAFFQACALTPTGERLWEGRFPRTADGIARFVARGVDAQRAIAVEASGPTWAFVDALTPTGAMVCVVDPRKTKLKAGFAAKTDRLDARRLADALRRESVVSIYIPPPSLRELREMCRGRHQVVRLRTRLAQMIRALLLRCDAGEPPGTRLYSPRALAWLAEVQLAPEATRTLRRLERLYREVHTDAHAADAELKQRAAVDPIAVALTTMTGIGPVVAVTLRAEIGDIARFRRGPELACYAGLVPRVDRSADRIYHGRITRDGSPWLRWALVEAAMHAMKRQDSIGRWARRLAVRKGAMKARVALARVLCNEVIAAWPRPN

SEQ ID NO: 427061 - protein, 336 aa, unidentified
MNTSEKNQNYLYYVGVDLSKLTFDAVLRSASEDLEHRVFDNNKAGIKRFVSWLERKKGFNFKQALICMEHTGLYSRELVQAMVKIEAFVWVESPLQIKRSLGFLRGKNDKIDSSRIAYYAEKYADKARLVQSNNESLQKLQDLLSARDRLLKTKGQLQRPLNELKKIAPDTYQALIKINRPIINQLTKSLAQIKKDIMSTINFDDRIKRQYMLATSVKGVGMVLGVQLMVYTHGFTRMNNGRQLACYAGVAPFEHTSGTSVRGRTHTSNFANMKLKSTLHLAAISSIQHNPDLKKYYERKVSEGKSKMCVINAVRAKLLYRVLAVVKRGTPYQNVA

SEQ ID NO: 427062 - protein, 401 aa, unidentified
MSDLIRIGIDAGKTHHHAAAVAGDGRLIWSQRVANDQAAVEGLIERGRRSGTELLWAVDLTSSAAALLVALLLAAGQRVVYVPGRTVNRMADAFAGEGKTDAKDARVIAETARMHHHGLAELSTPDELVVELSRLVAHREDLMADWVRGINRLRDLLTGIFPALERCFDYSTRSPLILLAGFCTPAAIRQAGATTLTDHLRRSGASRPGIPAMVSKALAAAAAQSVQLPGEATTAALITRLAGRLLDLHREIKDLDRLLTERFRTHRQAAIIESLPGMGPILGAEFIVTTGGDLAAFATPARLAAYAGLAPVPNDSGRRTGNLHRPTRYDRRLRRVFYLAAFSSLKTEGPSRVFYQRKRAERRRHTHALIALARRLVDVLWALLRDNRPFQLSAPTRTAAA

SEQ ID NO: 427063 - protein, 390 aa, unidentified
MIYAGIDVAKDAHDCLIVDSDGVVLAEPFTIQNNREGFDEFFKKIMDYSFNLSMIKVGLEATGHFSDNLIEFLTTKGLTTTVINPLHTSLYRKSQSFRKTKTDRIDARSIVKMLKTEDLKPYLSKSYHVRELKSLTRYRFSLVQYRSKLKTSYARLCVILFPELEKLVSSLHAASVYALLSELPSTKAIAGCHLTRLTNLLSVASKGRYGKDKAVEIREAARVSIGTFSEVKSLELQQTIQLIHMLDTQIEQVEARINPIVDVLQSPIMTIPGISYRIAAIIIAETQNLANFGSPEKLLAFAGLEPSVYQSGQLTSTHARMVKRGSRYLRCALFNAAKYVCLWDPSFGAYLAKKRGEGKAYNVAVSHAAKKLTRVIFHLVKTNQPFVSQA

SEQ ID NO: 427064 - protein, 320 aa, unidentified
MNSHYKIEKIQTEINHVGIDVSKQHLDVSIAGSKTQRLANTQAGLRVLHQKLGRLAHPRVTCEATGGYEKLLVDSMLDAEIEVCVAAPGRVRYLANAEGLLAKTDSIDAELIRRFAEKIPLPRQIKQDPAAQKLRQMSDYRRMLSEDIVKTSNRLELAQGYLREQLQSQLTHLQGLMKKVEVDIKAHIRNCEELAQKAARLQELKGVGPVLAATLLAHVPELGKVGDKTLACLVGVAPHPKQSGNFKGKSSIRGGRANVRHVLYMAAVTAARSNPILAAFYQRLRTQSGKTAKVALVAVMRKMLSVLNKMIAQPNFSLAH

SEQ ID NO: 427065 - protein, 318 aa, unidentified
MAFYQCVGVDVAKDKFDIAYFVNKKYQHECFANDKKGRLDFVKWLKKNVQSPWVCMEATGHYSELIADNLVENAIRISIVNPLQIKSFARVKLSRNKNDIVDAKIIAEYCEKMQPRTFISRSDSQKELKDLTKLLDTLKEQLVQLKNQLQSTQGHLAKKSIQKFIKELEKKIKAIEKQLADLVKKDESLNEKMALVTSVKGVGDITAYKILAQIPDIHTFSNAKQFAAYMGVSPKQRQSGKLQGRTTISRIGDSRLRKAIYMAALVAKRHNNALQPFVKRLELKGKSPKSIVCAVMRKLAHLIFGILKNNRPFDPKMA

SEQ ID NO: 427066 - protein, 452 aa, unidentified
MERSKSGALSMVNPRAAAIDIGSTMHMAAINPNADDNPVRAFGTFTGDLHDMARWFKTYGVTTVAMESTGVYWIPAYEVLEGHGFEVILVNARYAKNVPGRKTDVSDAAWLQRLHSYGLLRGSFRPEAGVATMRAYLRQRERLIEYAASHIQHMQKALMEMNVQLHHVVSDITGVTGMRIIRAIVSGERTPSTLAQMRDVRCHATIETICAALSGNWRDEHIFALGQSLALFDFYQTKVLECDRKLEIALKALEINEGHDVRQLPKVRTKRRQVNTPDFEVRSALYRVLGVDLTQIHGIGPSLALKLVGECGTDLAAWPSSKHFTSWLCLAPGNKISGGKLLSSKTRRSSSRAAALLRLAATTIGRSDTALGAFYRRLSARAGKAKAVTATARKIAVLFYNSLRHGMAYHDPGASQYEERYRSRVIGNLQRRAKAFGFILHEMPGEPDMAVS

SEQ ID NO: 427067 - protein, 428 aa, unidentified
MNPTSESSTGVIFVAIDVAKQTHEVLIEPPEGGRQRWRMVNCQRDYDLLRQRLQAFQAPVRIGFEATGTYHRPLAYFLHQCGFELRLISSLAVARTRDALYNSWDKNDPKDTQVLLHLLKTEVTQRYHDPLVHAVNDLQEFAQTHYQVSLRKVRVQHSIMTHYLPLYFPEADRYYTNSRAQWFTRLLHRFPCPAAITRYSREAFEQEAWAIVGRKVNKHGFLHDLYVTASQSVGLPVSEKSEAIQMFRVILTEHQQLCATRAAIEQQADHALCTHPDYQRLRTLPGVGPILALTILAEAGDLRRFPHHRQFVKFCGLDLSTQQSGQFRGTSRLSKHGNARLRYAFWMAAQGAVRMRENTFRQKYARYIKSDPQNPDRKRKALCAVAAKVARVAHGLIKTGTDYRPYFEALPPSGALRSRGPSRQALTS

SEQ ID NO: 427068 - protein, 398 aa, unidentified
MTESSDYESVQVFIGVDVGKDTHHAVAINRSGKRLFDKALPNDENKLRSLISDLKQHGQILLVVDQPATIGALPVAVARSEGVLVGYLPGLAMRRIADLHAGEAKTDARDAAIIAEAARTLPHALRTLKLADEQIAELSMLCGFDDDLAAQTTQASNRIRGLLTQIHPALERVLGPRLDHPAVLDLLQRYPSPEKLASLGEKKLAAQLCKLAPRLGKRLAADIAQALAEQTVVVPGTNAAAVVLPRLALQLITLRKQRDEVALAVEQRVLAHPLYPVLTSMPGVGVRTAARLLTEVACRAFASVAHLAAYAGLAPVTRRSGSSIRGEHPSRRGNKALKRALFLSAFAALRDPLSRAYYPRKMSQGKRHNQALIALARRRCDVLFAMMRDGTFYTPQAS

SEQ ID NO: 427069 - protein, 351 aa, unidentified
MVVVGADVHKQTHTFVAVDQAGRRLGRLTIAATTKGHAKALAWARREFGADLVWAVEDCRHLSARLERDLLSAGQRVVRVPPKMMAMTRASARTRGKSDPIDALAVARAFLREPDLPVASHDETSRELKLLVDRRETLIAQRTATINSLLWRVHELDPARAPKARSLDLAKHQNALRDWLVTLAGMVAELALDELDDIIALTARAKNYERRIVALTTQAAPTLMAMPGCGALTAAKLAGEAAGIARFADEAKFARHAGVAPIPVWSGNTAGRVRMTRSGNRQLNAALHRIAVTQIRLTDSLGKTYYDKKKAQGMSNREALRCLKRRLARTVFNHLTTDHHSRPTTSLPTAA

SEQ ID NO: 427070 - protein, 424 aa, unidentified
MKVTYQTCCGVDVHKSFLVATIVKTTGGIEPSYQKERFSTFNNSILEFKQWLLDNDCHDVCMESTGKYWVPVFNLLEDDINVVIANPKWVKAVKGNKDDTKDSKWIGDLFRLGLVKGSYIPCKKFRILREYTRYRYKLVSCRSSEKNRYQNALTVCNAALDSVVSDIFGKSSTSIIDYLLEQSGSSINHEEIASKLLRSLKSKEDAVIESVEGYQMTDAQKYRMRLVRAHMDYITAEINDVDKMIENMISSNTDFENAVQFLCTIQGVKRDSAITIISEIGTDMSQFSSSRRLCCWAGLTPGSNESAGKRKSVRFTRAGVYLKPALVQCAHAAVKSDKSPYYKKKYESLVKRRGKKRAIIAIARMILTAIYQMLSTGEQWNPSDLYKIDMPVALVEKQKAKAIKQARKLLQREGLLPPDEPLAS

SEQ ID NO: 427071 - protein, 400 aa, unidentified
MNHNILLYIGIDVSKDKHDICIKNNNGNILKRFEIKNNKEDLAKLYTTLDKLKSNIKEKTELFFGMEATGVYCFPLYSALKRDGHPVKLYNPIQTNGYRKMEIRKTKTDPIDSAIIADMLRYHEPPAATAIDNLALFQLRELCRVRQRNIEKCTKCKIQFVRDLDMVWPGYKSVMKSVYGKTSIALLKEYSVPSNVTAKPFNDIDEMIKKVSRSQISREQAEEMYNHAGNTLTVPEIDSVISIEIKTLISEIEMYQGQIKALEKMMTQLMDQIDSKIMTIPGIGNILGATILGEIGDINNFSSAKKVVAFAGLDPIIHQSGNFKNKTGPISKRGSPQLRRALFLAANVSRQNDENIGAFYNDKITRGKHHYSALNATAAKLLRIVYWVLKNDREYKVQLT

SEQ ID NO: 427072 - protein, 383 aa, unidentified
MQVKADRPEAPSAIRSDLGAIFVSLELSRSTWLITSLSPGAGEKMSKHSVPAGDIGALLARFSEMKQKAFARTGKSFPIIVIQEAGLDGFWIHRVLQKEGIESHVVDPASIATSRRRRRAKTDRIDGEALLRALLAYKRGEPRVCTMVKAPTPEEEDRRRLCRERKVLTTERVQHVNRIKGLLFCQGVFGYEPLRRNRRQRLDELKTGDGRLLPDHLKAQISRELDRLELLLEQIKAVEAERNALFAVAEAAAPTAAPVAMLLDLKGIGPEFAAVLWMEAFFRSFANRKQIAAYAGLAPTPWQSGSIDREQGVSKAGNPRLRTTLIQLAWLWLRHQPQSALAIWFKERVMCNGGRFKKTTIVALARKLLVGLWKYVTAGVVIE

SEQ ID NO: 427073 - protein, 369 aa, unidentified
MADRISYIGLDVHKESIVVAVASGGLRGEVREYGRIANTATALDRLLRKLGVDGMTLRFCYEAGPCGYGIQRRLSAQGQECVVIAPSLIPKRAGDRVKTDRRDAASLAKLHRAGELTAVWVPDAPHEAIRDLVRARLDAVHSLRRARQQLSGFLLRQGCHYGRPAWTKLHRRWLAGLKFDQAVHHVVLEDYIAAVEVAQIRRDRLTAQIETMLPDWTLAPVVAALQTMRGMALVNAATLIAELGDLSRFTNPRQLMAHLGLVPSEHSSGASVKRGGITKAGNGAGRRLLIEAAWCYRFPARLSRELLLRQENQPRPIREIAWKGQVRLCARYRRLARTGKPINVVTTAIARELSGFVWAIARHVTMPAG

SEQ ID NO: 427074 - protein, 322 aa, unidentified
MAMLSYCGIDVSKDCLDVAVLPDGECFSVCNDTAGWAELVERLRSFSIAAIGIEASGGYERGVMRALLAAGMPVRQVNPFRLRQFAKASGVLAKNDPIDARMIASFVAIMPTRPAQRHAPAIERLTEMLAIRRQLSAEKVAAENASRLLENAMLRRLSRRRIARLTADIDTLDKHLLAIVVSDAALGHRYELLPSMPGVGPLLACTLIALLPELGTMSRKQVAALVGVAPYAFESGTLKGKRCIWGGRAPVRHMLYMAAMSASNWNPVLRAFHARLKGAGKLPKVAIVAVMRKMIVALNAMVRDDVAWADRYRGRHPVPSAR

SEQ ID NO: 427075 - protein, 316 aa, unidentified
MSHELFVGIDVSKDQFDVASEPSSFTASFDNTAEGIRELVRQLRWIKPQLIVLEATGCYHKALVNALDAAGLPVRVMNPRVVRRFAQADGILAKTDGIDAAALAKYAARMSPSVRELPDATGQQLQMLVGRRRDLADMITAEKNRREGATGWLLRKLNKHIRHLKCEVDAIEAKILSVLQSDARRWHDYLLLLTVPGVGQITAFTLVALLPELGRLNRQEIASLVGVAPYNCDSGRHQGTRRCWGGRAEVRSVLYMATVTARTHNPAIKVFYERLHDEYNKPGKVALIACERKLLTVLNAMLRDRTTWQPELAQAA

SEQ ID NO: 427076 - protein, 366 aa, unidentified
MQKISTTQTSGKSIFKGQLTIGLDLGDRASAYCVLNDAGEIVLERKLATSPKAMTEIFGKMARCRIAMETGTHSPWVSRLLTALGHEVIVGHAQRVRLITKSRRKDDRQDARKLARLARIDPELLSPVKHRSVQAQLHLTEIRARAGLVSARTALVNGARGLVKSYGERLRKCDTRQFRREATGGLSTGLRDALEPLLREIESLNDRIQEYDRRIERMAKLTYPEASLLKQVKGVGTLIALTFLLTLDDPHRFRKSRDVGCYLGLQPGRRNSGQSEPQMHISKEGDPYLRTLLVQGAQHILGPFGPDCDLRRWGLKLAERGGKSGKKRAITATARKLAVLLHRLWVTGEVYEPLRNSNRRAVAAAA

SEQ ID NO: 427077 - protein, 402 aa, unidentified
MRIETRPQDHPTATTAEIARLLVSFELSQSKWVLTVRAPGSAKLSRFTVAARDTEKVLSLLTAQRQQAERRTGRPVRIVSIYEAGLDGFWLHRWLEAQGVESHVVDAASILGPQRKRNAKTDRIDGEKLLRSLASWLDGEVGVCSMVVPPSVAQEDIRRLSRERGELVGERTRLSNRIGGLLANQGIAGFKPLQKDARQVLQTLRTGDGRALPPHLHTTIERILLRLELLCEQIKAAEAERDALLRAARVAAAPDTAPEAATAAPPEMAAAPLLLRLRGIGPEFTIVLSLECLNRDFDNRRQLGSFAGIAPTPWSSGGVEREQGISKAGNRRLRTILIELAWSWQRHQPDSTLTQWFHKRIKGQGARVKRIAIVALARKLLVALWRYVKHGVVPQGAVLKAA

SEQ ID NO: 427078 - protein, 424 aa, unidentified
MNLTQNDRLKQVTSDTLIVGVDVGSQTHFCRAFDWRGFELSRRVFKFSNTGMGFLTFLRWTEELMNKTEMKKVIVGCEPTGCYWLTFQKFLQDHDVQLVTVNPFTVNRSMELDDNSPEKSDLKDPKTIALLVKDGRFSTSYLPSGVYAEIREASVCRDQIMKQHVRLSNQIQGWLQKFFPEYFECYADWDSTSGLMLLREAPLPQDILKIGAGGINQIWRDAKVRAAGIKRAQTLVEAAQNSVGLEAGEAARLEIWVLVNDYIFKAEQLKRLDEYLEEKVKEVPNVEKLLAIKGVGMSTVIGFIAEVGDIGRFTDPKQIQKLAGLEIVKKSSGKKKGQPRISKRGRRKLRRTMYESARALMTWNPAFQDVFLYYRNRTKKPLGGMQAKIAVACKAIRIFYVVLKTGCDFDEEKFRKDIIRPEAA

SEQ ID NO: 427079 - protein, 323 aa, unidentified
MVRNNNFFGIDISKDVFDVVKNGENHYQFSNNTIGFKKFIKLLDDKPCCIMEATGVYHYSLAMYLYQNKIAVSVVNPLVIKRFIQMHLKTIKTDKADAKQISLYGMQNKLPLWKPSESYISESKDLFELASLYIKQRTMLKNRLHSFGRKSTQKLIKTELNKSIRQLDRAIKKIETELEIIIKTYHQKMYANLKSIPGLGSKTVLYMILITDGFEKFESPKQLCSYAGLAPTQRISGSSIRGKSRISKQGNSKLRNLLFMCSFNACKVNKSCKALYDRLVAKGKSKKLALIAVENKLIKQAFSIAKSGLKYDENFVSVKPTYS

SEQ ID NO: 427080 - protein, 351 aa, unidentified
MMIIGLDYHPSFQQIAFVNTETGECGERRLEHGDQEAERFYRKLKEGGVSVRVGMEATGHARWFERLMAELGFELWIGDPAQIKAKRVRKQKTDRQDAQLILTLLMENRFPKVWVPSVENRDLRQLLWHRHRLVQMRTRVMKQLQAVAMNEGLRRKKGLWSKSGRAQLESFLLAPWATRRRRDLLELLDQLTRNITELSTAIEQEGKKRPEVVRLMTHPGVGPLTGLAFVLIIGPPERFRCGKQIGSYLGLIPCEDSSAGKQRLGHISKQGNSLLRFLLVEAAQIAVRDDPNWRRKYVHLAMRRERRIAKVAMARRLAVCLYWMLRKEWNYQQLLKFGSHAGQLETGHGVK

SEQ ID NO: 427081 - protein, 304 aa, unidentified
MGYFVGIDLHGDNNYIGILDEEDRKVFKRRNRNDINEIKRVLEPYKKEIKGIVVESTFNWYWIVDGLMEAGYQVHLANTSAMQQYEGLKYIDDTRDSFWLAKMLRLKILPEGYIYPKETRSVRDLLRKRMMLVQQRTAHILSMQTMVNRNKGVPISGDTIKKLSNEEVEGMFSDMHLTMSAQCDHEVIEVLNKQIDNIEKAVFKEVKLKKPYKKLLKVPGIGEILAMTIMLETGNIERFSEVGMYSSYCRCIGKKLSNGKNKGKETGRTGINTLRGRVCGGSAFHARFCEKEGNGIRGRRQRAM

SEQ ID NO: 427082 - protein, 425 aa, unidentified
MTASLVWAGVDVGKEHHWVCVVDENGVVVLSRKVINDEQAIRELVAEIEGLAEQVSWAVDLTTVYAALLLTVLADAGKPVRYLAGRAVWQASVTYRGGEAKTDAKDARVIADQSRMRGADLPVLRPDDDLITELRMLTAHRADLVADRTRTINRLRQQLIAVCPALERVAELTSDRGWVVLLARYQRPKAIRQSGVSRLTRVLADAGVRKAAAIATAAVTAAKTQTVRLPGEEVAAQLVADLAQGVIALDDRIKTTDADIEDRFRRHPLAEVITSLPGMGFRLGAEFLAAVGDPALIGSADQLAAWAGLAPVSRDSGKRTGRLHTPQALQSPTAPGDVYVGVDRDPLRPRLQELLPAQTRRRQASNPRHHLPGATPHQRPLRPHPRQPHLATRFTPHHRIGSLTSSLRVLSHAFTNLGEFVNWRG

SEQ ID NO: 427083 - protein, 418 aa, unidentified
MADLLVGIDVSRDTHHVAFTDGTATERWGRLTVPNDAGGALQLAHAIQEQATRHACDTVRIGCEATGVYAWHLALWLSQPTDPPRPWTVYLLQPRTVHRYAATFASKRAKTDRQDPWRIAEVLSHAAWLPRPFHVAERTLALQRLTRHRHHLVRQLTRHKNYAASYLFLKANGLACQPPWSDPWGGAAEALLLQYQTVEDIAAAPLTDLVECLQRGARGRLADPDRVAQAVRQAARNSFRLPEVLKEPVHQILSWTLQDIRHLEAQIRVVDRRIAHEPAARTNRLLTVPGLGPVFAAGILAEIGDISYFPDDDQLAQFAGLTWPPDASGQRVGEPTPLARTGNAYLRHYLVEAANSVRRHDATYAAYYQRKLTEGTQPAHHRALVLTARKLTRLVFALLRDDRAYDPAHPAVRARRHG

SEQ ID NO: 427084 - protein, 361 aa, unidentified
MEKHSTQTRKVQVIHIGIDVHKSSWRVTEMRDGVALKTYSASPSAAELGARLRREYPGAEYRSVYEAGFCGFHVHRELEAQGIRNIVINAADVPTSGKERANKNDTLDSRKLARELSNGSLEPIYVPSPANLLLRGVVRCETQTVKDVTREINRMKGILAQRGEEPPRINGGALKLRLEQAVREGDEEMALALGRLITRRSERARAVQAERRTVEALGLWPLLHRLMTVPGVGFRTAVVVLSEIWDMSRFPTENHLVSFAGLAPRLTGSGEHERTGGIGHRKHRLLQGILIEAAWTAGRKDAELHDKYWNMAMRKTARKAVVAVARRLLLRIRAVWLHGADYVPKQASDKAGGTGNDGHGE

SEQ ID NO: 427085 - protein, 281 aa, unidentified
MSQNNAVTTKPNNPVTMKPNDPTPMKPDSPPVLYVGLDVAKASLQLDLAGQSLALTNGAPGHARLLKLPRPHPTAQVVGEATGGYEQAVVRALHAALVPVSVVEAGRVRHFAHAKGWRAKTDPIDAALLAAYGRALTPRPTPAPTAEQARLATLSTRRQQSLQTLTAETNRAAHYVEPFCIQQGHQLRKLLEKQVARCAQAITALIAAEADLQAKSDRLDAIAGVGVVTAAIVLAEVPELGTLSDGAVAALVGLAPYNRDSGDRTAGRHITGGRAGVRCAL

SEQ ID NO: 427086 - protein, 386 aa, unidentified
MATSVTSRIEQDTLPQPTLYLAFELGKDTWKLGFTIGMAQPPRERTIPAGDVARLQQEIARAKQRFGLLADAHIMSCYEAGRDGFWLHRYLVAQGITNHVIDSASIEVNRRQRRAKTDRLDVRKLLTMLLRHSAGEKKVWSVVRVPSVDEEDRRQLHRDMQTAKQDRTRVNNRIKGLLAGHGVQLALRGDVDAQLDQVQPWDGAPLPCALRTRLKRAWQQVGFLTAHIQTLEAERRALLRRREDPVIAQVRQLFTLRGIGINSAWLYVMEFFAWRDFQTPKQVGALAGLTPTPYQSGQARRELGIAKAGNRHIRAMAIEIAWAWRRFQPDSALSQWYERRFGAGSARLRKLGIVALARKLLIALWRFVKTGVLPEGAVLKPAAPSR

SEQ ID NO: 427087 - protein, 377 aa, unidentified
MKRIKFVGLDVHAETIAVAVAEQDGEVRSVGVIPNRWESIRRLAKKLGPIEELRFCYEAGPTGYVLYWQLTALGAKCEVIAPTLVPVKAGERIKTDRRDALKLARNYRAGELTAVWVPDAEHEALRDLVRAREAAKRDQLRARNRLTKFLLRHGKRPPQGVRVWTLKYMDWVRKEAGFEWMAQQATLLDYLHEVEHMAARMERLDGAIEEAVKRAPPQMREVIEALQALRGIAQVTAVTIVAELGRLSRFGEAPQLMAFSGIVPREHSSGESTRRGGVTKTGNAHLRRVVVEAAWSYRHPPAITKGLRLRQEKVSEEVKEISWKAQHRLHSRYRKLTARGKNTGKVVTAMGRELLGFIWAIGVQVEAGQGKALGQAA

SEQ ID NO: 427088 - protein, 357 aa, unidentified
MEQRNELNFKGQNIYIGLDVHLKSWTVTVLSEVSVLKTFSQEPDPDKLYRYLCNNYPNAEYYSVYEAGFCGFWIHHRLTQLGIHNIVVNPADVPTMTSERLRKTDAVDSKKLAVGLRAKQLRGIYTPDDEAIEVRSLIRLKSTIAKDITRQKNRIKSHLRYLGIEIPQEYTGRSFHWPMRFIDWLRDVSIKTSCGRQTLDMHIRRLEELHAQNLEITREIRELSRTDRFSEIHSLLMTIPGIGRTVSLILMAEIIDIKRFNSSEQLAAYIGMIPMCHSSGEHIGRGNITVRRQATLRSVVIEAAWAAIRQDPALQLYYANNCKRMPPGKAIIKVARKLINRIYFVLKRHQPYVHAVA

SEQ ID NO: 427089 - protein, 424 aa, unidentified
MKVTYQTCCGVDVHKSFLVATIVKTTGGIEPSYQKKRFSTFNNSILEFKQWLLDNHCHDVCMESTGKYWVPVFNLLEDEINVVIANPKWVKAVKGNKDDTKDSKWIGDLFRLGLVKGSYIPCKKVRILREYTRYRYKLVSCRSSEKNRYQNALTVCNVALDSVVSDIFGKSSTSIIDYLLEQSGTSINHEEIASKLLRSLKSKEDAVIESVEGYQMTDAQKYRMRLVRAHMDYITAEINDVDIMIENMISSNPDFENAVQFLCTIPGVKRDSAITIISETGTDMSQFSSSKRLCCWAGLTPGSNESAGKKKSVRITRAGVYLKPALVQCAHAAVKSDKSPYYKKKYESLVKRRGKKRAIIAIARMILTAIYQMLSTGEQWNPSDLYKIDMPVALVEKQKAKAIKQAKKLLQREGLLPPDEPLAS

SEQ ID NO: 427090 - protein, 355 aa, unidentified
MTTTKYIGMDVHKESISIAVMNSAGKFVMECVIETKGSMLLQFIDGLRGDVRITFEEGTWAAWLYDLLKPHVSEVVVCNPRKNALLKDGSKSDRIDARKLAELLRGNHLKPVYHGEQGMRTLKELARSYLNISKDVTRVMNRLKALYRSWGIACAGIQVYAPRHRSEWLGRISEAGVRRRAEHCYQQLDVLRLLRQQVRRDLLLESKKHQAWRLLGLIPGIGPIRASLLIALIQTPHRFRTKRQLWTYSGLGLETHDSAQYRVVEGQLQRSKKPVTLRGLNQDHNHDLKDIFKGAATRISSSSGPFHDFYEHLLAQGRKPTMARLTLARKIAAITLIVWKKEVHFDASYLKSQAA

SEQ ID NO: 427091 - protein, 413 aa, unidentified
MDKREQGHRPRGLPVVPSERAGMRFVGIDIGAERHLVAWVDEQGTILQRPTAFREDREGYQQLLAQLGSTAETLIVMEATGHYWQNLFAALAAEGFAIALINPLRTRRFAEADLVRTKTDAIDALGLARFGQQKRPPATELPDLATRDLRELVRLRVRFLQDFGDRTRQLHRAVDLSFPEFTRFVVELDSPRATAVLHAFPTAAAVRAASERQLAAVRGGQRTVGRELARALKAAAGTSVGQHHTEVYARQVRFFCEDLDSLRRRLAEIERDIEQLLMRHQVGRLLTTIDGIGPQTAARLVAELGDPAKFRNAGALTAYVGAIPGLRQSGKQSWDRAGLARCGHAKLRAALWMPTLVAVRRNPWLRAYYERLRARGKLPKVALMAAMRKLLIAIYAVAKHRRPFVPIITMTAP

SEQ ID NO: 427092 - protein, 464 aa, unidentified
MTKRTKASAKKPTATTATSLSAVQTMVAGIDIGSAQHWVCGPVRDAEGKPAIRSFGTTTVDLKALADWLAEQGTKSAAMESTSVYWIPLYELLESRGIEPVLVNARQLHNVPGRKTDVSDCQWLQLLHSHGLLRGSFRPSEAISRLRALQRQMGNLVAERSRCVQWMQKSLDQMNVQVHRAVTDLTGKTGMAIVRAIVGGERDPVRLAVHRDGRCRKSSDEIAKYLTGHWREDHLFNLASTLRIYDTLEEQIAAYDARLMQELQALQPPERQDELVPRHPNAGKEKAIKGRGEQPGRLALWRFSGVDLTRIDGISAGTAQIVLTEIGASVASFPSEDHFASWLRLCPRTPISGGKPLKKRRNGLGANRIAGALRMAATSLQRSKTALGAAFRRIARHKGGAVAVFAVARKLSQLIYRMLRYGQDYVDIGEKAYEAKFEARRLASLQEAARGLGYTLVQEPLADG

SEQ ID NO: 427093 - protein, 333 aa, unidentified
MNKRFAVGVDVSQETLDVAARAESGAPRTAQFANTNAGHRQLIKWLTKGGRSARVVLESTGVYSLDLALALDAANRIDVMVVNPRAARKFADACLQRSCTDTTMAVALQEYAARMEFVPWTPPAAAVREVRAIARRIAALTLEKSRELNRQHAAGASADTPAVIRNDVAVNARHLERRIAELERHAVALITADSQLQPVYQHLLSVCGIAETTAIQLLGELLVLPADMTARQWVAHSGLDVRHVNSGSSVHKVPRISKQGNAHLRRILYMPALVAIRHEPHVRAFYAQLLAAGKKPIQAVVAVMRKLLHAIWGMLQTNTDFDGSKFRKLPVAA

SEQ ID NO: 427094 - protein, 369 aa, unidentified
MLSQSFSTQKGALTVNSSKYIAMDVHTATISVAVRDAAGKLIMESVIETKTSTILQFIQGLRGDLHVTFEEGTWAAWLYDLLKPYVTNVVVCNPRRNALLKEGSRNDRIDARKLAELLRTNLLRPVYHGEKGLRTLKELARAYLTISKDLTRVMNRVKAIYRSWGIPCGGQSVYNPRHRKEWLSKITQASVRRRAELYYEQLDALVLLRKQARQELLAEGKKHQAWKLLRSIPALGPIRAAVLMAIVQTPHRFRTKRLLWKYSGFGVVTHSSADHRYVKGQLERSKKPVSVRGLDRDHNHQLKDLFKGAAIQASTRKGPFREFYEALVAKGMRPEMARLTLARKIAVIALTVWKKGGAFDAKYLKPQTA

SEQ ID NO: 427095 - protein, 350 aa, unidentified
MLIIGCDYHPSFQQIAFVDTDTGELQERRLEHREEAEKFYRGLGVQGMRVRVGMEASGHARWFERLLGELNFELWIGDATEIARKRERKQKTDRQDAQHILRLLLKDDFPRIWIPSWENRDLRQLLWHRHRMVQARTRILNQLQAVALNEGLRCKKRLWREHGREQLESFRLAPWASRRRQDLLALLDRLNPTIAELSQAIEHEAEKFPEARWLMTHPGVGPLTALAFVLIIGRADRFQCGKQIASYLGLVPLEDSSGNRRRLGHITKQGSSMLRFLMVEASQVTVRSLPEWRSKYFHLMMRRGRKIAKVAMARRLAIRLYWMWRKGWDYEQVKKFGSHAGQLGTGDGVQ

SEQ ID NO: 427096 - protein, 423 aa, unidentified
MDIIYEQVAGLDVHKDTVVACVRIVAEGKTRRECRTFSTTTDQLVELRVWLEECRCTHVAMEATGVYWMPVFRILGEGVFELIVANAAHIKNVPGRKTDVNDATWIADLLACGLIKASFVPNEEIQEFRSLTRTRKQLVREQTRHVQRIEKTLVEANIKLNSVISDIMGASGRRMIEAMIKGVRQPRQLVELAGNGIKATPKELYDALHGRLTEHHRFLLDLHLKQWDGLDETIRKIDREIDQRIADTHTKGGSGEVPFRTLIELLSTVPGISTVSASAIVSEIGGDMSRFPTAGHLVSWCGLCPGNNESAGKRKPSRLRKGAPWLKTMLVQCAWAAKRKKDSYYRAQFFRLQSKRGPQKAICAVAASILTAVYHILKNGIEHHDLGASYFDRRPVELKAGRLVAHLKKLGFNVQLQPIPEAA

SEQ ID NO: 427097 - protein, 418 aa, unidentified
MFKILKNNCCELDVHKTWIYACIGITDSNKRTEYKQARFSSFTKGLNELCDWLAKYNCNDVCMESTGKYWIPVFNILEKNNIWVTLSHPKYTKPQKGNKTDRKDAKWICDLYMCGMVKPSFIPPADIRELRDLVRYRFKLTCMITGEKNRAHNCLTVSNLKLDDVFSDIFGKSSRSITEQILQHPGEVFDVAPFVDSRCKTPIEEIQAAVDGAISHEQAVKLRQCLKHIDELEMHKAEIEREIFRLSDKYEEALILIRTVPGFDKNPMTAIQVLSEIGGDMSVFPTAKNLVSWAGCCPRNDQSNQKIKSTRISRAGSYFKPVLVQIANALIKSKKHPEFTTRYRRIKARRGHKKAIIAICRMILTAIWHILTDLKPYTPEGFLESRPVNKEKVLTISQALNLIKQRGYIIKDDVGPVT

SEQ ID NO: 427098 - protein, 348 aa, unidentified
MVHFVGLDVSVKATSVCVVDDAGKVILEQKVPTDPADIIAILTSLGVSFGRIGIEAGPLSQWLVNALTAANLPVICVETRHMKALLTAQQISKTDRNDARGIAQMMRVGLFKPVHVKTLVAQEQRMLLTSRKLLQRKLLDVEADLRGTLRNFGLKVGVVGSSRYEARVRELVEGFPRLAAIVEPLLSVRRVMRQQFAVLHKMLLDMVRDDLVCRRLMTAPGVGAVVALTYRATVDQPQRFVHSRAVGAHVGLTPKRYQSGETDYDGGVSKCGDALLRTMLYEAAHSLLIHGRQWSWLKAWGIRVAQRRWMRRAIVAVARRLAVILHRMWVDGSEFRWRKDSAAVPAVA

SEQ ID NO: 427099 - protein, 404 aa, unidentified
MIFVGVDWAEAHHDICIVDEAGEVLARKRIPDTLLGVRTLHELLGEYAEEPHEVIVGIEKDRGLIVEAMLGANYRVYAINPMSSARYRERHVTSGSKSDPGDAKVLADLVRTDRHNHREAAGDSQNAGAIKILARAHQSTIWARQREVNALRNALKDYYPGALSAFGTDLDDRDAVAILEIAPTPPLGRQLAKSKIIAALKRAGRMRNLERRAGEIQNALREEQLAQGPIVEAAYGRTTKAHVAMIRAYNAEITELEEALTSGFEEHPDAGIVLSLPGMGTVLGARVLGEFGDDPNRYCNAKSRRNYAGTSPITRSSGKSHVVLARHMRNRRLADALDQWAFCSITRSPGARAYYDELRRRGKTHRQTVRQLANRWVGILHACLEQRVNYDESIAWKHRVDLAA

SEQ ID NO: 427100 - protein, 467 aa, unidentified
MVVANNEPSKPKRSRRKSLPVPVPASSAPLQVINPDAAGIDVHSNMHMVCVPADREAEPVRQFGANTADLQEIVVWLKQCRVKTVALESTGIYWIPLFELLESEGFEVYLVEPGQLSRCGARPKTDVLDAQWIQRLHSYGLLRGSFRPPDSVLALRAYWRQRQMQVRYAASHAQHMQKALEQMNVKLTQVVSDITGKTGMSIIDAIVDGEHDPIKLAQLRDERCHHSEDQIALALQGTWRPEHLFELRQARDLYRFHHQQITECDQQVQAELATFPNRAGEKTQTKKPRTRGRKSNDVRFDAKGPLFQALGVDLTLIEGIDVGTALVILAEIGVDVSRFPTEKHFASWLRLCPPQDQSNKTTKRRGHRKGTNRVAIALRMAARSAGKTMSPLGLFYRRIKSRIGGLGAVKATAHKLACLVYRMLKYGEEYVVKSMEEYEAQMKAKLVNSMARKAATLGFQLVPMPAK

SEQ ID NO: 427101 - protein, 353 aa, unidentified
MMENRPRIVLGIDTHLDVHVAAAITTLGHALDTRSIPTSARGYRDLLHWARELGEIEKVGIEGTGSYGADLTRLLVEEGLQVIEVNRPDRARRRRLGKNDPTDAENAARAVLSGEARAIPKAQNGPVEAMRMLIVARRSAVKARTQASNQLKSLLIGAPDPIRTAVEGLSFPAAVARCARFRPSATADLLQASRRALRALARRWIALGEELRELDQALAELTARAAPRLRAQHGIGPQTAATLLITAGDNPERLHSEAALAALCGVSPLEASSGRVVRHRLNRGGNRQANNALWTIALVRARGEPRTQAYVARRTSEGRTLKEIFRCLKRYIVREIYPLVLADLKEAQALALT

SEQ ID NO: 427102 - protein, 419 aa, unidentified
MSFKILKFNCCGLDVHKTWIYACIGITDSNNRTEYKQARFSSFTKGLNELCDWLAKYNCNDVCMESTGKYWIPVFNILEQRKIWVTLSHPKYTKPMKGNKTDRKDAKWICDLYMCGMVKPSFIPPADIRALRDLVRYRFKLTCMITSEKNRAQNCLTVSNLKLDDVFSDVFGKSSRSITEQILQRPGEKFDVSPFVDGRCKTPIEEIQAAVDGAISKEQAVKLRQCLDHIDELQKHISEVEQEILRLSDKYEAALNLIRTVPGFDKNPMTAIQVLSEIGGDMSVFPTAKHLVSWAGCCPRNDKSDRKIKSTRISRAGSYFKPVLVQVANALIKSKKHPEFTTRYKRIKTRRGHKKAIIAICRMILTAIWHILTDLTPYTPEGFLESRPVNKEKVLTTSQALNLLRQRGYLIKDDPSLAS

SEQ ID NO: 427103 - protein, 420 aa, unidentified
MKAKKKAKLDLIGDDTLVAGIDVGKRNHYCRFINVRGYEIGKGFSFSNNRDGMEKAISKIEEAKIQNNLAKAVIGLEPSGHYWKAAAHYLSRSGYKLALVNPYHIKRIKEIEDNSQTKTDPKDSLLIAKLVRDGDFFDPNLAGGIYAEIRRMYRLRLKVSKSLVKEKTKLKILLDEYFPEYESLFCDMLGATSEYLIDNYFLPEVVAKENILSFAGKIKMISRGKIGTSKVLKLIECARDSIGINTGIDAAVLEKTYILKDISNLKLKLAYINKKLKYYLDRIEYSKYLLSIPGVGVVTAAGFLGEVGDISKYKSAKEIIKLAGLNLVEISSGIRKGKKKISKRGNNRLRCLLYQCAIVAISKNSQIKKYFFYQAETKNKMKMVVAVQCKLARIMFALLKYRKYYDPEEVLKSMVAQEVA

SEQ ID NO: 427104 - protein, 318 aa, unidentified
MMQPVLNVGVDVAKDALVVACAEHSFPVQSVPNQRAPLRAWLKSLPKGSRIGLESTGAYHELLADLAQAQGYTVFLLNPLDTRHYAKAMGTRAKTDRVDAELIARLIAQEHTRLRAYTPPTANQRKLDRLIRRRAKIVGLKGTLKLTMRHLGGFAAELKAVVGKLDALLAKIDATMSAIAACSPQHQEAQQRVETIVGVGPVVGIGLPKTLERVPFRKADAFVAFIGFDPRANDSGRKTGRRRLSKRGPAELRRLLYNAAMSAIKTKVWKPIYEHYRTQGWSTTASLVIIARKIARAAWSIHHYRTTFHPERITKGLT

SEQ ID NO: 427105 - protein, 412 aa, unidentified
MEVLYPHCAGLDVHKNTVVACVRHTVDGTIKREVRTFKTITKELLALSEWLAAEGCTHIAMEATGVYWKPVWHILSDGDFALVLANAAHVKNVPGRKTDVNDATWLADLLAHGLIRSSFVPDQQTQEMRDLLRTRKQLVRERSRHVQRLQKTLEDANIKLDSVISDVMGLSGRKMIEALIAGESDPEQLAQLAHRRIKATPEELCEALRGRVTRHHRFLLSVHLQQIDAIDQVTRDIDQEIDAHVEPFRDTVLLLTTIPGVDELGACVILAEIGRDMSRFPTAGHLISWAGLCPRNDESAGKRRSTRMRKAAAWLKTTLVQCAWAAARKKASYLQAQFHRLRARRGAKKAIGAVAASILTAVYEMLKTGALYEDLGSHHFDRCGKRRQIHRLVSRLHNLGYAVQITPLPADA

SEQ ID NO: 427106 - protein, 340 aa, unidentified
MNYLGIDVSKAKLDCALLREASSGKRLDKTFSNDAAGVKALLVWLESKLNDTALAKVVDGKLGKTSVHALMEPTGVYHERAALWLFEAGLAVSLVNPARLRSYASAIGVVSKNDRIDSAVLARYGAAEKPEPWQPPTLAAQTLNALLARREALCQDITREQNRREKTHFALNTPVTVANSIAQTLEFLERQLAALEAEIDQHIDRDPTLKHNDELLRSIKGVGPRVAQRMNALMSSHRFKSAEALAAYIGLTPCERQSGSSVRGKTRISKKGPAHLRHLLFMPAVVAKTHNPHVRAIYERLIARGKPKMSALGAAMRKLVHLCFGVLHTGKPYSTDWKTT

SEQ ID NO: 427107 - protein, 367 aa, unidentified
MPRLHRDGEVVHVAFDASKNVLVTGVLRPGEETPTIERVFNDEPSVRRFVKGFPEPGRLRTCYEAGPCGYELQRLLQSLKVPCEVIAPALIPVAPGDRVKTDKRDARRLVRQFRAGELVAIRVPSRHDEAVRDLCRARADAVEDLTRAKNRLGHFLLRHGRIWRGGATTWTFKYRNWLGQQSFDEAALRVTFARYRATVECREAELESLESELTNYLEEEPFATPVQRLSAYRGVDRLGGLVLQAEVCDWRRFANGGAAGAFCGLVPSEYSSGDSVRRGSLTHTGNAHLRRQLIESAWAYTNGPSLGVTLRRRQDDVSPDTQARAWASQVDLCRRFRALDKRKPVRGVVVAAIARRLITHLHAEMVA

SEQ ID NO: 427108 - protein, 361 aa, unidentified
MEKIIKQCIGIDCSKDGLAVCFGQLGLPWEEKYKATGVFENSPKGFKQLFKWSEKLSEKGIPVEFVIEATGVYHEKVTNYLFDKGRKISVVLPNQANHFAKTLKVRTVNDKESSKMLASFGLQKQLDGWKKPDTVFDQLKGLTREIDQLKDELTVISNQEHAEQYSAFPNKKTLKRMNARMVFIEKQIKEIKKEIDLIIESHPTLAKKLKKICTIPGVGKITVVKVIAETNGFNMIRNKKQLVAFAGYDVVTKDSGTSVHGKPHISGKGNKHIRKALHFPALTSVKYDKNNHDLFKRIEAKTGIKMKGYTAVQRKLLVLIYILWTKDEEFDPNYRANKSNQQKLLEQPIMTALTELDQVCS

SEQ ID NO: 427109 - protein, 397 aa, unidentified
MIAVGIDVSKSKSTVAILNGHGSIRAKPFDVHHVADELQALVDYIKRTSEPPTILMEPTSHYHYPLLKAFTEAELPVCLINPYQMKKYGDTELRKAKTDKRDSLRIAQYALEKSYSLIPYTPQDQKYEDLRFLSRQYSQRISTLTVAKVQLLSLLDETMPGITTILPLKSRDPDNCVLLRFIKRFKSFDVIRKMGKTRFLDSYQVLVKKTKDRFAGSKGLAIYELVLNSVTTCGENPLSAMTQDQCVDLVSTSQKAADEINLQMRIIAETMPEYKVLRSMAGVGDRLGPIILGEIGDIRRFHSGKALNAYAGNDAPPYQSGQFESRNRHISKRGNPALRKACFEVMQALKLTKPQDDPVYLFLLKKEQEGKPYNVAKMAAVNKFLRIYYARAMELYK

SEQ ID NO: 427110 - protein, 344 aa, unidentified
MEENTTVIAVDIAKTFFEIAVSATPGRVSEHHRLKRASFLAFFKNVSPAIVVMEACGSAHYWGREIEALGHKIVLLPPHQVRPYVTRNKTDRTDAKGILEAFRNDDIHPVPVKSVDQQVLVAIHRFRSGWIGARTAQVNTLRGLLREIGFFIPEGIKHVVPQVRLLIEDADSKLPDALRSTLAVTCDQIDSLSQLIKKADRELESLADQSPAFERLATAPGVGLIVGTALLGFVGTPHRFPSGRHFASYFGITPRERSSGGKRHLGRISKRGDAYIRHLFIHGARSVLSHAGRAKSHDRLRAWALELAKRTSYNKAVVALANKIARIAWAVWRNDRPYLSVSAA

SEQ ID NO: 427111 - protein, 439 aa, unidentified
MMAAVIERCAGIDVGKKSISVCLMIGPADQEPRTEVRTYGTRNAELERLRQWLVTERCTHAVLESTGSYWKPIFNVREDSLTVVLANAEDVKGRKGHKTDPKDSWWLANLLRPAMIRPSFIPPRPIRELRDLTRRRGQLLHDATSERNRVGKVLEDANIKLSSVLADLFGVSGQLMLEALLEGQATATEIAHLAQRQAKRKIPELTAAIEAHRMSDHHRRMIRGSLRHLAFLEQELFHLDEDILRHIEASGLQNALQLLKTLPGVQQDSAVSILAEVGPDRSPFPSAAHLSSWAGLCPGNRRSAGKDKGGRTTRGNRWLRAALTQCAWAAASKKGCSLKNKFWRWAAEGRKRALVAVAHALLVLVYQVLARGEPYQERGMPAVEERQRKRLIRHHVRGLGRLGINVGFSSQRATPNSSKTTSCCCPRPSLEIVKHPEHA

SEQ ID NO: 427112 - protein, 369 aa, unidentified
MGEYTEAFVGIDAAKARNAIAVAEGGRGGEVRYLGEVDASEQGMRRLVARIAAKYDRVHFCYEAGPTGYGLHRLITGLGHDCTVVAPSLIPRKPGDRVKTNRRDAVALARLLRAGELTPVWVPDEGHEALRDLVRARAAAVQTLRVHKQQVAAFLLKHGRHFPRKTPWGARYMRWLQEQKFAHPAHQIVLQEAVEAVRLARERVLRLEKLIEELLPAWSLAPVVTALQALRGVNLIVAVTFVAEIGDLRRFESPRHLMAYLGLVPSERSTGDTVRRGGITKAGNGRVRHLLVESAWTYRHPPRVGAKKLAQMQHVPPKVREIAWKAQSRLTARYRALAARGKRLTIVCTAIARELAGFMWSVARESQPA

SEQ ID NO: 427113 - protein, 326 aa, unidentified
MEHELHYIGIDTAKEKLDVDVLRPDGRHRTKKFANTTKGHDELVSWLKGHKIDHAHICIEATGTYMEPVAECLYDAGYIVSVINPALGKAFAQSEGLRNKTDTVDARMLAEFCRQKSPAAWEAPHPLERALRALVVRHQALTDMHTQELNRTETAREVQRPSIDAHLLWLEAELKRLEKQIKDLTDDDPDMKHRRKLLESIPGIGEKTSAVLLAYIGLKDRFAHARQFAAFAGLTPRRYESGSSVRGASRMSKAGHVSLRRALYMPAMVATSKTEWGRAFRDRLAANGKKGKVILGAMMRKLAQVAYGVLKSGVPFDASRHNPVAA

SEQ ID NO: 427114 - protein, 485 aa, unidentified
MKTKQQEGAQEAKKANPSANQDKWHDMNRKQRREMMRKIQSEDLSLEVIHSDAAGIDIGNESHYVAVPPSRDSQPVRRFGCTTAELKAMAAWLKQRNIRTVAMQSTSVYWIAVYDILEQADLEVFLVNARDTKNLPGRKSDVQESQWLMKLHTYGLLRNSFRPPQEIRTMRTYWRQRNDLVRAAARHIHRIQKSLTQMNIQLANVLSDVSGLTGQTIIKAILGGERDPYKLAAFRHPRVKASEEQIARSLEGNWQQDLLFVLKQEQDGYEFCQRQMTECDQQLSHYLEQREDRSQAAPLPEEKRQQRLKKKKGNKPQFDLREGLFRMTGTDLTQIDCVDVMTATTIISEAGWDMSKWETEHHFVSWLRLCPDNRISGEKIIGKGRLPTNNRVTTALKIAASNLRVSDTYLGAQFRRLRTKLGAPIAIKAMAAKLARLVYRILRHGMKYVDQGATFYEAQHRQLQIKHLKWKAAKLGFKVIEVPAA

SEQ ID NO: 427115 - protein, 407 aa, unidentified
MDLLKTVFGIDVSSQKSNVCIMVNGQKVNDYAISNDMVGFNQLLGDLKQVTNPQIIFEATGVYSRRLQAFLDMHELRYVMMNPLEAKRKTKDDLHQNKTDKLDALYLAKLQSEHPQRLAYVQSEEYQELMANNRIYEQASHDLITNRNRLHKAIQLTFPEIEHLMVNPRGKNYWSIVLRFPHPDIVLETKEVDIIDFLKGLTGIGKKRANDIAQSLIRLAKVACPAVKKNSAHIRGLKMAINNILSAEEECQTALQEMAKLAPKRDLEILTSIPGIGKNTALRIISELGDIRRFNNPSQLNAFVGVDPQVYESGNLTAHLSISKRGTAIGRKVLYLAINQIQSAKKVGNPCHIADYYEKRKRSSETASHKKAAIASIHKLLRTIFALIKNDQLYSYDVAKHNQRLLS

SEQ ID NO: 427116 - protein, 358 aa, unidentified
MKIIGVDLHARQQTIAMLDTDTGEMVEKTLEHESERVREFYTALPGPVRVGIEATGSMQWFLKLMEELKIDCQVGHPAKIRKAETRKQKHDRRDARLLLKLLAENRFPSIWMPSTEQRDLRTLLRHRHQWVQMRTRVQNTLQAMALSNGLRRGTSLWSQAGQHALKALPLAPHASQRRIALLALYLRLREGIDDLDQQVSEQARQRPQARRLVTHPGVGPVTALASEVFLGDPARFADGKAVASYIGMIPSEHSSGGRQKLGALSKQGNSLLRYLWVEAAMHAVRKDPDLQRFYRRKLVQKGLGKARIAVARKLGIRLWIMLRDQIDYQEFCRRGQMRQKSGGARAGMPDFNSGPALQ

SEQ ID NO: 427117 - protein, 279 aa, unidentified
MEYFVGLDVSLRSCALCIVDGKGKVQLEREVPCEVEDMAACLMAFPHAIKCVGFEAGALSQHLYIGLQAEAFDIVCMEARQVSAALSAMRNKTDKTDAKGIAQILKTGWFSPVHMKSRQAHGLRELLSTRKALLKKTMDLANEVRGLLKIFGVRLPRTVKYGSFDGVVRPMILMDEVLAHAIIPLLDARAVLFQRYLELDRRVKRAASQDEVCMRMITVPGVGPIAALTFKAAVDDPGRFKRSRTVAAHYGLTPRRYQSGEHDNPGRISKAGDRDVWAT

SEQ ID NO: 427118 - protein, 408 aa, unidentified
MVQQDKLIYVGVDLHKQHHTAVFINCWNQKLGEIKFDNKPTAFLQLVKEVKKHVKKGMSVVYGLEDVGGFGRALAVYLTESGCWVKEVNAKLANARRKSHVTIQKSDSWDAECVAKVLRDELHNLPDAKPIDLYWAISQLVTHRKWQSKNLTNMVKRLHQQLGYHYPSYKAFFSEIDGKTALAFWHKYPSPKHLTGVWAEELAKYLRKLSNNGLSTKKAEQILSLITADGDTTRDFQEKRDFIVRGLVKNIRFSQRELKRVEEEIGGLMKELGFQLETIDVVTAAELVAEIGDIHRFSSPDKLARFAGIAPIAVGSGNKHRNYKSKQGNRELHDIIKALAIRQIAVTRTKKEPRNPYFHAYYEQRMAAGKTKQQAIVCIMRKLVNVIHYLMRTKAAYVIPVVSSNQAA

SEQ ID NO: 427119 - protein, 419 aa, unidentified
MKDKQEFAAFIGIDWADAKHDICLQAAGFEHTESTVLEHKPETIDAWARGLRQRFGARPIAMCLELDKGPLVYALRKYDFIVLFSVNPSTLAKYRAAMTPSGAKDDPTDAALALEFLTKHPERLERLNPQSPALRALAQLVEHRRRLVDDQTRITNRLTSALKNYFPQPLEWLGEKNTILFCDFLERWPTLKALQQARRSTLERFFREHQVRDAGLIERRIHAIKAATALTSDEGVIAPNALLVQALVTQLRATLKAIAQFDQAIVEHAHPHPDFALFNALPGAGPVFAPRLLVAFGEQRQRYRCASELQKYAGVAPVTERSGKMSWVHWRWQCPTFLRQTFVEWAGQSIQHSFWARAYYQQQRERGNSHQAAVRALAFKWLRILFRCWKNRAPYDESRYLEALKRRGSPLIHNLAKSM

SEQ ID NO: 427120 - protein, 341 aa, unidentified
MKKVSIVGLDIAKNSFHAHGCAKDGSKVFSKALPRGRVLEFFDQVEPCIIALEACAGAHHWSRELSRLGHDVRLIAPQYVKPYVKRQKNDANDAEAIAEAASRPTMRFVAAKTTEQQGQSMVLKTRDLLTGQRTQTINALRGHLAEHGIVAPKGPQHLPRLERAVAENADHLPPEVIGLCQIFFDLIAGLGDRIDALTRQLRQVAQHNDVARRLMTMPGIGPVTAVSIAVLAAPPEMFSKGRDFAAWVGLAPRQHSTGGKTRLGKISKMGQRDLRRLLIIGAMSAIQAAQKRGGAPDGSWLARMLARKPKMLVAVALANKMARMAWAIMVHGGVYETPANA

SEQ ID NO: 427121 - protein, 371 aa, unidentified
MADYREAFVGIDVAKLRNAIAIADAGREGEVRFFGEVDASSENMGRVIQRITTKFDRVHFCYEAGPTGYGLYRLIRSLGHECMVVAPSLIPRKPGDRVKTNRRDALALARLLRAGELTAVWVPDEGHEAMRDLVRARAAAVETLRVHRQHVSAFMLKHGRIYPRKTGWTMRYLRWLQEQPFDHPAHQIALQEMVEAVRIAKERVERLEGVIEEFVPTWSLAPIVRALQTLRGVDLIVAVTFATEIGDVRRFESPRQLMGYLGLVPGERSTGDTVRRGGITKAGNGRVRHMLVESAWTYRHPPRVGAKKLYRLEQAPPRVREIAWKAQTRLTARYRMLSGRGKKTTVVCTAIARELAGFMWAVAKEATAVRS

SEQ ID NO: 427122 - protein, 387 aa, unidentified
MPQPNDLSRSLVALDQDSTIIAVVEMSQSSWLVGGVVPGIERQPRKKQEPSPERLLALLHRWRDESVRAGRTITRIAVAFEAGRDGFWLARWLEARGVEAHVIHPSSVAVSREHRRAKTDRLDTELLRRGFLGWLRGERGHCSMARVPTIAEEDAKRPNRERECLVKERTRLVNRIKGTLARLGIRNFKPTLRQATERLATVHTPEGTPVPPNALAEMQRYLARLRFVVGQIKQIEEARRQRLEEEPECGRHAMVRLLARVVGIGIETADMLVNEVLSRPMRDRRAVARYAGLTGAPDESGAKRREQGLAKAGNARVRRGMIQLAWRFLRFQKNSALAQWYQARTADRRGATRKTMIVALARKLLIALWRFGTIGEPMDGVTLRPAR

SEQ ID NO: 427123 - protein, 329 aa, unidentified
MEKVIIGIDISATTLDICRREETKKDFFTISNSISEIKKILKSLKKYSQVTIAMENTGRYNWYIYEALKDFSYTVFVINPLHLKRSQGLVRGKNDKIDSERIADFASKNQESLKSWKPDSESIEKVRFLFSERNSKVKLRASLLKQQSNYKLMQSTLAEELLKMNKEEISLLEKHIAILEKDIENVIASHQDLKKKSELLKSVPGIGKVLCWMMLIKTGNFQEITEPRKLACYSGVVPFDHQSGTSIRYKPKLSFYADKSLKSILHMAAMSAIRLENDLREYYLRKVAEGKNKMLVLNNVRNKIIHRAFAVINKQKPYEKNYINNLVTS

SEQ ID NO: 427124 - protein, 349 aa, unidentified
MQVLHHGLDLSRKRLDVHVLDEGGATVKVTAVSPDPDAMRHLVSDVAPMGGRVRAAIESANGARFVHDTLERFGWEVEICDALKVKGLAPLACKTDRIDAWVLAELSRRDLVPSIWLPTPEVRAERERARFRLHLVRHRTALKNRIHATLIAFGRPCPYADLFGVGGRKLLRALDVPDPWRGTLLASLELIETLDEQISTCEGELRTLGADHPYVPLLLTVPGIGWVLAYTIASEIGSIARFASPAKLCGYTGLCPRVIQSGGRDHRGPLAKNGPRYLRWALIEAASHAARHPLYRDRYQRTKQRLGKQRGAKVARVDLARKLAEAIWFMLTRKQPFAPAGATRSALAS

SEQ ID NO: 427125 - protein, 344 aa, unidentified
MNVSKPKKFTYFIGIDVSRNELDFAIHYGQTFIFHKEIANELTAIKNVIEEIKKQPKFMMSKAVFCMENTGIYCNILINALKKFKANIVQENALQIRNSLGNIRGKHDKIDAIRIAQYAYRHREELRLWQSKRKIVQQVAYLSTIRFRLMSIQLALKAPLKEQQDFLSKKESKENVEVCKRSMTSIRQDIEGIEMRILELIASDENLKNLLDIITSITSIGVVTAVQMIIRTNEFRGITTAKKFACYAGVAPFKDESGTVIKKARVSHIANKKMKSLLHICAVGAMRYDKDIKAYYERKVAEGKPKMLIINAIRFKLITRVFTCVHQNRQYEKEYKRRDESYSV

SEQ ID NO: 427126 - protein, 350 aa, unidentified
MKKVVKQSVGIDVAQKELVVCLGRMHEDWSTELYAYKSFTNTSKGFLSLAQWVLKLMEPTVPIRFVMEATGVYHESLACYLADHSYCLSIVLPNKISNYARTLSVKTVTDKTASEAITLFGLERNLDDWKRPKPIFKRLRQLSRERNQLVQERTMVKNQLHAEQAESEPNVSSIKRIKQRILLLSKQEKAINEEIESLVKKEKTISQELTLLCTIPGIGPLTAATILAETNGFELVRNKRQLASYAGFDVKDKQSGTSVKGKTRISKKGNKYLRKAMHFPALSAIRHDERFRSIFARLVSKHGIKMKAAVAVQRKLLEMTYTVFKTQTAYNKNYLQEIEITRQSSRMEIA

SEQ ID NO: 427127 - protein, 335 aa, unidentified
MQIYGIDLAKEKFDVSFFDLTSKKVSNQPSHKVVTNNLKGIGKFFKGLPSDAVLVAEHTGVYGDTLLKCCMDSNVKIAFVGGYVIHRYRATPDRAKTDVLDCALLREFGERYPDKLKYRKFPEEALYELRQLARHREMLVEQRKQLMTADKSEDCRPIRSLAVKRSMDRIKEMLDKEIAETEKEMLKVIDGHDSIHHNYEIVKSVKGVGLVTAVELLVKTDNFTKITTARQYAAYAGTAPYEKSSGKMDKGAHISKIGNRRSKTLLYICAESARLHNKEIKLYYERRTLIDKKPRHYVLNAIANKLLRIIFTLVEKGEFYDVNYIRQDPRLVKHN

SEQ ID NO: 427128 - protein, 403 aa, unidentified
MAAVMIGVDPHKGSHTAVAIGAAEEPLGHVRVRASTVQAERLLAWAGSWPQRTWAVEGAGGLGHLLAQQLVAAGERVLDVPPKLGARVRLLASGDTNKNDPNDARSVAVAALRSAGCRPVRADDHATVLKVWAKRHRDLGRTRTQVACRLHAVLCELVPGGFSKRISAPQAARVLSQITAAGAVARARYELAADFLEDLRRIDVQMREARKKLTAAVQASGTTLTGIFGVGPVVAAVVIGEAGDAARFASREHFAAYNGTAPVEVSSGNRKVYRLSRRGNRRLNHAVHMAAVTQVSQRHSEGRAYYDKKIAEGKTPKEALRALKRQVSDAIYKRLKADAARAAAGAGQGPGGHQGNDSVASAAGSHPEHQLFGQATPGPEPTLRPRPQTKTTSRATRKTTRTT

SEQ ID NO: 427129 - protein, 350 aa, unidentified
MVTLGGDSHKRTHTLVAVDDNGRQLAEKTLLATKAGHLEALQWAARWSERKWALEDCRHVSRRFEADLLGAGELVVRVPSKLTGGARKVARTSGKSDPIDALAVARAALREADLPVAKLEGAGRELRLLLDHREDLVGERTRIQNRLRWHLHELEPEAAIPARMLSRYHTLAELEGRLRSQHGVVVEIAIELVVRIRELTRCINHLEADIAGRVSGLAPTLMQLTGCGALCAAKVVGEAAGVSRFRSKAAFAMNNGTAPVPASSGNQMRHRLNRGGNRQLNAAMHRIAVTQLSRPGPAKDYVARRLANGNTKTEAVRALKRRISDEVYRRLLHDERAVLASPSDSVEVAA

SEQ ID NO: 427130 - protein, 390 aa, unidentified
MILVGIDVAKDKHDCCIINSDGEFPEEVFSILNNREGYETLYKRICSLAVDLAKVKVGLESTGHYSSNLLAFLLDKHLTAYVINPLRVNLFRKGQSLRRTKTDKIDSRNIAHLLMTDSSLKPYSLSSYHMEELKSLTRYRAFIVRERTKLKTSIARLVTILFPELEQLVSSIHIHSIYAMLEKFPGSAYIAAAHLTRLTALLLKASRGRFGRETAIRIRDTARRSIGAVSPAKSMELQHTIAHLRVYDQEIGEIESEIEKIMDDVNSPITSVPGIGMQMGAVILAEIGSFRRFDSPDKILAYAGMSPSTYQSGKLTGSYSRMEKRGSRYLRYALFNVTRYVCHYDPGFTAYLSKKRKEGKHYYVAISHAVKRLVRVLYAMEISGNRYQTA

SEQ ID NO: 427131 - protein, 419 aa, unidentified
MSFKILKNNCCGLDVHKTWIYACIGITDSNRRTEYKQARFSSFTKGVQELCNWLAKYNCTDVCMESTGKYWIPVFNILEKNNVWVTLSHPKYTKPQKGNKTDRKDAKWICDLYMCGMVKPSFIPPADIRQLRDLVRYRFKLTCMITGEKNRAHNCLTISNFKLDEVFSDIFGKSSRSITEQILQHPGETFDVAPFVDGRCKTPIEEIQAAVDGAISTEQAVKLRQCLNHIDELEKHQSEIEREIFRLSDKYEEVLNLIRTVPGFDKNPMTAIQVLSEIGGDMSVFPTAKNLVSWAGCCPRNDQSNQKIKSTRISRAGSYFKPVLVQVANALIKSKKNPEFTTRYRRIKARRGHKKAIIAICRMILTAIWHILTDLKPYTPVGFRESRPVNESKILTTSQALNLLKQRGYVIKDDIVSVP

SEQ ID NO: 427132 - protein, 334 aa, unidentified
MSLKLLAIDLGKRSFHIFGIDNEGVIISRKIGRSKLAETVRELAPETVAMEACASAHYWGRCFLAFDCRVLLINARFVKPFVKGSKNDAADAEGIYEAAQRPTMRFVPVKSTEQQDLQSLHRARDRIVCARTALINHTRGLLGEYGVVLPQGAWRFLEQARDAVAAAEFSDLARGLFNDMLKELDTLDLRIAQLDRQLAAICRTNEACHRLSKLPGVGPVVATALVAAVDDGRHFRSGRELAAWIGLVPRQYTTGGKPRLGGIGSRANHYLRRQMIHGARSVMFRLAKHDDRRSEWLKGLAARRGFNRTVVALANKTARTAWALLTRKEDYVAA

SEQ ID NO: 427133 - protein, 400 aa, unidentified
MLSIGIDVSKGKSTVCGMKPGGEIVYAPFEVQHTREGMSELVLLLHNSGEEVRAVLESTGSYHCPVVAALLENGIFVSVVNSLRMKRFCSQSIRKVKTDRIDAMQIALYGLAYWQELQPTKLPEDTYRELQLLARQYYQMTSLLIKAKVDFNAICDQVLPGMQELMSDHAGRHKLSDFVLRYRHTTHILEMGETRFRKDYCKWAEKKGYRNCERMAVLIFATAQNGIPVLPNAPSTQIVITEAIRVLHTVEASRDAILTQMQALAKTLPEYSLVREMPCIGDTLAPRLIAEIGDVRRFHSKRALIAYAGIDAPPYQSGKFCANNRHISKRGNRYLRKTGYEVMQSYVMHKPANDPIFTFIEKKRGEGKSGKLAMVAGLNKFLRVYYGKVTELYRSLPAIE

SEQ ID NO: 427134 - protein, 354 aa, unidentified
MLAELVDHVIGVDPDRDWITAAVVDANTTGVIAKQKFSADAAGYDDAISWAEEFTVAGERAWAVEGTASYGRGLTAALARVSEWVIEFDRPREKASKDGAKSDELDAVRAAREALGRDRIHQPRAHDGHREALRVHTVTRAGVVRARTAAINELKALVLTAPDDLRRELRHLTTRSLVKRCASFRDTPQRPVAERCARNTMRSIARRIICFNDEVAVHDTAMKQLVDEAAPQLVAEPGIGHVTAAMFYIAWSHPGRCRNEAAFARLGGAAPLPATSGQSQDRHRLNRSGDRQLNSALFVVALSRTSNHQPTRDYRDRRRSEGKTDREIRRCVKRYIARRVWRLLEHPPALEIAA

SEQ ID NO: 427135 - protein, 349 aa, unidentified
MAMTIVEAPPGITGGVDTHLDKHVAAALDPLGRLVGTESFDADAAGYKALLVWLEDFGEVTKVGVEGTGSYGVGLSRFLRRKGIEVVEVNRPNRQSRRNQGKSDSLDAVEAARAAISGRASGVGKTKDGPVEAIRVLVVAKRSARQARVKATVQMRHLGFTAPDQLHSRLKGLSVTALVAEGAKLRATKSADTVTAATKASLSSLAHRIQGLDQEIAELDEKIESLLLATAPDLMARFGVGPDTAASLLVAAGDNPERLHSEAAWAHLCGVSPVPADSGKNAGHLRRHTGGDRQANSALWRIAMVRIAHDPETTQYFERRVKEGRTKRDVIRILQRYIAREVYRYLPRG

SEQ ID NO: 427136 - protein, 340 aa, unidentified
MKITTFGLDLAKNVFQLHWVEPETGEVKRRSLKRDQTIKFFAQRSASVVAMEACGSAHYWARKLIELGHEARLIAPQFVRPFVRSNKTDAADAQAIWEAAQRPERRFVAVKSVHQQAVLMLHRVREQRVKMRTMQINQLRGLLYEFGVILPAGRHKAMPQVTQALARLEDTLPAMALEVLREQCASVEALSAQIEEIERKLAAWRKEDEAAKRLMQMPGVGLLTATAAVAAVGDAKVFSSGREFAAFLGLVPRQSGTGGRVKLLGISKRGDGYLRRLLIHGARAVITHAKARDPWVEALLARRPLNAVVVALANKMARTIWALLAHGRHYEPRGQALGCA

SEQ ID NO: 427137 - protein, 335 aa, unidentified
MTITTIGLDTSKSWFQVHCIDADGRTVLRRKLARSKVLSFFANIPSCRVGLEACGGSHFWARELAKLGHDARLMPARYVRAYVKTNKHDAADAEACCEAVQRPGMRFVPVKTEEQQSMLMIHRARDLLVRQRTAAVNALRGHLAEFGIVAAKGTAKAHELMRLAGDDERLPAMAREALGYIVAQIHDIESRLKIFEQRILSLAKEDEVCRRLMTVQSIGPYIATAIVATVGDPRNFASGRHFAAWLGLTPKQHSTGGKEKLGGISKRGDSYIRRLLIHGARATVARVRSGQTKNAWLSGLLGRRHFNVATVALANKTARVAWAVMSTEQTYRRAA

SEQ ID NO: 427138 - protein, 377 aa, unidentified
MSKLRFVGLDVHAETIAVAVAEAGGEVRSLGIIPNRLESVRKMIGKLGSVGTVKCCYEAGPTGYVLYWQLTQLGVACEVIAPTLVPTKAGDRVKTDRRDAEKLARCYRAGELTAVWVPDAAHEALRDLVRAREAAKKDQLRHRHRLGKFLLRHGMRPRDAGKAWSKKYLEWIRIHVRFQQPALEATLAHYLHEVEHAAERIGMLEQAIDEAVVQAAPEIRAVIEALQALRGVAQMTAATVVCEVGSLARFENPRQLMGYSGLVSREHSSGNRVQRGAITKTGNAHLRRVLVEAAWAYQRRPNVQGRLLRRQQSLALSEEAKRIAWKAQQRLHKRFTALAARGKNKNQIVTALARELLGFLWAIAVHTEAQFKLAKAA

SEQ ID NO: 427139 - protein, 474 aa, unidentified
MAGKAHADLQALPMLCHETLYVGVDVGKKTHVAGFISTTLLSRHQRFESCPALSFDNSREGFRALVDRISTYVPLTQVYIVMQITGHYHRPLLQYLQEMELPTYIMHVQKRQEGLLKTDKRDALGLGNLLFNQLEKGIQVGDPMQAVRRLAPPTEAASQLRGMVQHRHELTVESTRRRNKLTSICDEVFPEFTHILKDPNLPTALAMRKRFPTPAAIATTSLSALQEVRGKNRSLTDAKLLELQQLAAQSIGTKDPARLRGLSFEQKQLIAELELIQQHLEQLEAELTQIVEHSREGKILTSIPGIGPTQAAAISASIGSIANFERASQLKSYFGWAPSVSQSGYTLDHVRLTPRGQRQMKLTMYLVVWHAIRLKDCEWAKIYERLVPLKCSFNERTRQYTGRAKVMGRIAGQVISVIFALLKRDAEALSTLPFGAKLPDPVLYDPEIHHQHRAGQYRAFTQQKPSNVIELPPH

SEQ ID NO: 427140 - protein, 356 aa, unidentified
MTKRNKLDFTGQPIYIGLDVHKKSWSVSIFTRYGEYKSFSQPPQVETLVQYLRHHFPGALYHAVYEAGCCGFWIHNQLVKEKVNCTVVNPADVPTKNKERKSRRDRVDCRKLSRSLRNGEIEGIYVPPREKLEDRSLIRTRLSMGRKQTRCKNQIKAMLLFYGVVIPEEREMGHWSRRFIRWIEGIRLERASGDIALKIHLEELSHLRQIIAKVNHAILVLSRTEEYRPWVHLLRTIPGISTLTAMILLTELGEIVRFRSIDPLCSYVGLIPDTQSSGEKEYVGGVTQRGHSHLRWLLIEASWIAVRKDPALLMAFDQYCKRMRKSKAIIKIARKLLNRIRYVLKNQAEYVPCVIE

SEQ ID NO: 427141 - protein, 324 aa, unidentified
MVTVTDETDRVVAEKRLPNDISKIVGFLLPWRDELVGVVVESTYNWYWLVDGLQDAGFEVKLANNGAIKKYDGLKHSGDEADARQLAHLLRLGILPTGTILSPEHRATRDLARKRMQLVRSRTSHILAIENIMARQQAVKITSNHIKRLTTGDVDQMGLPADVALAVQSNLAVVTTLGAQIDLLEKRLQERLDERPEYALLTSVPGIGRILAAIILLETGPIERFRAVGNYASYERCVDSQHLSNGKKKGEGNVKNGNKYLVWAFVEAANFALRFNAEAKRFYERKKARTNNVVATKALAHKLARACFHILKERQPFDVTRCFA

SEQ ID NO: 427142 - protein, 431 aa, unidentified
MSERKSLEIRVSVDVGSRSHQVAIGLSSGAVLEEFEIAHRVEGFEDLFSRIERHRKGNSYRVAVAMEGFNGWARPLDSMVRGRGYRLYNINNLKLARFKEIFPGAAKSDRIDARKGLELFQLRDHLPLAKEVLQEVVGTPHENEVLKRLSRRRRRLVDERVRVVNNLQADLQAVCPGLLEITKEAGNQWFLNFLISADTLPQLARLRRTTLLKIPSVGVKYARLIQDWQERAHFSEEVEWVSAMIQEDARRILELDETIKALEVKTAEVAETSTIAKLLRSIPGYGAICTSELAGEIGTIERFNKEGSLALYLGMATLDNSSGKYQGTKRPKHINTRAKAAMMTALDRHRKYVPQSQKYYEKKRAQGKSHNQAIRALGRHLCRIIYKMLKEKREYEVRPLKRDTQAKVTSRSSRIGQIGKKKISAKDKITI

SEQ ID NO: 427143 - protein, 384 aa, unidentified
MKKNSTAKKGPKALSNGKRNQVREVAAKQRLTIGLDLGDRTSRYCILDEAGETVSEGQLPTSQAGLSSLFAKMPSSRSALEVGTHSPWVSRHLAGMGHEVIGANSHQVKLITQSVHKNDRIDAEQLARLARVDPKRLSPIRHRGREGQADLAVIRARAELMEARTELINCARGLVKPMGERLKKCDADQVKESMGEGLSAAAQTVIGPLLKSVEAISQQIGEYDQKIEAIAKRYPEVELLTPIYGVGRLMALTYILTLEDAERFAHSRDVGPYLGLTPKERDSGDSQPQLGITKTGDGLLRSLLVQGAHCRLRKGAPDSDLRAWGLGKMKSGGKNAKKRAIVAVARKLAVLMHALWSRGEVYDPLYNQQAALAAAAKGNRKAAA

SEQ ID NO: 427144 - protein, 326 aa, unidentified
MSVFAVGIDVSKKTLDVCALVKQGKQHQQFSNTPQGHEALAQWLEQWAADVHIALEATGRYGDAVASYLYSQGYAVSLINPLRVKAFGQSLLSRAKTDRHDAYLIALFCQMHRPALWQPSTPIIIQLKEQTRYLKSLKQMRQQEVNRLKSGLQDQCVKAILETNIAHLEQQIQHLEKQIHQAIRQDPALSQAYQLLDTIPGLGKTTIPILLAEIGRIDRFGSAGQLACYAGITPKLHQSGTSVYKRSRISKQGNKHLRTALYFPAIVAKSKNPICLQLAQRLEKEGKAGKQIVVAVMRKLLHLAYGVLKSGQAFDPNFVKQIPIAA

SEQ ID NO: 427145 - protein, 461 aa, unidentified
MSKKRPAGKQKGSAQGQVDWKALDIVHPDAAGIDVGGSEHWVAISPDRDPEPVRRFGCFTADLREMARWLVEKGVRSVAMQSTGVYWMPVFEVLEQHGLEVYLVNAQHTKNVPGRKSDVQECQWLLKLHAFGLLNNSFQPTDEIRIARTLWRQRGNLVAEASSAIQRMQKALIEMNVQLSSVLSDISGVSGMSMIAAILDGERDPWTLAALVQSGVKATTEDIAKSLEGNWREELLFVLRQDVELYGIYQGKIDDCDLQLRKHLESFGSVVDLKTQPIGPKPKGKRGSKNAPKFDLRTELYRISGIDWAQVNGIDVLTAQTVIAECGADLSAFASEKNFASWLGLCPTNEQSGGKILKRRTRKVVNRAATALRNAATTLLRSQSYLGAQYRRLRTRLGAPKAITAMARKLACLFYRLIKHGQQYVDKGNEYYEAKYREQQIRSLTKRAQKLGLQLVIPKPA

SEQ ID NO: 427146 - protein, 415 aa, unidentified
MEKLLERCAALDVHKRQVTACAHVPHRRGERAELRAEFETMTPDLLALRDWLKGLGVTHVAMEATGVYWKPVYYLLEDDFELLLVNASHVKNVPGRKTDVADAQWLCELLEHGLLRASFVPPKPIRELRDLTRYRKSLVWERQREANRLQKLLEDANIKLASVATRVLGASGRAMLAELCEGRNDPEALAELARGKLRRKLPELRRALTGRFSSHHALLVSQLLSHIDYLDEAIDALSAEIEERLRPLEHKLELLTTIPGVAERTAEVIMAELGADMQRFPDHRHLASWAAICPGNEESAGKRKTGKTRKGDSWLRTALIEAANSAAGRTRDTYLNAQYVRIKRRHGHSKAIVAVAHSILVSAYYILRDGKPYEDLGGDYFLTRETQERLTQRLVSQLERLGQRVTLEPLAQPAR

SEQ ID NO: 427147 - protein, 342 aa, unidentified
MSIVGGLDIHRQQVTFDVVDTVTGEAWRGQVRPADREHLRGWLAGFAGRGEGELGMEGCTGWRYVAEEVAAAGFTAHVGDPAEIAARRGSKKRAKTDRADARLQRELLERGEFPECWVPPSAVLDWRQRLETCHDLRVQHTAWVQRIHAVLFHQGAPACGDLSAAAGRAALGDACAGLTGAGRDQVAAALGQLELAAAQLAASRAAVTAIARHVTGPVVLCRELYGVGPLTGLAMTSWLGGAGRFASSRQAVRFTGLDITVRSSAGKRAPGHLSRQGPPVLRWCLYEAGKTSARPGAPGYEYYSSVKDRIDGKRAALSQARRLTRRGMHILADLGDDAFAPC

SEQ ID NO: 427148 - protein, 370 aa, unidentified
MLENVAVRGSRYREPLTRRAAPVSPLASTAGELWDRCRSHARPNSRQTSIARTRQVTVAQIICGVDVSSISLEACIGLTGPARAFSNTAEGIAELLAFCRQQGVDLVAMEASGGYEKQPFALLWAQGLPVALLNPRAVRRFAEGMGLLEKTDRIDARVIAWFAAVKDSRPCDPASAQQQRLKALVTRLRQLTELQVAQRNQRLLVREETVLTSFSALLALVATQIRILEADIAALIAADPLWRKLDQAFRSIKGVADRTVARLMAELPEIGMASNKAVSKLAGLAPLARDSGKHQGKRPVRGGRRDVRAILFVVAGVVRRYDLDFAAFHQRLSAAGKPKKVIRVALAHKLLVRLNAKARQVRNEFVPLQA

SEQ ID NO: 427149 - protein, 330 aa, unidentified
MEIQDAIGIDVSKQTFDAMIYTSQQHRTFQNKTTGFRQMLSWIARLGINPDTTRFCAEHTGLYSHALAQFMADRGLHFSLVSGLEIKRSLGIKRGKDDALDAKFIAEYAYLRKGKLEDYAPPSEAVQELRKLVALRRKLVTHRKGYEVTIAESQRVIKKKDHQAYFEVHEALIKALKKQIAKVETQIEMLIEREQELRHLYLLLRSVCGIGPVIAPILMACTDCFRRFKTWRQFACYIGIAPFPYQSGTSVKGKTRVNHLANKELKALIHLAASSAILCDPELKGFYQKRIKAGKSRMSSMNIVRNKIVARVFAVVNRQTPYVKLNSFAA

SEQ ID NO: 427150 - protein, 338 aa, unidentified
MTILTVGIDLAKNVFAVHGVNEAGKAELIRPAVPRDKLHELIASLPPCVIGMEACSGAHHWARLFQASGHTVRLIAPKFVTPYRMTGKRGKNDAADAAAICEAIQRPHMRFVPLKTLEQQSRLMVHRARQGFVEQRTATINRIRGLLSEFGIVLPLKAATVRRRACECLEDLPGYANTVIGDLLSEVTHLDERIAQYDTHIQAMAKDDERARRLMQLGGVGPTTATCLLAMIGNGHDFDCGRQFAAWLGLTPGQYSSGGKTRLGRITKAGDAYLRSLLVLGAKALLAAAKNKADPVSRWAIALAERRGYWRAVVAIAAKNARMAWAMLRRGEAFALPA

SEQ ID NO: 427151 - protein, 466 aa, unidentified
MENNYILYVGMDASKGKADAAILKVSDRRSVKPKFLRKKLSFKFVKSEVTSFLETVRSYSDDNCTSICFALEVTGIYSTNVYNFIKDNLNDNESIKFLNTDFVNQWRNAHNIAKSDPLDAQTISTIIGTDSDVQYVNDNVFENKNGYQDLKALVHRHYQIKKIYSQEINRLIAQCDCLFPELQYVFEPKSAAFIAVLSSYPTTHDIINASRLEVFNVVYEATKHRCSMDKIDKLFDLCHDTLVPDNISSYGRSIILDLVENIKNIKGQLKMIERYIRDVASLNPAYKLLLTITGCGPLTAATVIAETGDIKRFKNADCFVSYSGTSPRNKRSGTSVETMGKISKKGSRYLRHAIYMIAEFARRHNPVLKHQFERIKNGNKKRHKLANIAIANKIARYIYSIMKNESSFVIFHEHIMKLPEETQNTFFNSISLDFPKNTRKQIYQYSDINGEVHKFIYTKLEETMII

SEQ ID NO: 427152 - protein, 327 aa, unidentified
MFCLGIDVSKHKLDLCLFPGNGKKKTKSIKNQVGVERDICDWLQKQKCPPEQVMVVMEATSVYHENVAYGLHGNTPVTVCIGNPQRVREFARGMGILTKNDAVDAWVLARYGELKQPDAWVPPPPEVRKLKDLLRLRDAIVEDVQRATNRLEKANSTQTAGEVTDSLERTKKSHEKELKRINALIDDHMDKNDGLKDDLKLLESIKGIGGVVGTTMLSVLRTCQFRNAGQVAAWLGVVPVEKTSGSSVRGLARMSKTGPADVRAKLYMAAIVAARWNRPVRALYERLMAKGKPAKVALGAVMRKLVHLCFGVLKTREPWNENYVATA

SEQ ID NO: 427153 - protein, 416 aa, unidentified
MSLALPEALFFTGIDWAAQTHAVCVMDAGGKIAAEFTIEHSADGIALLAGRLARYGTPGDMPVAIERPNGRLVDLLLEAGHPVVPVSPNAIKTWREGEVLSGAKSDAGDAAVIAEYLRLRQHRLKTAAPYSDETLALRTVVRSRGDLVEMRVAATNQLSALLEAHWPGAKAIFADVESPISLKFLTRYPTPAAAAPLGEKRMTAFLVKHGYSGRRTPAQLVARLRAAPAGTGREALTEALRDAVLAAVGVLTALNAAVKSLDRSVAAHLGEHPDGKIFTSLPRSGQVNAAQVLAEWGDCRQAYDGPDSVAALAGCAPVTSQSGKHRSVQFRWACNKRFRVAMTTFADNSRHASPWAAKTYDDARASGKDHPHAIRILARAWIRVIWPCWLNGVPYNPARHGAAAALAEQPAKQIAA

SEQ ID NO: 427154 - protein, 312 aa, unidentified
MTKLICGVDVASKTLDARVGRDGPMLHVGRTAEGIDQLAAFCRQHGVELVVMEATGGYEKLPFALLWAAGIACAIVNPRAVRRFAEAMGVLEKTDRIDTGVIAWYAEVKRIVGQPPASQTQQRLRACVDRLRQLTDLQTMQTNQRRLVEDQGVLATASELLALLRRQIRHFECEIARLLGDDPLWAALDRAFRTIKGVADRTVARLLAEVPEIGTISNKAVSKLVGLAPLARDSGKHKGARSIHGGCANVRAILFVVTQCVRKHDPDFAAFHRKLKDAGKPAKVIRIALAHKLLVRLNAKARDVRAEFANPA

SEQ ID NO: 427155 - protein, 454 aa, unidentified
MTARKNKNRQRVQVQHLPVLQPDAAGIDVGSAEHWVAVGPDRDEQPVRRFAAFTADLVRLADWLTQCGIKTVAMEATGVYWIPLFELLESRGFEVFLVDPRQTHNVKGRPKTDRLDCQWIQRLHACGLLAGSFRPSDQIVVLRGYLRQKQMLVRYAAQHVQHLQKALEQMNVKLTEVVSDITGVTGLSILKAILQGERDPVQLAKLRNVHCKASEAGIAQALAGNWRQEHLFELKQALALWEFYRQQIEACDHEIERYLGTLPDQSADKPRLEPKPRQRKRGANEPAYDARGLVYRVSGVDLTAIEGIDQTTALVLIAEIGPDLSRFPSRRHFCAWLGLCPQHKISGGKVQSRRVRPGVSRAARALRLSAWALHRSKSALGAYCRKMKARLGAAKGIVATAHKLARLVYALLTQGQEYVSQAMEEYEQAYKLRKVKGLARQAEELGYRLEPAQP

SEQ ID NO: 427156 - protein, 420 aa, unidentified
MKVTYQTCCGVDVHKSFLVATIVKTTGGIEPSYQKKRFSTFNNSILEFKQWLINNNCHDVCMESTGKYWIPVFNLLEDQINVTIANPKWVKAVKGNKDDTKDSKWIGDLFRLGLVKGSYIPCKAIRILREYTRYRYKLVSCRSSEKNRYQNALTVCNVALDSIVSDIFGKSSTSIIDYLLEQSGTTINHEEIASKLLRRLKSKEDAVIESVEGYQMTDAQKYRMRLVRAHMDYITAEINDVDKMIENMISSNPDFENAVQFLCTIPGVKRDSAITIISEIGTDMSQFSSSKRLCCWAGLTPGSNESAGKKKSVRITRAGVYLKPALVQCAHAAVKSDKSPYYKKKYEALVKRRGKKRAIIAIARMILTAIYQMLSTGEQWNPSDLYKIDMPVALVEKQKAKAIRQAKKLLQREGTLPPVV

SEQ ID NO: 427157 - protein, 343 aa, unidentified
MSIVILGVDLGKNACSVVGVDAAGAVIVRKSMRRQTLIDYVTKLPACVIAMEACCGAHHLGRLFAAQGHEIRLMSPEYVRPYVKAQKNDDRDAEGIAEAASRPTMRFVELKTQEQLDIQTLHRVRSRLVAERTNLINQLRAILLERGTICPAGRRKLELGIDAMLAAEDTTLSPRLKQLVGELRAEWHELDTKVEALNGEFVELARNDAAARRLTSIPGIGTLNATALIAAVGDASSFAKARDLGAWLGLVPRQHTTGGKPRLLGISKRGNTYLRTLLIHGARAALPSLARSETPLGRWLTGMIERGVHRNAIVVALANKLARIAWAALRKEVSFERGYPAAA

SEQ ID NO: 427158 - protein, 374 aa, unidentified
MLSARPAGACRPPPDQQKELAITTIAHPERPRVTVGVDTHLDVHVAHAKDQLGRRMETVSIPTTPAGYQDLLAWARGLGEVEAWGVEGTGCYGAALTRFLGDQGQVVLEVNRPDRQARRRRGKSDPVDAEAAARAVQAGEVTTLPKAGTATVEMIRSLRVARQTAIKARTQAINALKALLVTAPAQLREQLRGRSAAMLVRQAAALEPGPLVTPTAAAKLALRCLACRYQALHAEVATLDAELARLVAKAAPGLVARFGVGPDSAGALLVAAGDNPGRLRSDACFLMLCGSSPIQASSGKTRRHRLNRGGDRQANAALYRIVVVRLRWHQPTKDYMARRLTEGKTTKEIIRCLKRYVAREMFTVLNQTVPTPAT

SEQ ID NO: 427159 - protein, 339 aa, unidentified
MKLIRVGVDLAKNVFQLHGVDRGEKTVWRRRLRREDWIKVLKERVEPGCEIGMEACSGAHHWARELLKLGYSVKLIPPQFVKPYVKSNKNDANDAEAICEAMSRPGMRFVAVKSVEQQDVQAMHRVRSGLVEQRTAKASQIRGLVAEYGLVVPRELVRLRVALPRWLEDQANGLSASFRRLLEGLREDLVRLDERVKELDREIERLAQSDPTAKRLMQLRGVGPITATALVATVGNARQFVNGRQMSAALGLTPRQHSSGGRERLLGISKRGDAYLRTLLIHGARAVIRTAPAKDDRLSKWVTRLAARSHINVAAAALANKTTRMAWAMLSRGTDYQPA

SEQ ID NO: 427160 - protein, 350 aa, unidentified
MIIVGCDYHPGFQQIAFVDTETGELKEQRLEHREPAEKFYRELAAQGMKVRVGMEASGHARWFERLLAELNIELWIGDAAKIRAKRVRKHKTDRQDAQHILQLMLKDDFPKIWVPSWENRDLRQLLWHRHRMVQARTRLMNQLQAVALNEGLRCKKRLWREKGRKQLEAIRLAPWASRWREDLLQLLDGLNPTIAELTQAIDQEVEKSVAARRLMTHPGVGPLTALAFVLIIGRAERFQCGKQVAAYLGLVPLEDSSGERRRLGHITKQGSSMLRFLLVESAQVVARSIPQWRNRYFHLAMRRGRKIAKVALARKLAIRLFWMMRQGWDYEQMTQFGSHAGQLGTGDGVR

SEQ ID NO: 427161 - protein, 348 aa, unidentified
MSQSNIHQYVGLDVSLKETSICVVDESGKVVWRGRTDSTPQAIAEAIKRHARHVVRIGLESGQLSTWLFHGLNERSLPVICIDARHAKAALSLKVNKTDANDALGLAQIMRVGWYREVTVKGLDSQAVRALLVARAQLVSQITTLKNCVRGILKTFGFVVRTGLRSQFPKHVREAIHANPALAAIVEPTLRVLEAARAQLLVYDRAVIQRARSDETARQLMSAPGIGAIVVLAYMTGVESPGRFRRSSSVAAYFGMTPARYQSGEVDRAGRVSKCGDGMVRGLLFEAAKVLLSRSARPCALQSWGQALAKRIGTKKATMAVARKLAVILHRMWATGATFRWPTPAPAA

SEQ ID NO: 427162 - protein, 358 aa, unidentified
MKYVGIDVHKKMCQAAVLDDDGELLDEIRFPNDPEGIEEFAWKLTTFRDDVRAVVESTGNLWIPIHDRLEEHGFEVALSNPSKTRLIAEAKVKTDKVDARTLAGLLRADMFFTCYVPGEELRSRRELLRHRLNLVKTRTGVKNRVHGLLDKHGLRMPGTTAFSKENIAWLRGLSLGFMDDAILRSDLAVLEVVDGQVTLIEEKIAALAAEDRRVRLLMTMTGVGYFTAMLVVSEVGDVGRFRGDKEFASWMGLVPSVHQSGERTRIGGVSGPGNKRLRWALVESAQTAVRHDPRLGGMFERLSRRRGAGCAVVAVAHEMARIMYFTLVRGEPYRGENRGLTERKLKNMGKRALDGLRS

SEQ ID NO: 427163 - protein, 380 aa, unidentified
MKKNSTGLKDREKGKKTTAKPSKAGKKRQQQITIGLDLGDKSSRYCALGQEGEVLFERSTATTKKGLTQVFAALARCRVAMEVGTHSPWVSRLLKSFGHEVIVANARQVKLITQSSRKNDKLDAQSLARLARIDPELLRPIQHRSEEAQQHLMRIRVRAALVEARTALVNSARGLAKAMGERLPKCDADSLKLERLHELPAEMQAALKPLLEEVESLTEKIHACDETIEQIAREKYPETTLLKQVKGVGTLIALTFVLTLEDPSRFRKSRDVGCYVGMRPKSRDSGESQPQLGISKEGDVYLRKLLVQGAHYILWLGPDTDLQRWGLQLCARGGKNAKKRAVVAVARKLGILLHVLWVSGAVYEPLRNSKIREAAQRKAA

SEQ ID NO: 427164 - protein, 392 aa, unidentified
MDKAWVGVDAGKEFHWAHALDASGAKLFSRRVENDEGSLSALIDEVLCLAGDLVWAIDQPAGGAALLLALLWEREQKVLYIPALVVDRARDAYRGESKTDERDARLIAEQARMREDFSELAPEEGTLAELRLLLARRRDLTVDQTRAITRLREALLSLFPALERTLDLGAKGSLVLLLRYQTPAKIRRTGRKRLASYLKGHTVKGADELARKALEAAKTQTVELPAQEVASRICAELAGEVLALKERLATVDGQIASRFFERPEARILSSLPGIGPILGAEFVVAVGDLSAFQSADQLAAYAGLVPAVRDSGKRVGNNRRMRGGNKILKRVFFLSAFASLRSSPHSRAFYDRKRKEGKRHTQALIALARRRVNVLWAMLRDGTTFESPPLRA

SEQ ID NO: 427165 - protein, 421 aa, unidentified
MGITNIPPAMKVEHECCAGLDVHKRTVVACVLKGAPGKQPATETKSFGTTTPELMEMVEWLKSHAATHVAMEATGNYWMPVYNLLEGHFELIVANAAHMKAVPGRKTDVGDAHWIADLLRHGLLRASFIPSREQRDLRELTRHRSSLAAKRAQASNEMQKALESANIKLQSVVSDITGVSATEMLAEMLSGNTDAKELAQLAKRKLRSKIPELEKALSGNLRAHHRLILEQLLADIALFAAQIAELDAHIEALLQKDNDDIDRLDGMPGINRRVAEVIIAEAGTDMSRFPSAHHFASWIGLCPGQNESAGKRRSGKTRKGNRALRTALVESAHGAVRKKGSYFGAQYRRIAARRGKKKALIAVAHSLAVGIYHIVKNQTGYRELGEDFFDKLNPSRVLNRLTKRIQNLGFQVQVSPIPAAA

SEQ ID NO: 427166 - protein, 320 aa, unidentified
MESVTAYTRSMGIDVCAQRLDWHRLPDQRLGEFPNAAEGFQALLAELANTPVDIVVMEATGGLQRHAASALAAAGIAVAVVNPRQVRDFARASGQLAKTDRIDARMLALLGLRMQPQPRVLPNKAAMDLADRLARRGQLVEMRIAEKNRRTRASSAMKKSIDRHLAFLDQAIKTLEEELDDRLRGSPVWAEKVHLLEEVTGVGAQTLRRLLIDLPELGQLDRHGIAKLVGVAPLNRDSGVLRGKRRIWGGRTQVRNTLYMAALSAARFNAPLKSFYARLICAGKPQKVALVAVIRKLLTILNAMLRDHSRWNPDLAKSRA

SEQ ID NO: 427167 - protein, 341 aa, unidentified
MNAITIGLDIAKSVFQVHGEDHTGKVVIQKRLRRHQVEAFFSKQLRCLIGIEACGTAHHWAQTLVALGHDVRLIPAGYVKPFVRRNKNDARDAAAICTALSRPDMRFVTIKSVDQQASRGLERSRDLLVKQRTQLMNCTRSLLAELGIIAAVGWRGFAELIARVKHNEAAIPPVLLAALLPLIQQIEGLHTAIAALEDRIIAAARDNPVMRRLAGIPGIGGLTAHAIVTAIGDGRQFGSARDFAAWCGLTPQQHSSANKRHDKGISRQGDIRLRKLLALGASTIMRNARSRSNRATLWQRGILARRPVKVAVLAQAAKNARIAWALLVSGETYRSTTATTA

SEQ ID NO: 427168 - protein, 340 aa, unidentified
MKKNKQFYLGIDISKPFFDVSVLAVTQTAKQEMQTAQFGNDASGLRLFAKWLTGLGVSYDENSLVVIENTGIYHRPVWNFCSSKNLPIHIGNAAHIKWSLGITRGKSDKIDSQRLCEYGYRHREELKCTAALNPVFLQLKDLMTNRTRLMHHLTSLKSYLKELKGVSDKSFISVQQRCNKAVIAGLKKSIGLIDAEIKKLISQDKQILTNYQLLKTVPGIGHWIAIYLICCTRNFSNGITGKQLACYAGVVPFEHSSGISIRGRNRVHKMANKDLKKLLHLGALATLKYYDEFKQYYSRKKEEGKHSMSILNAIRNKIILRAAAVVQNQQPYVNYSANNV

SEQ ID NO: 427169 - protein, 339 aa, unidentified
MKYTPVGVDIAKHLIQVHFIDEHTGEVVDKQLRSKDFLTFFSNREPCLIGMEACGGSQHWARELKKLGHEVRLLQARFVKAFVMGNKNDMMDARAIWMAVQQPGKEIAVKTEEQQSVLVLHRSRRQLVKFRTAQINALHGTLLEFGETIHKGRAAMDSELPAALERMKARLPPYLITVLEDQHNRLKELDSLIDGLEKQLNSVARQNETCKRLMEIPGVGPLIATAAVATMGKAAAFKSGREFAAYVGLVPKQTGSGGKVRLLGISKRGDTYLRTLFIHGARAAALLTKEPGPWITELKKRRPTGVAIVAMANKLARTVWVIAAHDRKYDKNHVSIRPY

SEQ ID NO: 427170 - protein, 355 aa, unidentified
MTGTKYIGMDVHKESISIAVMNGFGKVVMESVIETKASTILQFIHGLHGELYVTFEEGTWAAWLYDLLKPHVRKVVVCDPRRNALLKDGNKSDRIDARKLAELLYLDKLHPIYHGEHGLRALKELVRSYLTLTKDLGRVMTRVKAIYRSWSIPCTGKQVYAPRHRSEWLAKISEPAVRRRAEFYFEQLDALRTLRQQARRELLAESKEQAAWRRLCQIPSLGPIRAAVLMGILQTPHRFRTKRPLWKYSGFGIEIHSSADHRSVHGQLQRSRKKISVRGLNRNCNHDLKNLFKGAAIVASSKPGPFQEFYTALLAKGIRPEMARLTLARKIATIALIVWKKGVSFDATHLKPQTA

SEQ ID NO: 427171 - protein, 349 aa, unidentified
MKIIGCDFHPSYQQIAMLDSVTGEMMEKALSHERKEEVQAFYAGLEGAVRVGIEASGQSQWFERMLAELGHQVWIGDAAKIRASCERKQKTDRRDAELLLKLLVENRFPRIWVPTAAERDGRQLLLHRHKLVRMRTQVKNQLQALALNQGVQRKWKLWSESGRKQLESLPLLPWANRRRAELLQLFDHLEASIRELDRVVAEQAYQRREARRLMTHPGVGPVTALAFTLTMGPAERFGRGKQVASYLGLIPSEHSSGGHPQRLGHISKQGSPFLRGLLVEAAQSAVRYEPEMRRAYQRLAQRKCRALAKVAMARKLAVRLYWMLRLQMDYAQLIQGSHAGQPGTFRGRG

SEQ ID NO: 427172 - protein, 411 aa, unidentified
MHNRQNYLYVGVDLHKEHHTAVIINCWQEKLGEIQFDNKPSAFSKFLLEVETYVSAGITVVFGLEDVGGYGRALAKYLVDHEQVVKEVNPALSFLERKSHVTTQKSDSWDAECVARILINKLNQLPDAKPNDLFWSIQQLVSRRNALVKAQSALKNQLHIQLNHHYPSYKKFFSELDGKTALAFWQQYPSPFCLEGANIKQLTAFLLDVSNNTCSVKKASDILKLVKEDGQTMKEYQEMRNFLVRSIVREIEFKKKEMKYIERELKQLVNLLDYQLETMPGIELVTASALIAEIGDVRRFPNANKLARFAGIAPVYFGSGGKGKTHKSKQGNRALHALFYNLAVQQVQVAKGSKMPRNPVFHAYYQKKLKEGKTKGQALVCIMRRLVNIIYGMMKYKIAYELPIVEEKEVV

SEQ ID NO: 427173 - protein, 384 aa, unidentified
MSADHRPEQTAIRTDLGAIFVSLELSRATWLITSLSPGREKMSKHQVRGGDTAGLLARLAELQAKAHARTGQRFPLIVIQEAGLDGFWIHRVLQSEGIESHVVDPASIATSRRRRRAKTDKIDGEALLRALLAYKRGEPRVCAMVKAPTFREEDERRIGRERKVLTAERVAHVNRIKGLLFAQGISDYEPMHRDRRARLSDLTTGDGRPLPQHLKAQVSRELDRLELLLEQLKAVAAERDALLAATEAPAKPGTAELLLDLKGIGPEFASVLWSEGLYRNFANRRQLAAYAGLAPTPWQSGTVDHEQGVSKAGNPRLRTTMIQLAWLWLRHQPGSALSRWFHERVERRGGLRKTMIVALARKLLVALWRYVTAGVVIEGATMKV

SEQ ID NO: 427174 - protein, 391 aa, unidentified
MGVLRRVVIGMDPHKRSVTVEVMEADERIVGHCRFGTDVAGFAELVAFAGQWADRVWAIEGCEGIGRHVAQRLLAVGEQVVDVPAKLSARMRMFATGQGRKTDDTDAHSIALVGVRISGLQPVVSDDQLEMLRLLVDRRRRIGQEHVTKICQLHQLLLEIVPGGAKKDLSAAQARKILAGTRPKDEVGKLRKRIALELVVDLERIYQRKKQANKELVTLLKTTGTGLLDLHGIGPTGAARLLVEVGDITRFPNRGHFASWTGTAPIDVSSGDRQHHRLSRGGNRQINMVLHMMAVVQLRNRTEGRAYYDRKVAAGKSPSEAMRCLKRRLSDIVYRAMLDDYVTAKATGPGGHRGTTHQSSVAGSHPHTSTSDKPLPGPVTRKPTTTLPKAS

SEQ ID NO: 427175 - protein, 341 aa, unidentified
MGQASTIGLDIAKRVFQAHGADATGRVVFRKRLVRAKVLEFFAGQPRCLVALEACGGAHYWARELGKLGHTVRLIPPAYVKPFVKRQKNDVADAEAICEAAQRPGMRFVPVKDEAQQANTVVFRARDLLVRQRTQCINALRGHLAEYGHVVPQGPAHVDSLVALVEDPKSSVPESARGILQVLIRTLNALEEQLKELDGEIARRAKADPVARRLMTIPGIGPIAATAITALVPAPEGFRAGRDFAAWLGLTPLQRSTGGKHKLGAISKMGERTIRRLLILGASAVVRWASRRGAAAGSWLARMLARKPRMLVTTALANKMARIVWALLVKGGTYRAPAVAA

SEQ ID NO: 427176 - protein, 450 aa, unidentified
MKKKEDRLSGLPVLHTHAAGIDIGSRFHVVAIPGELDPEPVRTFQAFTTDVERLADWLISVGIQTVAMESTGVYWVPVYEVLETRGLNVILANARETKSVPGRKSDVNDAQWLQRLHSCGLLRASFRPGRDITALRTYIRLRERHLDYGAAHIQHMQKALTFMNIQLHHVVSNITGVTGMSIIRAIVDGERDADKLAKFRDMRCKADLATIRSSLVGNYQPEHIFALKQALAAYDFYQDQIKEIDVEIESILGTLSCDMPLPVTPLPAPKHKTKAPNAPDFDVRPQLYQLTGVDLTQIHGVGPYLALRVISECGTDLSRWPSAKHFTSWLALSPGCKISGGKVLSSHTRKTSRRLTAHLRLAAVTVGRTDTALGAFYRRLAARIGKAKAVTATARKIAVHVYNAMRFGTGYQDPGSDYYETRYRERVIKQLHKRAAEFGYELQPVAMNVS

SEQ ID NO: 427177 - protein, 365 aa, unidentified
MSKLAKVDRFFKNVNLTSDDEVFVGVDVHKKSYHVALFLNDTPAIDFRMAAEPKQLNKKLEPMACSIKDIVYETGPTGYGLARDLRKNKLPANVVATSKTPRPAGTDDKTDRLDSKKLAEYSAKGLLRPVAIPTPKQEADRQLFRMRHRQARQLARVKNQIKSFLLMHGIKEPVGLATWTKASIDYLRTIKLLDTLRLSLDDLLSDHDYFKDRVKQLNKLLADTLDKGLLGHRMTLLKTHPGVGPVVSCQFATELFHYRDFSSTRQLYKYLGLSPLNNQSGEKNIRGSINKASNSRLRKNLIQGAWMWVRTDIEAKKCFYRICDNCGGIKQKAIVAMARKMAGHLWAMLMSDQPYDSEKSKSRLN

SEQ ID NO: 427178 - protein, 402 aa, unidentified
MSEKKKGVIIGVDPHKMSVTIEVVDTRERLLGSGRFDTNNAGYAAMRRYVKQWPDRVWAVEGANGAGRPLAQRLVAAGERVVDVPAKLAARVRLFDTGHNRKTDALDAHSIAVVAVRTEGFRVVTEDGELEALRMLTDRRDELTHQRVQTVNRLQRLLSELLPGQRKRDLSAAQAKAMLATVRLRDIAGKTRRRMAAEEIADLVAVDAKLKKIKAELKAAVTARGSGLMDIYGVGPAGAARVLADVGDVARFADRNRFASWTGTAPLDASSGEQNRHRLSRAGNRRMNHVLHVAAIVQIRHDTEGRAYYRRKLDAGKTPMEALRCLKRRLSDVVYRQLVADAQRMRQSDEAGPGGHCGAALQSSAADSHPLIDTSDQPLPGPAKPTLRRPLASRKTLATSAP

SEQ ID NO: 427179 - protein, 370 aa, unidentified
MADYREAFVGIDVAKQRNAVAIAEAGREGEVRFIGEVDASDTSMHRVIQRIAAKFDRIHLCYEAGPTGYGLYRLIRSLGHECTVVAPSLIPRKPGDRVKTNRRDALSLARLLRAGELTAVWVPDEDHEAMRDLVRARAAAVETLRVHRQQVGAFMLKHGRAYPRTKNWTMRYLRWLQEQRFDYPAHQIALQEMVEAVRISKERVERLERVIEDFIPNWSLAPIVRALQTLRGVDLIVAVTFATEVGDVSRFDSPRQLMGYLGLVPGERSTGETIRRGGITKAGNGRVRHMLVESAWTYRHPPRIGKAKLYRLEQAPPKVREIAWKAQARLTTRYRKLVGRGKRTTVVCTAIARELIVGFMWAVAREARST

SEQ ID NO: 427180 - protein, 367 aa, unidentified
MKKISTVAAKQSGNFSEQKLTIGLDLGDRSSWYCVLDEAGAVLLEQKLATTPKAMREGFGGMPRSRIALETGMHSPWVSRLLSELGHEVIVAHARSVRLIGESRRKDDRLDAQTLARLARIDPQLLCPVKHRSAKAQADLTLIRARAGLVRARTALVNTARGLAKSYGERLRGCNVRNMNPEKAEGLSPELQRALEPLLAGIEALSERIREYNEGIEGLAQESYPQVALLKQVKGVGTLIALTFLLTLEDPHRFGKSRDVGCYLGLQPGRRNSGQSEPQMHISKEGDPYLRTLLVQGAQHILGPFGADSDLRRWGLKLAERGGKSGKKRAIIAVARKLAVLLHRLWVSGEVYEPLRNSKQSPLAIAA

SEQ ID NO: 427181 - protein, 393 aa, unidentified
MTTNETQLTPTVAAPQGVKPHRLIKLGVDVHWREYVVVRQIDGTSPQPPQRFSPEGFIAWVAKQVKLADEVHCCYEAGPFGFVLHKRLVALGIKNYVVRPRNWDEYGKQVKTDRRDARALLSCLDRYLAGNHEALTVIRVPADQEERVRSDTRQRAQLLAERKRLAAQGLSTARYYGDDLPEEWWRAKKFEALRAELPEFLVTLLERWQRLLVAINEELEALSGQIELAQTQELPTGLGALTAQVLDREIGDWERFHNRRQVASYTGLVPCEDSSGERCFRGSITKHGNARVRHILIEASWRLQQFQPEYRAVKQRRGALDQAKARNNKSAKKKLGVGLARQFIVDWWRIRTGRTTPEKLGLQMSWPAAYVLRGKAPPRVAAPVATTEPEAAV

SEQ ID NO: 427182 - protein, 355 aa, unidentified
MNSEKYIGLDVHQATIVVAVTDSSGKLMMESILETEAATILQFFAGLRGTLAVTFEEGTWSAWLYDLLNPHVDKLVVCNPRKNALLKDGNKSDRIDARKLAELLRGNQLKPVYHGESGVRMLRELSRSYLTIVKDLSRVMNRLKAVYRSWAIPCAGRDVYYRRHRAQWLDKIREAGVRRRAERLYEQLDMLQHLRQQARRELLAEARKHAITARLRQVPYLGPIRSALAVALMQTPHRFRTKRQLWAYSGLALETRISAEYRMVEGQVRRSKKLLCIRGLNKDHNHDLKGLFKGAATMASVRPGPFQDFYQAALAKGIKPTMARLTLARKIAAITLTLWKKGESFDAEKLKSQAA

SEQ ID NO: 427183 - protein, 418 aa, unidentified
MKVCSQNGTTDSEFVDRGLHYDSENKPWRRANIRKESVMKKVRFIGLDVHAETITVAVAESGRNGEVRHLGTIPNRSDSVKKMIKKLGSAGELRVCYEAGPTGYVLYWQLIELGVKCEVVAPTLVPVKSGDRIKTDRRDAKKLARSYRAGDLTPVWVPDAAHEALRDLVRARLAAKRDQLRARHRLSKFLLRHGKRPEKNIGAWTMAYLNWIKTKVHFGQPAQEATLADYLHEVEHARDRIERLERNIDDAIETIPEKMRAVVEGLQALRGIAKISAVTIVAELGEVSRFNKPRQLMGYSGAVSSEYSSGERTRRGRITKTGNAHLRRIVVEAAWAYRHRPRVGIALAARQKNVSQEVKDISWKAQHRLHRRYYRLMARGKLKQKVVTAVARELLGFIWDIGVTIEQAHTSSKQDQAA

SEQ ID NO: 427184 - protein, 356 aa, unidentified
MSRDIKYIGMDVHKEAVVIAVLNSSGKLEMESIVETKASSILQFIHGLRGELHVTWEEGTWAAWLYDLLQPQVAQVLVCDPRRNALLKEGNKSDKVDARKLADLLRTGMLRPVYHGEHGLRTLRELGRSYQTLSQDLNRVMNRVKALYRGWSIPCAGTQVYAPRYREEWLQKIEHAGVRRRAELLYQQLDGLQALRRTLRPELLAESRKHKAAKLLRQIPCIGPIRAARLIALMQTPHRFRSKRQLWTYSGLGIETRDSAQYCYVHGQLQRTKKPQQIRGLNQNHNHEMKEIFKGAATRASCGVGPLRDFYVALLAKGMKPEMARLTLARKIAAIALTLWKKEERFDAEQLKPQAA

SEQ ID NO: 427185 - protein, 342 aa, unidentified
MKRFIGVDLHKNSFTVCYMQRKGEHNLKTFRVSPEDVEVFKKTLTKQDEVAVESTGNTGYFAREVKGSVDKVRIINPIQFKIISESVKKTDEHDAITIARYLSKGLIPEVRMRSKEEAKLASLIGTRDKFVKLRTTLKNKIHNILNASGVVTSKEMFSGDKALDKVLSMNLDQSDLFEIRIIVDQIKSLNKSIDEINKELTDRGKNLPGHKNLTSITGIGDLSATILLNTIGNVKDFDDDKKLAAYFGIVPRVYVSNQTSQYGNITKRGNKIARTALVQSTLIAIRYNHYLRRFYFKLKAKKGSGKAIIATARKLLAIVYRTLKNDWVFEDFNKFKLAAVTA

SEQ ID NO: 427186 - protein, 347 aa, unidentified
MDQIIRIGMDTSKHVFQLHGVNAAEEPVLRKKLRRQDLITFFGKLPPTVVALEACGGSHHWARLLQSLGHQVKLIAPQLAKPYVKRGKNDAADAEAICEAMSRPTMRFVPVKTPEQQAALMLVGVRDRLIRQRTQLVNVIRGYAAEFGLIAPKGLCRIEPLLERVKTEETLPALARELFEMQATEYAQLQAQLEEVEDRLMAWHRAHEGSRRLARIPGVGPIGAAMLVMKTPVPEAFRSARHFAAWLGLTPKDHSTAGKVRHGVITRAGDEILRSVLVVGATAVIRQLRRGQCAPASPWLVELLKRKPPKLVAVALANKIARIAWKLMVTGESYKAPSARPAAACAV

SEQ ID NO: 427187 - protein, 328 aa, unidentified
MCLLFTVLIKMVELFLVKPKVSRAALPELIASLPPCVIGMEACSGAHYWARLFRQYGHEPRLMAAKFVSPYRMAGKSGKNDAADAQAICEAVRRPHMRFVPVKDESQQAMQCLHRTRQGFIEEKTATYNRLRGLISEFGVIAPQSADALRHMVSVQKSSLPLQVQQCVDDLMEHVDRIEANITEYDRILSHIAKTDHRSQRLMELKGVGPTTACALVASIGNAHDFKNGRQLAAWLGLTPSQYSSGGKSKLGRITKAGDSYLRTLLVQGARSVLIGAGKRTDSFSRWVCMLVERRGYWRAVVAIAAKNARLCWASLHYGDDFRLYSVN

SEQ ID NO: 427188 - protein, 481 aa, unidentified
MKSKPQEKTKKAPCRPTQGHWNEMNRKQRRETMRRIQSDDLSLEVLHPDAAGIDIGNESHYVAVPPTRDTESVRRFGCTTAELKAMAGWLKQCGIRTVAMQSTGVYWIAVYDILEQAGLEVYLVNARETKNLPGRKSDVQESQWLMKLHTYGLLRNSFRPSQEIRTMRTYWRQRNDLVRAAGRHIQRIQKALTQMNLQLANVLSDLSGVTGQAIIKAILAGERDPHKLAAFRNWRVKATQEQIARSLEGNWQEDLLFVLKQEQDGYEFCQQQMAECDRRLKQYLQQREDRSQGARLPEEKRKERLKKKKGNTPQFDLRTELFRMTGTDLTQIDGIDVMTATTILSEAGWDMSKWQTEHHFVSWLRLCPDNKVSGDRIIGKGRLPTNNRITNTLKMAASSLRTSNTYVGAQFRRLRTKLGAPVAIKAMAAKLARLVYRMLRYGMQYVDQGASFYEAQHRNLQIAHLKWKAAKLGFRITQLEA

SEQ ID NO: 427189 - protein, 375 aa, unidentified
MNAMTRPAMSVSEPTVYVAFELGKKDWKLAMTSGFGVQPWWRTVPSRDWAAVARALAHGRARFGLSASARVVSCYEAGRDGFWIHRALLAQGIANRVVDSASIEVNRRARRAKTDRLDALKLVTMLVRVGGGERRVWSEVRVPTVAAEAARHVSRERTALTQDQTRLVNQMRGWLATWGTTLPARRRGTWWTTLRDWAGAALPAEVQARLARAEARLAGLAAQIAELEAQQEAAVSASAPATAAPRLVQLKGVATTSASVLLDEGLVWRAFRNRRQIGGLLGFAPTPYDSGESKREQGISRAGNARLQAISIQLAWNWVRWQPQSALTQWYQTHFGRGKRARRIGIVAVARKLMIALWRYVTQGVIPAGAVLTTA

SEQ ID NO: 427190 - protein, 367 aa, unidentified
MKKHSSIDQSLSSTDLSACTTLAVDLAKQVFQVAGEDVLGQVRFEQRIKSREAFYEFLQKLPPHVVVLMETGPGAQAWARQLQDQDNSARILPAGLVAKHRSGPKNDRNDALAILRAGRDEKICAVPVKSVAALAMQALHRARQGYVRRRTAVSNQMRGLLLEHGVALAQGDVAISQKIPRVLEDATQPVPALLRELIDELLAEWRHLGERISVLTGRLEVAANADMTAKRLMTVRGIGPVTATALVAKETKPERFPNARKFAAYFGMVPDQHSSGEKIRLGDMTKRGDAYLRSLMIQGAHAVLQQLRPDSQQPDDRRLLHWMSRLGRKEAAIRLANRNLRIVWVLLQNDQTYRRHAGDGQQATMSH

SEQ ID NO: 427191 - protein, 355 aa, unidentified
MNSLRYIGLDVHRDTISAAVLDEGGRLITQAVLATRASAILDFMQGIRGTVSVTFEEGTHSAWLYDLLVRRVAKLVVCNPRKNALLKSGSKSDAIDARKLAELLRAGMLSAVYHGEQSGLEVQHLARSYTMLTEDTTRVMGRLKAVFRGQAVACAGTKLYAKRHRDGYLKELGTAGLRRRAECLYQELDALQQLRRQAKRELIVECRKHAAAKWLQSVPFLGPLRAAVLIGRVQTPHRFRTKRQFWSYCGLALETRDSGEYRVVDGQVERRKKPVMIRGLNWNHNHELKNLFKGAATSASVCQGVFREFYLRLLDKGMQPEMARLTLARKIAAIALKIWKKGETFDQGHVKSQAA

SEQ ID NO: 427192 - protein, 372 aa, unidentified
MQQDSAVFVGLDASKMKISVALAEEGRQGEVRFLGDIDHTPEAVRRLVTKLVGRYGRLLFCYEAGPTGYGLQRQISALGHDCAVIAPSLIPKRPGERVKTNRRDAITLARLHRAGELTRIWVPDPGHEAVRELVRAREAAMADLRTKRQHLQSFLLRHGRIYRGSRPWTQVHARWLSNLSFEHPAQYLVLREYRQAIDDAETRLERLTQQVAEVVCSWSMAPVVEAYQALRGVAFLTAVTFVAEIGDVRRFETPRQLMAYLGLVPSERSTGEQVWRGSITKAGNPRARRVLVEGAWTYRYPARLSRTLQVRQERLSTVVRAIAWKAQLRLCARYRRLMAAGKRQTVVTTAIAREMAAFLWAIGHTVEPRPAA

SEQ ID NO: 427193 - protein, 443 aa, unidentified
MKAKSSLKKDGFQIIHPHAAGIDIASQMHYVAVPPDRDEQPVRKFGSFTTDLHEIAKWLRKCNINTVAMESTGIYWIQLYLILEEYGFEVFLVNARHVKNVSGRKSDILDCQWILQLHTYGLLNPSFQPENMARELRSYMRHRKNLTQSYSTQIQLMQKAFEQMNIKLHNVLTDITGKSGQQIIQSILSGERNAQKLSQLADKFVKATKEDIIKSLQGNWREEHLFELKQAYELYVIFKEKIVECDHQIEKVLHKLEPNQLPKNHKSARGVYSKNRLNFNATNYLNNILGVDATKIFGISELTVTEIISETGIDMSKWPTKKHFASWLNLAPNNRISGGKLLKPKKTKKKNKAGQAFLLAAYSLQRSNHWLGEFFRRIKAKHGPTIATKATARKLALIFYEMVDKKIEFNPIPIETYNQYFKERKLKYVKSQALKLGLTLVPA

SEQ ID NO: 427194 - protein, 400 aa, unidentified
MNIIGIDVSQGESHATLITKEAEEIAFKFKHNKSGFQILNSYIRSNTIIIFETTGVYSAQLTAYLKSKKVKFYELNPLEAKLRMASLRRNKTDKNDSFKLALLGATQLTEIKNHCNKQSALPYDSLRILSLRYKQLIKCRTRILNFLRSSLELTFPELNQIFKKAYAVLALQVFRMYCHPDFLAGLTLKEMTNRVYQFVSRRIHKDVIQSYCAQVWLAAKDSYPAVPADSLEIEIISEYCDEIESYNKEIAYIQSKLIKTAVGLDDFKVISSIPGAGQLNSALLLGFTGDIARFDNYKQLNAFLGLDLNRYQSGKYGKGDTINRRGSSQGRAVETDMIRSMLRNQGKIQNHLVDYYYKLKKPPFNKHDKVALIACANHLNRTIINLVHTHQLYNYSKAIH

SEQ ID NO: 427195 - protein, 363 aa, unidentified
MAAARARQQTATPATEVVGGVDTHKDTHTAAVVDIAGRVLGSAQFAADAAGYRALLAWLRAFGTLLLVGVEGTGVYGAGLARLLASENVVMVEVDRPDRKARRWQGKSDPVDAEAAARAALARVRTGVPKQRDGRVEALRALRVARRSAVAQRADVQRQIKALIVTAPESLRARLRGLKDRELIGWCAGMRPDKACAGDPMTATKIALRSLARRHQGLSVEVGDLDELLAPLVADINPDLLAMKGVGTEVAGQLLVTAGENVDRLQSEAAFAMLCGVAPIPASSGKTNRHRLNRGGDRQANCAIWRIVITRMGTDQRTKDYLARRTAEGLTKPEIIRCLKRYIARELFNRLVASPAQALTPAA

SEQ ID NO: 427196 - protein, 358 aa, unidentified
MSILFCGIDFHKNTCSICIVDNTGQEIESHKKKTEGVVKFLSNYKFEKIGVEASGGVNDFATRLITSGHKVDIIDPKAFRLVGMNGKKTDKKDAKAIAECLRLNFIPKVHLKSRRSRELKSLLMSREMTVTSRVNLCNHIRGTLREYGLPIPAGKEKFFEEVSGSINQVENGHIRVTLFELLDLAKNLIAKENDIERRIKELNEDNEKIKRLQTIPGVGLMTSTAMVSVVDDISRFKRAKDFASYVGLVPGEKSSGDKRRMGSITKSGSEILRRYLIHGARSVLMHAHKSEDPNIKWAFKLKERIGMNKATVALAHRMARIAYCLLRDETTYGEIKKEHRADAAKNFSGDSSKINSAA

SEQ ID NO: 427197 - protein, 321 aa, unidentified
MNKNTEIFGIDISKDVFDVYSHQKGHQSFKNDAQGFKSFLKVITKDALVVMEATGYYHYLFAQFLHKKKVQVSVVNPLSVKRFIQMKLAKVKTDKSDAKAICEYGRMNEVPLYTALTDVQAECLQLFRLLDNYLKKRTQTKNKKHGEEVLGIPSKYVYGSLKRDLKHLDKEIKGIEARLLELVKKDQQHQLTLLKSIPGMGMKTALFLIVVTDGFSKFETASQLCSYVGITPTIRESGSSVRGRSRISKVGNKKLRNLLFLCAFSACKHNKACKEIYERIVNKGKSKKLALIAVANKLLKQAFAIAKSGRPYDENFVSKLA

SEQ ID NO: 427198 - protein, 459 aa, unidentified
MEGAPMLDTTTFIGLDVHARSIKAVSLDVMTGEVRAATFGYDAGAVAEWVRSVDPRARCVYESGVTGFDLQKRLSGLGVDCAVGAVSKMIKPSADRRRKNDRNDAEFLARMLSVGNVVEVWVPDDECEAARDLTRALEDARDDLSRSKQRLSKFLLRHGLVFDERTPTGRRKGNWTRAHWSWIESIRFAERADNDVLAYYVDAVRRAAEEKARLEGLVEAEARKPRWRKRVDSLRCLKGVDTASAADLVFEAGEFSRFRNARSFAAWVGLTPSEHSSGESDRRGSITKAGNKHLRKTLVEAAWHYLTCSGRPKDLAKGQAPDRGARRHAAKGVRRLVERREALLARGVHGNKANVATARELACWVWAVGLMAEEAYGGGGPPHISRSSRKRFDPKPLRRTSGPFSASAQGATRVHRLSVRRRSLSRSNGLPSERSPRADIKLQRRASVRHAEVAADGLI

SEQ ID NO: 427199 - protein, 321 aa, unidentified
MQHDPSVSVVVGIDVSKATLDCYLDPVGQRAQAPNDAQGIAKLIDQLRSFKIQLVVIEATGRLHRRLAGELLLAGISVALVNPQRAREFARSTGRLEKTDRVDAQVLAEFGRGVKHRTLEQLPEKQVDLDDLISRRRALVQMHVAEKNRLHDQLPKLARSQAQKLLRLIDQQIEDLDRAIAKLIDGDDDWKRKSDIITSVPGVSDGTANQLIADLPELGKLNRQKIAKLVGVAPLAVDSGSHKGERHVKGGRGPVRNALYMAAFNAMRYCERFKQLAERLAKSGKAFKVIVTACMRKLLVTLNEMVRTDTTYNAKLNVSVP

SEQ ID NO: 427200 - protein, 321 aa, unidentified
MTYVGIDVSKLTFVVAYSSAKTSKTKTFKNTAKGIREFIKTISVNEHHCVMEATGNYSTLLVYMLSEFGFTVSLENPLKIKNFSRVMLSVIKSDEIDARLIALYGEKMQPSPYRMRSDSILILKQKRTVLRQLKKQLVATSNLKGSMEVLPIYDSKCKKTIEKTIAFLGKQIKYMEEELASLANDEFKKQMDLLTSIKGIGVTLAAALIVATGGFTYFDNAKQLTRYLGLSPTYQQSGTSVNFKGHINRNGDPILRSQLYVAALSSLRCNTECKVCFDRLRSKGKPGKVAVVAVANKLVRQAFAVVTQDKPYVDGFISVKP

SEQ ID NO: 427201 - protein, 401 aa, unidentified
MWFAGIDWADRHHDTFVIDEAGRKVAQLRVDHTPAGLKKLVGFLREIAPLDQIACILETNHGLLITALLEAGLALYPVNPKTIDRKRAASGAKTDLIDAYLLAKHGRAEWADLRRLDPDSPKIAELKALTRDQESLIQSQTRLVNQLTACLKAYYPAALQLFTKLQQHSALVFLQTYPTPQAAKPATVAQIEETLRKGQHTHPTTVAPKIYEVLHQPHLRADEVTTRTKTRLMQALVAQLLPLLEQIAAYDKEMTELFLTHADSQIFASLPGAGKRLAPRLLAEWGDDRRRYADASSIQALAGTSPVPFESGNYAKVHQRLACLKPLRNALQQFAWQSTQQEGWAKAYYDCKRKAGKSHSMAVRALANIWVRIIFAMWVKKELYERTTFVAAQRRHSSRAA

SEQ ID NO: 427202 - protein, 286 aa, unidentified
MEYFAGLDVSLEETAICIVDDTGLIVREARIASEPEALVAFFRASGMAMKRVGLEACSLTAWLHQALTEAGIAAICIETRQAKAAMGAMPNKTDRNDARGIAQIMRTGWYRAVHVKDPCCRSWRALLAARRMVLNKRRDVENGIRALLREAGLKVGTPSRRNFAARVIELVADDPVLAALSRSLLSVISVMTEEIDRLTKRVLDEVRIEPTCRRLMTVQGVGPFTALAFRATIDRPDRFQRSRDVGAHLGLTPRRYQSGETDVQAASAGAAMSSLEPHSTKPPIRC

SEQ ID NO: 427203 - protein, 386 aa, unidentified
MQKLNDFSRSLIALEPDGTLIAVIEMSLSSWLVAGIVPGVERQPLKKLAVDESALLKLLHRWREEAEKAGHRIERIAVAFEAGRDGFWLARWLKVRSIEAHVIHAASVAVSREHRRAKTDRLDTELLKRAFLGWLRGERDHCKMVAIPSIKNEDAKRPNRERENLVSEQTRIINRMKAALIRLGIRGFNPKLKRAAGRLEDLRTPEDEPIPPNTLAELRRDMERRRLVRDQIRQIEEARLERLDHAPDDGPHAMVRLLARVIGVGIETADMLVHEVLSRNMRDRRAVARYAGLTGSPDESGRKRREKGLARSGNGRVRRGMIQLAWRFLMHQKNSALAQWFRARTENARGTRKPMIVALARKLLIALWRLVRQGVVPDGVVLRPAQ

SEQ ID NO: 427204 - protein, 346 aa, unidentified
MRFYNRQHTYYCGIDLHVKTMYVCILDGAGQVLVHRNVPSTPAAFLEIVAPYRDGLVVAAECMCTWYWLADVCAAEGIAFVLGHALAMKAIHGGKAKNDKIDSHKIAVLLRGGMLPQAYVYPAAMRSTRDLIRRRLHLVRKRGQLLAHIQNSRAQYNLPVFGRKLAYRTNRDGVVEHFPDPSVQKSIAVDLALIDQYDALVLDIELTIVREAKRHNADAFHRLRSVPGIGKVLALTILYEIHDITRFDRVQEFASYARLVKCKKQSAGKTLGTSGAKMGNVHLKWAFSEAAVLFLRHTEGKKLIARIEKQHGKGKALSILAHKIGRAVFYMLSRGTVFSMEKFLAA

SEQ ID NO: 427205 - protein, 409 aa, unidentified
MNNTLFVGIDVAKLTNHVYCLNLNRDKLLSINIPNTHDGANQIETHLLKLLEKHKLTKVIVILESTGIYSAHIATYLSASKYLSLFDIKVYIINPKISRNYRRSFADMDKTDPKDAYVLADIARVGRCDELTPFKGSQRLALERLTRHRLHIAEKLSNEKAYALNNVFLKFSNFETLFSNNFGTTAVDFLLEYKSIDDIINSSLEDLADFIAKSSKNRFDSSTDVAVKIQKAARASYRLDKTTYDPINFSLASSINVIRCYQNELKSIDKAIANQVVGFNHNHYKILTSIPGIGKVYAAGILAEIADINQFDSHSALAKYAGITWRKNQSGKYTSDDTHMTKTGNKYLRYFLIQAANMVRMNIPEYRDFYHKKFNEVTTHQHKRALALTTRKLIRLIYGLLSTNRLYKL

SEQ ID NO: 427206 - protein, 348 aa, unidentified
METIGLDLHKRESQLAIQAEDGTITERRIVTSRERFTAVLGNRPSARILVEASTESEWVARHLETLGHEVIVADPNYAPMYATRSRRVKTDKRDARTLMEACGQGTYRRAHRLSEPRRHLRAELAVRDALVRTRTRYVALIKALARRDGLRVPSSTAERVGDRVQALAGSATLAAELAPLLTVLAPLNTTIGAADHRLSAQAERDPIGALLMTAPGVGPVTASALVATIDDITRFHSAHQCEAYLGLVPGERSSGEQRRIGPITKAGNRRTRWLLVEAAWRILRSKDPESAALRAWTLRIAARRGKRIAVVALARRLAGIVYAMWRDGVPYDGRKIRLPHPARVSQAG

SEQ ID NO: 427207 - protein, 344 aa, unidentified
MTDVSILAIDLAKHSFQVCAVNAEGVVLYNRKYSRGKLSELLASHPRCLVAMEACATSHYWGREAQGHGHDVRLIPPVYVKPFVKRSKNDANDAAAIAVAVRQPDMRFVAIKSPEQQAQAMLFRTHQTFTRQRSQLLITLRGHLAEHGIIVAKGNAALLAYEDVLEAQPDLVPDLVLEAARFYFHHIAQIDTTIATFERQMRDTAKRDDTARRLQTMPGIGPINAAAFLAFAPPMENFRKGRDFAAWLGLVPRQHSTGGKTKLGRVSKMGQADMRRLLITGATACLRWAVAKGVDPQSWLGRLLARKPFKMVAVAMANKMARAMWAMVTKEQDYSGGLVQYAKA

SEQ ID NO: 427208 - protein, 360 aa, unidentified
MEENETRKEGGIMATYCGVDFHARQQKVAYFESVTGEIQLKELKHQGDEVRQFYEQLPKPVIVGLEATGSSLWFEKLLGQLGHEVWVGHATEIRRRARSRQKNDWRDAELCLDLMVKNEFPRIYRLSEESLEILRRLRYRHRLVKMRTISRNGLHAIALSAGLSLKAKLLSKSGRSKLEVLELSPVCNEQRREWLDLIDQLNHRIARLESEIERIGGADPRVQLLRTHPGLGPLTALALVHTLEPVTRFSTSRNVTAFVGLEPREESSDEKVRWRGISKAGSRLLRFLLIEAAGTAIKYDEELRRFYFRLLHRRDWRKAKVAVARKLLVRAWIMLRDQIDYAEFLKRGVAVGSVRKGHRL

SEQ ID NO: 427209 - protein, 342 aa, unidentified
MQIAVLGIDLGKNSCSAVGLDPAGRVVLRRRLHRDGVVKLAAGLSPCIVAMEACCGAHHLGRVLREQGHQVRLMSPEYVRPYVKAQKNDDRDAEAIAEAATRPTMRFVELKSEAQLDMQTLHRARDRLVGERTALINQLRALLLERGIIVPQGRRKLELHLEALLAAEQVSLSPRTRLLVEDLRAEWRELDRRILALDEEFALQARTDEAAWLLTTIPGIGPLNATALVAAVGDARTFGRGRDLAAWLGLVPKQMTTGGKPKLLGISKRGNVYLRKLLIHGARAALPSLAKGETPLGGWLRGLLARAHVNTVVVALAAKLARIVCAVLRSGQRFEMRAAAVS

SEQ ID NO: 427210 - protein, 367 aa, unidentified
MKKVSTAAAQQSRNISQQRLTIGLDLGDRHSWYCVLDEAGQVQLEQRVRTSAQALQDVFGGMPCSRVALETGTHSPWISRLLSELGHEVIVANARKVRLIGESRKKDDRLDAQTLARLARIDPKLLCPVKHRSAQAQADLTVIRARAGLVRARTGLVNTARGVAKSYGARLRACNVRNLNPEKAEGLSPELQRALEPLLSAIEELSERIAEYNERIEALAEQSYPKVALLKQIKGVGTLIALTFLLTLEDPHRFQKSRDVGCYLGLQPGRRNSGQSEPQMHISKEGDPYLRTLLVQGAQHILGPFGVDCDLRRWGLKLAERGGRNGKKRAIVATARKLAVLLHHLWVSGEVYEPLHNSGRVALAAAA

SEQ ID NO: 427211 - protein, 370 aa, unidentified
MKNAITYVGLDAHKKDIYVAMLVDRERVPVTWQLANEPTALRRLVRKLEREASGPVQCCYEAGPCGYALQRQLTSGRVSCQVVAPALIPRKPGDHIKTNRRDARKLAELLRAGLLTEVAPPTAADEAVRDLARARDDAREDLLRARHRLSKLLLRRGVHFAGPSRAWSQPHRRWLRSLAWDQAADRRVADDYLLAIEQLEARLAELDAALTEVAQTAPYREPVAWLRCFRGIDTLTAIIIVAELHDFRRFHSARALMAYLGLVPSEHSSGEHARRGRITKAGNAFVRRVLIEAAWHYQHRASVGRALQRRRESQPARVIAIADRAQQRLCRRFRRLVAEHKPTPKVAVAVARELAGFIWAALQRPLPVAA

SEQ ID NO: 427212 - protein, 316 aa, unidentified
MDKPRPACCVGVDVSKDRLDVHLRPSDEAFAVARDGKGLENLVERLKALNVSLIVLEATGGFETTVAAALAGAGLPLAVVNPRQIRDFARALGKLAKTDAIDAEVIALFAEKIRPQARPIASEEAQMLGELVARRRQIVEMIGMEQNRRRRTTDKRLAKRIDRHLAFLEKELAEVDGDIDAGVRASPAWRETEQLLTSVPGVGPVTARTLIADLPELGRLDRRKLAALVGVAPFNRDSGTWRGHRMIAGGRTSVRSALYMAALVAIRHNPPIKAVYQRLIARGRPKKVAIIACLRQLLTILNAIVRDATPWTAQNA

SEQ ID NO: 427213 - protein, 397 aa, unidentified
MYIVGIDIAKRKHEAAVIDGEGAVIIKPFSFTNNCSGYNRLLAMLTKAKLPLDEVSFAMEATGHYWLALFTRLQKEGFRVQVINPVQTNSIRSFYIRQAKTDPRDALLIAEVIRFGHFSESTLHPENIYELRELCRGRHAIVSMQADVKRKVVALLDQVFPEYETAFTNMFGDTSMAILQTCPTPKELSEMPLEELCHLIEVSSRKRFRMAKAQELQELARNSFGFAMAGDVFSTMIRLYAKHLVFLKQQVQEMDRKIAEIMDTLDTPITTITGIGPTLGAYILSEIGDVSRFSSAAKLAAYAGIDPTMRQSGEYNGVRNRMSKRGSPYLRHAIWLAASSAVLHDPALKLYFQKKRDEGKPYMASVGHACRKMVSIIYAVMRDNKAYTPCIPNEISV

SEQ ID NO: 427214 - protein, 386 aa, unidentified
MPQPNDLSRSLVALDQNSTIIAVIEMSQSSWLVAGMLPGIERQPRKKLEPSPERLLGLLHGWQDEAVRAGRTITRIAVAFEAGRDGFWLARWLAARGAEAHVIHASSIAVSREHRRAKTDRLDTELLKRGFLGWLRGERGHCSMAHVPTIAEEDAKRPNRERDSLVGERTRIVNRIKSTLARLGIRNFKPTLRKAAERLAAVHTPEGMPLPPNTLAELQRDMARLGFVVSQIREIEDARQKRLEQHETGPPAMVRRLARIVGVGVETADLLVHELLSRPMRDRRAVARYAGLTGSPDESGARRREQGLARAGNARVRRAMIQLAWRFLMFQKDSALALWYRARTADSRSGTRKTMIVALARKLIIALWRFVTTDEPLEGVVLRPAS

SEQ ID NO: 427215 - protein, 428 aa, unidentified
MIAAVLERCAGIDVHKKFVMVCALLGPAQANPDAKIRRFGTYNAELEQLRDWLQELNCMHVVMESTGPYWKPVFNVLEEAGVQTTLANPQQVKNLRGHKTDMKDCQWLAHLLRHGMIRPSYIPPRPVRELRDLTRRRKQLVRNGAMERNRVQKLLEEANVKLGNVLSDVFGASGQEMLFALVQGEATAEQIAQLAKQRARKKIPQIQAALEGHRMNQTQRELIHQCMAHMAFLEEQIEEVDRQIQDKIRSFGLSQSYALLQTVPGMKKEAAATVLAEVGANVDAFSTPAKLSSWAGVCPGNNESAGKRKSTRTTKGNPYLRDMLLECAWASSHRKNSQMQHRYERLQPRKGHKRAIVAVAHALIQAVYYVLSTRQPFVDTAEPPRSPATVRRLIRHHTRRLRKLSCWLERGSHATQTSTLHQQQTTSG

SEQ ID NO: 427216 - protein, 376 aa, unidentified
MRKGTVFVGMDVHAETIAVAVAESRDGAARSLGTIANRPEAIRRLLGKLGDPAKLKVCYEAGPTGYALYWQLTRLGVHCDVIAPSLVPMKAGERIKTDRRDAEKLARSYRSGDLTPVWVPDARHEALRDLVRAREAAKEDQLRAKHRLGKYLLRNGQRPAEGCRAWTAAWWQWVRALELPFADQNTTLVDYVMEVDHQAQRIDRLEGAIDRAIIEAPAELRAIVDALQALRGVAKVTAVTLATEFGCFSRFERAAQVMSYTGMVPSEHSSGPRTRRSGITKTGNSHLRRVLVEAAWHYRHRPRICQRQHALQQTLAPNVAAIAWRAQERLHRRYWALAQKSKPTGKIVTAIARELVGFVWAIGTETEQQLRRPKAA

SEQ ID NO: 427217 - protein, 340 aa, unidentified
MAIVMGLDQHRAQITTEWVDTVTGELSRSRVAPAHRESVRRFLARFEGQDLEVALEATTGWRFVVEELQRVGAGVHLAEPAETAARRGRKKRAKTDRADARLLRELVMAGRLPESWIAPDHLLDLRARVRLRHTLIDERGEWQQRIHAVLYHHGCPHHHGIGLLTGTGRQWLSSLELPATAREQVAVALQMIGAVDSQLAPMDKQLRAHARRQPGCKALMGLYGIGHLTAVTILAELGDARRFSSSREAVRYAGLDITVHQSDQRRAPGHLSRQGPPALRWALYEAAQSAHRESSPDREYYLQAAERLGGKRACLAVARKLLKRSYHTLRELGEQALQPA

SEQ ID NO: 427218 - protein, 407 aa, unidentified
MELVALYKRVIGLDIHQAQITACALIEEPDGSTRIEQRQFGGFRRDRREMADWVASLRPDEVVMESTGIYWKSPYAALEAVGIRAKVVNARHVKNVPGRKTDVGDAHWLATLARAGLLRGSFVPPAKLRELRLVARQRQKLVGQLASEKNRLHKVLTDSGVRLGVVVSDLHGKSARAMVKAIIAGQSPNEVLKLASTRLKASREEIFDALQGDLTASHRFVLDELMQHIEQIEARIARFDARLLSELQSERNTLALLQTIPGVDLIGAAMLLIEIGTDMDAFGSADRLASWVGICPGNNESAGKRKSGRVRKGNLYVRRLLCEFAHAASRTTSVFKSKFQSLVVRRGYKRAIIAIGHKILRTIFFMLKRREHYRDSTTDYEALSVQRNAPRWIKALTKFGFITPANA

SEQ ID NO: 427219 - protein, 411 aa, unidentified
MEDTFIECCCGLDVHQGSIMACLLSGPANAKPRKEIRRFGTMPTDLTALREWLRAAGCTAVAMESTGVYWIPIYAALEGHFQVTVANPQRLKQIPGRKTDVKDCEWLARLLRQGMMPTSFVPPKPIRRLRELVRFRRRLVETIAGVRNRAIKELELAGIKLASVVSDVFGASGRAMLRALAQGQASPADMAALAKGALRRKLPELEQALSVPLEEHQRLMVDSALELLEFGEAQVARIERKIDEHLQPYRTQMELLMRIPGVDRIIAATIIAEVGVDMSVFPDEAHLSSWAGVCPGNNQSADKRFSSRIGHGNPYLKTALVQAAVSGSRKRGSYLKDKFFRLKARRGFRRAATAMAHKILVIVYHMLKFGRPYQDLGDAYLDQLSHRRTKRNLVQRLERLGYSVTLRPIAA

SEQ ID NO: 427220 - protein, 344 aa, unidentified
MSITMIGLDTAKTVFQIHAVDETGKTQIKRKLSRNDLVLFFTKQESCTVVMEACGAAHHWARILTGLGHDVKLIAPEAVKPFVKKGKKNDAADAAALCAAASRPDMKFVPVKSLEQQGILALHSARSLLVKQQTMLASAMRGLATEFGLTVPKGIGRLEELTVLVDTDETFPVKARQAFAGLFDQCQALTESIVTFEAEIVAHARHDETARRLATIPGIGPITASLIAATVGDIGMFKTARHFAAWLGLVPRQHSTGGKTRLGRITKTGNREIRKLLVLGATSMVYRAPQWNSAAGLWIRGILERRPVRLATVALANKMARIAWALMTRNEVYQAKGRVAAAAA

SEQ ID NO: 427221 - protein, 471 aa, unidentified
MLNSIFKSANNNLRDVLNNCLPSQLLYAPIDVAKHNHSAMIVNFLGDIIIPKFDFPYNNHGIEFLKNKLQSACSMTHAKKIFLALESTGHYHENLVASLIASGYDISIIRPIDSKNERDNVHAKTDAIDLAAIARVIIANKGTRSNMPDNIYYNLQRASRTHRQLTWQETRLKNIITMLVDKTFTGLWDQQDIFSDKWGKASLLFVSHYPTPQQAIKIGAKRLAQFFIKHNTKLGIDTANRIIALAKNTPARPTETMESDILALKANINVLETLTSAIGQQKKQMVKYLVQTPGIYLLSIPGISVVYAGDFTAEVGNVYRFAYAGQVISLAGTAPKKYQSGELDKANLPTSHKGRNLLRMTVNQIALSLNAHCPEFHKYYSDKLFHYQDAPPKARTATANRFIKLAYAMMKNETLYCPKAGNPLASQKEYYQSVWSKLKEKLTGYLSDDIPQDNYLVKIAHQLEEKYGINQ

SEQ ID NO: 427222 - protein, 418 aa, unidentified
MGKRKNRVCGADVHKDIIVATIQDSDDTEFQEKFGTTSIELGRFRDWLIAHNCEQVAFEATGVYWFPVYDALSPSIDTIVANPWMIKGIPRNKSDTLDSKWIAGNCLDGKIKRSRVLPKDGRDLRTLTRARSAYTKTRTQLRNRIHKYLALCGITLSSYISDIFGKSGRHILDGLIESKDVDTIMDGIPSGKVKKKREPIKASLGNGLDDVSRMLIKDTLELLDHLDEKVNDTSLEILGRLQERARDLAIVMSVPGIGFVSASIILAEIGDYHDFQKSEQLVKWCGLAPGLNESAGKKSPCGITKQGSKRLRTILVEIAQVVAKMSKNNLSSFFHRLRARKNYNVAITALARKLISIIFHLLINQELYQEDNCATVKTKPIKKDLLCLSKEEQFKDGVAAIVDAFYYFKKKSSLEGGG

SEQ ID NO: 427223 - protein, 371 aa, unidentified
MEHTRFVGLDIHKERISIAVAESGRSGAVEYLGEISNDPDAIGKLCDRLRRPGKTLTFCYEAGPCGYGVYRQLTDIGHRCDVVAPSLIPTKPGDRVKTNRRDATMLARLHRAGELTPVWVPDADHEAMRDLIRLRSVVRQIVTRARQHLQGFLLRHGRKHGRGTAWRMAYRRWLSTLAFEHPAQQVAFQDYVDAVMDAERRLQRVEEQISGLLPEWNLRPVVDALQVMRGIALINAVVLVAEVGDFTRFSNPRQLMAYFGLVPGERSSAETIRRGGITKTGNAHARRALVEGAWAYRMKARIGRHKVDRIEALPKVVRDIGWKAQVRLCTRYRRLSARGKTANVVNVAIAREMVGFIWSIACTVQSAPKTA

SEQ ID NO: 427224 - protein, 379 aa, unidentified
MTTNIDTVDVCCVALELSKTSWVCAFAVPGDNKATAHKIKARDVDRLISILNSSKTKAEHQLSRPLRIVLCYEVGYDGFWLARLLMARGIRTVVFDPASFLMPRRGRRAKTDRLDAEGMTRTLRTWLSGDREVARDVLIPSVEQEDAKRIERERKYLVEERTSIVGRIKGLLALHGIWLNGKRIGKRLLERLDIMKTGDGRPLAPFLRRDIERMLRHYDFVSQQIEEVIAERKAALVDGLGRFPHAEKVQRLATLGAVGETTATVLVAEVYHRSFETRRHVASFVGLAPSPYNSGDTGRDRGIHKAGTKLARQTLVELAWFWLRYQPNSKLSLWWHERFGGMGMRGRKVGIVALARKLAIALWRFVEQGVVPEGATLKV

SEQ ID NO: 427225 - protein, 356 aa, unidentified
MSRDVKYIGMDVHKEAIVIAVLNDGGKLTMESIVETKASSLLQFIHGLRGELHVTWEEGTWAAWLYDLLKPHVQQVLVCDPRRNALLKEGNKSDKVDARKLADLLRTGMLRPVYHGEHGLRTLRELGRSYQTISKDLNRVMNRVKALYRGWSIPCAGTQVYAARYRQEWLGKIEHAGVRRRAELLYEQLDGLQALRRTLRPELLAESRKHKASKLLRQIPCIGPIRAARLIALMQTPHRFRSKRQLWTYSGLGIETYDSAQYCYVHGQLQRSKKPQQIRGLNRNHNHEMKEIFKGAATRASCGVGPLRDFYMALLDKGMKPEMARLTLARKIAAIALTLWKKEERFDAEELKTQAA

SEQ ID NO: 427226 - protein, 415 aa, unidentified
MEPIHKRVAGMDVHRMEHVVTILLEQEDGTVLNETRKFGGFKRDMRALVDWLRSHRIELVAMESTGIYWKSVFSHLEAAGIEALVVNAFHVKNVPGRKTDVSDSEWLAQLARFGLLRGSFIPPKDLRELRVVSRYRRKLVQSLTGEKNRLHKVLDDAGIKLGGVVSDIDGVCARKMVEGLIAGKTPAELSALGHGKLKSSDELLQASMDGDLSPRHRLVLSTALNHLRYLEQQVAQLDRYLIEAMKPYAWAWRLLQTIPGIDEMSAAMILIEIGVDMQRFGSASRLASWTALCPGNHETAGKRKSGKIRHGNPIVRYLLCEAANAARRTKTVFQAKYTSLVIRRGHKKTIIAIAHKLIRTIYFVLTRRKPYHDTTVDYEAAIVARNAPRWIKALKKYGYWPKAAAANPATATAMA

SEQ ID NO: 427227 - protein, 430 aa, unidentified
MKSNTQNAKIEAITEKTLVLGIDVGSETHYARAFDYRGIEYSKKPFKFSNTEAGFVTFKEWILDLKERHEKDKVVPGMEPTGHYWFNLGKFLQDNEMKPVLVNPHHVKKSKELDDNNPTKNDRKDPKVIAGLVREGRYMIPYLPDGVYADLRTASNIRFQLQAELTRIQNRISRWFNIYFPEYKTVYGKPDAKSGMLILKAAPLPEDILMLGIDGVNQIWRDAKLRAVGKARAKTLIEAAGHSVGSKEGAVSARMEIRMLLEDYESRNMRLQEVMVLIEELVKGIPMAEKLLEIKGVGIRTVSGFLAEVGDISRFNNPKELQKLAGLALVENSSGKHKGGTTISRRGRKRLRYLLFEAAMSLVAKNPEFRELHNYYTTRRRNPLKKMQSLMAVATKLIRVFYAMLTKGVDYDPKKMVSDIRRPEAYLQAA

SEQ ID NO: 427228 - protein, 373 aa, unidentified
MNTIYIGVDFHARQQTICYLTTETGELVTTALKHEPKTAVRTFYEQFSGQVIVGLEASGYSPWFERLLEELGHQVWLGDATEIRRRARWRQKNDRRDAELILDLMLHDEFPRLHRPSLQSREVMRMLRYRQKLIKMRTMSKNSLQSLALQSGIARRGRLFTREGKAELDAAVMSPAMEWQRAHWWQLLEPLNQQVLETMTWLKAASQNDVSIARLRTHPGIGLLTSLCLVHTLQPVARFRNTRKVAAYAGFDPMERSSAERKHFLGISKAGSRVLRYLLVEAANTAVRKDEELKRFYQRLAQRRGRPKAKVAAARKLLIRAYIMMRDEIDYAEFRRRAVAARLARLRQGPQIPAALIGQPASTERQEPPPRGK

SEQ ID NO: 427229 - protein, 350 aa, unidentified
MVVVGADVHKHTHTFVAVDDVGRKLGEKVVKATTAGHHDAVLWARTQFGAELRWGIEDCRHLSARLERDLLTCGQQVVRVPPKLMALTRASARTRGKSDPIDALAVARAVLREPDLPVASHDEVSRELKLLVDRREDLVGQRTSTINRLLWRVHELDPAHAPKAGSLDRAKHRQLLGAWLATQPGLVAELARDELADITRLTEQINALATRIGDRVRLVAPALLALPGCGELTAAKLVGETAGVTRFKNEAAFARHSGVAPVPVWSGNTRGRVRMTRSGNRQLNAALHRIAVTQIRLDGLGRTYYRHRLDQGDSTTEALRCLKRRLARVVFGHLHTDHNNRHPACQTAAA

SEQ ID NO: 427230 - protein, 393 aa, unidentified
MICVGIDVAKDKHDCVILNSEGKILAGVFTIPNNADGFDTLLQKIRSCTSSDDKIKVGLEATGHYSYNILGFLINQGLPTYVINPLHTNLYRKSMSLRKTKTDRVDAKTIATMLMSNVDLKSYTDTAYHNEELKSLTRYRFDKVRERAQLKQSVSRLVTILFPELEKLVPTLHMSSIYALLIEFPGAKQITEAHLTHLKSLLKDASKGRYGRDMATEIRDTAKHSIGSVMPAKSLELRHTIRLIRELDSEIEDIEAAIEAIMEELQSPITTIPGMGFRMGAMILAEIGDFARFDSPDKILAYAGMSPSTYQSGQLSLAGTYSHMEKRGSRYLRYALYNATKYVCHWDPGFAAYLAKKRAEGKHYNVALSHAAKKLVRLIYAMEKSRQPYKRAA

SEQ ID NO: 427231 - protein, 341 aa, unidentified
MDIAVLGIDLGKNSCSVVGLDDSGKVVLRRRMQRKTIVNLAAKLPPCIIAMEACCGAHHLGRLLAAQGHILRLMSPEYVRPYVKAQKNDERDAEAIAEAATRPTMRFVSLKSEEQLDMQTLHRARDRAVCERTSLMSQLRAVLLERGIIVPQGRAKLRLQVTELLREPCGELSQRIRLLIEDMLMRWQALDQRIAAFDAEFAAEAKHNEAACRLTSIPGIGPLNATALVAAVGDARTFARGRDLAAWLGLVPRQATTGGKPRLLGITKRGSKYLRKMLIQGARAAMPSLSRGSTRLGQWLRSLLARAHSNRVVVALAAKMARIVWALLRHGTTFEQRAIAG

SEQ ID NO: 427232 - protein, 363 aa, unidentified
MQYLNDTELSSLEETRSQFNGCKAVIKLGIDVHQDFYTVVEQVGGSNPKPPQRFQKDAFLHWAAKLTGETCEVHAVYEACGFGFGLQRSLTALGIQCYVVCPQKLDEQNKRVKTDCLDAKALCLRLDRLVQGNRDALALVRVPTEEEEQLRAIHRQREQLVKARKRLEAQGRSLMVNHGIEPVKSWWKRRAFAALPVPEWMKELLGNSQPILLALQQKIAALTAQLQMAAAPNQPRGLGAMSSMIIDREIGNWHRFNNRRQIGSYTGLCPGEYSSGNIRLQSCVTKHGNPRLRAALVELAWRLVRFQPNYKPVVKWRQILAQGALATGAARKKAIVAVARQLAVDLWRIKTGRLSAEELGLIN

SEQ ID NO: 427233 - protein, 343 aa, unidentified
MYYIGLDVHKRTISYCVKDAAGKIHQEGKIGSTRRELDAWVKTLPQPRMIAMEATIFTGWIYDHLLPHAEKVKVAHPLMLRAIAAAKRKNDKIDGSKIADCLRCDFLPECYMTSTEIRDRRRTLRYRGLLVKQMVQMKNRVSGLLLEKGVTHTKQRLHKVGYFAELMSSNEEIDQSIRPLLKLSREHIVRAQKLEYALVSSLERDPLLTERLKRLRTVPGVGPITALTWALEIGDVSRFRSIKQAISYCGLCGAERSSADKVARMPISKQRNKHIQHVLVEAAKLAPRQNHELALIYEKEIERGNRNRATLAVARKIVAYLLAVERKKQDFVPTEQFGGTVAA

SEQ ID NO: 427234 - protein, 457 aa, unidentified
MAVAEFGEQDEVEEAEEIVARVAAIDVAKASGMVCTRVPHDTKAGRRLTRTWQVGAATRSIIELADHLACQGIQRVVVESTSDYWRPFFYLLEARGLDIWLVNARDVKNVPGRPKTDKLDAVWLAKLTERGMLRPSFVPPREIRRLRDYTRMRLDLTEERSRHKQRMEKLLEDALIKLSSVATDIFGVSGRQMIEALIGGERDPYVLAEMAHARMRPKRPALIQALTGEFDDHHAELAQMILDQVDVLTRQIDRLTARIEELITAIPAAQPPAITDADPGDGDQPTSGQDRAAVPLPALDRLDEVPGIGRRAAQIILAEIGLDMTRFPTAGHLVSWAKLCPATIQSGAKKKNGKTGHGDRYLKGVLGEVATAAAKTQTFLGERYRRLIKRMPKSKAMVALARSILTIIWHLLADPASRYIDLGVDFHTRRLDTGRKTRDHIRGLQALGYTVTLQPAA

SEQ ID NO: 427235 - protein, 337 aa, unidentified
MDYFAGLDISMDETHVCVLDREGVVVRESKTESTAQAIAGELAKAPSCHRIVFETGRMAPILFHGLNQLGLPVVCVESRQAYQALKSLATHKTDRNDARGLAHLARTGFFKPVHVKSLQAHALRSLIIARKKLVGQRVTLENQIRGLAVVFGIRLPRALAAAFIDQALKASEGIAGLSAAMRGLITARTAVMTAVAAIDADMRRMTRASAACRRLMTIPGVGQLTALAFVAAIDDPSRIRRSRDIGAYLGLVPRRHQSGEVDYTGGISKCGDGRVRTLLYEAANVMLTRYKGQLKLKDWAFAIARRSTMRKARVALARRLGIIMHAMLRDETEFVLA

SEQ ID NO: 427236 - protein, 354 aa, unidentified
MRKDTRKKSELSRVVVGIDVSDKWSYAYVLGEEDGPWEARFRTRPAAVRKFFEEFPGPMQVVLEVGTHSPWMAELLEGLGHEVLVADPSRLPLISRGKKKSDRLDAETLARLGAADRKLLSPVRHRPEEVRLDVAKLRERALLVQERARLVTSVRGTVKSFGELVSGGCSTEAFTRRAVESVSEKVLGACPGRLRMIEKLTEEIREADRWIARRIREAYPEAELLQGIPGVGPVVSLTFVLMVVDPRRFRNARALTAYIGLTPRLRESGEMRLPGRLSRTGDAELRRVLIQAAHHVLGKKGRDSRLRRWGLAVEARRGKKKAVAAVARKLAMIMYRMWLTGEPWDPERGLRQAA

SEQ ID NO: 427237 - protein, 392 aa, unidentified
MNLKQSVGLDISSREFKTAFEVMDSQQHIKIKATHSFENGPSGFKELDRWVQKHSDPAVPITFTMEATGVYYENLAWHLHQKGYTVAVVLPNKARKYMQSLGLKSKNDQIDAKGLAQMGAQQQLRPWKPISEHLLQLRYLTRHLESLQRLNTMIGNQAFALEHSRVGSKLVNKHLRQSRKSIQRQVDEVKAAIIALVEKDDQLRLRIKNICKIKGISVLTVAVIVAETNGFAILDNQRQIVSYAGYDVVENRSGRHVGKTKISKKGNSHIRRALHLPALSVVRYEQHPFVDLYDRVYERSKIKMKGYVAVQKKLLTIIYALWKKNEAFDENYQPKMTSGNEESNVLFPLGNKESNEVNSNGQNEVVPQQGGTTQDGHRCNESPNVLFPLVQT

SEQ ID NO: 427238 - protein, 419 aa, unidentified
MGKSINNPSSVTRIGVDLAKNIFHVHGVDAQGAVVIARSVKRSGLLKFFASLPRCLVVMEACASAHHWGRALIALGFEVKLIPAAYVKPYVRRNKNDAIDTEAIVEASRRPGLRFVPVRSVENQAQLMRHRVRELLTGSHTRMLNALRGHLAEIGIVAPQGAENAYDLMRQLADGFDENGEIIPDCVRASLAPLVRQIEAIDAEIATVDKELMALAKADDTARRLMTIPGIGPVTATAVVATVQDIGAFASPRAFSGFLGITSREDSTGGKVRLGRITKMGDRYLRKLLVVGACAVLRHLKGHKDALRLWAGQLLERKTVKHKFKLTAVALANKVARIVYVLMTRGGETTFEGPRIESRHTHGTGCTLASACAAGLAQGLALEDAVARAWAYTAEALRRAPGFGAGHGPLDHAWPLRER

SEQ ID NO: 427239 - protein, 348 aa, unidentified
MLIIGCDYHPGFQQIAFVDTETGEFGERRLTHREEAEQFYGTLKERSVRVGMEASGHARWFERLLKDLQFELWIGDAAEIRTKRVRKQKTDRQDAQLLLKIMVEDRFPRIWVADAENRDLRQLLWHRHRLVQMRTRVMNQLHVVALNEGLRRKKALWRPAGRSELESLILAPWASRRRQDLLDLLDHLTPKIQGLTRALEEEVEKRPVTRRLMTYPGVGPLTALAFELVIGTPERFHCGKQIASYVGLVPSEESSGDRRRLGHISKQGNSLLRYLLVEAAQVTVRSQPQWRSKFFHLAMRRGRKIAKVAMARKLAVHLYWMWREGWDYEQWNKFGSHAGAPGNRHGVQ

SEQ ID NO: 427240 - protein, 399 aa, unidentified
MICIGADVSKGKSTVCFLKPYGEVLHKPFEVLHTERDLKHFVELLSTLTEEARVVMESTGAYHYPVLAYLKEHGVFASLMNPLIISKYSKVALRKGKTDKLDAIMIASFGLDHWFHLADYEPASETYGELPVLNRQYLTYISMRIQAKVTLTNLLDRTMPGIKTLIMNRSDVPDRDKLCDFVKEYWHYDNITCMTESEFISSYCSWAKEKGYQASAEKAKKIYALALDGIPTLSSSTPSTKMLVLEAVHVLHMIDTTLAHILAQMRDLAKTLKEYEVVIGMHGVGEILGPRLIAEIGDVRRFHSASALVAYAGLDAPPFQSGNFEASHRSISKRGSSSLRRTGYEVMMYLKIAKPTEDNAVYLYMMKKESEGKAKRVAKIAALNKFLRIYYSRVKEVYA

SEQ ID NO: 427241 - protein, 371 aa, unidentified
MNSIIYVGMDVHKESFSVCCYTFDSDKIQYQQKLDADYRQVLKYLEQVRKRFPNSAEIVCGYEAGCLGYSLYHQLTDRGVKCIILAPTTMGIMNTNRVKTDRKDAGNVAKCLAFGTYKEVYVPTDEDNAVKEFIRMRDDQKKLLKSTKQQILALVLRHGKRFEGGKTYWTMAHVKWLKSLELPCVVRETLDEYLITYEYLSDKVQRLDLRIEEIASGERYEEEVKKLSCFIGIKAHTALSAIVEVGDFKRFAKAEQFASYLGLVPSEDSSGDSQKRYGITKAGNSHLRRLLVEAAQGYTRGQIGHKSLALKKRQEGNSPQVIAYADKANERLRRRFYRMTLKNGIKRNVATTAIARELACFIWGMMTDQIA

SEQ ID NO: 427242 - protein, 344 aa, unidentified
MDHFAGLDVSVKETSVCIVDDTGRIVKEMKAASEPQALLKVLGNPAYRFKRIGLEAGPLSQWLFSGLAEAGLPVVCVETRHMQAVLKAQINKTDRNDARGIAQMIRVGLYRPVHVKTLRSQKLRMLLTHRKLLQSKAIAIENDLRGTLRNFGLKVGMVGKVRFEARIQELVENTPDLAALVEPLLIVRRVLREQIVILHRRLLAIVREDEVCRRLMTTPGVGPVVALTYRATVDVPARFRKSKSVGAVFGLTCSRYQSGEIDWSGKISRCGDEMMRTMLYEAAQSMMHSKKWSWLKAWAMQIARRRGMKKAIVALARRLAVIMHRIWVDGTEFRWTREQAAAAA

SEQ ID NO: 427243 - protein, 436 aa, unidentified
MEEVTDEPLYRDRVCGIDIGKAGLVATIRVPAEKDPARRAAETRSFGTTRREVLALADWLRCWQVPAVVMEATGDYWKGPLYRLEAEGFECVLADAGQVRHLPGRPKRDPADSRWLAACFERGAVTPCFVATEEFRVIRLHTRYRRDLTEERTREKQRAEKLLESAAIKVSSVLTDLHGVTGRDIMDHLIAGDRDPKVLAQLARTAARRKISRLEEALEGAEFFTPAHAALLAVMLARIDRLNADIDQLTEVIERLLAPHEEQLQQAESMPGWGRRAAQDSLAETGPDMTRFPTGAHLASWAGRTPLDHQSGKRQGRSKAKKGNRYLGAVTGETAVAAGRTQTREGARYRRLARRRGKPKAQVAVGNTQLKVYHKLLSNPGMRYADLGPDYYERQRGIRRQIAHHVGKLGDLGFEVTLVRLPSPDPEPGGTHNPAA

SEQ ID NO: 427244 - protein, 368 aa, unidentified
MKPDPQMTLDRYFRQCVGIDISKDKFTACLYMYDRGSDVGCHTESIDFNNTKSGFNQMVKWSRKEAQKGFPLTYLMEPTGVYYESLAYHLHKIGQTVYIVLPNKARKFCESEGIKTKTDAMDARCLALMGCASRKLKPWSPPAPIYRELRQMTRFHADLSQIMTSVMNRMESLNHMEEADKTVRKNCQKLIEEIDRLMENNDEAIMQKVSEDKGLEARVKRIARAKGLGLTTVVCIVAETEGFHLIENRKQLTSYAGLDVKAKQSGKEDPMHAISKKGNAHIRAALYMPALVAVRYNPQIKAAYGRICQKHPKEKKIGVTAAMRRLLLLIYTLWENGEEYDSTRDKTHTPRKMEKRLEYGPENGALPF

SEQ ID NO: 427245 - protein, 352 aa, unidentified
MLNLDTCGIEVSAKVLLVRLRRNGQVLPHRSFPNTPAGHRDLVRFVRGPRGVQICMEATGTYGLDLALALNQVPDVRLMVVNPKAMRRFAEALLQRSKTDLLDVAVIEEFACRMPFKPWCAPAPHILQLRALSRRLQEIASQRTAEKNRLHATHATDSTPQALRLDIERSLEFLQQAHKNLLRTALELLEQDPVLARRYQLLLSVKGIGSLSAVMILAELSPLAPDLTAPQWVAFAGLDPRRYQSGSSVDRKPRLSKAGNPHLRRALYMPALTAVRRDPAFATFYKKLLERGKRPLQALCAAMRKLLHAIYGMFRHNLPFDPTRLFAFALPEIPQAALAQPAEAIYCGGPLT

SEQ ID NO: 427246 - protein, 369 aa, unidentified
MEKNTIYIALDDSKRKLVVAMLRPGATEPEEREIPKDAPHIQRLFRRLEREGPVQACYEAGVSGYDLYRQITACGVTCQVIAPALTPRRPGQRIKTDRRDARKLVRLLRAGELTPIHVPDEAEEAARDLVRCREAVRRDVVRWRHRLLKLLDRHGRLWVTEKNWTQRHWSWIRGQHFELAPLQRAFEATVFALEQALRRQAELDKEIEALAETAPYREAVGWLRCFRGIGTLSAMVLLAEIVDFQRFRRPRELMAYLGLVPSEYSSGETQRRGALTKAGNTHARRVLVEAAWHYRHRPTVGRALASRSQGQPEEVVGHAWRAQQRLHRRYRHLVGHGKRPPVAVAAIARELVGFLWAAMTRRETRGHAA

SEQ ID NO: 427247 - protein, 383 aa, unidentified
MPRKRILVKSIDTSISYQVIGIDLAKHLVSACLITGAGEIFGIDRLTYDDLLKSAERMSPTLFCMEPCPEVHYLAEKLQGYGHHTKVIDGAAVKEYIKTHFGGQKTDLNDAQAIAFLSLDTNLPEITPKNTSNSVLSSIQAVREQFRKEYIQSFVSLKGICQRWGLPISKGVMNKNKVEELVSESKKIPQEVKDWLLELLQSCRELQKRLNKISKYLKEYADNDEICQKIMSVPGIGPITATRLKATIGDIQRFEKPKSIVAYYGLVPKSKATGHNEKKGGITRRGDRVARSLLIEGAGVVLNLAAKGFLRSKPLNKWIEKKRKLKMPWGKLCCALAAKMLRIVRAGQNLPDKEFRYLRTVIVTAAVYRGFNSMLHLAVDISS

SEQ ID NO: 427248 - protein, 406 aa, unidentified
MKQIVSVGIDVSKGKSTVCAMIHPNTIIKESFEVLHTVEEMSMLADYIGSLDGEIRIVMESTGHYHLPVAQFLYQKGFFVCVENAYIIRQFSRIMLHGAKTDPLDAKKLAKYGLAYWSELKPYKFHPSCYTELSLLSKQYQTYIKLLIAAKQNVIHLMDEMLPGFKEALDTASSVQFSKVKYVDFAKEFYHVDMIKSMGKEIFRENYKQWCKEKGYRFQSEKADELFHLAEDGIPTLPTEFPSTRLCMEAATEQVSQLGYALEQILSQMQNLAKTLPEYQTIRQMGGMGEKLCVRFIADIGDVRRFHNGKALVAYAGIDAPPYQSGQYTGTKRRISKRGNSALRKTGYEVMKSLKSHPPKTDTRVYDFIIKKENEGKSKKQAKIAGLNKFLQIYYARVMEIYKNIV

SEQ ID NO: 427249 - protein, 345 aa, unidentified
MESSHYVGLDVSLELTSICVIDEQGAVVWRGKCATDPDGLSRIMRQHAPHLVRAGLETGLLSNFLTRALRARGVPIVCIDARHAKAALRVQINKTDANDAHGLAQVVRTGWFREVTIKSMDAQSLRLLLVARAQLISQRQATANTLRGLLKAFGYVVRKGAGGLFAVRVREVCDGNPALCAIAEPMLAVWQSLREQIRILDGQLLKRAKVDPAARRLMSIPAVGVVVALAYVAVIDNPDRFRHSSTVGAYLGLTPRRYQSGEVDCAGHISKCGDGLLRSYLFQAANAILTRKVTDSTLRSWGHAMVARLGLRRTTVAVARKLAVIMHAVWKNDRDFDCAGIPARV

SEQ ID NO: 427250 - protein, 370 aa, unidentified
MNQSSTLYVGLDVHKESIAVAYVAQEPHAEVVYLGTIGTRQCDIDTLIRMLQSKSPHLVFVYEAGPCGYWLYRDLTTRGHICWVVAPSLIPQKAGNRVKTDRRDAVQLARLMRSGDLTPVYVPTVEDEAIRDRSRAREDALRDLKTAKFQLKAFLLRQDIRYTGRATWGPAHLRWLSEVVCPTPAQQIVFQEYVRAVNEHTERLQRLEQALHEQVQAWRLFPLVEAFQALRGVQFTVAVIVAAELGDLTRFDNPRQLMSYLGLTPSEYSSGERRRQGGITKAGNTQARRALVEGAWAYRYPAKVSRHLQLRLEQVPKRLQDISWKAQVRLCKRYRQLSARGKNAHQVVVAIARELSAFMWAIAQEVGLPG

SEQ ID NO: 427251 - protein, 363 aa, unidentified
MFTERTSVGLDVHARSVAAAAIDGLTGELFQSKLTPSFDHIRSWVQELPGPAAVAYEAGPTGFGLYRALTEAGIRCEVAAPSKLQKPAGDRVKTDAKDAIHLAKLLRLDEVTAVAIPTVEQEAARDLVRAREDCRSDLMRARHRLSKLLLRHGIVYYGGDAWTGKHDAWLRHDALPQLTCRATRLTFDSDYETVLGVKARRDRLDAAIEEMAAESEFTPLVRRLGCLRGIGTLTGFALAVEIGDWGRFTGNTIGSFVGLVPSESSSGTSRAQGPVTKTGNRHVRRLLVEAAWHHRPRYRIGKTMRNRWDLAPAAARARGDEGNRRLHARWVGFIDRKKKNTVANTAIGRELAGWCWSLAVLED

SEQ ID NO: 427252 - protein, 344 aa, unidentified
MPIVGGLDIHRKQITFDYLDTVTGEVRRGQIVPADRAHLRAWLARFAGRDEVAFAVEGCTGWRYVAEELAAAGVAAHVGEPADTAAARGRKRHAKTDKTDSRHLRTLLAEGRLPECWVPPAQILEYRALLETYHDLRREHTAWVQRIHAVLFHQGAPRLGEEALRTEQGLAGLRSVAAAQLSAAGQLQVATALDMLAALEARMEVLRTQLRRAAQHLVGAKVLAALYGVGPVTALALTCWLGGAGRFSSSRKAVRFTGLDITVWSSDRKGPPGRLSRQGPPVLRWAVYEAGKTHARSSAPDHGYYAQVKDRKNSKRAALSEARKIVRQACHILTELGDDALTAA

SEQ ID NO: 427253 - protein, 347 aa, unidentified
MLIIGCDFHPSFQQVAIFDNRTGEIEERRLQHREEAEQFYRSLAGQEVRVGMEACGHYPWFERLLEELGIELWFGDAARVRASMVRKQKTDRRDAEHLLDLLRQNRFPRIWVPSLEVRDVRQLLVHRHKQVQARTRTKNQLQAMALSCGVQKKRKLWTKAGRAELEKLPLLPYAAERRKRLLEALDGLEAEIVELDRRVEEEARQRPEAVRLMTHPGVGPVTALAMVLTLGPAERFASGKQVGSYFGLIPSEDSSGGKQRLGKISKQGSSFLRFLLVEAGQTAARYDPQLKRFYRRLAVRKNRSVAKVAVARKLATRLYLMLREDWTYAQLCQAVMQVSPSHSVAGE

SEQ ID NO: 427254 - protein, 388 aa, unidentified
MFFLGIDIGKNTHVASLLDEKAKVIFKAYSFANTLDAAEALLVKLEPYKDSLEIGMEATGHYWLSLYSFLTEHNFIVHVINPIQTDGWRKGIEIRKRKTDVIDSVLIADLIRYGDFLETSLADEDTLSLRNLTRFRAYLVNSVSDLKRKAIAVLDQIFPEYASVFSNVFGQTSKELLKSLSLPSDYENLSATKIEEVLSNITQKKKASETISTLSDKASHSFGISFCKDSFAFQLKLIIEQICFIEEQIASVELEIEQLMSKLGTNIKTIPGVGNVIGAVILGEIGDIERFDNPSKLVAYAGLDASVSQSGEYEASSGKLSKRGSPYLRKALYMAAQRAEFCDPVFHAYYEKKRNEGKHHLVATNAVARKLCHTIYAILKKDIPYEIQ

SEQ ID NO: 427255 - protein, 404 aa, unidentified
MIFVGVDWAEAHHDVCVLDEGGAVLGSRRVLDTLEGVRQLHELVADHAEEPGQVAVGIEKDRGLLVVSLVAAGYAVYAVNPLASSRFRDRHQVSGAKSDRGDARVLADMVRTDRHQLREVAGDSDLAEATKVLARAHQSAIWSRQRHLNQLRNALKDYYPGALEAFGTDLASNDAVAVLTAAPTPAAGRALGTGELEALLRKGGRQRNVAARARQLRDALCRGQLEQPGIVADAYGAVTASELRLIAAATAEVATLEEALSAAFEQHPDAKVVLSLPGLGTVLGARVLGEFGDDPNRYASAKSRRNYAGTSPVTRASGLSRVVLARVSRNRRLVATCDQWAFCALTSSPGARRYYDELRQRAKTHRVAARALGNRLVGILHGCLEHHVPYDEATAWRHREQLAA

SEQ ID NO: 427256 - protein, 406 aa, unidentified
MTNSYTNAEPSILVAIDISKERHDILIEFPDKVKRKRMVIRNIQEDYDLLINYLHAFNTKVIVGFEATGNYHRCLAWRLLTEEFHLKLIYSVALARTREVLHNSWDKNDPKDAQVILYMLKANITQHYHDPLQGNILHLQELSKTHEVISKTKTEAWHRILTHYLPLYFPEAARSQGKSRSTWFINFLYHFPTPMSITHLLKEDFIKEAWPIVGRKVSKQNLLGDIYETAKTSVGLPLAIDSPAILMFKLVLQEALNLIKQRQIIENQAESLLKENNDYQLLKQVPGIGPIHALTILAEAGDLRRFAHHRQFLKYCGLDLATYQSGLFKGQTKLSKYGNARLRRTFWMASQTAILKVNNSFRDKFERYIARDRDNRDLRRKAYTAVTAKMARTVHAIIKNKTDYRP

SEQ ID NO: 427257 - protein, 454 aa, unidentified
MSRVRTKPVSTETMPLVHSHAAGLDIGSAEIWACVPADRDAEPVRKFGTYTPDLQALADWLKVCGIQTVAMESTGVYWIPAYEILEARGFKVYLVNARHLKNVPGRKSDVQDCQWIQRLHSFGLLNGSFRPEADICVLRAYRRHRGTLIEHRAAHIQHMQKALQQMNVQLTQVLSDLAGVTGLAILRAIVAGERDPQILAQLRDPRCAKPEAELVKALTGNYRAEHVFALKQALALYDAYTEQLRECDQEIERHYSVLKPVHEGDLPPLDTSDKRNTHSKNAPAYDARPLLYQWVGVDLVAVHGLNASTVEEILSEIGTDMSRWPSVKHFCSWLHLAPHNDISGGKVLRSRTLKAHHRAGQALRLAAQAVSRTQTALGAYYRRMRAKHGPEKAIVATAHKIARIVYFMLKHRTPFHDIGAEEYDKREREREIARLQKKATKLGFTLVLASAQPA

SEQ ID NO: 427258 - protein, 364 aa, unidentified
MKTLHYVGMDVHKETIDVVVFRGDEREPFLERTILNQVGVIRKLFKKLMEGGSVIACYEAGCMGFGLQRMLEEMGVASIVASPGRVPRRPTDRVKTDRRDARRLSEQLRARTLEAIHIPSRDDEAVRDYLRAREDVRLELVKTKQRLQKFLLRHGYVYESTRYWTGRHDRWLRGLEFDKGMLKEVFEEYYFMIGELTEKLRLMDRRIEEIALSEPYAVRVGRLRCFKGIDYLTALSIICEVGDFRRFSHAETFMAFLGLVPREASSGEKRRQGGITKSGNTHLRKLLIESSWHYRYRSAPSKRLTERRKGQPAEIIAYADRAMRRLQWKFLRLIMKGKTKQAAVTAVARELAGFVWGMMVGQTA

SEQ ID NO: 427259 - protein, 418 aa, unidentified
MREEVSTVELLVPRCAGLDVAKDEVVACVRVPDGQGGRRQEVRTFATFTSGLEALAGWLAAEGVTRVVMEATGQYWKPVWYVLEEAGFQLLLVNVRHVKILPGRKTDVCDAAWLAELLEHGLLRGSFVPPAAIRQLRDLTRYRKRLIQTHSAECQRIQKTLEDAGIKLDSVATDVLGVSGRAMLAALVGGERDPEVLAELARGRLRTKLPQLRQALRGRFSDHHALLVGLALAHLEHLEGAIAALDTEVDQVISPFARARDQLDTITGVGKRAAETIIAEIGVDMAVFPTAGHLASWAGRCPGNNSTGGKRRSGRPTKGNRWLGEVLTECAWAAARSRDTYLAAQYWRLARRIGKKKAAMAVGHSILVIAWHLLANDCDYQDLGGDFFVRRDADRARQRAVAQLQALGYRVTLEPLAA

SEQ ID NO: 427260 - protein, 359 aa, unidentified
MPTKFGVVALFPGRPIVDQYVALDVSLQKTAVCVLNASGSVVIEAELPSEPAALTAFIQIHAPRAARVGLESGPTSPWLWHSLKAAGLPVVCMDARHAHAALSVRPSKSDRNDARGLAEMVRMGWYREVQVKSLAAHERMALLGVRRQLVDMRVEIDGQIRGILKTFGMVVGSGNKGAFAQRARMLVQDHPVLSALVDKLIEVRAVAVAKVAALDKEIRRFVRDDPTLRRFMTVPGVGPVTALAFRSTIDEPDRFKRARDVGPYLGLTPRRYQSGETDRQGRISKCGDRFTRTCLYEAANVLLTKVQRWSPLKAWGTRLARRIGSKKARVAIARKIAVILQCIWTDGTEFWWTKEPATA

SEQ ID NO: 427261 - protein, 344 aa, unidentified
MDISVLGIDLGKNVCSVVGLDASGAVVMRRKVRRETLIALAEKLPPCVVGMEACCGAHHLGRVFAAHGHDVRLMSPEYVRPYIKAQKNDDRDAEGIAEAATRPTMRFVELKSQDQLDMQTLHRSRDRLVGERTALINQLRAILLERGMVAPQGKRKLEQFLAVLMDEQGGAGLSSRMIVLVADARTQWAEIDRRIAAFDDEFVRWVKENEEARRLMTIPGVGAIVASALVAAVGQAESFERGRDLAAWLGLVPRQFTTGGKPKLLGISKRGNKYLRRQLIHGARAALPYVAERDTPLGRWAKELMSRAHHNVAVVAFANKLARIAWAVLRRGERFAVTGMPVAA

SEQ ID NO: 427262 - protein, 409 aa, unidentified
MDVVYERCCGLDIHKRTVVACLLTPGAAGQPVKELRTFGTVTDELLALAAWLQDAGCTHVAMESTGVYWKPVWNLLEEQFTLLLVNARHVKAVPGRKTDVRDAEWLADLLRHGLLRGSFVPDRPQRELRELTRYRTSLVQERSAEVNRLQKTLEGANIKLGDVATDILGVSGRQMLHALINGVTDAAAVAELAQGKLRGQRPALAAALRGQIGPHQRFLLAQQLAHIEQLEIAIAAVSAELEARLCPFADELERLETIPGVGRRTAQVVLAEIGPDMSRFPSADHLASWAGMCPGNDESAGKRRSGKTRKGNPWLRSALIEAAHAAARSKGTYLAAQYRRLAARRGAKKGAVAVGHSILISAYHLLRDAEPYHDLGGNYFDERDRRAVERRLVRRLEALGHKVILEPAA

SEQ ID NO: 427263 - protein, 365 aa, unidentified
MNKNSNPAKTNSQSKEVFAFYIGIDLGDKYSDVCVFDAGGEVSKQFRLAMKEADIRKHFSSIGRSRVAMEAGGQSRWVAEVIESCGHEVYVSNTRKVPYIHDSDDKDDAGDAHKLAELVHFKPRLLHPIQHRSKQAQADLSWIRARQALVDVRRQLINTVRGISKSFGERLGRCSTEAFTAKMAEKIPGAIGGAVAPLLELIDQINERIRYYDEMEEHIARERYPKYGLLEQVNGVGVHTALSYMLTIGDPERFEKSRAVGCFLGMRPRKRDSGSSQPQLGITKAGDEYLRKTLVNCAHYILGPHGKDSDLRRAGQRICKRGGKNAKKRAVIAVARKLAVLLHRLWVSGEVYEPLRNSKKVAAAA

SEQ ID NO: 427264 - protein, 315 aa, unidentified
MWIIGCDFHPRYQQIAALNLDTDELVERRLSHEGKEAAAFYEALPRGALIGMEATCTAQWFERLLERCGHTLRVGDAAQIRASVVRKQKTDTRDALHVLDLLLTDRFPSVWIPTPAERDARQLLLHRHTLVRWRTAVQNQLHALARNQGLLPHTSFWTRTGRQQLESLALDPWAHRRRQDLLCQLDHLNSQIDELTEQVRQQARQRTDTAELMQQPGVGPIVSLAFVLTLGTAKRFPRGKQVASYLGLNPAEHSSGGKQRLGHISKQGNRMMRWLLVEAAYVAVRKDPELKRIYQRLAFRRGRKMLPWRWPESWP

SEQ ID NO: 427265 - protein, 388 aa, unidentified
MLLDHPSDRPTAIRTQFGAIFVSLELSRSNWLITSLSPGKGEKMSKHGVPAGAIAELLKLFAELKRKAEARTGQGYPIITIQEAGLDGFWLHRVLQQEGIESHVVDPASIATPRRRRRPKTDRLDGETLLRALLAYKRGEPRVCAMVVAPSPEEEDRRRLCRERRTLIEERIVHVNRIKGLLFAQGISGYAPLRRDRRARLEALRTGDGRALPLHLKTQISRELDRLELLLEQIKAVEAEQDALLAQASKPAGKTAAPDPVTLLLELKGMGPNFAAVLWSEAFYRQFANRRQLAAYAGLAPTPWRSGGIAHEQGVSKAGNPRLRTTMIQLAWLWRRHQGQSALARWFEAHSKRGRKTAIVALARKLLVALWKYVTAGVVIEGAKMKSV

SEQ ID NO: 427266 - protein, 430 aa, unidentified
MNESVSEQPLSPKVAAFVGIDWADQKHDVVLRSAGDPAKAEHQVFKSEINALNDWIAQIQERFGTKGKVLVCLEQSRGALIYQLMAYELFELYPINPSQLANYRKTFFSSGAKDDRPDADLLSELVMCHRDRLKAWKPDDQLTRELASLNEGRRNAVNRRTELANEIKSQLKLYFPVALQILENDITTALAADLLVQWQTLAELQKVSPGKLRKFFYGHNSRQEKKILERLALIKEAKPLTTDVAIIRPNALRVKLLAQQLKSLLPFIAEYERRIAELFGSHPDRFLFDNLPGAGPALAPRLLTAFGTDRDRFEVAGDLLNLSGIAPVRIASGKKTGKSASVHCRRACPKFLRQSFHEFGECSIRYCPWAQACYQAQRGRGKGHHAAVRAVTFKWIRILFACWKQRTPYDPQRYFQALQTRGSDYAQTTA

SEQ ID NO: 427267 - protein, 409 aa, unidentified
MAAVMIGVDPHKSSHTAVVVGAAEEQLGKLRVRASAEQAQQLLAWAAAWPERTWAVEGARGLGHLLAQQLIAAGERVLDVQPKLGARVRLLASGGTNKNDPNDARSVAIAALRSAACPEVQPDGQAAVLKVWSKRHRDLGRLRTQAACRLHAVLCELVPGGVRKEITAAHAARILEAVQPAGAADAARWELAGDFLEDLRRIDAQMAQTKKKLAAAVKASGSTLTEVFGVGPVIAAITLAEVQDVSRFPGRDHFAAYDGTAPIEVSSGKRKVHRLSRRGNRRLNHAVHMAAITQIRHRHSEGRAYYDKKLAEGKTPKEALRALKRRISDALYRHLRADARRAAATAAAQLAGPGGQPGNDSVASAAGLRPADRLFGKATPGPELTLRPGPAAQPKKRSSRASEKMSRTP

SEQ ID NO: 427268 - protein, 351 aa, unidentified
MPRKTDVAVVHTIGIDTGKNTLHMVGLDERGAIILREKVSRHRIAARLVNVQPCLVGIEAGMATHYLARELVALGHQVKQVPPAYAKPFRQGHKNDFRDAHAVAEAVQRPSTRCVPIKTDDQLDLQALHRVRSRLIGDRTAVINQLRGFLLEHGIAVRQGHRFLRQQLPQILATRADVLSPRMVRIAGDLVDDWGYLDERIERVTDEIEGLAQTDVSCGQLMTVPGIGPIIASATVAAIGNGAAFAKRRDFAAWLGLVPKQMSTGDRTILGRITKRGNRYLRMLFIQGARAIQLHPASWAKHSFGPWLTAAAKRLHHNVLTVALANKLARIALTVLVEGRNYETRIAPAVA

SEQ ID NO: 427269 - protein, 347 aa, unidentified
MTRVTHLGIDLHAKSSWWYGVSAEGEVVVNQDTPNDWLALDAALRRCRGRVVAAVEAGGNWPWLVYGLQKRGCEVHLLHATSVRTCRQSRAKNDRLDAWLLAQLAAEPWRVKESWICPENWVWVRGELRGRRHLVAQRTATRNRIQALLKQDNRLPPVTDLFGRQGLTWLAGLRLPARLRATLEALLAVEAEHGRQIAALEDELWPLTQTEPLMRRIVALPQAGPVTALTIALESGDFARFRNAEAYAAHCGLAPGTFESAGKRRDGRLCPQCHEALKEVYGEWGFRLLSHGGPGPAWRAVQESYRDRPVSEAKFMLARKITGAVRAMAVREEDFVVTKLIRHAKMA

SEQ ID NO: 427270 - protein, 366 aa, unidentified
MKKISTVQVLGNEILQEQKQTIGVDLGDRWSFYCVLEEAGKIILEQKVATTPEAMKQTFAKIPRSLIALETGTHSPWASRLLTELGHEVLVAHAQKVELITKSNRKDDRHDARALARLARIDPELLGPVRHRSAQAQIHLTVIRARAELVSARTALVNAARGLVKSYGQRLPKCGTQQVNRELAAGLSTELREVLEPLLQEIESLNERIKEYDERMEKIAQEVYPEVSLLKQVKGVGTQIALTYVLTIEDPYRFEKSREVGCFLGLKPGRRNSGNSEPQKKISKEGDRYLRTMMVQGAHYILGPFGEDSDLRRWGLKLAERGGKNAKKRAVVAVARKLAVLLHRLWVGGEVYEPLRNSQKAMRAVA

SEQ ID NO: 427271 - protein, 351 aa, unidentified
MNETTTIGLDIAKQVFQVHGVAVDSTVTVKRQLRRSEVIRFFDRLPRCRVGLEACGGAHFWARELTALGHDVRLIPASYVKPYVKRGKTDAIDAEAICEAVSRPTMRFVPIKTVDCQAGVMLLKTRHLLVKQRTQSINSLRGHLSELGIIAARGTGKVETLIAIIRDKTDQRIPAVARRALEMLADQVEALARRIATLENEIVAEVRRDDTMRRLATIPGVGPITAATIVALVPDPRAFTSGRHFAAWIGLTPKMHSTGGKERLGRISKMGNPVLRSLLVVGATAVSGHARRGATVSPWLTGLLARRPAKVAAIALANKMARIVWALLTKGGVFTRRPATARSMQPDLNMT

SEQ ID NO: 427272 - protein, 319 aa, unidentified
MKIVGCDFHPSWQQVAVFDPETGEVEERKLLHGGGEAERFYRELEAPALVGVESCGNSQWFIELVEGLGHVVWVGDAAQIRASYVRRQKTDRRDAGHILKLLIEQRFPRLWVPSTEQRDLRQLLIHRHKLVEIRTRVKNGLQHLALNKGLQKKNALWGVRGRAELEKLPLAGWTARRREDLLGLMKELNRTLDELDEAVERAAQDHPQARLLMTQPGVGPITSLAFVLTIGDVSRFRHSKQVSSYLGLIPREHSSGGKQRLGAISKQGNSFMRQLLVEAAQTANRLDEGYRRQYQARCHHKPKGVAKAATARKLAVRLY

SEQ ID NO: 427273 - protein, 334 aa, unidentified
MYILAIDLAKRSFQVCATDRGGAVLFNRVLSRTRLQQFLNEQSPCIVAMEACATSHFWGRFAQSRGHDVRLILPIYVKPFVKRQKNDAADAAAIAEAALRPNIHYVAVKSAEHQARAVAFRTHQCFVRQRTQLINALRGHLAEFGIVVAQGPANLGAVAGMLDDGGVDLPDGVREIGRLYLDQIRLLSEKVDELSLKLREATTSNAEMRRLCTVPGVGPVTAGAILAFAPDLHAFKSGRNFAAWLGLVPRQHSTGGKTRLGGVSKMGQTDIRRLLVVGAMSIIRWIVRKGTFPDNWLGHMLGRKPRMVAAVALANKMARIIWAMMTREQNYRMA

SEQ ID NO: 427274 - protein, 435 aa, unidentified
MEEVEDEPLFAERVAGIDIGKREIMVTIRVPSDTRRGRRQQETREFRAVRKDLLALADWLRAWGVTKIGMEATGDYWKPVYFLLEREGFDCVLYHAAQVKALPGRPKTDKLDSAWLAKITERGSLASSFVPPEEIRRLRTHTRYRRHLVQARTAEKARCEKLLEDAHLKLSSVITDIHGVSGREMAAIIAGQRNPKVLAQMARTRMRGKITQLEEALDCSFFTEEHAFVLAMMLANIDHLTAQIKELTGKIEALCQPYLHQIAQLDAIPGFGVITAQDIIAEIGVNMAVFPTAGHLCSWARQAPQVSQSGGKRKGKNATGRGNPYLGGALGESAVNAGRTQTFLGTKYRRLVRHMPKKKAQGAISRTQLVICYELLSDPEAVYQDLGTDHYERRANIRREVRSHARAIERRGYKVILEPIEPGLDPDILPVTKAS

SEQ ID NO: 427275 - protein, 389 aa, unidentified
MLFCGIDVAKYQHAVILLDEEGQVRKPPFGIKNTRKGFDQLGSLLQSQSEPVQVGLEATGHYWLALYEELSRLGYPVVVLNPLQIAAYRKSGVRKVKSDRTDAWWVADFLRIANLPATSQDIPLILQLRELTRFRFRLIEQIGDCKRKILSILDRVFPEYETLFSSVFLKSSRELLKTAVSAHEIADFDLVELSQLLHRASRGRFGRQKAKTIQDLARASIGVGFLADAVRMEMRCLLDQIDLLQEQIAQLDASVTELTAQIPQYITSIPGIGPVTGAAILAEIGDIQRFDSPEKLVAYAGIDATVYQTGQFEASEAHMSKRGSPYLRHALWQAASMAVLYDPELKAYYQAKRQEGKHHNTAVGAVCRKLLARIYVILKEQRPYVIRDC

SEQ ID NO: 427276 - protein, 318 aa, unidentified
MRIKECDLQARQQTLAMLDTGTGEVVNRTLPHEGKSVREFYSTLPGPVRVGIEATGSMKWFLQLMQELGIDCQVGHPATIRAAEPRRQKHDQRDAELLLKLLVENRFPSIWQPSQELLDLRGLLLHRHQWVRLRTRIQNALQAIALANGLRRGSSLWSESGQRAIASLPLATHTAQRRSELQAMYAGFEAEIEQLKQQVLQQAGPRPTAGLLMTHPGVGPITALATDVFLGDPKRFSNGKALASYIGIIPREHSSGGRQRLGGLSKQGNPLLRLLWCEAAAHAVRRDPELRRFYRRKLVQKGLGKARVAAARKLGPGN

SEQ ID NO: 427277 - protein, 268 aa, unidentified
MQDVTLVGIDLGKHSFHLHGQDRHGKALFRKKVTRKQLIEFFATLHACTVVMEACAGAHHMARKLAGFGHQAKLISPQFVRPFVKGNKNDFVDAEAICEAASRPSMRFVTSKTEAQQTLSALHRVRESLVRDRTKTVNQMHGLLLEFGVSLPIGEAVITRLPAVLAEQPLPPRLIAILERLHAYFKYLSEQLGELDKEMARQLADDDLGQRLLTIPGVGPITASVLATEMGDGKQYGCSRDFAASIGLVPRQYSTGGRANLLGVLSTR

SEQ ID NO: 427278 - protein, 355 aa, unidentified
MEGYVGQQYVGMDLHRRRSVIVRTTDQGEVLEAVQIINTPLALAEVISRAGESPEVVLESTYGWYWAVDTLQEAGANVHLAHPLGVKAFEYRRVKNDLRDSVDLADLLRLGRLPESWIAPPATRELRELVRHRAKLVALRSHCKAQVHAVLAKCGVLVPMSDLFGVGGTQLLDGLDLPKPYAARVASLRRVMDLLDFEIDVFAKLVKGRLVTDPGYTAVQAIPGIGPILGAVFVAEIGDVHRFASAEKLTCWAGMTARHRESDTKVRRGRITKQGSRLVRWAAVESVQRLPGHTVLGAFRDRVADKRGHNIAVVAAARRQLEYVFYALRDHHVRTDLRAGPLAPATTTATTSQAS

SEQ ID NO: 427279 - protein, 355 aa, unidentified
MDSKKYIGMDVHKESISIAVRNGAGKIVMESVIETKASMILQFIDGLRGDVHVTFEEGTSAAWLYDLLKPHVTKLVVCDPRKNRSMREGNQNDKIDARRLAELLRLNHLNPVYHGEHGLRSLKELVRSYLTITKDLGRVMSRVKAIYRSWAIPCTGKQVYAPRHRAEWLGKITEPGVRRRAEFYYQQLDALRVVRQQVRRDLLAESKKHKTWKLLCQIPSIGPIRSAVLLGILQTPNRFRTKRQLWTYSGFGIETHSSADHRRVNGQLERAKKQVSIRGLNRNCNHDLKNLFKGAAIVASSKPGPFQEFYTALLTKGIRPEMARLTLARKIATIVLIVWKRGACFDAQHLKPQTA

SEQ ID NO: 427280 - protein, 389 aa, unidentified
MQDVADQSAAPTTIGADLCAIFVSLELSRSTWLATSLSPGLREKMSKHSVSAGDIAALLARFSELRRKACARTGKSFPIVVIQEAGLDGFWIHRVLLSEGIESHVVDAASNATSRRRRRAKTDRIDGETLLRALLAHKRGEPRVCSMVRAPTPEDEDRRRVCRERKVLIMERVQHVNRIKGLLFSQGASGYEPLRRDRRARLDALQTGDGRRLPPHLKAQVCRELDRLELLLEQIKAVEAERDALLNAEQTKVSAPPLMLLGVHGVGPEFASVLWSEGLSRHFDNRRQVAAYAGLVPTPWQSGSVDREQGISQSGNPRLRTTMIQLAWLWLRHQPGSALTLWFKDRIERNGGRRRKTMIVALARKLLVALWKYVTAGVIIDGAVTRAVL

SEQ ID NO: 427281 - protein, 404 aa, unidentified
MLNAVGIDVSKGRSTVAVLQPGGVVIRKPFDVYHNQNDLNDLVSYIKSLEDDTKVVLECTGRYHRPIVDALHKAGIFVSAVNPHLIKNFGNNTIRKVKTDPADAKKIARYTLDNWQELREYSDMDDTREQLKTMNTQFDFFMKQKTAAKSNLIALLDQTYPGVNKLFDSPVRADGSEKWVDFAYSFWHVDCIRKLSLNTFKERYRSFCKKHDYNFNEAKAEQIYSSAKEAIATLPKSPVYKDLIHCSIKQLNLESEHVEKLRSDMNAVAAQLPEYPVVMGMYGVGTTFGPQLMAEIGDVMRFTHREALTAFAGVDPGKDDSGQRVSKSVKASKCGSARLRKTLFQIMTCLLQNMPEDDPVYQFLDKKRFEGKDYYVYMTAGANKFLRIYFGKVKEYLSNLHLEE

SEQ ID NO: 427282 - protein, 507 aa, unidentified
MKEYILQKQRGVILTIKLKFKMAKKAKKIRTRKGLELKIVNPDAAGIDVSSREMQVCVPLDRDADYNRKFGVFTEDLEAISRWLTECCIKTVAMESTGVYWVPLYMKLLDCGIEVYLVNAKSTKNFVEEKTDEVDAESLMLMHAYGLLKPSYQVDNCAREIRNLSRHRDNLIRSAAKEVQHMQKSMELMNIKLSNVLSDITGKSGQDIIAAILSGKRDAKELAELADPRCKNPKEIIAKSLAGNWNEDLLFTLKQSYELYQFIQKQIVECESKMEALFLKYSSQMPAQKDTIVRSEKQRQKKTKVAFDVEEYAHKIFGVNLMRIPGINEGNLLKLTGELGHNFTEKFDNYKKFCRWENLAPNNKITGGRIISSKLPKRKNPVGQIFREIAVTLGRAKNPLGDYYRRMQSRKGPMGAIVATANKISKIVYTMVKTQTEYDESLIRINEPEYLMRKMKNMQKGIAAIQKQLEAYSSKSSQKSGEFSEELSAKWNEVKSLMNKHFDVAAA

SEQ ID NO: 427283 - protein, 371 aa, unidentified
MKMSVGVDLHKTQFTVCVLSEDRTVNESGIYPTSKLGYKAFLSKMTALMDQGYEITAAVESTGNTRYFRNQLLKAGIGVKVVNTMKFKVVTESVKKTDKRDARTLAEFLEKQMLPESILCSQESEDIRRVIKSRSILVKALVSLKNQVHGLLLGYGIESRRGQLQSKKERQRILCGLEDHRSYGNAAQAVKPLMASIDQVACEIKRLEKVLAELVAKDEDVALLQTIPGVGLITAATIRAYTDDINRYKSAKKYAAHAGLVPWVQNSNETIRHGHITKRGPVEMRTAFVQVVMGMIRCGKVTGGYRVMTRYQEMKKHKGTGKSIIATARKMSTIMYAMLKSREPFDPTKMAPVNEKKIAVAPVKRPLALTG

SEQ ID NO: 427284 - protein, 415 aa, unidentified
MVETNEKERMRIYQKRNTCFIGIDMHKDMHCAVIIDCWMNKLGEVSFENRPSKFPAFVEDVRRICGTKEFVFGLEDTRGFGRNLAAYLVGRRFEVKHVNPAYTSAVRLSNPIIFKDDTYDAYCVARVLRDMVDSLQDARQEDIFWTIRQLVKRRDLIVKSNVMNKNQLHSQLSYSYPSYRKFFALVDAKSAMCFWEHYPSPEHVKATTPEKIYETIKPVHQALKLQRIHEILAMIEKDGDTRKDYQPERDFIVRNIVKEIRHNKELIAEIDDELRKLLPLTGYKLHTMPGIDLATEAQLISEIGDINRFPDSDKLARFMGLAPVQFSSAGKGKDQRCRNGNRALNAIFHFMAVQMVAISASGKPRHPVFRGYFEQKVKEGKNKPQALVCVARRLVRIIYGMMKTKTEYRPYQKDL

SEQ ID NO: 427285 - protein, 417 aa, unidentified
MIPAVIECCAGIDVGKKWIAVCVMRGPANGDAQAEIRKFETTNDQLERLGEWLVASGCTHVAMESTGEYWRPIYNVLEEVTDVELILANSQQVKALRGHKTDPSDAHWLAHLLRHGMVRPSYIPPLEIRQLRDLTRRRKQLVRTGAQERNRIQKILEDANIKLGNVLTDIFGLSGQRMLDKLLEGGEATVDEIAELAVRSARKKIPQIRTALQGHRLKDHHRRLINFSLDHMALVEEQIGELERAIVDHIKASGLEKAYELLQTIPGIQQQVAASVLAEVGPNMSQFGSPKKLSSWAGVAPGNNESAGKKRRAPALRGNPWIRSTATEAAWAASRKKESEFQQDYERKKPRLGHKRAIVAVAHSLIETVYEVLSTGTPYTKPGANPMPNDKRAKLIRHHTRRLKTLGKRLKTSAMQP

SEQ ID NO: 427286 - protein, 415 aa, unidentified
MALKIVYKICCGIDVHKTFVVACIASTNDKGITSYESHRFSTYTSGLKTLLQWLLDRDCKDVCMESTGKYWIPVYNILESDCSIILAHPKYVKAIRGKKTDKKDAKWIADLFKHDLVAGSFMPPADIRQLRDLMRYRFKLTCFKSSEKNRLQNCLTVSNIQLGNVVSDTFGKSAQAILDKLLENPADTSFDLEPLVYKSLKKKLPELRDAIDGYITPEQAGKLKVIKAHYENLESRKAELEELILALAAPYQQELTILQTAPGISSPFTAIGIISEIGTNMEAFPSAKHLCSWAGLTPTNNESAGKKKSVRVSKAGCYIKPLLVQCANAVVKSTKHPEMRNRYLRLKKRRGHKKAIIAIARMLLTALYHMLKNGENYNAELYQKSDLLPVDREITVEQALMIARNQGYKIKSATA

SEQ ID NO: 427287 - protein, 412 aa, unidentified
MEILYRAGAGLDVHKETVVVCVRRLGAAGQVHQEVRTFATMTRDLLALADWLAAQGVTHVAMESTGVYWKPIFNILENQFQVILVNAQHIKHVPGRKTDVKDCEWIAQLLQLGLLRASFVPPRPVRELRDLTRQRAQLVQERARTANRIQKVLEDANIKLGSVATDTLGVSGRDMLEAIVAGETDAEKLAELARQRLRAKIPALRLALEGRVTEHHRFLLRTLLDHVAHMETVIGQYRARIESVLSPFEEAVDRLKTIPGVDQRAAEVIVAEIGKDMSQFPSADHLSSWAGVCPGNDQSAGKRRSGRTTKGSRWLRTLLVQVAWAASRTKGSYFSAQYRRLAPRRGKKRALMAVGHAILVIAYHLLKEGTTYQELGADFFEKLEPERLVRYLVHRLEKLGHKVTLEPREDAA

SEQ ID NO: 427288 - protein, 330 aa, unidentified
MQDRAIDVPGNAIIGVDVAKATMVVARHGARATQAIANSPPVIRAWLQTVPAGACIAMESTGRYHLELASQAKAAGFGVYVLNAMDVHHYAKAMGQRGKTDPLDAHLIAQYVAHQLLGQGRKRVRPWEPTPKLLAELRELHRARVQLADSCARLTMALEHVAALQEEANALRVHFKRLMAQIDAKVAMLMASDTQLVKGCKRLQTITGVGPQGAAVLATLLTRIGFANSDAVVAYAGLDPRPEDSGNKRGKRRLSKKGDPHLRRQLYLCAMAATRSALFRPMYEALKGRGLPSTAALVVLARKLLRIAFAVWRSGKAFDPSKLLINTAPA

SEQ ID NO: 427289 - protein, 428 aa, unidentified
MPYNIAGIDVHKRMLHVVFSDVEVDGEYQFVRQKFDTSPSQLRMLADWLLEQQVEEVAMESTAQYWKPVWETLERYWKPVCEKREGAKPGSGTLHLAQALSNRGRRGRKKDFRDAERLVKRLVANELILSFVPHPEQRLWRTVMRTKYQMTCNRVPLQNRLEALWEEAHIKLSGLVSDLLGASARRMLKAIADGESDPAALAALADRKLRATPQQLSDALGACTELNPVYRRLIKMALEDLESIEKRIVQLEQEMADLLRSHEDQVKRLAEVPGLGVDSAQQIMAEVGATAATFPSAEHLSSWVGACPGDEESAEVSQSHRSPQGNRHMRRILNQAANAAVKLKGGIFEILYRRYVPRLGHNQTIGVIAHKLCRLVWKILHQGVHYEERGPAVSKVSKQKRTQRMLRELRALGYRIELAATQAGSPSA

SEQ ID NO: 427290 - protein, 440 aa, unidentified
MAMRKRTDTVFPNAAGIDVGASSHWVAVPPEAVEESVREFGVMTDDLHGLADWLLACEVETVALESTGVYWIPLFEILEQRGLQVWLVDARQMKYVPGRKSDVQDCQWLQRLMSYGLLRAAWRPAGEVCELRAIARLRETLLAEQASWVQRMQKALVQMNIQLTEVLTDVMGMSGQAIIRDIVAGERNPEVLARHRHRRVKASTEEVIRALTGNWRQEHLFVLSQALSMYDDIARHLRECDAQMQVLLGQRAQCAINVGAVPRAGSKARAAFDVRQMLANWAGVDLTRINGLEVSSVMKILTEIGPDLSRFANVKHFCSWLGLCPGTKVSGGKVLSAGTKRSANRVRQALKMAAMTLSHSNSALGAFYRRLCSRMDKPKANTATAHKLARMVYFMLTRGEAFVDQGQQRYEELQRERSIAALKRRATALGFQINPVGAAA

SEQ ID NO: 427291 - protein, 386 aa, unidentified
MQAPNVCTPTVGHIGTIFVAIELSQKSWLVTIHSPDRDRISRHKLTGGDHAGLLGLLGSIRTRASHKLGSAPAIVSCYEAGYDGFWLHRLLTAAGIRSHVFDPASIAVEQRGRRAKTDRIDGELLLRTLMAYCRGEPRVVRIVRPPSSEQEDARRETRERDRLVKEQGAHTNRIKALLRLHGMAVGNPRRRDWLKWLSAQRDWQGQAVPPQIKAEIEREHARLMLVREQLTALEQQSAQAQRTPAAAEMARRRDILFKLKALGPAFSGTLTNEVFYKNFDNRRQVGAYVGLAPSPWQSGGTDREQGISKAGNPRARLAAVELAWLWLRHQSNSALTRWFLARTAKASKRIKRIAIVALARKLLVALWRYLTTGLVPDGAVLKPVEV

SEQ ID NO: 427292 - protein, 393 aa, unidentified
MDFEVKHLICAGLDVHKKTIVAAVCMTDPVTLEAAYKVKSFSTNNSQIAAMRDWLLSYNCHDVCMESTGKYWIPVFNILETHMHVVLTHPKYVKAIKGKKTDKRDAKWIANLFRFDIVKASFIPPADIRALRELSYMRSAEKNRFQNSMTISRIRIDCVLTDPFGKTASSIMDYLLSDVPFDETECAKLIHGRVKASNEEIFDSIRGFEILSEQRFKMSHAKQHMELLSSYIDDIETELFRLSRSYDEVIKRISGIVGFTERSALFVISEIGADMGVFESAKHLCSWAGLTPANNESANKKKSTRCSKAGQYLKPLLIQCALAAVKSKKNPYYAIKYKRLAKRRGRKKAVIAIARMMLTSIYHMILNNEEWKPDDYEAIIHQNRSKLHLHLIM

SEQ ID NO: 427293 - protein, 350 aa, unidentified
MDRYIGLDAHASSCTLAVVSPSGKRVGTQVVETNARCLIEAVRQIPEPRPICIEEGTLAEWLYEVLSPHAQEVAVAAVRESRGAKDDRRDAFGLADQLRMGGIQRKVYKERGRFRALAYRARGHRWVTVDAARVKNRIKSVYRSRGVQVAGQAVYAPSKREGFLVKLPREAQPLAELLYEELDALGALKSRAKKAMLAEAKKHPQYRLVKSCPGLGPVRTAELLPIVVTPFRFQSKRGFWAYCGLGLVERSSSDWVRARSGEWIRTPLRQTRGLNQNFNHTLKAIFKGAATTVIGRGKDEPIYRHYGRLLDGGTKPNLAKLTIARQIASIVLAVWRTKEVYDPKRLETIP

SEQ ID NO: 427294 - protein, 319 aa, unidentified
MTQNDLVVVGIDVAKDKVDACIRTVTERRTFPTTASGRRSLIAWLRKHQVGKAVMEASGGYERVWAKALRQTALEVRIVDPKRVRSFAESAGRLAKNDRIDAEMIAWFAETFSEAPSQVEDPAHEEIKALVKGRKSLIDLRTRLEMQKEHEVPALVGKAHARLLKKLASEIAAIETAIGAKIKATPAFAVRAEIIQSVPGFAEATALTLLAGLPELGQVSNEVAAALVGVAPYDDDSGKRHGQRCIKGGRRWVRNALYMPCVGAATLNNPVFKAFYQRLIAKGKEPKAALIACMRKLIVILNTMIARGEKWDPKRYQVA

SEQ ID NO: 427295 - protein, 342 aa, unidentified
MQITTIGLDIAKNVFQVHGIDATEKVVVRKQLRRGQVMKFFEALPPCLIGMEACATAHYWARELTKLGHEVGLMPAKDVKAYVKRNKNDAADAEAICEAVRRPTMRFVRAKSAEQQGRLMQHRTRDLLLRQQTQVINALRGHLAELGIVAAQGREGLKQLLAIIADEADERVPIDARASLIVLAAQLQALQTMIGSIEKRLVVQHRANEASKRLESVPGIGLIGASAIAATVTDPNAFRSGRDFAAWIGLVPRQDSTGGKQKLGPISKQGDRYLRRILVVGAIAVLRYAKQNPEKYPWLTQLLARRPFKVVAVALANKMARMAWALLAKGGTYRAPALAAAA

SEQ ID NO: 427296 - protein, 341 aa, unidentified
MAVIIGIDPHKLSHAACAIDNNEHELAQLHVRAGQRQLELLLGWAQPFSERRWAIESAAGLGYLLAQQLVGAGECVMDVPATLSSRVRLLGTGRSNKNDPNDARAVAIAALRAPSLAVVRREDHLTVLRLLAKAHLDAGRARNRACCRLHALARELVAGGIRKEVVVLHAESLLAGVAPVGAAQRQRLELAHELVDEVCALAAKLRRSKARITTAVVASATTVTDLYGVGPIVAATVIGYSGDVRRFPTAGHYAAYNGTAPIELSSAGRTVHRLSRRGNRVLNHAIHMAAVTQIRNLPSEGRAYYDTKVAAGKTKREAMRALKRRLSDRVYRQLLADTRPR

SEQ ID NO: 427297 - protein, 384 aa, unidentified
MVNNSITFISLDTHKEFFEVAYIEDKRDAKPVSLGRIHGTKLALQKLVRQFESKYPGSTLHFVYEAGPCGYWIYRFLTSLGHCCFVVAPSLIPKKAGERIKTDKRDALKLALLLRSGDMDPIYVPEPEDEAMRDLSRARETAMKDLKDAKYQLKAMLLRNNIRCDIQDNWSAQHLRWLTELVLPHPSQQIVLQEAIQTISERIRRLERLDNELTYHVKNWRYYPVVKAIQAMRGVRLLVAVGVIAELGDLSRFDHPRKLMSYLGLVPSEHSSGGKRKQGGITRTGNTRARRLLVEGAHSYRYAANVSTELQKRQESLSKEIIDIAWQAQLRLCKRYQRLIKRGKNYNLVVTAIAREMIAYIWAISREIVLTPVNPAKRLARVPA

SEQ ID NO: 427298 - protein, 344 aa, unidentified
MKKNLFFIGLDISKADFAASIYKTPGQSIVTKEAIPNDRKGFEMLLLWLYDHHIDKKNCRICMEATGVYSQAIAYYFLFQDFPVSVEPPLKVKRAFDPVGHKTDPVDSKQIAEYAYRFQDELTSWKPRDEILEKIRQLLSVREQFTKQKVALDNSIQAYSKQRVQVALIKTAQKETLNQLKKQIARIDKELANLIKQDPEIFQRANNLDSIPGCGMLLAAHLLVITENFTKIQNSKQLAAFIGIVPYQHQSGTSVSKRAKIRHFGPGPSRKLLRLAAQSVSTHNVTFRHYYLRKLDQGKAKPLVLNNIANKLLKVACTIIRNNTRYIKEHRSIHPMYLKSLKSA

SEQ ID NO: 427299 - protein, 369 aa, unidentified
MQDSMFIGLDVHKATISVAIAKEERGGEVRHWGTIPHRPDHVRKLAEKLGTGGRRLHFCYEAGPCGYGLHRQLVELGHDCIVVAPSLIPVKAGDRVKTDRRDAVMLAKLHRAGELTAVWVPDAAHEAMRDLVRARATAMRVLGKARQHLQGFLLRHGRIYPGKKGWTVAYRRWLTTVRFQHPAQQIVFQDYVDAVSDAEARVVKLTGQIADLLPSWDLAPVVEAVQAMRGVAFIVAVTVVAEVGDFRRFDNPRQLMAYLGLTPSEHSSGASVRRGGITKAGSGLARRALIEGAWSYRMQARVSRKLHDRIEGLPKAVRDIAWKGQLRMCQRYRHLIAAGKAKVVVTTAIAREMVGFIWAIARAVTATPA

SEQ ID NO: 427300 - protein, 341 aa, unidentified
MQHLAIDLGGTKSQICVRTAEGRILHEQALETARLGRYLKGQPASRVVLETCSEAFGIADLALSFGHEVRVVPTTLVRSLGVGARRIKTDRRDAQVLSEVSCRIDLPSVHIPSDVARQRRSMCTMREELVATHTSLINCVRGWARTQLLKIRSGDSKSFAKRLRAAALATEDGLPEYVERLLQAIEALQQQIVAADDELRSLAEEDPVCQRLMSVPGVGPVTSMRFVAALDDRSRFPTAHAVEGFLGLTPGENSSSERQQRTGITKAGPAPVRRALVQAAWNLRRIRPSDPISQWAAQLEQRRGKFVATVAVARKLAGILFALWRDGSTYEPNHHAPRSAS

SEQ ID NO: 427301 - protein, 327 aa, unidentified
MAKRTTICAGIDTGKRKLDIALDGSSEQLQIDNTPEGYKALLDWLRRHRVKRIGIEASGGYEQAVVVELRRRRFVVVVFQPAQVRAYAKFSLQRAKNDKIDAALIAACTGAVKTIHAPPDARLLPFAEHLTMIDQIAEDITRLKNRIETCRNSRFSQTWKEDIARLEQREKIEFKALVAAIRKHRDLAERLDLINSVDGIGPPTAVAILVRLPEIGRITREQAAALAGVAPYDDDSGEHAGTRHIEGGRKRLRRALYTAALPASFRWNPQLIALYQRLIAAGKEHKRALIACARKLLIFANAVVARGIPWKHERPPVPSMTALPQPG

SEQ ID NO: 427302 - protein, 339 aa, unidentified
MNSMAVGVDIAKNVFQVHYVDQGSGEIVNKPIKRAKFLEHFANRARCLIGMEACGGAHHWARELTRLGHEVRLMPAEFVKAFNIRNKNDAADARAIWLAVQQPGKPVAMKTEMQQAMLALHRMREQLVKFRTMQSNGLRGLLTEYGEVMSRGRAKLDKAIPAALDRLAERLPAALIDTLREQWSGLARLDGQIAEIERRMREWKKEDGAVAAISEIPGVGLLTATAAVAMMGDPKAFSSGREFAAWAGLVPKQTGSGGKVNLHGISRRGDTYLRTLLIHGARSVLSHAKEPGPWVEQMKKRRPANVVIEALANKMARTIWAVLAHDRPYRKDYVSVKPA

SEQ ID NO: 427303 - protein, 340 aa, unidentified
MGKRYIGIDLHRNRFTCCIRLENERTYVTEWELEDLGKFVKKLRPSDEVAVEITGNTRLFYDAVAPHVARVVVVNTSQFQVIRQSVKKTDAHDARALALYLSKNMLPEVRMKDKERGQLASLTQTRDTLVKLRTALKNKINNILSARGLNLAKEALGSEKKLDEVLELPFDEMVRIELRVIVQQIRSLNKSIAELEKTIGEEGSKLEGHKELSSIKGIGKITGAILLSVIGDVNDFADEGRLASYFGIVPRVSNSNETAHSGRIHKRGTRLGRTALVQSALIAAKYSPYLKRFYERVKARRGAGKAIIALARKFLGIIYRTLKNKWVFEDFPNFVLAEAS

SEQ ID NO: 427304 - protein, 289 aa, unidentified
MNNTTVYVGMDVHKNSFSLCCYTVRDDACSHYVKIDPDYRLVLEYIESMRGIYGDDSKFICGYEAGCLGYTLYHQLNDHGVECIILAPSTMAKSPVQKKKKTDKRDSEMIARCLAHHSYHKVHVPTSEEEQIKEFIRMRDDHKLALKKIKQQILAFCLRHGFIYNAGASYWTAAHLSWLRSLEPEGLYKEILSEYLLTYDKLTDTLERLDRRIEELADQDAYRESVRKLCCFLGIKTQTALAVIVEVGDFKRFQKAQQFASYIGLVPGEDSSGDRDQPAPRSRKQAIRM

SEQ ID NO: 427305 - protein, 385 aa, unidentified
MAPPRMPEAVIGLDVGKLSHWACVATRDGEILLSAPVANREGDPDSLFGRFPDALVVVDQSRNIGALALARAKAAGMSAAYLPGLAAHGAARLFAGDAKTDERDAMVIAKTALGIPDALLPVGDPGPTVAAARALAAQRNFLTCENTRSKNRLRSILLESCPAFEALVDLSDGPQLRLMASLGGAWSVADAGPRRAAALTRGAARGKIEALVRSTASSTRPDAAAIAAEDRAVRLLARRISENSAEIDVITAEISALLEGDDTYRCLLTVPGIGPKTASELAISIDIEDFPSHDRLASYCGLAPRNRQSGTSISSVTASRQGNKRLKNLLIFSCNCLTRTEGRWGDYYARCRERGMPHGKALKALARKRLKVIYAIMRDRVPYAA

SEQ ID NO: 427306 - protein, 370 aa, unidentified
MNSITYIGMDVHTTNYTLCAFTMEGQKIFAQTSINPDIKELVKYLETLNMRQGGKVDFVCGYEAGCLGYTLYHELTAKGYKCVILAPTTIPSTANEIKTDKRDARKIAKCLAYGTYSPVYVPTEQDNAIKEYIRMRDDTQTMLKQTKQQINALCLRHGKVFDGRSNWTEKHMQWLRNVKFTNAIVQETLTEYLVTLEQLRDKVERLDKRIEKFSQMNDYAEKVNKLVCFKGIKTHTAMSLIVETSDFRRFPSAPQYAAFLGLVPGEHSSSDSCHRLSITKAGNSHLRRLLIEAANSYSRARVGRKSADLKQRQQGNAPEVIAYADKANDRLRRKYVRIATHSKANIAKTAVARELACFVWGMMNDRILQQ

SEQ ID NO: 427307 - protein, 348 aa, unidentified
MKIVGCDLHARQQSIAMLDSETGELTEKVIRHEGNAVREFYSSIKGRVMVGIEATGAMQWFLEVLEELGIEYRVGDPAKIRAAETRKQKHDRRDALLILDLLERDRFPAIWMPTSEQRDLRSLLRDRDQWVKMRARLQHTLQAMALNHALRKGPSLWSGRGQEALRKLPLPRYTSQRRNELMSLYAQLQRRMQEMDKQVEAQAQQRSQARRLMTHPGVGPVTALATDVFLGDPSRFTTANQVASYIGMIPSEHSSGKRQRLGKMSKQGNSLLRYLWTEAGMHASRKDPELKRFYRRKLMQKGMGKARIAAARKLGIRLWIMMRDEIDYEEFCRRGTLRQKGESPCGNA

SEQ ID NO: 427308 - protein, 397 aa, unidentified
MGNRSMFVGLDVHKETIDVSIADGDRHGEVRHYGVIASDLEPLDKVVRALRAPKRTLHFVYEAGPCGFGIYRHLRKRGEDCMVVSPSMTPKRSGDRVKTDRRDSLALARLHRAGELRPIYVPDDTDEAMRDLVRAREDAVTVGVQAKYRLKAFLLRQGRRYPGRDGWTLAYRRWLTDLSFPRTAQHIALQEYRDMIDETERRLERLTDQLRQLAPAWRWAPVVAALQALRGVKFLTAVSLVAELGDLRRFRHPRELMAYLGLVPSEHSSGPSVRRGAITKAGNPHVRRLLAEAAWAYQGIPRIGRQHAYRQEALPKRVCDIAWQAQLRLTARFRRLVARGKAKPKVATAIARELAGFVWAIAREVAPAESPAASGQDVVVHRCFRRHGGQVENPRGR

SEQ ID NO: 427309 - protein, 347 aa, unidentified
MKFYNQQHAFYAGIDLHAKTLHVCVLDQNGEKRLHKNFQCQDTETFLTEIQPFRENLVVGFESTFNWYWLADLMSQETIPFILGHALYMKAIHGGKTKSDAIDSEKIARLIRGGNFPLAHAYPKEHRATRDLLRRRTFLVRRRAEALTHIQMVHHQHNQPKPTNIKSKSNRLGIGQLLPDAHSQLLVDVDLKMIEAYDQQIARLESELIKKAKITHPQLYYRLTSVPGIGPVLGLTLMHEIQDIQRFPSVSHFLSYCRLVKGSHTSAGKNYGSPGGKMGNAYLRWAFGEAIQILKRESSDVKQLAQRLEKKRGKGRAMNTLAVKLGRAIYYMLRHDRAFDLNRFIGG

SEQ ID NO: 427310 - protein, 338 aa, unidentified
MKNEAIQYLALDVHQATTVATVRDESGSVRMRATVATEARAIVGLVRGLGPRVHVAFEEGTQAQWLHDLLQPYAERVMVCNVRGRSETTNKSDRLDADWLSEMLRVGSIKPVHHASTSLLTLKELVRCYTNLMDDSTRVMQRLKAIYRARAIATPGKSVYRVSQRKMWLSKLESRGARMRAAALYEQLDVLMKLRPAAKAAMLAEARRQAGWKILRSIPFIGPVRAALLLAIMATPFRFRTKRQLWPYVGLAVVTRSTNDQEIVEGKVRRRKRPPMTRGLNRNHNPVLKNVFKGAATAASAKDGPLKDFYDRCVARGVHADMAKLTLARKLASIVLRL

SEQ ID NO: 427311 - protein, 345 aa, unidentified
MEHYAGIDVSLESASVCVVDASGRIVREAKVASEPEVLIGWFGMLGLAVTRIGLEAGPLSQWLYAGMREAGLPVELLETRHVRDAFKAMPVKTDRKDARGIAQLMRLGWFRAVHCKSLPAQEVRALLTARKLLQTKNHDVEMSLRGVLRGFGLKVGPTTPRTFAARIRELVAGHPTLSTVAEALLAARSTLFEQWQKLEKRLRSLARQDRRVRLLMTAPGVGPIVGLTYASAIDDPSRFRSSKAVGAHFGLTPKRYQSGETDVSGRISKIGDGGVRTALYEAANVILTRPVKGSTLKNWGMRLAARAGVRKAKVALARKLAVVLHRMLANGTTFLDEKAAPAAAH

SEQ ID NO: 427312 - protein, 412 aa, unidentified
MNLVYERCAGLDVHKRNVLVCASTPDAQGQRHKERRTFSTMTPELLRLRQWLKDRGVTHVAMESTGSFWKPIFNILEGHMEVLVVNAQHLKAVPGRKTDVKDAEWIADLLQHGLLRPSFVPPASQRDLRELTRYRSSLVEERSRIINRLQKTLEDANLKLASVASDLMGRSARDMLAALLAGEVDPSVLAQLARGRMRAKRDLLEQALQGLLKPHHRFLLSEQLADIDALDEAIERMSHEIAGRLRPYEALIQRLSTIPGIKRRLAEVILAEIGPDMSRFPSARHLASWAGMCPGNNESAGKRLSGKTRKGSPWLRSALVEAAHAAIHSKDSYLSAQYQRLSLRRGGKKATIAVGHTLLVIIYQLLSQDKDYEDLGGNFFDEWDRQAVQKRLVRRLEKLGYEVTLEPTTPAM

SEQ ID NO: 427313 - protein, 356 aa, unidentified
MAPIYIGVDFHARQQTICYLKTETGELVISELKHQNKEQVRAFYQQFQEPVIVGLEASGYSPWFEALLEQLGCEVWLGHATEIRRRARWRQKNDRRDAELIWDLMVHDEFPRLHQPALSSREVLRMLRYRQKLIKLRTMTKNSLQAIALQAGLAKGPQLFTAAGQEQFKAAEMSPVLQWQRDHWFELLKPFNQQLLETVVWFKAQSKDDVQIQRLRTHPGIGLLTALCILHTLQPVSRFRNARKVAAYGGFDPVERSSAERQHFLGISKAGSRMLRYLLVEAVQTAVRHDEDLKRFYKRLAERRGRPKAKVAAARKLLIRAYIMLRDEIDYAEFRRRAVAARLARHGQGPTKCPRY

SEQ ID NO: 427314 - protein, 387 aa, unidentified
MIYVGIDIAKRTHYASVMNSDGEILAEPFPFTNDLPGFQKLLSCISSFPKEQLLIGIESTAHYAENLTCFLFRRDFQVCIINPIQIASLRKSNIRKTKTDSVDTFLIMKALSLHDYRLFSMRDYDSLQLKNLCRFRQKLMKARTKVKIQLVSYVDLIFPELQYFFKSGIHTKSCYALLKTESNPDRIANMHLTRLSNLLKKTSKGHYTKNHAIALKELASQSVGIKDDTLSLQILQSIEQIEMYTQQISKVEASICEIMDHMDSVIKTIPGIGNLNGAMIIGEIGDISRFEKPCQLLAYAGLDPSVYQSGKFTASRTRMSKRGSKLLRYALINAAWQLTLNNETFKAYYDLKISQGRRHYNALGHVAHKLVRVIHKMMTDNLVFDLD

SEQ ID NO: 427315 - protein, 353 aa, unidentified
MQDGNRMEPGMTIGLDLGDKFSRFCVLDASGEVLEEGRVATTTPGLSQRFSGLAPCRVALEVGTHSPWVQRLLVGLGHEVLVANARKVRLIHDNESKDDRLDAERLARLARVDPSLLHPIDHRDAEAQETMAELRSRQALVETRAKLVNHVRGAVKSHGSRLKSCSTPSFHKQAAGQIPEGLQPALAPVLETIGELTSKIRRSDRRIEHLAAERYPQTTLLRQVAGVGALTALWYVLVIGNPRRFRSSRRLGAYLGLRPRRRQSGDGDPELRITKTGDRELRRLLVSAAQYILGPFGPDSDLRRWGLALAARGRKSAKKRAVVAVARKLAVLLHALWINAEVYEPLRNSQAAA

SEQ ID NO: 427316 - protein, 351 aa, unidentified
MKTQITAESKLFIGIDIHKRSWTVHCATSLFSGKSFSMAPNPEDLKKYVDKHFSEYEVSTAYEAGCCGYSAHRSFESYGWTSLVVNPADIFRKGKERFNKTDKIDAQLISRELKDGRLTSNEIPDRHREELRSLFRRRNDLVKDFRRVKSYIKMQLLYYGIKVPDQFDNDHWSHDFRNWVDGLTFDYTVGKSSLESRMRFFRFVDQDLRTVSSELRAYCRKNFKNDYYLLRSIPGIGGIVACGILSELGDLRRFNNIKRLAGYVGIAPGVHQSADTNKKLGMTPRAHRLMRSYFIEASWQAIRTDPVMQAYYKKHYGKDTKKIIVKIARKLLSRTLAVIKTNTPYQIGVVA

SEQ ID NO: 427317 - protein, 373 aa, unidentified
MEKNTTFVGLDVSKATIAVAVAQGGRRGEVRFYGTISSKPEAVAKLIGTLSAKHAELVFAYEAGPTGYGLYRQITNQGHACHVVAPSMTPSRPGDQIKTDRRDAAVLASLLRAGELTPIWVPDSDHEAMRDLVRGRISAVAAIRRTRQQLLSFLLRHGRVYRDGVKHWTKRHRRWLGEQRFDHPAQQIAFEEYNRAIEQAEDRRLRLERQIEALLPDWSLFPVVASIQALRGISLIAAVTLVAEVGDFRRFANPRQLMGWLGLVPRERSSGATRAQGAITKAGNSRARRMLVESAWTYRLPARVAGALLQRSARLPETVRDIAWKAQVRLCARYRRLQRSGRPKNVVTVAIARELAAFVWAIAIQTEPAPQTT

SEQ ID NO: 427318 - protein, 319 aa, unidentified
MAQNGLVVVGIDVAKDKVDACIRSLSLRQTFPSTAQGHRKLAAWLCKHPVNKAVMEASGGYERAWARMLREGGIEVRIVDPKRVRSFALSAGRLAKNDVIDAEMIAWFAETFSEAPSQTHDAAREELQTLMKARLSLIDVRMRLVSQSEHAAPGLVQKAHAHIMKSLASEIAKLEAAICAKVKSTPDFAERAEIIESVPGLAGTSSANIVAGMPELGQVSDEIAAALIGVAPYDDDSGKRRGERHIKGGRRWVRNAIYMPCVGAATLNNPVLKAYYQRLIAKGKEPKVAIIACMRKLIIILNTMIARRQKWDPSRYALS

SEQ ID NO: 427319 - protein, 407 aa, unidentified
MQVIYPRCAGLDVHKQTVVACARIVGDNPPRQEVRTFATTTSGLLELADWLDSLGVEHVAMEATGVYWKPVWHVLEGHFQLVLANAAHVKNVPGRKTDVNDATWLADLLAHGLINASFVPPVAVQELRTLTRTRKQFVRERGSHAQRIEKVLEDANLKLSVVISDILGKSGRAVLQAIIEGQSDPEQLAARISTRVKASRAELLEALRGRISAHHRFMLKLHLGHVDALDKAIADIEKEVGLGLEPFRQAAKLLSTMPGLSDVSAHVIVAEIGIDMSRFATAGHLLSWACLCPRNDESAGKRRSTRLRRGGKWLKTTLVQAAWAAVRVKDSYLQAQFHRLRARRGAKKAIIGVAASMLTAAWHMLRDGTEWHDLGATHFDRADTQKTANRLIRRLQQIGYAVQVTPA

SEQ ID NO: 427320 - protein, 428 aa, unidentified
MEESTEEPVGLVERVCAIDIGKAGLVVCVRIPHESKPGRRVQEVREYATTTPALLGLADWLHHQRIELVAMEATSDYWKPVFYLLEAEGFECWLLNAKHVKNVPGRPKTDKLDAVWLAKVVERGMCRPSLVHPKPIRQLRDLTRYRRSLVREQSREKQRLEKTLEDAQIKLDTVISNLHGVSGRQMLQAMIDGQRDPKVLAEMAHGRMRPKIPQLRQALTGHFDDHHAFLCAAMLRRIDTLAADITGLDARIDELIAPFVQAVEKLDEITGIGIRSAQEIIAEIGVNMDAFPTAAHLVSWAKFAPIDRQSAGKNKGASTGKGNPWLAATIGESVAALARTDTFLGERYRRLVRRRGKKRAIVAVGNSMLTIIWHLLADPNARYHDLGPGYYELKINKQRRQRDLVRQLEHLTGRKVILQPPPELPTAA

SEQ ID NO: 427321 - protein, 321 aa, unidentified
MEKEQVYVGIDVGKGSMDMAVHQSKKLRSFINDDRGIIQAVSCLRELAPALVVLEATGGIEMPLVAALGAARLPVVVTNPRQIRDFARATGKLAKTDALDAKVIAHFAATVKPDFRPLPDDQAQEFEAILARRRQVVEMITAERNRLSSAHNKVVRKHIKDHIAWLERELVDTDNNIKRSVRESPIWREKDNLLRSVPGVGPVLSATLLADLPELGTLNRREIAALVGVAPFNCDSGTFRGKRATWGGRAKVRAVLYMATLVATRYNPVIRAFYRRLCAAGKEKKVALTACMRKLLTILNAMLKHRTPWRYSACHTIGPCS

SEQ ID NO: 427322 - protein, 425 aa, unidentified
MTRPQLTPPAGVLVAIDIAKARNEVLIEVPGSGRRRRLSVLNTRAEHDRLIALLSNLGQPVTCGFEATGNYHRPIAWRLLQAGFAVRLISSVGLARTREALHNGWDKNDPKDAQVMLHMIRIGASQVYHDPLAAGINDVQELSKTHDAVSRAKTEVLHRILTHYLPLYFPEVDRFRHNSRSDWFFAFLDRFPTPACITALSKEAFIASAWDVVGRKVAKAQLLGDIYETARSSIGLPVPPDAPAVSMFRLVIGEARGLIQQRDAIEATADALLTDCSDYKLLRRIPGIGPINALTILAEAGDLRRFGHHRQFLKFCGLDLATQQSGTFRGQTKLSKYGNARLRRTLWLAGQVAIRQRENGFRDKFERYIARDRHNADLRRKALTAITAKMARVVHAVIKTGADYRPFVEGPVPGGRTPLSRAVRA

SEQ ID NO: 427323 - protein, 338 aa, unidentified
MKVTTVGLDIAKDVFQVYGVDAQGRVVARKRLARDKLLEWFGKLGSALVGMEACGSAHHWARELSIQGHEVRLISPQFVKPFRKGCKNDPNDAEAIYEALCRPSMRFVSIKTTDEQALLAVHRVRERLVAKRTALINQIRGLLAEFGVILPKGAAQVRRAVPEALEKHEARLPALLREIVCDLRDELATTDSRLQEYECRIDRIFQGTSMCKKLAALEGIGPVTATALVASVGRPGDFKNGRQFAAWLGLTPRQHSSGNRQCLMGITKRGDKYLRTLLIHGARSALIACRKKTDSKSLWAERLRLRRGNNVAATALAAKNARILWALMTRAEEYRVSV

SEQ ID NO: 427324 - protein, 430 aa, unidentified
MKSNTQNAKIEAITEKTLVLGIDVGSETHYARAFDYRGVEYSKKPFKFSNTEAGFVTFKAWVLDIKEKHEKDKVVPGMEPTGHYWFNLGKFLQDNEMKPVLVNPHHVKKSKELDDNHPTKNDRKDPKVIAGLVREGRYMIPYLPDGVYADLRTASNIRFQLQAELTRIQNRINRWFNIYFPEYKTVYGKPDAKSGILILKEAPLPEDILTLGIDGVNQIWRDAKLRAVGKARAKTLIEAAEHSVGSKEGAVSARMEIRMLLEDYESRNIRLQEVMGLIEGLVNQIPMAEKLLEIKGVGIKTVSGFLAEVGDIRRFNDPKELQKLAGLALVENSSGKHKGKTTISRRGRKRLRYLLFEVAMSLVAKNPEFRELHNYYTTRRLNPLKKMQSLMAIAAKLLRVFYAILTKGVGYDPKKMVNDIRRPAAYAQAA

SEQ ID NO: 427325 - protein, 355 aa, unidentified
MKYYTSTTQFNCGIDLHARQMYVCLMDRDGKKLVHTNIKNNDFEFFLKLVAPYRHDLTVCAECMFGWYWLADACQAAGLQFVLAHALYLKAIHGGKNKNDRIDSEKIAHLLRSNLIPPAYVYPADKRPLRALLRQRLFFVWRRAELLARIHSHQLAHNRIPPKQTRRNRDPWEKQLLAAEDHPLRQLALKNDLAMIRHFDTQIFQLEEELQRQAKKTASRDYALLQTVPGIGENLGMTLLCEIGDIARFPTVKNFLSYSRLVKGTVASAGKIKSLRGAKLGNPYLRWAFGEAAVIAKRDHAVIGPLAQRLEARMNGNKFKANTVVAIKLARAVYFMLKGKTVFDPDRLVATLSRN

SEQ ID NO: 427326 - protein, 339 aa, unidentified
MKEVTTIGLDLAKNVFQVHGVDHAGAVVVRRALRRSQVLAWFAKLPPCLVGMEACATAHYWGRELRRLGHEVRLIPPAYAKAYVRRNKNDAADAAAICEAVSRPTMRFVTIKTEQQQAVAGIHRVRDLLIKQRTMLRNQLRGLLAEFGVVAAQGRRGLNELLAILSDPEDQRIPSPLREGLMAIMETWRGIERKLEEIDRQMVAAGRADATCRHLITAPGYGPILSSAMAALVIDPGAFKRGCDFAASLGLVPRQDGTGGKVRLGPISKRGNGYLRRLLVNGATSLIKCQRTRQDPWVAKLLASKPRKVVAVALANKLARIGWALMTRQEDFRSRLAAA

SEQ ID NO: 427327 - protein, 354 aa, unidentified
MQRTTKYVALDVHQATTVAAVRAASGRVIARTILPTEEPAIVEFFRGMRGTVHVALEEGTQAQWLHDVLVPLVARVVVCDRRGEPQQGNKADQVDAEQLAERLRQGSLRAVYHGSPHRAVLKELTRSYANLVEDTPRVMLRLKALFRARGIPAPGKRVYHPRERAQWLAQLPDAGARSRAAVLYAELDVLRPLRPRAKAAMLAEARRDPAWGVLRTIPFYGPVRVALLLATMRTPWRFRTKRNLWAYAGLAVVTKTSAEYGWVNGRPVRRHRAPLTRGLNRNHNRVLKDVFKGAATAATTRPGPLQDWYHGVLARGVRAELARVTLARKLAALTLRVWKHGEPFDPTKLTTQAR

SEQ ID NO: 427328 - protein, 410 aa, unidentified
MSLFCGIDWATDHHDAAVIDGDGVMVARARVSNDAAGFAQLLTLLAQAGDSAKSPIPVGIETDRGLWVAALRETGRLIYPINPLAASRYRARYAVSGAKSDATDAVLLANIVRTDAGAQRPLPADTELAQAIRVLARAQQDAVWSRQQISNQIRDLLKDFYPAAIAAFAGLSDGGLARADARTILAAAPTPAQAAQLTPARLRRLLVKAGRQRHLDRDVERLRDVFTDTYLHQPALVENAMGIQLTALLGQLKAACTAVEQLTEAAIAHFEQHPDAEIITSFPGLGMLAGARVLAETGDDRSRFADARGLKAFAGSAPITRASGKKTVVLHRHIKNRRLAAVGPIWALASLRASPGARRHYDTRRATGDWNHQAQRHLFNKFLGQLHHCLHTGQLYDEHRAFPPPLPHAA

SEQ ID NO: 427329 - protein, 354 aa, unidentified
MGLKHQKEKRSMNHFAGLDVSVKETSLCIVDDAGRIVREVKVVSEPEALLGVLADPAWQFKRIGLEAGPLSQWLFNALAEAGLPVICVETRHMRAVLKAQINKTDRNDARGISQMMRAGLYRPVHVKTLRSQKLRMLLTHRKLLQSKAIAIENDLRATLRNFGLKVGTVGTAKFEARIKELVESLPDLAVLVEPLLVVRRVLREQVGVLHRRLLAIVREDDVCRRLMTVPGVGPVVALTYRATVDVPSRFKNSKAVGAVLGLTPCQHQSGESDRTGAISKCGDEMIRTALYEAAQILLARSKRWSWLKAWAMQIARRRGMKKAIVALARRLAVIMHRIWVDGTEFRWTREAVAP

SEQ ID NO: 427330 - protein, 381 aa, unidentified
MRTTATPNEHDTTTERVLFLAFELSEKTWKLGFTTGPGQKPRERAVAARHQARLLQEIAQAKRRFGLPDTAPVISCYEAGREGFWLHRFLQAQGITNQVVDSSAIAVNRRKRRAKSDGLDVRKLVSMLMRYEQGEREVWRVVHVPSVEAEDQRHLHRDLETLKQERASTTTRIKGLLSSQGIRLTSLSKFPEQLDALRLWDGSEIPSGLRRRLLRVWAHHQFLSAQIAALEAERRALLQSSQEAPIDKVRQLMQLKGIGINGAWLLVMEFFAWRALKNRREVGGLAGLTPTPYQSGASAREQGITKSGNRHVRWMTTELAWSWLRYQPESALSCWFRERFGSGGKRLRRIGIVAVARKLLIALWRFLNTGVLPEGAELKAA

SEQ ID NO: 427331 - protein, 412 aa, unidentified
MDVVHERCAGIDIGKADVKVCVRVPGPGKRRRKEIRTFSTMTRDLLAMRDWLLAEQVTVVGMEATGAYWKPVFYLLENDIECWLLNARHMKNVPGRKTDVADSEWICKMVEHGLVRPSFVPPPEIRQLRDLTRYRTEVIRERTREAQRLEKLLEDSGIKLSAVVSDLLGKSARAMLESLIAGERNPEILAEMARASMRAKRQILAQALTGQFTDHHAFLARTMLDRIDAISATEARLSEEIARQLAPFRRQIELLITIPGVSTRSAEMILAEIGADMTRFPSAAHLASWAGMCPGNHESAGKHTSGKSRPGDPWLKNALGLAATAAARSKNTYLASRYKRIAIRRGKKRALVAVGHTILTSIWHMLTNDAEYADLGADYFLQRTGRTRQTRRLVSQLNMLGYQVSLQSADAG

SEQ ID NO: 427332 - protein, 400 aa, unidentified
MRTVFGIDVSKTSSEVAILVNGEKVHGYTMPNDAIGFTRLLDDLKTVHTPEIVFEATGVYSRRLQAFLEDNGYAYTRLNPLEAKKQLDSLRVRKTDKIDAEKLAQSQFVLNRKSTYVQKEIYQQLRDLSRFYQNLTEDIVRTKNRLHKVLQVTFPELENLLSTPTGEQYWNLVIAFPSKEFVLSLTQSQLIDSIRQSTTKRISEKRVEYLADKLTELAKQSYCAVKKTSPMMEEVRYYAQELLRLSNRRQTVLDEMVTFAQPLPEYEILLSIPGIAETTATSIIGELGDIRRFQSANQINAFIGIDLRHYESGNFLAKEHITKRGNPYARKILFKCIHNIAAASHTNPCHIADFYEKRKRQSQMTSTKPHTIASIHRLIRTMDDLITHNKLYDYTSTQNQ

SEQ ID NO: 427333 - protein, 427 aa, unidentified
MSEVRSTQTEPEFAAFIGIDWADQKHIWSLQTADSEQRESGELEHTREAVESWVAHLYQRFAQRPIAVAVEQSRGALVFMLSKYEPFHLFPVPAQMAASMRQALYPSGAKDDPRDADLLLDLLVQHRNKLRRLSPDSEATRRVQNLVEERRQLVDEKTAQINRLTDHLKVYFPQVLEWFGRLDTELVCALLERWPALEELQKASPASVRAFFRQHRCRDRERIEHRMEAIRRALPAIQDRAVIEAKSAVVKVIVQLVRILVEGIEDLEGQIEEAAAAHPDFFIFNSLPGAGPVMAPRLLAAFGSQRERYRSAREIQSFSGIAPVTESSGKRKWVHFRWACPKFLRQSFHEWAGHSIVQSEWARVYYQQQRRKGNTHHAAVRALAFKWIRIVFRCWQDGVAYDENTYMAALVKRGSPLGAGVATGKTL

SEQ ID NO: 427334 - protein, 338 aa, unidentified
MPTDPTVLEYRLFVGVDIAAQTAMVATQRPGAKAGRSFTIEQTPEGYTSLLHQLQATGSVPGQVLVVMEATGSYWISLATRLVHEGFAVSVINPAQAHHFAKALLKRAKTDAIDAQTLAQLAMILQPEPWTPPPQIYYALQQRLAQRDDLLNLRQQVRNQLHALVQHPEVIAEVRARMESLLATFASQLTEVESEIAAALSQDSAWAAAATRLQSIKGVGWVTAAWTLVTTLNFTSCDPVDSLTAYAGLAPMPRQSGSSVWHRPSIGHTGNGRLRTAFYMATLSAAQHNPVIKAFYTRLREVGKPEKVARCAAARKLLHIAWAVVKKDQPFDPHYALG

SEQ ID NO: 427335 - protein, 351 aa, unidentified
MSRKTEAGLARTIGIDTGKNTLHLVGLDDKGAVVLREKLARGRIAARLANVPPCLIGIEAGMATHYVARELLVLGHDVRQVPPAYAKPFRQGHKNDFRDAHAIAEAVQRPSTHCVPVKTDAQLELQALHRVRSRLIGGRTAVINQIRSFLLERGIAVRQGLRFLRQQLPQVLATRTDVLSPRMISIIEDLSSDWRRLDERIEHATAEIELLASDSEACRQLMSVPGIGPIIASAMVAAIGNGAAFAKGRDFAAWLGLVPKQMSTGDRTILGRITKRGNRYLRTLFMQGARVVLLRPANWAKHGFGPWLAAAAKRLHHNVLATALANKLARIAWTVLAQGRSYEARAVPRIG

SEQ ID NO: 427336 - protein, 371 aa, unidentified
MGESITFVGLDVHKATIAVCVAEAGRDGEVRYVGEIPNEPGALDKLAARLGRGGRTPRFAYEAGPCGYGVYRHLRRRGHDCVVVAPNLIPRKSGERIKTDRRDATALARLHRAGELTPVWVPEPEHEAMRDLVRARADMVEALGKARQRLQGFLLRHGRAYDGKRWTWPHRKWLMEQTFSQPAQQVACQEYLDAVNELEARIERLTGRIRDLVPAWSMAPVVEALQAMRGVSLIVASALVAEVGDFTRFDNPRQLMAYLGLVPSEHSSGAKRRQGGITKAGSSLARRMLVEGAWTYRLPARISAQMRPRLAGLPREVRDVAWKAQVRLCARYRRLQAIGKRPQVVVTAIAREMVGFAWAIARMVTPPVRTA

SEQ ID NO: 427337 - protein, 366 aa, unidentified
MKKHTSKNQTTRKGPVKETFAFYIGIDLGDKKSDICVLDEQGELHDEFRLRMNAQEFQTYFGSLARSRVAIEAGAQSRWVAEVIQRCGHQVYVSNTRQVPYIHQSDAKNDPGDAYKLAELVRFQPRLLHPIQHRSPEAQADLSWIRAREVLVQSRTQIINAIRGMSKAFGERLQKCSTTSFTDKRADRIPAPIRSAVAPLLETIDHLNEQISYYDQMIQQVARTRYPRHRLLDQVQGVGVHTALAYMLTIGDPERFDKSRAVGSFLGLRPKQNDSGERKPQMGITKAGDEYLRKTLVNCAHYILGPHGADSDLRRFGLRICERGGKNAKKRAVVAVARKLAVLLHRLWISGEVYESLRNSQVAAAA

SEQ ID NO: 427338 - protein, 364 aa, unidentified
MIVIGVDVHKRTHTLAAIDGITGREIGRLEVAATDAGHVLALRFAVGLGKDVVWAIEDCRHVSRRLEQALLGTGAEVIRVPPAMTGESRKGQRTPGKSDPIDALAVARTVIREGVEKFAVAFLDEDAMEIRLLHDHREQLIGERTRVINRLRFHLVVLDPELEADLAPRTLHFAAVQARIRRHLTKLGQTAQTRVAASELAHIVKLTKEINALHADLDRLTACHSPALRAEAGCGPVCAAMLIGHTAGARRFATDAKFARLSGAAPIPAMSGNTRRFRLHRGGDRQLNRALHVIAMSRARNDPETRAYLNRKRAEGKTNPEAFRCLKRHLARRIWKTMFAAAPEAQLHSNRVTVGAPASMPCTG

SEQ ID NO: 427339 - protein, 355 aa, unidentified
MEQLSRIGMDTSKRVFHLHGVDADDRPVLRRKLRRADVLTFFAKLLPTRIGMEACGGSHHWARELRALGHAVVLIPPQYVKPYVDRGKNDAADAAAICEAMSRPKLEKRLVSIKTPEQQAGQMLIGVREGLLRRRTQVSNMIRGHAAEFGLVTPRGLAHLEPLMARIEQDDTVPRLARDMFAMLAGQYRHVSAQIREIEARLLAHHRASPQSCRLVRIPSIGPVIAAALAAKVPDPTRFRSGRDFAAWLGLTPKDHSTGGKARQGRITRAGDETLRSLLICGATSVIRQAGHRGAGGPAWLGSLVDRKPPKLAAVALANKTARIAWKMMMTGEAYDPCRHGAPREAGVCVVAEAT

SEQ ID NO: 427340 - protein, 350 aa, unidentified
MNKITTLGVDLAKNVFQLHGVDLAGTVVLRREVRHAQLVKTIAQLQPCLIGVEACGGAHYWARRFAEHGHQVKMISPQFVKPYRKSDKNDRDDAEAICEAVTRPSMRFVAVKRLEQQDMLTLHRVREGLMKERVALINRIRGSLSEYGIVIANNVSNLARALPGILEDAGNELTCMARQVFKELYEDLGVREERIAHLERLIRALGSQHEVVRRLEAVPGIGFLSATAMFATVGDAKQYRNGRQLAASIGLVPRQCSSGGRQRLFGITKRGDKYLRKLLVHGARSVATRAERAPQPQHRWLNELRERRGKARSYVAQANKTARIAWAIMAKGEAYRAPTATLTMAVPVAA

SEQ ID NO: 427341 - protein, 348 aa, unidentified
MNFYNTTHLHYCGIDLHARSLYVCILNAQGETLLHKEIPAKSEALLSLIEPYLEDLVVGVECMHCWYWVADFCQDRGIQFILGHALYMRAIHGGKTKNDRVDSYKIAALIRGGNFPLAYVLYPQHMRATRDLLRRRTNLVRHGADLKAHVVNTTSQYNLPPNKVNLKNVSSREQLKKTFDDPMVQRNIDLDMAVLECYHRELSQVEWLLEKQAKQHRPIYYYLLTTIPGVGRILALTILYEIGDIERFESVQKFASYSRLIKCKAESAGKVYGTQGSKIGNAHLKWAFSEAAVLYLRGNPGAQQLLQRFQKRMSKGKALSALAHKLGRAVFFMLKHEKVFDEKRFLTS

SEQ ID NO: 427342 - protein, 322 aa, unidentified
MKVGGAAMFTLGFDVAKDKLDVALINRSGQLKDRYVVANMPKAITELLKTVHAKHPKLIAGCEATGHYHVALVRTCLAANIEVRILNPLMTKQYTRATIRGRKTDTDDALSIARLILRGEGRAASLSDIALPKLYVRLATKVAQQRQALELQQQFLRALDADGKIRDCFLPAIAALDKLSTELRAYAAADVNPKDYELLQSIIGIGPHIAVSILAEVGDITRFPSSKQLIAFAGFDPKQKQSGTTLNRTGRLTKRGSPELRRVLFLAATVARRYDPELKLYYEKKRGEGKRYTPAVIAVTQKLINRIYAVLVRQTPYVTKST

SEQ ID NO: 427343 - protein, 355 aa, unidentified
MCSKKTGDIENLAVVGIDIGKDTFHMVGFDRSGQLVMRKQIKRLALNATFAQLPRCIVGMEACLSAHFVSRTLRGMEFEPRIIPAIYVKPFNKGQKNDYNNAEAIAEAALRPNLRTVSEKDQDQLDLQALHRVRARLVSRRTATINQIRAFLIEQGITVRSGLRALKNSFEAILEQRRDEISPRMRGILIGLYGDWLWLDKRIEDVSGEIEEISRTEENCANIMTIPGIGPMISTAMVAAVGQGEAFDRGRDFAAWVGLVPRQFSTGGRTILGRITKRGSRYLRMLFVQAAKVIMMRPHRWSDFSFDPWLTEAVARMPRNKAAIALANKLARTARSILRNGTRLDAPKDATMEAI

SEQ ID NO: 427344 - protein, 423 aa, unidentified
MKKKNTQTKSERAGKPGKAKVPVQRDAKEVMAELVAKLSEKLAPQPARTSEEKGQPLGPNRDRLTVGVDLGDRLSNFCVLGLDGEKLTEGELPTTQDDFAEFFQSLAAARVVLEVGTHSAWVRDVVAGCGHEVLVANPRQMEGPKRRKRKNDRIDAHKLARVGRMDPQSLFAIAHRSVEVRQDLVAVRARNAVVAVRRDLINVTRGLVKSMGGRLPKCSSESFPHRVEDALPAAVREVLLPLVQLVETLGSRIKEYDDMIEKLGSEKYPHTKLLRQVKGVGPITALAYVLTLENPERFAQSRDVGPYLGLVPKQEDSGDRQPQLRITKMGDVMVRQLLVGSAHYILGPFGPDTDLRRYGLRLSERGGKNAKKRAVVAVARKLAVLLHRLWVGGEAYEPLRQAPSGAPGEGAVAGEPAEVSQAA

SEQ ID NO: 427345 - protein, 419 aa, unidentified
MTCNQLSHPLAATRGEHAAIHASLELARHRWVVTVLLPGSEKMSAHGIKGGDVGALLELLERLRVRAERSIGKALKIVLIQEAGLDGFWVHRRLEAHGIESHVVDPASIPAPRRRRRAKSDKIDGQTLLRALLAWLRGEPRVCSMVRPPSPQEEDRRRLVRERGVLIKERRSEVGRIDGLLAAQGITGYKPLRRDRRGCLAQLRTAAGERLPPYLAAELGRILDRLELLLRQIADLEHQRQALLQAVCAAESAAMADTPKTTEARGTPPAGVPDTTGPAGTMGAPQERDPAAMLFRLKGIGVEGATTLAYECFFHRFDNRRQVAAFAGLAPTPWRSGQIVYEQGISKAGNPALRTIMVELAWCWRRYQPNSALTQWWRKAAATGDRRIAIVALARKLLVALWRYVTHGVLPEGAVFKAA

SEQ ID NO: 427346 - protein, 409 aa, unidentified
MNTGTITAVGIDVSKHKSTVAARRPGGEVVLLPFDVEHTAEGLKKLITKLRELDGEIRIVMEHTGMYWRPIAMTLKEAGFYVSVVNAILIHNFSDNSIRKVKTDRADAMKIANYGLTFWSDLQEYAGEDENRQLLKIQSRLYERTATTAGMLRNGLISLLDQTFPGANKLFRDESRNSKGHVKWIDFVLRFWHKECVAALSLAAFTDTFQKWCKRTGYKFSASDAERIHAIARNAVATLPKNDSTKLLITQATNSLNAIYDSLQAIRTEMDRLASMLPEYELVMGMEGIGKVTGPQLMAEVGDVRRFSHKGALVAYAGVDASPYQSGSFDSKSRHVSKRGSPHLRRVLFVIMSMTLIRANTANPVFCFMDKKRAEGKHFYVYTVAGSAKFLRIYYAKVKEYLNALEETA

SEQ ID NO: 427347 - protein, 359 aa, unidentified
MEGKEKVTRPVIAGVDTHKDLHVAAVVDQYNRVIGTQSFAATRQGYRQMLIWMRAFGDLQKVGIESTGTYGAGLLRFLQAASVDVLEVTAPDRQDRRRRGKNDDLDAQNAAHAAFSGRRTVTPRTRDGMVESLRILVACRKTAVSARRVALQMLHNTIVCAPDRLRDQLRQMTRMQLIRTLAASRPDLTAYRDVESAYRIGLKSLARRYVELHDEIADLDVMIKAIVAELAPELISRSSIGSNSAAQLLLTAGDNPERLKSEAGFAALCGVSPVPASSGKTVRHRLNRGGDRAANSALHIIAIGRLRTDEKTKAYVARRVSEGRSKLEAIRALKRYIAREVYGIITRRQREIHQTCIAA

SEQ ID NO: 427348 - protein, 339 aa, unidentified
MSKQPSFAQGLVFCGIDVSAKTLAVSVLQQDQPLRQRELANTAGGHKALITWLRKAKATVRVSLEATGVYSLDLALALDAAEGIELSVLNPRRVHQFAQTLRRSKTDAADALVLAEYSKRMPFVAWRRPSQRALELRAVSRHLATLTEERARLHNRLHAAESSLATPRCVREDLKRSLAGIDKRILRLRKAAVALIERDGEMQRKFRHLTGITGIAETSAVHLLGELATLAPEMTAPQWVAHSGLDPAHRHSGTSVNLPSRMSRHGNSQLRRALFMPALAGARFDPHMRAFYTLLQQRRKSKMQALMAVARKLLHAIYGIFKTNTPYEGSKLFPQLKVA

SEQ ID NO: 427349 - protein, 382 aa, unidentified
MLKIVYPICCGLDVHRDFVYACIATTVNGVTTYKSHRFSTFTKGLRELLSWLLASNCKDVCMESTGKYWIPVYNILETDCKIVLAHPKYVKAIRGKKTDKKDAKWIADIFKHDLVSGSFIPPADIRQLRDLVRYHAKLTNFTTGEKNRAQNCLTVSNLKLDSVFSDVFGKASSKIISHILASPSEKLSDVSAFRTKGMKATDEEILEAVDGEIYPEQAEKLRIIRDHMSSLDLCKANLQSLILSTAEKYIPEIDLVCTVPGIATFSAISVIGEIGVDMSVFPTSKHLCSWAGLTPQNDQSAGKKKTTRIGKSGAYLKPLLIQVALAASRGEKHPEIYGKKQALQKRRGKKKAIVAIARRLLTAIYHILSKNEPYNPAAYTGG

SEQ ID NO: 427350 - protein, 367 aa, unidentified
MQVIRYGIGLDMAMEKFDACISTIDVKQAVLVKSTRSFDNKSKGYQQLYKWVSSQCVLPVPMIFLMEATGIYHEGLASYLHSQECFISIVLPNKAKKYKQALGLRSKTDSIDAKSLSRMICEQALPAWNPMSKAIYLLRGVTRQIQSIAKDITRIKCQLHAQEFAMYKNNDVIKCLKQQLRLLQKQKDQLEEEVLKILETDPALKEKCKKICRIKGLGKLSLAVIIAETNAFSFFENIAQLVSYVGYDVVEDQSGKHKGRTKISKQGNGRIRRILHLPAFNVVRLKQQPFVGLYQRVYERSKIKMKAYTAVQKKLLILIYTLWKKDAAYQPYYRQSSGEKELALSFVKVDAFIKEKNSSAVEQSYTR

SEQ ID NO: 427351 - protein, 340 aa, unidentified
MVHVGVDLDKRSSQIAVLSEDGEIVQHRLANDAARLEKFFADLPPHTPIAIEASGTWWWLVDLLEELGHQPVLSNPKQTKAIAAARLKNDRVDAERLALLLRGDLLPRVWIPPTALREARELIRHRIQLVWLRGVLRNRLQAMLARRTRQPTSGQSWLTQRGQRELQRLPLGEPPSRIREDYAALLPTLDAQIRRLDADLVTRWGADARVRRLTTIPGIGPFIAIVLVLELGDIERFASAKRVASYVGLTPRIRGSAGRVRAGHITKEGNRLLRWVLVLAATQAVRRPGPLRAWFHAVKKRRGKKVARVALARRLAEIVFHVWKQECDYFTVVRHGVVRG

SEQ ID NO: 427352 - protein, 357 aa, unidentified
MKQDYTSKTVYIGIDVHKNSYTVYCICERQKVKSWTMSAHSSQLIEQLKNYFEGGKLYSVYEAGFSGCALHRELLASGIENIVVNPGSVETASRDKVKTDKRDAKKLSEQLSDGRLKSIYIPSLDEELIRLSTRLRQTLVADRKRITCRIKAKLFQFGYNDLVRDETANERWINMVKKDPRFPEALKKVLDYWCNQWLELTKAIKDQNQEIARESRENKHCAQQEEVYRSAPGLGNISAKALSRELGDLQRFSNGKEVYSYLGLTPCESSSGERRKQGGISHCGRPYLRHLLTEVAWRSVSKDPELAHKFSSLSYRRGKKRAIVAIARLLIGRIRACFKNGTLYQTQVVSLGETIVP

SEQ ID NO: 427353 - protein, 381 aa, unidentified
MAQQATTQERWYLTEETLYVAFELSKEKWRVLCSAGGRKRHSGVMAPGSESELSTILERGKKKLGLAPGVRVLSCLEAGRDGFWPHWFLTGQGLESLVVDASSMKVSRKGRRAKTDRIDAARLLADLVRHDRGDDDVWRVVHVPSEEDEAHRHEHRELEQLKQERKRHRNQVRSLLATEGVKVGGDLMRVLGEAADLRSWSGEPLSQWMLWRLERKAQRLAQVEAQIKEIERHQVECVKRANTAKLEKIAKLDRLRGIGIPSAWVLVMESLGWRQFNNRKEVGGSVGLVGTPYDSGESSRELGISKAGNARVRSLLVELAWLWIRYQPDSSITKWFNARYGGQGKRSKRIGIVGVARRLMIQLWHYVEHDVDPPGAIIAKS

SEQ ID NO: 427354 - protein, 408 aa, unidentified
MNPLYVGIDVSSKSNVVYLMKPDGSKHSNFSVPNSHTGSIELSKRIVSAIKSNELTDVIIGLEATSVYGDNLVYFLREDGNLERYNRKIHVLNPKQVKKFKDSYSDLSKNDYVDSYVIADALRFGRINKEVYLDDYRYEALRHLTRARFFVVQNLTKEKQRFLNYLFKKYSSMTQEKVFSNSFGATALAVYEEFDSAEQLASMDLQELTAFIMEKGKNRFPNPDAVAKAIQAAARGSYRLPKTVNDSVNQVLSISIRSMRALEAQIKTYDSAIADQMELIPNTLQSIPGIGPVYSAGIIAEIGDINRFNNQASLGKYAGYAWNRHQSGDFEAQNTRLIKSGNRYLRYYLGEAAWSLVRCDAEYKRFYDRKYKEVNKYQHKRALALTARKLVRLVFRLLKDNRLYSPAE

SEQ ID NO: 427355 - protein, 384 aa, unidentified
MRRAEKRGPGPSSVLVTPDHAANVVGIDPHKHTLTATVVDPRGGIVASEHFKVSGGGHRALEAWARQFGQIARWGVENAAGWGRHTAIFLAGRGYDVRDVCANRTPRHDRARQRGRSDTLDSERIARETLAHPLLPKAFKRAGQDQGPDELHQLLGLWHNRRRSILTSRQHLVNEAEHRLCELPLELRERLPASKAVRPRLAALQRRNRRRRYEAPTRLRLQLLDGYHAQIKALDREEKQVTAALEELVRQSGSTLGELCGLSTRSVAELLVETGDARRFTEGGFRRFNATAPLPASTAEGPGEPVRHRYNPGGNRRINAILHRMAVTQLRCEPRAQAIYASARANGHTKKEARRVLKRHLSDVVYRRMIRDLAAQSAQPPIAA

SEQ ID NO: 427356 - protein, 317 aa, unidentified
MSSSSSLTILGIDISKDWLDAHILPGGRSWHISAAPECISRWVKQLPDGINLAVIEASGGLQNLTAATLSKAGIPVAIVNPKQVRDLAKALGQRAKTDAIDAKMIAEFGLRVQPKPSQLPDQTQILLADLIKRRRQLVQAEVAEGNRLKRIQAKPVRRDIEVHIRWLERRITGIDKQINELIQDSPMWLANEKLLTSVPGVGPRTAHVMLGELSELGKLSRRQIAALVGVAPYNHDSGKSRGKRYVSGGRAPVRAVLYMAALTASRFNPVLSQFYRRLIEKGRPKKVALTAVMRRLLTILNAIIRDQNPWKSVSINS

SEQ ID NO: 427357 - protein, 433 aa, unidentified
MEEVTDEPLYRDRVCGIDIGKAGMVATIRVPSDGNPARRAQETRSFGTTKKEVLALADWLRCWQVPAVVMEATGDYWKGPFYRLEAEGFECVLADARQVKNLPGRPKRDPSDSRWLAACFERGTVTACFVATPEFRVIRLHTRYRRDLTAERTREKQRAEKLLESAAIKLSSVVSDLHGVTGRDIMDHLIAGERNPKVLAQLARATARRKISQLEEALEGAEFFTEDHAALLKAMLERIDRVNEEIARLTEVIERLLAPYEEQLQQAESMPGWARRSAQDALAETGPDMSRFATGAHLASWAGRTPLDRQSGTRKGKAKSKKGNRYLGAVTGETAVAAGRTQTREGARYRRLARRRGKAKAQVATGNTQLKVYHKLLSSPGMRYEDLGVDYYERQRDARRQISHHVGKLGALGFEVTLCRIPDPDTAGQAPAT

SEQ ID NO: 427358 - protein, 411 aa, unidentified
MNNTLFVGIDISKRSNVATFMNCEGKVVGRLTFSNNGSGADRLVAKILSYYEKEDFEAIRIGMENTSVYSKNLVWFLYEHEALNEHKLSIIPLNAIMVANYKKSFLDMDKDDITDSFAIADFIRIRPGLLPFKLDDRQEALKIMTRSRYNYVQALSRMKSQFLTRLFLSFSEMEAGKPFYSIFSKTSLSLLEEEFTLDELAEKPIPELVEFLQEKGGGKFQNPEEIAKVLKKAASSSYRVPAMVRESLNRTMASDMEIMRILENEIHNCDKNIEKLMKSVPAILVSIPGIGPVLAAGIMSEIGDISRFQKQESLGKMAGFKWKRNQSGKKESENKAAVLSGNKKLRYYLVEAANRVRIHDPVFEAYYRKKYAESKTHAHKRALILTARKLVRVIFYLLKENKLYKPDVGIS

SEQ ID NO: 427359 - protein, 529 aa, unidentified
MSRHISSTKRRTSKSKAKTRRRGKQSLQKPRGVIGPRVKKVGGERFAIVCVDPAKNRSEWMMADYFGNLLIQPQTVEHHRGFPAAVELIQQAREQHGIEDLIVVVERTGNYYLTPKRAFARAGLETRVLHPFVTKQYRAAANPGNKTDETDLHAQHRAAVAGFGLCEYELEPPYRALQLRVRHRRNLVEKSSALACQIREHLHMALPGFGSLFDHLLGHQSAMAMARRCDSAATVLEIGHDGLARHLRENKVRFQARTIDKVLAWASQAVRNVVQDAALHHALWTDLEALYQQFRQRISALERDLAGDLAATFYVRLMAIPGINVVSAAELAGEMGPIAHYANANAITGRSGIYPSRSQSDQTDNNRGPIIRHSNRRLRAALMRIADNLVCHCNYYRARADVDRANRIHETAIRIKVTKKFTRLVFACVAGDEPLRHPCFQKPDSILEKLRAFHHEHQTPVDRILSDLKITVEQLPGNTRSHEAEAVAAVLEKRTKCRRGAAAIGELLPAVLARLKIKPTQENENMGRP

SEQ ID NO: 427360 - protein, 414 aa, unidentified
MSGSSSPKPEQVVTTHVVGIDIGMESCTMSCLTMDKRQVIKSTPFANTLQGFEWLFERLEGLGVAPKQMLVGLEATSRYGENLLQALLKRGYQVCLLHPAQMHAFAQQRGLRAKTDQLDAVTIARALLSGEARFGYVPSEQVATYRELMRLQKQLSDDVVRYKNEIHALLVVLFPEFTQVFVDPTRPTALAVLKRYPSAQAIAQTEVETLGKFLHELAPRHYGRPTAQELVGLAKASISSGVAVAARSSSLRILCDQLDHTQKNLEQLQGEIDQLLDQDPKATGMLGVPEFGPTTVAVLRAELGDLTRFTRIDQVVAYVGLDLQVKQSGKWKGQTKLSKHGSGRVRRILYLAALRSIHLEASPFGAYYQRLVARGMKKGMAVVAVMRKMLIVAVHLIQTEERYDPGKVAMQAGS

SEQ ID NO: 427361 - protein, 392 aa, unidentified
MYIVGIDIGKNHHEASIVSPEGKQIGPSLRFATTHKGADSLMSFIFKNIGNSPCVFGMEATGHYWYPIYSFLKAKGYTIYVINPIQSDSLRKMYIRQTKNDSIDSFLIAEVIRFGQFGTTSMADENILAMRQLCRYRDSVISSRTEIKLRIGTIMEQIFPEYEKQFSSLWVSTSMGILEKYLTPENIENAPIDELFEIIKDKSHNRLTKAKAISIKEAAADTFGIKIAQDAFSFQLKQLIDRMNFLDKQIEALDIEIMKYYEQFDCYLHTIPGIGIIGAATILAEIGDISRFKNSSALVAFAGIDPTVRQSGEFNSTHNHMSKRGSPYLRHAIFLAATTCSFHNSPLNAYYKKKRDQGKHHLTATGAVARKLTTIIYAVLRDSKPYEPKKFC

SEQ ID NO: 427362 - protein, 274 aa, unidentified
MYSIGLDVHQRSTALCIIGPTGRVVKRESIKGHPRQVVDRLRQLDYPFRVCYEATCSYGWLYDQLRPIADRVVVAHPGHLRLIFRSQHKHDRADAEKLAKLLYLDEVPAVHVPSVDTRAWRGLIEHRHRCVAARTRAKNALRALLRTHGVEMPKGMGLWTGAGMTWLEAIEFPDEVTALRRDQFIDDVRHHTRKIKRVEKALAPTANRQPGITLLRTILGVGIRTAEAFLAYIDDPSRFGRNKSIGRYLGLVLRQDASGGGGYRNRDAPRFLQR

SEQ ID NO: 427363 - protein, 423 aa, unidentified
MPQLWAGIDAGKTEHHCVVIDANGTKLLSQRFKNRETAILTLMGDVASLPGGTDVAWATDLNHGGTGLLQTLLHSHAQPLFYISGRVVHHASGAYRGEAKTDAKDAVIIADQARTRRDVTLMRQADEVTAELRLLSARREDLVHDRTRAVNRLRAILVHYFPSLEGAFNYATTRGPLVLLTRYATPGAIRRMGESRLAAWLKGQGCWKSAAVAKTAVEAAREQTSVVVGEGAAARLVSRSARDLLRIRDEVAELDGEIEAALQDSRSADLLVSIPGFGRRLAADFLAATGTDLAAFETPDRLASFAGLAPVPRDSGKISGNHHRPRRYDRRLLNACFQAAFIASRNCPVSRSFYDRKRQEGKSHKQALIALARRRMNVIWAIFRDQTTFNPTPPRPNDPVTPLLQHGPESPSRSRPTIALAAA

SEQ ID NO: 427364 - protein, 357 aa, unidentified
MTTYYIGADVHSNSTEMAIEKGRKIVANYIVPTTILAISNILDSLQGKKQLAIEEGPMAGWLYRNLNKKVDKLIVCDPRRNKLIDCDGDKDDKIDASKLALLLRGGYLRAVYHSEDDGRAELKHWVSLYHDRVRDAVRHINKIRARCRMHGIRIPRMVLRRPLHRSKWLSEINHPTLAKQLNMLWIGYDATAEQTRMAKQQLIRMSKKYQVIRLWKELPGIGPIRATTLFAFLDTPWRFKKKNKLWKYCGVGLQRTTSGTDKKGRPKPAKLQLPWAVNRTLKNAALGSATSVINQTDNLFRNYYERMLSDGIMPSNARHAVARKLLTVMWGMWKTNSRFDEGLCRKPDSKTATVLSR

SEQ ID NO: 427365 - protein, 401 aa, unidentified
MNYVLVLDVAKGKSMFMLSSDIGEVLLEPTEYIHNKSYFEKIDSYINKLNIKDNLTVVMEATSIYHKSPERFFKENNYHVIVFNPLIGKEITNTIRKTKTDKQDCIKLTNLFWKGSIPDRNYTEDEIYTKLNELSRQYYHLDEGLTRHKNRYKELLHLCFPEFELCFKDGKTYDLTALNFIKEFPHAYIIKDKRVDALAYNMANTNNTHLNYYKRKANIIKEYAFTSYPGVNKNSKDVDNLKQLANIIINLTEQKDEVKNQMIELAKETKNFECINSLFGIGELSASLIIAELKDITRFNNIKQINASCGLDPTIVQSGKSINYHGPISKRGNRYARKILFNCSRNIITLSAKCDKENSIYVYYQKKKQEGKHFYACLTACSTKLIRIIYALCMNNSTKQD

SEQ ID NO: 427366 - protein, 371 aa, unidentified
MRNDSTVFVGLDLHQKSIVAAYAVDAGEVHDLGQVGVLQRDLDRLCKQMRSKGSRVHFVYEAGPCGYAVYRYLTANGFQCTVCAPSLIARKPGDRVKTDQRDARKLVQALRMHDLSAVHVPDAADEAFRDLVRVWSAARRDLAKAKQRLKSFLLVHDVRYSGTANWSEAHRRGLAKLVFKESLSQLAFQEHLHSIEDRIAQCERLERLLREAAVHWRFYPAIRALQALRGVQFKVAVGLLAEIGEISRFASAPQLMAWLGMTPSEHSTGERRRQGAITKCGNANARRLLIEAAWAYRYPPKVSPSIQQRHEHLPKDIIARAWEAQLRLCKRFRKLTARGKPHNVALVAVARELAGFIWDIARLSASNETTH

SEQ ID NO: 427367 - protein, 405 aa, unidentified
MNAVGIDVSKGKSTVTIRRPGDVVLMPPRDIPHTKSAINELIKQIQSLDGETKACMEHTGRYYEPLAAWLSDAGIFVSAVNPVLIRDFADDSLRSPKTDKADSKKIARYTLDRWAKLKQYGSMDKTRNQLKTMNRQFSFFMAQKTAMKNNLIALLDQSYPGANDLFDSPARSDGSQKWVDFVYTYWHVDCVRGKSLSAFTEHYRKWCKHKGYNFSAEKAEKVYEASCDLIAVFPKDDNTKMLIRQAVAMLNTASETVENLRIKMDETASALPEYPVVMAMNGVGSTLGPQLMAEIGDVTRFTHREALTAFAGVDPGKNDSGKHVQKSVRTSKKGSPHLRRTLFQIMDGLIKRSPIDDPVYVFMDKKRAQGKPYYVYMTAGANKFLRIYYGRGREYFASLPETGEN

SEQ ID NO: 427368 - protein, 345 aa, unidentified
MESMYYIGLDVHKKLISYCVKDASGRIHAQDKIAATRYDLDVWMKTLPGPWMAAMEATMFTGWIYDHLKPHAVALKVAHPLMLRAIAVAKKKNDRIDADKICDALRCDFLPESYMVSTEIRERRRTLRYRNLLVQQAVQLKNRISCVLMQAGVTYNQEKLHHAGYFKELLTSNPDIDESLRRLLHQCREGLVRLRKTEGALVRSLERDPFLAERVERLMTIPAVGPITALTWALEVGDVKRFSSIKKAISYCGLCGDEKSSAGIRKRTPISKQRNKHLQTVLVEAAKMAPRLSPALAQLYDQAKQKGNANRATLAVARKLVAYLMAIDRRQEGFLVVEKEDRAVA

SEQ ID NO: 427369 - protein, 308 aa, unidentified
MATSSYVGIDVSKARLDVAELGGREWQMDNTPDGIAQLVQQMAEMQPELIVVEATGGYQRSVVDALFHAGLCVAVVNPARVRQFARASGLLAKTDKLDAQLLAVFGQRMQPKRYEGKSETEKQLSALLVRRKQLEEMLKAEQNRLRTIVPSLRGSVERMIAILKDEKKRLEEQIEQFLKEQKGWQEQREILSSAPGVGKVTSATLLADLPELGKMDRKKIAALVGVAPMNYDSGKRRGYRKTKGGRTDVRSVLYMSTLVATRYNPVIQAQYEQLLKRGKVKKVALTACMRKFLTILNAMVRDQQPFRG

SEQ ID NO: 427370 - protein, 400 aa, unidentified
MRTVFGIDVSKASSEVAILVNGERVHGYTMPNDIIGFSHLLKDLKTVSNPEIIFEATGVYSRRLQAFLEENSYDYTRLNPLEAKKQLDRLRVRKTDKIDAEKLASSQFVLNRKPTYVQEEVYQNLHDLSRFYQNLTEDIVRTKNRLHKVLQVAFPEIENILSTPTGEQYWNLVSIFPTKHWVLELSEVELKETIRNSTSKRISENRVGNLAEKLVGLAKQSYSAISKTSPMIEEVKYNAQELIRLTNRREQVLQQLIALAEPLPEYEILLSIPGIAETTATSIIGELGDIRRFKSANQINAFIGIDLKHYESGDFLGQEHITKRGNPYARKILYKCIHNIASASHTNPCHIADFYEKRKRQSQTTSTKPHTIASIHRLIRTMYYLIMHNKLYDYTLAKSH

SEQ ID NO: 427371 - protein, 359 aa, unidentified
MTSMASPTTRVVIGGVDTHGHTHHAAVVDKIGRQLGDREFTASPAGYRALAAWLGTHGTLQMIGVEGTGTYGAALARYLRTIGLTVVEVDRPDRKARRAHGKSDPLDAYAAAKAVLSGSAAGVPKLRDGRVEAIRALRVARSSAVKARSQATNQIKALIISGPPELREQLRHLPTAKIIASCVRLRPGPQLGDPEQATKTAQRRLARRHQQLSEEISEADHEITQLVGEVAPDLLSVRGVGPEVAGQLLTSTGDNPDRITSEAAFAHLCGVAPVPASSGRVHRHRLNRSGDRHANNTLYIVVLNRLRYDPRSRAYAERRTKEGLSKPEIIRCLKRYVAREIYRLLVPAPAAKKPVRPTT

SEQ ID NO: 427372 - protein, 517 aa, unidentified
MVTGGCDDISGDTRLARGLPLGRMLVLRPPHPMPKGCVQRESEEMARTPCRQGGGQQRPRRSRRGRPAQLEQLNLNAAGIDVGAEAHWVAVPPDRVEQPVQRFGAFTADLYALAEWLRQCQIETVVMESTGVYWIALFEVLEERGFDVKLVDPHAVRQVPGRKTDVKDCQWLQELHTYGLLRGAFRPEDEICVLRSYLRQRSMLVAMASRAVQHMQKALEQMNLKLTEVVSDITGKTGMTILRAILAGERDPQQLATYRDKRCKHDHATIAKALTGHWRAEHLFALQQAVDQYDFLAQQLRACDEHIERCLQTLAPDVEADSPPSPPVRPWRSSRSNPLGFDVQAYLEAMTGVDLTQIDGIDSLTALKVISEIGLDMTRWPTSKHFASWLGLCPGNKVSGGKRSRIRSKPSANRAATALRLAAQGVANSHSALGAYYRRIRIRLGAPKAITATAHKLARLVYSMLRYGTAYVDAGQQAYEQKYRERILTNLQRKAKALGYQLVHVEDTGSAQAAATL

SEQ ID NO: 427373 - protein, 342 aa, unidentified
MQIAVLGIDLGKNSCSVVGLDSTGAVIKRRRMRPENLVAFTETLPACIVAMEACCGAHHLGRTMSSQGHQVRLMSPEYVRPYVKAQKNDDRDAEAIAEAATRPTMRFVELKSESQLDVQTLHRARDRLVGERTALINQLRAVLLERGVTIPQGRRKLEQHLDAMMASDDDHSLSPRVRRLIDDMRAEWLELDRRIAAFDDEFAAYARSDADARRLATIPGIGVLNATALLAAIGDGQTFARGRDLAAWLGLVPRQVTTGGKPRLVGITKRGNKYLRKLLIHGARAALPSLATSATPLGGWLRALMQRVHKNAAVVALANKLARIVWVVLRRGEEFNAAAVTA

SEQ ID NO: 427374 - protein, 326 aa, unidentified
MFQPDKFVGIDVAKKDFYVCFEENSESKKFNNTTTGINSFLRHLIKNNFQIQNTVIGLESTGSYHLRLCLQCSTIGFPIKVINPLIVKKQNQTNLRLVKNDQKDASLIRYCLTTGAGYAFTETPDTLLLKSLVRQRNSLVNIKFKNKRQQSDITYKEDCLKIKFNSVYQELSDILSQKIKELEIQLKQYQPKTQKLLQSIPGVGPITAVSFIAEVHDIKRFKQPKQLVAYIGLDSRVHQSGTSVRGKGYISKRGNKILRTRLYNATHVAVLHHNLFQNFFQKKRSEGKPYKVALVATMHKMVNVIYSVWTNNKPFVDYTKNNRPIN

SEQ ID NO: 427375 - protein, 347 aa, unidentified
MTQAQIYIYGIDLGKNWFHLVAMDRMGHVLAKQKLTRSQLKQFISTTPPCRVAFEACPGSQYWGRLFQQAGFEPKIIPAQFVKPYLKSNKNDFNDATAIAEAGSRGTMRCVPLKSHEQLALQATHRVRQRFIVERTATVNQMRALLLEYGLTVPVGRKVFERSLPTILEDAENGLPDFIRALVLRLRERWQQLDIQIDDMSLMLGQASSASGLCQKISTVPGIGPIVSTALIAAIGNGSQFKKARDLSAWLGLVPRQYSTGGKSSLGGISKRGNSYLRQMVIQGAKALKIHMKRDKSSLGEWVARLEAGHHHHVVLIALANKIMRICWKVLTSGRDYQPYPNASAAV

SEQ ID NO: 427376 - protein, 436 aa, unidentified
MRGCRCSMIMGFTKPIEHFNLQRKKVITMNTLYVGIDVSSKSNVIYLMLPNGDKHSNFSVANSHEGSTQLVKRILSALTSHSLDTVLIGLEATSVYGDNLVYFLREDATLAPFNRKIHVLNPKQVKKFHDAYNDLPKNDYVDSFVIADCLRFGRINKEVYMGDYRYKALQNLTRARFFAVQNLVKEKQRFMNVLFKKYSTMTQEKVFSDTFSTTALAVYDEFESAEALANMDLHELTDFIIEKGKNRFPDPDAVAKAIQKAARSSYRLPKTVNDSVNQVLSISITSMKALESQIKEFDKAIKAQMELLPNVLISIPGIGPVYSAGIMAEIGDINRFNSQAALAKYAGLAWKQHQSGGFESEVTRLIPSGNRFLKYYLCEATFSLVRCDKEYSDFYRLKYKEVNRCQHKRAFALTARKFVRLVFRLLKDNRLYCPAK

SEQ ID NO: 427377 - protein, 369 aa, unidentified
MKKIIKYIGLDVHKNSIAIAIAEDGRQRDVNFYGVINNDMDQLQKFLRKQISQGAEPKCVYEAGPCGYNIYRSLLNKGIDCVVVAPSLIPKKSGDRIKTDRRDSESLARLHRSGDLTAVYVPTLEDEALRDLVRAREDLVNILKRAKQQLGAFLLRHHIDSPVKSKWCKSYFNWLASIAMPHPAQQITLQEYIDIVHDGKKRVERISEQMRQLSGQTQLNNLNKALQSLRGVSEIVSIVVVSEIGDLTRFDSPVKFMAYLGLVPSVHNSGEKIKTGRITKTGNGHVRRALIEAAQAYRLPARKSRAIAKRNEGLPQEICKIAWNAQVRLCGRYKRLVFRGKNSNLVKTAIARELAGFMWAIAQKVPKVA

SEQ ID NO: 427378 - protein, 313 aa, unidentified
MSQTNTTTVFAGLDIAKSSLQLHLAGQFHTLTNDAKGQRQLVKLLRAHPTAQIICEATGGYEQSVLEVLHTATIAVSLVEAGRVRHFAKAKGLRAKTDPIDAAMLTEYGVAFAPARTPALHPIQQQLSQLTSRRRQLLDLKIIEHNRAEHYSDAFSQKQSRQLTALLEKQITQCDEHIAQLIAQDESLRTKSQRLDAIPGVGPHTAATVLAEMPELGQLSASAAAALAGVAPYNDESGNKASPRHIAGGRKAVRCALYMATLSAVRHDRILKDFYLRLRAAGKKPKVALTACMRKLIILMNHLLKNPHFQLAS

SEQ ID NO: 427379 - protein, 403 aa, unidentified
MNNVAGIDVSKGKSMVSVLRPFGEVVAKPFSIGHTGSELKELADYLKSLDGETRVVMEHTGRYYEPVARFLHEEGVFVSAVNPKLIKDYGNNTLRKVKTDKADARKIARYGLDNWAELRQHTPMDTIRMQLKTLNRQQSLYAKTKTMMKNNLIALLDQTYPGVNALFDSPVREDGSQKWVDFATAFWHVDCVRNMSLTAFAERYRKWCKRHGYNFSQSKAVEVHTGAQDLIAMLPKDALTKTMVRQAIDALNAVSASLERLKAEMQALAAQLPEYPVVMAMHGVGDSLGPQLMAELGDVTRFTHRNAITAFAGVDPGADQSGTHEAKSTRVSKSGPPELRRALFLVMDCLLKTQPQDDPVYRFMDKKRAEGKPYLVYMTAGANKFLRIYYGRVKEYLASLEGN

SEQ ID NO: 427380 - protein, 456 aa, unidentified
MRYFVGLDWAKLTHAVCVIDEDGQVVMRRAVDHTAEGLAQLVTALRRFGDPAELGIAIERPSGLLVDALVEAGFVVYPIHPNVVKASRPRYSAALGKTDPGDAYLLADLLRTDGHRFRALCSLSDETRALRALVRARSDLVGARVGLANQLRALLESFWAGAVAIFGEIDSPIALAFLLEYPTPPSAARLGPKQMAAFLSGQGYCGRRSPHELLQRLRAAPTIELGPAEMAAKGALVCSYATLLDTTVKQIRQLTSAIERAVMAHSDATVFTSFPRIGKINAAQILAELGARDRFLTEEQLAGEAGVAPVTRMSGKHRAVVFRWACNHRLRAALTWWADNSRRASPWAHAVYLSARHRGCDHPHAIRILTRAWLRRHALRSHPTSRGRRPQAAGVTRPSHSTSDAVHSPSTNPQARAVGAVGAGVRSPASKELVGARPFAPPQLRQLPQPPTRRPP

SEQ ID NO: 427381 - protein, 331 aa, unidentified
MFPVGIDVSKKNLDLCMLYDGIKGRIKTRNIQNNRHSVENILRWLRLQHCSPEDVHVVMEATGVYHERLATELHDAGFRVSLANPHRSREFARGMGIMTKTDKVDAYMLACYAFLKKPHRWEPPAPEIRYLGALLRRRDVLLGDALREENRLEKYLSTDTPADIISSCRRMAQLLREEVSNIERQIKAHIKASPALRRDYTLLTSIKSVGPQLGMHMLVVLRSHNFVSAEQAAAFLGVVPIEKRSGTSVRRRPRMSKIGPPQLRAKLYMSALCGKIYNKRMRNIYDEMCLRGKPKMVAIGALMRKLVHWCYGVLKTGTVFNDEDLKPVLST

SEQ ID NO: 427382 - protein, 452 aa, unidentified
MAKQKRRKHRKLDRSLPEMRPNAGGIDIGATEIFVAVPADRDTDSVRSFPTFTQDLHDLADWLQRCRIDTVAMESTGVYWIPLFQILEARGIEVHLVNAQHVHHVPGRKSDVVDCQWLQYLHSVGLLKASFRPEHAVCEIRSLMRHRQSLVEMSCVHVQHVHKSLDQMNLQIHHVISDITGVTGLAIVDAIVAGQTNPKALAKLRDHRIKAPIETVTKSLVGDYRPEHIFTLKQSLTAYRYYQQLIADCDREIQQRVESFDTKGGDPPAAAVVDSSTSISTTEPTFDLRRHLERIFGVDLTAIPGFDTLRVQTIFSELGADLSKFPEDDQFCSWLNLCPKDGFSAGRRIRGPKVKTKNRVTQAFRLAAQSLHRNQSYLGDYYRSQRARHGAVKAIKNTAHKLARIFYHLVTTRQPYDESIFATLEAHNRNRRLHKLQSLAKQFGYSLVEANA

SEQ ID NO: 427383 - protein, 392 aa, unidentified
MVVSVGVDVSKDKHDCFILSSEGEVLVDVFTIPNNLDGFRFLLRRIRDCTHAQDKIKVGLEATGHYSYNLLGFLLDNGLPTYVLNPLRTNLYRKSLSLRKTKTDRVDARTIAAMLLSDAGLKPYTNTAYHNEELKSLTRYRFDKVKDRAKLKSSIARLVCILFPELEKLVPSLHIASVYSLLEEFPGAKQIAAAHLTRLKTLLETASKGHYKRDMSLEIREAARNSIGSRMPAKSLELQHTIRLIRELDSEIAEIEKQIQSIMEKLHSPITTIPGLGFRMAAMILAEVGDFTRFDSPDKLLAYAGMSPSTYQSGQLKNCYPHMEKRGSRYLRYALYNATKYVCHWDPTFAAYLAKKRAEGKHYNVALSHAAKKLVRLIFAMEKSGQPYCLAS

SEQ ID NO: 427384 - protein, 328 aa, unidentified
MAKHTMICAGIDAAKLKLDAALECCSERLRVDNTPAGHKALLDWLRRHRVTRVGIEASGGYEQAVVAELRRNGFVVIVFQPGRVRAYAMFHLKRAKNDNIDADLIAICTAAVKKIHAPPDPRLAPFAEHLTMIDQIVDDIARHKNRLETCRDARIRQVWKEEIARLEKHRKIELKSLVAAIRRHQDLAVRLDLINSVDGIGLPTAVAILVRVPEIGRLTREQVAALVGLAPYDDDSGGRSGTRHIAGGRKRPRSALYAAALPASMRWNAQLIALYQRLIAAGKLHKVALVACARKLLIFVNTVVARGTPWQRHQNPRPSAIPHAATAR

SEQ ID NO: 427385 - protein, 369 aa, unidentified
MSLKLENNDNPLSFLPQFWTVHWAFGARFKDARSTVDCSSITQICMSKCKEFFGIDISKDVFDVVDFQENHHQFKNDHSGFKEFGKLLDENSHCVMEATGCYYQKLATWLYSQSINVSVVNPLSVKRFIQMRLKTSKTDKLDAQMIRRYGEAEQPKLWNPPSKLIIEATELHKLIELLVKQRAALKNKLHSLKSMGITRSPVVTSVRRQIRNLGNEIADLELKLESVIKEYQPDLLTRLCSIPGIGKRTAIFLIVLTHGFEKFETSRQLISYFGLDPIIRESGSSIRGKSRISKTGNTHVRSLLFMCAFTACVHNKSCSEIYQRITAKGKSKKLALIAVANKLLKQSLAIAKSGLYYDENYRSVYVNLG

SEQ ID NO: 427386 - protein, 407 aa, unidentified
MNISNSPHLQVAVDIGSHEYYVAIGLSEGGILDEFSIAHTPAGFEHFFSRIEQQERLHNLPVNVAMEGYNGWARPLDSLVQKHGYQLYNVNNLKLARFKEIFPAPAKSDLIDAHKILELFQLQDHLPLAKGVLQAVLPVPDVNLRLKRLTRRRRQLTNEKIALQNRIQPDLQAVCPTFLDMTGSVDNLWFLHFLTCRDDLTKLARLQSKSLLAIQGVGRAYLNLIHNWQKQAEFSNEVSQVGPMIQEDACRLLALLTSIKKLDAKIDQQIKESVYAQHIKSIPGFGLVCSAELAGEIGTLERFPKQSSFSIYIGMSPLDNQSGAYRGTTSPKHVNTRARKAMMTAVCRHMACVPESRAYYDKKRSEGKTHNKAIRALGRHMSRVIWSMLRHDRDYVEPIQAQIKKAA

SEQ ID NO: 427387 - protein, 448 aa, unidentified
MSRKKHTHLRGERGQAFADKIRGVPLEQILCVSLDIHKYFHVVMIHNALGEIVTTTFEIDIFQAGFDRLCQAIDEAAARTNAQVVLVGMEPTGHYFENLARHLHHDRRSPQPVTLINSFAVSRNRDQQMMHREKDDEIDVAAIGDLLRRGEGTPFQPVRGLYLEMQHLSRVRLSKVKMQTALKNQILGHLDRIFPGLVIQGKVARERYEPLFVANFWSCQTLQHLIRVCPDPRQLATMAPQDLRTAFHEQGFALGPKTAAKIITYTQKVLLPDPEVVAIRCELLARDLALLEEVEQLIAELEDRLHALLQQTPYWVWTQVRGLSMTQVASLAAAIGDPSHYTHAAQVFRRSGLVSGRNDSGTRRHKGKGKRVVKTGDVYLRRALMTAIMSLIRYQPVLQDYFNELHRTKHAGVARVATARRAMGTRSVWAMQRDQHSRTLVLKRGAEM

SEQ ID NO: 427388 - protein, 361 aa, unidentified
MKCVQSNKLDFSGQNIYVGIDVHLKSWSVAILSEHSVLKRFSQSPEPEALHKYLVSNYPGANYFSVYEAGFCGFWIHERLTDLGITNIVVNPADVPTMSKEKLRKTDAVDCNKLARELRSGSLVGIYVPGVETLELRSLIRMRNLIVKDSTRAKNRIKSLLRFHGVEIPEEFTRCSIGCWSKRFLSWLQALELSTEYGKKTLELHLEQFLRLRMMLLQETRAIREISRKAPFEKPIRLLTSVPGIGVTTAATLMVELDDIVRFKNADHLASFIGLIPMCHSSGESNGTGDITVRRHFMLRSLLVEAAWIAIRKDPAMTVAYTEYRKRMNPQKSIIKIARRLVNRIYYVLKHEKEYVPCVVQ

SEQ ID NO: 427389 - protein, 405 aa, unidentified
MTVMIGVDPHKGSHTAVVIGPGEEPLGELRVESSPGQAEDLLTWAAQWPERTWAVEGAAGLGRLLAQQLVAAGELVLDVQPKLAARVRLLQAGDTGKSDPHDAQSVAVAALRSRACRPVAAEGHTVVLKIWARRHRDLARARNQVACRLHAVLCELVPGGVRKQITAGQAASVLERVTLSGPIGAARRELAAQFLEDLRRIDGQLREANKKLAAAVRASGTTVTEVFGVGPVNAGTIIGDVTDVNRFPTRDHFAAYNGTAPTEVSSGGRKVYRLSLRGNRRINHAIHMAAVTQIRHSHSDGRAYYEKKIAGGKTHKEALRCLKRKISDAIYARLRADARMAARPVGEGPGGQTGNGSDSSAAGSHPEHRLFGQATPGPATTLRPPARPARQQTRTRRLKDLEKTR

SEQ ID NO: 427390 - protein, 361 aa, unidentified
MRHLGARLLSDRESAANREPSMGQITTIGLDLAKHVFQVHGVDAEGTTVLRKQLRRSQLLAFFSRLPRCVVGMEACATAHYWARELRALGHEVRLMPAQYVKAYVKRNKNDAADAEAICEAVLRPTMRFVPVKTAEQQAALLLHRGRERLVRERTMLANAMRAHLAEFGVIAPQGLRNVGKLIAVVRDKSDARLPDLARQVLQVLAAQIEQLEASVAALEKQLMAWHKSNPVSQRLATIPGIGPIIATAIAATVVEPIAFRSGREFAAWLGLVPRQNSTGGKTRLGGISKRGNQYLRRLLINGASANLLRSKATNADPWVIGLRRRRPSLVVAVALANKTARIAWAVMHRQENYQRTAAAA

SEQ ID NO: 427391 - protein, 346 aa, unidentified
MLHAGLDLSRKRLDVCLLSDQGELVDELAAVPDAGGLKTLADRVGEQEEPVCAVIESMTGARFVHDTLESHGWSVEIADAQKVKGLAPLAVKTDRIDARVLAVLSQRDLVPAIWLPDPRVRRERELARFRLHLVKHRSQLKHRIHSALMSFGRPCPVTDLFGVEGRELLGRLEIPEPWRGNIDASVHLIDCLETQISEINAELRSGGADHPYVPKLLTVPGIGWVLAFTIAAEIGDITRFETPTKLTGYTGLCPRVVQSGESDRRGPLTKQGPRYLRRALLEATMHALRHPACAERYQRNKRRLGKQRGAKVAQIEIARKLTVAIWHMLTRNESFAPRGAARRLAA

SEQ ID NO: 427392 - protein, 294 aa, unidentified
MSKIITIGIDIAKNVFQIHGVDETGGVVVRRQLRRRQVLPFFHRLPACLVGMEACASSHHWAREIGKLGHEVKLMPPRYVKPYVKRNKNDAADAEAICEAVTRPNMRFVPIKTEEQQSVLMLHRTRQLFVRQRTTVINAIRAHMAEFGIVAGVGRNGVEALLALIVKGEDERIPCQARDCLMALAMQLELLKRQTLEADRRVLAWHRQNKLSKRLEAIPGVGPLIASALVASIPDPTIFRSGRDMSAWIGLVPKQNSTGGKARLGSITKAGNRYLRKLLVIGALSVIKRAKQVG

SEQ ID NO: 427393 - protein, 389 aa, unidentified
MSQSFDASKSLTTLEQDNTVIAVIEMSQSKWLVAAVVPGVKRQPLKKLQADEEALLKLLYRWRTEAGQTGREIKRVVVAYEAGRDGFWLARWLRTRGVEAYVIHPASIAVSREHRRAKTDRLDTELLMRAFLGWLRGEKRHCSMAAVPAAEEEDARRPNRERENLVTERTRIANQMKAILARFGIRSFKPTLRKAAEKLDGLRTAEGTPLLENTRAELSRHLARLRVVREQIRAIEQERLHKLAAAPADENGPHAMVRLIARVFGVGVETADMLVNEVFARHLRDRKAVARYAGLTGSPDESGKRRRERGLARAGNARVRRGMIQLAWCFIRFQKDSALAKWFDLRTADGRGSTRKTMIVALARKLLIALWRLVTTGEVPEGVILRPAA

SEQ ID NO: 427394 - protein, 414 aa, unidentified
MRIIHDKVAGLDVHKKMVVAAIIVKQEDGGWLEEKRNFETMTGDLLGLSDWLLLQGVTHVAMESTGEYWKPVFNILENNFDVMVVNAQHISKVPGRKTDQSDAQWIAELLQYGLLKSSFIPPLDQRELRELTRYRSSFVRERATLVNRVQKVLESANIKLASVATDVMGVSGRAMLDALIAGSATPDQMAELAKGRMREKRDQLTKALEGRVKAHHRFVLTEMLCQIDSIEETIARFDQEIEAYCRPFEEAVELLDTIPSVGREAAEIIVSEIGKDMSRFPTADHLASWAGVAPGNNESAGKCRSGRTRKGNQALRTVLNQAAHAAAKTKNRYLSAQYHRLAGRRGTKKAIVAVAHSILVIAYHLIERKEPYQELGGDYFDKRNVEATAKRLTKRLERLGYQVSLQQQPVGVGA

SEQ ID NO: 427395 - protein, 351 aa, unidentified
MMIIGVDYHPSFQQIAFLDQETGECGERRLSHDGGEADRFYRELQQRGIFVRVGMEATGYARWFERLLAELGFELWIGDSAEIKTRRVKKQKTDRKDAELLLKLMREDRFPRIWIPPPENRDLRQLLWHRHRLVQMRTRIVNQLWALAMNEGQRRKKKLWSEQGRGELEKLSLAPWAGRRRRELLELLDRLNPAIEELTAAAEQEAKKRPDVLRLMTHPGVGPLTALAYVLIIGTPSRFARGKQIGTYAGMIPSEESSGDKQRLGHISKQGNSLLRFLLVEAAQAATRVNPEWRRRYIHLAMRRHKSIAKVAMGRRLAVRLYWMWRNGCEYSPSLEFGSYAGQPGTGHGGK

SEQ ID NO: 427396 - protein, 346 aa, unidentified
MLYAGLDLSRKRLDFHLLDQAGETVEASTAPPDVDGLRGLADRVARFEEPVRAAIESMNGARFVHDQLEGHGWAVEIADAVKVKGLAPLACKTDRIDAWVLAELSRRDLVPAIWLPDPEVRGERERARFRLHLVRHRSSLKQRVHAVLLAHGTPCPVSDLFGVSGRALLERLALPEPWAGTVGASLRLIDELDREIDACEHELRRLGADHRYVPLLLTVPGIGWVLAYTIAAEIGDIDRFSSPTKLAGYTGLCPRVYQSGESDRRGALAKQGPKYLRWALVEAATHASRHPLYRERYQRTKTRLGRQRGARVAQVDLARKLAEAIWHMLTRNQPFAPAGAANPLAA

SEQ ID NO: 427397 - protein, 482 aa, unidentified
MSATGTTDENTLLVEARSRDVGRGGWDNFRASILFLKLALFAIEGHTVSENTDVKLTFEANPLSTLEVCRRMKEKACGLDLHKKFILAAIIDQGGTTVEHRFSRTQTDLFALRDWVLFHDCEVVACESTSDYWIQVYDLFVGKIPVIVGNARDIKAISHKKTDTIDAIWIAKLALHDLIPASRIPDPETRDLRSLIWLRKFLVEKRTDLKNQVHHILDSCLFRLSTVFSDIFGKSGMLILTGVTDGKSIAEILATLPVRTRKRSEEIQSILETTLPELAIIRMQCCLNLIKELDNQIETLMQRVHQCVARQTRLLRILTSVPGIGYIAAVTLIAEIGNFTNFSSGDKLASWVGLVPTVNQSADHLRMGAITKRGSRTARWILVEIAQAAVRTRSSRFHAFFTRKVGVIGFSKAIVAVARKIVTILWHLVVNDEEYEETEGNRKQEIRIPKAKQPKFLTLNEMFRILAEANIFLKQSDPHGGG

SEQ ID NO: 427398 - protein, 353 aa, unidentified
MEQFIGCDAHKKFSLFVTMNERGEYGAAIRVSHEREAMREFLAGLPAGSKIALETSGSYYWLVDEMERAGHEPQLAHAFKAKRRMEGRHKTDQKDAQGLAMLLRNGTLPRVWIPPAELRDQREMLRLRMRLVRMRTQVKNRIHGTLTRYNVTVDASDMYGEKGRKQLAERLIELPPYSRQSVYMQLEMLDFLAMQIADCERTLEQILKPSLQRTLLRTLPGVGPILSAVMALEIGTLQRFASAEDLVSYAGLVPAAHQSAERRGRSQCPKDCNNYLRWAYVEAANVVACNQVAWRQTHVVKLYQRVRRSSKLHAKAVVAVGHQLAEASFWMLRKEQVYRAPGSTRPAASSTLG

SEQ ID NO: 427399 - protein, 411 aa, unidentified
MNNTLFVGIDISKRSNVATFMNCEGKVVGRLTFSNSGSGADRLVAKILSYYEKEDFEAIRIGLENTSVYSKNLVWFLYEHEALNEHKLSIIPLNAIMVANYKKSFLDMDKDDITDSFAIADFIRIRPGLLPFKLDDRQEALKIMTRSRYNYVQALSRMKSQFLTRLFLSFSEMEAGKPFYSIFSKTSLSLLEEEFTLDELAEKPIPELVEFLQEKGGGKFQNPEEIAKVLKKAASSSYRVPAMVRESLNRTMASDMEIMRILENEIHNCDKNIEKLMKSVPAILVSIPGIGPVLAAGIMSEIGDISRFQKQESLGKMAGFKWKRNQSGKKESEDKAAVLSGNKKLRYYLVEAANRVRIHDPVFEAYYRKKYAESKTHAHKRALILTARKLVRVIFYLLKENKLYKPDVGIS

SEQ ID NO: 427400 - protein, 340 aa, unidentified
MTFGTIGIDVGKNWFHLIGLDSRGVIVTRQRFNRAQLLRFMSKLPPCVVGMEASCGSHHLARELSGMGFDARLMSAKFVRPFLKGNKNDYLDAEAIAEAVQRPSMRFVRIKTIEQLDLQAIHRTRSGLISRRTGVINQIRSFLQDRGITVPQGPAVLARALPALMTAEEARLSDSIKQLIRMLREQWVSINQQVDELESELRSIVERDDACKRLASIPGIGAITASAIVAAIGDGRMFRSGRDFAAWLGLVPRQHSTGGRSTLLGISKRGNAYIRTLLVHGSRCMLRFFKDPDTAIGRWAVALKSRAHANVAAVALANKQARTAWALLTQGTFYQARPAV

SEQ ID NO: 427401 - protein, 331 aa, unidentified
MDQTRISVGIDVSKTELVMATHPTAEQWTSDGSAAAIDVLVTRLTALRPHVIVIEATGGYERPAVAAMAAAGLPIAVVNPRQVRAFAQALGRTAKTDAIDAQVLALFGARVQPAVRTIADADTQALVALVARRRQLLEMLGAERQRLAQAATTVVRRDLRNHVRWLERRLADVDDEIGGAIERSPVWRVHEDLLRSVPGIGPTVARTLLAELPELGRLDRRTIAALVGVAPLNCDSGQHRGQRHIWGGRASVRTAVYMAALSATRCNPVLRAFYRRLRDAGKPAKVALVATMRKLLTILNAMMKYHCRWNSQVASTPASSSRPARAATVSA

SEQ ID NO: 427402 - protein, 329 aa, unidentified
MKVQHIIGADLSKKSIDLVCHLLKSHVQIENTITGFKDLMQWFKQQKINASKTMIVMEHTGLYSYCFEKFLHEHQIPFCKVNALTIKRSIGLVRGKTDKLDAARIAAYGYEKKDKLTIDVPASDSLRRLQMLHSTRERLVRHRASLICSIKEYKCIGISDKDVIMQTQLQLIKNFDKQIEKLMIEIETIIENQKALKQNFRLLQSIRGVGKVVALVTIIKTHNFTRFANARKFACFCGTAPFPHDSGTSIKKRTRVSHLADKQMKSLLDLSAKSAIQYDKELREYYLKRTEGGKSKMSTINVVRNKILYRMFAVIKRQTPFLENYLQAA

SEQ ID NO: 427403 - protein, 342 aa, unidentified
MQITTIGLDIAKNVFQVHGIDAEEKVVVRKQLRRSQMIAFFKALPPCLVGMEACATAHYWARELTKLGHEVRLMPAKDVKAYLKRNKNDAADAAAICEAVRRPTMRFVQIKSAEQQGQLMQHRTRDVLIRQRTQIINALRAHLAELGIVAAQGDAGLNALRAIVADEQDTRLPIDARASVIVLAAQLEALQTLIGSIEKRIKMQHRSNETSQRVETIPGIGVLGATAIVATVADPTIFRSGRDFAAWIGLVPRQDSTGGKQKLGPISKQGDRYLRRILVVGAISVLRRAQENPGKYPWLTQLLARRPFKVVAVALANKMARTAWALMVHGGTYRAPELVEAA

SEQ ID NO: 427404 - protein, 319 aa, unidentified
MAQNDSVVVGIDVAKDKVDACIRALALRQTFTSTVQGHRKLVRWLRKHRLNKAVMEASGGYERVWARVLREADIEVRIVDPKRVRNFALSAGRLAKNDAIDAEMIAWFAEIFSEAPSQRHDAAREELQALVKARLSLIDSRMRLVSQSEHVAPGLVQKAHGRILKSLASEIARLEAAISIKIKSTPDFAERAEIIESVPGFAKTSSANLVAGMPELGQVSDEIAAALIGVAPYDDDSGKRRGERHIKGGRRWVRNAVYMPCVGAATQNNPVLQAYYQRLIAKGKEPKVAIIACMRKLIVILNTMIARRQKWDPSRYSLT

SEQ ID NO: 427405 - protein, 353 aa, unidentified
MDASTVNLVVGMDLGDKYSVLCTLDEAGEIVEESRIRTTPAAVTGRFAHLSPCRVVLEAGTHSPWVSRQIESYGHDVIVANPRRVALIYGDHTKSDEIDAKTLAKLGRMDPELLSPIRHRGAETLADRAVLTARTALVRSRARLIQVARGIVKSHGQRLPACGANCFSGKVRGTLPAELAVALAPLVETIDELTRKIRAQDREIERICEEKYPETALLRQVVGVGAVTALRFVLTLENPHRFTSSRSVASYLGLRPRRSQSGGSDPQMRITKAGDREMRRLLVHSAHYILGPFGKDCDLRRFGEKLAAPGGKSGKKRAVVAVARKLAVLLHRLWVTGETYEALRNGNKTKIAA

SEQ ID NO: 427406 - protein, 385 aa, unidentified
MSQLNDLSRSPTPLQQDSTIIAVIEMSQSSWLVAGIVPGIERHPLKKLEPSEEELIHLLMRWRAEATKHGRTITRIAVAFEAGRDGFWLARWLRARDIEIYVIHPTSVVVSREHRRAKTDRLDTGVLKRVFIGWLRGEPDHCHMAAIPTLAEEDAKRPNRERERLVGERTRIVNRMKSCLVRFGVRNFKPTLRKAPERLETLQTPEGVPLPPNTLLELRRDMARLRFVMDQIKQVERARAQRLEQAPQEKSHAMVRLLARVIGVGIETADMLVHEVLARNLRDRRAVARYAGLTGAPDESGSKRREKGLAKAGNARVRRGMIQLAWRFLIFQKDSALAQWYQTRTAGAGKKRKTMIVALARKLLIALWRLVTTGEVPAGVILRAA

SEQ ID NO: 427407 - protein, 317 aa, unidentified
MSISSWFGGVDVAKQSLEVAFIRGEEEDVRQVPNTPAGWAELVAAGQERRVERIVLEATGGYERRVAAELMAAGLPVVVINPRQARDFARATGRLAKTDRLDARGLARFAAAIQPPVRPLPDEKVVELREKLARHRQLVQMRTAEGNRLEHAQSAPVRKSIQKLLKVLDQQLTELDKDIDQRIEESPAWREKDRILQSVPGVGPQTSRTLLSSLPELGQCSRQQIAFLVGVAPLNRDSGKMRGTRSIYGGRAHVRHALYMATLVATRYNPLIRQHYLHLQEVGKKKKIALVACMRKLLCILNAMIRDHETWNPTLST

SEQ ID NO: 427408 - protein, 422 aa, unidentified
MEVMIERCAGLDVHQATVVACVRIRDGGKRARREVRTFGTMTHELEELRDWLGEHGVTHVGMESTSVYWRPVYAVLEGHADLIVGNARHIRNVPGRKTDVKDAEWIADLVAHGLIRSSYVPPRPLRDLRELMRYRRKLTELQAAERNRLQMQLESANIKLASVATDVLGVSGRAMLRALIKGEAGPDAMAELARGRLRTKRGELAQALRGRMDDTQRILLEMQLRRVEQTEQQIEELDRHIDERLKPYRAEMALLTQIPGVERVTAAVLIAEIGTDMAVFLSVHHLAAWAGVCPASHESAGKRRNIGVRHGNKHLRTALFEAAMAGSRTRGSYFRDKYHRLKARRGAKRAGLAIAHKILIAVWHMLTRRVDYRDLGEAWLDQLDQQRTARNLRRRLEHLGYEVTMVPRQPTSGGAEAAIQTA

SEQ ID NO: 427409 - protein, 368 aa, unidentified
MKKVSTAAAKASRNISRQTLTVGLDLGDRNSWYCVLDEAGQIQLEQRVGTNAKALREVFGAMPRSRIALETGTHSPWISRLLSELGHEGIVANARKLRLIGESRKKDDRLDAQTLARLARIDPQLLYPVKHRSAQGQADLAVIRARAGLVRARTAMVNTARGLAKSYGERLRGCNLRNLNPEKAEALSPELQAALQPLLAALESVSQQIREYNQQIETLAQERYPQTALLKQVKGVGTLIALTFLLTLEDPQRFGKSRDVGCYLGLQPGRRNSGKSQPQMHISKEGDPYLRTLLVQGAQHILGPFGVDCDLRCWGLKLAERGGRSGKKRAIVATARKLAVLLHHLWVSGEVYEPLHNSRRRTTVAAAA

SEQ ID NO: 427410 - protein, 408 aa, unidentified
MQVYIGIDWSEENHTLVFMNEAGVDLARLSIAHTLDGFTQFDTLRRKFGLATSDCLVGLETAHNIFIDYLWSQGYVHLYVLPPSLVKANQSRFRQSGAKDDPADARLIAEILRTDRGRLQPWKPDALLTRQMQADLSLILHLNRQAIRLSNRLRSVLLRYYPAVLKVFKSGLTTQIAPEFVRAYPSPQAAKELSLDKFIAFGRKHHYPKPGLLPHCFARLQADYPQASPDSVLIYQEQAVQLADLLLHTTHQKRKTQARLLARYRQHPNYAIFHSLPGTGKFIGPALLAKFGDDPQRFPKAASVQALAGTSPVTEQSGKYKIVRFRRACDKEWRYISQEWAMALVTKTQHPLAVAYFQKIRPHCHSDSHAFRCVANRWIAVSWKVWFSQTVYDEAYHFQQQAARSKPR

SEQ ID NO: 427411 - protein, 359 aa, unidentified
MESSEEFVSAEIAVTLGVDTHKDAHVAVALDGLGRQLGVVSVPTTENGYCKLIQWAEDLGNIERVGVEGTGSFGADLTRFLIAKGIEVREVIRPKRRDQYRSGKSDPLDAEAAARAVLAGTATSLPKGADGEVEMIRALRITRRSALKARTQAANHMKALLVTAPEELRAKLCELSTNKLVKRAAHFRLGQCPDDVTAATKFALRSVARRYLRLSEEISEFDELLDRLVAEAAPELIAVEGVGTDTAASLLIATGDNPQRMRSEAAFAHLCGVAPIPASSGKIVRHRLNRRGNRDANRALYAIAFGRMRRDQRTRDYVARRTAEGKSKKEIIRCLKRYIARELYRVLPSPRERPPVSVP

SEQ ID NO: 427412 - protein, 386 aa, unidentified
MKTVAGLDVHKDSVYLCILRENGEKIERVYGVLTPQLDSMRDFMAKNKVSEVAMESTSVYWIPIWRVLVDSFELKLVNPYFIRQLPGRKSDVKDAQWIAECVMKELIRGSFIPSPLVQRLRLYDRRIFEINAELVRKYSKIDAILQRCNIRLSNYVSNTDCKSYKAVVKQISEGVTSPQELLRHVHKRIINKHGEDTILAALTGVVSDSEIDMLAQYVAESAILEDNKNKCIEKMREICNSDFKEQMKNLQEIPGVSERSALTVLAEIGPDVNAFPSAKHLVSWCGFNPRNDESNKKIKSNKITHGNRFIRIASVQCAWAASRTKDCYFSKFYAFHTQVRKKFKLKVVVAVARKVLVCIWHILKFNVPYKDFEPQKSVTKDCIQFA

SEQ ID NO: 427413 - protein, 309 aa, unidentified
MNTQNKNIIAIDIAKSTLQVQTENSSFVIGNDKGGFKRLDKQLSKLSKPHVVCEATGGYERPLVRHLFEQEVSVSVVNPSTVRAFAKGEGIKAKTDPIDAKMLLKYGQTRELKPSSRPDPAREELAALMDRRSQLSGSLTREKNRLDKDPAFTRKLIEKSVRFLEKQIKEVDKRIEGILASNDCLTKLVDRMTEVKGVGKTTALTILAYLPDLDSLSRGQMVSLSGLAPFNRESGKTRSRAFIQGGRAKVRKCLYMAAQSAAQHNDVIKTYVTRLMDSGQPYKSALVAAMRKILICLRSLLMNPKFRLA

SEQ ID NO: 427414 - protein, 345 aa, unidentified
MENIGIDVHKVESQICILTEGSEVIERRIRTQRERFAAVFGVRAPARILIEASTESEWVARCLEELGHEVVVADPNFAAMYATRSRKVKTDRRDARTLAEACKLGAYRPAHRTSERQRQLRARLAVREVLVRTRTRYISLVDALLRSEGYRIRSGVAESFGRRVEELALGGRLKSEIAPLLAVLLGLNKQVAWLDSRLEQLAESDQTIGRLCSAPSVGPVTAAAFASTIDEPRRFRGPHQVEAYLGLTPSEMSSGEKQRKGSITKAGNGRLRYLLVQVALSILRLRSPRTEALRDWAERIAARRGKKIAVVALARRVTGILYAMMRDGTPYQPARRRPAPQRAAA

SEQ ID NO: 427415 - protein, 394 aa, unidentified
MIYAGVDIAKTDHVIGAVDERGAEMCRPMPFKNTEAGLERAVAWLEGLAGSPSDVVVGMEATGHYWMACYSFLVARGYSVAVINPMQVKAVRKLKKLDKVKNDRIDAWLIAETLRIGQYDETRLATDEVASLRSLSRYLQSLRGMAAELKTQCVCLMDAHFPEYAGIFSDMFGAGSRAVLSKSPLPFELARRRADSLARDIAEASRRGGKSAGYAARIKAAARSSIGVRLGQEAASFQVKSLIRQIEFADSECAKVEARVRALLDEVEPLVLTIPGVSYATGAQIVSEIGDVSRFRNASALVSYAGLNSSVSQSGQFDSGGGPITKHGSPYLRRALWLAANRARQCDPGLRAFYDKKRAEGKPHRVAVTAVARKLCHIVFAVMRDQVPYDPGRE

SEQ ID NO: 427416 - protein, 343 aa, unidentified
MDDTIYDHYIAIDWALENMAIARMTKKSNKITAIDVPSDIGDLRAYLKNLKGTKILTIEETTPTQWLYTELKDHVDRIFICDPTRNKLLNEGPKNDKIDATKLVQLLKAGLMKEVYHSNDKFLYLRRLVSGYEDLVKAGVRTQNQRYALLRACGKKGNEKKDLNLDSGGEQFVLECLDRQINAYEEEKDGYEKEFARLAKKHPEIRHQKTLPGIGLINAVKIVARVVTPYRFADKGHYLSYSGLIKLEKISGGKSYGKKNPRYCRQLKTVYKSGVFAAIGGNNPINDYYEFLMREKAYPEDIARHKACRRLATLSLGIFKSGTKYQPHRKHYVEGKKKMSSGL

SEQ ID NO: 427417 - protein, 318 aa, unidentified
MTVKHFVGIDVSKGDFYVCLNDQEAPRRFNNTPAGVRGFITSLRAREYLPSTTKIGLESTGPYHYPLSFACTKQGYVINIINPLITHAYNKTTVRRTKTDKKDSSLIRYVLTQGAGYPFVETADTLVLKNLVRERAYLSNMKRDIHRKAKDIEYKEAIVHTPITSVNQDIFTILSEKMKDIDRQLKQHRKEEQALLQSIPGLGPTTAATLIAEITDIHRFKTPKHFTAFIGLDPRTYQSGTSINGKGYITKRGNKILRTLFYNCASVAIQRPNVFQDFYNKKVSEGKPKMIALIATTHKMAKVAYAVWKTNKPFDPNH

SEQ ID NO: 427418 - protein, 341 aa, unidentified
MNEISIVGLDLAKNVFQIHGAGPDGSVALRKKLNRGRLLEFFAKLPICVVAMEACASAHYWGREIGKLGHEIRLINPSYVKPFVKRQKNDAADAEAIAEAASRPTMRFVSVKSAAKQASSMAFKVRDLLVRQRTQTVNALRGHLMEYGLIVPQGFKNVPLLHEQIATHPDLPEVAKMLCKGLLEQAMFLSEQIAVLEKELRIRARQDDLASRLMTIPGVGAICATAIEALAPSAETFSKGRDFAAWIGLTPKQNSSGGKDRLGKVSKMGQRDLRRLLVLGATAVVRWARRYGAPVGSWLARMLSKKPPKLVAVALANKLARIAWALMSSGGVYQAPASGAA

SEQ ID NO: 427419 - protein, 346 aa, unidentified
MNYIGIDVHKSICTAVVMNDDEKVIDQIIDFGTNDEGCSSIVDRYSPEDSYILFENLTTAHRVYRFFKDRGYRAEGLHTGHGCVTEISKTDFKTDLEDATKLARMCKDHFTGRREYALAHFADIDSMKAKELCRVMNDCSEQRDKLNLRIQAYMDLFDIHLPKGLKNVYSNKAMTYLKSLDHPALTIMVEDMASAMAHIETARDGLESLFKDNEDVKNLMSIKGIAIQTAATIYTAIDGIERFETPESLVSYFGLKITRHESGGDRDLHGHINKRGDPLVRKYLANVVVKHSIYYPDSDLAGFYKRKKEVMPHWKAVTAAMRKLVCIIWAMLTRHQVYRFSSPVKA

SEQ ID NO: 427420 - protein, 417 aa, unidentified
MSEYAAFVGFDWADKKHDLCLVDAATGKKEFAVIKHTPQALQEWATSVRSRFGGQKVAVALEQSRGPLIFALLKYDFLVLYPINPSTLARYREAFSPSRAKDDPRDAEYAVELLLHHRERLKAWLPDDEQTRTLQYLVEHRRRVVGDRTRLSNRMTALLKLYFPQVLEWFEDIRTDLVCDFLLKWPTLEEVQKVKRATLEKFFREHHSVRQEALSARLKAIKESVPLTTDRAVISSSALMIKTLAAQMKTAISAIKEFDRKIAELCANHEDYHLFASLPGSGSVYSSRLLAAFGTERKRYESADEVARYAGIAPVIERSGQSCWIRWRYFCPKFLRQSFHEYAGESIKHSFWARAYYAEQKAKGKSHQAAVRALAFKWIRVIYRCWQTRTEYNEVKYLESLRKKGSPLLNYAANNPQ

SEQ ID NO: 427421 - protein, 360 aa, unidentified
MAKARTLVGLDVHATKIVAAVLDAETGEVQYFRMTADVSKAAGFCAGLPGPVRAAYEAGPTGYGLARELARRGVGCVVAAPSKIPRASGDRVKTDRRDAELLARLLLAGKLHAVRVPGAEEEALRDLVRAREQVRVDLMRCRHRLSKLLLRHGIRFDDGDAWTERHRAWLDGVVLEWPAAQATLLDVRGAIDALTHRRDGLERQIVSMLPSSPWMAQVGVLRCLRGVDTLTAVGLCAEVGDFTRFARAEQLMSYLGLVPCESTTGQRRLGSITKTGSAHARRLLVEAAWHYRPRPNLSKRLTERQHGQPQEEAVAVAWTAQKRLHRTWTRLEARGKRRTIIAVAAARELAGFCWAITQIE

SEQ ID NO: 427422 - protein, 416 aa, unidentified
MAQLKIIYPICCGMDVHRDFVMACIASTDRQGVTQYNTKRFSTYSGGLRSLRDWLAEFNCKDVCMESTGKYWFPVHNILEADFNVVVTHPKFVKAIKGKKTDKKDAIWIADLFKFDVVRGSFIPTTDIRQLRDICRYWVKLTAYNTGEKNRAQNCLTVSNFKLDSVFTNVFGKSASAIIDYMLEHPGEQFDVAPFVDGRCKAPIEDIQEAVDGAFNPWQAEKLKIIREHMDSLEKLKALLEDLILRLAEPYMTQIKLLLTVPGVSDMMTAIRIIAEIGVDMSQFDSSKQLCSWAGLTPQNNESAGKKKTTRIGKAGQYIKPLLVQCALAAANPRSKKYPEILSKYQQLKKRRGSKKARVAIARRLLTAIHQMLLKNESYAPNIAPVKDIIPKNRVLSPEQALAMLRSKGYIIAENI

SEQ ID NO: 427423 - protein, 412 aa, unidentified
MEVVYPRCSGLDVHKRFVVACLSIIEKGQRHKELRQFSTMTNEILMMKEWLKASGCTHIAMESTGVYWKPIFHLLEGDFEVVLVNAQHMKAVPGRKTDVKDAEWITDLLQHGLLKASFIPSSEQQAVRDLTRTRMRLTQERTRLINRIQKVLEDANIKLASVVSDIMGVSGQAILMALLAGQEDPERLAHLARGSLVKKEDQLQAALQGKLFPHHRIVLEELLPLIASLDRSMARFDREVAERLGRFDALIARIDAVTGLSRRSIEVLFGELGWDMSRFPDAAHAASWVGICPGQHETGGKQLSGRTRQGNRWAKTVLIQAAHAAGHTQTYLGEQYRRISARRGSKKAAMAVGHSILVIFYHMVKTGEPYHEKGADYFTNVTKEKIQRRLVRQLERLGNTVILQPKAETTLA

SEQ ID NO: 427424 - protein, 342 aa, unidentified
MVVHYIGADVHSNNTELSIERNGQIVARHGVPTNVRAIRQVLTVLQGRKHLTFEEGPLAGWLYRNLKDHVDSLIVCDPRRNRLISSDGDKDDRIDAAKLARLLRGGYLRPVYHSDDPQRVTLKRWVALYHDRVRDATRAINKLRGCCRVYGERIPRRALRDPSARQAWWASLEPDLAEQIDMLWLSYETNATQVRIARGQLARRASAFATIGHWSALPGIGPIRATTLFAYLDTPWRFQRKNQLWKYCGVGLQRSASGRDRHGRERQARLRLPWPVNGLLKNVVLGAAMSAIRSRDNMFRRDYERMLRDGALASNARHTVARKMLTVMWGMWKSQRPFEPWA

SEQ ID NO: 427425 - protein, 366 aa, unidentified
MPSVSRTKSPIHLGLDVHKDSISVAILHPNDEAVDVERIFHDETSVRRLVGRFSEPRDLRACYEAGPTGYDLHRLLTSLGVRCQVIAPSLIPKASGDRIKTDRRDARRLARLHRAGELTAIRVPRPEEEAVRDLCRARDDAVVDRTRARHRLSKFLLRHGQVWRGGNQWTVTHDRWLRSLRLGEPALQATFRHYLAVLEVRDADVRSIDADLAPWFSSGPFAEQVGRLGAYRGVDQLGALTLASEVCDFRRFASAQMFMGFCGLVPSERSSGERTRRGRITKAGNAHLRRQLVESAWSYRFPANLTDRMRRRQDGLPRETVTRAWAAQLRLCARFRRLAARKESKTIVATAIARELAGFLWAEMVA

SEQ ID NO: 427426 - protein, 353 aa, unidentified
MKQQAIHFVGLDVHQSTMVASMRDESGKIVMKATVPTEEKAIVALVRSRPRVHVAFEEGTQAQWLHDVLIDQVERVVVCNVRGKGPLANKDDRIDADDLSERLRVGDLKAVFHGAPEILTLKELVRSYNNLVQDSTRVMLRIKAIYRARAIATPGTSVYRVSQRKQWLARLEGGARVRAASLLTQLDALLELRPKAKAAMIVAARRQPGWKVLRSIPYLGAVRVAQLLAIMRTPFRFRTKRNLWPYAGLAVVKHSSANQVFKNGKLQRSKKAPMTRGLNRNHNPLLKAVFKGAATAAASASGPLGEYYKASVSRGVDKDLAKVTLARKIAAVALRLWKKGEVFDPKKLTMQVT

SEQ ID NO: 427427 - protein, 322 aa, unidentified
MAMLSFCGIDVSKDRLDVMLLPEAQSSSVSNDAAGWAKLVEQLRGSSIAAIGIEASGGYERGVTRALLAAGMPVRQVNPFKLRQFARASGILAKNDPLDARMIASFVAVMPTRPAQRATPAAEQLVEMLAVRRQLSAEKIAAENASRLLEDPMLQRLSRRRIARLAADIELLDKRLVEIVATDATLAHRYRLLTSMPGVGPVLACTLIALLPELGGMSRKQVAALVGVAPYAFESGTLKGRRCIWGGRANVRQVLYMAAMSASNWNPVLKLFHDRLKGAGKLPKVVIVAVMRKMITTLNAMVRDDIAWADRLSGRHSVTTAR

SEQ ID NO: 427428 - protein, 361 aa, unidentified
MTGTLTWVGMDVHARSTHAAAINLLSGEIERMRFGPGVEAPVAWLSGLAGPVHACYEAGPTGFGLYRAAVAAGVRVDVVAPGKTPRAASDRVKTDRKDAELLARLLVAGQLAPIKVPSAGVEGARELTRLHDQGRRDLMTARHRISKMLLRHGRVYPKPTTWKADHRRWLTGQHFDEPTSELVYLNLLAQVDALTSRKLELAGQIAQLATDERWWPTVARLRCFRALDTLTALSIHLELGADWDRFEKAPRVGAWLGLTPSLNQSGESKAQGAITKTGSTLARRLLIEAAWHYGPRPHVGPALQTRQHGQPEHVLQIANKAQHRLHRVYRQMKARGKPHGVVTVAVARELACFLWAAATAD

SEQ ID NO: 427429 - protein, 392 aa, unidentified
MIYVGIDVASTKHDCFIMSDKDANSNLLITINNDIVGFTKLKETIYDFMPSNDEKVRIGLESTGHYSHNILHYLVKEGFDTMLINPLLTNMERKSSSVRKTKTDKIDAKSICTFLMRNQEFKPYTIKSYHSTALKSLSRRRITLVRQLSKQKVQLHMLITLTFPEYLKVFSSLYAKSSLEILYKYSIPSKISKSRIDGLSNTLKKFSKGHHGHQTALLIKELAAKTAGDTNEFYAIQIKLTIEMIRFLQVQVKAYNDEIKTIVDEYCPIILSIPGISYVTGSIILGEIGEISLFQSPDKLLAFAGLDPNVYQSGNYNANKLSISKRGSSYLRWAVHQSAAIIIHNDSAFAAYYSKKRKEGKHHLVALGHVSKKLVRVIFSILKYNNAFVAQN

SEQ ID NO: 427430 - protein, 416 aa, unidentified
MDTMYERCCGLDIHKKTIEACFRSGKKKTHMSFGTTSAELRKLTMWLVENDCQSVAMESTGSYWKPIFNILELSGTDMKIIVVNARHMKNVPGRKTDVNDAEWIAELLQYGLLRPSFIPDREQRELRELSRYRKSLVGERAREINRLQKMLEGGNIKLTSVVSEVTGYSSRRLLDRLLRNDEPMTEDVISGLVHTSLAGKSKELETALDGLLSELQKELLIKVLDHIDDMSRRIADLDDFCRKQMEKYEDALDKLDEIPGIARRTAETILIETGLDMSRFPTAKHFARWAGLAPGNNESAGKRSSGRTTKGNPTLKSTLIQSAKVAARKKDSFFKARYQKIAARRGANRASVAVAHSMLIAIYHILKSGESFKDLGEDYYNQFNKEKKKKYYLKKLTKLGVNLKEATLSISIQAAT

SEQ ID NO: 427431 - protein, 403 aa, unidentified
MVAACAGRIRVLDSQTRTLSCPDDTSRTNKRDGVDGPNGISVPRLRAVRTCEREPPEMSISIIGLDTAKAIFQIHAVDEVGREVLRRKLRRVEVVRFFNDQEPCTVAMEACGAAHHWARVLTGLGHEVKLVAPEAVRPFVKKGRKNDSADAAAICEVASRPNVKFVPMKSSEQQATLSLHTARSLLVKQQAMLANAMRGLAAEFGVVVPQGIGRLDGLMASVEADETVPERARQAIHELFDNCCALGSRIHVLEKEIIAHARHDETARRLETIPGVGPITASLIAATVSDIHAFRSPRHFAAWLGLVPRQHSTGGKTRLGRITKTGNREIRKLLVLGATAMVYRAPRWNSVAGAWLRNILERRPVRLVTVALANKTARIAWALMTHQEDRSGVCCRMMPCSGW

SEQ ID NO: 427432 - protein, 343 aa, unidentified
MHTITTIGLDIAKSVFQVHGIDAQGQVVTRRQLKRRYVLTFFQKLAPCLVGIEACASSHHWSRELKALGHTVRLMPPAYVKPYVKRQKNDAADAEAICEAVTRVNMRFVATKTPEQQSCLMLHRTRHLFIRQQTAVINVIRAHLAEFGIVAPVGRKGVEELLDVVADPSDKRVPAIARACLAALGTQLRRLKEQILEFDRVIVAWHRSNDASRRLDAIPGVGPMLATALVASVADPRVFRSGRNFSAWIGLVPKQHSSGGKDRLGGISKQGDRYLRSLFVAGALAVIRYAKIHGTKHRPWLTALLARRPTKVAAIALANKIARMAWAMMARGERYKEPVALAA

SEQ ID NO: 427433 - protein, 410 aa, unidentified
MSNSLLVGIDVSLNDNKVHVLHPDGTSLSKFAVPNSVPGAERLSQKVSGIMEQNSFDSIVIGLESTSVYGDPLVYFLKQDTVISKFNTKIHVLNPTQVSKFKAFYPDLPKTDDIDAWVIAEHLRFGRINKEVYMDDKYKALQKLTRARFHTVNNLSREKNWFLNNLFLKFSSLAQEKIFSDRFGATASSIIEEFFSVDDIAYMPVEELAEYINKKGKGHFANPEELASTIQKAARSSYRLPKTITDSVNQVLAVSLVAIKAYKEQIKTFDAAIEQQLKLFPNVLTSIKGIGPVYSAGIVAEIGDIHRFTNQAALAKFAGIAWSKHQSGNFTAANTHLIKFGNRYLRYYIMEAANKARMHDPELKRFYDLKYSQTPKTPHKRALALTARKFVRLIYALLHSNRLYTPPKGD

SEQ ID NO: 427434 - protein, 338 aa, unidentified
MYYTGIDLHKFTSYLTTIDSTGVIIKQENLKNVAHNFIQYFNSIPGEHKATVESTMTWYWLNDLLTSINIPLVLAHAKYVKAIAYAKVKTDKVDSHTLAQLLRMDYIPVAYKISAENRLLRDALRARLKIVQRHTSVTNSMHLLLAKYNFDSPTQLTGIPEFQYEQLSEVEQLLDEQMLDLEKQLYPFLIPNDDIQRLLWIPGIGKMNAFTILLEVDDINRFPDVKNFFSYCRLTPSARNSGGKSKQRSSKDGNKYLKVAFSDAATHAVQYYPVIRKYHSSLLRRKNKQVAKTILAKEIASIVYYVLKYKSDFNNTFRGQELEHKKSLQWPRVVSPCA

SEQ ID NO: 427435 - protein, 322 aa, unidentified
MKYIGIDVSKATFVVAYSSDKGGEIRTFDNTTAGIRKFIGTLHKEGNIHCVMEATGNYSALLLYMLNVAGMTVSMENPLKIKNFAKAMLSTVKTDKSDARLIALYGEKMNPQPFKVQGEAILRLRQKRTVIRQLTKQITAMSNLRGSLECLPVPDKGAAHTVDETIKFLEKRRDRLQSELTDLVEVEFSRQLALLTTIKGIGITLATALIITTGGFTYFQNAKQVSRYLGICPTYEQSGTSVNIKGHINRNGNAYTRGLLYVAAWNASRFNAKCGETYTRLRQNGKPGKLAMIAVANKLVRQAFAVVAHDKEYVDGFVSNRH

SEQ ID NO: 427436 - protein, 465 aa, unidentified
MAAVMIGIDPHKASHTAVVISAAEEPLGELRVRACTAQAEQLLAWAAAWPERIWAVEGAAGLGHLLAQQLLSAGERVLDVQPKLGARVRLLAAGDTNKNDPNDARSVAVAALRSPGVREAVPDDHAAVLKIWSKRYRDLGRARTQVVCRLHAVLCELVPGGVAKAITAAAAARLLDSIVPAGAVDAARCELAAAFIEDLRRIDAQLRATRKSLITAVQATGTSLTTLFGVGPVIAAAVIGDVKDVSRFPRRDRFAAYNGTAPIEVSSGRRKVYRLSRRGNRRLNHAIHMAAVTQVRHRHSEGRAYYDKKLAEGKTPKEAMRSLKRQVSNAIYARLQGDARRAAARAGGPGGQPGNDSVASAAGLHPAGRLFGQATPGPGHHATPTAGSPAPGSRAGHSPVAAILPPAKPRVQVERPQRSEDERPGGAARRRPQSATRKAPGQDPLARTQRPKGTSHPAKKANGNP

SEQ ID NO: 427437 - protein, 365 aa, unidentified
MRRPNTKVIAGIDLHGNNVVIGIMNQDGKRIEHQKVATDLDEVESVLKPYKKRLSCMAVESTFNWYWLVDGLRLRGYPIDLANPAKIEQYNGIKHADDKHDAFHLAELQRLGILPKAHIYDAQLRPVRDLLRRRSMLVGHRTALYISFKSLYSRTTGRQMPLGELKSLGPGDVARLYEHPANQLIAQIQLEEIGRLDKSIQRIEAAVLSCARHIRLYPKLLTLPGIGKILGMTITMEVGDIQRFKTDGDFASYCRAVDSRRMSNGKQKGQNNQKCGNRYLSWAFVEAANFAKRSDPQCRRWYERKKARTSTVIATKALACKLAKAAWHVMAHNTDYLPERMFPGEQRDLENRRQPATGLAKSPKD

SEQ ID NO: 427438 - protein, 377 aa, unidentified
MGTTRQALINDTSVVLMLYMALELSASKWKVALADGQRAASQHTLEAGDVGGLLKLIEKAKKRCGLQGRLKVKSCYEAGRDGFWLHRWLLEQGIENVVVDCSSIEVNRRARRAKSDGLDAVKLYEMLVRHVGGDKRMWRVVRVPSVQQEDERRVHRELERLKRERTAHVNRMRSLAVLHNVRLQRVGGRGWSERLEQLKGQLPGALWAEIERESVREKLVCEQIVALEQERKEQLQAMLEQGGPLVALLKLRAIGLQTAWVLVRELFGWRHFNNRRELAACVGLNPSPYDSGASQREQGISKAGNRRVRALVVEIGWYWLRYQPHSALSEWFNRRFGAGGKRMRRIGIVALARRLLIALWRYVEHGIVPAGAQLKKA

SEQ ID NO: 427439 - protein, 433 aa, unidentified
MHTPHPFDLVIGLDRSDRKADLHLINTVSGQRQSTIIDTSPEALWEWLLQLRQEHPEARVALCLEQPAGHLISFLEAYDWITLYPINPITLQKYREAFVTSRAKDDTRDAYFLAELLFSHPDKLSAWAPEDSATRAVQQLVFHRRCVVDERTGLTNRLQALLKQYFPQALVLCGEDLWRPLATGFLLKWPSLSAVQKAKTATLQQFYYLKGSRSQKLIAQRLALIEKALPVTDELAVIASFVLRVQLLARELQLAQKTITEFDHQIAGAYQAHPDRVIFASLPGAGPVLGPRLLASMGSQRERFAAASDLQHYTGVAPVTKRSGGSCYIHRRYLCPKFHRQSFHEYAKESVLWSRWAAAYYLQQRTKGSPHHTAVRALAFKWQRIIFRCWQDRRPYQEATYEAALRKNASALVKLFDRVELGKSPWKNPAKKN

SEQ ID NO: 427440 - protein, 394 aa, unidentified
MRSVALDVHLDFCEVAIVEDGELRSAGRIETKPEQIELFARSLAPDDRVALEVTGNAWEIARLIEHHVAQVLVVSPSDTGIRQARAKTDRLDARTLARLLAAGSLDGVWMPDRWTWMMRRRLSRRSQLVWARNRAKNQIHAVLMRQLIGRPPFSDVFGVKGRKWLSELQLAPEESETVSAAMRQIEFFDSEISEIERLIARAGLESAEIKRLMSVPGVNVIVAASFMAAIGDIHRFQSPRKLVGYLGLDPRVHQSGVSPATHGHISKRGSTRARHALVEACWTTVRQPGPLHAFYQRIRARRGHSVAIVAAARKLASLFWCLLSREEDYAYQQPSLTRKKLRRLEIAAGAQRYTAKAAGIWSANDAVREAERELARQAEVAYARSVRDWHATRR

SEQ ID NO: 427441 - protein, 356 aa, unidentified
MSRDPKYIGMDVHKEAIVIAVLNDSGKLVMESIVETQASSILQFIHGLRGELHVTWEEGTWAAWLYDLLKPHVHEVLVCNPRRNALLKEGSKSDKVDARKLADLLRTGMLRPVYHGENGLRTLRALARSYQTISKDLNRVMNRLKALYRGWGIACSGTQVYAARYREEWLHKIPHAGVHRRAELLYQQLDGLQALRRTLGPELLAESRKHKAAKLLRQIPCIGPIRAARLLALMQTPHRFRSKRQLWTYSGLGIETHDSAQYRYVRGQLQRSNKPQQLRGLNENHKHEMKEIFKGAATRASCGLGPFRDFYVALLAKGMKPEMARLTLARKIAAITLTLWKKGGRFDAELLKTQAA

SEQ ID NO: 427442 - protein, 343 aa, unidentified
MNKLNVIGVDLAKNVIQISVLSPSNRELRNSALTRRKFAEFLAKQRPGMVAFEACATAHYWARTAQRHGHQVKIIPAKVVAPFRQGHKTDENDALAVAEAAQRPNVKIAPLKTIEQQGMQAIQRSRELLVHERVSLSNHLRGLLMEFGIVMPQGFAALYRWLPQILEDGENELPDLYRPTLNLLYGRLCDLREDLEQLNREIETLVQQHPLCRRLTALEGVGPIGSVLLYATLGTGEAFANGRQFAAYLGLTPKQFSSGGKVNLVGISKRVANRRLRAVLIQGARAYVYHMKEPKTTKDRWLWAIVERSGKCKAAVALANKNVRTAWAMLPQNTEYQRYPLAA

SEQ ID NO: 427443 - protein, 347 aa, unidentified
MSITMIGLDTAKSVFQLHAVNESGKVEIRRKLQRSELIPFFEKQEARIVILEACGAAHHWARMLTGLGHDVKLIAPEAVRPFVKKGKKNDAADAAALCAAASRPDVKFVPAKTLEQQGVLALHSVRSLLVKQQTMLANAMRSLAAEFGLIVPKGIGKLRELMELVDADATFPKRALQAIRALLDHCGALAESIETFEAEIVAHARHDKTARRLATIPGIGPITASLIAATVADIGVFKSARQFAAWLGLVPRQHSTGGKTRLGRITKAGNREIRTMLVFGATSMINRAPHWNSAAGVWLRGVLERRPVRLATVALANKMARIAWALMTRKEVYHATGRFIASAEAAA

SEQ ID NO: 427444 - protein, 310 aa, unidentified
MSTEHFIGVDVSKDKLDVAVYPTNELFAVDNNQSGADELIQMLQNFHPALIVFESTGGYELLAATTLYTAELPVVIINARQVRDFAKSVGKLAKTDAIDAKVIAHFASAVRPELRALKDKITRELAALVTRRRQLVEMIVAESNRLPSATKPNCRDIKTHIRWLKKRLAQIDTQIKGQVSKSPIFCKKDKILQSTPGVGPTTSATLICNVPELGTLNRKKIAALIGLAPMNRDSGRFRGRRMIWGGRAHVRAVLYMSTLSAVQFNPIIHQFYNRLREAGKCHKVAMTACMRKLLTILNAMVRDQQCWQSC

SEQ ID NO: 427445 - protein, 358 aa, unidentified
MSERTFVGLDVHARSTVACSIDSQTGETTRARLTPEAEDIWRWLQELPGPVAVAYEAGPTGFGLSRFLSDRQTRCVVAAPSKIIRAPGDRVKTDARDAQLLARLLLHGDLVAVTVPSRQAEGARDLVRAREDARSDLMRARHRLSKLLLRQGIVWSGGDAWTGAHDAWLRRQRFDDPARQLAFESDYEAVANIVARRDRLDQAIEAMAADSEFTPVVHRLGCLRGISTLTAFGLAVEIGDWHRFTGSSIGAFVGLTPSESSSGASRSLGSITKTGNTHARRLLVEAAWHHRRQNRAGKVMLDRWQRAPMPARLRGQEGNARLHARWQRFDARGKRPTVANVAIARELAGWCWSLAVMD

SEQ ID NO: 427446 - protein, 349 aa, unidentified
MGEVSTIGVDIAKSVFQIHGVDAGGTVVIRRRVGRARVLEFFADLPACLVGMEACATAHQWARELKKLGHDTRLMPPTYVKAYVKRGKNDAADAAAICEAVTRPSMRFVPIKNVEQQSVLMLHRTRDLLIRQRTQLINALRAHLAELGLVAAKGREGVHQLVTVVTECGGERLPSNARFACQAIVTQLHAVQIEISGLDKRITQTHRVNADSKRLDTIPGFGVILSTAVVATMTDPKAFKTGREFAAWIGLVPRQNSTGGKDRLGSISKQGDRYLRRLLVVAATSVINSARARPYKYPWVIELLGRRPTKVVAVALANKMARIAWAVLAKGEPYRAPTCSSNAVVPAAA

SEQ ID NO: 427447 - protein, 408 aa, unidentified
MDLTPMHKRVIALDVHQAKITACAVVEHDDGRVEVTKRDFGAFKRDRRALAQWALEMAPEVVVMESTGVYWKSPFAALEAVGLIAWVVNARHVKAVPGRKTDMADAQWLATLARAGLLRASFIPPVQMRQLRLVARQRQKLVGMCSAEKNRLHKVLVDAGIRINVLVADIHGQSARAMVKALIEGQPMHEVLNHKGRLRASRQELCEALSTEQFSAVHRFVAQEIVQHIEQIEQRIARMDQYLLQGLQPWQPQLRLLQTLPGIDEQGAAMLLVEIGADMGVFGSAERLASWVGICPGNNESAGKRKTGRIRKGNAWVRRLLCEFAQAAARTRCALKAKFDALTIRKGHKKSVVALAHKMLRTIYAMLSNGSHYQDKEVDYEALNVQRNAPRWIKMLRKHGFIATPAAA

SEQ ID NO: 427448 - protein, 350 aa, unidentified
MAVTIVEETRTITGGVDTHADVHVAAALDPIGGLLGVREFPATAAGYAGLLGWLGGFGTVALVGVEGTGSYGAGLARHMAAAGVRVVEVDRSDRQDRRRQGKSDPLDAVSAARAAQSGRARGASKGRDGSVEAIRTLMVAKRSAAGERTRTINQARALVLTGPDDLRARFVAHTPAALVAGLASLRPRPGGDVAGHATRVALRELGRRAQFLDSQLERLDELIVPLVTAHAPGLLALYGVGPNTAALLLIAAGDHPGRLRSEAAWAHLCGAAPIPASSGKVARHRLNPGGDRQANHALWRIVFTRLGSDPATRAYAERRTAEGKSKAEIIRCLKRYVAREVYPHLRPAAG

SEQ ID NO: 427449 - protein, 446 aa, unidentified
MKKSSRMSIVHPHAAGVDIGAEFHVVAVAPDADAEPVRTFQSFTGDLHRMSDWLKTCHITTVAMESTGVYWLPAFEILEAAGFNVILVNARDAKNVPGRKTDVNDAQWLQKLHSFGLLRASFRPEHDISVLRSYLRQRERLTEYRAAHIQHMQKALMQMNVQLHHAVSDITGVTGLSIVRAIVSGERDPSKLIQYRDVRCKKTPEVLQQALTGNWQPEHLFALEQSVAFFDFYQEKIRECDDQIETSLLQLSTGIKEPEGVLPSARHRTKQPNQLSFDVRPLLWKITGADLTQIHGFGPYLTLKFVAECGTDMNRWPDASHFTSWLCLSPGNKISGGKVLSSKTRRSSSRIAAALRLAATTIGRSDTALGAFYRRLSSRIGKAKAVTATARKLAILFYNALKYGQKYVDPGADYYEERYRSRVLDGLKRRAKSLGYSLQQDPELCV

SEQ ID NO: 427450 - protein, 331 aa, unidentified
MRNYSESLGLDISKSHFDAVLHQKKVHRQFENNPVGFKKLDNWIKCHKYSWEDILVCFENTGYYSLDISYYLHSNDIDYIQEHGLQIKRSIGFRRGKSDKADAFDIAFYCWQNRSDAKLSSPPSVMLSKLKQLNRSRDILVKQRVALRNQVQALSAVRDKAIYSEACKSLRKVIRSIDLQLKNLERTIRELIESDPEVDKNYCLCTSVKGVGPVLAIEMILHTHNFTCFDSWRKFAAYSGTVPYPHQSGSSINWKTKIHPFCDKRLKSLLTMGAISALKCDKGLKIYYSKRIEEGKPKMSVINIIRNKLIARVFAVVNRGTPYVMIDKYAA

SEQ ID NO: 427451 - protein, 311 aa, unidentified
MLFVGIDWSDRVLDYHMRNADGDVLAQGQVVPSVEGLTEMFMKLEAHALPGEIGIAIETSHGAWVQALLDRGYGVYPVNPKSVDSFRKALSANGDKTDKIDRKVLAMAAILKQPALPVVEHLQKAHEPLIRYLARSLQELNAEIAQRDQQITKDLDNLPESNWIRSLPGAGKVLAPALLACLGRDPQRFDDVSQARALMGTAPVTKASGKSHVVHFRRGCWKFARRTLQLFADKSRFQCPWAQKFYQKQRDSGHNHHEALRALAHKWLKILLAMKRTGTPYRESIFVNSQRRYLLKIPLLDTKNMSLAQRA

SEQ ID NO: 427452 - protein, 341 aa, unidentified
MQITTVGLDIAKNVFQVHGIDAEEKVVVRKQLRRGQVMRFFEELAPCLIGLEACATSHYWARELTKLGHEVRLMPARDVKAYVKRNKNDAADAAAICEAARRPTMRFVQVKSAEQQARLMQHRVRDLLMRQRTQLINALRAHMAELGLTAAQGREGVSELLEIIADKEDTRLPLDARASLMILAAQLEAMKTSIGLLEKRIVAQHRSNQDSKRLETIPGIGVIGATAITATVTDPAAFQSGRDFAAWIGLVPRQDSTGGKPRLGPISKQGDRYLRRILVGGAVSLLRRAKLDPRRYPWVTQMLARRPFKVVAIALANKMARIAWALLAKGGTYQRLRLAAV

SEQ ID NO: 427453 - protein, 349 aa, unidentified
MTNCVGMDLHSTNTVLGMVDEDGKRIYRKKIPNHYALISKELQPFKKKIKGVVVESTYNWYWLVDQLIEDGYKVHLANPSAIKQYEGKKYVNDQDDAFFLAELLRLGILPTGYIYPKKERSVRDLLRKRLMLVRQRTAHILSFESFYCRNTGLRMSCNDVKKLNISDVDHMFESDYQVLSAQANIATIIFLNGRIKEIEKRVLDFMKPMPQFQKLLTIPGIGNILALTISLEVGEIDRFKKVGNYSSYSRCVSSGKYSNGKKKGENNRKNGNKYLSWAYVEAANHAKINCLYAMKFFQRKSAKTSNIVAIKALAHKIARASYYVMKNQEDYDIERIFGPIKKQAAAVNQ

SEQ ID NO: 427454 - protein, 403 aa, unidentified
MNMNAVGIDVSKGKSMVAILRPFGEIVSTPFEVKHTVSGIRSLIEHIKAIDGESRIVMEHTGRYYEPLVRELSQADLFVSAVNPKLIKDFGDNSLRKVKSDKADAVKIARYTLDSWTELRQYSLMDEIRNQLKTMNRQFDFYMKHKTAMKNNLIGVLDQTYPGANTYFDSPAREDGSQKWVDFATTYWHVDCVRKLSLNAFINHYQKWCKRRKYNFSQSKAVEIYEASKEIVSVLPKDDLTKLIIKQAVEQLNMASQTVEQLRTMMNDAASKLPEYPVVMAMKGVGKSLGPQLMAEIGDVSRFTHKGAITAFAGVDPGVNESGSYEQKSVPASKRGSGTLRKTLFQVMDALIKTKPQDDPVYLFMDKKRSQGKPYYVYMTAGANKFLRIYYGRVKEYLSSLPK

SEQ ID NO: 427455 - protein, 472 aa, unidentified
MVRQRILRCRPVRGLFDKDCGPTKAACPHNNIGGEDMEPERVDYAAWIGLDWGSYKHALCLKPVDSSSVERCTLEQKPEALHRWFMNLLARFGERKVAVAIEQTRGAVINFLLGFDFVHVFRIHPKSLKNYRDALHPSGAKDDPTDAELLLQFVTLHQDRIKPWVPDRPEIRLLLRLVEFRRKIVGKRVRLSNELTQLLKEYFPGALDWAGELDAVMACDFLSKWPTLAKLQKSKPEAVRNFYQEHGCRRGNVIDDRLKEIHLALPLTTDEPVIETSVLMVKTIAPQLRSLIVAITHFDRRIKELFQKHPDAEIFSSLPGAGSVMAPRLLAAMGSDRSRFNSSAEVAEYSGIAPVTERSGKAKWVHRRFACSQFVRQSFHEFAGQSIMHCNWARAYYDRKKAEGKGHHVAIRALAYRWIRIIYRCWKDRVPYNEQTYMESLRRKRPSWLASVADREFLNAQPGPRSKNHVSS

SEQ ID NO: 427456 - protein, 337 aa, unidentified
MQASNVCTPTVDHFGTILVAIELSRQSWLVTMHSPDRDRISRHKLCGGDHAGLLALIERVQERAARALGSVPAVVSCYEAGYDGFWLHRRLMAAGITNHVFDPASIAVEQRARRAKTDRIDGELLLRTLMAHWRGEPRVVRIVRVPSAEQEDARRDTRERQRLITEQTAHTNRIKALLRLLGMAVGNPRRRDWLIWLAAQRDWQGQAVPPRLAAELKREHARLMLVREQLEALSQAAVGADAPAAAAQMARRSALLLRLKGLGPVFAATLTNEVFYKDFRNRREVAGYCGLAPSPWRSGATNHEQGISKAGNPRARHKAIELAWLWLRHQRAQSMVP

SEQ ID NO: 427457 - protein, 475 aa, unidentified
MGKNRNIQGRKGRRFSEELRGVNLDQIIVVSIDAAKYHPKALICNYFGDILEDSFFFAVNSVGLNELDNKIRQCVKTCNAQRILIGIESTGHYHEDVVRELEKRGYQVTIINAYTTSEERSSGLNWTKTDDVDLAAIAVAIRHNKGTESKLPSGIYDKLLTATRARRSEVNKHSGLQIEIRQLMDVIWPGFQAITEVRNGKAETKAIFSDFWGKAPLFLMRHYPEPKQVLNLGTEGLRQLSREHKLKMRSSTIEKLLHVAKLSFNKKTEDLEIELMLLKMKLDDLDRSNQNISLLEQKIEELLVQTSGVILLSLPEVGVVTAAQFTAEAGPIDQYTNARQIIKKAGTNPLVSQTGGGEPTYGPISKQGNPWFRTAIYSIGFNLANGKTNPYFRTFAERLKANGKKGSQIWIATGNKFIRVAFALLRDKKLFNPPLWNGLPLTKNVLSKIKSKENKEVAQKTLDSLLDKDDHLRVS

SEQ ID NO: 427458 - protein, 345 aa, unidentified
MENMYYIGLDVHKKTISYCVKDGSGGIYAEGSIPATRLTLDMWMKTLPQPWTAAMEATIFTSWIYDHLLPHAAAVKVAHPLMLRAIAAAKKKNDRIDANKIADCLRCDFLPECYMASTEIRERRRTLRYRNLLVRQAVQMKNKIAVLLMETGVGYNKQKLHKVGYFRELLASNQDIDEGLKPLLRLCRETVVRLGKTESALVRSLQRDSLLVERVERLMTIPAVGPITALTWALEVGDVQRFSSIKKAISYCGLCGAERSSANITMRTPLSKQRNKHLQTVLIEAAKMAPRNSPELAMVYQQEKQKGNANRATLAVARKMVAYLVAVDRRQNGFLVVENKNRTAA

SEQ ID NO: 427459 - protein, 369 aa, unidentified
MRNRTTYVGLDAHKATIQITMLVPDQKPVEWQIQNEPAAVRRLAKRLLKEGTTELATCYEAGPCGYALQRQLRSLGVACEVVAPSLIPVKPGDRIKTDRRDAKKLAELLRAGLLTEVHPPTAEEEAVRDLGRAREDATEDYLRCRHRLGKMLLRRGIIWGEGKKAWTASHRVWLKSLHWEHEADQAVFEDYLLAIEQVEERIKSLDAKLEIQAQKEPYREPVAWLRCFRGIDTVTALTVVAELHDFRRFGSPRELMAYLGLVPSEYSSSESRRQGSITKAGNSHVRRVLVEAAWHYRRPWLPGYTLKKRRVGQPLQIIALADKAGQRLHRRFVRLSARGKPNCKTVVAIARELVGFIWAALYPRAIKSA

SEQ ID NO: 427460 - protein, 412 aa, unidentified
MQTLIERGCGLDVHQATVVACLLIVRKDGKVQKEMRTFGTATRELVGLRAWLLSEGCTHVAMESTGVYWKPIYAILEGALEIVVANAQHIKKVPGRKTDVKDAEWIADLLCHGLLRSSFVPPKPIRELRDLMRYRRKLVESQAAERNRLLKVLETANIKLANVATDVFGMSGRLMLRALIEGKATPQEMAELAKGLLRKKIPELQLALEGKLEEHHRFLLELQLQRLEAAEKDLAALEQRIRQKLETYAAQLALLDEIPGVDWTLAAVIIAELGVDMSVFGSVSQLASWAGVCPGNNESAGKRKSSRIPSGNVYLKSGLVEAANAAGRAKGTYLRDKFFRLKARRGYKRAVVAIAHKILVAIYHMLSQQVSYNDLGDLYLDKLNKNHLTRNLVHRLERLGYAVTLTLQQKAA

SEQ ID NO: 427461 - protein, 340 aa, unidentified
MQAIRFGVDLAKSVFQVHGVDAAGKVVVQRQLKRGQVEAFFARQPAALIGMEACGSGHYWARRLAALGHEVKLMPPAYVKPYVRRNKNDARDAEACCEAVSRPTMRFVPAKSVEQQCARALMKTRDLLVKQRTQLANAMRGLLYEMGVTGAKGTAGIVALLQRIEAADAAIPAALLCCLEPLARQWRALAGEIGRLDKEIVARVAGDEAARRLLAVPGVGPLSAYAVVAAIGDGGQFGSGRDFAAWLGMTRRNHDTGGKHSLTGKISRAGDEAVRKLLVLGASAHLRRVRSKPEAGSAWIKGVLARRPVKVAVVAQAAKTARILWAMLRSGQQYRAPAAA

SEQ ID NO: 427462 - protein, 382 aa, unidentified
MDEVETLYKRCAGLDVHSETIVACVLLGDSEADMEKETETFPTLTKDLFRLLKWLEEKGVTHIAMESTGVYWKPVYNILEDFFDITLANAQRIKNVPGRKTDVSDAEWIAKLLRHGLIEKSFVPPEDFRNLRDLTRLRKKWIGHMTSEKNRIQKVLETSNIKLSTVISDVFGVSGRKLLEQLMTEGYIDQEEVEKKIHGRMAHKKQLIADSLFGTLNDHQLFLIKQSWMHIIYLEELISDIEKRIDKTLLNYQEEVQLLITMPGIKKDTAAIIIAEIGVDMEQFPTSKHLAAWAGLSPGNYESAGKRKSTRTLRGNPHIKSALCEAAWAVSRSRNKRLGIKYWSLAARRGKKKALVAIGHRMLTIVYHMLQNKEPYHELTSN

SEQ ID NO: 427463 - protein, 409 aa, unidentified
MKLFVGIDVDSEFLKAHIMNQDGDSLKALSVKNNLNGAELLRDEVISLADELSSREMQIGMESTSVYSFHPAMFFNEDEALRKRQAKVYVINATLISKFKKSYPELPKTDHIDAWIIADRLRFGRVPCTFILNEQYLALQRLTRMRFRLVHNMTREKQYFLQNLFLKCNAFKSEVDSSAFGNAMMELFLESYSIDEIASMEIEVLADYLREKGKNRFPDPDGVAKCIQKAARSSYRLSKCVENSIDILLATSIESIRSLKNQIKHLDKSIANLVDGIPNTLQTIPGIGPVCTAAILAEIGDIHRFKGQASLAKYAGLSWGKHQSGKFEADETRLARSGNRYLRYYLVEAANLVKNHDAEFKEYYRKKYNESAKHKHKRALVLTARKLVRLIDALLRNDQIYTPRRKVDR

SEQ ID NO: 427464 - protein, 392 aa, unidentified
MYIVGIDIGKNHHEASIVSPEGKQIGRSLRFATTHKGADSLMSFIFKNIGNSPCVFGMEATGHYWYPIYSFLKAKGYTIYVINPIQSDSLRKMYIRQTKNDSIDSFLIAEVIRFGQFGTTSMADETILAMRQLCRYRDSVISSRTEIKLRIGTIMEQIFPEYEKQFSSLWVSTSMGILEKYLTPENIENAPIDELFEIIKDKSHNRLTKAKAISIKEAAADTFGIKIAQDAFSFQLKQLIDRMNFLDKQIEALDIEIMKYYEQFDCYLHTIPGIGIIGAATILAEIGDISRFKNSSALVAFAGIDPTVRQSGEFNSTHNHMSKRGSPYLRHAIFLAATTCSFHNSPLNAYYKKKRDQGKHHLTATGAVARKLTTVIYAVLRDSKPYEPKKFC

SEQ ID NO: 427465 - protein, 453 aa, unidentified
MVVVFVRGAEQAEFVSRLRGVSSDRVLLVPVDVGKRSAMSMVANQLGEVIVDPFEFLLDRSGVDLLLDRVADAEETGDAVVVRFGIEAAGHYHRTLTTALQTEQVEVVELHPGAVHRARAEMGQRRLKSDLRDLAAMVELMARGTGRSSRWEDSPIAIQAVWSTHRRRKVKARVTMGLQLLSQLDLVFPGLGDCFKDVIRAKGGHAILRHCPDPVRIQRMGPEGLRSFVGNRGVRMARSKAALIVATAQRALLVPDTERRARMRVLQADMAIYDKICTEIDRAETELAAVIGDTPAGVLTSLPGVGITRASAYGAALGDPWRFASAASAWRYSGLVPVEHESAGTRRAGMRISREGSTPLREAILEIGKGLSDHHPEFKAYKRRKIAQGKKKTVAAVAVAHRAHRLAFTMTRTQTLFDPNLWHQSTVGRPVTATKSDRHDVTRPPPTTMIASR

SEQ ID NO: 427466 - protein, 378 aa, unidentified
MHSMKHQDTLVIGGVDSHADTHHAAAMDQRGALLATKGFPTTTPGYRALLDWLCAFGEVDVVAIESTGSYAAALVRYLREHGVRILEVNQPHAHTRRRRGKSDPIDAEMAARLALSGKATAVPKQTDGIVESIRLLRAARHSAVKSRSSAIVQLGALIITAPQELRDQLASRKTIRGKAALCRRLRPSTDELSRPAHAAKFALRSIAQRIGVLDDEIAILDRQLEQLVSVAAPRTIQLLGISTGHAGRLLVTAGENIERLRGEGAFAALCGVSPVPASSGKTTRHRLNYGGDRQANRTLHLIVVCRLRYCERTRAYAKRRTAEGKTKPEVMRCLKRYVARETYHTLLADLAALQLPTPPATTTINCGAGPIGITRMRT

SEQ ID NO: 427467 - protein, 340 aa, unidentified
MKEVITVGLDIAKHVFQVHGVDQDGNAVLRRKLRRAEVVSFFDELSPCLIGIEACATAHHWARVLMNLGHEVRLMPASYVKPYVKRQKNDATDAEAICEAVTRPTMRFVPVKSQEQQSVLMLHRARELLVRQRTMLINALRAHFAELGIIMRQGSAGVGTLIGLIEDDEHDLVPDFTRRALIPLAEQLRELYRRIAELDQEIICWHRTSELSRRLETIPGVGPITASALSATITDASLFKSGRQMAAWLGLVPRQSSSGGKERLGRISKKGDPYVRKLLVVGAHAVLRFSRKGGTGPKKWAAELLARKPHNVVAVALANKMARVAWAMMMSGERYRSIPV

SEQ ID NO: 427468 - protein, 365 aa, unidentified
MKKSSTVKRTSKQVKKSGQFTVGLDLGDRNSRYCVLNEHGDVVREERIVTTQKAFQEAFGEMVRARIALETGTHSPWVSRCLEELGHEVIVANARRVRLITESSSKDDRLDAKKLARLARIDPDLLSPVRHRSKEAQTDLMMIRARAALVSARTKLINTARGITKSYGERMRKCGGHQMGEELAASLSPELRFALQPLLAEIEALTQRIKEYNRRIERLAKERYPETALLTQIKGVGPLIALTYVLTIEDPHRFQRSRDAGAFVGLRPKRRDSGSTSPQLRISKEGDSYLRTMMIQGAQFILGPFGEDSDLRRWGLGLAEHGGKNGKKRAIVAVARKLAVLLHKLWVSGEVYVPLHAQTRQEVAA

SEQ ID NO: 427469 - protein, 316 aa, unidentified
MNTNTEIIVGIDISKKNLDIQIQEDGAYFTCGNDLIGIDKLVEKLSSVHPALIVLEATGGYEKGLVSALVEAELPVAMVTPSWVRFFAKSSGTLAKTDKIDAKMLVRYGRANHPPVVIMRSKQQEDLSELMTRRSQVSLALITEKNHLETATSAVVKKSVQESILFLKQEIEKLESEIAEIIKQNPTLEHNEQLISSIPGAGKITAAILLADLPELGTLDHKKIAALVGVAPFNRDSGYYRGKRRIKGGRKAIRKVLFMTALTAIRCNPVIKEFYERLLARGKVKKVAIVACMHKLLTFINAMIRSQTPWKPKIAS

SEQ ID NO: 427470 - protein, 340 aa, unidentified
MSDSTPYRLYVGVDVAAQTVTAAWMEPGGTPSPALTVAQIPSGFAALQTRLTETGHAPAVTLVVMEATGPYWVTLATTLTQAGFAVAIVNPAQAHHFAKALLKRAKTDAIDARTLAQLAATLQPTPWTPPPAVYTEIQQRLSQRDALVGMRQQARNQRHALVQLPMVVVAVRERLDVLIATLDAQIEATEAELTEVMRQDPGWAANADLLLSITGIGLLTAAWLLVATVNFTLCPTVEAATAYVGLAPYPRESGTSVRGRPAIGHGGHRRLRTALYLATLSAAQHNPLIKTFYERLKANGKPKKVARCAAARKLLHLAWAVVHSGRAFDPAYGQDTLSAA

SEQ ID NO: 427471 - protein, 465 aa, unidentified
MTAGNKLWRNRKERKEWARRLQSEDPGLEVVHPHAAGIDVGNSAHDVAVRPDRDSEPVRRFECFTADLHRIADWWQSCGVETVAMQSTGVYWIPLYEILEERGLEVYLVNARHTKNLPGRKSDVQESQWLLKLHTYGLLNNSFQPVSEIRGLRTYWRQRGEHVRGAATCIQRMQKALTQMNVQLANVISDISGLTGQLIIRAIVAGDRDPRKLAGLSDRRVHASQEEIAKSLEGNWRPELLFVLQQEIDMYDTYQKRIVECDRQLQKQLARLTGVTPPGKEPRQKPKTKPAAAKNAPRFDLSSELQRVTGVDLTRIDGIDVMVAQTLLSEVGLDMSRWKTESHFASWLGLCPENRISGDKVLARGTRRVVNRAATALRQAANTLIRSRSYLGAQYRRLRTKLGAPKAITAMAHRLARLVYRMLKYGQAYVDKGTEYYEERFRQQQIQLLRKRAAKLGLQIAEIQA

SEQ ID NO: 427472 - protein, 406 aa, unidentified
MMTSNTRRVTGGVDTHGEVHVAVAVDTRSARLFDTASFRADTAGYIELHQWLRSFGELDQIGVESTGSYGAGLTRFLRSQGETVIEVNCPDRRTCRFNGKDDPTDAEAAARAVLAGTATAIPKTSDGPVEAIRALEIAYHSASKDRTRAINQFKALLVSAPAPLREHLAQHSFHRQLQLARRFHDHHDDVVQQELRYTLKELARRLAFLDDQLARLANRIKQHVADTAPALLGLPGVGPHVAAQLLTATGDNPHRLHSDAAFAKLCGACPIPASSGKTIRHRLNPYGDRRANNALFTIVLVRMRHHPPTRAYVARRLAEGKTRKDIMRCLKRFVAREVYQTIIHPPSDVPTGAQIRILRTALGINMTDTGLAVGTTYDAISRLERGIIHDTNLARQTRDWLLTITP

SEQ ID NO: 427473 - protein, 388 aa, unidentified
MDVLYQSCAGIDVHQATVVVCILHGPLTSTRPKREMAQFDTTTKGLKACHDFLSQFHVEAVGMESTGVYWRPVWHELCDDFELILAQPAHMKAIPGQKTDKKDAHWIAQLTRIGLLPRSFVPDETIQELRELTRQRKHYVESRNRETNRIHKILQSGGIKLTTYIEDIMGASGRNLLQLLIDETPVTPRMIHQSVYTSLKRKVPQLLEALDGYFSAHHRFMLGQSLEIYDFYQKQIDCLEERINGYLNLYERPVEILDSIPGMDLITASVIIAEIGVDMSQFPTAGHLASWAGLCPGNNESAGKKRSTKIRHGNSYLKRCLCQAVFAAKRQKGSPLAERYYQIQSRRGPQKATIALAHQLLKIAYILLKENLTYQEFVLQKRLLETSQ

SEQ ID NO: 427474 - protein, 392 aa, unidentified
MDSKVWVGIDAGKEVHWAHALDASGTKILSRRIENDEADLSGLIDEVLALSEEPLWAVDQPGGTSALLLALLWERDQRVLYLPGLAVERAREAYPGESKTDARDAYVIADQARMRSNLAEIVPGEDDLAELQLLLARRRDLVADRTRCINRLRDVLLSLFPALERALDLNAKGALILVRHYQTPGAIRRVGQRRLAAFLKNRGVKGAEEIARKALTAAKAQSVSLPAENVAATISAELAGETLALKESVAALDGELGRRFFARPEARILSSLPGMGPILGSEFLVSVGDLSAFESADQLAAYAGLVPAAHDSGKRVGNHRRMRGGNKVLKRVFYQSAFASLRGSPHSRAFYDRKRREGKKHTQALISLARRRVNVLWAMLRDGTTFEPPLRA

SEQ ID NO: 427475 - protein, 413 aa, unidentified
MQEILDRCAGLDIHKNTIVCCIMIGAGSSMYKEIRTFGTMTDDIRELGKWLEHHGIKDVAMESTGVYWKPIFNVLDGDFNLTLANARNIKNVPGRKTDVKDSEWICKLFKNGLIEKSFIPPESIRFLRDLTRYRRSLLNQLTSAKNRLIKTLESANIKLSSVFSNVRGKTAWNIIKMMAAGQDCVDILSANIPKNVKATRKDIRKALTGTLQQHHLNLLNLMIREIENLEALILDVENEITTHLNQYEREVNLLKTIPGIGDASVATIIAEIGINMNQFPTAKHLTSWAGVAPGNNESAGKQKSTRINPGNKHLKIILIQVALAAIKDKDSYYHASYKRLALRIGHKKALVAIARKILVAAYFVIDQTQPYKELGANFLDDKTRDRKVNYYKKQLEILGQNVVLVNSENTISA

SEQ ID NO: 427476 - protein, 420 aa, unidentified
MKAFAVEDFAALIGIDWADKKHDVCEHLNHSNEHQYSVISSKPEAIHQWASELASRYPNQKIAVACELQKGPLIYALSKYKHIVTFPINPSSVAKYRKVFSPSGAKNDPTDAFIQVEMLRLFMDKLRALEPESCSVRALAQIVENRRNLVQDRVDITNKITSSLKNYFPQVIDWFIEKDTAIFCDFLSRWPSLKEAKKARKQSLMIFFNQHNSRNPRLNETRINAIKEAVLLTEDEGVVAPNKLYIEALVPQLKVLNESIVTFEKAIKQYYKAQRDKAIFDSFPGSGPQLSPRLFVAFGTNRERYKEATELQKYGGIAPVTEQSGKKQWIHWRYSCPTFLRQTFVEWAGQTVRYSFWARAYYEQQQAKGKPRNTIIRSLAFKWIRIAFRCWQTRTPYSESKYLEALKRRGSPLLKFAAQR

SEQ ID NO: 427477 - protein, 425 aa, unidentified
MEPNSHNQEVPFHQQFLAFAGFDWASDHHDVVVLDPQGAILLDLTFADDADGWADLGRRLRDELGLEPSRLAVTIETNNGPAVERLLALGVVIYPLNPKAAQRYRDRKNPAGCKTDHLDALSFADALRTDGHGWRRLKADDPITQELRLLCRDEVHLIAQRTALVNQLRAALREYYPAALEAFDDWVSDGPWAFIQAFPTPRDLVKAGKRRWEKFLHTHRLYRPETYAKRLEIFARADQFCGIAPVTRAKSRLALTLVGQLRLLHARLGEYRQSIETLFAQHPDHDLFGSLPGAGPKIAPRLLSELGNDPTRFASAQSLQCYGGTAPVTKQSGHNRWVSFRRACNKQLRYALHLWADKSRSQCVWAQAYYQRKRDQGKSHAAALRCLGQRWLKILWTMWHHGTVYDEALHTRNQVHHGSWVVQLT

SEQ ID NO: 427478 - protein, 415 aa, unidentified
MKGTEDTRQIERYIAPDIHKEYVLAGGQNAKQEWVMPPRRISMAKFREWASANLQEGDAVVIETTTNVWDIYDSVAPLVTRTVVAHAGAVRQIAEARVKTDKEDVKRLIRLLIADIVPEVWVPPVEVRELRGLISYRNRLVKTSTMIRNRLQSLLHRHNILLPKGSLQDAARWQAQQMSGLEKMQIQQELVLLEEIDKHKAEVDAELGRQCLREPWGKQAVRLLQLPGFGVVMSMIVLSAIGDIQRFASAKHLVGYAGLGAGVHESGKEHIEKRITKSGRKELRWALVEAAWQAIRISPYWKEQYEKYLRRMRRPNQAIVVIARKLLVAVWHVLTKEETDIHASEEDLAYKMLVLAWDLDENVRLGLTYKQFAKYALMKLGIETDITRFVRRNVPRRIAPRAEVLARMEELGLTC

SEQ ID NO: 427479 - protein, 340 aa, unidentified
MAYAAIDLHVRRSEVLIVDDAGELLLARRIDTQREQLGRIFADRPPMRILLESCTHSEWVAQCLEGYGHEVIVADPNYAPMYEQRVRKIKTDRRDVAALARACRLGIYRRAHRVSAEQRHRRRTLRVRRHLVQMRGRAVQLIGAYLRQEGLRLPRGGAETALVRLARVSMPGSLRTVLQPLREVLATLADTIARADAAIAVVAHEDAVIKRLMTAPGVGPIVAATFSAVLDSADRFDGDVRRATAFVGLVPREYSSGERRYQGRITKGGPSELRSLLIQSSWTIWRSRSAQAGRLRAWAHALAARRGRQVAVVALARRLTRILVAMWRDGTDFQWTPHVA

SEQ ID NO: 427480 - protein, 344 aa, unidentified
MNFTRCGLDIAKQVFQVHAVNEHGLAKGRKTLQRGKVLEYFARLPPCLIGIEACGGAHYWARALSKLGHTVKLMAPQFVIPYRKRGKNDANDAEAICEAVGRPNMHFVAVKTEEQQAVLMVHRARSLVVANRTALVNQIRGLLAEFGLVVPKGIARLRAQLPRILEDAENGLPPLAGEVLSALLEQFHELDQRIQQYDLKIRELARQSEPARRLMQVESIGPMTATAVVASMGDPHAFNSARNYAASLGLTPRQYSSGGTTRLGPITKQGDRYVRTLLVHGARAYLRVVDKKTDGKGAWARGVKERRHVNIAAVALAAKHARIAWAMLANNTEYRPTQLKEAAA

SEQ ID NO: 427481 - protein, 342 aa, unidentified
MVQPVTVGLDIAKNVFHAFGADAQGAKVFSRKLRRGQVEAFFSKLQPCLIGIEACATAHHWARTFQTMGHKVRLMPPAYVKPYVKTQKNDEADAEAICEAVTRPNMRFADIKTVDQQSVLVLHRTRTILIKHRTRMGNTIRAHLAEFGITESLGREGLARLIDMIVTGKDGRITEIIRRAMMCLVDQYRLLQDQILDLDRQVMAWHRSSETSKRLATIPGIGPLAASALVASVGNASSFKNGRSFAAFIGLVPRQSSSGGKERLGKISKRGDHYLRWLLVVGSLAVIRYAQRHGTRRPWLVKLLQRRTAKIAAVALANKLARIAWVLMTRGGAYREPVPQAA

SEQ ID NO: 427482 - protein, 406 aa, unidentified
MNAVGIDVSKGKSMVAIMRPFGEIVSAPFEIKHTASDIHSLIELINSVEGESRIVMEHTGRYYEVLAHQLLEANLFVSAINPKLIKDFDNDSLRKVKSDKADAVKIARYALDKWQNLKQYNVMNELRNQLKTMNRQFGFYMKHKTAMKNNLIGILDQTYPGVNTYFDSPARSDGSQKWVDFASTYWHVDCVRKMSLNAFIDHYQNWCKRKKYNFSQSKAEEIYGKAKELVPVLPKDAITKLIIKQAVDQLNSASTTVESLRTLMNETASKLPEYPVVMAMKGVGTSLGPQLMAEIGNVSRFTHKSAITAFAGVDPGVNESGTYEQKSVPTSKRGSADLRKTLFQVMDVLIKTHPQDDPVYQFLDKKRAQGKPYYVYMTAGANKFLRNLLRTSERISFISSRILIIH

SEQ ID NO: 427483 - protein, 420 aa, unidentified
MIPAVIERCAGIDVGRKFVDVCIMVGDAAAVPTEQPRRFSTLNEDLEKLRQWLHENGVTHVVMESTGSYWRPIHNVLDDGGLEVLLANPQHVKNLRGHKTDRNDARWLAHLLRHGMIRPSFIPDRDTRQLRDLTRRRKQMVCCAADERNRVQRVLQEANVQLGAVLSDVFGESGLSMLDALMNPDASPEQIAELAVRQARKKIPELRKALEGHRMTDHHRKLIRHSMEHLAFLEEEIAELDGEIAEHVADHTALRAASELAQSIPGIRQTAAAAIIAETGPDMNQFPGPDKLASWLGTCPGNNITGGKRKSGHTRKGNPWARRILVECAWSATRKKDSEPQRYYERLKPRLKHKPALIATAHLLTVKLYQVLATGKPYAADPQPQLTETKAERLVRHHTHRLKKLNRWLSGHRQRCGPTS

SEQ ID NO: 427484 - protein, 477 aa, unidentified
MAIKHNAATEAKPNRKQRREQQRKIWTDNPGLDVVHPNAAGIDVGNSEHYVAIAPDKSAEPVRRFGCFTADLRELAGFLKEHGVVTVAMQSTGVYWIPLYDVLEEAGLEVYLVNARDTKNLPGRKSDVQESQWLLKLHTYGLLRNSFHPTSEIRVLRAYWRQRAEHIHTATECVQRMQKALTQMNLQLANVISDIMGVTGQAILRAIVAGERDAEKLAKLRNWRIQASQEEIVASLTGNWREELVFALGQEVARYDFCRQQIRECDREIERHLGSLPARPQEVAQSGEAELPPQKRKKATGNEPAFDLAGALIRIAGVDFTRIDGISVLTTQTVISEVGLDMEKFKTEGHFASFLGLCPFNAVSGGKVLRRGTRKVVNRAATAFRIAAFTLKNSNSYLGAQYRRFRSKLGAPKAITAMAHKLAVLFYRMLRYGQEYVDRGQQFYEEKYRQQQISLLNKKAAQLGFSIVPAANAQVTA

SEQ ID NO: 427485 - protein, 362 aa, unidentified
MEKSSKVFVGMDVHKESIDITLAEVGGEVRRLGQIGGDRGSLLKMVRKQQSKGGERVFVYEAGPCGFWIHRELAALGERCMVVSPALVPKRAGDHVKTDRRDSERLASLARAGELEAIHVPDIRDEAIRDLVRGRDDAVIAQRRVRQQLKALLLRNDIRYVGKTSWSGAHRRWLSELKLPEPAQQIVFEEYVDAIAVATARIERLTRAIESEVTTWRFAPVVAALQAMRGIQFVHAVTLIAELGDLTRFGSARQLMGYLGLVPREDSSGEHRRQGSITKAGNSYARRVLIEAAWAYRHPARVTRIIATRQTGLPKAACDIAWRAQLRLSAKYRRALGLCLGHRPQRQAAVSRTMATVHRVPL

SEQ ID NO: 427486 - protein, 407 aa, unidentified
MAKVIIGVDPHKLSATIEVVDSHEKLLGSGRFSTDQPGYTAMRAYAKTWPERIWAIEGSNGAGRPLAQRLLEAGEHVVDVPAKLAARVRLFDTGHNRKTDALDAHSIAIVAVRTKTLRVLRPDGELEALRMLCDRREELTRLRVQTVNRLHRLLAELVPGKAKKDLTALQAKAILATVRPRDIAGKTRRKIAAEELADLLTVEAKMKKATAELKVLVKTRGSRLMDLHGVGPVVAARTLADVGDIARFADRNRFASWTGTAPLDASSGEQNRHRLSRAGNRRMNHMIHIAAVSQIRLDTDGRAYYRRKQAAGKTKLEALRCLKRRISDALYRQLLADAEQAQLLCAAEPVDTGPGGHCGASQESSAVDLPPHIDTSDQPLPGPATQTLQPARPTGKTSQPRTPQTTG

SEQ ID NO: 427487 - protein, 348 aa, unidentified
MSQTLSTVTVIGIDIGKNSFHVVGLDRHGALVLRQKWSRGQVEARLANMAPCLIGMEACFGAHYLSRKLKALGHDARLMPAKYVRPYSKGQKNDFRDAEAIAEAVQRPTMKFVVTKTAEQLDLQALHRVRERLVSQRTGIINQIRAFLLERGVAVRQGFRFLRAELPRILAAPPEVLSPRMVRIIGGLAEDWRRLDERIDCLSGEITALARQDAGCERLVSVPGIGPIISSAMVAAIGTGEAFSKGRDFAAWLGLVPKQLSTGDRTILGKISKRGNRYLRVLFVQAAWVVLIKPQSWERHGLKHWIEAAKKRLHRNVLAIALANKLARVAWSVLARSRIFEASKLQAV

SEQ ID NO: 427488 - protein, 344 aa, unidentified
MQPQEYVGIDLHRRRSVIVRRSAEGETLEVTKVDNDDLLAFERAVTAAGEHPEVVLEACYGWYWATDLLEELGCKVHLAHPLGNNWGNRRVKNDTRDAEDLADLLRLGRLAEAWIAPPEVRELRELVRYRAKLVSLRTNCKLQVYAVLAKEGVYVPMTDLFGVSGSELLETCHLSTAYRTRVESLRDLIEVFDREITKLEADVRHELRGQVGYEAIQQIPGVGPLFASVFVAEIGDVTRFRSPAQLASWAGLTPKHHESDLTVHRGPITKQGSRLVRWAAVEAAQRQANGTKLRADFVRITAHHGDSAGARKIARVAVARKIVTLVYYGLRDGTIRYKAISEAA

SEQ ID NO: 427489 - protein, 430 aa, unidentified
MNTNTKLEAITEQTMVVGIDVSKKDHLARVFDYRGTELCKKIEFGNSREGFCSFTGRIEALKAEHMKPDIIIGLEPTGVYGHVLISYLKDKGYNVVYTLGMQVKRAKELEDNSPAKNDFKDAKTIASLVNSGYYFDIRTYSREIAELKEATGFAYQLTKKLTRVKCQIKDCLTEYFPEFTTAFKSFAYSGRSSSNKTALVTLHLFPLPCQVDALTAEEIVEAWRAAGVKKGIGIKKARQLKQLAAGTVGLEATESVRIKFRGLMDELDLLTGQEAGIWQRVRALVEGNADFQAINAIPYLSLRLAANLLAEVGDFRDFSHPQQLVRLAGLNLKESSSGKSRGRSEITKRGRAGLRRTLYFIILEQLKNAAPGWHQLHRHNTTRKDNPLKKMQSVIALCCKFLRTVWGMIRNGTDYDPQMLMPNRAASRMA

SEQ ID NO: 427490 - protein, 347 aa, unidentified
MPSENTVHIAIELSFSSWLVAARLTGAKKSRLHRIEGGDTGALLALIAELRSRALTQLGGAAEVACCFEAGRDGFWLHRLLTAHGILVYVLEPTSILVNRRSRRAKTDRLDAEGMLRVLAAWLGGDRQVCSMVRVPTPEEEDGKRPHRERERLVQEKLRIENRIEALLFTQGIRARPSLRSWERELTELRTGDGRTLPPLLRAELDRLRRRLVLILELIRELEAERAAALAAAPDEAMAQKITSLQRVRGIGANFSAVLVREVLYRSFANRRQLASYVGVAPMPFQSGGMDRDRSISRAGNPRARTTLIQLAWLWLRYQPGSALATWFRARWHPAGAHAPHRHRRPG

SEQ ID NO: 427491 - protein, 413 aa, unidentified
MKRIRDRVAGLDVHRDTVMAAAWVLDRVTGEVVEDQEEFSTMSSGIARLGRWLLDRGVTTVGMESTGNYWKPVYYGLEGMFEELWVCNAQHVKNVPGRKTDLSDAMWLADVMAHGMVRASFVPPEPIRELRDLTRYRRSQVDIRGRELQRLEKVLQDAGIKITSVASKVWSLSSRRMIEALIAGERDPAVLANKAVGKMRPKTARLTEALSGHWRDHHSLVAAEIIAHIDHLDASIDALSQAIGQRLGPFEDLIDKMCEVPGISRTTAEIVVAETGADMSRFPTPQQLCAWAGLAPASHESAGKRRPAGTRKGQHWLRRALVEAAKSLSRSNNSFLSARYKRIARRRGPNKATVAVAHSTLTILWHLMADPTKRYSDLGADYYQRRRDPEREARALVAKLEHLGYTATIKPAA

SEQ ID NO: 427492 - protein, 368 aa, unidentified
MKKNNTVKQSSKRAPARQPERGTIGMDLGDKTSRYCVLGKKGEEVSEGSVATTKKAMTQKFSTMRRCRVAVEVGTHSPWVSRLLTGLGFEVIVANARQVQLISASSRKNDRMDARLLARLARVDRELLRPIQHRSEQAQADLMTIRVRAVLVEARTKLVNATRGFAKTLGERLPACDADSMGVEKMEELPAQVQDRLRPLLEEVESMTEQIKQLDTKIEQIARTQYPETVLLRQVSGVGTLIALTFVLTVGDKERFQKSRDVGCYVGLRPKQSESGQSQPQLPITKEGDRYLRTLLVQGAHYILGWRGPDTDLRRWGLKLAERGGKNAKKRAVVAVARKLAVLLHRLWVCGEVYEPLRNSQAASRKAA

SEQ ID NO: 427493 - protein, 434 aa, unidentified
MEEVEDEPLFCDRVAGIDIGKAAVMVTVRVPSEARKGGRQQETREFGTTRRELLALADWLRSWQVEKAGMESTSDYWKPVYFLLEREGLDCILYQASQVKVLPGRPKTDKLDSVWLAKVTERGSLAGSFVPPEEIRRLRTHTRYRRKLTQMRTAQKERCEKLLEDAHLKLSSVISDIHGVSGRSMLRAIAAGERSPRVLAEMARGVMRRKTARLEEALDCSFFTEEHAFILTMMLDSIDQLTAQIAVLDEKITAMCKPYEQQIARLDAIPGFGVVTAQDLIAEIGVDMSVFPTAGHLASWARQTPRVTESAGKRKGKNATGRGNPYIGGALGEAAISTGRTQSFLGAKYRRLCTHMPKKKAQVAIMRTQLVIAHAILSDPEAEYHDLGPDYYERRADTSRRARSHARALERLGYKVTLEAPDPETGEYLPVTTS

SEQ ID NO: 427494 - protein, 419 aa, unidentified
MKNSKSKKVKFINTKTMIAALDIGKNTHYAYFRSPNGKDIKPFPFGNFREDFCKFWTKLSQFKMDHSLEDVVIGFESSGPYAEPLFHYLRKKPVKLVQINPMHSKRIKELTGNSPNKTDKKDPRVIADVISLGHALTLVVPEGAAANLRRLTQARERALKKRTAATNQVQDLVFIIFPEFLTIMKGIATETAFYLLERYPAPEAIVSLGIEPLAAEIRRVSRGKLKRERAEELFNAARESVGINEGKDGILLEIAHLLFQIRNEDKFISDLEKEMEERLTEIPYSRSILSIKGVGIVTVAGLIGEVGDFRKFNTMSEITKIAGLDLYEISSGKHKGRLSISKRGRPLIRKLLFFASINVVKSNGIMNKPYQQMLDRGMLKMKALVAISRKLLGLIFALVRDNTEYIENYDHVHHFKLAA

SEQ ID NO: 427495 - protein, 367 aa, unidentified
MKKISTVVARQSKNFREQKLTIGLDLGDRSSWYCVLDEGGEVLLEQRLGTTPKAMKEVFGEMPRSRMALETGMHSPWVSRLLSELGHEVIVAHARNVRLIGESRRKDDRFDARTLARLARIDPQLLAPVQHRSAHAQAHLMVIRARAGLVRTRTSLINTARGLTKSYGERLRGCSPRNMNAEKAQSLSPELQAALEPLLAAIESLSERIYEYNQQIAKIARESYPQVARLEQVKGVGTLIALTYVLTLEDGQRFRKSRDVGCYVGLQPGRRNSGQSEPQLHISKEGDPYLRTLLVQGAHHILGPFGADSDLRRWGLKLAERGGKNGKKRAVIATARKLAVLLHRLWVSGEAYEPLRNSRAMPLPAAA

SEQ ID NO: 427496 - protein, 341 aa, unidentified
MKHKTITIDLAKNVFQVCGVNEHIKPQFNKKLKRNELLDFMRQQLPTVVVMEACYSSHYWGREIAKLGHDTKLIPAQHVTPFVRGNKNDHNDAFAIAEASQRANIRFVPVKSEHQQEISCLHRIRERLVKNKTAMSNQARGLLSEFGVVFPCGHKALLNGLASVIDNPQYSHRLQDMVIDMLNEYNTTFKRLKDIEKQLGEFVDDSESGKILRSIPGIGVINASALLAAIDKGQAFNNPKEFAVWLGLTPKQHASGNISKMGGITKRGDRYLRKQLIHGARAFVCRAAKSTDPLALWAMKLRATKPFNKVAVAVAHRLARLIWILLTRQERYCAESSQVSA

SEQ ID NO: 427497 - protein, 404 aa, unidentified
MYNAVGIDVSKDKSTVAVLQSEGTFVGKPFDVSHSSSELKSLADYILSLNGKTKVVMECTGRYHEPILRYLSDAGIYVSAVNPRLIKNFGNNTIRKVKSDSADSKKIARFTLDNWAQLRQYSSMDTTRAQLKTLNAQMDFFTKQKIAAKTNLISLLDMTYPGVNELFDSSPRDDGSDKWVDYAYAFWHVDCVRNLGQSRFTTRYRSFCKKHGYNFQPAKAIKLFNDSKELVPVFPKEKQYKDMIRMCINQLNVISANVETTRQEMNRLASTLPEYNIVMSMKGVGPTFGPQLIAEIGDISRFNHREALTAYAGVDPGVNQSGNFKSKSNRASKCGQPRLRKTLFLIMKALLQLKPDDPVYRFMDKKRSEGKPYRVYMTAGANKFLRIYYGKVKEYYREHPEIES

SEQ ID NO: 427498 - protein, 368 aa, unidentified
MTTGQRSTSSTSKGPPARGEAVLGVDTHGEVHVAAVVSPLGRILGTRSFPATAAGYRQLLAWARALGMVRRAGVEGTGTFGAGLSRYLLAQHVAVFEVNRPDRSARRLLGKSDPLDAQAAARAVLSGRARARAKSGDGPVQSARMFKLAKDSAVKARTQAINQLKSVLVITDPALRERLSGLGNRELFRTCARLGPCEGEAGGGDEDVTDATFVALSMLAQRIEQLTGQIDELNQRLAGLVERHAPQLLAPVGIGPDSAVTLLITMGDNPERLSTEASFAALCGVSPIEYSSGGRSSHRLNRGGDRQANAALHRIVFTRLRHDPRTQAYYERRTQEGKTRREIIRCLKRYAAREVFNLVRTVSTDPPI

SEQ ID NO: 427499 - protein, 344 aa, unidentified
MNHYAAIDVSLELSSVCIVDATGKVVKETKVEAHPEALVKFFKDIGLPLTRIGLEAGPLSQWLYAGLTEAGFETTLMETRHVKAALSAMTVKTDRRDARGMAQLLRMGWFRPVHAKSPGSQEVRALLVARKQLQHKLTDIELSIRGILRAFGLKVGQVTDKTFEARIRNLVTGHAMLEQIAEAMLAARATLLIQFNKLHKAVLDIVRHDEVCRRFMTTPSVGAIVAITYKSALDDPSRIKKSRNAGPLFGLTPKRYQSGQTDVTGGITRVGDEMVRTVLYEAANVLLSRVTRFSALKRWGLEVAKRRGLKRAKVAVARKLAVILHRMWVDGTTFRWTTPEAARA

SEQ ID NO: 427500 - protein, 444 aa, unidentified
MACSGMILIREVADAPVIMGISKPAGLKSPCGEVKIVNPLFVGIDVSSRSNVAYLMKPDGSKYSSFSVQNNLGGAKLLSERIVSALHSMQLSDVVIGLEATSIYGDSLVYALREDGGLGRFQRKIHVLNPKQVKKFKEAYPDLPKNDFVDAFVIADHLRFGRIAKEVYMDDYRYQALRTLTRARFDVIQNLTREKQRFANYLFLKCSGIAQDKGIQNTSATTIALMERFETVDDLANADLEELTAFVAETGRGRFVDPESTAKVVRAAARGSYRLPKTVNDTVNQAMAVSIASMRALKEQVKVLDKAIEQEFEIIPNTLISIPGIGKVYSAGIIAEIGDIHRFSSQASVAKFAGLVWTQHQSGEFEAEHSRMIKSGNRYLRYYLLEAANSVRRCDSEFRRYYDLKYHEVNKYQHKRALALTARKLVRLVFRLLKDNRLYIPPEG

SEQ ID NO: 427501 - protein, 423 aa, unidentified
MMKLKYSICCGLDVHKNVIVATIVTTNKDGISEYLQKSFSTINSDIQRFHNWLIENNCYHVCMESTGKYWIPIFNYLENDIDICLTHPKYVKAIKGKKTDKKDSKWIADLYKFDLVRCSFIPPKDFRQLRELARYRFKLVCMKSSEKNRIQNCMTISNVGIASVLSDPFGKTATEIMSYLLEHTADSMDEKAVRKLIKKGAKSKSDEIIEAIKGYTIETDQAKKLELARGHLEYLDDMITQTEVELYVRIKPYYEFVEFVSTMPGMTELSSTIVLAETGVDMDIFDDAKHLCSWCGLSPANNESAGKKKSVRIAKAGDYLKPMMVQCALAAIKSKKQPYFAIKYGRIKKRRGHKKAIIAIARMMMVCIYHMVSEKKPFTPTDYEELMNPQNHVESVVLNENNVFAYLESLGYDSSKLVKRNDN

SEQ ID NO: 427502 - protein, 348 aa, unidentified
MTVFVGLDISLDETHICVVDQEGKTLKETKVMTEPEAIVPVLRGFGDQIKRVGFEASSLSPWLSNELIKLGFPAIIVETRHMASALGAMRNKTDKNDARGLAQMMRTGWYRAVHVKSDNNHRLRILLTNRRILKRKFLDIENAIRGTLKVFGVKMTRTTRGRFEQDLTIKLADEDPMLREMTQSMLEARRTLLEQHNRCHKLVLQVVRGDDVCRRFMTVPGVGPITALGFKTTIDDPTRFKKSKTVGAHLGLTPKRYQSGTVDYEGRISKCGDPEMRTLLYEAASSLLTRVQSWSVLKAWGMSVQKRAGKRRATVAVARKLSVILHRMWMDGTEFKASRNELDTAKPA

SEQ ID NO: 427503 - protein, 461 aa, unidentified
MKKPKKPKNPKKPNKKSQLPQHLQQLNLYAAGIDIGSKSHFVAVPEGADEQPVREFECFTADLHRLVDWLISCGVTTVVMESTGAYWIPLFEILESRGLEVKLVNARHVKNVPGRKTDVSDCQWLQQLHTYGLLAGAFRPPEQVCALRAYVRHRMNQVRYCASHIQHMQKALIQMNLLLHNVVSDITGVTGMRIIKAILDGERNTAVLAGMRDRRCKNRIETIAKSLEGNYRPEHLFSLKQAVETFEFYQTQIAKCDHEIETLLASFDAQSTDNPPTHPNTNDNSTSSKAKGEASAFNLKDELIRIAGVDLTKIDGIDSTTVLKVISEIGVDMNRWKSEKNFTSWLGLSPGNKVTGGKRLSGKTKPVVNRAAAALRLAASSLYRSSCALGAYYRRMKARLGAPKAITATAHKLARLIYSMLKHGTEYTDVGQDYYEQQYKSRAIKNLKTRARQLGFELVET

SEQ ID NO: 427504 - protein, 365 aa, unidentified
MWEAPVKVQRTSVGLDVHARSVVACGLDGDTGELFERRLTPDHGEIVAWLGDLPGPVAATYEAGPTGFVLARSINAAGIRCSVAAPSKLQRPVGDRVKTDIRDARHLARLLHLGEIVEVEIPSVEQESARDLFRAREACRRDLMAARNRLSKLLLRRGIVYYGGAAWSRNHERWLRGQRFDDPALAIAYDTAFDTVLATTARRDRLDAAITAMAADSSFTAVMTRLGCLRGVSTLTAFGLATEIGDWHRLTGRSIGAYLGLVPCEYSSGANRAQGGLTRTGNTHARRLLIEAAWHHRPSYRPGEVMRRRWDAASPAARARGQAANRRLHARWLRFNERKKRPVVANAAIARELAGWCWSLAVMDD

SEQ ID NO: 427505 - protein, 355 aa, unidentified
MTSMTETPPDVSLTIHAGVDTHKHTHHAAIVDHLGRPLADREFPATDAGYHQLLSWLAGTGIIASVGVEGTGSYGAGLTHVLHDAGLTVVEVDRPDRRSRRRHGKSDPLDAYAAATAALTGRATTVPKTHGGDVEAIRFLHNARRSVIKSRAEAITTLKAMIVNAPEPLRAALRGLSDPALFAACAALRPGPIVPGDLTAAVKTALRSLARRIRALTAEGRALRTNIAALVAHTAPRLLERCGVGVETAAQLLITAGDNPGRITSEGAFANLCGVAPIPASSGQTTRYRLNRGGDRQANRALHVIVLSRLKYDDRTRAYRDKRLAQSKSKRDIIRCLKRAVAREIFALLNPANPG

SEQ ID NO: 427506 - protein, 310 aa, unidentified
MPSYEFIGVDVAMEWIDVCYLSDGRHERIKSTKQSLAKFAKQANDAVVVLEASGGYERPLIEALIKAEARFVRVNPRQAREFARATGKLAKTDKVDAAILARMGKALDLVPSPIPDPDRVRLADLVARREDLVAAIQAERNRLGTSRDGWVRREIQRLVATLEDHLKAVEKEIARHIAASGSLLEQARRLRTAPGIGPALVAVILARLPELGRLKAKQIAALAGLAPQACDSGLSRGKRRVWGGRADIRRALYLAGFVASRFDPTLAAFRARLQDLGKPPKLAITACARKLLTIINAMARDATDYTSAVS

SEQ ID NO: 427507 - protein, 350 aa, unidentified
MKVTTIGLDLAKNVFQVHGADAHGTPLLRKQLRRAQMAEFFAQQPPCVVAMEACAGAHHWGRKLRSLGHQVRLIAPQYVKPYVKSQKNDAADAAAICEAATRGHMRFVALKTVDQQSLLALHTVRSGFVKQRTALSNQIRGLLAEFGVVIPQGLSKLAEQLPVVLAEHNNELTGVMRELLQMLQTQLSHIDELVARLERQIRVWANQDEDAKRLQQIPGIGPITASALAASVGDARQFEDGRQMSAWMGLVPRQHSSGGKSVLLGITKRGDKYLRTLLIHGARAALKAYQRNPAKMPEHLAQLLQRKHPNVVCVALASRNARVAWAMLTRREDYQGRDTVKAGALPAALA

SEQ ID NO: 427508 - protein, 347 aa, unidentified
MEFVKTDHEFYCGIDLHAKSMYVCIQNKSGDVLFHRNLKNDFPLLLQTLQPYQKDIAVGVESTFNWYWLADGCHQANIPFFLGHALYMKAIHGGKKKNDRVDSKTLADLLRANLFPAAYPYPQEMRATRDLLRRRHRYVALRAEGYTHIQNTFSQQAVLDICPQDVKKKATRRQLPERLDHPDLAMSVDCDLDHIQALDAIICKVEKQILAQAKHHDRNALSILMSVPGVGEMLAMTILYEIHTIARFKSAQHFSSYCRLVKIEKTSAGKTVGKENSKIGNPHLKWAFSEIILRAQVYSQSINAYYEKLKSKHGPAKAKSLIAHKFGVAVYYMLKNGQAFDEKRFVS

SEQ ID NO: 427509 - protein, 357 aa, unidentified
MGKSIPNLSTVTRVGLDLAKRVFQVHAVDAKGEIVVARKLTRSQLIPFFAELPLCVVAMEACSSAHYWGRALIELGHEVRLIPPAHVKPYVRRNKSDQIDAAAIYEAMSRPGQRFVQVRSIDNQAALMRHRARELLAGQRTAALNALRGHLAEIGLIAPQGAQHAYGLKRMAADGFNENGEIVVPDCVRGALRSLVGQIDALDEAIGAIDRELAASVKADETAKRLMTIPGVGPVTASAIMATIQDASAFASGREFAAFLGLTPRQNSTGGKTRLGRITKMGDRYLRKLLVVGACATLRHRRGHSDALRVWASGMLERKTVKYKFNLTAVALANKVARIVFVLMTGGGQYDGRPVAA

SEQ ID NO: 427510 - protein, 461 aa, unidentified
MLLSKEELDRKIEVIKKELRSYTWRDLETNGKFAKNDKLSFITDDMLIAGCDIGSETHYIRAIDVRGRELSSGAFEFSNTSEGFANAKAWVLALAAKNDKKQIVLGLEPTGHYWFALAAWMISNGISVVQVNPYAVKQSKEIEDNSQLKDDRKDPKLIANLVKDGTYGMSYLPEKVYADMRRLSMFRDQLTEDRIRNINRLHRELKIYFPEYMDAFGKIDGAFTLEVLKISAISSDITALGAEGIKNIWHNVKLRGRGYSRANEIVSYAEKSVGLTDGTDAGREAVKWYAEQILRLDEQLAEIESALHEKCREIPYAENILAINGVGENILAGILAEMGDISRFDDVKEIQKLSGMGLVACSSGKHKGQTKISHRGRKRLRYWLFQAAKSAVSHADEFKQLHEYYTTRSNNPLKKMQSLVVIACKILRVIYTILKTGTTYDSQKLLKDIKHPAASQAPMAA

SEQ ID NO: 427511 - protein, 359 aa, unidentified
MRGQRNEISFRGQKIYIGIDVHLKSWSVTVLSETSVLKKFSQHPSPEALHGFLARSYPGAEYHSVYEAGFCGFWIHERLTALGIDHDVVNPGDVPTKSSEKLRKSDAVDSSKLARSLRANELKGIYTPDSASLEMRSLIRLKNSITKDTTRQKNRIKSQLRYLGIGIPQEFLEPFSNWSKRFIAWLKEVETLTPSGRQAFDIQIRHLEELRRQKLEMTRALRTLAKTDRFREPLRLIMTVPGFGQATGMAFLSEICDIAHFRNAEQLAAYIGMIPMCHSSGEKDGTGDITVRRNAVMRCNLIEAAWVAVRQDPAMNLFFTEQCKRMPKSKAIVKVARKLVNRLYFVLKHQTDYVNSVMS

SEQ ID NO: 427512 - protein, 355 aa, unidentified
MNEIKYIGMDVHQTSTSIAVLNASGRVLTSAVVETQGHTLVAFIQGLRGRLHLTFEEGTYAAWLYDLLAPHVSRLVVCDPRRNALLKSGSKNDPVDAHKLADLLRLNALRPVYHGKHSLGTLKELSRSYLALVQDSTRVMNRIKALYRSRGIPCTGTKVYSPCQRANWVEQLQQAGVHQRAELLYRQLDLLSLLRREAKRALLAESRKHSVSRILRPVPGLGAVRVAVLLAMVQTPFRFRSKRLFWAYVGLGLVTRISAEFALVNGQLKRSGKAPAIRGLNPNHQRELKEIFKSAATAAVHRPGPWQQFYQLRVAAGRKPELVRLTVARKLAAVTLHLWKKGERYDVQQLKPTAV

SEQ ID NO: 427513 - protein, 338 aa, unidentified
MTCIGFDHHKKWTQAAAVDDQGKIIREMRVLNDNSSLKGFLKGLPQPLKGVVEAGPTWGWIYDTLTELGVKMIVANPSAVRAIAEAKIKTDKIDARMLATLLRVGLIPEVYVPTEEVRSQKMLWRERIWLVRMHVRLKNRIHRLLNHYHLEVPEFSDLFGAAGRRFLEELKLPEPGNRILNAQLKLLQSYRLQIEEVQRWAVKATQGHPNRAYLESLPGFGKVFAPIVALEIDDPKRFASPGKLASYCGLVPSLYSSGGKSWQGGIGKDGNHWLKWAFIEAAWAAIRSSAYFRVVYQRLRQRKTAQVSIIACARRLCEIAYHLLKERRCYEERPYRCA

SEQ ID NO: 427514 - protein, 339 aa, unidentified
MTEITRVGLDLAKNVFEVHAVNAQEQVVVRRSLRRSQVLTWFAKQPPCLIGIEACGTANHWARELTTLGHTVRLIPPAYAKQYVRRNKNDAADAAAICEAVSRPSMRFVPIKTVEQQADSVTHKARQILIKQRTMAMNSLRSLMAEFGIVVPQGPQHIGKLLAILADPEDTTVAAVARTALNTMRELLSALEMQIGVLDKDIRARARTDVTARRLDTIPGFGPILSSAIAAIVTDPRHFDSGRDFAASLGLVPRQDGTGGKVKLGPISKRGNGYLRRLLVNGATAVLNGKNARNDPWRAKMLDGKPRKLAAVALANKMARIAWAVMTRQEDFRPRAVPA

SEQ ID NO: 427515 - protein, 348 aa, unidentified
MLADQLDYIVGVDPHRDSHAIAVVHVVDGAVVFEATVIADSDGYGLALRLVDQHAPGRRAFAVEGTGSFGAGLTRFLTVRGERVLEVGRLRRERRSGGKTDALDAVRAARSVLTSERPATPRAGGERQALQALVAAREGAVNAKRAGLCQLRDLLITTPEPLRSELRPLTRARLLQRLAATRPRSRHDAELRGSMLALRSIARRVLQLTAEERELAAEIETITRKLAPQLLDQPGVGPHAAAQLVLSWSHRGRIESEAAFARLAGAAPIPASSGQTIRYRLDRSGDRKLNRALHMILVTRKRSHPATIAYIERRLQEGKTRREANRCLKRYLARSLYRLLEHGAPSAT

SEQ ID NO: 427516 - protein, 485 aa, unidentified
MALVLAVVLGLLILEVAMSRRKPKPTSPDPASLALLHTLHPHAAGIDVGAAELWVCVPPGAVASPHPAAALPAHVRRFGAFTADLYAIAAWLRQCQVTTVAMESTGVYWIPLYDLLESAGFQVLLVDPRQVQRAPNRPKTDVHDCQWIQRLHSLGLLTAAFRPEEPIRVWRSYQRHRASLIEDAGRHLQRIEKALEQMHVKLPEVVSDMTGLTGMSIVRAIVQGERDPKALAKLRDRRCKASAETIARALQGTWQPEHLFALQQSLELYDYYHQQIRECDRVIEAHLQGMALPEVQPLEPKKRVRRRKDNEATFDARQRLHHVAGVDLTAIEGIEESTALVVLSEIGTDMSRWPSEKHFGSWLGLAPNPKKSGGKGQSSATRPGVNRAAQALRLAAKNLQRSKSALGAFFRRIAARRGLAKAITATAYKLARIVYALLKHGTAYVAQGLAAYETAYRERVVRQVKRKAAELGLVIVERDAVGQPS

SEQ ID NO: 427517 - protein, 310 aa, unidentified
MDIITIGIDVSKDRLDVAVRPSGEVFAVERNAVGLEQLVARLRDLSPRVIALEATGGFEVIAAATLAGARLPVAVVNPAQIRAFAKAIGQRAKTDPIDAAVIAHFAEATELEPRPLPDEATRLLGDLITRRRQIVEMIGAERQREKRMAVAHLRKSIARLVKALEKELATLNTDIDDAVRGSPVWREKEDLLVSVPGVGPVISRTLIAELPELGQLGRKEIAALAGLAPFTRQSGQWRGKSFIGGGRTVVRTVLFMGAMVAKRHNPLLKAFFDRLRAAGKPKMVALIAVARKLLTILNAIIRDNRPWQTA

SEQ ID NO: 427518 - protein, 337 aa, unidentified
MKYSGIDLHSNNSVVTVTDEEDRVVAEKRLPNDLTKIVGLLTPWREEMAGVVVESTFNWYWLVDGLQAAGFKVHLANTTAIKKYEGLKHSGDETDARYLAHLLRLGILPTGTILPPEQRAVRDLARKRMQLVRSRTTHILAVENITARQQGVRISSNQVKQLTADAVDQMHLPEEVALAIKANVAVIATLSAQIELLEKRLQEKVGARMEYGLLTSVPGVGQVLATMILLETGPIERFANVGNFASYARCVDSVRTSNGKKKGEGNTKNGNKYLAWAFVEAANFALRYCAEAKRFYERKKAKTNNVVAIKALAHKLARACFHILKERKPFDVTRCFA

SEQ ID NO: 427519 - protein, 358 aa, unidentified
MRIIGVDLHTRQQSVAMLDTDTGEVIEKTLEHEGDEVREFYSALPGPVLVGIEATGSMPWFLKLMEELKIECRVGHPAKVRAAEPRKQKHDRRDARLLLNLLAENRFPAIWMPSTEQRDLRTLLRHRHQWVRMRTRVQHTLQSLALANGLRRGATLWSQVGQHALQALSLAPFASQRRAALLALYPVFQKAIDDLDQQVSEQALLHPQARRLMTHPGVGPVTALATEVFLGDPMRFADGKALASYVGMIPSEHSSGGRQRLGKLSKQGSPLLRFLWGEAAMHAVHQDPGLKHFYRHKLQQKGLGKARVAAARKLGIRLYIMLRDQIDYEEFCRRGQLRQKCGSAHAGMSDRNHGPAVQ

SEQ ID NO: 427520 - protein, 418 aa, unidentified
MEHPKILFVGIDIALNKFDVEYLDIFSNSFSNKKNRLFNNSPEGVDSFVDFIITIAKENDFNKVLIGFESTGNYGFHLPFVLSENEELKSFNPVIYQINPKIIKNFRKSYNDIPKTDSQDAFIIAERLKNSRLMPFTRFDPHYFALKTLTRSRFSLVMKMVSEKARFISLLFIKASAFTQTKIFSNILCNTGSSLLTEFNSVDEIANMDINEMVKFIILKSKNHFKDPETLAKQIQDVAKESYKISKVLHDPVSYSLMASFNHIKYLKGEIQILEKEISKLIPTFQNQYNILTSIKGIGFVLASGIIAELGDLSDFKSQDKVAKFSGLVWSIKDSGKFKSEEKHLTKTGNKFLRYYLVEAAQCLVSFNSDFTPYFQNKFNQGVKRKYKRALLFVARKFVRVIFCLLKNNKLYVSPKTK

SEQ ID NO: 427521 - protein, 402 aa, unidentified
MDKYAGIDIAKRTHWMCVTDGEGRFLMEPRPYENDADGLSRMVADLDLCGGDVAVGMESTGCYWRSCYKVLAEGGYPVSVINPVVTCAERKSGNLGRAKTDRVDCLVVADALRKQGIAPTPSPDADAAQLRDLCRFRRAVSESMSRTKIQAVALLDQVWPEYGKLFSDKFGDSSRAVLRRFASGDMDSDGLADDLRGASRNRFGAAKASDVLESLRSTCGVPATDALRLQLRLLLDQLDFCAAQLAEIDSEAGSLLDAVAPTLPTVPGIGRATAAQIAAEVGDATRFRDAKSLVAYAGLDPTRRQSGGFDPDRNRISKRGSAHLRRSLYIAAQASLRADCEFRDFYDRLRARGYSHRYAVCAVARKMLCVCWALMRSGEEYSRDRHRARGKAPEGASPVDAG

SEQ ID NO: 427522 - protein, 414 aa, unidentified
MEQKMIYVGIDWADDHHDILITDDSAKTLDQFRIDHTCDGFALLHSHLANHQTSPGLVLIAIETSRGLLVHELLQKGYTVYAINPKAVNRYKDRHVLSKAKSDALDALSLGHLLRTDRHLFQPIKPLPEDYRLLDRLCSDLRKAVDEKSRVINQVISCLKEFYPKALETFSLNSQIFIDFLKAFPDHGTLRACTKKAFLTFLKKHRYPYPSRAEELWKVIQSPALQPDRVIARSGKLRLGMLLGQLENLKEHITHYEQEIQAILDSLPESNPIKSLPGVGERLAPELVATLGPNSKDGHHRFHAAVEIAKLSGCVPVVRESGKWKSVSLRYACVKSLRRTFHDWAFASINYSSWARAFYDYHKEKNQSHCTILRNLGKKWIKILFAVWSKGISYDEALHIQNLKAKNVPWAMAL

SEQ ID NO: 427523 - protein, 354 aa, unidentified
MIIVGCDYHPGFQQIAYVDTETGEVKEQRLEHRELAEKFYRELASQGETIRLGMEASGHARWFERLLAELNIELWIGDAAKIRAKRVRKHKTDRQDAQHILQLLREDRFPQIWVASWENRDLRQLLWHRHRMVQARTRIMNQLQAVALNEGLRCKKKLWREQGRKQLEAYRLAPWASRRREDLLKLLDELNPTIAELTQAIDQEVEKSAEAGRLMTHPGVGPLTALAFVLIIGRAERFQCGKQIAAYLGLVPLEDSSGERRRLGHITKQGSSMLRFLLVESAQVAARSIPHWRNQYFHLAMRRGRKIAKVAMARKLAVRLFWMMRQGWDYEQVNKFGSHAGQPEHRHGVQSNTE

SEQ ID NO: 427524 - protein, 359 aa, unidentified
MASIASDPADVIVGVDTHKDQHVAVALDGLGRRLGQWSAPATPSGYADLLAWAASLGRVAAFGVEGTGSYGLGLARFLRRHGIVVLEVARPPRKGQRRRQGKSDPVDAEHAARAVLAGSGPVTPKTGEGSVEAIRLLKVARDTAVVAHSQAMITLKATLVTANDALRAELEPRTDFALVTACAALEVSGDLADPDVAMRHALRALACRWLELHEEIKAHTRHLKTLTTRTAPELVATFGIGFDSAAELLCAAGDNAGRVRSEAAYAKLCGACPIPASSGKTSRHRLNLGGNRQANAALFRIVVVRMRWHPATIAYVQRRTAEGLSKREIIRCLKRYVAREVYQLLPVPATATAEPLQAA

SEQ ID NO: 427525 - protein, 394 aa, unidentified
MKLVGIDVGKNSHHFCVMDKETGEFNVAPSSFSNNKEGFDFLINYLKPYSKKSILIGMEDTGHYHVALLKFLLSNGYPVALINPKTTDLTRKMEGGITKNDKLDTITICDVLDTPERKKQYRITKVDRFDLYEQRQLTRHHHNLKEELNVYCNRLQKSIDLVFPEFNTLFSSKYSIVYMNLLKTFGSAEAIASTDIRTIRKCFEIKGRGNRISLTPEKLKECAKNSIGISSEVETIQIKHLVSQITLIKEQIAEIDKKIEEFSITNNSPILSIPGISHFSGTSILAELGDIGNYSKPSQIIKFAGVAPYHYESSQYNAQHTGITKKGSKYLRKTLYQIILTVINNNPVFKKYYLLKISQGKGHRCAQGHCIRKLLRIIYHLLETGQSFDPALLR

SEQ ID NO: 427526 - protein, 428 aa, unidentified
MHGKDYNKQIAKRQRIKRTTLVIGMDIGNEFNAMCFMNKEGEVLGKYPQIYNSRKGFDFFTKAIEVMKKKKGFRDVLIGMEPTGHYWRKIAYFAKERGYEVRFVRTTALRHQRELDESSSAKSDVRDAVTIANITREGKYIDTVIEDGVLRQLRTLAHVRERIQRYNTGSKHALRAVLDDYFPELKDIFWSMKSKGLWAVLENVPFPGNVIELGLKRLTELIAKSTRRKESAAKKAVEIYQAARETVGLKQIGGADRYRVKMYLEEVKRSEVQLKDIEQEMGKLLEEVPYAKNILSVPGVGVLSCAVFLGELGEPSNFKHPKQIIKYAGYDPQENDSGQSIGRKRISKKGRWMLRKYLYFMSMRAIYRSEFFREYYEGKLKSSNSFGQPLKKKEAICAVAIKLIKVIFALLRDDRMFTAKVPELALAA

SEQ ID NO: 427527 - protein, 348 aa, unidentified
MAIVGGFDVHRAQITFDYIDTDSGQVTAGQIRPATRPALRNWLQRFDGRDDVAFAVEGCTGWRFVVEELTRARVEPHLAEPADTANLRGRKKRAKTDRADARLLRELLAQHRLPESWAPPSHVLEVRTLGRLYVTLMDERRAWQQRIHAQLFHQGVPSVRALLTSDGRVALSTAELSPAGVQMLQTALGAVDALSLQIGPLRAQLQTIGTNQPGVLALTRQYGIGLLCGTIIWAELGDCRRFSNADQAVRFAGLDVTVWSSDTKRSAGRLARQGSPELRWALFEAAKSAARQTSPDHAYYDAVRDRLGGKRPALSVARKLVRRCYHALRELGDQAWLASAPSSEQQAA

SEQ ID NO: 427528 - protein, 346 aa, unidentified
MQTIVKQVVGIDVAQKELVVCLGRMDSDLSSELYAYHVFGNTAQGMNSLINWVKQRTDANVSLRFVMEATGVYHESLAYFLNEQGYHQTIVLPSKINHYAQTLAVKTVTDKTASQAITRFGLERQLTDWVPPTPAYKKLRQLTRERDQVVQLRTMAKNHIHAEKTEAQPDEQSLRRMKQQIDLFNQQEKEIKAQIKELVKQQEKIKNEIAIITSITGIGELTAVTILGETNGFELVSNKKQLASYAGLDVKEKQSGTSVKGKPRISKKGNRYLRKAMHLPALAAIRSDERFKAIFTRLVAKHGIKMKAAVAVQRKLLELVYTLHKTGSKYNPEYLKKLENSNGAVL

SEQ ID NO: 427529 - protein, 454 aa, unidentified
MHNNDNRPSIEGPRQSGRTLVGIDAAITARHHVAVRSDGGETTKRFSVEPTLAGLRTLTDRLVGYDNIDAVVEPTSMTWLALTIAVEKAGGTMHMVGARHSARLRGAIVGKSKSDVIDADVLTRAGQVFDLAPLALPEPAQLALRRSVIRRAAAVIDANRSWRRLMSLARWAFPDVWIAFAGSLATATAVLGRWPDIRSLAGARRATLTAVIAAHTRGVADTPARAEAIRTAAAGWAAFWDGHLDLDALAVDVTEHLTDLSDDQARVARFTAHATRWWEHLYGDDELLLSVPGMGPVTAPTVRAFLGDGSSFSTAKKAASYAGITPSTWSSGTMTQPRRAITKEGPAPLRLALFHAAGAARRIDPQLAAFYHRLMTTHGHCHTQATIAVARKLAERTWVTITTGRPYQLRDVDGHPVTARGAKELIDTHYRVDAATRAKARAHTDTVRKSKMAR

SEQ ID NO: 427530 - protein, 404 aa, unidentified
MTVYIGIDWRENEHEVVWLNEPGAIIEHFTMKHRSEEFMKLEQARHRVGLVRDECVVALETAPNLVVDFLWAWGYEQLYVIPPSVIKSNRGRFSSSEARDDERDGHLIAEVVRTDRGRLQPWSPDRPLTRQIRAKVSLWHYLTKQKVRCSNRLRALLMRYYPLALQVFGLWSSQISLAFIQQYPTPQAATELSWDDFAAFGSQYGYPAVKLPACFARLQQPQPQASRETVLTYQDEAVYLAGHLSQLIRTKNQTLKELTGLFEQHPDQPIFASLPGAGELLAPALLSKFGDDRARFPTPASLQALAGTCPVTDKSGKRKVIKFRQACDRQFRHLVQQWARHSLRKSVWANAYWQQVRPRCQSDSHALRCLANRWLAVAWKLWQTGQLYDQSYHLQQRALRAQPR

SEQ ID NO: 427531 - protein, 349 aa, unidentified
MKIIGCDFHPSYQQIAMLDSVSGEIVEKALSHERKEEVRAFYAGLEGSARVGIEASGQSQWFERMLAELGHEVWIGDAAKIRASCERKQKTDRRDAELLLRLLAEDRFPRIWVPTAAERDDRQLLLHRHKLVRMRTQVKNQLQAQALNQGVQRKRKLWSEAGRKQLESLPLLPWASRRRAELLQLLDQLEASISELDRAVAEQASARPAARRLMTHPGVGPVTALAFALTMGPTERFQRGKQVASYLGLIPSEHSSGGHQQRLGHISRQGNPFLRGLLVEAAQSAVRYEPEMRRAYQRLAQRKCRALAKVAMARKLAVRLYWMLRLQVNYAQLIQGSHAGQPGTFCGRG

SEQ ID NO: 427532 - protein, 315 aa, unidentified
MEPSEVYVGIDVSSAHLDVAVRPTGEGWQITHDAQGIVALVERLRVLVPILVVLEATGGMELALTGELAAAGLPVVVVNPRQVRDFAKATGKLAKTDTIDAHVLAHFAGAVQPALRPLPDASAQELRTLLARRRQLVEMLTAEKNRLRAATRRIRPQIQEHIHWLQRQLEDMDEDLGRTLRESPVWREKEDLLRSVPGVGPVLSLTLLADLPELGTLGRRQIAALVGVAPLNRDSGTLRGKRTVWGGRAHVRASLYMATLVATRFNPVISAFYQRLCSTGKAKKVALTACMRKLLTILNAMIKHHRLWSPVTQTP

SEQ ID NO: 427533 - protein, 323 aa, unidentified
MTVKCMAGIDLHSNNLFCAIVDLAGQRVFEKKLPCHLESVLQALKPFKNRLEKIAVESTYNWYWLVDGLQDHGYPVVLANPAAMQQYNGLKHADDKSDGFFLAEMLRLNILPTGNICDRKVRPVRDLLRRPMGLVQKRTSLVLSLKSLHTRMTGQDLGTGRIKALKPQDAEKLFGHPADQLITRLDLALMEQLGRSIQQIEAAILAGVKGTPNYQVLQTMPGVGKILGLTIALETVDPKRFASPGDDASYCRCVDSRRMSNGKKKGENNGKCGNKYLAWAFVEAAQFARRHDDRCRKFHDRKSAQVNQIVATKALACKLAKAA

SEQ ID NO: 427534 - protein, 391 aa, unidentified
MSMYFVGIDISKYKHDCCIISAADQKVVSKVTIKNNKTGFDELLTIINSLSNPEDIRIGFESTAHYALNLELFLESSLLTFMEVNPVLISEYKKSKTLRRTKTDSVDCESIARWLMTVEYKPHSKGFYHAYSLKSLTRLRDKLIRQRSFYLIKITNVLDHTFPEFKPFFNERLSKTALYLLENYGSAEKMARMNSASYEKLRSLSRGKFSPQQFLRLKELAANTVGVNNSIFDVELNSLLSLYKSLVKEINTIEKEINKLIEEVHPHYMSVPGIGPLSAAVIYSEYGDISNFTNPGQMLAFAGIEPGINESGTESHGGKMVKRGSSQLRYTLINCCLPLIRFDMTFATYYAKKRGEGKPHRVAITHVAKKLIRVIYALERQDIDFNAQKLR

SEQ ID NO: 427535 - protein, 399 aa, unidentified
MNLQYLPKELQIGIDIGSVNHSVAIGDGYGNPIQQFEIEHNTKGFNKLISIIDKEAKERDAIVHVAMEGYNGWARPLDSILLEKGYKLYNVNNVKLARFKEIFPAPQKSDRFDAQKILELFSLQKHLPVAKKVLQEIMPFSNDNVKLKKLTRRRRQLVDEKVAISNRFSTDLQAVCPELRAITNNIDSLRFLRFFTLKEDIRELVKVTKTKILKINRLGEHYYNIIHQWQKEATFASETELIASMLYEDATRILELKNRIKQLENEVRSLIPNSTIARVIDTIPGFSTVTAGELAGEIGNIERFKSEASLALYIGMTNLNNDSGKKTGTKRNFSTNRHAKMAMTTAIMKHTQHVEQSKKYLEKKISEGKKYQQAIRSIGRHLVRVIWSMIQNDRAYEVR

SEQ ID NO: 427536 - protein, 464 aa, unidentified
MRFIGMDIHRDFCEIAISEDGVLRSVGRIETTLEALAVMASSFVEGDVVVLEATAGAGLIVDELKRGPARVLVANTRRMPAPGRAKTDRLDARMLARLAASGLLETVWAPDEATRALRCICARRDSLVRARTRAKNETHAVLARNLCGRPPATDLFGKTGRAWLAEQMLAFDEQLTLDGCLRQIDFLDDEIEAMDRALAERALASPEILRLLSVPGVALNTAACFMAAVGDIGRFDPAKKLVGYLGLDLRVRQSGNADARHGRISKEGSALARAMLGEAAWSVAMTPGPLKAFFERVRARKGPQVAATATARKLACLFWCMLTREEDYAYARPSMTRHKIRQLELAAGAPAQKGKKGVAGNRSPDLREQERQLARQAEAAYCRTIADWKAAGPAKAGAGATPGHASSRPSKNQAARQTTAQRSALRLVGHPHPPTASHSRRQRSRALDFHPSVITRSTVMPWRR

SEQ ID NO: 427537 - protein, 450 aa, unidentified
MNLTQNDRLNQVTADTLVVGVDIGSETHFARGFDWRGYEFSKRAFRFSNTQVGFLTFIRWVEEMMKKTEKTKVIVGCEPTGCYWLTFQKFLTDRDILLVTVNPYSVKKCKELDDNSPEKSDLKDPKTIAGLVREGRYSTSYLPEGVYAEIREAQVCRDQIMKQHVRLSNQIQGWLQKYFPEYLECYKDFDTASGMMVLEHAPLPEDIIKLGAGGINEIWRNAKLRAAGIKRAKTLVEAAQESVGLSGGEAARLEIWFLINDYQTKTKQLERLDEFLSKEIMKVPHVEKLLAIKGVGLSTVIGFVADVGDIGRFTDPKQVQKLAGLEITKASSGKKKGQPCISKRGRRRLRRTMYESARSLISWNEAFSEVFMYYRYRTRNPLGGMQAKIAVACKGTNVPVNVRQIRLALDYRSALYQTKQSDAAKACGIGHDPGKEQGRHPTMGRLDEGI

SEQ ID NO: 427538 - protein, 398 aa, unidentified
MLDQAWVGVDVGKDHHWAAAVDADGQVLLSRKLANDQQAILAVLAEVGALARRLTWTVDLTTAEAALLLAVLWGQGQQVRYLAGRAVHQAAVGYRGEAKTDAKDAHIIADQSRMRRDLPELQPGQDLIVELRILTSRRADLVGDRTRAINRLRQQLTAICPALERAAELAGQRGWVLLLAHYQRPSDLRSVGVAPLAALLAGHGIRNPDRIAQAAVAAASTQTVQLPGQDVAADVAGALAREVLDLYARITQTDHALQARFHRHQLAEVICSMPGFGFRLGAEVLAAIGQLELIGSADRLAAYAGLSPVANDSGKRTGRLRTPVRYNRALRRAMYLAALTAIRCSPHDRAYYQRKRAEGKRHVQAVICLARRRTNVLWALLRDHRTWEPQPPVNHQAA

SEQ ID NO: 427539 - protein, 438 aa, unidentified
MPTISKIEQFRQVKSDVTKNKDYLLIGLDASKKSSVSCFYNIEKDTLIRKYCVNHSLEDFQRFTCKIEQIMKINNFQNAVIGVEPTGNYHKPLSEYLKNKGYFVTYVSSVAAKNNRKTIANGRWGKNDPRDAYNIVDLMRQGKILFYRDENTESTNIRKYLLLRQRLMKLKTSLKTRIRNNIWACHFPELCNIFRNTEIHEVTLLLEYCPSAELVKNMDFQSFISIFPLSGNKNNKRYLRLCRVWQTAKTSVGFPMPSATILESKMIARDIQRTQKDIAHIDKILAEFCTQNDVFANLLSIPGFGTFTASVFKSILGDINDFNYAEQIVKFAGLDIETMSSGNFKGKEKISKKGNSLLRFAVCQATNIAVSKNKVIKQMFQHKLNDRGNSKTAKAKLKIKFAVKFIRAAFVMLKNNLTFDINRFNVPVNDPVLRTVRA

SEQ ID NO: 427540 - protein, 406 aa, unidentified
MLFVGNDWAEDHHDVELMDVRGRRLAKARLAEGVAGMARLHAMIGEQLGETAQTADVLVGIETDRGPWVLALVAAGYQVYGVNPLQVARYRERHGVSGAKSDAADAHTLADMVRTDAHQLRQVADDSSEAEALKVVARAHKTLIWERTRHVQRLRHALRDYFPAALQAFDDLDAADTLELLSKAPDPASAARLTLTQISAALKRAHRRGIPAKATRIQAALRSEQLGQPDVVAAAYAASVRASAAMLATLNEQITVLQRQVEHHFGQHPDAEIILSQPGLGPILGARVLAEFGDAEHRYASAKSRRNYAGTSPITRQSGTKKQVLARYVHNDRLIDALSSQALSALSASPGARAYYDNLRARDVGHYAALRQLANRLVGVLHGCLKNRTRYDETTAWTNQVIKPAA

SEQ ID NO: 427541 - protein, 344 aa, unidentified
MFYAGIDAHMKSSTIRIVDRKGRKVNSSTVMTSAEGFAAGLGRWARRGLQAAVEASGITPWVCQLLKDIRVKVVVVNPHRMRLIAESRKKSDRVDAETLAELLRLGGLPEVHQLSMEARRLRTELSVRRQLVRQRTGLINQARGLLRGWGVILPARFFQSRGSWKDLAAKKLPEYLGPLLETMKSVYEQLTRGIRLVDATLKQRERSDERVARLETIPGVGPVSALTLVAAVDQIARFARAKQLTAYNGIVPTVRSSGEREQQGSITRQGRSEVRAVWIQAAHSLVRSRQPAAQPLQKWFWKVARRRGVRTAIVALARKMLSLAFYLLRDGTQYEPLRLRQAAA

SEQ ID NO: 427542 - protein, 431 aa, unidentified
MNSLTASSEIVAWIGLDWADQEHVYRLQAAASDSVEAGVFSQKPEALHAWVARLRARFPQGQVAVALEQSRGALIYALMNYDFLLLYPVAPQVLARYRKAFCPSGAKSDPEDADLLLELLRCHRDRLRPWAPDDTLTRHLRLLVEQRRKLVDDRTRLSHRLSAWLKQAFPQALDWVGELSSPPALEFLSRWPSLVAVQQAGRSALRHFYLAHGGRDPGWVETRLAEIVNARPLTSDAAVLQVATQMTSVLVRQLRSLQPEIEELERSTQELFQQHPDHALFDSFPGAGKVFAPRLLVAFGSDRDRYADAAEMQQFSGIAPVTRRSGKIHVVHRRRARPKFLCQSFHEFAALSIAWSAWAKAYYLQQRIRGLRHHAAVRALAYKWIRILYRCWKDGTPYDERLYHEALLRRGSRISLVLESQVASAEGGRKK

SEQ ID NO: 427543 - protein, 340 aa, unidentified
MRMIGCDLHAAQQSIAMLDDDTGEVVEITLKHEGEQVREFYAALPAPVVVGIEATGSMGWFLRLMEELAIECRVGHPTTIRRAETRRQKHDRRDAALLLRLLTEGRFPAIWMPSTEYRDLRSLLLHRHQWVRMRTRVQNALHAIAMAHGVRRGHTLWNREGQALLASLPLAPHTAHRRSELQALYQHLDAHVDRLGERVKQVADERPRATLLMTHPGVGAVTALATDVFVGDPARFPDGKAVASYVGMIPSEYSSGRRQRLGALSKQGNPFLRFLWCEAAAHAVRRDPDLQRFYRRKVAQKGFAKANVAAARKLGIRLWIMLRDQIDYAEFCRRGLARQS

SEQ ID NO: 427544 - protein, 344 aa, unidentified
MIYIGMDVSSKSFVIHAIDARKKVVCREEIPPCKESLLGLLQRLGKERKLVVFEAGNQMKWIAQTLMKVEGVELHVVHPNELKWISQSSGKTDKVDARKMAELAKGDLLPRKVHIVEGHIRQLREMLSGRQVLQSKRIALINGIRAMMLQEGVRLPEKFFDRLDWRERLEKAPVSEATRKIITAYMHGICGLQAAEDDLTEQIVAIKDDRLKQLESIPGIGSLSSRILLGALDDASRFDNKKSAAKYGALTPTVHQSGNVNHHGHICRDGRHEIRKVLLQCAHTVARMKRYDAKPLKEFFERIQKRRGKKIAVVALARKLLTIAYGVLKAGTYYDPSRLSLREA

SEQ ID NO: 427545 - protein, 313 aa, unidentified
MSPNNLSILYVGLDVAKSSLQLDLAGQPHTLTNDAKGHAKLLTLLRDHPAAQVVCEATGGYEQPVVRALQTAQQPVSIVEAGRVRHFAKAKGQRAKTDPIDAAVLSDYGRAFRPVPAIAPTSQQTRLAELATRRRQLIDSRLVETNRAEHYLDKDCTRQSKQLLRLLEKQIKACDTAIAQLIAADEKLKAKAARLDAIPGVGPITAATVLAEMPELGQLSHQAAAALAGVAPYNSDSGTAQGLRHIAGGRRPLRCALYMAALSAIRFDAILKAFYLHLRAAGKKPKVALVACMRKLVILMNRLLKNDKFQLAN

SEQ ID NO: 427546 - protein, 407 aa, unidentified
MELEPLYKRVVGLDVHQAQITACAILERDDGTSRVEHRQFGSFKRDRRALAEWVVEVGAQEVIMESTGIYWKSPYAALEAVGIQAKVVNARHVKTVPGRKTDIGDAQWLAILGRSGLLRGSFIPPARFRDLRMLSRQRQKLTSQLSSEKNRLNKVLTDAGIRLGVVVSDLHGKAARAMTKGLIAGEPPELVVTYAGNRLQASQEAILDALQGDLNDVNRFILRELVANIEATEAQIERFDRKLLSELKPESGLLDLLETMPGVERIGAAMLLVEIGTDMGVFGSADRLASWVAVCPGNHESAGKRTSGRIRQGNRHVRRLLVEMAHAASRTRSALRHKFDSLLPRRGYKRAIIALGHKILRIIYRLLERREPYRDSAMDYEAIHVQRNAPRWLKALIKHGYITPATA

SEQ ID NO: 427547 - protein, 357 aa, unidentified
MADLETTVIGGVDCHLDTHHAVALDTHGRRLGDQSFPTTSHGYHQLLAWLQHFGCVHAVGVESTASYGAGLTRYLVGAGLTVIEVNQPHRQVRRRRGKTDALDAEGAARSVLAGEATAVPKDTTGSVEAIRQLRLARASAVKARTAALTQLGEVIATAPAALRERLSGPASLHARATRCARLRADQARLQQPLEAAKFVLRSLSQRILALDAEIARFDAHLATLVASVAPRTTALLGVGTLTAAQLLITIGQNAARMGDEAAFAHLCGVAPIPASSGKTNRHRLNIGGDRQANAALYLIAVCRLRYCERTRAYAARRTHDGRSKRDTLRCLKRYIAREVFHTLRADLAARTAQPAPA

SEQ ID NO: 427548 - protein, 338 aa, unidentified
MRTCAGIDLHSSNNYIGIMDQDYKRLFGRRQPNDLNNVLKVLEPFKADLEGVIVESTYNWYWLVDGLQEHGYRVHLANPSAIKQYEGIKHTDDKWDSFWLAHMKHLNILPEGYIYPKEQRPVRDLLRRRLFFVRHRTANILSLQSTITRNLGIKISGNDIKKLNMDDAGNLFDSSNLVFMAQNNISTIKHLGKIIKGIEKEVKSQVKFRKEFVMLTTIPGIGIILGLTIMLEVGDIGRFSKVGNYSSYCRCVSSKRLSNGKKKGENNKKNGNKYLAWAYVEAAHFAKRYIPKAQRFYQQKMAKANGAVATKALANKLARASYFIMRDQVPFDEDMLFR

SEQ ID NO: 427549 - protein, 410 aa, unidentified
MEAIYKCVAGLDVHLKTVVACVRWLDDKGRLHKQVRTFGTMTRDLLELADWLERATVSHVAMESTGVYWKPIFYVLEGRFELLLVNAQHIKNVPGRKTDVKDCEWIAQLLHCGLLRGSFVPPPEIRDLRELTRQRSQLVAERAKQSNRIQKILEDANIKLAAVASDVLGVSARAMLRAIIAGREDPCGLAELARGRLRGKIPQLQLALHGRVTDHHRFLLRSLLDHVEYLEGLIERFSMRIERVIAPFAVQRDRLMTIPGIDSRAAECLLAEIGPDMGQFPSAAHLASWAGMCPGNNESAGKRRSGRTGKGNRWLRQTLVQAGWAASHTKKTYLAAQFRRLTPRRGAKRALIAVGHSILSIVYQMLASGTTYSELGEDYFDRLNSTRLTRYFVKRLEGLGHKVVLEPNAA

SEQ ID NO: 427550 - protein, 315 aa, unidentified
MTVGIDISKSTFDGSWMSSGKEVNKKYDYTESGIKSLLNEAPRDAVFLMEATGVYHTLLALRLYESGRQVSVCNPLVIKRYSQMKLIRAKTDKADARLIRMFGEENNSDIWSPNNKEINELKQAHGWLNDQIQERTRLLNRQEAHGHQAQQSNFVKQQMGKQLKSMNQQIQACEDHLELVVKKHFGDLYSRLITIPSIGPKTAMELIIVTGGFSRFEDIKSLSAYVGVSPTNHDSGTSVKGKGGIAKMGNGRIRQLLYICSWTAKTCNPSCKELHTRLLEKGKPAKVINIAVAHKLLRQAFAVAVKKVDYSASYT

SEQ ID NO: 427551 - protein, 345 aa, unidentified
MSIVGGLDIHRKQITFDCLDTDTGELRRGSIVPADRQHLADWLAEHSAGGAEAHLAFEGCTGWRDVAEELGRAGVYGHLAEAADTAALRGPKRHAKTDRADSQHLRQLLFDGRLPECWIPPAHIVEARALLETYHDLRVEHTAWVQRIHAVLFHQGAHRPGVGLRSVEGQAELAVICTTELSAAGRLQVATALDMLTALEDHLHRLHRELIDAARHLNGAKVLSARLYGVGPVTGLALTCWLGGAGWFSSARKAVQFAGLDVTVHSSDGKRSAGRLSRQGPAVLRWCLYEAGKTHARGSAPDHDYYAQAQQRIDGKRAALSEARKIVRQACHILTELGDDALTNV

SEQ ID NO: 427552 - protein, 475 aa, unidentified
MEKKSSNKRDEVIKLLERQKIRNVKDLESYKLSECHPHSAGIDLGSRGIYVALNPAIAAEMDKAIVHRFETFTKDLLACKDLLVYCGVKTVAMESTSVYWTTIYFILEEAGIEVCLVNPKKFRMVPGRKTDISDCQWLQTLHLYGLLSGSFHPPLQIDMLRSYMRERDSIIKERSTFIQRMQKAMVKMNLLLHNVIDDITGKTGIAIITSILEGQRDPKVLASFRDPHCKKSEQEITEALTGYYKEDQLYLLKLNYQSFCFFDKQLCDLDRQITRLLKQFPCKKEKKEKRPDNGKSKSKGKNDIRTKENPEDILYHILGIDLSALPGIRANAILQIISEVGTDMSKFPTANHFASYLGFVPRNKITGDHVISSRTDRIKSSAAQAFRKLIPSISQTQTALGAFYRRLAPRIGKAQAIIATCRKLAILFYNTLAFGMAFVEHGEQVYQQKQEDYERRKMLNLAKKFNCKIVENIAT

SEQ ID NO: 427553 - protein, 423 aa, unidentified
MPYRIAGIDVHKKMLAVVVSDVEVDGEYQFERVRYSSSPEHLRLLAEWLIAQQVEEIVMESTAQYWKPVWGALERYWKPSCQEREGAGPKSGTLHLAQAQSNRGRRGRKKDFPDAERLVKRLVADELVLSFVPDTEQRVWRTVTRRKYQLTRNHVRLQNQLEGLLEECHIKLSSLVSDLLGASARRMLKSLAEGETNPVALAAMADKNLRATQAQLCDALGACTELKPIYRRLLKMFLEELQFIDQQISQLDQELASLLSQHHDAVVHLAEIPGLGVDSAQQIIAEVGAGAATFPSAKQLSSWVGACPGEEESAEVSKSHRSPKGNRHMRRILNQAANAAAKSKGTIFEIVYRRLVSRLGHNQTIGAIAHRLCRLIWIILHRGVRYEERGPSVSAKTRRHRTNRMIRELRNLGYRVQPLVTTA

SEQ ID NO: 427554 - protein, 347 aa, unidentified
MGYFAGLDVSLEETAICIVDGAGRIVREARVASEPEVLVAFFRASGMEMERVGLEACSLTAWLHAGLTEAGIPAICIEARQAKAAMGAMPNKTDRNDARGIAQIMRTGWYRAVHVKSSSCRSWRALLTARRMVLNKRRDVENGIRALLREVGLKVGTPSRRDFPVRVRSLAADDPVLASLVDSLLAVVEVMTLEVERLTKRVIDEVRVEPTCRRLMTVPGVGPLTALAFRATIDQPDRFRRSRDVGAHLGLTPRRYQSGETDVQGRISRCGDELARTALYEAAHSLLIRSTKWSALRAWGMNVAKRRGMARARVAVARKLAVILHRMWADGSEFRWGKQAATSTAAA

SEQ ID NO: 427555 - protein, 462 aa, unidentified
MARSKPKASRTAVPGPAFPPPLAAANLHAAGIDIGADAHVVAVPPSDDPQPVRGFGAYPADLNAIADWLATCGITTVALESTGVSWIPLFALLETRGFAVLLVDPQQVQKIKGRPQSDVHDCQWIQRLHTFGLLASAFRPTDQVCVLRRDLRQRAMLLTSAAQHIQHMPKALTQMNRKLQHVISDMTGVTGLAILRAILGGERDPEKLAPLRDDRGKYDEATIARALQGNGRDEHLCAVAQAVALSDVYHQKIIACDRHIEAYLQTFADRSEGQPLPPPPRPRKRGGNQPAFAVRGPLHRITGVDLTQIAGLDETTSLVILSEMGLDMQRWPTVKHFTSWLGLCPHHRVSGGKVLSRRTKPCANRAATALRLAAACRHHSQSALGAFFRRMKARMGAPKAITATAHTLARLLYTMLKHGTAYVRQGMDEYAQQSRDRMVKTMTRRAKALGYTLVKAPEGNLA

SEQ ID NO: 427556 - protein, 373 aa, unidentified
MKKVRFLGLDVHAETIAVAMAEPEGEVRSLGIIPNREESIRKLVKKLGPAEPLQACYEAGPTGYVVYWQMTALGVKCEVVAPTLVPVKAGDRVKTDRRDAMKLARSYRAGDLTAVWVPNEEHEALRDLVRAREAAKQDQLRARHRLSKFLLRHGRRAPAGIKVWTQKHEEWIKKQVHFEQPAQEYTMLDYLHEVEHMDDRIRRLEQAIEEAVKLAPPRMQKVIQGLQALRGIAQISAVTIVAELGEISRFGGARQLMSYSGAVSSEHSSGKRIRRGQITKTGNAHLRRIAIEAAWSYRHRPAIGASLRKRQEGLSEEVKEIAWKAQHRLHKRYCHLFAGGKEKQKVATAVGRELLGFIWAIGVQVERNSKALA

SEQ ID NO: 427557 - protein, 370 aa, unidentified
MKEDSAIFIGLDTSKLKISVAIADGTRNGVVRFFGDISSEPSSVASMVSKLSKRGARLHFCYEAGPTGYGLYRQIVELGHDCVVVAPSLVPRRAGDRVKTNRRDAMSLARLHRAGELTAVWVPDEGHEAIRDLVRAREAASDTLKQARQQLQSFLLRHGRIYTGRKPWTRAHVRWLACQAFDHPAHQILLAEYCQAIEDAGVRLDRLTKLVVETAASWTMAPVVAAYQAMRGVAFMTAVTFVVEIGDVRRFDNPRQLMAYLGLVPSESSTGERVKRGRITKAGNQRARRVLIEGAWTYRFPARVSSRIQARSQDLPKTVRQIAWKGQVRLCTRYRKLMAAGKPKVVAVTAIAREMAAFLWAIGQEVAPTV

SEQ ID NO: 427558 - protein, 339 aa, unidentified
MEVEKTCIWVGLDVGKASFSAALDTPAENGRAKLTTLPCRDFKRTPEGVEQFFRWVTKTASDYDIRIVMETTGCYSQHLTDWINQLHPEIGVTIENARNIHAFIQSLNLPHKTDKLDAQAIARFGTERQPQPTHRPSQTILTLRELSRERTALIKARVNLQNRRDTLISPIARKINGQTLATLTLQIEKIDKEIKACVVQNEELLAEVHIMTTMPGVNFVSAYSILAEIGSLKQYSAKELSSLSGLAPRIIESGSSVHSSYLSRRSSGRLRQILYLDSVPGVPQIPVLLEFHQRLINRGKKKMTARCACMRKMLLMLRSMVVHKTPFDENFLKNSSKGA

SEQ ID NO: 427559 - protein, 451 aa, unidentified
MEQQMTLEIVNKNAAGIDIGSRSHWVAVGQKKSDIKEFGVYNEDLYALADWLREHKITSVAMESTGNYWQNLHAVLIANGFEVTLCNGKFTKNIKGKKTDVIDCQWIQKLHALGLLSSSFLPDEDTEILRTFTRHRLNLIQQAAASSKKMQKYLRLMNIRLDVVVKDIVGLTGLKIITAICLGETDPKKLASLRHYNCRKSEEEIAKALHTNRRNDYLYALNDELDTYNYLQEKIRKCDDQIALKIDDIIGKDPEKKEHHIDKKKHKRINKNTPKNIDINLKSYQIFKGIDLLAIEGTSYNTALTIMSEIGYEGIHKFKTAKHFTSWLRLAPNNKVSGGKVLSSKIGKGSSRLKIALRNAANAIGNLKDSTPLRDFFHRINFRKGRVSAITATARKLAIIIWNMIVKAKPYQNPEGYLYLDQKRKLGLVKRIKKQIDKFDIKPEDLEFKTP

SEQ ID NO: 427560 - protein, 316 aa, unidentified
MLYVGIDVAKNKHDVTALNVPGKTVLKPLTFSNNKAGFELLDLSLRQLNQDCLIALEDTGHYAFNLLNFLHEQGYEVYTYTPLLIKEFAKSLSLRKTKTDKKDAHGIALKLLSDPNREQFQHDNRQVELKILARHIHRLKKKQSDWKVQYTRCLDIIFPELDKIVGKHSEYTYQLLTRYPNPQKRIEVGFDKLIEIKRLTASKIQDILSVAPRSIGTTSPAREFEIIEIIKHYKRLIDKAEKCVNDLMAEFNSVITTVTGIENRLGAVILAEIRNIHAFDNPAQLQAFAGLDSSIYQSGQIDLAGRMIKRGSPHLR

SEQ ID NO: 427561 - protein, 309 aa, unidentified
MPFIGVDTGKASYEVCVENMLLKVERSKKPVRKFLNGLQAGSVICIEATGKYHLLLAEMAYELGFTVYVVNPADFACYRDSISYRAKTDPIDARILARYAEREHDRLRAWIPPQKVPALARELLQMRETLVSARVAMQQSLSETSCAQSRALADVRRTLNDMAAHAAAIEAEIAQLLKDDNTFRRLLRVPGVGVLTAAMLTWVFAHGEFATSDKLVAFIGLDVRVRESGKWKGQRKLSKRGDALARKLIFNGATSLRSSQHWKQRFLAIEARGWSKIAATVAVARKLLRIAWALVKHDRQYFQVVTHAA

SEQ ID NO: 427562 - protein, 459 aa, unidentified
MGNARKGKIPAQLVEDEDYQLRHERVAGIDIAKAKADVCTRLPPSRAGGRRASRVEEVPATAREVLALAGRLLADGVELAVMESTSDYWRIWFYLLEGAGLRVQLVNPRHARQLAGRPKTDRLDAQWIARLAEMGLLRPSFVPPPEIRALRDLTRSRLQLVRDRTREWQRLEKLLEGALVKLSSVVHSLARTKTARVIVEAIASGESDPGTLAGLAAGRVKGGRGAIAGALEGMQVRDHHRTLIRVHLDHIALLDRSVAAVEDEIEAALDAIPAAWGADATGETGPDAGRGPDPAALPAAQRLAEIPGVSPALARAIIAETGLDMSIFPTAAHLASWAGLAPVASQSGPRTRKPGKGHGDAYLKGYCTQAATGAAGTGTFLGERIGRLSRRLGGNRARCAVARSILVIIWHLLSDPGARFADLGPGWHDSRADRDRKIRAHVRQLQALGLNVELSEAAA

SEQ ID NO: 427563 - protein, 381 aa, unidentified
MGKVIMIGCDLHAKTMVLRTALDRGEPESLIFANTTAGRQKLIDTFHRRVAQVGGARVVLAYEASSQGFGLYDQLTDAGFECHVLAPTKIARSAKHKRDKGDQQDAQQLLELVRADVLAGNELPKVWVPSRETRDDRELVRSRMDIVQKMTRLKVQIKGLLARQQLARPKGTGQGWTRLFVAWLRGLPLPIGSRRTLDSLIRQIDFYERELKQFDEALDQLAYSPRYAQSVQALCQLVGVGVVTALVFLTEIGDPRRFANRRQIAAYLGLVPSRHESGERADCKGHITHQGPARVRTVLCQAAWTRVRYENDDQAAYRRLVRKNPKHKKIALVATMRRLGIRMWHEAVRGLDRPAASPWERDQRPQVPPPGPHLLPSLCSC

SEQ ID NO: 427564 - protein, 410 aa, unidentified
MEVMFDRVAGLDVGKESVTVCVRTPGSRRGRHSETRTFKTMTGSLRVMRDWLVESGVTIAAMESTSAYWKPPFYCLEEVMEVWLLNAAHMKAVPGRKSDVRDAEWIAQLLEHGLLAPSFVPPPEIRRLRMLTRYRVQLMADRAREIVRLELMLEDASIKLSSVASSLKTVSARAILTAMINGESDPLRLADMAKGRMRRKIPDLAQALTGHFDANHARLARSMLRRLDLVEQAIVELDAVIMDACQPWAHQIELLQTIPGVGPKVAETIVAETGADMTRFPTAAHLAAWAGVAPAMHESAGRQTPAGKRHGNKWLTAMLVEAAGSVGRMHGKNYLAVQHARLTKRRGMGRAQVAVAHSILVAAYWMLKRDEPYHDLGADWHSRRNDEAHTRRLIAQLEHLGHTVIIDPAA

SEQ ID NO: 427565 - protein, 347 aa, unidentified
MRFYNNQHNYYCGIDLHARLLYVCILDSLGKKVLHKKIDADPDALLELITPYQDNIVIGVECMHCWYWVSDLCLDYAFDFVLGHALYMKAIHGGKTKNDRIDSFKIASLLRGGNFPIAYVYPRAMRATRDLLRRRTKIMRHGADLKAHVANTFSQYNQQSHNVQLRYPCAREQVRNQFDEPSINRSIDMDLNVIAFYTKELASVEHFIEKTAKQHSAQDYNLIQTVPGIGRILALTILYEIGNIERFPSVQNFASYSRLVKCKAESAGKQKGTNGNKIGNAYLKWAFSEAAVLYLRGNDPAKKYIQRLQKRMSKAKALSALAHKLGRCVYFMLRDKTVFDEKRFLPQ

SEQ ID NO: 427566 - protein, 402 aa, unidentified
MNAVGIDVSKGKSMVAIMRPFGEIVSAPFEIKHTASDIHSLVELINSVEGESRIVMEHTGRYYEVLAHQLSEANLFVSAINPKLIKDFDNDSLRKVKSDKADAVKIARYTLDKWQNLKQYNVMDELRNQLKTMNRQFGFYIKHKTAMKNNLIGILDQTYPGVNTYFDSPARSDGSQKWVDFASTYWHVDCVRKVSLNAFIDHYQNWCKRKKYNFSQSKAEEIYGKAKELVPVLPKDAITKLIIKQAVDQLNSASTTVESLRTLMNETASKLPEYPVVMAMKGVGTSLGPQLIAEIGDVSRFTHKSAITAFAGVDPGVNESGSYEQKSVPTSKRGSSDLRKTLFQVMDVLIKTHPQDDPVYQFLDKKRAQGKPYYVYMTAGANKFLRIYYGRVKEYLSSLPES

SEQ ID NO: 427567 - protein, 337 aa, unidentified
MKYSGIDLHSNNSVVVVSDEADRVLVRRRLPNDAAAILALLAGHRDDLIGVVVESTYNWYWLVDALQAAGYRVHLANTAAIKRYEGLKHSGDEDDAAYLAHLLRLGILPSGYICPPAARAVRDLARKRMQLVRSRTAQVLAVENMLSRETGARMRSYAVQRLTAQAVEGFGFNPEVERSMCANVAVIKTLNREIDKLEQRLHECVRLRPAFRLLTSVPGIGQTLATLIMLEVGTIERFAAVGNFASYARCVDSARISNGKKKGQGNVKNGNAYLAWAFVEAANFARRYCVEARRFYERKKARTNGVVATKALAHKLARACYHMLKEQKPFDVKRCFA

SEQ ID NO: 427568 - protein, 375 aa, unidentified
MNLLAWAESIKQEHGLTDVLLGVEPTGHYWFPLFHFLKQHGIEVVLVNPHHVKKSKELDDNSPTKNDIKDAKVVAKLVIDGRYTQPQLPEGVYADLRVLMNQRDRLCGDLNRVKGRIHNWLDRFFPEYTQVFKDWEGKASLITLQNFPLPQDVIAAGETTIAAIWKKNGVTRAVGPKRAELLYRKARKSIGLTEGATAARHELAMYMEQYVMLCRQIEQLMELVAGLVEQIPGAAHMMSMPCIGLITVAGFLAEVGDLSGYDHSQQIVRHAGLSLRENSSGLHKGETTISKRGRCRLRALLFRAALTMVAKNPEFRALHLYFTTRRENPLKKKQSMIAICNKLIRVLFELGRKQKNYDASKVLGPHREAQLQAAA

SEQ ID NO: 427569 - protein, 468 aa, unidentified
MEEVTFKFSVDWTKTAFYCGLDVHKHELAVAIYGKDDSLSEIVKTTIVPVTGKGLHEFWNFVKKYQPGGFAMEATGIYHHVVYKFLLNKRSKVHWPFVIVVVNPADAAGLPGRQKNDRIDAELLARYLAKGLLRSGKPVIEVLEDLKAIFRMALRLERDRTALKNRIKKTLDRAGIRPKYFDLNNQWSITFLTCFIEQENSLGCFIERELSDETSPLQGIRKHLVRNLKHLIPFFGFSLTSPQRALIRQDLVELAFKTGRKALLALEVDQVLLSRPGLRARAHDLATIPGISPFSAVWLLTEIGSIKRFRTFRQFKAYCGCCPRIVSSAGKIYSAHTQRHSNAHLRTIFYNAAVVVCNLVKKESALKEYADRVNRTKSSRNKKLVYCIVAGKIAKIVYTILKKGVPFSPEIGRGFSPNRLEAPFCLADRKLIRRARNNLQKVKLIPNIGCLGERSEELAKELDKLLTS

SEQ ID NO: 427570 - protein, 451 aa, unidentified
MSRPQVIDDEEHERVHDRVAAVDVAKDSGMVCTRTPHPSRPGARRSTVWTVKARMNPIRTLGRQLRKDGIELVTLESTSDYWRIWFFALEACGLAVQLVNAAQAKNLPGRPKTDKLDAQWLARLTELGLLRASFVPPKAIRDLRDYTRARTRLIQERTRCWQRLEKLLEGALVKVSSVASKLTTISAQDMIKAMIAGERDPEVLADLARTRMRAKHDDLVQALDGMFDDHHGELAALLLDQIAFLDGRIAQLGARAAELTAAMAEAWGVDPDGTTGPSAGATPEAPVLNAVARLAEIPGVSQDLARAIIAETGLDMTRFPDAAHLVSWAGLCPSARQSGPRTRAGKKGQGNGYLRGSLGQAAIGASRTATFLGERYGRIARRRGKAKAQVAVARSILVIIWHLLADPEARYTDLGYGYYQARTDKDKKIKNHIRQIEALLGHPITITPKAA

SEQ ID NO: 427571 - protein, 417 aa, unidentified
MKEEFTFYVGVDWGVEFHQACILDAHGEKICQRRIEHSGPGMLEFCDFLQALTNGEASALAVAIEVPRGPIVEALLEHNYAVFSINPKQLDRFRDRHTVAGAKDDRRDALVAADSLRTDQHCFRRVRPEHPDVIRLRELSRMEETLGIDLRRCVNQLSQLLLRYFPQLLRLCSTPDEPWLWALLELAPTPQQAAKLTEKRLKQLLAKYRIRRWTAEKVGEILTAPPLPLAAGSAEAISEHALLLLPQLRLLHLQRKQVADRTQQLLDQMATSTNDFPMSQEHRDIPVLLSLPGVGRIITATMLAEGSHILSLRDYHALRAHAGIAPVTKQSGKSRQVLMRYRCNQRLRNAFYHWARTSIQHDPRSKHHYARLRQVGHDHGRALRGVADRLLAMLIAMLKSGQTYDPNRRSTANLTAA

SEQ ID NO: 427572 - protein, 380 aa, unidentified
MRNDIRFVGLDVHAETIAAAVVEPDGELRFLGTIPNRPEAIRRLMKRLGPAARLRACYEAGPTGYVLYWQLTELGVHCDVVAPSLVPVKAGDRVKTDRRDAEKLARSYRSGDLTPVWVPDAAHEALRDLLRAREAAKSDQLRARHRLGKFLLRRGRRPGPGIRPWTCKHMEWIKREVHFEVTAQEATLTDYITEVEHVGLRIERLERAIDEAVSAVPNRMRAVIDALQALRGIRQISAATIVAEVGELSRFARPRQLMGYSGAVPREHSSGERTRRGGITKTGNAHLRRIVGEASWAYRHRPNLSRGLRQRQEGLSEQVKEIAWKAQHRLHQRFRKLTARGKAKQQVVTAVGRELLGFIWAIGTTVERGLTEPADQRRVA

SEQ ID NO: 427573 - protein, 399 aa, unidentified
MHKKLIVACFKKGNTQEIREFGATTRELLEMADWLKDGGCEMVAMESTASYWKPLYNIFESSDLNAIVVNARHMKAVPGRKTDVKDAEWIADLLTHGLLQASYIPDKDQRELRELVRYRKSLVGERNRELNRLQKMLEGANIKISGTITDINGKSARNILEHILSGKQIDSAEYDILYEKKVIAHNLKASKEQIIDDLNGVMSDIQRKMMRLLLKHLDELNAIIKELDDDIDSFMKPQEKQAAKVIQDIPGIANTSAQAIISVLGTDMERFPSDRHLASWAGLCPGDNESAKKRKSGKTRKGNALLRETLVICAHSAVRNKMSYFYAQFMRISAHRGKKRAYVAIAHTILIAIYHILKEGVTFKDLGADYYNQFNKERKINAYLKKLKALGWEAPVVAA

SEQ ID NO: 427574 - protein, 346 aa, unidentified
MKINRVGVDLAKNVFQLHGADRKGKPIWKRRLSRSKWLEVLYDTVDPGVEIGMEACAGAHHWARQLMQRGYVVKIIPPQFVKPFIKSNKNDANDALAICEAMGRPNMHPVRVKTVEQQDLQAMHRIRDEIKGHRIAKANQIRGLVTEYGLVAPLQLTALRRAIPEWLEDAENGLTFLFRQLLQGLWGDLHVLDQRMAELDKQIAVVAQEDPTAKRLQQLRGVGPLIATALVATIGDGKQYRKGRDMAAALGLTPRQHSSGGKDRLLGISKRGDAYLRCLLVHGARSAVRTVKDKDDRLSRWIIDLQSRRHANVVAVAMANKMARMAWVMMTRGVDYDPKLAAASVN

SEQ ID NO: 427575 - protein, 354 aa, unidentified
MNKIKQLSFEGKVIYCGLDVHKTNWKINARMEGIEMAAFSQNPDPLLLKNYVDKNYPGAELKVVYEAGFCGFEIQRSLKSLGIECIVVNPADVPCSDKDRKRKDDKRDARKLSIELAKGNLKGIYIPDKQMQDARSLVRQRHRLVQDQTRCANRIKHLLLSNGITTGEKSERWSLRFIKKLQQLDCGSISLKSSLQFAIEQYLQTRRIVKEITLAIGDLSKQEPFKKVQAVLGSIDGIGLINGMVIQTEIGDIHRFKRLDSLCDYAGFVPDIYSTNDRMVIRGISKRGNEFLRETIIESSWVLIRKDPAMLMKYNEYRSRMSANKAIVRIAKHLLSRIRFLWKTGQTYVRGIIG

SEQ ID NO: 427576 - protein, 320 aa, unidentified
MMAQNGLVVAGIDIAKDKADVRIRTLSQRQTFPSTAAGRRQLISWLRKHKVTKVVMEASGGYERQWARALREAGIEVRIVDPKRVRHFAQSAGRLAKNDVIDADTISWFAEIFGEAPSQAHDAARETLQQMVNARQGLLDIRTMLSNKGEQDVAEPVQKSHARLLKNIVVEIANLEAAIAALIKATPHFAKRAEIIESVPGLAATTSAGLIAAMPELGEVSNEAIAALLGVAPYDDDSGKRQGQRQIKGGRRKVRNLFYMASLGAATRHNPMLKTFYHRLIAKGKKPKVALVACMRKLIVILNTMIARGEKWDASRYPVS

SEQ ID NO: 427577 - protein, 358 aa, unidentified
MQSNKKSFKGQKIFIGIDVHAKTWAVETLTESGFTKRHAQEASAKVLFDFLSKNFPDGEYHAVYESGFSGFSTYYQLKEYGIHCVVVHAADVPSTQYEQVMKTDKIDAGKLARALRKGDIKPIYIRERENLDDRAVVRLRKTIQKQLSGYKTRVKHLLHTNGVKLPARFDKPGTHWSRAFMNWLKDEVVLLSSTRLSLDLLINQVESIRKNLLEATRAMRILAATDKYKANYELLLSIPGIGFNVAMCLLTEIYDFKRFGNENCFAHYLGLVPTCHDTGDKHSTGGKTFRGNKLLGPMIIEACWVAIHKDYGLSQAYCSYKQKMKPQLAIVKVARKMSNIIFSVIKNGKKYEPYKWEE

SEQ ID NO: 427578 - protein, 423 aa, unidentified
MNPITTYQATIGLDWADQKHDLWIHPADGAKPQHLQLEQTPEAIHQWVAQLRERWGSGAVASAVETSRGPILSALRAYDFIVVYAVHPKGLKDYRAAFGVSGAKDDRTDAYLLEEMLRWHADKLKPLRPDDELTRKLGGLTEARRGLVDQRTEMVNQTHATLKTYYPLAERILGSEMNTLMAAEFLGRWPDLASLQAASSQSLRTFFYKHNCRSAKRIDQRLQAIKEAEPLTTDSAIIEPARALVLARARMLKCLSQSIAELEAQIQQAMDQHPDAPIFRSFPAAGPALAPRLLAAFGTQRDRFEDADQVAQLYGIAPVVIQSGNSKVVRVRYRCPKFGRQTFHENAACAAKTELWAQSYYQRQRQRHQDKHHQACRALAYKLIRIYFACWKNRTPYRSDTYLAALQKNGSSLYKEITQAPGE

SEQ ID NO: 427579 - protein, 402 aa, unidentified
MNCVGIDVSKGKSMIAVMRPFGEVVVSPFEVLHTDSELSKLAGLLKSLDGETRVVIESTGNYHAPVAWLLHDAGLYVSVVNAMLVHDYGNNSLRRAKTDKKDAVKLANYGLDHWLILPRYVPEEDTRLMLKTCYRQYQQYSKVQTMLKNNLISLLDTAFPDANRLFTSPPRADGSEKWVDFVAAFWHCECVCGLSEKAFTAKYQKWCKKHGYNFSKNKALDIYASSCGHFGVMPKTDTAKLLVEQAVSQLRATSAALAALKQEMQSLAASLPEYPVVMEMFGVGPTLGPQLMAEIGDVRRFHSKKALVAFAGIDAPPYQSGQIDVRSRSISKRGSASLRRTLFLVMGVILQHAPMNEPVYQFMNKKRSEGKPYRVYMIASANKFLRIYYASVKAYLDSLEHD

SEQ ID NO: 427580 - protein, 368 aa, unidentified
MKNVITYVGIDAHKKDLFVAMLVGNQATPVTWTIPNEPRAVRRLVKKLEREAPGPVRIFYEAGPCGYALQRQVTTSRVSCDVVAPALIPRKPGDRVKTNRRDARKLAELGRAGLLTAVQPPTPEDEAVRDLARARDDAREDLQRCRHRLGKLLLRRGLHYAGRNWTRGHRQWIDSLTWVHAAERTVVDDYLLAIDHTAARLLELDAGLAEIAERDPYREPVGWLRCFRGIDTLTAMLILAELHDFRRFASAPALMAYLGLVPGEDSSGEKHRRGGITRTGNALVRRLLVETAWHYQHRPSVGVALTRRRKGQPGRVIAIADKAQQRLCRRFRKLVAEHKPAPKIAVAIARELAGFVWAALQPAPVPAR

SEQ ID NO: 427581 - protein, 346 aa, unidentified
MMIIGCDFHPSWQQVCWLDTETGETGEHKLVHAEGDAERFYRQVPAPALIGMEATGNCHWLVDLLAEIGHELWVGDAAQIRASYVRQQKTDKRDAAHIMKLLVEGRFPRIWMPSSEVRDLRQLLLHRHKLVIIRTRVKNELQHLCLNQGVQRKRKLWSQAGQKLLRELPLRPWAARRRDDLLRLLSVLDQQIEPLDAAVKAEALRDKMALLLQSQPGVGPITAMAYVLTMGDVSRFPRGKQVASYLGLIPREHSSGGRQKLGAITKQGNRMLRMLLVEAVQTTVRLDPGFRKQYLHRCHQKPKGVAKVAAARKLAVRLYWMLRTQTGYPEIVRIESSPRVPLVGAS

SEQ ID NO: 427582 - protein, 355 aa, unidentified
MNSSKYIAMDVHTATISVAVRDAVGKLIMESVIETKTSTILQFIQGLRGDLHVTFEEGTWAAWLYDLIKPYVTNVVVCNPRRNALLKEGSRSDRIDARKLAELLRTNLLRPVYHGEKGLRTLKELARAYLTISKDLTRVMNRVKAIYRSWGIPCGGQSVYNPRHRKEWLSKITQASVRRRAELYYEQLDALVLLRKQARQELLAEGKKHQAWKLLRSIPALGPIRAAVLMAIVQTPHRFRTKRLLWKYSGFGVVTHSSADHRYVKGQLERSKKPVSVRGLDRDHNHQLKDLFKGAAIQASTRKGPFREFYEALVAKGMRPEMARLTLARKIAVIALTVWKKGGAFDAKYLKPQTA

SEQ ID NO: 427583 - protein, 310 aa, unidentified
MGIDVAKQVFDLHSLKTGQDRRMENSTEGIRQCVALCNTLRPELIVMEATGGYELTLAATLQAEGFAVSVVNPRRIRDFARAAGQIAKTDKLDARIIAQFAATMDPMPTERINENTQKLKALVARRSQLVGLHTAESNRLEHADSKAIQRSIAAVLKVIEAQLKTIDRQIKEHIQNTPELRQRSEILDSAPGVGPTTAHMLVTELPELGRLNRRQIAALVGVAPMARDSGTFRGKRMTGGGRKEIRSRLFMPTLAAVRHNPILRAYYTRLIRRGKCKMVALIAVMRKLICILNTMIKNNQLWNPNLIKIS

SEQ ID NO: 427584 - protein, 340 aa, unidentified
MEAATIGLDISKHVFHIHAVDSQGQVAGRQRLRRGEIVSFFSSLAPCLVGIEACATAHHWAREIGQCGHDVRLIPPAYVKPYLRRGAKNDAADAAAICEAVSRPNMRFVRIKSAENQGFLMLHRARGLLVRQRTMTACAIRAHFAEFGIIVGQGRQRVDGLVDLLDDEELTLPAHARIALAVLVSQLKELGRQVEAIERELAEIQRVNPMAKLLSSIPGIGPITATALAATVPDATMFRSGREFAAWLGLTPKQNSTGGKDRLGRITKQGDSYLRHLLVIGARNVVRYPKARSRVGGGWIEALLERHRPMVVAVAVANKLARIVWAMMTTGEFYRPKLAA

SEQ ID NO: 427585 - protein, 398 aa, unidentified
MTESSDYESVQVFIGVDVGKDTHHAVAINRSGKRLFNKALPNDENKLRSLISDLKQHGQILLVVDQPATIGALPVAVARSEGVLVGYLPGLAMRRIADLYAGEAKTDARDAAIIAEAARTLPHALRTLKLADEQIAELSMLYGFDDDLAAQTTQASNRIRGLLTQIHPALERVLGPRLDHPAVLDLLQQYPSPEKLALLGEKKLAAQLCKLAPRLGKRLAADIAQALAEQTVVVPGTNAAAVVLPRLALQLITLRKQRDEVALEVEQRVLAHPLYPVLISMPGVGVRTAARLLTEVACRAFASAAHLAAYAGLAPVTRRSGSSIRGEHPSRRGNKALKRALFLSAFAALRDPFSRAYYTRKMSQGKRHNQALIALARRRCDVLFAMMRDGTFYTPQAS

SEQ ID NO: 427586 - protein, 465 aa, unidentified
MRTPKGKRKPLPETKTQEDHSLPALNLHAAGIDVGSEEHWVAVPKDRDSEPVRRFGCFTADLHAMAQWLKQCRITTIAMESTGVYWIPVHQILERYGFEVRLVNAAHVKHAPGRKTDVADCQWIQQLHTFGLLSGSFRPDDQVCVLRSYWRHRDNLVRYASDHIRHMQKALTQMNLHLHKVLADITGVTGMKIIRAIVQGERNPRKLALMKEPGVKSTPEGIAKALEGDYREEHLFALTQAVELYDFYQRQIEACDRQIASCLRAFDSKADPAFPLGPPKRRDKKRTGNQPYIDLRAELYRISGVDFTQIPGFDALTVQTILSEIGLDPGRFPTEKRFVSWLGLCPNNRITGGHVKGTKTRKTHNRAANAFRMAAQSAGNSNSAFGGFHRRIKARLGAPKAITATAHKLARIFYRLWTTGKSYVDLGADYYESRYKERVLRNITKRAKELGYQLIPQQPAAEEVA

SEQ ID NO: 427587 - protein, 343 aa, unidentified
MGEISTIGLDIAKSVFQVHGVDVAGQVVIRRQLKRRYVLAFFQKLPPCLVGIEACASSHHWSRELKALGHTVKLMPPAYVKPYVKRQKNDAADAEAICEAVTRANMRFVATKTPEQQSGLTLHRTRHLFICQQTAVINVIRAHLAEFGIVAPVGRKGVEELLNVVTDASDNRVPVVARMCLAALGSQLRQLKEQILEFDRMIMAWHRSHEASRRLDAIPGVGPMLATALVASVADPKTFRSGRNFSAWIGLVPKQHSSGGKDRLGSISKQGDRYLRSLFMAGALAVIRYAKIHGTKHRPWLTALLARRPTKVAAIALANKIARIVWAMMARGERYKEPVALAA

SEQ ID NO: 427588 - protein, 336 aa, unidentified
MENCGIDLAMRSSSICMMDARGGVVAERVVATEESAFRVLLGGRNRMRCVLEASPLAEWAAEVLEGLGHEVIVIDPRKAKGVIATKKKTDKLDARNLAKMGRTGWYTEVHRKSGQARAIRTFLQARHGLVQTALAQGARIRGLLRAHGIKVGQVPESQFAARVQQLAGEKNPLLWPMLEPLVAVWRQALESAEQMRKQLIRQAAQAEVPRRLMTVPGVGPIVASAYAATIDDPRRFRSGNQVAAYVGLVPSVAQSGQLDVHGRITREGDGLLRGYLVEAAHVLLTRTRRTCALKRWGLKLAKKKGHGKARVAVARKLAALLHRLWITGESFDPTRA

SEQ ID NO: 427589 - protein, 467 aa, unidentified
MGKRSGGNEMTRGDRRRNARRERLRGLLPRDGAVIGIDLAEDKQALAVIDHDVRVLARKTVKVKAFRLGQALDWAAGQARVKGFERVTVACEPAGPRWMQVQRLCAERGLPLVCVQPLVSHIAREQQDYTPHKTDESDCVLIGRLATELHCYVPEELDETWAHLRHLGRRRAQLITAATASVQRIRDFLSVAWPTVTEACAGPFESVTWLAALQVVTARCGGDPARLAALGLEEFTALVRGAVPGWGGKKGWSRICRRVFAALTDTEGVVTWSRRGLLRRCADELGDLQRTRAQLRAVEADMVLVLGELGLSRLGDIPGLTAVGAAAILAETGDPRRYDSSSSLVKHAGLSPSENASGALEGQAHISRRGRPGLRLTAWRAVWPMLQFNPVMAAKYAAMTQAAAAAAADAGSRQARAAAAAARARRAKARVACAASLLRWIYSMVIHGTSWDAAVASGVPACQPEAA

SEQ ID NO: 427590 - protein, 348 aa, unidentified
MQSKSQIRSIGIDLGKTTFHLVALGSRGQVVVRKKFSRQQLLLYTANLPSSLIGMEACVGSHFLGRALREQGHEVRLIPAQFVRPFVKSNKNDYRDAEAIAEVVERENMRFVPIKTEDQLDVQALHRVRERLVSRRTSVINQIRAFLLERGISFAKGPASLRRQMPEILENADEKLTTRMRRLLDFLWQEWKHLQLQIESLSEDLELIASSDEACGRLQQIPGVGPLVATAVVSAIGNGAAFHKGREFAAWLGLVPGQWSTGGKTKLLGISKRGNPYLRKMFIHGARAVVLRAKREGSYLGQWMKSLEGRAARNVVIVATANKLARISWAVLSSGENYHPMPAVAVAS

SEQ ID NO: 427591 - protein, 364 aa, unidentified
MNKKHGLKKQSKKVPATPESRTVGIDLGDQWSRYCVLDGEGEVIEEGRFKTAPGALTKHFADSERMRIALEAGTHSLWVSEHLRHLGHEVLVANAREIRAITHSDSKSDQFDAEKLARYARVDPKILHPITHRSVEMQLSLNVVRARDVLVRMRTMAVNAVRGLVKPCGYRLQICSTESFVDRCRVNLPAALLEISEPLLKQIEQANEQIAFCDKRIRELADGTYQETKALRKIPGVGALTALTYVLTVADKQRFSQSRDVGCYLGFRPRRSQSGDSDPQLGITKAGDRYLRKLLVQSAHYVLGCYGPDSALRQWGLRICERGGKNAKKRAIIAVARKLSVLLHRLWVTQAEYVPFYEMEKRAA

SEQ ID NO: 427592 - protein, 357 aa, unidentified
MEYYAGIDVSLELASVCIVDANGKIVKETKVESHPEALVALFDDLRLPIARIGLEAGPLSQWLHAGLTQAGFETVLLETRHVKAALSAMTVKTDRKDARGIAQLLRMGWFRPVHPKSVRSQEVRALLVARKLLQNKLKDVELSIRGILRGFGLKVGDVTRKKFESRIRQLVAGQAMLERIAEAMLYARAGLLIQFNKLDKAVRWIVRSDKVCQQLMTVPSVGPLTAITYKSAIDDPQRIKKSKAAGPLFGLTPRKYQSGETDVTGGITRVGDEMVRTALYEAANSLLSPKTRFSALKRWGLEVAQRRGLKRAKVAVARKLAVILHRMWIDGTPFRWSKADGHTDPSRAKTSGSSSCR

SEQ ID NO: 427593 - protein, 344 aa, unidentified
MEYFAGIDVSLRSCAVCIVDGKGTVLLERELPCEVSDIAECLGTLPHLIERVGFEAGTMSQHLFYGLKAEGFDVVCMEARQVNAALSAMRNKTDKNDARGIAQVLRTGWFSPVHMKSREAHGVRALLSTRKALLKKTMDLANEVRGLLKIFGIRLPMTVKHGSFDGVVRPLIEMDDVLTHALVPLLDARVVLYQHFLELDRRVKRAASHDEVCMRMMTVPGVGPIASLTFKAAVDDPTRFKRSRTVGAHFGLTPRRYQSGEHDNPGRISKAGDRDVRATLYAAANALLMRTMAGSQIKSWGMRLMRTKGRRRAVVAVARKLAVLLHRMWVDGTEFRQDQVGGAA

SEQ ID NO: 427594 - protein, 350 aa, unidentified
MTIIGCDYHPGFQQIAFVDTETGDYGEQRLAHSEGAEKFYRDLAAQGKKVRVGMEASGHARWFERLLTELSFELWVGDATEIARKRERKQKTDRQDAQHILQLLMENRFPKIWVPSGENRDLRQLLWHRHRMVQARTRIMNQLQAVALNEGLRCKKKLWREKGRQQLEAFRLAPWASRRREDLLQLLERLNPTISDLTQAIEQEVEKCPEARRLRTHPGVGALTALAFVLIIGRAERFQCGKQIAAYLGLVPLEDSSGNRRRLGHITKQGSSILRFLLVEAAQVTARSIPEWRNKYVHLTMRRGRKIAKVAMARRLAIALYWMWRKGWDYEQLRKFGSHAGQPGNRDGVK

SEQ ID NO: 427595 - protein, 394 aa, unidentified
MRGFFKSKQPNRYVDPEVSPISQSSKSQNSTKVASLMESRQNLNEQSPLLIFKTMTNQIIRQNVGIDVSKATITVAIAQKKLDQSVVIKSTKTFSNNLAGFAKMDNWVKQFTDTQIAIHYNMEATGVYYEALAYWLYERQRPTSVILAKQFKNYAASLNIKSKTDDIDARVLAQMGVERVLSFWQPHSCQMRTLKQLSRERNALKDEQIDIKNQLHALNHSYRPDENNLKRVEKRLELIKQQVKEIEQDIKNIVEKDTQLKQRIDNVCTIKGVGFITAISIIAEANGFALFRSKAQLVCYAGYNVINKDSGTSVKSKPRISKKGNKNIRKSLHFPSLTAIQHDRNMQKTYDLIYDKTKIKMKGVVAIQRKILVLIYTIFKKNEAFDENYFQKTA

SEQ ID NO: 427596 - protein, 354 aa, unidentified
MSQRQHTTAVPSCTIGLDLGDRSHAWCALDAAGQVTARGTIGATPAALAALSTAHPGARMILEAGTHSRWVSRQLAAAQHEVVIANPAKCYQGRRRQRNDRRDAEFLARQGRADVTLLHPITHRGPHTDAPLALLRARDQLVAARTRLINTARGLVKPTGTRLPACSAESFPTKARSALPAALRDAVQPLLDTIAHLTTQIRAYDRDIRHTLLPQVPVAARLAAAIPGVGALTALAVVLLIDDPARFRHSRDVGAYFGLVPKLDESGDATPQLRITKAGDPLGRRLLVSAAHYILHRGPDSALRRHGAALMQRGGPNARKRAVIAVARKLVVLLHRLWVTGAPYDPLYGLPRAA

SEQ ID NO: 427597 - protein, 343 aa, unidentified
MEQYVGLDVSQEQTSVCVVDGDGKVIWEGKCTSTPEAIAATLRTRAPEAVRIGLESGPLSAWHWHELRKLDLPVVCLDARHAKAALALQLNKSDRNDARGLAQIVRTGWYREVAVKSVDNHLVRSLLTTRAQLVRMRVDLANQIRGVLKPFGLIAGKGGGRPFAERVRALVAGGPLQEVAGALLAAWQAIGEQIAVLGRRLVAVARQDEAVRRLMTAPGVGVLVALAYVSVVDAPERFAKSSSVGAYIGLTPRRYQSGEADYTGHISRCGDKLLRTYLYEAAGIILHRVPRWSALKAWGTRLARKIGTRKATVAVARKLSVILHRMLRDSSEFRWSAKEVQAA

SEQ ID NO: 427598 - protein, 420 aa, unidentified
MTRREPTPPEAALVAIDVAKRRNEVLIEAVRGGYRRRMTILNTRADHDKLIASLQAMRKPVVVGLEPTGNYHRVLAHRLIAAGFSVRLISSMALVRTREALHNGWDKNDPKDAQVILHMLGIGATMVYQDPLVAGINDLQELSKTHEVVSKAKTEIWHRLLTHYLPLYFPEIERFVGNSRSDWFLSFLERFPTPASITAMTKENFVRAAWDVVGRKVSKARLLGDIYETACTSAALPVSLDSPAIAMFRLVLAEARSLIQQRNIIEAHAHELLREWPDYLRLRQVPGIGPIHALTILAEAGDLRRFRHHRQFLKFCGLDLATHQSGQFRGQTRLSKFGNARLRRTFWLAAQVAIRQRDNSLRDCFGRHVAKDRESRDLRRKATVAVATKMARVVHALIKTGTDYRPFPEGPVPSGRTLSL

SEQ ID NO: 427599 - protein, 333 aa, unidentified
MRKKWFIGVDISKKTLDVVIYDSKKKHSDSANYLKVSNDEEGFNRMLSWFQGKRMSLSGMVIGMESTGIYGFDLRVFLESKGIDHCVYMPLALKRSLGLTRGKNDKLDAERIAYYTWLHREELSCSKLSGSAVLRLQELSNERKTLVKQQAAYKAYLTEMDGRERTASCVRAEEMLAFLKAQMDTVEKEMEEVISRDSSLSHNYRLLLSIKGIGSVNAIHTIIHTNNFEAFETARQFACYLGIAPFGHTSGTTVKGKPKVLRMGPKQLKADLSQAANSAIVWDKELKAYYERKRKEGKAYGVVLNAVKFKLVCRMFAVVKRGTPFVELMNYKS

SEQ ID NO: 427600 - protein, 355 aa, unidentified
MTSTKYIGMDVHKESISIAVLNFAGKVVMECVIETKASTILQFIHGLRGDLQVTFEEGTWAGWLYDLLKPHVTELVVCNPRKIALLKDGSKSDRIDAHKLADLLYMNKIKPVYHGEHGLRMLKELSRSYLTISKDFGRVMNRLKALYRSWGVPCAGTQVYAPRYRSEWLSKITEAGVRRRAELYYQQLDALRLVRQQARKELLVEARKHRATKLLRQIPGIGPLRAAHLVAVMQTPHRFRTKRQLWTYSGLGLETHDSAQYRVVERQLQRSNKPVTLRGLNTNHNHDLKDIFKGAAMRASTAAGPLHDFYEALLAKGRKPTMARLTLARKIAAITLIVWKKEVRFDANYLKQQAA

SEQ ID NO: 427601 - protein, 318 aa, unidentified
MAMRSKLEALGVDVAKDWLDIFNGETVVRVDNNAKAIRAFLKSLTHSIPIAIEATNVYHELFVRLALAASHKVYLVDAYRVSRYREAVGVRVKTDSVDARLLFRYLNAEMAHLRPYQPPPKAVKRLMTLLRVRAKLTHSKTALKQSLAGIGELAQTSKALLRRIDQAIQLIDHKLIHCISHSGYINDYNRCQTIKGIGPINAAALVAFYHRGEFRKADAFVSFIGLDVRVRESGRFKGQRKLTKKGNPEIRRLLFNAARSGARTAQWKPYYDTLRERGLTTTAAAVAIARKMARLAFALMRDQTEYQAKYDEKTCLFT

SEQ ID NO: 427602 - protein, 351 aa, unidentified
MVHVGMDLHHRSSVVRALSDETGELYPARTIHHDRIDELWQYLDSFGDEPIRVVFEAISNARWMYRLLGQRPNVQPVAVTPHKVKIIAETISKTDKIDAGKLAWLSSVNMLPRAWLPDERVERLREMTRHRTSLLGIQTKCKNQVTSGLVRLGMQRPYDNIFGSLGRRWLAAVPLPEVMRLQVEHWLTLLDTTAQRMLRMDRKIHGIIQDDPIWARAAALLDTIPGVGKVTISTILAELGDWKRFRRRGEVASFAGLVPVSKRSANTKRYGHITKRGSKELRRVLTEIAQGVARRVPQYGWLYARVASQKCANVAKTAVARRLIEDAWTILMKNEPFRLMPVQAESLARVG

SEQ ID NO: 427603 - protein, 314 aa, unidentified
MTHPVRFVGIDVGKARLDVAVADGPAFHVANSAKGRDELIVRLKPLGVVAIGVEASGGVERDLLDALLAAKCDVRLLQPARVRKFAEARGRLAKNDALDARLIADFMAVVPTRPLRRDPNVEALAELVDVRRRLVDEKAQMQVTLGEHPPRDAAVLRMLRRRLRRIEADIVLLDKRIADTLADDPVLAPRARRLLQVPGVGPTLAATLIAHLPELGELEHRQIAALVGVAPYDHDSGTMRGKRRCRGGRSKVRNVLYMAALSAGRFNPALAAMRKRLKDAGKPPKIILVALMRKLLTILNAVMRHDSEWRKAKA

SEQ ID NO: 427604 - protein, 396 aa, unidentified
MPATTRHARVPALPESTTAQARLLYLALDLGERHWTLAFTVGRGQRPRVRTIPAGDLERLTTELAAARRRFGLPPEAQVVSCYEAGRDGFWLHRALLAAGVTNVVVDAASIEVPRRARRAKTDRLDARKLVTMLVRYIEGERPVWHVVHVPSEADEDRRHLERERETLVADQTGLVNRIQGLLATQGVRLALRGDVPAQLAAVRRWDGTPLPPELRARLEREWMRVEAVRTALRALTTARHRRVTTPTPPATDAATVHLTRRLAALAAVGETTAWLLATEMFSWREFRNRRQVGSFLGLTGTPDQSGDRIREQGLTRNGSVELRARVIELAWGWLRYQPASALSQWYRQRYGGGNARLRRIGVVAVARRLLIALWRYAMGGPPPAGAHLKDDAMVA

SEQ ID NO: 427605 - protein, 388 aa, unidentified
MSSLPAGAVTAVRSIIYLGMDVHKDSITIAVLPEGAKAPSRVDRLPNDLPKLKRWLERVARDGEVRGCYEASGAGYVLHRALAEWGYACEVIAPSLIPKRSGVQRKHDAHDAADLARLYRAGELVAVRIPSEADERVRDVVRCRGIFQREILKSRHYILKFLATRGFVFRAGTNWCTPHLKWLQQLTTDGSPLAAHDRLVYREFHALLTYKLSRREELDRQIEQLALLPHLAPMIARLQCFRGISLHSAMVLATEIVDWRRFERPAQLACYLGLVSREHSSGDRQRLGSITKAGNSHCRHVLVQAAWSYRHRPQTSVDLKRRQQGQQPSVIGHAWKAQQRLHQRFNHLSYRKRPQIAVVAVARELVGFLWAVMQDVPQDVPPRTQHAA

SEQ ID NO: 427606 - protein, 337 aa, unidentified
MSILSYFVGLDYHQSSVQVCVLDREGTVLANLKSPNCCGTIAMLVRSAVPESARIFVAIEACTGTPNFTDELIKLTGWSVDLAHPGYVAKLKQSPDKTDFSDARLLADLERVGYLPKVWLPPESLRDLRRLVRYRQQLAGERRNVKLRISAVLREERIKAETKRWTKPWLHWLAGLEELSPHSRWIIDRHLEKLELLQQQIREAERRLSAATCDDPTVKRLLELKGVGLVTAVTLRAEIGRFDRFRTGKQLARFCGVTPRNASSGERQADAGLIKAGNPELRRVLIEAAHRLGRYDEHWSKMNTRLRRAGKPGSVVAAAVANRWVRWLYHQMKTISV

SEQ ID NO: 427607 - protein, 414 aa, unidentified
MTEEETISWFAGVDWGSERHQVCLLDARGTTVGEREFPHSGEGLAELGDWLLSMASAASTVAVAIEVPHGPVVDALIDRGFVVYAINPKQLDRLRDRFSVAGAKDDRRDAYVQADSLRTDRRLFRRLQVADPRLIELRAWSRLAEELRAERVRLSNRVRHQLWRYYPQMLKLTDDLAAPWFLELWAIASTPAKAGRLRKSTVERLVKQHRIRRMEAETILRILREPAIKVAEGVAEAASIHMRSLIVRLRIVNRELREAERKLDELCTAISEIEQTLGEGLQRRDVAILRSMPGIGRINLGTLLSEASGPLSRRDYEGLRTLSGAAPVTKRSGKSLIVVRRYAAHVRLRDTVYHWARVATQRDPKCRARYTALRKRGHSHGRALRSVADRLLALACVLLQRQTLFDPYFGRSTA

SEQ ID NO: 427608 - protein, 422 aa, unidentified
MLEETQDDAEIIQRIAALDIGKAEVVCCVRVPAPGSAGRRVQEVRICSTMTRSLAEMADWLGGLGVSRVVMEATSDYWKPVFYLLEAHGFQTWLVNAGDVKHLPGRPKTDKLDAIWLCKVAERQMLRPSFVPPEPIRRLRDLTRYRVDLVGERGREKNRVEKLLEDAQIKLSAVASDIFGVSGRAMMDALIAGERDPAVLAGMARTRMRTKIGQLHEAFIGHFTNHHAFLLQRMLAHIDAVNADITAVEERIEEVIDPFAHAVTRLDEIPGIGVTAARAIIAEIGTDMGRFPTPAHLASWAKFAPGVKESAGKTKGTAATGHGNPYLARVLGEAAVGAARTNTFLGERYRRIARRRGKKKAIVAIGRSILTIIWHLLSDDHATFTDLGPGYYDTHAGTQRALRNHLRNLEALGYTVTLHPAA

SEQ ID NO: 427609 - protein, 322 aa, unidentified
MNKYNETFGVDISKDVFDVHGSKSGHVQFKNDEKGFKAFLKSLPCQALVVMEATGYYHYRLAQFLYKNDVLVSVVNPLSVKRFIQMGLAKVKTDKSDAKAICNYALINDVPLYTALTDIQSECLQLFRLLDSFIKHRTATKNKMHGEETLGVPSKAVYRSLKRNKKHLDKELAAIEERILSLVKKDQQHQLTLLTSIPGIGIKTALFLIVVTDGFSKFENASQLCSYVGITPVVKESGSSVRGHSKISKVGNKKLRNLLFLCSFNACKHNKACNGLYERLVNKGKSKKLALIAVSNKLLRQTFAIAKSGRPYDDAFVSVLKK

SEQ ID NO: 427610 - protein, 378 aa, unidentified
MDVIYPRCAGLDVHAETIVACALWEEDGHIQKDIQTFSTFSKGLGDLLEWLEEHGVTHVAMESTGVYWKPVFAFLEGYVDLTLANPQRIKNVPGRKTDVSDAEWIAKLLRHGLVEKSFVPPADIRELRDFTRLRKKWVGQLTSEKNRIQKVLESSNVKLSSVLSDLFGVSGRNILARLLEKGYVDKDELDECLRGRLKTKKQAVYDSLLGTLTEHELRLLRLLWKHVEELEQLIEEVDQHIDRLLEPYREEVELLMTMPGVKKQTAAVIIAEMGTDMSVFETPERAASWTGLSPGNHESAGKRKSTRTTKGNPHLRSALCEAAWSAARSKTHPLSRKFWSLAARCGKKKALIAIARRMLVIIFCMISRKEPFRQPQLI

SEQ ID NO: 427611 - protein, 357 aa, unidentified
MTQVTIVGCDLHDRTMLLRTAIGQDEPDQRTFRNDFSGRKEMLYYLFQFARKSGSERIVFVYEASGQGYGLYDLLTEQGIDCFVLSPTHIPRSAKSKRHKTDAKDAQRLLELARGHVLAGNQLPVVWTPPQRLRDDRELLRARLEAAESCTRVKLQISSMLKRYSITQPDWFLRNRCWTRRYVKWLEVQAQAMDRVVRPVLLSLLDRYELLRSQVVDFERHIRALAKTDRYKLPYRELRKIPGVGLITAMTFLTEMGDLQRFSNRRQVAAYLGVCPSSSESGEANDRKGHITRQGPGRVRKVLCQASWAALRYDEDVYRRWKRIRGGKQGRGKKALVAIMRVPAAATRPRPCESPRP

SEQ ID NO: 427612 - protein, 318 aa, unidentified
MGDSPSIFVGIDVAKLKLDVVLLPVGEHFQVANSPEGLGQLVERLKVQPPQCIVLEASGGYERPCVAALVEAALPVAVINPRRARDLARGLGKQAKTDRIDAGVLAYCAQHCELHKAVKTPEKQAQLEALVTRRRQLVAMCSLERTRLEQATIKRTKNDIQDTLKFLGRHLEKIEQQIAELIDSDDYWSGLAARLESVPGIGKATAAILLAELPELGHLNRQQIAALAGVAPYHRDSGSRKGKRAITGGRAALRSCLYMAALTARTWNEKIRAFHQRLVAAGKPFKVAQVACIRKLLTILNQIAKTGLHWNQHLPKKA

SEQ ID NO: 427613 - protein, 335 aa, unidentified
MWHVGIDLGRTSLYVAAVNDSGEARGPVAIRCRDTDAILREFEALRPFRTVIEATGTYRWLHRLLCPLGSVLLAHGARLRALVNRRSKTDKLDSQLLATLLRINQIPLAYIPSEAYQYLRDITRQRARLSRLQSEAKTGLRAVLARNNITAPYRVPFGPRGLKWFAKQSFGLADDAVRDELLSRLTHYSLEIAAVDAHLETIGMSYPQTEALIDIHGMGHYFALLIVAEIGDPERFRSARQVGAYAGLTARVNQSGEHAYYGHITRQGSSWLRWALVQVALHVCRKDQALNLFYTRIRKRSSAKIARVAVARKLAEICWKRLRRWHRMHPEVQAA

SEQ ID NO: 427614 - protein, 338 aa, unidentified
MDTETGELQELRLQHREEAEKFYRDLEAQGVKARVGMEASGHARWFERLLMELKFDLWIGDAAEIRTKRVRKQKTDRKDAPLILRLLLEDRFPRVWVPSWENRDLRQLLRHRHRMVQARTRIMNQLQAVALNEGLRCKKKLWREAGREQLESFRLAPWASRRRFDLLELLDRLTPTIEELTQAIEQEVEKCPEAQRLQTHPGVGALTALAFVLIIGRAERFQCGKQIASYLGLVPLEESSGQRRRLGHITKQSNSLLRFLLVEAAQVTVRSDPEWRRKYFHLAMRRGRKIAKVAMARRLAVRMYWMWRKGWDYEQLNKFGSHAGQPGHRDGVKLTPSN

SEQ ID NO: 427615 - protein, 304 aa, unidentified
MFGIGIDVSKATLDVAVHGEQFRQFSNDKRGFVRLIRWLKTWPIKQVVLEASGGYERAALDVLHAAGLPMVRINPARARRFAQGTGRAAKTDRLDATVLAQMAHLLPLTRYVPPAPWQQRLAEFAQCRRHLVQMRVSEMQRLRRLVDPDLIAMKQRYIAQLSDDLKQLDKAIAEQLEGQPGWKNIGALKGVGPILISTLASELPELGSLGSKAIASLVGLAPMNRESGTWQGQRRISGGRAVVREALYMAALTAIRYEPRLRTFYAGLKAKGKASKVALVAVMRKMLVILNARKRDAEVAIGCP

SEQ ID NO: 427616 - protein, 400 aa, unidentified
MNAVGIDVSKGISTVAVIRPFGEIIKMPFDVIHTQEELKKLAKLILSFDGETRVIMENTGKYHQPIANALVKAGVFVSVINAKLAHDYGGDTIRRAKTDKIDSLKIAAYCLDKWVKLEPYEPEDEIRKTLKTYNHQLAEYNKLKLMLKNNLISLLDQVFLEANELFTSPARESDGHEKWIDFALEFWHCECISGLNENVFTVRYHKWCSKNKYQFSSEKAQLIYATATKSPSTLPKNEFIKTLMQQAILQLNSLCQTIAILKKEMNKIASQLPEYATVLAMHGVGNTLAPQLIAEIGDVRRFEKRTSISCFAGIEPPENQSGKYEQKSRHISKQGSPHLRRALFCVMMAVLQNKSTDEPTFQFLDRKRAEGKPYKVYMIAGANKFLRIYYSRVTQCLGTL

SEQ ID NO: 427617 - protein, 407 aa, unidentified
MDEKVWVGIDVGRHAHHAAAVDETGTVLWSRRLPNDQPAIEALVDRVAGVETVVWAIDMTAPESALLRGVLAVRRQHTRYVPGRVVHSMTGAFAGEGKTDARDAVVIAQTARLRGDLTTISVPDDVAIELDLLTGQRSDLITERTRGINRLRGLLTRIFPGLERCFDYSTLTGLAFLTRFATPSAIAAVSDDEIYDHLRGHGVRRPTIPKMINKARAAAASQTIALPGEATTALLVRQAAASLMALTRQIAELDKQITEVFRRHPHAQILESVPGIGARSGAELIAITGGDLASFGSAAKLAAYAGLAPVPHDSGNRRGNVRRPQRYHRGLRKVFYMAALNSSQRDGPSREFYQRKRCEGRSHVHALIALARRLVDVVWALIRDGRVWLLRPTVERVSVDEVGAMAG

SEQ ID NO: 427618 - protein, 370 aa, unidentified
MDEGIKFFVGLDVHKDSIAVAVAEAGRAPARLIGSIGHDVAKLIKRLARYGAPGQVQVVYEAGPTGYGLQRELARRGYHCQVIAPSLIPKRAGDRVKTDRRDGLRLAELSRAGELRPIWIPDPADEAIRDLARAREDAVNARTQVRQQLKGFLLRHDVRYSGKTSWSKTYYRWLGTLNFGLSGAQKAFTEYWQAVTSADERVARLTDALAHSIEGWRFESVVLALQALRGIDQISAIGLVAEIGDIGRFAHPRQLMGYLGLVPSEHSSGERVARGSITKTGNAHARRLLTEAAWSYRFQARIGYRAQRRAESLPQAIRDLAWKAQLRLTGRFARLRARGVQINKVCVAVARELAGFVWAIASTRTKLPQS

SEQ ID NO: 427619 - protein, 367 aa, unidentified
MALKIVYKICCGIDVHKTFVVACVASTSDKGITSYESHRFSTYTSGLKTLLQWLIDRNCKDVCMESTSKYWIPVYNILEKGCSIVLAHPKYVKAIRGKKTDKKDAKWIADLFKHDLVAGSFMPPSDIRQLRDLMRYRFKLTCFKSSEKNRLQNCLTVSNIQLGNVVSDTFGKSAQAILDKLLENPADTSFDLEPLVYKSLKKKLPELRDAIDGFITPEQAGKLKIIKDHYDNLESRKAELEELILALAAPYQQELTILQTAPGISSNFTAIGIISEIGTNMEAFPSAKHLCSWAGLTPTNNESAGKKKSVRVSKAGCYIKPLLVQCANAVVKSTKHPEMRNRYLRLKKRRGHKKAILPENRSSSSRA

SEQ ID NO: 427620 - protein, 362 aa, unidentified
MYLCILDQAGETLLHRNMPATPEALRKAIAPYRGQIVLAAACLFTWYWLADLCAEHAIPFVLGHALSMKAIHGGKAKNDKIDAQKIAVLLRGGMLPQAYVSPAERRATRDLLRRRMQLPRTRAALLAHVHHTNSQSTLPAIGQKLAYKANRDGVAERCADPAVHKSLAVDLALITSDDAWRRDGELSLVTTAKHHDANTRSLLPTVPGIGKLLRLVLRYDIHDSARFPRGQDFASSCRLITCARASAGKRSGTSGATIGHAHLTWAFSEAAVLCVRDHPAAQQWLSRFAHKHGTGKAWTILAHTLARAVYDRLQRQTALDRQQCLQASGRGVGARHASLDHQGMHRIRHAQHTVKNCVVERP

SEQ ID NO: 427621 - protein, 423 aa, unidentified
MDVMRDCVAGLDVHQAMIVACVRRQSGGKASRDCRTFDTTTDGLLVLLAWLTEAGCTHVAMEATGVYWKPVWAILSDGAFELVLANAAHIKNVPGRKTDVNDAMWIADLLACGLIRPSFVPDEPTQELRALLRTRTQLVREQARHTQRIHKTLESANIKLSSVVSDIMGLSGRRMIEAMIAGVRNPAKLAELADRRLKATRKELYDALHGRLTEHHRFLLHLHLSQFDALAAAIEQIDIEVQASITRMDEEVAEGQATFLSLIGLLYTIPGVSRHAATVILAEIGQDMSRFPTAGHLVAWAGLCPGQNESAGRQKSSRLRKGAPWLKTLLVQCAWAATRKKDSYYRAQFHRLRARGGAKQAICAVAASILTAIYHMLKNGTKHVDLGATHFDQRPTLVKAKRLAARLEKLGFHVELHPIQSAA

SEQ ID NO: 427622 - protein, 341 aa, unidentified
MYYIGLDVHKKTISYCVKDVSGQVHREGKIGTTRNELDCWVGTLPQPRIMAMEATIFTGWIYDYLLPHAEQVKVAHPLMLRAIAAAKKKNDRIDAGKIADCLRCDFLPECHMASTEIRDRRRTLRYRHLLVRQMVQMKNRISGLLMETGVTYNKQRLHKRGYFGELLSSNEEVQENIRPLLRLSRETIVRCQRTEYALVSSLQRDPLLAERLRRLRTVPGVGPITALTWALEVGDVSRFRSVKQAISYCGPCGEEKSSADKVLRTPISKQRNKHIQRVLVEAAKLAPRQNHELALIHERENQKGNRNRATLAVARKMVAYLLAVDRREREFVPAEGRGKAA

SEQ ID NO: 427623 - protein, 341 aa, unidentified
MAQVTIIGLDLAKNVFQAHGTSETGQVVFRKKLTRNQVLSFLSEQPRCIIAMEACATAHGWAREIGRLGHSSRLIPPQYVKPYVKRQKNDMADAEAIAEAASRPTMRFVEIKSEDQQASAMAYRTRQMFIGQRTQSINALRSHLAEHGVIAATNKRGLKKLSAMIEDLTVGMPDKVRGIARVYVDHIEGLTAQIAEMTEAMKTVAKTSTIMKRLQTVPGVGLQTAMAIETFAPDLTCFNRGRDFSAWLGLVPRQNSTGGKSRLGKVSKMGQVDIRSHLIRGAMSVISAASRFGVKKGSWLERLLARKPKLVAAITLANRMARAIWAMMTKNQDYRNPEAVA

SEQ ID NO: 427624 - protein, 349 aa, unidentified
MQITTVGIDLAKNVFQIHGVDEHGKTALKKQIRRDQMATFFANVSPCLIGIEACGGAHHWARKLQALGHTVKLMAPQFVKPYVKTNKNDAADAEAICEAVARPNMRFVPLKNVEQQAALALHRVRQGFVGARTAQANQIRGLLAEFGLVVPQGLAHVMGDVRDLIEDASNDLPGSFRRLVERLLDHLKELDRQVNELEAQIKDPHRKSEASRKLEKIPGIGPITASALVATIGDARSFESGRQLAAWMGLVPAQSSSGGKTNLLGISKRGDTYLRTLLIHGARSAVRAFQSKPDQSGNPWLQKLLGRRNLNIAVVALANKNARIAWALLARDREYEPGFSPDKASSSPA

SEQ ID NO: 427625 - protein, 387 aa, unidentified
MNFIGVDLHKKSITLCVMNEKLKVLARKTLYCNQPDQIVEFFRQFRPFKVAVEATASYLWFVELVEPLAEEVVLANPKKLRVIAESTKKTDRLDAQILSEFLARDQIPRAYMPTPRQRQHRALVRHRQYLQGRMTSVRCKIHHILSDYNADRKDLFSSNCGPAYIKEIKLDDADRFVIKQLWSEWEDHRSRLLAVTKKIKAFIAKAPNREKEARAILKTAPGVGFVTAEVILSEVGDVSRFRNAKAVCAYAGLVPAVRQTGGKRSKDLAITKQGSGLLRWALVESAWRLVKTSPKWTAFFSRLRKRSGKKRAIVAVARKLLCVLYAMLKTSTPYKIVATETKAPKTTHKRLVRISTPEEVVPAETKAPRTTRRRLVRKSSPEQTVTT

SEQ ID NO: 427626 - protein, 362 aa, unidentified
MPKMIWLGMDVHAASITVAQYEDQAPTATVQTIANDPAQVRRLVRRLPAGSDVRACYEAGSCGYGLHRQLTALGVHCDVIAPALIPRRPGERIKTDRRDAEKLGRFYRSGELTTITVPTPSQEGVRDLVRAREDVRRDRTAARQRLAKFLLRHGHRYPGSHWTKRHWEWVCGHTFDGPARTVFVHYCDHVLALNERLAHLEREIRTLAESAAYQPVVTRLSCLRGLATLSALVLIAELYDLRRFRTPRELMAYLGLVPSEHSSGARERRGRITKTGNALARRLLIEAAWAYRHPARQTRRVQQALTTQPPEVHAISDRALHRLTARYRRLLSRGKTPHHAVTAIARELCGFVWAIALVPDLA

SEQ ID NO: 427627 - protein, 349 aa, unidentified
MDRTTYGLDIAKNVMQLHWVDAQTGEIGRRKLARARLAAYFAQLQPVRIVMEACGSAHHWARVFTALGHEVQLLPAAQVRAFVRSHKDDAADARAIWVAAQQGDIRRVPQKNVEQQAVLSLHRTRQHWVSVRTATVNSLRGLLYEFGVVLRGGRQAGLKALAEQRAAIDQQLPVVMHNLLDGQLHTLEQLQQRIDALEGQIAALQGQLKGGPELDRVPGIGVLGATALAATLGDGKAWRSGREFSASLGLVPAHAGTGGKVRVGHISKRGDPYLRTLLIHGARSVIERAKHQPKWLEDMLARRPKNVAVVALANKMARTAWAMVAHDRAYQRDWKSARPGSAAAQAAGA

SEQ ID NO: 427628 - protein, 313 aa, unidentified
MNETPCFVGIDVSKASLEVALRPSGKQQSFSNDGDGIARLVQWLRVEAPSLIVLEATGKFELRVARALAEEGLLFNIINPRQSRAFAKATGILAKTDRIDALVLARFAEVLQPEARPLKTEETEALNDLVTRRRQVVEMITAEKNRQVTASKRVRRDIQAHIRWLEKRLEDLNDDIDDLIRQSPLWREKEKLLQSVSGVGPVLVSTLLGALPELGTLNRKQIAALVGVAPFNRESGRFRGKRTILGGRGPVRSVLYMGTLAAIRYNPVIRVFYQRLFEAGKPKKVAITACMRKLLVILNTMIKNGASWQYQPA

SEQ ID NO: 427629 - protein, 340 aa, unidentified
MNKFNSIAIDLAKNVFQVCILSPDRIVIQNKQVSRAKLSSLLSNQETSIVAMEACYSSHYWARVFSDMGHKVRLIPAQHVKPFVRGNKNDRNDALAIAEASWRPNLKYVPLKTVEQQDIQALHRIRDKLIARRTSVVNQIRGLLSEYGVIIPMGLAGFKQHASQLLDPSEPRLTSRMKLQLAEAKEEFDSLSRRSLSIEKELKNYAQDHPLCQRLMTLPGIGVLNATALFAAIGNACQFSTPRELSVWLGITPKQYASGEKSKTGGITKRGNRYLRKQLIHGARTLLHRTKGKTDKLSVWIQQIVERRGKNKAVVAIANRLARLAWILLQRNEDYRAIPA

SEQ ID NO: 427630 - protein, 398 aa, unidentified
MAYEVTTETVVIGCDVGKTHHQIHVIDSVMQRLGRRRISNTISDVDDMFGWVKTLSSDVVLIIDQKASYAALLRHRAAVHDVPVLYVTGLQARRAADLTPGRAKTDRIDARVIAEFGRIHADRLPTLELPDESRASMSLLLGRDEDLRCDFNRAINRIRDLLTSINPELETSLGRRLTAPGVLAVLARWGNPANLSRVRVATIAKVIAEHNPRMALTVADVMRRAARQTLEVAGIDITGELISRLATQAIVIAAERADITPRLERLAADHDDYQLLISIPGMGPRTTPRAIAEIGDISQFPTPGHLASYAGLAPINKQSGSGLNTVHKDQAGNHRLKNALFLAAFVATRSDPRAAACYQRQRDNGKHHNAAIIAVARKRCDIIWAILTKRTPYEPLTT

SEQ ID NO: 427631 - protein, 372 aa, unidentified
MLVKTTPMSLTLNPNPIMHYAGIDYHKRYSVVHVLDESGETVGKGRINHDRPANFRDFFDSIGGSFSVVFEASMNWHWLHDILEEIDSIESIVMAHPYKTRIIAEAQVKSDKIDARLLAQLLRGDLICKAYACGREARHRKELVRQRAFWVRIRTSLRNRVHRLLGGEHDLQLPEVSDLFGRKGIGVLNKLELHEPARMQLKQNLRMLSELNQHIKTVEKSLDDEIGSDENVIRLKSIPGIGPIIAAVIVSEIDHIERFNSSNKFCSYAGLIPSSSSSGGKTHNGKLVARCNRWLRWAFVEAAWVAVGCDGYFGSLYRQHKARGKKPNTAIMIVARRMCQITYRLLTEKREYSAAPLNDKTFPGGSEVRMAV

SEQ ID NO: 427632 - protein, 346 aa, unidentified
MMIIGCDFHPSWQQVCWLDTETGDTGERKLVHADGDAERFYRSVSGPALIGMEATGNSHWFVDLLAEMGHELWVGDAAQIRASYVRQQKTDKRDAAHILKLLAEGRFPRIWMPSSEVRDLRQLLLHRHKLVILRTRVKNELQHLCLNQGVQRKRKLWSEAGQKLLRELPLRPWAARRREDLLRLMAMLEQQIDPLDAAVKAEAQRDKMALLLQTQPGVGPVTSLAYVLTMGDVSRFPRGKQVASYLGLIPREHSSGGRQKLGSITKQGNRMLRMLLVEAAQTTVRLDPGFRKQYLHRCHQKPKAVAKVAAARKLAVRLYWMLRTQTKYPEIVRIESSPGLALVGES

SEQ ID NO: 427633 - protein, 340 aa, unidentified
MGQATIIGIDLAKNVFQIHGATADGAVAFRKKVSRSKLLPFLSSQALCLVAMEACGSSHHWGREIQALGHDVRLIAPAYVKPFVKRQKNDMADAEAIAEAASRPTMRFVAVKSVAKQASAMVFKTRDLLVRQRTQTINALRGHLTEYGVIAPQGLPNLDRLVSEVRSSSSGLPAIVTELSELLLEHIAALDERIAGLDRQLREQVRTDETAKRLVTVPGIGPICAAAILALAPAPETFAKGRDFAAWLGLTPRQHSTGGKAKLGSVSRMGQRDLRRLLIIGAMSVVRWAARRGAPAGSWLARMMAKKPRMLVATALANKMARVAWALLAHGGIYEVPAGA

SEQ ID NO: 427634 - protein, 355 aa, unidentified
MDSEKYIGMDVHKESISIAVINGAGKIVMESLIETKASMILQFIDGLRGDVQVTFEEGTSAAWLYDLLKPHVTKLVVCDPRKNASMREGHQSDKIDARRLAELLRLNHLHPVYHGEHGLRSLKELVRSYLTITKDLGRVMTRVKAIYRSWAIPCTGKRVYAPRHRAEWLGKITEPGVRRRAEFYYQQLDALRMVRQEVRRELLAESKKHQAWKLLCQIPSIGPIRAAVLLGILQTPYRFRTKRQLWAYGGVGIEASSSADYQVRKGQLERKKKPVEIRGLNRNYNHDLKNLFKGAAIVAASKAGPFQEFYTALLTKGMRPDMARLTLARKIATIVLMVWKRGVCFDAQHLKPQTA

SEQ ID NO: 427635 - protein, 343 aa, unidentified
MAEYVALDVSWRSTSVHIVDEQGRCLWRGTCPTDATALADTIRRHAPAVERVGLETGMLSTWLCHELAEAGLPVVCMDARQAEAALSCRIDKTDANDAEGLAQLLRTGFFRQVRVKAKGTMLVRTLLSARRQLVRTGLDLANQIRGLLKIFGLLPPRGGGRAFEAAVRERLAGHAQLATVIMSLLQAWRAVREQVLALDRQAYATAKRDARCRLLLSAPGVGTITALAYVAAVERPEEFRNGRAVSAWVGLTPARHRSGQVDYSGRISRQGDVHLRTYLYEAANAVLTRSRPDTALKRWGLGLKARLGHKRAVVAVARKLAVVLHAMWSKGEPFETDAVAAAA

SEQ ID NO: 427636 - protein, 363 aa, unidentified
MQYRTNTELSSFEETRCQFNGSTGVIKLGIDVHQDFYVVVEQLGGSNPKPPQRFKKEAFVLWAAKLKKQGNQVHAVYEACGFGFGLQRQLSALGIDCHVVCPQKLDEQNRRVKTDGLDAKALCLKLDRFVQGNRAALARVRVPTEKEERLRAIHRQREQLVKARKRLEAQGRSLMVNHGIEPIQQWWKVRAFARLRVPTWLQELLATSQPILLALEQKIKTLTLQLQNAAQPNQPRGFGALTSVVIDREIGNWQRFNNRRQIGSYTGLCPGEHSSGNTRLQSCVTKHGNPRLRAALVELAWRLVRFQPNYKPIVKWRATLAKGALATGAARKKAIVAVARQLAVDLWRIRTGRLQAQELGLIN

SEQ ID NO: 427637 - protein, 346 aa, unidentified
MRFYTKQHRYYCGIDLHARSMYVCVLDQAGEKVVHRKIPSKPAHLLRLLKPYRRDVVVAVECMFCWYWVADLCAQEGIPFVLGHAFYMKAIHGTKSKNDRIDSYKIAALLRGGNLPMAYVYPSEMRATRDLLRRRMRFVRKRAGVLSHIQNTITQYNLPPYEGRIDEARNRGGLLEHFEDEDVQMSVAANMTMLDTYDVTIHELELYLESRAKVHDASSFYLLRTTPGIGKILSLTILYEIHQISRFPEVGNFLSYSRLVAGTHESAGKKKGSRGRKMGNVYLKWAFSEAAALYQRCNPQGEKLLQRLEKEHGKGKAMTLLSIKLGRAVYYMLRRREPFDAKKFTR

SEQ ID NO: 427638 - protein, 340 aa, unidentified
MTEKIVVGIDVAKSSMDVAIQKPGRTTYLQKQFQNTNKGINKLIEVIEKEKESQNMTTIHVCLEATGRYSRSITTMLLNTTQYKISEVNPAKISAFGKTLLLRTKTDRVDARLICEYAQKMDPIASQKIPKWKVELKEYTRFLANLIKERSSLKGYLDAMDIPDIKKTVSAQIRAYDRHIIKVESKIKSIVDSEPKLKKECQLLKSIIGVGQKLAVTALSELIEETKSTRSTVAYSKRKQTAHAGLAPSKRQSGTSVNGRPKICKTGSGILRKALYMPTLSAIRFNPIISAFYHRLVSKGKPKMVAVVACMRKLLALMIGVLNSQKPFSKEWVSKPYYAT

SEQ ID NO: 427639 - protein, 362 aa, unidentified
MPKSTTIIAFDQHAATTVAAILLPGHRTSALQSLTSDSPTILRFVERVRRQGPVQCCYEAGPCGFELQRALAAHQIPCDVIAPALIPRRPGDRVKTDRRDAGQLAILYRAGALTAIHIPTEQEEAARDLLRCREDIRADLLRARHRLSKFLLRHGRRFTATKRAWTTRHAGWLQAQRWPLAALEQTHRAYVRAVDEAVGRLQAVDAELRDLLTLEPLRSRVERLRCFRGIDDLTALTIAAELGDARRFPSAPRVMAFAGLVPSEHSSGTKQARGAITKTGNAHLRRVLVESAWQYRHHPFLGPALRRRQQGAPTAVIDQAWHAQQRLHRRYRRLAARGKPTQHIVTAIARELSGFLWAALTH

SEQ ID NO: 427640 - protein, 410 aa, unidentified
MEVLYQHCAGLDVHKDTVVACVRHMTNGTVKREVRTFKTMTTDLLALSEWLASEGCTHVVMEATGVYWKPVWHILSDGDVALTLANAAHVKNVPGRKTDVNDATWLADLLAHGLIRGSFVPDAQTQEQRGLLRTRKQLVRERASHVQRLLRTLEDANIKLDSAISDVTGVSGRAMIEALIAGETNPTTLANLAHRGIRTSPGTLREALRGRVTSHHRFLLQLHLKQINALDEAITGIDQEVDTHVQPFRAAIAQLKTIPGISDLSACVILAEIGRDMSRFPTQGHLISWAGLCPKNDESAGKHRSNRMRKGAPWLKTTLIQCAWAATRKKGSYLQAQFQRLRAKRGAKKAIGAVAASMLTAAYHMLKDGTFYQDLGADHFDRKAKGAHAKRLLAKLQSLGYDVAITPAAA

SEQ ID NO: 427641 - protein, 342 aa, unidentified
MKDTIIGVDLAKRVFQVHGASIAGEVKFRKKLTREQFRLFIAQQPPCAVVFEACGSANYWAREVEKLGHEPKLIAPQYIRPFVKRQKNDATDAEAIVIAARQPEMRFVLPKTAEQQAKSVLFRNRERLVRQRTELVSALRSALYEYGYVFPIGLAHLKRMDALVQGRDCDLPSLIVTECRELLAQIAETTEKITTKTKRLKALAEETDTARRLQTMPGVGPLTALAVEAFAPQMGQFRCGRDFAAWLGLVPRQHSSGGKERLGRVSKAGQSDIRRLLIIGAMTRILAHARYKCPAESWLGRMLAKKPKMLVGIALANKMARQLWAMLTRNEDYRDPAMAAAT

SEQ ID NO: 427642 - protein, 482 aa, unidentified
MKKRNIYQNQSQELLHLFEEAGSADKVMCIPMDFAKHDHLVMFCNGRGDIVRKPFSVKNTPEGIAYIDDQVTRSCRRRGIKKKHVFFGGEDANTFAQNFVSTLRAKGYLVANVNAHDAKKQRANVQASTDRIDLMGIATMLLNCRANCHPAQAGIYRNLRTLVRHRRKLVQMLTEVKNRVHGIVDQLFPGFLSEKNTGIVPFTQASLYLMEDRFSPKQIHRRRHKSLIEKLQYFSTSKAEQTAARLQQYTAKVLNAPVEYIDILQLSLSQHVKHIRCLQDGIVQMEKEIALSLSRTQGAFLTSVRGIGFVLAAGVTAEIGELHKQKPLNNLVSYAGIIPRIKQTGGVGGKTYVGSVGKRCNRILKDYVVKSAHHLGWHGEPEFMADHKRRDASGQHADFGVARRYLRMAISLMRSSQVYLPPNLRTKNTDLKERADYYLMTWPYLRDKWRKIDALEAAFAKDRPLGMWRQIVQELYDIKLTI

SEQ ID NO: 427643 - protein, 372 aa, unidentified
MRSPINNGLEAQRRLAVNEISMRKGSWTIGLDLGDRFCQACVLDAAGEVVARFRVATTRKGLERGLARYPGARVVLEVGTHSPWVSHQLEEAGFEAIVANPRRLRSITQSDRKDDRADAEQLARLGRVDPKLLSPIRHRGLSVQRERARLAVRDGLVRSRVLLVNQARGLAKPLGLRLPKCTTEGFASRMRREGMVDAFPGMAALVAMVEQLTQSIRALDREIEAVGRERYPETELLRQVAGVGPLTSLAYVLTLEDPQRFRRSRSVGAYLGLRPRRRQSGEQDPLLRITKAGDPYLRRLLVQSAHYILGPFGPDTDLRRFGLRLIARGGRAGRKKALVAVARKLAVLLHRLWVTGEAYEALRGGAAPAAAA

SEQ ID NO: 427644 - protein, 389 aa, unidentified
MFEAPVEAPVSATSKTILHCALELSKSCWLLAIHYPDRPQPSLYRIKGGDAEGLMAQLLISRQRCAKSTGEVPSIVLCYEVGYDAFWLARFLIARGVECLVVDPASLQVNRRGRRAKTDRIDVGMLLRALIGWCRGERHVWSVVHVPSVDEEDVRRSHRERGRLIHERTSHINRIKGLLFAQGIRDLNIKAHYGKLQLDQLVTGDGRRLPPRLVNEIAREIARLALLQEQIAVIDRERDEAPTPCKATEKKRIQLTQLKGIGPAISAVMSREVYYRQFNNRRQVASFLGLATSPYDSGDMERSQGISRTGRGQVRAIMIQAAWLWTKHQPKSTLTRWFVERTKGQSGRVKRIMIVAVARKLAIALWRYVEQGLVPQGAVIELPRTKSAR

SEQ ID NO: 427645 - protein, 347 aa, unidentified
MTIVGGARPIVGGVDTHLDVHVAAAVDGLGGVLGVRSFATSSAGYHALSSWLGSFGTIERVGVEGTGTYGAGLARHLAVSGITVIEVDRPNRQERRRNGKSDELDAIEAARAVLSGRARGYAKGGDGNVEALRALLVAKRSARSVRIRTTGQLRHLVITAPDELRNQLGGLTAKSLITQAAALRPRVGGDPVRHGTKTAIVALARRVQTINDEIALLDRQLDALVRTTCPRLLEIYGVGVDTAAILLVAAGDNTRRIRSEAAWAHLCGVAPIPAGSGKTNQRRRLNPGGNRQANHALWRIVLTRLGQHEPRTVTYMQRRLAQGRTKPEIIRSLKRYIAREIYQQIFA

SEQ ID NO: 427646 - protein, 403 aa, unidentified
MFAGWDWATGSHDVTVVDATGAKTDRWALAHTETGIASTLARLRRHGDPAVLPVAIETTRGLVVDRLLAAGHPVIPVHPNAFNAIRPRWGAARAKSDPGDSFKLADYLRTDGHQLRTLAPTLPETLELQALTRQRADHIEARIAAVNQLTALLDEHWPGGKAVFASLDSDIALAFLDRYPTPESAATLTASRLERFCTRHGYSGKRPGSVLIERLRAAPVTASRLGQQTVTRLVGIQVRLVRAMRATIRELDTAIAQAVKAHPYAPLIAGLPRIGSINLGQVVGEIGPMLERASDCAQLAAETGAAPVTKESGKHRAVNFRHAVNRRARQALMTFADNSRHGSDWAATIYNDARARGKRHPHAVRILARAWLRVIWACWRDKTCYDPNIHHAANKINKTEGLT

SEQ ID NO: 427647 - protein, 343 aa, unidentified
MSEDYDGRQYVGMDLHRRRSVLVRMTEAGQPLETVRIVNDCEQLAAVMARAGEDPEVVLEATYGWYWAVDALAELGGCVHLAHPLGVKGFSYRRVKNDERDAADLADLLRMKRLPEAWIAPPATRELRELVRHRAKLVHLRTSLRCQIHAVLANHGIRVPVSDLFGVEGTKLLEHAALPPAARSRVDSLLRLIDAFDGEIGAAAKATAARLADHSGYTAVQTLPGIGPILAAVFIAEIGDITRFPAPAKLASWSGLTPKHYESDTTVRRGRISKQGSRLVRWAAVEAVQRVGKHTHIGGYRDRVAARRGRNIGNVAAARELIECVYYALRDGTCRRALTPAAA

SEQ ID NO: 427648 - protein, 488 aa, unidentified
MAKRKKSIFERLQSNRMNRQQRKELQRQFDTGSPELTIVHPDAAAIDIGSASHFVSVPPDRDQEPVREFGSWTADVRRAARWLKACGIKTVAIQSTGVYWIPVHDVLEEEGLEAYLVNARGTKNLPGRKSDVQECEWVRKLHTYGLLRKSFLPPEEIRAVRTIWRLRDRVLKDAARAMQHIQKALTKMNVQLTNAISDVSGVTGMKIVRAILEGQRDPHELAQLRDPRIQASEDEIAHSLEGNWKSDVLFELEQVVDAYDFHRKQLASIDDELQKYLSARPTREPVGEAAVKIDTSQLPAKQRKKMNKKLKATRKQKDNRPAFDLGTELARLMGVDLRIIDGIDVMTAQTIYSEVGADLSAWPTEGAFASWLELVPRKDVSSGKVIRQKKRPSNNRVATALRNAAETLVRSDSYLGARYRHFTARLEGLKGVKAMAHYLACLVYRLLTKGPAWVDRGAAYFENKRRERELVSLHRKAAAMGLQLVPNA

SEQ ID NO: 427649 - protein, 477 aa, unidentified
MKDNRRPSAPRQAAATQHRAWSPLLKRIQPDAAGIDCGATSHYVAVPEGRDPRPVRAFSTFTADLQRLAGWLVQCGIKTVAMESTGVYWIPLYEVLEERGLEVVLVNARHVHNVRGRKSDVQDCQWLQELHRVGLLQASFRPAGDIVALRSYVRHRQTLIEAAATCIRRMQKALTQMNLKLHHVLSDLTGVTGMAIVRDILAGVRDPHVLAAHRDGRCKASAAEIAVALTGHYRPEHLFALRQNFEAFEFHQRQIVQCDQAIAAQLASLADSRPPTSSELPAARARSKPSKNEPHGELRAPLHRIAGGVDLSQIDGIGPYGALQLIAEIGTDMSRWHSEKHFSAWLTLAPNNKISGGRLLSSKTQPSANRAAAVLRRCAMSLTRSATVLGAYYRRLAYRLGQPKAITATARKLAILVYRVLRGEMVYHDPGAAAYDQLHRTRLINGLRRRAQEFGLSLINLETGEVLDHALVPQSVS

SEQ ID NO: 427650 - protein, 317 aa, unidentified
MAEPCGVGLDVAKATVDLACSTNPAARWQTTNDEAGWAALVVHIRTLDPTLIVLEATGGYEIGAASALSTAGLPVAIVNPRQVRDFAKALGLLEKTDAIDAAVLAAFAARIRPTPRPLPDDLQADLHALVTRRRQLVDMLTAERNRVPLARGAVRKNLLAHIAWLEKQLGKTDRDLRTRIEASPLWRVRDQLLQSVPGIGPATSACLLACLPELGTLTHRQISKLVGVAPVPDDSGRRHGYRRIQGGRGDVRTALYMATVTAITHNPTIRAAYRRWRAAGKLPKVALVAAMHKLLIHLNAMLKHQTLWHQIPTEATA

SEQ ID NO: 427651 - protein, 429 aa, unidentified
MTRSKDTTVVTVLHPVCCGLDVHKEFITACLMTTNSSDEETLLLETFGTFTDDLIRLREWLLGHECPVVALESTGVYWRPVHNILEGYLNVVLVNARHIKNLPGRKTDMSDCQWIATLLRVGFLKGSFIPPKIVRQWRDLTRYRRSLVEGLGDVKRQVHKLLEASNIKIDSVVSVLFGKTGRNLLELLAQKPGKLTMEAVQTCLRGTLKKKATELFRSVQGFFEDHHRWLLRDMLHRVDLYERDVKKVESRLKDLMEPHAELVHRLCQIPGIAPTSAYAILSETGTTLESFPNAAALCSWAGVSPANNESAGKRRSTRSPVRRNHLRTHLVEAAWGAIKKKGTYLRSKYFSLRSRLGPKKAIMAIAHKILKALYNIIKHGESFRDLGEDYLIELRSRSVISYIQRQAKKLGMVVLPEGIWKMMLHPSPA

SEQ ID NO: 427652 - protein, 289 aa, unidentified
MKIVGCDLHTRYQQVALLDQETGELMERRLEHESGEARSFYGALAGPVRVGIEATGHTRWFERMLGELGHELWIGDAAAIRATVVRKQKTDARDAAHLLDLLLTNRFPRIWRPSLEERDLRQLVWHRQKLVWMRNAVGNQLHALAMGEGVCRKQKLFTKKGRAELESLALGPWASYRRQELLRMLDELDRSLQRLDDAVEQQAEQNPEAVRLMTHPGVGPLTALAFVLIIGRAERFECGKQIAAYLGLVPLEDSSGNRRRLGHITKQGSSMLRFLLVEAAQVTVRSLPE

SEQ ID NO: 427653 - protein, 464 aa, unidentified
MVTSNKQTGKELPPHLEHINLNAAGIDIGSESHYVAVPEGRDPEKSVREFSSFTCDMTAISTWLQACEVDTVVMESTGVYWIPLYDHLEKVGFDVKLVDARHVKNVSGRKTDVQDCQWLQQLHTYGLLSGAFRPPEQICALRSMIRQRDTLVRYAASHILHMQKALTLMNIKIHNVLSDITGKTGLAIIRLIIAGERDPKKLAALRDGRCKHTMSTIEKSLEGNYRAEHVFSLKQSLELFDVYQAKIKDCDREIESTLKAFEPTKRDGSSLLNGKRKAVGKHGPSFDVRRILIEKSGVDLTQIPGISDMTALSVMSEIGFSVAPWKTAKHFASWMGLCPGNKISGNKILKTKTKVCANKVAAALRLAVTNLWRSQTAMGAYYRRMIYKLGKPGAVTATAHKLARLIYAMLDQGTAYVEAGVESYENAYKQRVLKTLRKRAHALGFDLVEKATELDMNSTAFSIS

SEQ ID NO: 427654 - protein, 455 aa, unidentified
MYLPDWKWIPIRKGLLLMSNKVIFNLDELFISVGIDVGADFSWMSIALPNQQFVGKPYKILHNSIDSLTTAVSKIKEAEELYSLESRIFLESTGIYHYPLFCYLRDKGFNCSVINPIITKNSTNINIRKVHNDRFDSKKAALVGLKPDLKVSLMPSDLALNCRNLCREYYDLMDNRSAYVNKLQGELRMAFPQYLGIFSKVTINTSLTLLETYTSPSAFLKADKQEIIDIIKSTARFGLTYAQNKYNAIIQAATDANQFGYIIDSNIKRIRLYISFIRKYDEEINSILESLHELVDANEDADFVKQIHLIETFKGAGFLSSVSIMGEIGDFSAFSKPKQLFAYFGLDPAVKQSGKFEGTKVQMSKRGSAIARRVIHTLTLQSISISRNREAKNPVLREYYLKKCDSKPKLVAMGAVSHKVCNMIFAILRDNKPFKIIAPQEHIKQYNSAKCDIAA

SEQ ID NO: 427655 - protein, 320 aa, unidentified
MTDSSSQPSVGIDVSKDSLDLARSDQKAPWQRPNDPAGIARLVDELRAIDPACIVIESTGGLERHLVAALLEADLPVALVNPGNVRDLAKGLGILAKTDAIDAHLLARFGHLAAPRLLEKRLQIQTELSALVTCRRQLVNSRTEQANRRLATFSRPAQRALDAVITILDKQIDKLDRQIHDQIDSNDQWKLLAENLKSVPGVGDVLATTLIAQLPELGKLDHRPLAALVGVAPFNRDSGRFRGKRTIRGGRASVRSVLYMAAVTAIRCNPVIKAFADKLKAAGKPAKQVIVACMHKLLTLLNVIARENLQWNQLNLIKNA

SEQ ID NO: 427656 - protein, 374 aa, unidentified
MIYVGIDIAKLNHFAAAVSSDGEILIEPFKFTNDYDGFYLLLSKLAPLDQNSIIIGLESTAHYGDNLVRFLISKDFKVCVLNPIQTSFMRKNNVRKTKTDKVDTFVIAKTLMMQDSLRFLTLEDLDYLELKELGRFRQKLVKQRTRLKIQLTSYVDQVFPELQYFFKSGLHQHSVYALLKEAPTPNAIASMHMTHLAHLLEVASHGHFGKEKARQLRVLAQKSVGVNDSSLSIQINHTIEQIELLDSQLFHTELEMANLVTCLHSVIMTIPGIGFINGGMILGEIGDIHRFSEPKKLLAFAGLDPSVHQSGNFQAQRTRMSKRGSRVLRYALINAAHNVVKNNATFKAYYDAKRAEFLANLYLTFHSWSPPDPL

SEQ ID NO: 427657 - protein, 329 aa, unidentified
MKIQHIIGADLSKKSIDLVCHLQNTHLQIENSFTGFKSLLQWLKQQGINPSETMIVMEHTGLYSYCFEKFLHRYQIAFCKVNALAIKRSIGLVRGKTDKLDAARIAAYGYEKRDKLATDVPASDALQRLQMLYSTRERLVKQRASLICAVKEYRNISIPEKDIIMKTQLQLIKGFDTQIEKLMGEIESIINKQETLKQNFLLLQSIRGVGKIVALTTIIKTQNFTRFANARKFACFCGTAPFEHSSGTSIRKRSRVSHLADKQMKSLLDLSAKSAIQYDKELREYYLKRTEGGKSKMSTINVVRNKILYRMFAVIKRQTPFTENYLQAA

SEQ ID NO: 427658 - protein, 338 aa, unidentified
MSVALLSIDLAKNTFQLYGVDQSGHPVLSRRVSRNKLLEAVVCLPPCRIVMEACGGAHHWARRFSAMGHQVHIIAPRFVKPFVKSQKNDRNDAEAIVEAASRPTMRYVAINSVEQQDIQSMHRIRSLLMRDRIAQINQIRGLLAEYGVVIAQTPLKVRIQLPTIIDDERNELTALTRTMMRDMYERLALLDRQIARYDELIQQVHKASPTSQRLEKIRGVGPMIATGVIAAAGSASEFTNGRQFAAWLGLTPRQHSSGGKDRLFGITKRGNGYLRMLLVHGARSVVQQAVRHTDKLSRWILEVQARRGTNVAVVALANKIARTIWVVLARGQEYAPPV

SEQ ID NO: 427659 - protein, 323 aa, unidentified
MNKYNEIFGVDISKDVFDVYGSKSGHNQFKNAASGFMFFLKNLPKKSLVVMEATGYYHYRLAQFLFKQGVLVSVVNPLSVKRFIQMKLAKVKTDKSDAKAICEYGQINQVPLYSALSDVQSECLQLFRLLDSYLKKRTMTKNKLHGEDVLGIPSKHVYRSLKRNRKHLDTEIASIETKLLSLVKQDQQAQLTLLKSIPGLGVKTALFLIVITDGFTKFETAAQLCSYVGITPTIRQSGSSVRGRSRISKVGNKKLRNLLFLCSFSACKHNKSCREIYERIVNKGKSKKLALIAVSNKLLKQAFAIAKSGNPYDETFVSVLVAK

SEQ ID NO: 427660 - protein, 425 aa, unidentified
MKTTKLPAAAQLDHLLDICVDISKAKLNVYFEVGNQAHDDEWANTTRQIEAKLRQYQRLAEEHGLRGLRVICEPSGGYQDKLLRTARRLGHLTAYVNGEAVAKFRVVETNDDGKTDLKDPHIINTLARIGKTLRHRQLPVEYQLMRTCGTLYDQAERAVVSVRGGLHRALLQLFCDYSFGKDFLYTTSGRALVGKYGANPYRIVRAGKVRFERAMRRRAPRIRQTTLDRLWDNAQTSARHEHVAQHADLLELQVRQLWEEFLLHEQRKIDLEKRLSSLLQRLRDLDPHVPAPTPGVISAKNLARLIGETGPLGDFTSWRMLLRYAGINIRMRQSGIYKGQNRITKKGRPLLRKILSQIALPLVRRKCLYGEFYHRKRLTMPGQKAMVVVMRSFLRKLHGWYRSGRAFDDERFFIDHAEYETRRAA

SEQ ID NO: 427661 - protein, 290 aa, unidentified
MLYLGIDQHKSQLTVNVRGEDGEVVLKRQVSTRWEKVRAFFADFAVKAGLEGGFMAIVEVCGMNAWLLEMLESYGCAEIVVTQPTSRSKQKTDRRDAGELSHGLWVHRQQLVGGRHPSGMRRVQPATPQEADDRQLTALRAKLTKRRTAVLNGIHKILRKHNREQECPTKVFQTKKLRRWLAGMELPGVDRLEMDLLLPQWEMLDGQLEVVEARIGERAAADEQAKLLQSMPGMGHYSAVAIASRIGNIERFKRPGSLANYFGLTPGCRNSGEATKRLGSITKRGSKIVR

SEQ ID NO: 427662 - protein, 411 aa, unidentified
MTDSIFIGIDVSKQSNVFCILDQAGNRLAKGTISNNLQGAKEVVAKTVFIACENAVSNITFGIEATSVYGETLLYYLYQEQQLKAYNCMVCQLNPKQVYNFKKIYLDVPKTDSLDAAIIAECLRFGKIGTREVAMDERYNALKTLTRSRYFVVENLAREKNRYLKNLFLSFSSLTQEDDLFSNLFGSTALSFVKDFNSLDEVAYMSVEDLADYLNKKGKGKFADPELLARNIQKAARSSYRLPKTVEASVNQALAISITSIRAFQNQIKSYDKAIEELMKAIPNTLTSIKGIGPIYSAGIIAEIGDINRFKDQAALAKYAGLSWTRYQSGGFESSKTRLINSGNKYLKYYLIEATNSVRMHDLELKRYYNLKYQETPKTPHKRALVLTARKFVRLVYALLRSNRLYTPPRE

SEQ ID NO: 427663 - protein, 443 aa, unidentified
MTRKNQKRFEVVHPDCAAVDVGGSEHLAAVDPAKCADPVQRFSAFTDDLHAMADWFSSMGVKVVAMEATGVYWIPLFEILDRRGFEVYLVNSRATRQITGRKSDVLDCQWILQLMTHGLLRGAFRPSDEVCSLRSLVRQRANKVRDQAKSLNRMQKALVQMNIQLAQVISNIAGVTGMSILRAIVEGERSPDVLARLRDKRVKVDEATVARSLRGNWRAEHLHALSQELAAYDFLEKQIGECDQAIADALDRLPVLQSDVTTPTKTLRSTHRSNEQQLALHQALNKVMGVDLTAIPTIGIDTALVLASELGADLSRFPTSQHFCSWLGLAPPTRISGGKPLPGKSAKVINRSAQALKQAASIARNDKSFIGASHRARLTRMDTCCAIKATAHQLARLIYAMLTKGQPYVEKGIEEFEERSRDRQLRALERKARKLGLQLVKAA

SEQ ID NO: 427664 - protein, 350 aa, unidentified
MDKKLYIGVDVSKQTLDLAYYDGESIDWKKAHIKVSNNNAGFKKIGSWVAKVSKGVDIVLFCMEYTGLYTQNFRLWLEEKHYIYRMVEPRKMHRFEPDLDDGLRSLDRIKTDELDSFRIAIYCEQNHRKILRNPSKLPPPVYFKLKRLLAERKQTVKQSVLYKQQLHDICAYDTDLSVERKNGQLKTLNDALKGIDNEIDMYIKEDADISKNFSLLTSIPGIGRVVALETIVLTENFMAIDNPRKYACYIGVAPFKKESGTSVRKGSSVSKKGFKQAKADLSIACLVCMQHIPNIRDYWERKRKEKCSGIVFNASKFKMILRMFAVIKRGTPYVETDNYRNGKNKQPGVN

SEQ ID NO: 427665 - protein, 412 aa, unidentified
MEMLYRSCCGIDVHKQFLVACLLVVDEAGCQHKELRRFSTMTGELLTCVDWLKAAQCRAIAMESTGVYWKSPWNLMEGHFEIVMIVNAEHMKRVPGRKTDKKDAEWIAELLQLGLLKPSFIPSRPQRELRDLTRLRTTMTGERTRLVNRLHKTLEDTNLKLSSVLTDIMGQTGQHILGAIVRGEEDPAVLADLALRRAARKRDALALALRGRVNDHHRLLLRELLEMIEYHDQVIFRLDQEIEERLRPLEKQIQRLDVIPGCSRRVIEILFAEVGWDLRAFPDAAHLASWVGICPGNNESGGKRFSGRIRKGNRWVKAILVQAAQAAARTKNTYLSAKSHQIATRRGNKRAAVAVGHSILIIYYHMLTAGEPYQEKGANYFSELDRKHAERRATKQLERLGYQVTLTPAQMA

SEQ ID NO: 427666 - protein, 436 aa, unidentified
MRGCRCSMIMGFNKPIEHFNLQQKKVITTNTLYVGIDVSSKSNVIYLMLPNGDKHSNFSVANSHEGSTQLVKRILSALTSHSLDTVLIGLEATSVYGDNLVYFLREDATLAPFNRKIHILNPKQVKKFHDAYNDLPKNDYVDSFVIADCLRFGRINKEVYMGDYRYKALQNLTRARFFAVQNLIKEKQRFMNVLFKKHSTMTQEKVFSDTFSTTALAVYDEFESAEVLANMDLHELTDFIIDKGKNRFPDPDAVAKAIQKAARSSYRLPKTVNDSVNQVLSISITSMKALESQIKEFDKAIKAQMELLPNVLISIPGIGPVYSAGIMAEIGDINRFNSQAALAKYAGLAWKQHQSGGFEAEVTRLIPSGNRFLKYYLCEAAFSLVRCDKEYSDFYHLKYKEVNRCQHKRALALTARKFVCLVFRLLKDNRLYCPAK

SEQ ID NO: 427667 - protein, 342 aa, unidentified
MQVTTIGLDVAKRVFQIHGVEAAGAVVIRRKLRRSELLQFFAHLAPCLVGIEACATAHFWARELGAFGHQVRLVPPSYVKAYLKRGKNDAADAEAICEAVTRPNMRFVPVKTVEQQGLLVLHRARELLVRQRTMLVNGLRAHMAEFGIVVPQGIQRLPELVALLEDEKTGIPQIAHEVLAAMVVQINNLTTSIRQMEKRIVAWCRTNAAARRLSTIPGVGPITASALAATITDPTLFRSGRHLAAWLGLVPRQHSTGGKAKLGRITKMGDQYLRKLLIVGMTAVIRSARRTKAPAFAWVNALLERRPARLVSVALANKAARIAWAILIRGETYRAPAITAAA

SEQ ID NO: 427668 - protein, 430 aa, unidentified
MNYLFISVGIDVGADFSWMSIALPNQQFVGKPYKILHNSIDSLTTAVSKIKEAEELYSLESRIFLESTGIYHYPLFCYLRDKGFNCSVINPIITKNSTNINIRKVHNDRFDSKKAALVGLKPDLKVSLMPSDLALNCRNLYREYYDLMDNRSAYVNKLQGELRMAFPQYLGIFSKVTINTSLTLLETYTSPSAFLEADKQEIIDIIKSTARFGLTYAQNKYNAIIQAATDANQFGYIIESNIKRIRLYISFIRKYDEEINDILESLHKLVDSNEDTKFVKQVHLIETFKGAGFLSAATIMGEIGDFSAFSKPKQLFAYFGLDPAVKQSGKFEGTKVQMSKRGSSIARRVIHTLSLQSISISRNGKAKNPVLREYYLQKCDSKPKLVAMGAVSHKVCNMIFAILRDNKPFEIITPQEHIKQYNAAKCDIAA

SEQ ID NO: 427669 - protein, 350 aa, unidentified
MSIVDARVLTAVTGGVDTHVDFHVAAALDQIGGLLGVESFEVSETGYGDLLDWLEGFGRVVKVGVEGTGSYGAGLFRFLHRHDIEVVEVDRPDRQLRHREGKSDPTDAVAAARAALSGKASGRPKLRNGPVEQMRILAVARRSARDQRIQTLNQIRHLVFCAPGAIRERFVGRYQVTMLKEMAALRPRPGADQIGYVTLTTLRDLARRIRHLDAETKRISGQLKTLVSEVAPSLLNVHGLGPDGAAVLLVAAGDNPDRISSEAAWAHLCGVAPIPASSGKTIRHRLNRGGNRQANSVLYQVVICRMSTDPRTRAYVTRRREEGRTTGEIVRILKRYVAREIYKHLPRDTT

SEQ ID NO: 427670 - protein, 321 aa, unidentified
MYKYSEIFGVDISKDVFDVVNSKGDYYQFSNDLKGFKAFTKKLTKETLVVMEATGYYHYCLAQYLYEQGYLVSVVNPLSVKRFIQMKLSKIKTDKSDAKAICEYGSFNEVPLYTAKDESQAECLQLIRLMDIYLKQRTMMKNKIHGEKTLGIPSKSVYRSLNRSLKSIKKEIGLLEDRLNLLVKDHQQKQLTLLKSIPGMGVKTALMLIIMTDGFNRFENSKQLCSYAGITPTIRHSGSSVRGRSRISKMGNQKMRNLLFLCSFSACKYNKGCKAIYERIVSKGKSKKLALIAVSNKLLKQAFAIAKSGLPYDENFVSVLK

SEQ ID NO: 427671 - protein, 338 aa, unidentified
MSILYVGIDLAKNVFAVHGVDEHGRPTLVRASVPRGKLHALIASLPPCSIGMEACSGAHHWARMFAALGHTVRLMAPKFVTPYRLSGKRGKTDAADAAAICEALQRPNMRFVPVKSLEQQAALTLHRVRQGFVEQRTALINRVRGLLSEFGIVMPLKASTVRHQAAATLEDLPGWANTAIGDCLSELHRLDERIAQYDRHIALQARQDARACALMRLHGIGETTATAIVAMVGNGHEFACGRQFAAWLGLVPGQYSSGGKTRLGHITKAGDGYLRSLFVLGARSVLNAAKGRTDALSGWALALQERRGYWRAVVAIAAKNARMAWAMLTRGEGFVMPV

SEQ ID NO: 427672 - protein, 403 aa, unidentified
MNAVGIDISKGKSMVTILRPFGEIVSSPFEIKHTSSDIHSLIKLIHSIEGESRVVMEHTGRYYEALAHQLSAADLFVSAVNPKLVKDFNNDSLRKIKSDKADSVKIARYALDKWQSLEPYSITDELRAQLKVMNRQFHFYVKQKTAMKNNLIGLIDQTYPNANTYFNSPTRSDGSQKWVDFVSTYWHVDCIRKMSLNAFVEHYQNWCKRKKYAFNKSKAEEIYTKTKELVPVFPKNEITKHIIRQAIDQLNSTSVTVETIRTLMNETASKLPEYSIVMQFKGIGPSLGPQLMAEIGDVTRFTHKGALTAFAGVDPGVNESGSYAQKSVPTSKRGSSNLRKTLFQVMDVLIKTMPQDDPVYQFMDRKRTQGKPYYVYMTAGANKFLRIYYGRVKEYLSVLPDPS

SEQ ID NO: 427673 - protein, 349 aa, unidentified
MHVTTIGLDLAKHVFQVHGADAEGTTIFNRKLRRAELLRFFEKLPSCLVGLEACGSSHYWAREIASLGHEVRLIPPAYVKPFVKRGKTDAADAEAISKAVTRRTMRFVPIKLAEQQAAAMVLKTRALLVRQRTQAINALRAHMSEFGIISAIGTAKATRLIEIVREASDPRLPEAAFFALATLADQIVALGRQIDKLEREIVAEAKRDEDMRRLATIPGVGAITAAAVKALVPDPHGFRSGRHFAAWLGLTPKPHSSGGKERLGGISKMGNSDIRSLLVLGATGVLRYARYKAGAPIWLTNLLSRRPYKVAAVALANKMARIIWALLTKGGTYRGMVPSLETVSSEANA

SEQ ID NO: 427674 - protein, 375 aa, unidentified
MSKHSEAFVALDTSKLRNAVAIADGGRAGEVRFLGEIENSTAATAKLIRKLEAKYERITFCYEAGPTGYELHRQIKALGHECVVVAPSLIPKKRGDRVKTNRRDAVNLAKLLRAGELTAVWVPDRRHEAMRDLTRARETAVIDLRSKRQQVSAFLLRQGRWYPAGKKTWTNAHMNWLAGQKFEQPERRIVFEEMMFAIRQAQERVERLEPAIRAAVPDWSLAKVVTALMALRGIDLISATGLLAELGDLSRFQTAPELMGYLGMGSSESSTGDTIKRGPITKSGNRRARRTLVECAWSYQHPPRVGIAKQQKVAAAPPKVREIAWKAQCRLNRRYRALIRRGKLKTVAITAVARELAGFVWAIAREAGSAEPAAK

SEQ ID NO: 427675 - protein, 315 aa, unidentified
MMSTQVFVGIDVSKAQLDLALRPEGRFSAPNNEAGFAQVLERLSAVRPTLVVLEATGGLEIPLTGVLAAAGVPVVVVNPRQVRDFAKATGRLAKTDALDAQTLAHFAEVIRPELRPLPDEQTQALAAILARRRQLVEMLTAEKNRLGSARQSVRKSLRTHITWLERELAHTDSDLAQAIRESPVWREKEALLRSTPGVGPVLTTTLLANLPELGTLTGKQIAALVGVAPLNRDSGTWRGKRTVWGGRAQIRAPLYMAALVAARFNPVIRVFYQRLCAAGKAKKVALTACMRKLLIILNAMLKHRTPWRAELVQCA

SEQ ID NO: 427676 - protein, 345 aa, unidentified
MAIVGGLDIHRKQLTFDYLDQASGEVVCGRICPADREHLAEWLQRFAGVDRVCFAVEACTGWRYVAECLQAAGVEVLLAEPADTAAARGRKKRAKTDRADSRLLRELAEGGRVPQCWIPPQQVLEYRALLELYHDLRREHTAWVQRIHAVCFHQGTEHLGTGGLGTEAGRDRLRRLAATQLSPAGRVQIDTGLQMLDTLETHLAGIHRRLQAAGRHLRGAKVLTDRLYGVGPVTALALVCWLGGAGRFSSSRKAVRFAGLDVTVYSSDGKRSPGRLSRQGPPVLRWCLYEAGKTHARTSAPDHAYYTAVKDRAGGKRAAISEARKIVRQACHILTDLGDDAFTPA

SEQ ID NO: 427677 - protein, 346 aa, unidentified
MKQITTIGLDLAKQVFQVHAASADGSPIFNRKLRRAEVLRFFEKTPACLVGMEACGSAHYWAREIRALGHDVRLIPPVYVKPFVKRGKTDAADAEAISEAVTRKTMRFVPVKSADQQAAAIVLKTRALLVNQRTQVINALRGHLSEFGIIAAAGTTKVAGLISIVRDKTDLRLPKAARLALMEVASQIDALKAQIEKLEQAIVATVRRDDDARRLVTIPGVGAIIAASVRALVPDPGGFKSGRHFAAWLGLTPKPHSSGGKERLGRISKMGNPALRSLLVVGATAVLRHARGNPNASRWITALLARRPYKIVAVALANKMARIIWALLVKGGTYQDKGARNQIVAA

SEQ ID NO: 427678 - protein, 343 aa, unidentified
MDNVSTVGLDLAKNVFQVHCADEKGRCIQSKVIRRSQLLRFFATLKPCLVGMEACGSSHYWARELKLLGHDVRLMAPQYVKAYVKTNKNDAADAEAICEAVTRPGMRFVDIKTEEQQAILLLHRDREGLTRDRTALINRLRATLAEFGVTAPSGPQRLNRWFREDYSGYGVRLPGLVERQVERMRTRLRGLESEIAALDVEIDLTSRSNEACQRLEAVPGIGRLTASAVVATVGKGQSFKSGRQFAAWLGLVPRQYSSGGKPRLLGISKRGDGYLRRLLIHGARAVIRHMNPKRAVTGWLAQLSTRAHHNVVIVALANKLARIAWAILYKERAYSEALVAGRR

SEQ ID NO: 427679 - protein, 354 aa, unidentified
MSKDIILTVDYHDRACVIRRLDRGADREQVFTEIPTTAASLGQVVDQARRDLGRRGRVVWIQESTTGWARVRELLADRVEFNLANVLQMPLPPKARRRKTDKVDTARMQREYLAGTLPLAYQPPAAWRQLRRLVAYREGLVSRRTAVRNWIDRYLAHETWFDRTGLWSPRGQRRLRALLEGWPRTDRVILAEKLDELARLEGQLGVALKELVAAYRDCAEAQRLDAILGIDVVSAVSIVARIGPVERFGDAEALIAFAGLAPGIQESDRTRRDGRIGGGGTDRHLRHYLIEATVWARKLPRYQTTYERMKKRRGSKVGRLVVARMLVRSIYKVLKDGVAFDPGVTPRRTPAAAC

SEQ ID NO: 427680 - protein, 417 aa, unidentified
MKEEFTFYVGVDWGVEFHQACILDAHGEKICQRRIEHSGPGMLEFCDFLQALTNGEASALAVAIEVPRGPIVEALLEHNYAVFSINPKQLDRFRDRHTVAGAKDDRRDALVAADSLRTDQHCFRRVRPEHPEVIRLRELSRTEETLGIDLRRCVNQLSQLLLRYFPQLLRLCSTPDEPWLWALLELAPTPQQAAKLTEKRLKQLLAKHRIRRWTAEKVGEILTAPPLPLAAGSAEAISEHALLLLPQLRLLHLQRKQVADRTQRLLDQMATSTKDFPMSQEHRDIPVLLSLPGVGRIITATMLAEGSHILSLRDYHALRAHAGIAPVTKQSGKSRQVLMRYRCNQRLRNAFYHWARTSIQHDPRSKHHYARLRQVGHNHGRALRGVADRLLAMLIAMLKSGQTYDPNRRSTANLTAA

SEQ ID NO: 427681 - protein, 406 aa, unidentified
MNMNAVGIDVSKRKSTVAILRPGGKVVLKPFDVPHLSADFQSLINQIRVFDGETRIVMECTGRYYEPVARQLSHAGFFVSAVNPQIIRNFQGQDNPLRKVKTDKADSVKIARYALDSWDKLKQYTLMDELRSQLKTMNRQFDFYMKHKTALKNNLIALIDQTYPGANTYFDSPARGDGSQKWVDFLDTYWHVDCVRKMSLNAFTDHYQKWCGRKKYNFSKAKAEEIYGKAKELIPVLPKDSFTKRIIKQAIEQLNAASQTVEQLRSLMDETASRLPEYPVVMAMKGVGPSLGPQLMAEIGDVTRFTHKGAITAFAGVDPGVNNSGDYSQKSVHASKHGSPALRKTLFQVMDVLIKTKPDDAVYLFMDKKRAQGKPYYVYMTAGANKFLRIYYGRVKEYLAALPVSD

SEQ ID NO: 427682 - protein, 368 aa, unidentified
MKKNNTCPKSPKRSKTRKRSLTIGMDLGDKTSRYCVLDSDGEIVREGTVRTTKKGMKQRFGSLAGCRIAIEVGTHSPWVSRLLSSLGHEVIVANARQVKLISASSRKDDRLDAQTLARLARMDPQLLRPIRHRSEKAQGDLMQVRVRAALVDTRTGLVNAARGLAKAMGERLPKCDADQMGVAKTQGMSAELSEALRPLLETVEALTKQIKASDQKLEQLAERDYPETELLRQVSGVGSLISLTFVLTIEDPSRFQKSRDVGCYVGLRPRRSESGESRPQLGISKEGDEYLRKLLVQGAHCILSHKSPDTDLKRWGLKLAGKGNKNAKKRALVAVARKLAILLHHLWVNGEVYEPLRNSRLLEQKAVA

SEQ ID NO: 427683 - protein, 289 aa, unidentified
MDKSITLHVGLDVHKDSIDIATAAPGRDGEVRHVASTGRELTSLDKALRKLVSRGHRLHVVNEAGPCGFVIWRHLSAHGIDCEVVAPSSIPKRSGDRIKTDRRDAMLLARLDRSGELTAVRVPGAADEVVRDLVRARDDAVRECRNARHRLKALLLRNGITYAGKSAWTAAHLRWLATMKMEHAAQQIGFQEYLHSITEATTRIARLEQAMRDTLADWSSKPLVQALMSLRGVQLIAAMTLVAELQDFLRFDSPRKLMAFVGLVPGEHSSGPKRRQGSIPRPATAPRGA

SEQ ID NO: 427684 - protein, 393 aa, unidentified
MKATKEKINRIIGLDMHPDVFAAAAIEKTTADLSQVLWVQDRLLTAGLEDWAKKHLCSGDMLVLEASANSFEVASRFHALGYACLVLESMQASKIKENFCNDDRHSAVKLAKVYLSGLAKIVWQPDETTREMREVFFSHRTAVKDCTRLRNRIRTFLNEHCVRLPKGTRLTQESGLKTALSLHSWSELQIELITDSFQQLWQSEARRKKLEKLMVKELLNRPQWRQLWRLMGVRHIVAFGLMAMIGDINRFPTAKKLVGYFGLSPRKVQSGNNAKGYERGIGKTGRGDIRALLIQSAQNAMMQRNSPLHKWGWKLLLKKNHNIAVSAVARKLTVAIWHLLKGHFTPIVELSKHLETKLLKLATLLGKEDLIKSGFKDRNEFIQHYFKKIQLYT

SEQ ID NO: 427685 - protein, 355 aa, unidentified
MDNKKYIGMDVHQASISIAVGDAAGKVLMECTLETKAATVLEFIQGLRGSLWVTFEEGTSAAWLYDPLKPHVTKVVVCDPRRNALLKAGNKNDRVDARKLSDLLRAGLLTPVYHGESGVRTMRELSRSYLAASRDLTRVMNRLKAIHRSWAIPCAGQQVYSPRHRAAWLEKLREAGVRRRAEQTYQQLDFLMRIRKETRKELLAESRKHPARELLEQIPRLGPIRVAFLIALLQTPHRFRTKRQLWNYCGLGLRTRSSGEYRYKEGQLQHARKPPALRGLNVNHNHDLKHLFKSAATQADTKDDPLREFYQNLLAGGMEPPMARLTLARKIAAIALKIWKKGERFDPAKLNQQAA

SEQ ID NO: 427686 - protein, 334 aa, unidentified
MQNVTLIGIDLGKHSFHVHCQDKSGKALLRKKFTRTKLIEFLAGCSSATVVMEACAGAHFMARRIIDLGHEAKLISPQFVRPFVKSNKNDFVDAEAICEAASRPSMRFVQPRTEAQQAMRALHRVRESLVRDKVKTTNQMHAFLLEFGISMPIGIAVIKRLSSVLAENELPPYLAQLLTRLHAHYLYLVEQITELEVALKQELSRDDTGQRLLTIPGIGPITASVLSSHLGDGKQYARSRDFAASTGLVPRQYSTGGKNTLLGISKRGDKKLRQLLVQCARVFLQRIDSQSGRLADWVREQLTRKHSNVVACALANKLARIAWAVTTRQAVFER

SEQ ID NO: 427687 - protein, 424 aa, unidentified
MFRPDLTHACIDHQCPELDPSVGCGAPLSPRRPGGCDLIGARVPGHPSLCCPSAPLGAGQPHHKQREGTGSMAGPVRTVIGGVDTHKDTHVVAALGEQGALLGTASFPTNLAGYAQLHDWLQDFGAITSVGIEGTGSYGAGLCRFLQAAGVPVSEVSRPKRLWRRRYGKSDPRDAEAAGRAVLAGEALGIPQQRDGMVEAIRMLRMARRSAIKARTQTINQLRAVLDTAPDELREPLRSLSAHALVAIAQRWRPGAPTGPLAAARVTLKLLAERWTTLSAELNQLDAQLAPLIAAAAPELLATHGVGPDTAAALLVASGDNPERLGSEASFAALCGVSPVDASSGRQHRHRLNRGGNRDANRALWVIVLCRMATDPRTRQYVTRRTGQGLSKKEIIRCLKRHVAREIYRLLRLEATLPIGPLAA

SEQ ID NO: 427688 - protein, 334 aa, unidentified
MWHVGIDLHRETVVIAAVNDTGEVTKPVSVRCEDTATIVNVVKALGSFRAVIEASATYRWLYDLLRPYGTILLAHPFRLRVMVQRRTKTDKLDAQLLANLLRINQIPLAYIPPEPYQQLRDLTRRRARLGRELAEAKIHLRALLARLNRQAPYRVPFGVRGLAWFRGQDFGWIENLVRDELLARLKHFGRQATIIDRHIEGMWPAFPQAEALTEIHGIALYSALLIVAEIGEPERFRTAKQVGAYAGLTCRVHQSGGHCYRGSISRQGSTWLRWILVQAAIKVIREDAALKNFYTRVRKRSSAKIARVAVARKLAEICWKRLRRWQREHAQQAA

SEQ ID NO: 427689 - protein, 410 aa, unidentified
METLYERVAGLDVHKDTVVACVRVQQGREVSEELAEWGTTTRELLGLRDWLEAHAVQVIGMESTGVYWKPVFYALEDTAECWLLNARHLRNVPGRKTDMADAAWIAKLVQHGLVRPSFVPPKEIRELRNLTRYRKAQIQERTREAQRLDKVLQDAGIKLSSVASDTLGASGRAMLAALVEGSRDPDALAELAKGALRKKIPMLRDALEGRFNTNHALVVSEILAKLDYLDEAISRLSDAIDELCRPFEHEIDLLDTIPGIDRRCAQAVIAEFGVDMSRFGSAERLASWAGLCPGQHESAGRRKTGKTRKGSKWLQMHLNEAAKSIVRSKGTYLSAQYSRIKARRGHAKATVAVEHSIVVAAFHILDRDEPYRDLGADYFIRRHDPERHARRLARQIQALGYHVTIRPAAA

SEQ ID NO: 427690 - protein, 341 aa, unidentified
MDRELYFGVDVSKKTLDLAYYDGETIDWKNAHIKVSNDNAGFKKIGSWVAKVGKDFDTFLFCMEYTGLYNQNFRLWLESKEYIYGMVDPRKMHHFEPDLDDDQRSLDRIKTDELDAFRIAIYCEQNHKKILRNPSKLPSPVYLKLKRLLVERKQNTKQSTLCKQQLHDTCAYDTDLSVERKKLLLKNMQENQKAIDKEIDSYIQEDASISKNYELLTSIPGIGRIIALETIVLTENFTAISNPRKYACYIGIAPFKKESGTSVRKKTGVSKKGFSEAKADLSIAVLSAITYNPAIRGYWIRKKKEKCGGIVLNAIKFKLVLRMFAVIKRGTPYVETDAYKN

SEQ ID NO: 427691 - protein, 337 aa, unidentified
MQPTIIGLDIAKSVFQVHGVDAEGRTVIVRKLRRSQVEPFFAKLAPCTVALEACASAHHWARRIGGLGHDARLISPQHVKAYVRRNKTDAADAAGLCEAASRPHMRFVPVKPPGRQAVLSMHKARALLVNQRVRLTNALRAHLAEYGLIAPQGRKGFAELRDRVEHGKLDMPAPLVRALKAQLQPLDALEIAVAAIEAEILTWHRQSQDSRRLAEVPGIGPLTASALTAALVDPAAFRCARDFAASLGLTPRIDATAGKARLGPISKRGDPYLRRLLVGGAHAVLHSDRAKADPWIARLLAEKPRAKVAAALANKIARTAWVILARGEPYRPGRLVA

SEQ ID NO: 427692 - protein, 404 aa, unidentified
MHNDLGFDIWCGLDVGKQAHHACALDAAGKKVFDKPLPQDQSKLEDLFTRLSEHGRVLVIVDQPNTIGALPIAVARSMGIQVAYLPGLAMRRAADLYPGNAKTDARDAFVIADAARTMPHTLRRVDLGEETLAELKVLVGFDEDLAAEATRLSNRIRGLLTQIHPALERVVGPRLATRQGLAVIEQLGGPQGMTAASKSKLLRVITKANPRHAQNFADAITQALSEQTVVVAGTAAAEQVLPKLAASLRQTWDQRCELAAQVEKVVDAHPLAEVLTSMPGVGVRTAARILLDVGDASLFPTAGHLAAYAGLAPVTHRSRTSIRGEFPARSGNKHLKRALFLSSFAALRSDPVSRAYYDRKRAQGKKHNAALICLSRRRVDVLFAMLKNREPYRAPNPTPQPLAA

SEQ ID NO: 427693 - protein, 338 aa, unidentified
MEWTVAIGVDTHKDVHVAVALDRFGARLGSREIETTESGYRSLLCWALELGVPAFAVEGCGSYGAGLVRFLALAGVAVWECERPRRQERRRGKSDLIDAALAARRLLTGDGLCLPRGGGRREELRLLLLERRSAIQARTAALNQLRALVVTAPEQLRQRLGDLSGERLAQAAARLRPGADVGNAVPQRLGRRIRKLSHEVAEVDRNLLDILTEVAPELLAECGVGPVCAAQLLVSSGDPKRMASEASFAALAGTNPLDASSGQQRRHRLNRGGDRQLNCALHVIALARIHHHAETTAYYQRLLATGKTAREARRCVKRALARYFYRRLREIPTPALTT

SEQ ID NO: 427694 - protein, 339 aa, unidentified
MKEVACNDYWVGVDLSADWFDASVAPRGTEPGTWRKLPVRHFENTRMGQEACVAWAQAFGRSGRRLLGLCVESTGRLSERFAREMQQLAPALPAVSIINPKRSRDFGHSLGVRDKTDPIDARILALYGATVQPQPKVLAENYRRLRELVRLRNRLGIQRDGLRDTQRQTDDSMVGDVFRRCLETLQKQMDRIEAEAQRILDADPQLQRDFELLDSVKGIGFITAWTLMAELGDLRAYSRGQLIAFVGLYPRRHKSGKSVEKKPRLVKGGQALVRKELYNAARSICHSKDNTLKDYLDRLEENGKIYMERLTAVMRKLLLIARSVLIQGKFYDRHFGQIA

SEQ ID NO: 427695 - protein, 387 aa, unidentified
MFYVGIDIAKNTHWASVMSSDGEVICEPFSFSNDNSGFQKFISKLESLDKEKILIGLESTAHYGENIISYLFNLNFKIGLINPIQTANLRRSNIRKTKNDKVDTYIIIKALTLGNYSLITSRDINNLKLKGLCRSRRNLVTMRSKAKIQLVSYMDQIFPELSEFFKGNLHLNVSYQLLKEYASPNVIKKLHLTKLTNILHDNSHGRYGQQDAIRLRELAKSSVGIDNPSLSLQVKHAILQIELYNEQIAEVEALYKSILDEMESPILTIPGMSYNQAAVIIGSIGDINRFEHSCQLLAYAGLDPSVIQSGNFQARSTRMSKRGSGMLRYSLVYSAHNVVLNNKTFKAYYELKRSQGKSHYCALGHVAHKLVRVIFKMLKDNVAFNLD

SEQ ID NO: 427696 - protein, 353 aa, unidentified
MARVSVAGIRTFVEGSKSGTVHVGVDVHKRSYSVALLRADGAWKEWTMPSSPKVLENAFLPLRSRIGAVVYEAGPTGFGLARRLTRAGIPVIVAAPSRVPRPVAPTSKTDRLDGRKLAGYAASGLLRPIAVPTEEEEGFRALVRRRHRLTDSIRHAKQRIRGLLLQFGIEEPAGLSHWGKAAVEEVGRLSLPPGTDETRDSLLRELAFLIREREAIEEKLRQTCRAPRHEGRIKALKTVPGVGETVATTFAAELFRPGRFRHPGEVTSYLGLAPVVHQSGSGKARVQIRPVGQRRLRSLLIEAAWMWKQRDPAAETFYRRILGRTGLPQKAIVAVARKLAILLWRLSAYPAAA

SEQ ID NO: 427697 - protein, 347 aa, unidentified
MALTIVETRAITGGVDTHADTHVAAALDPIGGLLGVQEFPATTAGYAGLLSWLGGFGTVCLVGIEGTGSYGAGLTRHVTAAGVRVVEVDRSDRQDRRRQGKSDPLDAVSAARAAQSGRARGAPKGRDGTVEAIRALMVAKRSARSERTQTINQARALVLTGPDDLRARFAGHTPAALVTETASLRPRPGDVVGYAVRIALRELGRRAEFLDGQLQRLDELIVPLVTARAPGLLALYGIGPNTAALLLIAAGDHPERLRSEAAWAHLCAAAPIPASSGKTVRHRLNPGGDRQASHALWRIAFTRMGSDPATRAYVARRTAEGKSKAEIIRCLKRYVAREVYPHLRPGG

SEQ ID NO: 427698 - protein, 384 aa, unidentified
MITIGVDAHKRVPMAVAVDAAGRELARWRGPNSIARWRELAPWGAALDGPVCWGIEGAWHYGRGLAQHRITTGAAVVEVNPRWTAAGRRRARRRDKHDRLDAQAVALYVWREGATLPRLVADDDTAVLDLLVSEREDLVTEATRLRNQRHQLVLHLDPEYTVHLPSLRSQAGLAVLETYTTADNDPLQQQRAAAVRRVAQRLRLVTAQAKALATAIQHRAAPRCAPLTTICGVSFLTAGALAGMLGPGNRFSTDAQRAAFAGVAPLEASSAERVRHRLNRGGNRRRNAILYRIVLAQARHSLAAQAYLARRSKEGKTRREAIRALKRFIVRAIWRQWQACHAALAQPQQALAASRHAPRRWRSGGYMIPSVLMASPVGFALRRR

SEQ ID NO: 427699 - protein, 323 aa, unidentified
MKHKFIGIDISKQTFDVAFCKNEKWEYYEFPNNLVGFRSLLKLIDLEDWVVMEASGPYYLSLASYLYSKQVQVVVENPLVIKRYSQMKLYRAKTDRKDARTIAEYACSNGLKRWEPNEKYITDIKQLHTAIEGLQKQLHQGSQQLEAFRSSGALDKYLEKEMKRIASFLQSKISKLENRQEELAKEHFASSLKKLTSIPGIGNKTAIMLIVITNDFQKFDHYKKLIAYVGFSPRIYQSGTSVKGKGHICKMGKAQIRKLLYICSWSAKRWNKACKEMYERLAAKGKPERVIKIALANKLLKQAFAIAKGDKLFDENYQPNICF

SEQ ID NO: 427700 - protein, 357 aa, unidentified
MIIIGADYHPGFQQIAFVDTETGDYRELQLQHSEEAEKFYRELAAHGMKVRVGMEASGHARWFERLLAELKFELWVGDATEIETKRVRKPKTDREDARLLLRLLMEDRFPRIWVPSWDNRDLRQLLWHRHRMVQARTRIMNQLQAVALNEGLRFKKRLWREAGRQQLESFPLAPWANRRRHDVLALLDRLNPTIAELSQAIEQEVEKCPEAQRLMTHPGVGPLTALAFVLIIGTVERFQCGKQIASYLGLVPLEKSSGSRRRLGHITKQGNSMLRFLLVEAAQVTVRSIPEWRNKYFHLVLRRGKKTAKVAMARRLAVRLYWMWRRQWDYEQVKKFGSYAGQLGHRDGVQLEHRVID

SEQ ID NO: 427701 - protein, 340 aa, unidentified
MTSMQVGVDPAKSVCEVAVSAVPGQVRERRRLSRAALGPFFAARPPAEVLLEACGSAHHWGRELQRLGHTVTLLHPRDVARYRDGNKTDRADAKALLEAARNTALSRVPVKSLEQQAVVALHRLRQGYLQTRTARINAVRGHLREFGCVIPLGPQQLLRQAAAALEQETVPALLRPALHIVLEEIVALEDKAEAVRTELTRLAEQMPDAQLLLTVPGVGVLTATALVAFVGDIHRFRAGRHFAAYLGLTPREASSGLVRRLGAITKQGNSYVRMLLVHGARSALRAGAVTQHPDDLRTWARALAARKGHNVAAVALANKLARVCWRVWRDQRPFERRDAR

SEQ ID NO: 427702 - protein, 348 aa, unidentified
MNTTTIGLDIAKNCFQVHGVDAHGKTTLQRQLRRAQVLTFFANLPACLIGIEACGSAHHWARKLGELGHQVKLMPAQFVKAYVKTNKNDARDAEAICEAVARPNMRFVAVKTVAQQELLMLHRVRQRLVMERTAKANQLRGLLGEFGIVVPQGLHRLRRVMPEILADAENGLSCRSRERFSYLFSHLRELDAAVIEWERQIVAWHRESPLSQRLDKIPGIGPLGASALVASIGDIRTFKSGRQLAAWLGLVPRQDSSGGKTRLLGISKRGDRYLRTLLILGARSVLRQMQRHPARAAQSWLERLTARSHPHIAAVALANKSARIAWALLAHEREYQADYRRRVALAAA

SEQ ID NO: 427703 - protein, 388 aa, unidentified
MSAFDASRSLTTLEQDNTVIAVIEMRQSRWLVAAIVPGVERQPLKRIDADEEALLKLLHRWRNEAGQAGREIKRIAVAYEAGRDGFWLARWLQARDIEAHVIHPTSVAVSREHRRAKTDRLDTELLMRAFLGWLRGEKRHCSMAAIPTVEEEDARRPNRERENLVTERTRIVNQVKAILARFGIRTLRPTSRKAEEKLEGLCTAEGMPLLENTRAELRRLFARLCVVREQIRAIEQERLRKLAAVPAKEKGPQAMVRLLARVLGMGVETADMLVNEVLSRHLRDRKAVARYAGLTGAPDESGRRRREKGLARAGNARARRGMIEFAWRFLRFQKDSALAQWFTARTADGRRVTRKTMIVAVARKLLIALWRLVTIGEVPDGVILRAAS

SEQ ID NO: 427704 - protein, 395 aa, unidentified
MRHILSFDIAKDKSVYCFIDELRNVIIDATLIEHKKDEFDLLFNKVKNHSNLIVIMESTSIYHLPVENYFRSKGIDTIVMNPKLVKQFKDTLNKSKTDKLDCFKIARCYLGTIDNFYQKQDEYFMYNPLARQYWSLVEGQTRLKNRYRQLIDIVFPEFALIFNDLYDDLALNFIHDFPHPVLFVNRRIDYLMNYLKEKNGTTQAYRFKNKVLKMKELASNSLCFVAFDSYQVQNLVQVIEMIQYHKSELNKIKNQLINEMKDKKLFKIINSIPGFGEFSTALFLAEVGDITRFDNKYQFISFIGIDSVTSQSGVSAYHGPISKTGCKFGRTILFNIVTTVLQISAHTDKTNLIYLFFRKKQSEGKHHYKCIIACETKLCKIIYKLCSSNCLYENK

SEQ ID NO: 427705 - protein, 425 aa, unidentified
MVVNPVMLRRCAMQVEYERCCGIDVHKETVVACVIGPGAEGKPVKVTRTFSTLTGELKALAQWLTEQAVTHVAMESTGVYWKPVYNVLEGQFELLVVNAEHLKKLRGRKTDVADAEWIADLLRHGLLKGSFIPSAQQRAWRDLTRYRTTLTDERSREVNRVQKVLEDANIKLASVASNVVGVSGRAMLEQLIQGTTDPATLAELAKGRLREKRDLLEQALTGTFQAHHRFMLIQHLSHIDFLDEQIAKLDAELEEQMRPFQAALTRWDQIPGINLRIAQVILAEVGTDLKQFEDAAHLASWAGMCPGNHESGGKRHSGRTRQGSRWLRRALVEAAHGAARTKDKYFKNLYHRLAGRRGKKRAIVAVGHSLLVTGYYLITRGQDYEDLGANYFDERNQEMVKRQAVKRLEKLGFQVELKLAVPAPA

SEQ ID NO: 427706 - protein, 414 aa, unidentified
MLICLYVKITFVKVFVMYKQFVGIDISKDSFDLTLLESSGEIKLEVKLTMDRDGFDTFLEYLSSYSKEELLIAMEATGIYHLPLLSFLLENSFKSVVINPILIKSFIGSTTLRKTKNDKKDAASIALFSLKSYQSLHLASSDTVASVRPLIRERESLSKDIARLKTEIKANLVQLFPELLKNTNIFTKSILNLLLKAPSRKSIRNLKEKKIQRILDDTSGNKVRITASDILTLAKTSIAISDTYLEKVVTSKIRRLINIQEELSILDSELENSLKDTDINDDIDILQSIPGVGTVTSKNFMVEVSTVDKFNSVKQLCAFIGIDPSVRQSGTSINYRGKISKRGNANLRRTIWQMAIGTIRSCKKFNTYFTKKREEGKKFKQAVIAVANKLLKTIFVMLKNKAKFDSDLAYGVSK

SEQ ID NO: 427707 - protein, 295 aa, unidentified
MKDVQKFVGLDVSKEMISVGVAEAGRGEPRFHGNIPNQPEAIRKLMRKLGNPEDLHVCYEAGSTGYGIVRFLLSMGIDCIVVAPTLIPRRAGDRVKTDRRDSLRLAQLLRAGELTAVWTPDEDHEALRDLIRARHDIREDLQRARQRLNHFLLRHDIRPAQETRNWSVKHRDWLNTLTFEKSSLRIVFQEYLHTIHEVEERMKRIEAQIHEEAMQSEHAPVIQALQTLRGVAEVTAVTLVAEIGQFSRFINPRQLISYAGLVPKEYSSRSSRWQGSITKIGNVQIRRALVECAWA

SEQ ID NO: 427708 - protein, 348 aa, unidentified
MRTHFDPREAEMKYSGIDLHSNNSVVVVTDELDRVLYQRRLPNRLEEILAALAPHREELAGVVVESTYNWYWLVDALQEGGYQVHLANTGAIRQYDGLKHSGDMSDAAYLAHLLRLGILPTGHILAKPERAARDLARKRLQLVRTRTAQVLAVENLFARNTGARPTSNAVKRFTQEEIDSVGLDPDVALAIKTNVAIIGALNEQIERLECRLRQCARLRSQFALLTTVPGIGETLATTIMLETGPIARFAKVGDYSSYCRCVDSARISNGKKKGEGNVKNGNKYLAWAFVEAANFAIRYCPEAKRFYERKRAKTNGIVALKAIAHKLARACYHMLREKRPFELMRCFA

SEQ ID NO: 427709 - protein, 351 aa, unidentified
MMIIGVDYHPSFQTIAFLMEETGECGEQELNHSDGQAEKFYRDLKQRGMCVRVGMEATGYSRWFERLLAELGFEVWMGDPAEIKAKRVKKQKTDREDARLLLRLMRENNFPQIWVPGPENRDLRQLLWHRHRLVQMRTRIMNQLQALAMNEGFRWKKKLFSEQGRALLEKLSLAPWASRRRQELLELLDRMNPTIEELTAAVEREATKRPEVLRLMSHPSVGPLTALAYVLIIGTPTRFQRGKQIGTYVGMIPSEDSSAGKQRLGHISKQGNSLLRFLLVEAAQAAARIQPDWRRRYMHLAMRRHKSIAKVAMGRRLAVRLYWMWRNGCEYSPSLEFGSYAGQLGTGHGVK

SEQ ID NO: 427710 - protein, 395 aa, unidentified
MLQDNEGTISTQDQPTGSDVFVSVEMSRSKWVVGIHTPLADKIGLHTMACGDVDALLSLIDRTRAKLIASGSNSPATMVCYEAGYEGFWLYRHFVALGIRVVVINPASLLVDRRAKRAKTDRIDARAMVRALMAWARGERQVLSEVRVPTVEQDDARRGLRERQRLVKERTGHGNRIKGLLKTQGIMDFEPRAADAAERLDAIVTGDGRPLAPYLKREIVRELERLALVMRQIDRVEAERDAVVKACDAGAGTDALAEPEREAAMIGELNRLKGIGMNDATILVREAFWRDFRNRREVGGWSRLAPSPWASGSVLRDQGITKAGPPMLRAQMIQMSWRWLLWQPDSDLAQWFRKRTEGATGRMRRIMVVALARKLLIALWRYATTGMVPHGAIVT

SEQ ID NO: 427711 - protein, 439 aa, unidentified
MTFAVWSTLYRIPYRSIPRRRRCWEEYMEVMYPRCAGLDVHKETVVACVRIVAGGEVSRSVRTFATTTASLIELGEWLEVNGCTHVAMEATGVYWKPVWQVLADGAFELILANAAQVKSVPGRKTDVNDATWLSELLAHGLVRASFVPEPAIQELRGLLRTRKQLVREKASHVQRLQKTLEEANIKIESVLSDVMGRSGRAMIQALIDGETDPAKLAALAHWKVRASAATLREALHGRIKRHHRFLLRLHLQQVDALDAAIAEIDREADAGLACFRDAVKQLSTIPGVSELSAQVILSEIGTDMGRFATAAHLRSWAGLCPRNDESAGKRRSTRLRRGAPWLKAMLVQCAWAAARTKATYLHAQFVRLRGRRGPKKAICAVAASILTAVYHMLKDGTFYEDLGAAHFDRRRPEMQARRLVKRLSELGFSVELKPVAAIT

SEQ ID NO: 427712 - protein, 339 aa, unidentified
MYYVGCDLHKESTWFYIMNESGKRITSESILNHPDELHKFFSKIPKPFILAVEATYNWYFFIDIAEQYAEEAYLANSYELKAFAKRHKKTDKIDSRLIADVLRKGYLPAVYIPDKEARTMKELLNYRMKIVQDRSRNIFRLKSLLDRWGFDSGGNYTTYKALRSIKLGDLKEDIEEIAQGYITRIASLTEKEYESTKAIREKVQQNNDILNLITIPGLDYFSAALIKTEIADIGRFKSFPRLCAYAGLAPRVYQSANKSIHGSLNVNRKKNLQWILLEVVYHFIKANPKYKKKHESITKRKGYNTAKVALARDMLKVIYHILKEKRPYYKNAKVRSRAA

SEQ ID NO: 427713 - protein, 386 aa, unidentified
MTRPSNVLLRAINYDHTLVLAIELSNKSWVLAAQVPGFPQTKAQRTIEPNKNALLAAIDGYRARAAAVGHSVDRVIVTYEAGWSGFWLARWLIAQGVEVHVVQPSSVPVDRRLRRAKSDGIDAELLLRTLLAWLRGEPRVCSMAPIPDEADEDARRSVRERTELLSERVGLTNRIGAILATLGVNDYNPLLQSRRRRLAELRTGLDQPIPPNALAKIERLLARLELVLAQIAELERERDKVPAADVSDRAGQMIQQLTSLRGIGVQSATVLVREGFVRHFSNGKALGSYAGLTSTPYSSGGTDREQGIGKAGNRRLRTVMVELAWLWQRYQPGAAQVTWFRDRVGSTGRRIRKVMIVALARKLLIALWRFVIDGVMPEGAMMKPSI

SEQ ID NO: 427714 - protein, 408 aa, unidentified
MEILYPRCAGLDVHKETVVACVRCVSEPPHSEVRTFSTMTSGLLELNQWLESHRCTHVAMEATGVYWKPVWHVLEGNFELVLANAQHIRNVPGRKTDVNDAMWIADLLAHGLIRSSFVPPAPIQELRDLTRTRKQLVREMSQHTLRIQKVLEDANIKLDSVLSSVVGKSGRAMLKALVDGEDDPERLADLAQGHARKKHAALVEALRGRVTKHHRSMLKLHMQMIDAIESALREVDGHVGKALEPIQACAHLLTTIPGVSDIVANVIVAEIGIDMSRFPTPGHLISWAGLCPRNDESAGKRRSTRTRKSGTWLKTNLVTAAWSAVRVKATYLRAQFLRIKSRRGAKKAVMAVAASMLQAAFFMLRDGVEYRDLGSEHFERRDKTKAIGRLIRRLGDLGCQVEIKATAA

SEQ ID NO: 427715 - protein, 344 aa, unidentified
MYFIGVDHHKQASVMTVVDKDGLEVKTGKVLNRRAKVEFFLSGIRPFRAVVEAGRSSYVMADLLRELGGEVKMANPAEVKAIAHARIKTDKRDSRTLAHLLRAGLIPEVYQREAWNRRAQRVMRMRAFWVRKETEIKNKIRALLAQQGEEVRGEVERREDGLFGSKGLEFLRKLALEGRDKEVLDDLLRGYEELGAHIKNSDGIVRALFKELEEASRIDSVPGFATTLSVLTAVEIADVSRFPRVEQLHAYAGVIPSTYSSGERTYHGRITKQGNAWLRWAVVEAVYPAIKKDLALRVLYNRLARRKGANTAKIAVARRLLTIIYRILREKREYIPEMNESSAA

SEQ ID NO: 427716 - protein, 427 aa, unidentified
MNNVTYQPTLCVGADVHLDEIVLRAVDKALGHEVVDRFRVTNNLPGAQLAAATIAAAATDLGYTRIEIACEATGMLWIPFHRYLSTAPPLQSFELELVCFNPKLVAKFKDGLVLRSPKDDDRDAFDVAARLRFGELPISYVPSDFWQGLRRLTRYRYRLSKAMSREKMRFQSHAFLKCSDWKRVKAFSDIFGATSVALLTQFTAAELQEMTHDQLVDLIAHRGHGRFTDPTATARAVRKALRTSYPIDPRTDEMVTATLAAGWDHIRYLNRLMKRLDQLIARYIDLIPNPIITIKGLGAVITAGILAEIVDVLRFPQEKHLAQYMGLTWRKSSSGSFVSENTRLTKVGNVYLRYYFILGANLLRQNNLEYKAYYWRKYQEVSKYQHKRALVLTARKLVRLVHALLTRNEPYVRPRTTRQEQEDDRLQ

SEQ ID NO: 427717 - protein, 388 aa, unidentified
MQIAADRPQASTAIRTDLGAIFVSLELSRSTWLITSLSPGGGAKMSKHSVRGCDVAGLLERFAHLREKARARTGQRFPIIVIHEAGLDGFWIHRMLNAEGIESHVVDPASIATSRRRRRAKTDRIDGEALVRALLAYKRGEPRVCSMVKAPTPEEEDRRRLCRERKVLTAERVLHVNRIKGLLFSQGITGYEPLRRDRRERLEQLQTGDGHTLPDHLKGQVRRELDRLELLLDQIKAVEAERDALLAAERAAARTPAAMLLDIKGIGPEFAAILWSEGLFRHFDNRRQVAAYAGLAPTPWQSGSVDREQGVSKAGNPRLRTTLIQLTWLWLRNQPRSALTLWFHDRVRRNGGRLRKTTIVAVARKLLVALWKYVTAGVVIEGAVMKPA

SEQ ID NO: 427718 - protein, 424 aa, unidentified
MAEQNLAACPEPKFAAYVGIDWADQKHDWAWQPTDGGPKRMGQLAHTPDAIHTWVGQVSAAFGDQPVAVALEQSRGPLLYQLMKYPNLVLYPVHPSTLASYRQSWRPSGAKNDPSDTGLLLDLLQRHRDKLRSLQPDTVATRTLQFLVEERRQWVDDRTCFGHRLTACLKLYYPQVLDWFDDVTAPITLDWLERWPTLEQLQRARPATIEQFLKEHGRRDADKVHQQLQQIQPARPAVTDAAVIDSCRLNLQTLVGQLKPLREAIAGYDRQIESVVQAHPDFVIIDSFPGAGLAMAPRLIAALGTQRDRFDSASSLQCFSGIAPVTSQSGRQCWIHWRWACPKFVRQTFHEWAQHSMKKCEWARSFYQRQRDAGKSHHAAVRALAFKWLRILFRCWKDRVPYDEAKYLRSVRDRLVPKNILKTI

SEQ ID NO: 427719 - protein, 433 aa, unidentified
MLKLNYMSTLFVGIDVSSKTNAVYAMDFEENKYISSSFGNNQPGADKLVNMIAECMHKHKNLDTVLIVLESTSVYSVHISSFLSTSEVLMPYKPYVFCVNPKATSNYRKSYIGMEKTDPTDAYLIADFGRVGRTKKLEPWRGGQFIALKRLTRHRMHLSECITREKTYMVSNLYLKFSELQLLEGDDKPFGSLYGATSSAVLTEFLSPQEIIDMPEEDLLTFLAGKSRNRISDLSKTSELLRKAARDSYRLDKCMYEPLSISLASSFNCIHAYQKEIKLIEQAIEKCINGMNPNALLILQSIPGIGPIWASGILSEIGDITVFHSSDALAKYAGLYWPKGDSGDFTSEDNKMSKAGNPYLRYYLGEAANSVRKHIPEYADFYARKYAEVTKHQHKRALALTSRKFVRLVFGLLVKNQLYTGEKLDAEYNIESN

SEQ ID NO: 427720 - protein, 395 aa, unidentified
MVRLFVGIDVSKDSSSARGIDDNGEDCFAIEFDMDSDGFAKLYKAIMQHCTDVAEVMVAMESTACYHINLFSFLTTKGINTVIVNPLLIANFSKLSLRKTKTDRKDALTIAQFLMAHKDSITQLAVSQDIQDLRDIARERESVIQMISLQTVEMKRLLQTTFPELERLCNITTKVMLDFIEEFPSARLVRAAKPMVIEKALNRKGVSTRLAFSANDIITAARKSIATVSPAKELILKGKVSTFQHLAKRRDELTKALTDYCRQTMIEDLKIVTSVTGINSGTATTFLAEIGNIDKYTSYKKLIAYAGIDPSVYQSGKYEGTGKISKRGNRHLRRVIWIMTKNVIHHNPLFKTFFLKKRKEGQAFKKAMFATSHKLIRVLFALRSKKIYFDQTVHS

SEQ ID NO: 427721 - protein, 347 aa, unidentified
MLADELDYVIGVDPHRDAHAFAVVDVRSGGVVFEATAVADGEGYACVLRLADQHAPGRRVFAVEGTGSFGAGLTRFLVSQEERVLEVGRLRRERQSGKSDALDAIRAARSVLGHTRPAGPRAGGEREALRALTAAREGAVTARRAGLCQLRGLLVSAPEPLRAELRSLTRARLLRRLAAVRPERCQDPELRGTLLALRALARRVKALTAEERELAREIETLARKLAPQLLDQPGVGPLAAAQVLISWSHRGRIRSEAAFARLAGCAPIPASSGQTVRYRLDRSGDRRLNRALHMILVTRRRAHAPTIAYINRRIQEGKSRREATRCLKRYLARNLYRLLENGAPLPT

SEQ ID NO: 427722 - protein, 415 aa, unidentified
MNRSCGIDWAEGHHDVAIIDSDGKLVAKKRISDDPTGFSALTELLADSGDSPENPIPVAIETPRGLLVAALRGTGRPVFAINPMAVARYRERSSVARAKSDHADAMTLANILRVDAHIHRQLPADSELAQAIAVLARAQQDAVWRRTKAGNELRSMLREYYPAFLDTFAGKSATNLAKPEARAILAIAPTPAHAARLTKTRIAAALRRAGRKRGIDDLAADILQRLQIPQLRQPDLVEKAMGRQAMALLAMLDAACAGADDLEQAATEEFRKHPDHAIITSFPGLAEVTGARILAEIGDDRDRFADGRALKAYAGSAPVTRASGKVTSITHRRIKNDRLAAVGWVWATYASINPGPAREHYRRRRDHGDRHAAALRHLFNKMIGQLYHCLQTHQTFDAEKAFSHPAETPQNGAAA

SEQ ID NO: 427723 - protein, 346 aa, unidentified
MVVIGIDSHKRTHTAVAVDMTGRKLIERTVAATSAGHLELVRWAARFAERRFALEDCRHLSRRLSTDLVVAGEAVVRVPPKLMAGVRRSAREPGKSDPIDALAVARAALREPDLPVATLEGQERELRLLVDHRDDLVAERTRAENRLRWHLHELDPGREPAARSLDRRRVVDALEHDLAERSGTVARIARELVARIRDLTSAIDALEREVVRLVTDLAPSLLALAGCGALTAAKLIGETAGVGRFRSAAAFARHNGTAPVEVWSGNRERHRLSRTGNRQLNLALHRIAITQLGRQGPGRTYFEHRRQLGDTKPEAIRALRRRISDEVFRRMRRDEVALVTAPASAA

SEQ ID NO: 427724 - protein, 460 aa, unidentified
MNPKRSKSRNAGKMPMVHPNAAAIDVGATMHMAAVRADRAPEPVRSFGTFTADLHRLVDWFTECGVETVVMESTSVYWIPIFELLDARGFTVFLVNARDAKHVPGRKTDVSDAQWLQRLHSFGLLRASFRPKGQIAELRAYVRQRERLLEYAASHIQHMQKALTEMNLQLHHVVADITGATGLRIIRAILAGERDPEALACLRHYSCHSSAETIAKALTGSYRAEHLFALEQALALYDAYHEKASACDARIEAVLKELSIHRGHGHGSPPPASRRRNRTDQVNALTFDVREALFALLGKDITTIDGFGPYLSLKLIAECGDDLSSWPSAKHFTSWLGLAPSNKVSGGKMLSSRTRRSGGRAAALLRLAAVTVGRTDTALGAFYRRLSARIGKAKAVTATARKIAVLFYNAVRYGMDYVDPGAASYETRYRTRVVNNLQRRAKAFGFVLQPLEPKVGAAVS

SEQ ID NO: 427725 - protein, 352 aa, unidentified
MPMLAELIDAVVGADTHRDTHQLEIAHPTGAPIDVRSISNDTCGFTEAVGWIAEHAPGSRVVVAIEGTRSYGAALTRALTEAGLTVIECEQPTRRARRRKGKSDAIDAHLAVLAALRLDAAKLPTPRAEGDREALRVLLCARDELTTTGTGQTNRLKALLRDGDDTDRALARGKLTDITLNRLARRRPPPEATRAQAVRQTEIRRLAVALRDQRRELKHNRAQLQAIVNDLAPGLTDHNGIGPVCAAQVIVSFSHPGRCRSEAAFAALGGTSPIEASSGRTTRHRLNRGGDRALNKAIHTIARTRMRDCPATQAYVTRRFAEGKNEAEIRRCLKRYIARQLHRFLTTAMAPA

SEQ ID NO: 427726 - protein, 319 aa, unidentified
MTTTAVVVGVDVAKDRLDVAVRPSGEVWSEANDETGITTLVGRLRPLRPALIVCEATGGFERAAIAALAAAGLPVVVANPRQVRDFARATGQLAKTDRLDAGILALFAERVRPTARPLPDAAAQLLDAVLTRRRQLLEMLVAEKNRLGFAPKPVHRGIQAHVRWLERQLDDVTKELAALIEASPVWRAKDDLLQSVPGVGPIVSYTLLGELPELGTLSHKQIAALFGVAPLARDSGTLRGKRLVWGGRASVRTALFMAALCGRRWNPALQRFYERLKAAGKPTKVALIACARKLLTILNAMVRDDKRWAVPAPSVQYSC

SEQ ID NO: 427727 - protein, 413 aa, unidentified
MDAVRLFVGVDWGSATHQVCVIDRDRRVVEERAVAHDGEAIGAMVERLLALAEGDVERIVVGIESPWNAVVETLLERGVHVFCINPKQLDRFRDRHTVAGAKDDRRDAFVIADSLRTDAAAFREIKLGDPRIVELREFSRIHDELREEHGALASRLYQQLLRIFPQILELGSVHQDAWILALIERGPTPEQARSLSVAKIRTILRAHHVRKWTAEQVREVLRKKPLTVAPGVTAAAQSHIRLLLPRLMLLDSQMRETRRAIQGLLDDLEEASDDPNRKEHRDVTILRSLPGAGMIVAATMLSEARDALESRDYHHLRALCGTAPVTRQSGKSSAVSMRRACSHRLRTAVFFMAKTMAAHDPRAKALYAAHRARGHSRGHALRVVADRGLALLVAMLRSGTVYDPSKRILAAPT

SEQ ID NO: 427728 - protein, 343 aa, unidentified
MRLFVGLDVSLEKTAICVISEHGKIVREAQAASEPEALLRWIGEQDGSIAAIGLEAGPLSQWLHRGMDEAGLDVVLMETRQVKGALKAMPIKTDRRDAEGIARLLHLGWFRPVHCKSVSAQEVRAVLGARKAVQQGFIALEMSLRGLLRNFGLKVGTISRGRFEYRIRELAAGNPMLEAATGPMLRARAALRKELAGLERSVRQLAQDDPVCRRLMSMPGIGAVVALTYRSAVDDPARFTSSKKVGSWVGLTPSRNQSGERDVSGGITKAGDVNLRRALCQAATVMMHRGRSTWLRTWAAQVARRRGGKRAMVALARRIGVILHRMWVDDTDFRSDIPIPHAA

SEQ ID NO: 427729 - protein, 343 aa, unidentified
MEYGAIDLHTKESEIRIIDEAGAVVFERRIATTRTRLTEVFGRRAPLRILLESGTGSEWVAQHLESMGHEVVVADPNYAPMYGQRTRRIKTDRRDVAALAEANRLGIYRAAHRVSAPQRDVRRRLRVRDQLVHVRRQAINLLRAQLRSEGVRVPTGAAETFAARFRASEASAAVREAMAPLLELLAALAPLLSQAEQWTRHAAKADPLARRLMTAPGVGPVVALAFQATVDNVGRFATPGAVTSYLGLVPREDSSGERQRKGAITKAGPSRMRVLLIQSAWHLWRSPAGSATLHAWARRLGDRRGRRIAVVALARRLARILWAMWRDGRDFEPARVGRLAAAA

SEQ ID NO: 427730 - protein, 409 aa, unidentified
MKLFVGLDVSSQDAKICFLNGEGDCLQSFTITNDLPGALILKKKILDTASKSNCKIIKIGLESTSIYSYHPAMFLHNDKELRTYGSQVFMINPKQISNFKKSYPEMDKTDAIDAFVIADYVRFGRHTMSIVKEEQYMALQQLTRSRYQLVHALTKEKQHFLQHLGLKCSQFTQDVESSVFGNAMMELFLERFSLEELAQMPLQELVLFLQEKGKKRFGNPEDVAKSIQKAVKGSYRLSKVVEDSIDLLLSTSIQIMRTYQAQIKEIEKGIESLMSTLPQTLESIPGVGPVFAAGIVAEIGQIDRFADETRIAKYAGLFWKKYQSGRFTAENTSLTKSGNPYLRYYLVEAANSVRRHVPEYRDYYTKKSAEVPKHKHKRALVLTARKFVRLVDALLRNNQIYAPGRGVDR

SEQ ID NO: 427731 - protein, 386 aa, unidentified
MQKLNDLSRSLTALEPNGTLIAVIEMSLSSWLVAGIVPGVERQPLKKLAVDESALLKLLHRWREEAEKAGRRIERIAVAFEAGRDGFWLARWLKARGIEAYVIHASSVAVSREHRRAKTDRLDTELLKRSFLGWLRGERDHCKMVEIPTMKDEDAKRPNREHDSLIGERSRIVNRMKAALVRLGIRGFNPKLKRATTRLDGLHTPEGEPIPPNALAELRRDMERRRLVNNQIRQIEEERLERIEQAPCDGAHVMVRLLARVMGVGIETADMLVHEVLSRNMRDRRAVARYAGLTGSPDESGRKRREKGLARSGNARVRRGMIQLAWRFLLHQKNSALTKWFRSRTENARGTRKPMIVALARKLLIALWRLVREGIVPDGVVLRAAQ

SEQ ID NO: 427732 - protein, 378 aa, unidentified
MLAELVGKLKAKLDPTKVAATSAGEKHRRGELGPNLDRLTVGVDLGDQWSHYCILGLEGETLAEGQLRTTQEDFATFFQGLNAARVVVEVGTHSAWVQEVIRGCGHEVLVANPRLMEGSKRRKPKNDRIDANKLARLGRVDPESLYPIQHRSREVRQDLVMLRARDALVAARTEIINTTRGLVKSMGTRLPKCSSRSFAQKGEEAVAVEMREALLPLVRLAATLSADIKEYDKKIETLGQEKYGHTALLRQVKGVGPITALAYVLTLENPQRFAKSRDVGPYLGLVPKQEDSGESQPQLGISKAGDTMVRKLLVGSAQYILGRFGPDTDLRRYGLRLCERGGKNAKKRAAVAVARKLAVLLHRLWVHYAMSAPIAAAA

SEQ ID NO: 427733 - protein, 320 aa, unidentified
MTILNAPTVVGIDVAKAEIVAYREDVQLTQAIGNNRESIGRWLKTLPAQSAIALEATSHYHLDTAELAFGMGHRVYVVDPYRVSHYRESVGLRAKTDPCDARLLARYLASEQQHLRAWSPPPRFYGVLKSLLRKRAELIKTHAAVMLSWSGEPLLKDLMAQQMEHFKRVDQTLQKLLRETAQEAGITENIRRCKAIEGIGDLTATGLATTFMRGDFASADAFIAFLGMDLRPKDSGKKHGCRRLSKKGDGEMRRLAHNAAMAACRSPVWKPYYESYLARGLAKTQALVILARKLCRVAFALMKSESEYQPNLRLQGSLAT

SEQ ID NO: 427734 - protein, 339 aa, unidentified
MKYTPVGVDIAKHLIQVHFINEHTGEVVDKQLRSRDFLTFFSNREPCLIGMEACGGSQHWARELTKLGHKVRLLQARFVKAFVMGNKNDVMDARAIWMAVQQPGKEIAVKTEEQQSVLVLHRTRRQLVKFRTAQINSLHGTLLEFGESIHKGRAAMEREFPEALERMKERLPPYLITVLEDQYNRLSELDSLIDDIEKQLTSVARQNETCKRLLDIPGIGPLIATAAVATMGEASAFKSGREFAAYVGLVPKQTGSGGKIRLLGISKRGDTYLRTLFIHGARAAALLTREPGPWITELKKRRPASVAIVAMANKLARTVWAIAAYGRKYDKNHVSIRPY

SEQ ID NO: 427735 - protein, 460 aa, unidentified
MLRYPVPYGRKEECIPGTRTILIMRLYCASPKGICSVGSLLCVEGEVRFMNNTLFVGIDISKRSNVATFMNCEGKVVGRLTFSNNGSGADRLVAKILSYYEKEDFEAIRIGLENTSVYSKNLVWFLYEHEALNEHKLSIIPLNAIMVANYKKSFMDMDKDDITDSFAIADFIRIRPGLLPFKLDDRQEALKIMTRSRYNYVQALSRMKSQFLTRLFLSFSEMEAGKPFYSIFSKTSLSLLEEEFTLDELAEKPIPELVEFLQEKGGGKFQNPEEIAKVLKKAASSSYRVPAMVRESLNRTMASDMEIMRILENEIHNCDKNIEKLMKSVPAILVSIPGIGPVLAAGIMSEIGDISRFQKQESLGKMAGFKWKRNQSGKKESEDKAAVLSGNKKLRYYLVEAANRVRIHDPVFEAYYRKKYAESKTHAHKRALILTARKLVRVIFYLLKENKLYKPDVGIS

SEQ ID NO: 427736 - protein, 343 aa, unidentified
MKLTRVGVDLAKQVFQVHGVDRAERPAWCQRLKRGRWIAELERNVEPGCEIGMEACGGAHHWARILQSKGYDVKLIAPQFVKPYVKSNKNDANDAQAICEAMSRPSMRYVSVKTVEQQDIQAVHRVRASLISERGAKANQLRGLVYEYGLVAPREIASLRRAVPSWLEDATNGLSARFRALLAALYRDLLWLDERLHELDREIEAIVRENEAVRRIEQLRGIGPLTASALVAMVGDGQQFKNGRHLAVALGLTPRQNSSGGKERLLGISKRGDKYIRTLLIHGARSALRTAPGKTDRLSRWALALAERAHPNVAVTALANKMARVAWAMLRHGTNYEPERVAN

SEQ ID NO: 427737 - protein, 360 aa, unidentified
MSTIADGDDLRVVVGVDTHKDVHVAVVLDEVGRLGDTASFAATARGYRNLTGWVTGFGEVLAIGVEGTGSWGAGLARHLRARGLNVIEVNKPNRHNRRRRGKTDPIDAEAAARAVLAGDATATPKAGDGPVEALRQLRVARAGAMKARTAAANQFHSICDTAPDAVRGQLRGLSTRRKMTVAGRYRAGDPLTPTSAAKMALHSIARRWAALDTEIRALDRDIKTILDTIAAPLLARHGVGYETAGSLLCAAGDNPDRLATEASFAALCGTSPVPVSSGRSNRHRLNRAGDRQANAALWRIVIVRLRSRHAPTMDYLERRVTAGNSKRDAIRCLKRYLARELYNDIQAIVTTTEPRSDIAA

SEQ ID NO: 427738 - protein, 319 aa, unidentified
MFNLGIDVAKAKLDCALRLPNGKHRHKVVDNNDKGYAELHAWLLKHEAGSPRVCMEATGTYWERVAEYLAGRGMLVSVINPAQIKAFGASRLVRTKTDKVDAQLIADFSHERQPEPWLAPSPAEQALRAMVLRLEALQAMRQQESNRLDVARAAVRQGIVDHITWLDGQIKELIRAIKRHIDDDPDLRGKRELLDTIPGLGERTIPVLLSYYANPERFDSAKQAVAFAGLDPRQHESGSSVRGKARMSKVGHSFLRKALYMPAMVTVYRTAWGKRFGQRLRAAGKAKKLIIGAMMRKLVHVAFGVLRSGKIFDPTLHAA

SEQ ID NO: 427739 - protein, 390 aa, unidentified
MHKLFVGIDIAKLNHQATVIDETGKVLGGSIRFPNTTKGGTTLLEHVTKFRDGDTPIVFGMEATGHYWLALYSFLVGKGHTAIVINPYQSESWRKVYMSAVKTDKEDAFLIADLLRFGSIKKSQVPSEVTIALRNLTRFRVSMSLQLSDTKRRILTVLDQVFPEFPALFSDALGKTAISILEEYQTPEALETLSSRKLTNLVSKLSRGRFGKAMAQSLHAAASDSFGITFALDSFSLQLKLLLHQLELLVGQLNLLDEEIAKLFGTESKLLTIPGVGPTTAAAITAEIGDIQRFKTSAQLVSFAGINPTVRQSGNFIGNKNKMSKKGSPYLRLALWQASVVASRKNPVLKAFYEQKVKEGKHKMTAIGAVSRKLTGIIFAIMRDNKPFMI

SEQ ID NO: 427740 - protein, 430 aa, unidentified
MKSNTQNAKIEAITEKTLVLGIDIGSETHYARAFDYRGIEYSKKPFKFSNTEAGFVTFKEWILDLKERHEKDKVVPGMEPTGHYWFNLGKFLQDNEMKPVLVNPHHVKKSKELDDNNPTKNDRKDPKVIAGLVREGRYMIPYLPDGVYADLRTASNIRFQLQAELTRIQNRISRWFNIYFPEYKTVYGKPDAKSGILILKAAPLPEDILTLGIDGVNQIWRDAKLRAVGKARAKTLIEAAKHSVGSKEGAVAARMEIRMLLEDYESRSIRLQEVMTLIEGLVKQIPMAEKLLEIKGVGIKTVSGFLAEVGDISRFNNPKELQKLAGLALVENSSGKHKGETTISRRGRKRLRYLLFEVAMSLVAKNPEFRELHNYYTTRRLNPLKKMQSLMAIAAKLLRVFYAILTKNVGYDPKKMVNDIRRPATYAQAA

SEQ ID NO: 427741 - protein, 385 aa, unidentified
MFRFTGSAKTAVDYNSTIIAALELSEKKWVLAVQLPGVDRHSRHVLDACGERLVSFVERLKARCASAGRKIARVILTHEAGRDGFWLARFLARRGIEVHVMQPSSLPVDRRARRAKTDIIDVEMLLRTLMAWLRGEPRVCSMVPIPSEADEEARRAHREREDLTRERRSIINKIDGILATLGVKGYKALRRDRREQLKCARQPDGASIPQKARGRIERLLDRLELVLKLIEQVESERDAVLKKDAPADEPEGMIRSLTELRSIGPDVATLLVREAFVRQFRNRRALGGYVGLGGTPFSSGGSEREQGIGKDGNRRVRAAMVELAWTWLRWQPDSALSVWFRARVGTMGGRIRKVMIVALARKLLVALWRYVKDGVIPEGAKMKAA

SEQ ID NO: 427742 - protein, 273 aa, unidentified
MSEVITIGVDLAKNVFQVHGVDAQGDVVIQRQVRRAQMLPFFRKQPPCLVGMEACATAHHWARQLIELGHEVKLMPPYYVKPYVKRNKNDAADAAAICEAVTRPTMRFVSVKSKEQQGVLVLHRSRELLIRQRTMLINAIRAHMAEFGIVAPIGVPQVRKLLAVIADPDDARLPPVARACLDGLARQFVSLQEAIHTLGKRILAWHRSNEISLRLESIPGIGPITASALVASITDPEVFKSGRELAAWIGLVPRQNSSGGKQRLGKISKQAEQ

SEQ ID NO: 427743 - protein, 350 aa, unidentified
MTTLTANDVVVTGGVDTHQDLHVAAALDQLGRVLGTHAFPTTVAGYRPLLAWLRGHGRLDKVGVEGTGSYGAALARHLTGAGVEVMEVARPNRQVRRRYGKTDVVDAIAAARAVLSGEATGTPKTHDGPVEALRTLTAVQRSGNKARTQALNQIHQLLVTAPAELRARLRPLTRKDLLATCAGFRIAADDDTLKAMTRLALRELAQSVLHLDEQLAVVTNRLHRITAEVAPKLVATTGVGPAVASALLMTAGDNPHRMASEAAFAALCGSNPIPASSGKTNRHRLNRGGDRNANAALWRIVIVRLACDARTRQYLARRQAEGKTKTEAIRCLKRYVAREIYNAMPSPVAI

SEQ ID NO: 427744 - protein, 316 aa, unidentified
MASFLGIDVSSLSLDVAVRPQGIKIHLSNDPTGFEALLESLRKLSIQRVLLEATGGYERDVMRFLQDAGYKVIRVNPRRARSFADSLGIKAKTDAIDAEVLAHYAEVIPDQPSLQISPERALLRELLQQRDRLVQQRDDDLRRLKQVQSTAVANYLNANLKHFKAQIKLVEHEIEQQTAMLNDERVTQLIKVKGIGMVTAGKLIALLPELGRVESREIASLVGVAPFNHDSGKSMGKRSISGGRFEVRRSLYMACLVAMKYNPALKARYQSLRERGKLPKVAIVACMRTFIVRLNAMLRTGTSWLDLVLPQPESTT

SEQ ID NO: 427745 - protein, 315 aa, unidentified
MPQLAGQVDGVVGVDTPVDTHRDTLTAAVVNPIGAVLADAQVSADADGYQRLLELARQQVPGRRCWALEGTGSYGAGLADFLDAVGEHVVEVCRPKRPAQRGGRKTDALDAVRAAREALVSEHLIHPRRRGEREALRVLLATRGGAVLARTAAVNQLKALIVSAPEALRAELRGRTSKQQIASCLARTTRPGDDVELRATMRALGCTAERIQTLTTEARELEQEIDLLVQAMAPELLALVGVGPISAAQILVSWSHRGRFRSDAAFAAFAGAAPIPASSGLTTRHRLNRAGDRQLNRALHTVVLVRARVDPATRA

SEQ ID NO: 427746 - protein, 267 aa, unidentified
MRSVALDVHLDFCEVAIVEDGEVRSAGRIDTKPQQIELFASSLGPDDRVALEVTGNAWEIARLIEGHVAQVLVVSPSDTGIRQARAKTDRLDARTLARLLAAGSLDAVWMPDRETWVMRRRLSRRGQLVHARTRAKNEIHAVLMRQLVGRPPVSDLFGVKGREWLAGLELAFEERETVDGAMRQIEFLDAEIAEVERLIASDALSSAEIKRLMGVPGVNVIVAASFLAAIGDIHRFQNPRKLVGYLGLDPRVRQSGSGPATRLSRSA

SEQ ID NO: 427747 - protein, 350 aa, unidentified
MNYIGIDIHKKYSVACVQDEAGKVIKRVRIEGNSAEGFRRCLNGDGEPARAVIEACWNWGKVYDTLEGIEGIEEIVLAHPLKTRLIADAQIKTDKIDAAALATLLRGNLVARAHVPGKATRLRKDQLRQRLYWARLRTRIRNRLHALLDRQDDPCLPQCSDLFGSRGTSFLKKLRLTRPEDQRLLDEDLALLDLLASQIKAQEARIKAANIADADTALIASIPGMGPILSAVVAAEIDGIERFGSAARLCAYAGLVPSTYASGGVVYNGKLLNAANKWLRWALIEATWVAVGCSGYFGSLYRHHRARGKKANTSITIVARRMSTILWHLLKERRSFEEDFSLSPVAPCTD

SEQ ID NO: 427748 - protein, 441 aa, unidentified
MSPLALDVVTKTDKTPVLGRMLSKYVGRKTSSIENGITKARNHSRQRGNIMRVVFGIDVSKASSEVAILVNGEKVHGYTIPNDAIGFNRLLGDLKTVHQPEIVFEATGVYSRRLQAFFEDNSYTYTRLNPLESKKQLDSLRVRKTDKIDAEKLAMSQFILNRKPSYVQEALYQELRDLSRFYQNLTEDIVCAKNRLHKVLQITFPELENILSAPTGEQYWNLVITFPCNSFVLESDDATLTAIIRQSTAKRISEKRVTYLVDKLTKLANQSYCAVKKTSPVIEEVKYYAGELLRLSEHRQGVVEEMVTLAQSLPEYEILLSIPGIAETTATSIIGELGDIRRFHSANQINAFIGIDLRHYESGNFLAKEHITKRGNPYARKILFKCIHNIASASHTNPCHIADFYEKRKRQSQVTSTKPHTISSIYCLIRIMYYLITHNKL

SEQ ID NO: 427749 - protein, 417 aa, unidentified
MKCFVGLDISSTKLDVCIMLSDTSTPVTASLSNDLSGATEIKNHILDLNHTYHFERIVIGMEATSLYSFHPAMFFHEDRQLKELHVEIMVEQPNKIKKYRDAFEENKNDTIDAFYIADYFRIERFSPSFLKEEKYMALQHLTRTRLQIIEQLTRTKQHFIENIYYKCNTLAYQFKKEELSTNLWSSTMMTLMTDEMTLDELANMPLQELDDWLQKLGKGHFKDSEKLAQTIQAAIRGSYRLSKLQQDSVNVILGLLAREIRNLEKMIKEIDKAIEDMVETIPEYQCLTSIPGVGKVYAAGIIAEIGQIERFKDHPQVAKFAGLNWREKQSGNSNSQHTSLVNRGNRYLRYYLVKAANSVRRYDDEYKDFYKKKYHEVPKHQHKRAILLTARKFVRLVDVLLRNHQLYTPPRRIMEDN

SEQ ID NO: 427750 - protein, 395 aa, unidentified
MVGLFVGVDVSKDFFSAAGLDEEGKELFSGSYEMDSNGFSEFLKALSSHDESLDQVRVGMESTGCYHITLFSFLHDKGIHVVVIHPLVIANFAKLSLRKTKTDKKDAKTIGRFVVAHQDSISELSLSQQMQDLRDLSRERESLCHLVTATQVEIKRVWRATFPELESIGDLYTGVMLRFLQEYPSARWVREAKPKAIAKALKGPYVGHKLTFSADDILQAARSSVGVTSPAKEVILQGKIATLLHLKERLDETTKLLTDLCKATRLEDLDILRSIKWVGLKTAAPFLAEMGEVENFTSHKKLIAFAGWDPSVRQSGKFVGISKISKRGNRHLRRAIYLMTASVVSQNAFFKAYFLKRKREGLPPQKALCATVHKLLRVIFAMLTQRTYFKPKEVI

SEQ ID NO: 427751 - protein, 367 aa, unidentified
MKKISTVGARQTRNFREQQLTIGLDLGDRSSWYCVLDEAGEVLLEQRLSTTPKAMKEVFGKVPRSRIALETGMHSPWVSRLLSELGHEVIVAHARNVRLIGESRRKDDRFDARTLARLARIDPQLLAPVQHRSAQAQAHLMVIRARAGLVRTRTSLINTARGLTKSYGERLRGCSPRNMNAEKAQSLSPELQAALEPLLAAIESLSQRIYEYNQQIAKIARESYPQVARLEQVKGVGTLIALTYVLTLEDGQRFRKSRDVGCYVGLQPGRRNSGQSEPQLHISKEGDPYLRTLLVQGAHHILGPFGADSDLRRWGLKLAERGGKNGKKRAVIATARKLAVLLHRLWVSGEAYEPLRNSRAMPLPAAA

SEQ ID NO: 427752 - protein, 401 aa, unidentified
MAAQQDMAWAGIDVGKTHHWVCVVDANGKVLLSVKIGNDEAEIVALLARVASLATRVIWAVDIIGAPSVLLLALLARAGQPVHYASGRVVAAMSAAYAGEGKTDAKDAYVIAETARLRRDLAAIDADTDLVRNLAVLTGHRADLIADRVRMINRLRDLMTGVFPSLERAFDYSSHKGALVLLTGYASPDRIRRVGQTRLASWLRNRNVRGSADVAARAVSAAKAQSVVLAGQELTASIIAELASGILALDERLKALDARIEETFAEHPQAAIIQSMPGFGSFLGASLLVGAGDLRAFPSAGHLAAAAGLVPVPNDSGQRTGNLHRPLRYSRPLRHVFYLSAQTSMMRAGPNRDYYLKKRARGATHSQAVIALARRRIDVLWALLRENRTWTATPPPLAQAA

SEQ ID NO: 427753 - protein, 333 aa, unidentified
MNEHAVGIDVSKHKLDVCVARGEKFKSKVVKNTPAGHQQLLAWLGERDLPAATPVVLEATGPYSEAAAIALSDGGWRVSVVNPARVKGFAQSELSRNKTDAADAKLLARFAQRSELTPWVAPSPAVRELHALVERLTALQQMRQQEKNRLEGLGPDAPTRVVSMVKEHIRWLTRQIEALEREIHDHIDGHPELRRDAELIRSIPGCGDKLAAQFLAYVGDARRFKSAKALAAYIGVTPRQRLSGTSVRGRTVLSRTGHADARKALYMPGVVAKRHNPVIRVLAKRLEQRGLAPKAIVGASMRKLVHMIYGVLKSGQMFDAEIPMRELAIQDGI

SEQ ID NO: 427754 - protein, 405 aa, unidentified
MSNDVFVGLDWAVHTHAVCVIDATGSVLDRFEVAHDRDGLAELMRRLARWGERVRIAIERPSGLIVDALVEAGHEVFPIHPNAVKASRPRYRSHGAKSDASDAYLLADLLRTDGHRWRALAQQSDAIRALRALVRSRDNLVAARMAAANQLTSTLQAFWPGAACVFADIASPIGLAFLRRYPSPGCAKRLTEAQLQRFCKRQHYSGRRSAVDLLGRLRAAATGRVGAQTEQAMAEVVRAQVAVLVPIVTQIAELTHRIERYMHALPDGLLMMSFPRAGQVCAAQILAELGDVRERFPSADLLAAEAGTVPVTYQSGKTRSVAFRWACNHRLRRAITCLADNSRHANDWARSIYQAARGRGCDHTHAIRILARAWLRVIWRAWTDRKPYDPALHGALNKLAAAGGG

SEQ ID NO: 427755 - protein, 407 aa, unidentified
MEVLHARCAGLDVHAASVVACVRLASGASVTYEHRTVSTNTRGLLELAEWLTAHQCTHVAMEATGVYWKPVWHVLEDHFTLVLANAMHIRNIPGRKSDKNDATWIADLLAVGLIRSSFVPPAPIQELRDLTRTRKQLVREVVRHTQRIQKTLEDANFKLTEVVSDILGVSGRAILTALVAGETQPERLADLTHGRLKAPRAQLVAALEGRVTAHHRFMIKLHLAQVAALETAITELEARIGEALAPFRAAVSLLITMPGVRDTGAAVILAEIGDDMSKFPSAGHLVSWAGFCPRLDETAGKRRSTRTRSGAPWLKTTLVQMAWAASRKKDSYFHAQFLRLKSRRGPKKAILAVAASMLTDVYYMLRDGVEFHDLGNQFFEQRDKERLTKRLLERLRDLGVQVEVKAA

SEQ ID NO: 427756 - protein, 347 aa, unidentified
MALPIVETRAITGGVDTHADVHVAAALDPIGGLLGVKEFATTPAGYARLLEWLGGFGTVCLVGIEGTGSYGAGLSRHVTAAGVRVVEVDRSDRQDRRRQGKSDPLDAVSAARAAQSGRARGAPKGRDGAVEAIRALMVAKRARSGRTQTINQARSLVVTGPDDLRTRFARHTAAALVAELALLRPRPGDVVGYATRIALRELGRRAEFLDGQLERLDELIVPLVTAHAPRLLALYGIGPDTAALLLIAAGDHPERLRSEAAWAHLCAVAPIPASSGKRTRHRLNPGGDREANHALWRIVITRMSSHPPTRAYVERRSKEGLSKKEIIRCLKRYVAREVYRHLRAAAG

SEQ ID NO: 427757 - protein, 346 aa, unidentified
MTATPTRQLVLGVDTHRDLHVAVLLDRLGRKLATASFGTTNAANAALVAWTRRHGQVTIAGVEGTGSYGYRLAQQLIAAGIHVVEVNRPDRTRRRRKGKNDPVDAEAAARAVLAGDASAIPKCRNGAVGQLRALVLARRSAIKARTQATNQLRALLVDTDDELRGRLDRLRKHHLARACADLHPNGGALHLALRSLGRRWLTLNREITDLDQAITTTVTGVAPRLLARHSVGVHTAARLLLTAGDNPTRLRSEAAFAALCGTSPVEASSGKTVRHRLNRGGDRAANNALWTIAFVRLIHDPRTRAYAAKRTAQGSSRKEILRCLKRTIARELYPLILEALTAPKPS

SEQ ID NO: 427758 - protein, 309 aa, unidentified
MNKAVVYIGVDVAKASLDVAWAERSRRFANNKSGLSALTKWVKQSPFAVHLICEASGGYERGLLDAAEQNRIKVSLVQANRVRQYARAAGILAKTDKVDARVLCAFGSAMQPEPTPPLSAQQKRLRELETQRQHLSRMMVAEQNRLAQLNDKELQRLTRSLLATLKKQMTAIDMRMEGLIAEDQTLKQKAQKLTAIAGVGTRTAVLLLARMPELGTLNRTQAAALAGLAPFNRDSGTSRGKRTIFGGRRALRCGLYMAALVAARHNLILRNFYQRLRSNGKPHKVALTAVMRKLLLALNHTLKPTPCFA

SEQ ID NO: 427759 - protein, 348 aa, unidentified
MDHYAGIDVSLECSSVCVVDASGNIAREGKVASEPEALVAYFGSLRLPVVRIGLEAGPLSQWLYAAMKAAGLAVELLETRHVRAAFKAMPVKSDRNDARGIAQLMRLGWFRPVHCKSLAAQELRAMLTARKLVQSKLRDVENHLRGILRGFGLKVGHTTARSFAVRIRELVEGQANLETIAQALLAVHAVLLREFNGFERRVRIMAREHVKARLLMTTPAVGPIVALTYAGAIDDPARFKSSKQTGAHFGLTPKKYQSGNTDITGRISKIGDAAVREALYQAAHVMLTKPVKGCSQLKSWAMRIARRAGMRKAKVALARKLAVVMHRMLADGKPFNPTARTTPVAMTA

SEQ ID NO: 427760 - protein, 353 aa, unidentified
MDKYIGIDVHAASCTIAVVDARGKQVGSHVVDTNGQEIVECLRAIPGQRHVCFEEGTQSGWLHEILEPHAIEVVVAGVGAISRGPKDDERDAFSLAEDFRLGAIKTRVFKGGGPYKALRELARTHRMVVRDVVRAKNRIKSMYRSRGVAVAGQSVYSSAGRKPWQEQLPEGYRKPLGTLYAELDALEEVRNDAEKALVQEARKFPITKLLATCPGLGPIRAAQIVPIVVSPHRFRTKRQFWSYCGLGIVMRSSSDWLRDKNGQWQRAQVQQTRGLNLTHNHHLKAIFKGAATTVITQHPDEPLNVAYQRWLAAGTKPNLAKVSLARKIAAIALVMWKTEEKYDSSKHSKTVSP

SEQ ID NO: 427761 - protein, 372 aa, unidentified
MAKGITWVGLDAHKKSISVAMFRPDASAPEEWQVANREQDVRRLARKLVREADGGEVRCCYEAGPCGYALQRQMEAAAPLVCAVIAPSLIPVKPGDRVKTDRRDARKLGRLFRAGELTEVHPPSEQEEAIRDLMRCREDAKEDLLRARHRLGKMMLRQGRIYGDAGAWTKRHYEWLRSQSWEQAAERMVFENYLRAIELIEERLAGLDAQVEVMAGEAPYREPVGWLRCFHGIDTITAMTIVAELHDVRRFKSAPELMSYVGLVCSEWTSGDRHRRGRMTKAGNAHVRRVLIEAAWHYRHRPRVGPTLRRRRQGQPAWAMTLADKAHARLHRRYWGLVAKGKPPVVATGAVARELVGFLWGVFQRGVPGAAT

SEQ ID NO: 427762 - protein, 430 aa, unidentified
MEVIHPRVAGIDVHKKIVWVAVRLPGQRPGERTVTVKRFKTFWRSLRQMAAWLAEPGVTDAAMESTGVYWWPVYHALAGAGIEVCVCNAAHMRNVPGRKRDVIDCQWIAELHEHGLLRPSFIPAGAVAELRARTRYRKKLIEQRTSEGQRLAKVLEDAGIKIDSVASRLLLKSGRAMIEALIAGERNPGRLADLALGRLRRKIEELQLACDGRFTAAHGQMCRLHLDAYDHLTAKIAELDELVAEAAAPFAALIARLQTIPGIGRRTAEVIVAETGGDMARFATPARLAAWAGLAPGDNESAGKRKHAAARKGNRHLRTAMVESAWATARTRTRPGARFRRLARRFGKGNEKKAAVAVAHTLICIAWAVLSRGEDYAEAGEDYYQQRDRRDREHLIRHHQQALARLGCQVTLIPPGDGSLPPSATSQQPA

SEQ ID NO: 427763 - protein, 277 aa, unidentified
MHIASIGIDLGKTTFHLVALGERNKVLLRKKFSRPQLLAYTANLPASLVGLEACAGAHFLGTALREQGHQVRLIPAQFVKPYRKSNKNDFLDAEAIAEAVTKQNMRFAQLKTQEQLDWQAMHRVRDRLVRRRTALINEIRGFLLERGITFAAQPIHLRKNLPTVIEDAEQNLSPRLRWLLDRMWQEWKQTETEIQAITDEIERISNEDARCRQLRQIPGFGPLVSTATVAAIGNGSAFRRGRDFAAWVGVVPRQYSTGASKSCMASASAAMSICVAC

SEQ ID NO: 427764 - protein, 439 aa, unidentified
MMAAVIERCAGIDVGKKSISVCLMIGPADQEPRTEVRTYGTRNAELERLRQWLVTERCTHAVLESTGSYWKPIFNVREDSLTVVLANAEDVKGRKGHKTDPKDSWWLAHLLRPAMIRPSFIPPRPIRELRDLTRRRRQLLHDATSERNRVGKVLEDANIKLSSVLADLFGVSGQLMLEALLEGQATATEIAHLAQRQAKRKIPELTAAIEAHRMSDHHRRMIRGSLRHLAFLEQELFHLDEDILRHIEASGLQNALQLLKTLPGVQQDSAVSILAEVGPDMSPFPSAAHLSSWAGLCPGNRRSAGKDKGGRTTRGNRWLRAALTQCAWAAASKKGCSLKNKFWRWAAEGRKRALVAVAHALLVLVYQVLARGEPYQERGMPAVEERQRKRLIRHHVRCLGRLGINVGFSSQRATPNSSKTTSCCCPRPSLEIVKHPEHA

SEQ ID NO: 427765 - protein, 353 aa, unidentified
MNEITTVGADLAKDVIVVCAGDAQGRTVYYKQLSFAGFAEWAAKLSACTFGMEACSTAHHWARFLSAQGHTPKLMAAEFVAPFRKSQGAKNDRNDSQAILAAVRQPDMRFVSVKSVDQQAMLAWHRARAGFGEERTALLNRTRGLLAEFGVWLGRSAEVLIRQLPRLAQDQRLPEHFRPILFYALEHLRRIDQCIADCDTRIHEHVRQSEEAKRIQALTGVGELTASALLATVSNPRDFKNGRQMAAWTGLVPRQNSSGGKQRLGVITKRGDSYLRGLLTQGARSTLQVALKREPLRRSRLQQWIVALHGRVGYHKTLVAIANKHTRILWAILAHGESYDPDAWRRHAPQRHA

SEQ ID NO: 427766 - protein, 353 aa, unidentified
MNITTVGIDLAKDVITVYAQDAQGRCVLSRNFRFKELAEWLVQLPAGCLVGMEACSTAHHWGRRMQTMGLAPRLMAAEFVQAFRKSKSAKNDHNDAEAIAIALRQPTMRFVAIKSEAQQSRLAWHRVREGWKEERTALINRCRGLLLEFGYPIARSTTAFQRGLQICLHDEHLPDGLRRLLAQIADQLQQLDQQLALCDREIAQSARDDEAAKRLQVIAGVGVITADAVCASVGNAHDFKNGRQFAAWMGLTPRQYSSGGKTKLGRISRRGDAYLRSLLVQGARSTLQAALKKTPEQLNRVQQWIVRLYGRVGYHKTLVAIANKHARQLWALLAKGESYDQNAWQIYAPGVPS

SEQ ID NO: 427767 - protein, 362 aa, unidentified
MLYVGLDAHQKRSSLCILNQDGKPVKQELIHGPWPMVIDRLRKIEEPFRICYEASCGYGYLYDRIAPLPMAAQVTVAHPGQLRLIFKSKKKHDRVDAAKIAKLLYLDEVPRVHVPNLDVRGWRKLIEFRQKLLGQRTAVKNQIRAMLRGNGIPATGKWQWGKKAIAALRQVELGTDGERLAMDLAIEELSWLSAKIKRVEKALAKIAAGHPGITLLMTIPGVGIRTAEAFLAYVDDIRRFRRSRQVGAYFGLVPCLDSSAGKDRFGHITRDGPSTVRKLLCEAAWVAIRHDARIKACFERIQNKDPSRKKIAIVAIAHHLCRVMAAMLRSGEVWRKATTTTTTTTTTTTATATATTTTTTTQ

SEQ ID NO: 427768 - protein, 347 aa, unidentified
MKFYNQQHQYYCGIDLHARKMYVCILDQKGKTRVHKNIRTDPELLFELIFPYLDDVVIGVECVFCWYWIADFTAEHKVPFALGHALYMKAIHGGKTKNDKIDSYKIAALLRGGNFPVAYPYPAKMRATRDLLRRRIYISRQCAELIAHIQNTNTQYNLPPFAKKISRKYNRQGVAERFEDPAVKKSVEVDLALIDSMNKILSELEWYIEKTARQHDYQTLYLLRSIPGVGQILALVILYEIHDIRRFSSVQDFSSYARLIKPDKESNGKWAGKSNKKIGNPNLKWAIKEAAILMLRESQQVKSYVAKMEKRYTKGKALGIFTHKLGRAIFFMLRNKEAFSMKKFFQD

SEQ ID NO: 427769 - protein, 401 aa, unidentified
MWYAGLDWADSHHDVVVIDDGGRQVASRRVAHSAQGLAELTAFLRQIAPLDQIACIVETNQGLLISTLLEAGCTLYPVNPKTIDRRRNASGAKTDLIDAYLLAKTGRSDLRDLRKLTPDSAIIQELKALTRDQDSLVQSQTRLVNQLTACLKAYYPVALQLFSKLQQRSTLIFLQTYPTLEAARQASVEEITSVLKEVGHPKPSKVAPKIRETLHQPQLHANAITTRTKSRLMLALAAQLLPLIEQIASYDKQITALFLTHADHEIFSSLPGAGKRLAPRLLAEWGDDRTRYTASTSVQALAGTAPVAFQSGNYAKAHKRYACLKPLRNVLHQLAWQSTKQEAWALTYYKRKRAEGKSHSMAVRSLANVWVRIIYAMWFEHKSSKTATFEAAQHHHAKRAA

SEQ ID NO: 427770 - protein, 307 aa, unidentified
MHYVNNTELSSHEETRSQFNGGRCAIKLGIDVHQDFYVVVEQVGGSNPKPPQRFQKEAFLHWAARLKRKSGAEVHAVYEACGFGFALQRKLSALGIRCYVVCPQKLDEHNRRVKTDGLDAKALCLRLDRFVQGNRAALAIVRVPTEEEEQLRAIHRQREQLVKARKQLEAQGRSLLVNHGLEPVQNWWKPRTFAALPAPQWMKELLANSQPILVALQQKIAALSVQLQSAASPEQPRGLGKMTSVIIEREIGDWKRFNNRRQIASYTGLCPGEYSSGNTRLQSCVTKHGNPRLRAALVELAWRLVRF

SEQ ID NO: 427771 - protein, 343 aa, unidentified
MDYFAGLDVSVKDTSVCIVDGTGKIVREGKVASEPEALLTVLRDTAYRFKRIGLEAGPLSQWLFSALAEADLPVICVETRHMRAVLKAQINKTDRNDARGIAQMMRVGLYRPVHVKTLRSQKLRMLLTHRKLLQAKAIAVENDLRATLRNFGLKVGAVGAVKFEARIKELIDNFPDLVALVEPLLVVRRVLREQISIPHRRVLAAVRYDEVCRRLMTVPGVGPVVALTYRATVDVPARFRKSKSVGAVFGLTPARDQSGESDRPGAISRCGDQMMRAMLYEAAQAMLLRSAKWSWLKAWAMKIAKHRGMKKAIVALARRLAVIMHRIWIDGTEFRWTREAAAA

SEQ ID NO: 427772 - protein, 402 aa, unidentified
MRRCIGLDVHREFAQVAIWQDGVIWQAGRIELTPEALRDFADSLCVTDEVALEATGNTYAIARLLERQVGRVVISNPQKTRAIAEAKVKTDKVDAAVLAGLLAADYLPSVWLPDDATFALRRRVTRRAHIVRQRTRLKNQVQSILHRNLIPRCPAADLFGTKGRAWLAAQDLPPDEQQAVGALLRQLDFHGQELRIVDAELGRVALEHAEVRRLLTIPGVDATVALAIVAAVGDFGRFSSPQRLVSYLGLNPRVRQSGGQPAQHGRITKQGRAHARGMLVEAAWAAAKTPGPLRAFYERVRARRGMQVAVVATARKLATLCWHLVVGDQDYAFARPSLTDKKLRALELRAGMPPRRGQKGTAAAYSLKEVRRRERALTEQAEAAYRQLVAGWQPKRPAAKPR

SEQ ID NO: 427773 - protein, 374 aa, unidentified
MAKRLAARQIVPASVEDTARKLEIAVQPTHSRARTVARAKSSHLTRTGRRSGRQERNRMGEVFVGIDVSKARLDVAVSPSGEVWSCANDEEGFAALLERLRPLRPKLVVLEATGGYQAPLAAALTVGGIVVAVVNPRQVRDFGRATGQLAKTDVLDAQVIARFAEAVRPEPRPLPDDETNALRGVVARRRQLVEMITAEMNRLPSAVATVRHDIEEHIQWLRRRLKDVDKDLYDGLKRSPLWRVKEQLLRSAPGIGPVTTCTLIADVPELGRLNRKKIAALIGVAPFNRDSGTLRGKRTIWGGRGEVRRTLYMATLAAVRRSPSMRAFYERLANDGKPKKVVLVACMRKMLVRLNAMLRDGATWLEPVQVITAA

SEQ ID NO: 427774 - protein, 344 aa, unidentified
MIYIGLDVHKDNITACVLTARGKVKFEHDYKRQSQSWDCLSELLGYRDRDGSCFLMESGTYAYPPYRFLTDHGAEAHVVHARSLKVITDSDRKTDRVDAMAIAKMLRLWKRGEIELSMAFMPTRDQCELKDICRYREQISKEIGDETRRIKSHMARNCQAMPPDTDNFQTRKARRFVAETYRDDMTLSRRMARLDELFSERDRVQREVESRLPEDSRVALLEQIPGIGRQSAVQIMSMIVDVDRFPDAEHMCAYFGMVPRVRDSGGKEHHGRMTKNGDRMMREIMERATESHVRNCESSVTEFYRRMLPRMGQKKALITASRKMLSVIYAVLKRGTPFRPHLDG

SEQ ID NO: 427775 - protein, 372 aa, unidentified
MGHHTEVFVGIDTSKSRNAIAIADGGRGGEVRYLGEFSATEAAIRKLVAKLAAKCCHLTFCYEAGPTGYGLYRLLKSLGHDCLVVAPSLVPKKAGDRVKTNRRDAVNLAKLLRAGELTAVWVPDERHEAMRDLSRARLAVKKDLQGKRQQISSLMLRLGRIFPGKTTWGPAHMKWLMAQKLEHREQRIAFEELLEGIRQESERVERLENAIREAVPEWSLAEIVAALQAMRGIDLIAAVGVLAEIGDLSRFQNPRELMGYLGLVPTESSTGDKVKRGGITKAGNGRARRILVEAAWSYRYPPRVSRDKQPKVEAAPRRAREIAWKAQTRLCGRFRSLERKGKRRTVIVPAIARELSAFIWAINRELMPPRQA

SEQ ID NO: 427776 - protein, 447 aa, unidentified
MKTEPEEIPDADHELIIERVAAIDVAKASGKVCLRLPRPGRPGHRVSRVWDVEATTAAVCELADHLVAGQIERVTVESTSDYWRIWYYLLEAAGLSVQLVNARDVKNVPGRPKSDKLDSVWLAKLTEKGLLRPSFVPPAPIRQLRDYTRLRVDLTRERSRYWQRLEKLLEDALIKVSAVASTLDTLSVRDMLEALIAGERDPRRLADLARGRMKTKRAALIEALTGRFDDHHGELARMLLDQIDALSGQINTLTIRIDQLLATIANEVPGHDDGDSGAGGQPSADLTVVQRLTEIPGIGPTGAQVILAEIGLDMSRFPTAAHLVSWAKLCPRTIQSGAIQRSGKSGKGNPYLKGALGEAAAAAAKTNTFLGERYRRIVKRRGKLKALVAVARSILVIIWNLLSDNHARFRDLGPDYHATRINTERKLRNHIAQLAALGYHVTVEPAA

SEQ ID NO: 427777 - protein, 358 aa, unidentified
MKETKWKDESKEHWVGLDVSKATFDAALAAPDQRFPSTPLRTLPWKAFPRTREGVEAFLAWLDEQVPKRKARVLMEATGRYSVELTTWLVAKRPTLRPAIENPKNTKAFLDSLNQRNKTDGLDARGLAFYGVERRPAPYEPLSKTRQELRELNRYRDALVAQRTALKNRSHEKSSSKIVTRMQVRQLRQLDKDISTVEQEMKLLINEDEVFKGDFDLLTSIDGVGPITAMTVLAEIGDLRRFERARQLTAYAGVSPRIVQSGTSVRGKTRMCKRGNKRIRQALYLSAMATLNTKKPNSLSAMHYRLCKGGKQGKEALGAVMRKQLTVMRAVIISGKPYDPTFKGRGKFSARTLAEGTI

SEQ ID NO: 427778 - protein, 342 aa, unidentified
MKIAVLGIDLGKTSCSVVGLDGTGHVVMRRRMHRDSVIKFASGMAPCVVAMEACCGAHHLGRIVRDHGHQVRLMSPEYVRPYVKAQKNDDRDAEAIAEAATRPTMRFVELKSAEQLDMQSLHRVRDRLFGERTALINQLRDVLMERGITVPQGRRKLEQHLAVLLDGEELRLSPRVRSLVEDMRAEWGALDRRIEAFDDEFAARAKTDDAARRLATIPGIGVLNATALAAAVGNAASFARGRDLAAWLGLVPRQMTTGGKPRLMGISKRGNKYLRKLLVHGARGALPSLSASTTPLGKWLKDLLQRAHKNTVIVALANKLARIVWAVLRHGGTYDAAALTVA

SEQ ID NO: 427779 - protein, 405 aa, unidentified
MSKAPAGQDADRVVVGMDPHKRSVTIEVMAGDETILGGGRFSTTVEGYRAMRAYVAQWSARVWAIEGCAGIGGHVATRLLADGEQVVDVPPKLSARARVFTTGQGRKTDATDAHSVALVGTRMSGLRPVIDNSQLAVLRVLVDRRRSLGEDHTRMVSQLHHLLLQLIPGGAKKDLSAAQAKALLASVRPRDAAGKTRRRVAAELIADLERIYQRKKAADKELTALLTQTGTSLLTLNGIGPSGAARLLVEVGDITRFPSRAHFASWNGTAPIDASSGDQIRHRLSRAGNRQINRVLHIMATVQLRNPTTGRSYYDRRRTDGKTSMEAMRALKRRLSDIVYRTMLGDAIHPTQAGAAAAQRTGPGGHSGAATNSSAVDSNPGIDASEKSLPGPATEQPTTPLPTAS

SEQ ID NO: 427780 - protein, 556 aa, unidentified
MSAGKKNAKNNNGGDGARGAVPVHGGEGAEVAEESTQVVEYAAAIDVAKGFGMVCTRVPGSRPDRRRQKVWRAEAAFKEVTALMDHLRCEGIQRLVLESTSDYWRIFYYLAEAAGLEVWLASARDVKHLPGRGKSDRLDCVWHCKLNERGMLMRSFVPPEPVRDLRALTRTRARLAQDQTRHQSRVEKILEDALVKVSAVISDLFGTSGRRFPGALVAGQRSPKALAALGDYRLKASTAGLEAALTGRFRDIHATEIAVHLRLIDAINAEIALLDEQIEQHLPSVPHTAPVCTACGEIGGCHAPGCGSHGTAPLSLAGRLDEVTGIGPVNAPALIAEPGTDPSQFPTPGHAAAWAHLTSRSRQSRGVREARPHRQGQPVSARRARPGCDDRGQHRYPPRRHVPPDRPQARQAESHRRGLPGHLRDRLDPHLRPRRPVRGTGGGLLPSPQPRPPDPRQDPRDRAPQPRQEGHPRRRRAASRRSRLKRAAHGSRTVTATLRGVTPLTVIPPGRAQPPHPTLRWTAGCCPPSGAVSGQSINVRTADIVRRVTIPVHHRA

SEQ ID NO: 427781 - protein, 415 aa, unidentified
MALKIVYKICCGIDVHKTFVVACIASTNDKGVTSYESHRFSTYTSGLKTLLQWLLDRNCKDVCMESTGKYWIPVYNILEKDCSIVLAHPKYVKAIRGKKTDKKDAKWIADLFKHDLVAGSFMPPAGIRQLRDLMRYRFKLTCFKSSEKNRLQNCLTVSNIQLGNVVSDTFGKSAQAILDKILENPADTSFDLEPLVFKSLKKKLPELRDAIDGYITPEQAGKLKVIKAHYENLESRKAELEELILALAAPYQQELAILQTAPGISSDFTAIGIISEIGTNMEAFPSAKHLCSWAGLTPTNNESAGKKKSVRVSKAGCYIKPLLVQCANAVVKSNKHPEIRNRYLRIKKRRGHKKAIIAIARMLLTALYHMLKNGENYNAELYQKSDLLPVDREITVEQALMIARNQGYKIKSATA

SEQ ID NO: 427782 - protein, 370 aa, unidentified
MKTRITEKRYYIGMDVHKHSVQMAVFEQEGEQPIYERSLENDTGLLMNEVLRFSREAMTEVAYEAGSLGYGIYRGMSAIGVPCYVLPASKVAKRRTERIKTDKRDARLIGRELRSKSIRPISVPQEADEAARDLLRCREDVSEDLRRVKQRLLKFLVRNGHVYTAGANHWTVKHWKWMDGIEFGQEYQKKVYEEYRSEIYGLQQRLKRLSQEVEQAAHSPRYQAAVSRLRAFKGIDYVIALALVCEIGDFRRFANAKSFMSYLGFVPSEYSSGGRRVQGSITKAGNGHLRKLLIEGAWHYTRSSRTGRRLEERRTGSPAQAIEIADRALQRLHKKYIRLVIKGKHVNKAVTAIARELAGFIWAVQVSSAA

SEQ ID NO: 427783 - protein, 372 aa, unidentified
MSACYEGPQFVGIDLHRRRTVLVRMTPAGERLGAMVRFPSTPEALRREMTAAGTAPQVVLEATYGWYWAVETLQQMGAQVHLAHPLGIKGFTTRRVKNDERDAADLADLLRMGRLPEAHIAPAPVRALRELVRHRAKLTRWRATVKTSIHAVLAKRGVVVPMSDLFGVEGLTLLDALCGRPGENGSITSSRLEPEYAARVRSLRMLLGVLQTEITVFDRRIATALAGHPGYRTLQQINGVGPVFAAVFIAEIGDVTRFATADKLTCWAGLTPRHRESDTTVHRGRVTKQGSKLVRWAAVEAVQRSSEPAVAAVRTRIADRRGRPGQRTGRNIAKVAAARVLLKLVYYGLRDGQIRALSPDPGPRPPATRTAA

SEQ ID NO: 427784 - protein, 424 aa, unidentified
MRFLGLDVHRDFCEVAIAEDGELRLAGRVRSSPGELELFARSLSPEDVVAMEATANALAIARIIEPHVARVVLANPKAVTAATGLRAKTDKIDAKTLAQLLAAGFLAEVWTPDEQTRVRRRLISRRSHLVRQMVREKNQVHAVLQRQLKDRPPMSDVFGVKGRQWLAQQCEQLPVDEQQSVNACLRQIDFTKSEIELVDLEIAKQIAASEQLRNLMTLPGVSGVTATALLAAIGDIERFPTAKHLVGYLGLSPRVHQSGTEAAKHGRISKQGPGEVRGLLVEAAWHAARSAGPLRAFHERIKQRRGANIATVAVARKLVVIAWNMLSRNEEYAFARPSLHREKLRRFELMLGAQRQTGRRLSSDGRTFATPTQRLLEKQLADQAETAYRLLMTDWQSVKKAGAGSTPGRASQRPSKGKAARQTQ

SEQ ID NO: 427785 - protein, 345 aa, unidentified
MSVYVGIDVHRKRSQVAVIDAKGEVLANRNVPNGVEPILKVIGGLPPGTPAAFEAACGTSWLVELLEGYGFDPHLVHPLRCKAIASARLKNDKVDAAILAQLLRADLLPEAWIAPPPVRQLRALLRHRVALVRLRTLLRNRIHAIVADHGHDRPRGGYWSGPGRAWLAALALPAVSRELVEDDLGLIGALQTVIDRLDWEIRQRARSDPRAGVLTQLPGVGPFTALVILAETGDVSRFGSARKLASWAGLTPTVRGSDRVAHYGHISKQGSVWLRWALCEAAQTAKRSPQFAASFQAIAGRRGKKIATTAVARKLLTRAWHLLTDAEPAATPPPAQAAAPPAETR

SEQ ID NO: 427786 - protein, 360 aa, unidentified
MIVQGTSVGLDVHALSVVAHAVDEETGKVARARLCPDHGEVLGWLHQLRAPVRVTYEAGPTGFGLARAITEAGMECLVAAPSKLQRPAGDRIKTDARDAAHLARLLRLGEITEVRVPEREIEAVRDLVRAREDARADLMRVRHRLSKLLLRQGIVYFGGTPWTCAHEEWLRRHRFDDIHLKAAFDHSFDAVLAATAARDRLDEQIMVVAASPRFADPVNRLGCLRGISALTGLALTVEIGDWSRFTGSSIGAYVGLVPCEYSSGNSRVQGSITKAGNTHVRRLLIESAWHHRKSYSTSGPTLRARWAKVDPALRARGHAGNRRLNKRWRSFTERGKNPLVANVAIARELAGWCWSLATMQ

SEQ ID NO: 427787 - protein, 388 aa, unidentified
MSKVIMIGCDLHERSMLLKVAVGRGCPQQLSYDNNAAGRRRMIQRLKGMAKKHNCTRIVFVYEASGLGHGLSDELHDAGIECHVLSPTHLPKTPKSAKLKTDARDAQMLLEQVRGHVLAGNSLPVVWTPPQRLRDDRELVRARVDVADEMTRVKLKMRSLLKRYENPANYPTKTKWTKTHVRWLREKIVPELEMTVGVKLRLLLDRLEMYRHEQGELDKALKMLSREERYKSPCSELCKLPGVGLLVAMTYLTEMGDLTRFHNRREVAAYLGLCPSSHESGQTTDRKGRITRQGPARLRKMLCQAAWVSISRCKELADTYHRIRQNQKHRTKKALVALMRKLGIIMWHCARRCGVSEELVGRGGPHDLAGASPGHPPKATDRPVACLA

SEQ ID NO: 427788 - protein, 346 aa, unidentified
MKQVSTIGLDLAKHVFQVHGADNEGSALFNRKLRRTEVLRFFERLPPCLVGMEACGGAHYWAREIAQLGHDVRLIPPAYVKPFVKRGKTDAADAEAISEAVIRKTMRFVPIKTAEQQADAMVLKTRALLVQQRTQSVNALRAHLAELGIIAAGGLANVAALMTIVREAEDTRLPTAARFALTAIVDQIDALAIQIGVLERAIVTESKRDESMRRLTTIPGVGAITAATIKALVPDPGGFKSGRHFAAWVGLTPRPHSSGGKERLGRISKMGNPELRVLLVLGATAVLRIARNDEKARPWLKALLARRPFKVAAVALANKMARIIWALLNKGGFYDPPEPSPNLATI

SEQ ID NO: 427789 - protein, 408 aa, unidentified
MNHTLCVGIDVAKLSNHVYALNFNRDKLLSVNIPNTQDGANLIETHILKLLDIHHLSKVIVILESTGVYSGHLATYLSASKFLSVFDIKVYLINPKISKNYRKSFADMDKTDPKDAYILADIARVGRTDELTPFKGGQRLALERLTRHRLHIAEKLSNEKVYALNNVFIKFSNFETIFSNNFGSTAVDLLLDYKTIDDIIDSSLEDLSDFVAKSSKNRFDNSLDIAAKIQKAARDSYRLDKVSYDPINTALASSINVIKCYEHEMKDIDKAILRQVAGFNHDHYQILTSIPGIGKVYAAGILAEIVDISQFESNDALAKYAGITWRKNQSGKFTADETYMTKTGNKYLRYFLIQAANMARIHIPEYRDFYHKKYDEVTTHQHKRALALTARKLIRLIYGLLSTNRLYK

SEQ ID NO: 427790 - protein, 418 aa, unidentified
MKKILYVGLDVHAETIAVAVAEGGRDGEVRSLGTIANRIEAIRKLVKKLREQGEIRACYEAGPTGYCLYWQLTQLGVECEVIAPSLIPVKASERVKTDRRDAEKLARCYRAGELTAVAVPSPEQEALRDLVRARESAKKDQLKARHRLGKFLLRHGRRPDGMKAWTKQYLEWIKINVHFEIKALEVTLLNYLHEVEHVAERIVHLEAAIDEAVREAPVELREVIEALQALRGVAQTTAATIVSELGSLTRFASPRQLMGYSGLVASEHSSGGKVQRGAITKSGNAHLRRVLVEASWSYHHRPNVTGFLLRRQKNLALSDEVKAIAWKAQHRLNKRYKALTAKGKNKNQVVTALARELLGFIWAIAAKTETKTLAAGQGGMDQPHATQSSSVRPGPRPSRPSPAGALRAALTGSGPART

SEQ ID NO: 427791 - protein, 364 aa, unidentified
MVEDRRTVVVGLDVHKSSVRLAAVRDGELLRERTLGYDHEQLLREVRVWPGARVCQEAGPTGFGLHRALIAAGVDSVIVAPGLVPSRPGDRVKTDKRDARRLASLHAAGLLTEIFIPTEEHEALRDLVRAREDARLDRMRARHRLGKFCLRHERTMPTTCWGPTRRAWLGRQSFQLPGQQQAFDDYLFAVDQVDRRIEMLEAELDRLASDGPHRELVGRLRCMRGIDTLTAIGLVAEAGDFSRFNTAEQFMSFVGLVPSERSSGESRRQGSITKAGSAHARRLLVESAWNGRRRPTVGYELARRQRGQDPQVLEHAWRCQQRLHRRWSRMAGRGKPHQKIVVACARELAGFVWAIATEQPLRTR

SEQ ID NO: 427792 - protein, 309 aa, unidentified
MLTAEADKRKTKVVVNTAAGVQALLAWCAKHGAQPAQLHAILEPTGLYHEQAATALPQVRVSLVNPAQARDFAKALALRSKNDALDSYVLARYGQTLSPALWHPAPLHARQLRALLTRREALSKDLLRELNRKEKSQFSPSAPLVDGSIDKAIAFLREQIKQIERAIDQHIDNHPDLKQDCELLNSIPAIGPQAGNAILAVMHNRHIDSAQSLAAYLGVVPVQRQSGSSLNSCARLSKAGPSQVRATLYMAALVGTRHNPHIRALYQRLLKAGKSKKAALGAAMRKLVHLCFGVLKNRIPYQPNYAIDA

SEQ ID NO: 427793 - protein, 350 aa, unidentified
MLIIGCDFHTRYQQIAMLDDATGESTERRLEHENGEAHTFYRGLPKPVRVGLEATGPMHWFERLLAELGHELWIGDSAKIRASELRKQKTDERDARLILELLLTNRFPRIWVPTAAERDLRQLLWHRHKLVRLRTMLGNQLHFLAMSQGLCRKKKLFTKKGRHELVGLALGPWASRRREELLQLLDQVGPSIAELDRAVLEQANRREDAVRLMTHPGIGPVNALAFVLTIGPVARFRRSKQVVSYLGLNPSEHSSGGKRRLGAISKQGNTLVRWLLIEAAHHTVRGDPELRQDYQRLRFRRGNAVAKVAIARKLAVRMFWMLRSGADYAQLVRMQGSPGATLMETPPSLG

SEQ ID NO: 427794 - protein, 391 aa, unidentified
MEAWTVNNLPPAGTHDDAVRCLLAIELSKKSWIVAVNTSLSDKISRHTLKPCDGKELLDLCERIRTRVARETKKRVEVVSCYEAGYDGFWLHRLLEAHDIRNYVIDPASLQVDRRARRAKTDHVDAERLLRSLIAYLRGEPKVWSVVCVPSVAEEDDRRLHRERSRLINERIQHVNRIKGLLAIHGIYDYQPLRRDRMQRLERLCTAADGRTLPPRIKAEILRELQRLELAIRMIKTIEAERDAIASAAKTETKHTSAKKIQHLAKIKSIGPEFATTLVGEVFYRSFDNRKQLASYVGLTPAHFQSGAMCRDQGISKAGNAKARTVMIELAWLWLRHQPDSPLSVWFRDRVGKLKGRIRRITIVAVARKLLIALWRYLETGLVPEGAALKV

SEQ ID NO: 427795 - protein, 426 aa, unidentified
MKNWIEQTHFAGLDWADDHHDVVVVDRQGQTQLRLEFAHSAAGWQELRQALAPWPGIPVAIETNQGLAVDQLLQWEFTVYPVVPKAAAAYRTRQCPSGLKDDFHDAWSLAQALRTDGQRWRPWQPLDPLTAQLRLLCRDEVALIEQRTALVNQLKAALKEFYPAALEAFSDWTHPSAWAFVLAFPTPQDLQQAGRRKWEKFLHTHRLWRSDTAPERLALFAQATAFVGSAAVTAAKSCLALALARLLVTLEAQLKLYRARIAQLFAQHPDHDLFGSLPGAGPKLAPRLLSQLAGVDWTSLAQVRGWAGTAPITFQSGQMRRVKVRWACNHFLRATLHLWANLSRHSCAWAQAFYERHRQQGQSHACALRALANRWLNVIAGMCRSGTAYNPELHLRNLQKHGSWVLALSPHPTPKKTLRPASSPCE

SEQ ID NO: 427796 - protein, 409 aa, unidentified
MPGALHIGIDISGRENMACFLNENGDRLGPVFTFSNDQTGLNKFLEQLFQIAHNHCPEKINIGMEATNFYWWHLQEALSEVRLDGADIDLFPINPKLVKGFKKAYPNLPKTDAIDAFVIADRLRFGRLTPLHRGSLIYAPLARVTRLRYMMKKSIEREKNRAINLTFLKFSNFRQAAGRKAFNKSSCELLNGFTVDEVADKPLEELVDFVLTHGNNRIAGPEQFINEIQKAANNSYRLNPKMDDMVSVALTMTIENIRFLEGQCKKLDKVIEKEFKAMPQVLNTIPGIGSVLSAGITTEIGDISRFSGEKALAKFAGLTWHRTQSGPYVAEETSLTKAGNAYLRYYLVEAANSLRLHNDDYAAFYRRKYEEVTKHRHKRALVLTARKFVRLVFALLSKGQIYNERMVNG

SEQ ID NO: 427797 - protein, 311 aa, unidentified
MVERFGGIDVSMDRLDVMVVPDRVGFSVENNAAGWTKLIERLRGSPLTAIGIEPSGGYERGVIRALLAAGLSVRRINPNKLRQFARARGVLAKNDRLDARLIAEYVAIMPTRIVQSDPAAQRLAEVVTMRRQLCDEHVTVENQATHVEDAMLRRLNKRRLARLDSDIRLLDKRMAEIVAAEPALDQRYRLLISMPGVGPVLAFTLIALLPELGQMSRKQIAALVGLAPYDFDSGKLRGHRSIYGGRMPVRNVLYMAALSACRYNPALKTFHKRLASADKKSKVVIVAVMRKMITTLNAMLRDNAAWQIKTT

SEQ ID NO: 427798 - protein, 355 aa, unidentified
MNDSKFIGLDVHKTSISAAVLDHDGKLVMQSIFATHAAAVLSFIHGLRGTLRITFEEGTHSSWLYDLLRPYVTEVLVCNPRKNALLKSGNKSDQIDARKLADLLRSNLLTPVFHDDSRTLTLKELGRTYRAVTEDTTRVMSRLKALYRSQAIATEGKKLCTKRRREQWLKELTQAGRRYRAERMFEQLDALQGFRRQARRDLFVECRKHAATAILTSIPFLGPIRAALLIARVQTPFRFRGKRQFWAYCGLALETRSSADYRLVEGELHRAKKPVFIRGLNLNHNHDLENIFKAAATTASACPGPFRDYYETLLGRGMKPEMARLTLARKIAAISLIVWKKGERFDPEQLKAQAA

SEQ ID NO: 427799 - protein, 415 aa, unidentified
MANEAIKVIAGIDTHADTHHVAVINEHGKPIADREFLAVGSGYRKIIDFITSHGTPIAIGVEGTGSYGAELARTLRGEGLTVLEVNRPNRAARRLKGKSDPLDAYQAAKSVLEGRTKAIPKAKDGPVECLRILRSGRASAIKARTAAVNQIKALLVSAPDKIRAKYRALATTALITALQRARPSGHLADPEYVTLLTLKALAGRCQALGTEIEVADAALKEVLDSYAPMLCDLPGVGTEVASQLLITVGDNPDRLGNEAQFASLVGVAPVPASSGKTTRHRLSRSGDRNANHALYSVVLVRMASCQRTKDYVAKRTSEGKSKREIMRCLKRYAAREIYRQITNPQPAPDNSDLRRMRTQLGITITNVARELGQWVSIISRLERGHIRNDQLAATYRQWLTKQTRLEHLAHPIPAS

SEQ ID NO: 427800 - protein, 359 aa, unidentified
MKANVKKNTINFKGKMVSIGVDMHKRSWHITALSDGEIVLAVSLSRPSYNVFEKLLSQFKGNYVRIVYEAGPGGFELYDRLTTDGIECIVIPPSLIPTQSGSRVKTDKKDSLKLATLLEINMLKKVWVLSPEERAHRQLIRTRRQIVNHRSDVMRQIKSLLLFHSIEVPFSSRQQWTGPFIRWLHDVDLGNEYLNRSLKDLGNLFDYLSAEKKRLTHEVVELGREENYVQRVKLLKTIPGIGCLSAMEILVELQDITRFQTADELAAYLGLTPSQYSSGEHIRMGHITHAGNDRARTTLVESSWLLIGKDPHMRCRYEDIKQRRGGKKAIVAVARNLSIRIRRMLLDHVPHEIDFQKAA

SEQ ID NO: 427801 - protein, 364 aa, unidentified
MKSYTGKTIFIGMDVHKKTYSVTAICEEVVVKRDTLKADPVLLITYLKKRFGEGKIVSAYEAGFCGFHLHRKLIAAGIDNIVVHPAGIEISNDRVKTDKRDSLKIATHLSQKRLKGIYVPSVEREDFRAITRVREAFIKEKTRIACQIKSLLHQYGLIGACDDRKVSEKWIKSLSKLELNPGIKFSLDMYVSMWLEFNAKIKEISIEMKKQAAKDNVIDTIYQSAPGIGPTTARILANELEDLLQFKNNGQLYSYVGFTPSEYSSGEHVRQGHITKQGKPILRKILIQAAWTAIRHDEELRAIFDRISAKAGCKRAIVAIARRLIGRIRTCFRTGTLYETPTEQQKNRISNKQGTDQELKTLVA

SEQ ID NO: 427802 - protein, 322 aa, unidentified
MSQPNPLCVGIDVSKATLDIAASSDVAQFTVSNDSDGFNAIITGLRRHSVALVLMEATGGLEVAVACSLQAEGFEVAVVNPRQARDFARAMGYLAKTNRIDARVLTQMAEVINRHPERKRFIRALPDAERQALAAMVVRRRQLIAMLVAERNRLHPSHPQNKKSINTIIKALEDELVRLEKEMDSHIRNHFKEIAERLSSIKGVGTMTVSAMLAEIPELGTLSRREISALIGVAPVNRDSGTMRGRRTIFGGRAGVRSALYMAALVATRFNPVIKTFYVRLLAAGKAKKVALVACMRKLLTILNAMLRKNEEWDESYHHVAP

SEQ ID NO: 427803 - protein, 335 aa, unidentified
MPMLAELVDAVIGVDTHRDTHQAEIATATGTPIATITVGNDSAGYSQLLGWIIEHCPGPRLVVAIEGTRSYGIGLARAISAAGLSVIEAEQPHRRQRRGRGKSDPIDAHLAVLGALGLDAGRLPTPRADGDREALRILLGARAELTVANTAQTNRLRALLLGGDDNDRDTARASLTQATLRRLARRRPPALPSLEQAVRQAEIRRLALALRAARAELKANRTQLQAIIDDLTPGLTDRPGLGPVSAAQAIISYSHPGRCRHEAAFAALAGVSPLPASSGRTVRHRLNRGGDRALNSAIHTIAVTRIRVCPRTRAYVTRRTAEGKTPREIRRCLIG

SEQ ID NO: 427804 - protein, 458 aa, unidentified
MKKSKKQKMFNSPEFKQINFNAAGIDIGAEVHYVSVPEGRDPEGRDVRSFGTFTSDLYAIADWLKQCQIDTVAMESTGVYWIPLFEILESKGFDVKLVNPSFIKNVPGRKTDVVDCQWIRQLHAYGLLKGSFRPEDQICVLRSYLRQRALLVSYASHHIQHIQKALEQMNIKLNQVIRDITGQTGMRIIRAILAGERDPEKLAQLRNSRCKNDVETIAKALHGNWRREHLFSLQQAVELFDFYQNQIAACDLKIEEHMVDFEDRSNGQSLGKSRRTTGRNKLSFDARTHLFRITGVDLTKVEGLDSLTALKVISEIGLDMNRWPTVKHFASWLGLSPGSKISGGKVISANTKKCSSRAAHYLRLAAYSLHNSKTAIGAFFRRKKAQLGPAKAITATAHKLARTIYHMLKSGTEYKDVGQDYYEQRYKSRVIANLKRRAKQLGYDLTYVKEQQELIQTV

SEQ ID NO: 427805 - protein, 341 aa, unidentified
MSDYSYFCGIDLAKNHFSLHAVDQNGKVILHKSVTRSKLLTTIANMPLMRIGVEACGGAHYWARTLNKLGHDARIMAVKYVVPHRTKGKNDLNDAVAICEAVQRPSTRFVPIKSPEQQAILSVHRIREHWVRERTALMNRMRALLSEFGLIIPVGRSSLLKQVPLMLEDAENALPHLARTVIADAYHHLGELNQRIADTEQVFDSFAKVSANVQRVMKVRGIGPQTATAILASIGNGSQFDKSRDFSAWLGLVPKQYSTGGKPRLGRITKHGDKYLRTLLVHGARAVIANLGDKQDKLSQWCRGVLERRGMNRAIVALAAKNARIIWSLLHNQTEYENYAA

SEQ ID NO: 427806 - protein, 377 aa, unidentified
MKRILKIGMDVHSTNYTLCAMEPVFGADDRIYATIQVSPDYKNILLFIEKVKQKLDPNDTYDIECGYEAGCLGYSLYNQLTSAGVKCVILAPTTMLTQQGNRIKTDTRDALMIAQCLSYGGYHPVYIPTEDDDSVKEYLRMRDDHKLTLKKIKQQINAFCLRHGYHYPQGKWTQMHLDWLSAIKLPPLYQETLDEYMATYFELTDKIEKYDTRIEEIAAQEKYADKVKKLGCFIGVKTHVALSLIVETGDFKRFAKGNAYAAYLGLAPGEHSSSDKINRLGITKAGNSNLRRLLVEAAWGICKGNIGYKSKDLKKRQQGNSVQVISYADRANNRMRSKYYRLIRHGKKKNVAIAAIARELACFVWGMMTDNIEERVA

SEQ ID NO: 427807 - protein, 331 aa, unidentified
MAQSEVVVVGIDVAKDKVDACIRSLSQRQTFSSTAEGQRALIRWLRKHRVGKAAMEASGGYEQDWAKALREARIEVRIVDPKRVRSFARSAGRLAKNDPIDAEMIAWFAETFTEAPGQAYDAARERLVKIVNARQGLLDLQTSLKNSGEHSVPDVVQKMQARLLKKIAVEVVKLETAIAAQVKATPHFAELAEIIESVPGLGKITSAGLIATMPELGQVNDNIVAALLGVAPYDDDSGQRRGNRHIKGGRRRARNLFYMPCMGAATRHNPVLKAFYDRLIAKGKEPKVALTACMRKLIVILNTMIARRQKWDANRYKVSDSARLPPSACPA

SEQ ID NO: 427808 - protein, 366 aa, unidentified
MDPIYIGVDFHSRQQTICYLKTETGELVTCELKHQDKDEVRDFYRKFQGHVIVGLEASGYSLWFEAMLEQRGFEVWLGDATEIRRRARWRYKDDRRDAELIRDLMVHHEFPRLHQPTPQSRDILRMLRYRQKLIKVRTMTKNSLQAIAMQAGLAKGRRLFTLAGQTEFKAIAMSPVLQYQRDHWFELLKPLNQELLETMKWFKAAAKGDATVARLRTHPGIGLLTALCLLHTLQPVSRFRNQRKVVAYAGFDPMVRRSADSALHLGISKAGSRMLRYLTVEAVHTAIRHDKDLDRFYKRLTERRGRPKAKVAAARKLLIRAYIMMRDEIDYAEFNRRAVAARPARKSQGTPGVPEVLIGRSASPGA

SEQ ID NO: 427809 - protein, 428 aa, unidentified
MDEVNRNRLEEFRQLRQEVRHSEEYLIVGIDIAKERHHAFFGTATGKTLLRRLVFSNDYEGFRKLLDQAEALRVRHGLKKVVYGMEPTANYHKPLGEYLITLGRTVVLVSGVTVKRNRESLDGRWDKHDVKDSANVTDLISQGKCLYYEYPSAGLRGLRGLLSLKKRLKKQEHGYKVRIRNHLIAQYFPEMDGDYERLGAAGLSIVRWCLPASQITELDVEPFIERVTSRRVRMETRRRLEGVWEKAGETIGCEGVPGVDHEAKVMVEGLRQIREMIKETEDKIQELCEQFPEYPYVLTIPGFGPDVSAKVLGAIGDPYRFQNGKQVLKLAGLDLSADRSGKDSDKAIPEISKRGKADLRYALYQAALIASTKNQDFMRYYTRKLEGRQKEKGIQTKMWVKLSAKMLLIAWTLMKKKEAFDPVYLKVE

SEQ ID NO: 427810 - protein, 343 aa, unidentified
MQITTIGLDLSKRVFQVHGVDAGGNVVIRRRLQRAEVAAFFGDLPPCLVGIEACATAHYWARLIGGSGHQVHLIPPAYAKPYVRRNKTDAADAEAICEAVSRPSMRFVAVKSAQQQAGLLHHRARDLLVRQRTMLINAIRGHLGEFGIIAPAGRHRVTDLIKVLQGTVDADLPALAREALQILFAELSALEVRIKAIEAVIVRDHRSNAVSRRLATIPGIGPITASAIAGTIVDPLTFRSGRELAAWIGLVPRQHSSGGKQKIGRVSKQGDRYLRRLLTIGATAVMRRLTGKTDGLSLWVRALLDRQPFRLVSLALANKMARIAWAVMVRSEPYRTALTIATA

SEQ ID NO: 427811 - protein, 424 aa, unidentified
MKVTYQTCCGVDVHKSFLVATIVKTTGGIEPSYQKKRFSTFNNSILEFKQWLLDNHCHDVCMESTGKYWVPVFNLLEDKINVVIANPKWVKAVKGNKDDTKDSKWIGVLFRLGLVKGSYIPCKIVRILREYTRYRYKLVSCRSSEKNRYQNALTVCNVALDSIVSDIFGKSSTSIIDYLLEQSGTSINHEEIASKLLRSLKSKEDAVIESVEGYQMTDAQKYRMRLVRAHMDYITAEINDVDIMIENMISSNPDFENAVQFLCTIPGVKRDSAITIISETGTDMSQFSSSKRLCCWAGLTPGSNESAGKKKSVRITRAGVYLKPALVQCAHAAVKSDKSPYYKKKYESLVKRRGKKRAIIAIARMILTAIYQMLSTGEQWNPSDLYKIDMPVALVEKQKAKAIKQAKKLLQREGLLPPDEPLAS

SEQ ID NO: 427812 - protein, 446 aa, unidentified
MEVVFPYCAGLDVHKKRVTACRLVSDSTGQVPEGVAELQTFGTMTHELLALADWLVEAGVTHVAMESTGEYWKPVYNLLEGIVTIFLVNASHVKNVPGRKTDPADARWLAKLMRYGLLQASFIPPIAQRDLRDLTRYRTKLVQERAREVNRVQGVLERANIKLASVASDVLGVSGRAMLEALITGQADPATMAALAKRRMRSKIPALEQALTGTVRDHHRRLLAMQLRHIDFLDEQIAALNSAIAQCVTTLSQEAPVSPAPLAPTTIDVPTPADPPPPLTFTRAVELLDTIPGVNQRGAEMIIAEIGIDMTRFGTAARLAAWSGVAPGNDESAGKQRSGKTRKGNQVLRAGLTQLAHGAVRTKGTYVSALYRRLAARRGKRRAILAVAHSIMGSVFHMLSRNEPYRERGPNYFDERRRHYTVDRLTSRIEHLGYRVHLEPLPTAAA

SEQ ID NO: 427813 - protein, 338 aa, unidentified
MFIIGIDPHKGSHTAAVLDDHEMLVGELRVTADRRQRDRLLEFAAPFEPRTWAIEAAGGLGALLAQQLVAAGETVLDVPPALSARARLLDSGRTDKTDPHDARSAAIVALRHATLQPVRRPDHTVVLRLLADRRHDLVALRTQSIGRLHALLCLLIAGGMPRQLSAERAAKAIATIRPDGPVEVERTAMATELVGDIGRLDQQIAALRERIVEAVDTSGTTVTDIHGVGPIVAAIIIGHTGHVGRFPTAGHYARYNATAPIEASSGPRVRHRLNPRGNRQINHALHIAAVTQIGHDTPGRVYFDRKVAEGKTRKEALRALKRRISDAVYRQLLTDARP

SEQ ID NO: 427814 - protein, 411 aa, unidentified
MSLTPEVVPERVCAGLDWAKDDHAVCTIGTDGEILDRFTIEHAAPGLTALVRRLLKAGVGEIGIERGDGPVVEALLQAELTVLVISPNQVKNLHSRYGSAGNKDDRFDAYVLADVVRTDRRRLTPLVRSSAATTTLRSTVRARRDLVEHRVAVANQLRAQLQLVFPAATVLFAALDSPITLSFLERFPTQSKADWLTCTRLGDWLSKVAYSGRVAPEVLHQRILAAPRGPTDPDAQTHAATTLAFVAVLRTLATQIDTLEDSISNQLNVHPDRHIVTSLPRSGMLRAGRLLAEIGDARGRFPTADSLACLAGVAPSTRQSGKVKAVTFRWSADHQLRDALCDFAGDSRHANPWAADYNRARARGHDHPHAVRILGRAWANIIWRCWQANVGYDPTKHGALQALLNTTTKAA

SEQ ID NO: 427815 - protein, 331 aa, unidentified
MSTQNYAGIDIAKRHFVIGIHGRDKTKTETNNPKGFTHTIDYLHKHNVGLVVMESTGGLEIPLAKTLHRAGFQVVIANPRCTKNYANGFSLAKTDHLDAKMLADYAQALEIKGLVANMLYIPPSEAEEKLEALVKRRSQLVDIRAAEKNRLEQIHESQQQSVKDLIAHLDKLIAELDKDIDSNADAFGGKGQVLTAIKGIGSTTSATLLSMLPELGTVPHKRIAMLAGVVPPPNQSGDTDKKTGCIGGRMAVRNMLYMAALTASRFEPKIKAFYERLRAKGKPFKVAINACMHKLLRILNARMRDYLASLQTKSERQSEQQSKQQPAPQCA

SEQ ID NO: 427816 - protein, 327 aa, unidentified
MKTYVGIDVAKDTLVVALPQTETNWKVRSIGNAPAAIRKLISELPDQAHVVLEATGSYSVLLTYLLCQAQVAVSVINPKQSHHFAQLQLAVTKTDEGDAVLLARYGQLVQPPRYTMESDVLLRLKQKRTLLRHYKKQRALANLQHAFSPLPVQDERVASSLQQVLTHFQTAIAEVTAKIEQLTKQHFPDQLQRLTSIQGISTTIATALIEVTNGFAQFHSAKALAKYIGVVPVIYQSGKSQTTKGICKTGDPHLRGMLYMASWSAIRYNKPCQELYQRLKAAGKAPKVALIAVVNKLLRQAFAVVKFNQDFDPNYQPVLRPATCFLT

SEQ ID NO: 427817 - protein, 411 aa, unidentified
MNPVIGLDVAKGESQIQAFLDKGEPYRKSFSILHNVKELNKFLDFLKEIESLAGGKPSVILESTGHYHTPIIQFLEEQQYMYIIVNPLIAHRAKSSSLRKVKTDAIDAYNLCELYYKEELEPSKKRGIRLLNLRNLTRQHETISSVAAQTKLQLQSILDQVFPEYRGVFGNLYSKVSLQVLLIFPTSKSVLSVTGPVLADKIASLCKSRSDKWAKEKAKKLRDAAIRNPFQNNLYQSHIINLEIMINIVLQYQEHLSKLAAEIDALAKEVEEYELIQSIPGIGEKIAATIISEIGEIERFNHPKKLVAFTGVDPSVYSSGKFTASVNRITKRGSSRLRQALFMAVQCGIRDARKKKTSVEIIPRNKRLREFYDKKRDEGKPFRVAIIACVNKLLHWIFAMLKSNTTFLDIA

SEQ ID NO: 427818 - protein, 349 aa, unidentified
MTIVEDRPVITGGVDTHADLHVAAALDPLGGLLGVQEFPATATGYAQLLDWLGGFGTIAVVGVEGTGSYGAALTRHLAAAGIGVVEVDRADRQDRHRQGKSDPLDAVSAARAAQSGRACGAPKGRDGAVEAIRALMVAKRSARHERTQAINQARALIVTGPDELRARFAGHSPAALVEAIAALRPRPGNVPGYATRVALRELGRRAQFLDTQLDRLDELIGPLVAARAPGLLSLYGVGPDTAALLLIAAGDHPGRLRSESSWAHLCGVAPIPASSGKVSRNRLNRGGDRQANHALWRIVITRLSSRPGHPATRAYVTRRTKEGLSKKEIIRCLKRYVAREVYHQLRAGA

SEQ ID NO: 427819 - protein, 347 aa, unidentified
MTEAYDGRQVVGIDLHRRRSVIVRMTEDGRKLGTVRITNSPAALRREIARAGEHPRVVIEAAYGWYWAVDVLEQAGAEVHLAHPLGVKAFSYRRVKNDERDAADLADLLRMGRLPEAWIAPPEIRELRELTRYRHKLVKARTSYKDQVHGVLAKLGIPVTRSDIFGPGGSIWLDGLDLPQPYAGKVASLRQLAGELSTEITLLDKVLGDLLAGHEGYAAIQQLPGIGPVLAAVIVAEIGDIRRFGGPGQLGCWAGLTPRHHESDTKVIRGHVTKQGSRVLRWAVVEAIQRQPAGSRPRQVKDAIIARRGKEARNIAKVAAARELLTLIFYAMRDGRIRRAPTPGQAA

SEQ ID NO: 427820 - protein, 385 aa, unidentified
MNRIIKIGMDVHTTNYTLCIFEPSFEHDGTVHCITQVKPEVKNIIHVIETFKKKHENEELNIVCGYEAGCLGYSLYHELKEKGIECVILAPTTMKTEKGGRKLKNDYRDAKMIAECLAYGGYSAVHIPTELDNSVKEFIRMRDDIKENLKSIKQQIIAFLTRNGKQFEGKSFWTRKHIDWINTVSFSEPLLQDTLKEYMIEYNHLCNRIETLDRQIEEISLKEEYVEKVQQLQCLIGIKTHTALSLIVETSDFNRFKKGNMYSAYLGLIPGDDSSGGHENKLGITKAGNSHLRRLLVEAAQGYTRGRVGFKSKDLKSRQGKCSSEVVAYADRANERLRRKYYRMTLRGKKYNVAKTAIARELACFVWGIMTDLSLIHISEPTRPY

SEQ ID NO: 427821 - protein, 321 aa, unidentified
MEKEKVYVGIDVAKASIDMAVHQSKQRWSFTNDDEGISQAVSCLQELAPVLIVLEATGGIELPLTATLAAVGLPVAVVNPRQIRHFARATGKLAKTDALDAQVIAHFAAAVKLTPRPLPDAQAREFSALLTRRRQVVEMITAEKNRLRSTCSKVVREFIKDHIARLEQELAKLDDNLRRSIRGSSVWREKDDLLQSVPGVGPVLSATLLADLPELGTLDRKQIAALVGVAPLNRDSGNFRGKRTVWGGRAKVRATLYMATLAATRHNAVIRAFYQRLCAAGKDNKVALTACMRKLLTILNAMLKHRTPWSYGASYTIGPCS

SEQ ID NO: 427822 - protein, 370 aa, unidentified
MEKRSMFVGLDVHKESIDISIAEEGRDGEVRHYGVITGDLEALAKVLKALRAPTRRLRFVYEAGPCGFGIHRYLTAQGEDCVVVNPSSMPKRSGDRIKTDRRDSATLARLHRAGELTAIYIPTADDEALRDLVRAREDAVGLATQARHRVKAFLLRQGRRYPGRAGWTKPYRRWLADLSFPRAPQHIALQEYRDTIDEAERRVERLTDQLRQLAPAWRWAPVVDALQALRGVSFVTAVGLVAEIGDIRRFTHPRELMAYLGLVPSEHSSGPSVRRGGITKAGNSHARRLLAEAAWAYQGVPRIGRVMLYRQEALPKVICDIAWKAQLRLTSRFRRLVARGKAKPKVATAVARELTGFIWAIAREVPTPAA

SEQ ID NO: 427823 - protein, 354 aa, unidentified
MLAELVDHVIGVDPDRDWITVAALDSRTAGVITTDRFPATRDGYQDAIAWADAHTEESERAWVIEGTASYGRGLTMALQRLDELVIEFDRPMRKATKDGAKSDALDAIRAAREALGRDKLNQPRANDGIREAIRVHTVARAAAVRARTAAVNELKAFIVTADEQLRSELRGLRTNKIVIRCSRFRDSAKRPIDERCTRNAMRALSRRVQHLEAEIGEHDAAMKILIDRAAPQLLAERGVGYVTAAAFYLAWSHPGRCHSEAAYARLGGTAPVEVTSGQNQDRHRLNRGGDRQLNRALYFVAVTRQRCCPETKDYMARRTSEGKTEREATRCLKRFIARRVWRLLEHPELHLDTT

SEQ ID NO: 427824 - protein, 317 aa, unidentified
MYVGIDVSKEHLDVATDDGAFSAQFANDEQGYGELVIRLQEVKPTLVILESTAQYQLEVSLMLATAQIPLAIVNPRQVRDYAKAMGILAKTDKLDAVTIARFGATVRPAAQTLPDAETLELEALLTRRRQLVGMIASEKNRLQAIFGPAKQGAAAQSVRDTLSYLTKQLKQLEKDLQKRLERSPVWKAKEDLLKSVPGIGKVTAMTLVIDLPELGKLNRKQIASLAGVAPFNCDSGKNQGKRRIRGGRATVRTALYMACLASLKHLSEPTASRYERLKTQGKKPHGVAIVACMRKLLTILNAVVRDGKPWNPDLASA

SEQ ID NO: 427825 - protein, 338 aa, unidentified
MNIARIGVDLAKQVFQVHGVDRTEKVLVRRQLRRSQMLDYFSKLTPCLIGMEACGSAHYWARELSKLGHEVRLMAPQFVKPYVKSGKNDVNDAEAICEAVGRPNMRFVAIKTAEQQVIQAEHRIRARLIKSRTALSNEIRGLLAEFGIVVATSIGRLRKALPELLEDGENGLSGSFRVLLAGLGEELRALDDSIAAFDARIAQTAREDDRIRRLLEVEGIGPVTASALVTAVGNGTQFNSGRDMSAWLGLTPRQYSSGGKNRLGGISKRGDKYMRMLLIHGARAALNAAKNKEDGRSRWVKSLAARRNKNIATVALANKNARIAWSILSRGESYKKAA

SEQ ID NO: 427826 - protein, 404 aa, unidentified
MIAIGIDIGKGKHAAAVIDDAGRQLCRPAFYNNDREGAEKLVAALAKVAPPTEARVGMEATGNYWIPFHDFLAEAGYAVEVINPIVTSASISGDVRGRKSDKGDAVAIARVLLSGDATPRARPNDESRRLVVLTRHRSFMVAQRADAKRHLQSMLDAVFPEFHTLFDDMFCRFAMELLRAHPTASSLARAHRPTLAKLVRKFCRGKDADAEAERLVKAAKRSLGFGSEVSDAFGACIASAVECISDLDRRVADIEKLIDEARSPRLANVIAQIKGSGKLLPKVIAAEFGDVARFEKDPKYGRSSGMHKRMLAFAGCEPRIRESGKWRGRVRMSKRGSGALRTALMQIAFTISQNDDFFKSIYEKHIHAHQHHKVALSYVVAELLKVVCSLWKSNRAYSVERPAS

SEQ ID NO: 427827 - protein, 347 aa, unidentified
MSQEKYIGMDVHQATISVLLMESLLETKASTIVDFIQGLHGTLSLTFEEGTSAAWLHDLLKPHVSRLVVCDPRKAALLKEGNKSDRIDARKLAELLRTNQLKAVYHEEHGIRALKELGRSYLTITKDVTRVMNRIKALYRSWGIPCSGTSVYAPRHRAEWLAKIVEPGVRVRAEHSYQQLDSLQPLRLQARRELLRESSQHPAVKLLRQIPSIGPIRAALLVALLQTPHRFRTKRQLWAYSGFAVETHDSGEYRYVRGKRQRNRERISVRGLNDNHNKDVKNLFKSAAISASTRPGPLHDCYVARVEKGMRPTMARLTLARKIAAITLTIWKKGVSFDPKHLHRQAA

SEQ ID NO: 427828 - protein, 311 aa, unidentified
MTDHTIGVDISKSHLDVFRLEDGAAQRFDNSAAGFRALTKWLGKAPVARIVFEPTGPYHKAFEAALAKTFPLVKVNPLQARRFAEAHGTRAKTDAVDARMLARMGMAFDLAPQVPCSKEILVLRDLHVARAGLIKDRTRLRNRAQTQDIAVLKRQTKARLAQVERQIVELDAEIAALIAAGQTTARNCDILCSMPGIGTVTAAAMLTLMPEIGTLERKQVASLAGLAPITRQSGQWQGKAFIAGGRKPLRDALYMPALVAMRFNPDLKAKYEGLRAAGKPAKVAIVAVMRKLIETANALVKADRTWTQKTA

SEQ ID NO: 427829 - protein, 343 aa, unidentified
MTEVITIGVDLAKSVFQVHGVDAEGAVVIRRQLRRGQMLPFFKKQPPCLVGMEACATSHHWARQLIELGHAVKLMPPRYVKPYVKRNKNDMADAEAICEAVTRPTMRFVAVKTPDQQSVLMLHRTRQLFVRQRTTIINALRAHLAEFGIVAGVGRNGLERLLKVIEDGEDDRVPSAARDCLLALRDQLELVKHQILNADRRILAWHRSSEASQRLDEIPGVGPLIATALVASVPDPHAFKSGRDMAAWIGLVPRQNSTGGKERLGHISKAGNRYLRMLLVVGALSVIRRAKQVGYTRHPWLAKLLQRRSAKIAAIALANKIARTAWAMMAHGTYYEEPEPQAV

SEQ ID NO: 427830 - protein, 347 aa, unidentified
MKHYAGIDVSLNSCSVCAVDESGKIIREAKVASEPVALINWFKSLCARMERIGLEAGPLSQWLYGALRESGLPVELLETRHVKAALSAMPVKTDRNDARGLAQLMRLGWFRPVHCKSMAAQEVRALLTARKLVQSKLYDIEMSLRGILRGFGLKVGPTTSQSFVARINHLVAGQASLETVAQALLSVHAVALREFKSLEKQVRRISRADERVRLLMSAPGVGPLVALTYVSAIDDPKRFTASKAVGAHFGLTPKKYQSGETDITGRISKTGDGSVRTALYEAAHILLTRPIKGGALKSWAMRLAKRAGMKKAKVALARKLAVVLHRMWLNATAFDFDQPNRCSHAAV

SEQ ID NO: 427831 - protein, 337 aa, unidentified
MSNKKIIGLDLHSGRSVACIMTTGKKIIKRVELETNEKNLIELAKSNGKDCEIIFEEGTLAGWAYQILLPYCKVVVVDPKENKWIFKADRKNDRIDSQKLAELYIGGFTKEIFHPVGEMRELRDMILFYNKITQNIVRFKNQLKAIFRSKGIATTVGVYEKKYKDFENKLTHQSSKIQANIIYTTIQRLEREKAKILKKLKEMTKNNATIKVLDKIPGIGFISAISYLGIVVTPFRFENKRKFWAYSGFGITESDSNGRSKPQHLSNNYNRILKNITNQAVNTIVNRSSKNKFKKKYVELIKNNIRLSSAKLTIARKLLSTILALWKSGEYYSEAYK

SEQ ID NO: 427832 - protein, 343 aa, unidentified
MEHFAGLDVSVKETSVCIVDDTGKIVREVKVTSEPDALLGVLTNPAYRFKRIGLEAGPLSQWLFSALAEAGLPVICVETRHMRSALKAQINKTDRNDARGIAQMMRAGLYRPVHVKTLRSQKLRMLLTHRKLLQSKAIAVENDLRGTLRNFGLKVGMVGAAKFEARIRELVETIPDLATLVEPLLIVRRVLREQIAILHRRLLAIVRDDEVCRRLMTVPGVGPVVALTYRATVDVPARFRKSKSVGAVFGLTCSKYQSGEIDRSGRISRCGDEMMRAMLYEAAHIMLVRSTKWSWLKAWAMQVARHRGLKKAIVALARRLAVIMHRIWVDGTEFRWTREVAAA

SEQ ID NO: 427833 - protein, 398 aa, unidentified
MQHVIIGVDPHKLSATIEVVDQREQLLGSGRFTTDRAGFTAMRAYAKAWPDRTWAVEGANGVGRPLAQRLLESGEHVVDVPAKLAARVRLFDSGHNRKTDAHDAHSIAMVAVRTRGLRVLELDGELEALRMLVERREALTRRRVQTVDRLQALLAELLPGQAKRDLTTGQAKTMLASVRPRDIAGKTRRRIAVEELAELVAVEAKMKKATAELKAIVLARGSHLMDLHGVGPVVAARVLADVGDVARFADRNRFASWTGTAPLDASSGEQTRHRLSRAGNRRVNHMIHIAAISQIRLDTDGRTYYRRKRADGKRPLEALRCLKRRISDAIFRQLLADAAAPQEHVEAGPGGHRGATQESSAAGSHPHTDTSDQPLPGPAPTTLRRPLTARKRQLDPIS

SEQ ID NO: 427834 - protein, 354 aa, unidentified
MSQKSSSEIAVIGIDIGKNSFHVVGQDRRGAIVLRQKWSRGQVETRLANLPPCLIGMEACVGAHHLSRKLQGLGHNARLMPAKYVRPYSKGQKNDFRDAEAIAEAVQRPTMKFVATKTADQLDLQALHRVRERLVSQRTGIINQIRAFLLERSIAVRQGLRFLRAELPRILAMRSDVLSPRMLRVIEDLAGDWRHLDARIEGLSGEIETLAHQDPHCERLMTVPGIGPIISSATVAAIGTGDVFSRGRDFGAWLGLVPKQISTGDRTILGGISRRGNRYLRALFVQAAWVVLVRPTQWERYGLKSWIEAAKKRLHHNVLAIALANKLARIAWAVLNRGRAFEFVKTDAMASRTA

SEQ ID NO: 427835 - protein, 357 aa, unidentified
MLAELLDAIVGVDTHRDTHQVEIALPNGIPIATCQISNDTAGYAELLAWIIDHAPGPRLAVSIEGTRSYGVGLARAATAAGLLVVECEQPNRKARRGKGKSDPIDAHLAVLAALRLDADRLPIPRADGDREALRILLGARQELTALSTAQTNRLRALLRDGDDTDLALARGLLNDAVLAAIARRREPRDASRQQSVRHAEIRRLALALRESGRTLRTNRAQLQAISNDLAPGLTDRRGLGPVTAAQAIVSFSHPGRCRSDAAFAALSGTSPLQASSGRTVRHRLNRGGDRALNSTIHTIAMVRMRSCPTTQAYVTRRTAEGKTPREIRRCLKRYIARELYRTLTATMTTTAATPNAA

SEQ ID NO: 427836 - protein, 344 aa, unidentified
MDHFAGLDVSVKETSVCIVDDTGRIVREVKVASEPEALLTVLRNPAYHFKRIGLEAGPLSQWLYSALAEAGLPAVCVETRHMRAVLKAQINKTDRNDARGMAQMMRAGLYRPVHVKTLRSQKLRMLLTHRKLLQSKAIAIENDLRGTLRNFGLKVGIAGKVKFEARIKELVENLPDLAVLVEPLLVVRRVLREQLGILHRRLLAIVRDDDVCRRLMTVPGVGPVVALTYRATVDVPARFRHSKAVGAVFGLTPAKYQSGEVNRTGAISKCGDEMMRVMLYEAAQVMLTRTNKWSWLKAWAMKIARHRGMKKAIVALARRLAVIMHRILVDGTEFRWTREEVAAA

SEQ ID NO: 427837 - protein, 338 aa, unidentified
MKKYSGIDLHSNNSVVVVADENDRVLYAKRLPNELGKVLEALQAHREELVGVVVESTYNWYWLVDGLQSAGYTVHLANTAAKKQYDGLKHSNDHTEAAHLAHLLRLGILRTGYIYPREQRALRDLGRRRMQLVRQRSMHILAVENVQARETGARMTGDRIKRLDVLAVEGLGYRPEVAMGIGANVAVIGTLNAQIRRLETHLRQHVRLTPQYQVLTSAPGIANTLATVIMLETGELERFAAVGNYSSYARCVASVHTSNDKKKGEGNRRNGNKYLAWAFIEAANMARRWCPEAKRFHDRKRAKTNNVVATKALAHKLARACYHMLKTGEPFDMKRCFG

SEQ ID NO: 427838 - protein, 395 aa, unidentified
MSAEGEAIRSNDYRKDTTVKAPSTRPAAVLGLDVGKSSHWACLIDRDGEVLASAPVRNREAELDALFASAPAGTLVVVDQFRNIGSLAVRRARAAGLGVAYLPGLAASRAAGLFAGEAKTDERDAAVIARTALGVPDSLSGVPGRGEALEAARALSSQRDHVVACATRDKNRLRAVLLESCPALEAAVDLSDRRWLELLAGFGGAWGIARSGAGGPRAEAAGEAAAASTAPPPALVEAENRQVRFLAARISEALDEAGALEAETAALLEGDETYACLLTVPGIGPRTAAQLAVSVDIGRFPDHDHLASYCGIAPRVRSSGTSVRSVRASRRGDARLKSLLIFSCNSLVRSSGRYGEYYRACRARGMGHGRALKAVARKRLRAIYAVMRDRVPYRE

SEQ ID NO: 427839 - protein, 350 aa, unidentified
MVTIGVDAHKRTHTMVAVDRTGREIGQRTVAATSTGHLEALRWAGRWAERHWALEDCAHLTRRLTADLLSAGQSVVRVPPKMMAGARRSARERGKSDPIDARAVALAALREPHLPVARLDGPAREVRLLVDHREDLVADRTRVANRLRWHLHELDPGNEPAPRSLDRRVTLDALEVRLADVDGPVARLARSLVARLRLLTVEIDELEREIARLVAKLAPSLLELVGCGPLSAAKLVGEVAGVGRFRSRAAFAMHNGTAPVPVWSGNTERFRLNRGGNRQIDVALHRIAITQLQRPGPAHDFVARRRSAGSTKTEAIRSLRRYISDEVYRRLRADEVSLHALPATRLAAAA

SEQ ID NO: 427840 - protein, 372 aa, unidentified
MRDYSAYIGLDVHKDTVAVAVALQKGGEPLYRGDIAHTTKALTKLLHRLTASYGEKIAFCYEAGPTGYGLYRWLIKRGFYCEVIAPSLIPRKPGDRIKTDRRDAISLSRLFRVGDQTAVWVPDHEQEAMRDLTRVREDMKGMETQAKHRLNSFLLRHSRRFSGRSKNTPAYFSWLEGLKFENPTSQIVFQEYVNAVLTAQARVTGIVEEMENALSSWALAPVVEALRALRGVDLVAAMTVMAELGDITRFTSPKQLMAFLGLVPSEDSSGLKQRRGGITKTGNGHVRRVLIESAWSYRYPARMTRHLRKKAENASPEVKTIAWQAQKRMCGRYWYLMGKGKCQQQVVTAIARELIGFIWAIAKEMQPKAITE

SEQ ID NO: 427841 - protein, 422 aa, unidentified
MAHGIRWVGLDVHAHESTIAVFDQDTGELTTRRVVGRPHELLPWLKRIARPARIVYEAGPTGYGLVRRARAAGLEIAVCAPTRTDRRPGDRIKTDKRDAIRLARLLAAGELTLVTVPTVEHEQLRDLVRCREDIRADLMRARHRLGKFLLRREIYYEGPNVPWSRRHREWLASLTFADRASQLTIADYLHAHDLLIARRDRIEAELEQVAADSPWTGAIARLKCLRGIDTLSALGLCAEIGEWDRFEHPDQLSAYLGIVPSENTTGERRRQGAITKAGSTHARRLLIEASYHYQRHPGISAALERRQRDQDAAVINIAWRAQRRLNARWHQLKHMRKKPNGIVAVAIARELAGFCWEIALATRTAQPTTRCGWRGGPRLPAIAHNQSPREPVEQPRSPAAALDPRQRTVRRNQGLGVTSPRI

SEQ ID NO: 427842 - protein, 356 aa, unidentified
MLYSGVDLHRRLIAICTVNESGTIIARSKMKTDPELVTAYFQQWPDEHRAVVECTTGWYWFCDLLRSIGISVVLAHAKYLKAISYAKVKTDAVDAETLAQLLRMGYIPEAHQLPPEYRAMRDLLRQRMVMEHKRTNIIQRVTSILAQFNITNLPLSPYQSGFADFLNQCSIPEEYRMTLMMYHYQCLQTTEHRKQLEKYFTGHLRPTPTVQLLMSIPGIGDITGSIIAMETGDIHRFADDKHYCSYCRLVPGAKDSGGKRSHRSGSKDGNQYLKYAFTESALKAMRFYPAIKHFASRLERRATKAIARTVVAKELAKISYYVLSRQQEFQTFKGIEINKLRNWPRARKPVRLTGGV

SEQ ID NO: 427843 - protein, 420 aa, unidentified
MNTLGNNSFTAFVGIDWADAIHDVCIQGVGDEHREFARISHKVDAIDTWAQSLYRRFGGPIAVALELSKGPVVYALQKYDFLVIFPVNPTTLAKYREAFTPSRAKDDPTDAELALDLILRHPDRFKPLAPQSVEMRTLVSLVEQRRRLVNDRVRITNRLRNTLKQYYPQALEWFDRIDTPLFCDFIERWPTVIQVKRARRTTLATFFNKHNMRFVSVLETRLQSIKATTPLTLDDAVITPHRLQALVLVDLLRATLVAIKRFDAAIADLAPKHADYALFDGLPGAGPSLAPRLLVAFGEQRERFSNAAELQRYAGVAPVTERSGKKHWVHWRWQCPTFLRQTFVEWSAQTINKSFWAGVYYQQQRDKGCSHQAAVRALAFKWIRILYRCWQTRTPYNETVYLKALQRKGSPLLSRQMPQF

SEQ ID NO: 427844 - protein, 340 aa, unidentified
MDEYIGLDVSLKETAVSIRRDGKRIWRGKCASDPQLLAALIRKHAPAAKRVVFETGPLSVWFFHALTAEGMPAICIDARHAKAALDMAANKTDANDADGLAHLAEVGFYKEVRVKSFDSMLTRTLVAARTRLVRVCTELSNQIRGLMKTFGLVVPQAMGSKFARHVEALLADNADLGRIIRPLLEAWHAVRLRAAELGRRLLADARRSEACQLLMSIPGVGVVTATSFVTAIEDPANFKHSRSVGAFVGLTTRRYQSGEIDYDGHISRRGDSHLRGLLYEAATVLLTRSRSECDLRKWGLQLRERLGFKRAAVAVARKLAVIMHSMLITGEPFREKSTAV

SEQ ID NO: 427845 - protein, 345 aa, unidentified
MTQYKRIAVDTSKAVFTLHGIDQREQPALRINLRRAQMTSFFKKLPTTEIAMEACGGAHHWARELTALGHEVRLIPPQYVKPYLKRAKNDRNDAEAICEAAGRRGMHFVPIKSVPQQAQGMVLKVRDTFVGQRTLLANTLRGHASEFGVIAGKGMSKIGSLLTAIEPETSIPAEVKEMTALLGRQIEDLDERTKELDVKLNAAHKANPVSQRLTTIPGVGPVTALTLATEIDPEAFESGRHMAAWMGLTPKEHSTGGKQRMGGISRAGNERIRTLLVVCAMSVIKAATRPGGRPRTEWLRGLLQRKPRKVAAVALANKIARVAWAIMIRGETYRHPAAAVEASAA

SEQ ID NO: 427846 - protein, 320 aa, unidentified
MMAQNDLVVVGIDVAKDKVDVCIRSLSLRCTFASTVDGRRELVSLLRRKKVGKAAMEASGGYEREWAKALRDARIEVRIVDPKRVRDFARSAGRLAKNDAIDAEMIAWFAETFDEAPGQAYDAEREKLAQIVNARQGLLDLRTTLQNRGEHAGPEPVQKMHARLLKTIAAEVVKLEAVIAAMIKATPHFAELAEIIESVPGLARTTSAGLIAKMPELGQVGNKVAPALLGAAPYDDDSGRRQGERHIKGGRRKLRNLFYMACLGAATRHNPVLKAFYDRLIAKGKKPKVALVACMRKLIVILNIMIARRQKWDPNLHVLG

SEQ ID NO: 427847 - protein, 453 aa, unidentified
MKSQVEGTKKTKRMERFVVINADAAGVDIGDTEICVAIGPEKCEENVRTYGTFTSDLAQIVIFLKENSIQQVAMEATGVYWIQLYLLLEREGFQVTLANARYIKNVSGRKDDENDAMWIQRLHSCGLINGSFQPDWPTRQLRELVRQRKRIVSDQSKCVNRMIKALELMNVKVQTVISDIDGKTGRAIVTAILAGERDPAKLADLADWRIKASREVLMKSLEGNWDALQLFILKQQNDLYDFFTNQIRDIDFQIEAQLKIVIASRNEGELPNIDLQQKRKRTTRKNTIPFNATAYLTALLGVDVTQITGINELTALAFTAEVGVDMLKWPSAKNFRSWLNIVPTSEKTGGKIKSERVRKRFHPAGQALRVAAVGVRNSNMPLGHIYRRQLARGGPSKAILSVADRMATAFYHMVRYKQPYQPQTLLENEEKRRIDQIKRLEKRLEKLKIEYVT

SEQ ID NO: 427848 - protein, 315 aa, unidentified
MDYIGIDISKDTLHVAWNDVAEISVFANTNEGITSFEDSLHHRQFQKEFTKIGLEATGIYHLLLCVLLSDHGWHVTVINPYLTAKAIKSSLRHVKNDRKDAKTIRSVLIVGHGYRFTDTSEILRLKALLREYATLTKMKSKCRNMIHVQQKYQETTDKELESVFPALCASLEENLKQMKKRLVQTQSTDQKLLQSIPGIGPVCSAALVAHIGNIHRFSSPQKLVAYIGLDCRVHESGTSIHGKGFLTKRGSPVLRSLLFNAAYVARRYNPDLKAFFEKKMNEGKHYYVATCAVERKLVHVIYAVWKRGTPFEKRS

SEQ ID NO: 427849 - protein, 392 aa, unidentified
MARTPQTNPTISQPPKLFVALELSKNTWKLGMTLSRIGKPRIRDVAARDLDGFLAEIEAAKARYGLQPDAPVKTCYEAGRDGFWIHRFLEANGIGNVIVDSASIEVDRRKRRAKTDRIDAQKLAILLARHHDGEAVFRVVSVPPLESECERLLPRQLRSIRRSRTRISNQIRALLFQHGIDLNPREGSFKGKSFLKALAQARQWDGSRLPAELRAHVRLLWRQFALFTQQLKKLEQQQRQVLREARRDASQATVAQQKAACLSLLRGIGDTGSYTLATEFFGWREFRNRGQVGALAGLTGTPYQSGEGGREQGISKAGNPRVRTLMVELAWLWLRFQPESALTKWFHEHTGKGGSRSRRKAIVALARKLLIQLWHFVEHGVIPEGAVLQEAA

SEQ ID NO: 427850 - protein, 382 aa, unidentified
MEQSTRFVGMDVHKETIVVAVTATGEVGKATAYGTFPNTGAGLEKLVKRLRQAGSGPIKFCYEAGPCGYGVHRTLTRTGEDCMVVAPSMIPRKSGERQKNDERDAASLAVLHRGGLLTAVWVPDAAHEAMRDLIRARLAAVRAARQQLSAFLLRHERVYPGNRTCWTKTHRGWLADQAFAQPAQQIVLEESVEAVRLSEQRRHRVDGHLRAQIPTWSLFPLVQNLCALRGLDMIAAAGLAAAIGDPSRFATAPHFMAYLGLVPSEHTSGPKRRIGAITKAGEVHARTLLIEAAHSYRYPARIGRHKLAVVDAVAEAVRAIAWKAQTRLCQRYRQMTAKGKPNQVVVTAIARELAGRLIPLVQVTPICGARHANESLRGHSIW

SEQ ID NO: 427851 - protein, 355 aa, unidentified
MLIIGCDYHPGFQQIAFVDTETGEWKEQRLEQRECAEAFYRELASRGEKVRVGMEASGHARWFERLLAELSIELWLGDAAVIRAKRGRRKPKTDRQDAQHILHLLLKDDFPKIWVPSWENRDLRQLLWHRHRMVQARTRLMNQLQAVALNEGLRCKKRLWREKGRKQLEAIRLAPWASRRREDLLKLLDGLNPRIAELTQAIDQEVEKSAEARRLMTHPGVGPLTALAFVLIIGKAERFQCGKQIAAYLGLVPLEDSSGDRRRLGHITKQGNSLLRFLLVESAQVAARSIAQWRNQYFHLAMRRGRKIAKVAMARKLAIRLFWMMRQGWEYEQMKQFGSHAGQLGHRDGVQQSIE

SEQ ID NO: 427852 - protein, 354 aa, unidentified
MLIIGCDFHTRYQQIAMAREETAEMLVERRLDHESGEAHAFYRSLQNLQEPVRVGIEATGPIHWFERLLTELGHELWIGDSAKIRASEVRKQKTDERDARLMLDLLLTKRFPRIWVPTPAERDVRQLLWHRHKLVSMRTMLGNQLHALAMSQGLCRKQKLFSKKGRAELGSLTLGPWAGRRREELLKLLDQLEPPIAELDRAVQEEAKRREDAVLLMTHPGIGSVTSLAFVLAIGPVTRFQGSRKIASYLGLNPTEDSSGGRRRLGGISKQGNTMVRWLLIEAVYPAVRKDPALRQDYQRLKFRRGHAVAKVAIARKLAVRMYWMLRSGAAYAQLVRRQGSPGATLVDASPSLG

SEQ ID NO: 427853 - protein, 354 aa, unidentified
MLAELVDHVVGIDPDRDWITAAVLEAGTAGVVATGRFPANTAGYQDAVAWADQYSIDTERAWAIEGTSSYGRGMATALARCGEWVIEFDRAKEKAAKDGSKTDELDAIRAGRETLGRTKLASPRIPGGFREALRVHTVARDSAVQARTAAINELKAFVVTADDTLRSELRGLRTAGLVKRCAGFRPSTNRSIDQQCTRAAMRAVARRIIHLNDEITTHEQALTSLVAQAAPQLVAEVGIGPITAAALYIAWSHPGRCRNEAAYARLAGTSPIPATSGQTQNRHRLNRRGDRQLNKALHQIAITRLRCHPPTQAYKQRRSAEGKTDREIRRCLKRYIARQVWRLLEHQTPAKTTT

SEQ ID NO: 427854 - protein, 362 aa, unidentified
MRIDGTAPPLVISTARKHGPSVLGLCPEQMMGSESRMQGKESSKQKADAESTAGIDVCKSWLDVHVVPQGHSIRVSNDARGHDKLTRWLGQREVGLVVMEATGKWHRNVHGVLHRAGFRVAVVNPRRTRLFAEVLGELAKTDKVDARILALFGASLSPPARPPAPETMQALQELVTARDTAVREQTRLQNQLAAAMLDFVRRQLRNRIDRMEKDIAQLTAEMQRLIRADEVMVRRYAILCSLPGVAAITAATLIAKMDELGSCSAKQIAALAGLAPFDDQSGDRDGQKAIRAGRGAVRRALYLCAPAARRGNAAWNGLFDRLVARGKPKKLARTAVARKLLIAANTLIAEDRLWQPQSPLHA

SEQ ID NO: 427855 - protein, 331 aa, unidentified
MTSLPNRTNETPLTVGVDVAKATLEVGFSDRDTTLMPTNDEAGHAAVLAHLAELRATGATIALVVLEATGGLEVEVATALQLAGYAVVVVNPRQARDFARAMGVLAKTDRIDARVLALMGQTLLQRADLAKLVKPLPDERQRMLQALVTRRRQLLAMRIAEQQRASGPDRRMRRSLNIILKALDRELARLDKDMQAFIGEHHAELAALLNAVKGVGKATISTLLAEVPELGELNGREVSALVGVAPINRDSGTMRGKRTIFGGRPNVRKVLFMAALVASRYNPVIKVFFQRLLAAGKPKKLALTACARKLLTILNAMARTRKPFNAALHLG

SEQ ID NO: 427856 - protein, 368 aa, unidentified
MEVMYPRCAGLDVHKDSVFARVRCVSEPRHDEVRNFGTTTTALYELNEWLDSYGVTHVAMEATGVYWKPVWHMLEEGFELVLANAQRIRNVPGRKTDVNDATWIADLLAHGLIRSSFVPPTAIQELRDLTRSRKQLVRETAQHNQRIQKTLEDANLKLGSVLSDVLGKSGRAILQAIIAGESDPEKLADLAHGNAKRRRADLIEALRERIRPHHQALLQLHLKLVDALREAIADIDVRVGKSLTPIKDCARLLTTMPGVSDVTAQVMVAEIGVDMERFPSAGHLISWAGLCPKNDESAGKRPLYARTPGCSVAQDHTGHLGLGSGAAERLLSTGAVPPVACPTRCQESHRCGGGVHVDGGVSHAQERC

SEQ ID NO: 427857 - protein, 422 aa, unidentified
MQNESAPGARGPVFCGVDTHADSHWLCVLDWRGRKVLSRQFPADAAGYEALAGAIAAAGEPACVAMEGTSSYGAGLTRHLASLGMPVREALSPARMQRRRPGQGKCDESDAERAARAAMSGSKLGTPKSQDGWVDGVRCMLAARSGAVKARTSLLTTAPEGLRSRFRGMAGPRLMEELPSVRAEGALGAALGALADLWAAARDAALDMERAIEASLEENCPALLAMYGCGPVSAAKLAVAAGDNPGRLRSEASFAAICGACPIPASSGKTVRHRLNRGGDRQANSALHEIARQRVMRDPETAEYAERARARGKSDREVMRCLKRYVAREAYRALMRPHEVRRPEDASGLVAARRAARVSQVRAASILGTSEKYISMLERGQRELKPIRRAYEAWVEAGLPLDWDRQAFEAERKMDSKKHLAK

SEQ ID NO: 427858 - protein, 407 aa, unidentified
MKLLIGLDWSKDHHYVCLLAANGSQQASFEISHTVEGFARLDAERVKFGVSAKECLVALETAHNLVVDYLWSRQYQVYVIAPSVVKSARGRYGASGAYTDASSAFLLADLLRTDLARFIPWQPDGELVRQMQAKLSLIEALRCDINRWSNRLLAVLLRVYPHPVGLFSSLTTQIGLHFLIAYPTPQAAQGLSYEDFGAFCRQHRYPARRWPSLYAHLQSPRPEPDAAALLAYQDEIPFLARTLLALVQHRLQLIREVKELFSQHPDHFIFESLPGAGDLLAPGLLVKFGDHRERFPNAAIPQALAGTCPYTRQSNKKRVVLFRTACDHDFRRITQQFSIESVKQSVWAATYWQEAYARCHSKSQAYRCLANRWLAIIWKMWQTRKPYDEEYHLKQRLLRRQPRSRKS

SEQ ID NO: 427859 - protein, 412 aa, unidentified
MDTLYPCCAGLDLHKDTVVVCVRRLADNGRLHKEVRTFGTVTRDLLALSDWLAAEGVTHAAMESTGVYWKPVFNILEGQFELLLVNAQHIKQVPGRKTDVKDCEWIAQLLQCGLLKASFIPPQPIRELRELTRQRTQLVGEKTAVANRIQKVLEDANIKLGSVASDVLGVSGRDMLEALIAGEEDPEKLADLARRRLRAKIPELQLALCGRVTDHHRFLLRLLLEHVHHLEGLIAQLSSRIEGVVAPFEEAAARLDTIPGVDRRTAEILIAEVGTDMGPFPTDDHLASWAGMCPGNNESAGKRRTGKTTRGSRWLRTALVQAAWAASHTKGTYLAAQYRRLAARRGKKRALVAVGHTILVIAYHLLKNGTDYQELGGDFFERLDPERLTHNLVRRLEKLGHKVTLESKDDAA

SEQ ID NO: 427860 - protein, 400 aa, unidentified
MISVGIDVSKGKSTVCILKPYGEIVSKPFNITHTQKDLSELSSMLFRLNDEVKIVMEATGIYHLPVLTYLQEKGFFVSVVNPYLMKSYRNESLRKAKTDKIDSRIIANYGIDHWFKMKEFQTSGEIYEELKLLGQQYRHYMKLHLLSLAELTHLLDLTMPGIKNLLASWNETNRKDKRSDFVERFWHYDVITSMSEQEFTEEYILWAKEKKYVPSQEKAKVIYTLAQESIPTLPSETSSIKMLVTEAVRVLKEVDATLGLILSRMQEIAKTLPEYSVVIEMGGVGNTLAPKLIAEIGDVRRFRNGKALVAFAGIDPPPYESGQFVGCNRKISKRGSASLRKVGYETMRSLKMRSRPEDPVYRYVVKKESEGKSKKSAKIAGLNKFLRIYYARVTELYKNI

SEQ ID NO: 427861 - protein, 390 aa, unidentified
MSSSPAVAAASTIYLGLDVHKDSITIAVLPNEAKAPTRLERLPNDLPRLKRFLDRCARDGALAACYEASGAGYVLHRAMREWGYACTVIAPSLIPQRAGVQRKHDKRDACDLARLFRAGELTPVRIPSEAEERVRDVVRCRETFQREILKSRHYILKFLARRGFVFRDGTNWCTPHLRWLEHLTSETSPLAPADRLVFREYHALLAYKLQRRDELDRQIEHLALTPALAGAVARLQCFRGISLHGAMVLATEIVDWRRFERPGQLAAYLGLVAREYSSGDRERKGSITKAGNSHCRHVLVQAAWTYHYRPHLSVEIQRRQHGQPPAVVTHAWKAQQRLHQRYQHLAFRKRPQIAAGAVARELVGFLWAVMQDLPQDLPQDLPTAEGRTIA

SEQ ID NO: 427862 - protein, 379 aa, unidentified
MRDHSEAFVAFDTSKLRNAVAIAEAGRSGEVRFLGEIDNTPTATIKLVRKLAAEYGRLAFCYEAGPTGYGLYRQITALGHECMVVAPSLIPRKAGDRVKTNRRDALGMVTQFRAGELTAVWVPDPRHEAMRDLVRARGAAVEDLRRKRQHISSFLLRLGLHYGGKKTWTKTHMKWLASQKLDHAEQRIAFEEMLLAVRQADERIARLEEAIRVAVPDWSLAEVVDALMAMRGIDMISATAFLAEIGDLSRFRTPRELMAYLGLVPSEHSTGDTVKRGPITKAGNRRARRILVECAWAYRHPPRVGRKKEDKVAAAPRAAREIAWKAQHRLYARYRALTRRGKLKTVVVTAIARELSGFIWAINRETTTADAVASQQGIR

SEQ ID NO: 427863 - protein, 428 aa, unidentified
MDFTQNQRLAQMNDRTLIIGVDVAKHKHVARVVDDRGRDLAKRLVFANTMPGFSELLSWVRDLSEEHDRPDIVIGMEPTGHYWLNLAYHLKARGIHTVVVNPMKVKRFKEMDDDSPTKNDTKDAKVIAQIVRDGRFHEPTLPEDVYAELREGMKVYDIMQEDLSSIKAQMQNALDRYFPEFLQVFKDWTGKAALHLLEKGFLPEDIRQASEEALLAEVKTAAKRAVGIKRIQALKQAAETSVGLTVGLRMAREEFRYLIDQYKRIEERLIALEAQLEELVLHVPGADQMIAIKGVSALTVAGFFAEVGDLANYRDPRQIIKLAGLNLKLNQSGTFKGQTTITKRGRKRLRSLLFQVARPLSCHNEAFRKLHEHYRYRATNPLTGKQSFVALSRKLVKIFYVLGTRKCTFSETRMIRDIPGISGLQEAV

SEQ ID NO: 427864 - protein, 422 aa, unidentified
MNEQEPVVYNVYVGIDWADKKHDVCICPRDSDTREFDVIRHCAEDIDAWVKGLHQRYEGRIAVAVELSKGPIISALQKYDFIDLFPINPATLAKYREAFQPSKAKDDPTDAQLAVDMLLRHSEHFKVLKPQSVEMRALATMVEQRRSLVSEQGRITNRLRSALKQYYPQVLEWFEHIDTPLFCAFVKRWPTLTQARRARANTLKQFFHEHHMYREDVVERRRKAIKAASPLTLDEAVIVPYRMQVLVLVEQLELMFKAIDQFDDEITKLASQHPDYAIFRPLPGAGPSLTPRLMVAFGEQRERFSSAADVQKLSGIAPVTERSGQKHWVHWRLQCPTFMRQTFVEWAAQTINKSYWAGAYYRQQRDKGSTYQAAVRSLAFKWIRILYRCWQTGVAYDESRYLKALERRGSPLVKNREMLESA

SEQ ID NO: 427865 - protein, 314 aa, unidentified
MSRIFVGVDVSKDRLDVAAHPDPSSWSVPNDEAGIEDLVNRLGDLRPVCIVLEATGGLEMPALTALAVAGLPAVAVNPRLTRHFAKAAGLLAKTDRIDAAVLARFGEAMKPEIRPILDAPAQELRALTVRRRQLTEMLTAEKNRRSMAPKRMVKEIDKHIAWLERSLSRINDDLQKTIRNSPVWREKDDILQSAKGIGPKTSAVLIAELPELGRLDRWEIAKLVGVAPMNCDSGRYRGQRHIQGGRASLRCALYMATLTAIRFNPAIAPFYQRLMAGGKLFKVAMTACMRKLLVRLNAMLRDRSPWQEKAPQIA

SEQ ID NO: 427866 - protein, 362 aa, unidentified
MEYFCGLDVAIEETAVCVVDDRGEVHLTVKVASEPEAVFAVLKPFATRLRRVGHEAGSLSPWLHPELKKLGLPVICLETQHVRAAMSAQRNKTDEKDALGIAHIMRTGWFRAAHVKTEGCYRMRLLLTHRRNLKRKFLDLENAIRHSLKSFGIKLGGTGRGKFDQAVREAVADDALSSELMDAMLTARAALWKEYCRLHDLVVKMVAQSELCRRFLAIPGVGPVTALSFMTAIDDPTRFRRSRDVAAYFGLTSRRWQSGTSIDVQGRISKAGDADVRRALYEAASGLMTRFKGKDKVKTWGQQLAKRSCHRKAVVAVARKLAVIMHAMWSDGTFYVGDHMASEADMAARAHVKDRRLLGAHA

SEQ ID NO: 427867 - protein, 430 aa, unidentified
MSRPQVIDDSEHERVHDRVAAVDVAKDSGVVCTRTPHPARPGARRSTVWTVTARKNAIAGLGRQLKKAGIEVVTVESTSDYWRIWFFVLEACGLAVQLVSASQAKNMPGRPKTDKLDAQWLARLTENGMLRPSFVPPPEIRELRDYTRARTRLVQERTRCWQRLEKLLEGALVKVSSVASKLTTVSAQDMIKAMIRGERDPQRLAGLARTRMKARHDDLVHQIAFCDGKITRLDTRIGESVAAIPAAWGTDAGGTTGPGAGAGPDAPVLPAAARLAQIPGISETMARSVIAETGLDMTRFPTAGHLVSWAGLCPSARQSGPRPRAGKKGRGNGYLRGTLGQAATIAARTPTFLGERYHRIARRRGTAKAQVAVARSILVIIWHLLADPATRYTDLGPGYYAARTDADRKIRNHIRQINALGFSVTLTKAP

SEQ ID NO: 427868 - protein, 343 aa, unidentified
MQSISTIGLDIAKSVFQVHGVDAAGQVVIRRQLKRRFVLSFFEKLSPCLVGIEACASSHYWSRELQALGHTVRLMPPAYVKPYVKRQKNDTTDAEAICEAVTRPNMRFVPTKTVEQQSGLMLHRARHLFVRQQTAVINSIRAYLAEFGIVAPVGRRGVEQLLEVVADTADRRLPEVARACLAALGSQLRALKAQILEFDRRIIVWHRSSATSKRLDAIPGVGPALATALVASVADAKAFRSGRDFSAWVGLVPKQHSSGGKDKLGSISKQGDRYLRSLFTAGALAVIRYAKIHGARHRPWLTALLARRPTKVAAIALANKLARMAWAMMARNERYREPAALTA

SEQ ID NO: 427869 - protein, 343 aa, unidentified
MAYFAGLDVSVKETRVCIVDDAGKIVREARVASEPEALLQVLTNTIYRFKRVGLEAGPLSQWLYSVLAEAGLPVICVETRHMRAMLKAQINKTDRNDARGIAQMMRVGLYRPVHVKTLRSQKLRVLLTHRKLLQSKAIAIENDLRATLRNFGLKVGMIGTVKFETRIRELVENLPDLAALVEPLLIVRRVVREQLGILHRRLLAIVRDDDVCRRLMTVPGVGPVVALTYRVTVDVPARFRNSKAVGAVFGLTPAKYQSGEIDRTGAISRCGDEMMRMMLYEAAQSMLVRSAKWSWLKAWAIKIARHRGMKKAIVALARRLAVIMHRIWVDGTEFRWTREVAAA

SEQ ID NO: 427870 - protein, 382 aa, unidentified
MQSIDNVNPTIHLAIELSASSWLIAARVPGSEKPYLHRIDGGNTAALLALISSLRAHVARRLDAAIEVICCFEAGRDGFWLHRLLTAHGITNYVLEPTSILINRRARRAKTDRLDAIGMLRVLAAYLRGDRQSCSMVRVPTPEEEDAKRIHRERENLVQERLRIENRIEALLFTQGIRKRPSLRSWERDLANLRTGDGREMPRHLRAELNRLRRRLVTILELIREVEVERDELVVTTPQDRTSRKIVALCRIRGLGENFAAVLTREVFYRSFGNRRQIASYVGITPMPYQSGGMDRDRRISRAGNPRARTTMIQLAWLWLRYQPGSELAEWFRKRVGTLAGRTRRIAIVALARKLLIALWRYVETGVVPAGVEIRTETVVAA

SEQ ID NO: 427871 - protein, 359 aa, unidentified
MNRNTGMTAGQIIGTMNGKQVIGLDIAKHVFQLHTVDMGTGEIVNLQIKRAKVLEHFANKQPCLIAIEACGGAHHWGREFTAQGHSVRLLHARIVRPFVSGNKTDATDARAIWLAVQQPGVKFVGIKTAMQQATLTLHRQRELLMKMRTMQTNALRGLLYEFGATFAQGRKALFKDVEQTLGDLSGQLPQMVQDSLREQIARIKAISVDMLAIEKRLGIQHKADPQMQRIGQIPGVGVLTATAAIATMGEASAFKSGREFCAWLGLVPKQNGSGGKVRLGGISKRGDTYLRTLLIHGARSVLAHAKEEPGPWLQQIKARRPANVVIVAQAAKMARTIWAVTAKEQDYQRGFKSVRPLAA

SEQ ID NO: 427872 - protein, 392 aa, unidentified
MIIVGIDVASEKHDYFMLRKETGEFFSSSAITIPNNEAGYKKLHKDIQTFCGATGDSKVRIGLESTGIYHTNIIAFLLEQNYETMMINPILTNMARKASKVHTPKNDNLDAQTICKYLVDNESSFAPYTLTLYHIQSLKSLSRKRFYIVEDLRKAKLAVSNLIQLIFPEFKTLFSNIYGESALSVLKAYSSPQKLARAHTARVASLLHGRCKCTADQLIEAARHTVGLKSDCYAFELLDAIEELEHIQRRVDNYDAQIKRYVDEICPNLLSIPGVGYTTAGLIAGEIGDIGRFHSTDTLVSFSGIDCTVYESGKYKARHCIPSKRGSKYLRYALFQVSRVIWQWDPIFREYYDKKAAEGKHYYVILGHIQKKVIRVIYSIMKSGQNYVARTA

SEQ ID NO: 427873 - protein, 367 aa, unidentified
MKKGSTTAAKQMRNFSQQKLTIGLDLGDRSSWYCVLDEAGKVRLEQRVSTTAKAMREVLSRMPHSRIALETGMHSPWVSRLLSELGHEVIVAHARKVRLIGESRCKDDRLDAQTLARLARIDPQLLCPIKHRSAKAQADLAVIRARAGLVRARTALVNTARGLAKSYGERLRGCNVRNMNREKAEGLSPELQAALEPLLAAIESLSERIREYDERIEALAQESYPQVALLKQVKGVGTLIALTFLLTLEDSHRFGKSRDVGCYLGLQPGRRNSGQSEPQMHISKEGDPYLRTLLVQGAQHILGPLGADCDLRRWGLKLAGRGGRNGKKRAIIATARKLAVLLHHLWVSGEVYEPLRNNNPMRMATAA

SEQ ID NO: 427874 - protein, 342 aa, unidentified
MLHAGLDLSRKKIDVCLLSAAGEVVDEWASPPDSDGLRGLAARAVMWGGSVRGVMSMNGARFVHDRLEEHGWEVLIADATKVKGLAPLACKTDKIDARVLATLSARDLVPEIWLPDPSVRRERELARFRLHLVRHRTTLKNRIHAALIAFGHPCPVSDLFGHAGRELLDRLEIPDPWRSNIDVSLELIDDLDLQIATLTVQLKRQGADHRYIPLLVTAPGIGWINAYTIASEIGDIGRFASPAKLCGYTGLCPRVKQSGATDARGPISKHGPKYLRWALFEAALNACKHPYYAERYQQTKRRLGRQRGPKVAQIDLSRRLTEAIWHMLTRNEPFAPAGAPVV

SEQ ID NO: 427875 - protein, 323 aa, unidentified
MSIFVGVDVAKRSFDIATTLPNGKKRTKAKLPNDSGGFAQFSDWLERHAEPGTWIVMEATGTYHEALAEHCHAQGYRVCILNPAVISKFADVELRRVKTDKADAKVIAAYSQQNAASLRQWEPEPPAQRRLRALVRRPDDLKEMRQMEQNRLDVARDAVQQSIRDIIGHITEELEKTKKAIEQTIDDDPDLRNRRDLITSIDGLGETTAALLLAELGDPLKYQSPSAIVAFSGLNPVVQQSGEFTGQSTISRTGSSRLRAGLWMSGAVSIKHNPVIKALAERLSSRHKAYKQIVCAAMRKLLHLVYGVVKSGKPFDPQIALAR

SEQ ID NO: 427876 - protein, 367 aa, unidentified
MKKVSTMAAKPSKKILQQRLTIGLDLGDRNSWYCVLDESGQIQREQRVRTHATAMREVFSEMAHSRIALEIGTHSPWISRLLSELGHEVMVANARKVRLIGESRKKDDRLDAQTLARLARIDPQLLYPVKHRSAQAQADLMMIRARAGLVRARTGLVNTARGLAKSYGERLRGCNVRNMNPEKAEGLSPELQRALEPLLTCIESVSEQIAEYNGRIEKLAQDSYPQVALLKQVKGVGTLIALTFLLTLEDPHRFRKSRDVGCYLGLQPGRRNSGQSEPQMHISKEGDPYLRTLLVQGAQHILGPFGVDCDLRRWGLKLAERGGRSGKKRAIVATARKLAVLLHRLWVSGEVYEPLHNSNHRAMPAAA

SEQ ID NO: 427877 - protein, 341 aa, unidentified
MEKYVGLDVSMEETSVCVLDGGGNIVFEGKTSSQPDALSKLLRAKASDAARIVLETGSLASWLWHELRGRNLPVICLDARHVRAALSMRVNKTDRNDARGLAELARMGWYREANVKSTESRYTHSLLAARAKLVDLRRDVENQMRGLLKGFGLPPGKGGIKALLEKIVVIMREAPHLRMLFNPMMLAHSALVTQVKFYDVQILKLAKGDETTRRLMTVPGVGPATALAFRSTIDDPNRFKSSSDVGAYLGLTPRRYQSGELDRTGRISKRGDRLTRLYLFEAASVLLSVVKRWSALKAWGVRLAKRVGIKKAKTAVARKLAVVLHCIWVDGTEFQWGKEKA

SEQ ID NO: 427878 - protein, 344 aa, unidentified
MDHFAGLDVSVKETSICIVDDAGKIVREVKVASEPEALLAVLKNLAYHFKRIGLEAGPLSQWLFSALAEAGLPVICVETRHMQAVLKAQINKTDRNDARGIAQMMRAGLYRPVHVKTIRSQKLRMLLTHRKLLQSKAIAIENDLRGTLRNFGLKVGMVGKVKFEARIRELVENLPDLAVLVEPMLIVRRTLREQIVILHRRLLAIVRDDEVCRRLMTTPGVGPVVALTYRATVDVPARFRKSKAVGAVFGLTCAKYQSGEVDRNGRISRCGDEMMRVMLYEAAQSMLRSKKWSWLKAWAMQIARRRGMKKAIVALARRLAVIMHRIWVDGTEFRWTREQPTAAA

SEQ ID NO: 427879 - protein, 413 aa, unidentified
MANTVAGIDIHKKVLMVVVVKRSGVSTEGEVQRHRFGTGSSDLHRLQAWLVEQGVEEVVMESTAQYWKPVWYELEPHFRLQLAQAHSNRAPRGRKHDFRDAERLVRRLLAEELILSFVPQPEQRAWRVMTRAKVQLARDRVRLHNQVEALLEEMRIKLSSLLSDLFGVSGLRILHALAEGETDAKKLAALGNQRLHCTEEQLVDALSATPRPIHRKLLGHFLDRLQLVDKQLAELNRETAEAMAQHADTVARLAEVPGFGADSAQQVIAEVGVQASTFPSAAHLASWVGTNPGRQESAEQNQSSRSAKGNKFVRRILTEAAQAAVKTKGSHFQVVFRRLMPRLGYKQALWAIAHRLCRLVWKILHDGVRYVEQGAQRDPKALKQRMHTMARSLRQLGYDVNLDITPHSALARS

SEQ ID NO: 427880 - protein, 373 aa, unidentified
MPKYSTAFGMDVHLRSTTVCALDADTGEAVTRRFPGNPWGEIAGWMDGFPGPSLAAYESGYLGFAPQRELAGLGVECVVAAVSKIPRSAADSASKNDRNDAARMAKAILAHDISPAWVPSPEVEGIRDLAGAYDGATARLATAKQRLLAFLAKRGFAYGGTTPAGNPRKYWTYDFLRWLDKVRPEDDGGVRTLAALRNEVEAAAEARADLLSEYRAAVDASPIAAEVAALQSIKGCAFALAAAFSAEVGDFTRFRSGRQVTAYFGLAPSQRSSGDSVRLGGISGAGNALVRKLAVEGSWCYAAARHQPKLMPRDTGVPLEIRMHGRKGSERLLRRREEMLARGMPAAKANAATAAELVRWLWALGMMCREGAE

SEQ ID NO: 427881 - protein, 399 aa, unidentified
MFYCGIDIAKYKHEASVIDMSGKALSNSITFANDRQGCEKVLAIFEKSEITPDNIVIGMEATGHYWLSVYTFFLELGYTVKVINPIQSEAFRKMYIRQTKNDSKDSYIIAQIMRFGEYSATSLSEENIIALRQLSRYRLALVDACGDCKRRVIALLDQVFPEYDKLFSDTFGKTSSELLLNCPTPEDMLAVSTRKLTNILNKASRGRFGKEKAEELKDAAKNTFGIAFAKDAFSFQIKQLMQQIIFTENQLSELEEQIANLLHETNQYITSITGIGDVLGAIIVSEIGDINRFERPNQLVAFAGLDVTVKQSGEFSGTKNKISKRGSPYLRRAIWLAAQRAAFCDPVLSDYYQSLKARGKHHLTAVGAVARKLCNIIFVILKENRPYFPTPPKKSQNLS

SEQ ID NO: 427882 - protein, 344 aa, unidentified
MVMLGTDAHKRSHTIVAVDPGGADIGSVTVTATTDGHLGAVQWAAQYTERQWAIEDCRALSRRLEGDLLGVGERVVRVPPKMMARARATARQAGKSDPIDALAVGRAALREPDLPVAQLDGPSREVRLLVDYRETLVRQRTALQNQLRWRLHELEPGYDPPTGSLNRYCTLDDVIGLLEGHDSMVADLARRETRRIRDLTVEINQLERDIQQRVTVLVPTLLAIPGCGALTAAKLIGEAADITRFRSRDAYAMWAGVAPIPVWSANNTRFRLNRGGNRQTNAALHRIAITQIRMHPDAQAFIQRRIESGSTKREALRLLKRKLANVVYRTLQTDTQTTHLAQAA

SEQ ID NO: 427883 - protein, 345 aa, unidentified
MQPMYYIGLDVHKRTISYCVKDSSGAIHAEGRIPATRFDLDRWMKILPQPWSAAMEATVFTGWIYDHLRPHATALKVAHPLMLRAIAAAKKKNDRIDAKKICDCLRCDFLPECYMASTAIRERRRTLRYRNLLVRQMVQMKNKIGMLLMEAGVSYNKQRLHKAGYFRELLATNQDIDEGLQSLLRLCRETVVRLQRTESALVRSLERDSLLVERVERLMTIPAVGPITALAWALEVGDVERFSSIKKAISYCGLCGAEKSSGNTVQHTPLSKQRNKHLQTTLIEAAKMAPRNSSELAMLYDKEKQKGNANRATLAVARKLVAYLMAVDRGQRNFQVVETNNGIAA

SEQ ID NO: 427884 - protein, 345 aa, unidentified
MNITTLGIDLAKNIFQLHGVNQRGKTILQKKISRAKLADFIVQLPACTIYMEACAGADYWAKKFISFGHEVKLISPQYVKPFVKTNKNDAKDAEAIVEAGIRPNMRFVEIKTTEQQDIQSTHRIRERLMAQRTALVNQIRGLLMERGIFVQQGVQKLKRELPKIVESDELSASMKENVLELYKELNYLNSKIAFYDEKIEAIFKQNEACLRLEKMPGIGKLTATMLVAIIGNGSTFKNGRHFAAFSGLVPRQCSSGGKERLLGISKRGDTYLRKLLIHGARAVLRHVNKKKDKESLWLQTLAKRAGMNRAAVALANKMARRAWAMIHYGTEYQRGHVPSFKSICN

SEQ ID NO: 427885 - protein, 393 aa, unidentified
MVAHESEHDSRILGLQPTCTFVFVENTKLQVVLIKEMTTEEKRQTMFVGVDVHKDTHTAVGVSPFGEKLFEITVGNYKKDFEVLTSKVREISSSLSPYYGLEDCHGYGERLSAYLYENGHQILAVPSVLVDRARQKATHPEKSDSLDALGVAKVMMQNIDSLPAYTISEESKKAKQIKELSIDREYLVEERTRLKNHLHNLLHRIWNTEYQGKFKDPFSLKALTYWKKSKPSCDPFLLRSMKRKARRLIDIHYEILDLEKEMKTLLDENYTIQTASGCGTVIAGMIVGEIGDINRFHSPGALAKYAGCSPRECSSGKKHRHMKTRSGNRRLNCAFHRMALSQISRSGNELAKTYFKRKVSEGKSKSQALVCLRRQMVNIIWCMMKHGTVYKFV

SEQ ID NO: 427886 - protein, 351 aa, unidentified
MKFYRTTTEYNCGIDLHSRQMYMCVMDKEGNKLVHTNVTGNDFGYFLTRVQPYRGNLTVCCECTFNWYWLADACAAAGIEFVLAHALYVKAIHGGKNKNDRIDSEKLAHLLRSNLIPPAYVYPAARRSTRDLLRRRTGFVWKRTELQHHLSCMPLVQGQQPVQKTQHKVRDVWFDKLRVRFDDPMRLLSAEADMYLIKEFDKIIDRLERTILKETKKEQGRDFALLQTVPGIGDILALTMLYEIDSINRFPRVQDFSSYCRLVKGTVASAGKIKGLRGAKLGNPYLRWAFGEAAVIGKRSNPALKCYGKKLQMHLTKPEVNAILASKLARSVYFMLKHGKGFDPKLFAKGL

SEQ ID NO: 427887 - protein, 363 aa, unidentified
MKQRTSVGLDVHARSVVACAIDGETGEIRRRRLTPEYGDLVGWLQSLPGLVKVVYEAGPTGFGLARFLLAADIMCVIAAPSKLQRPVGDRVKTDKNDALHLARLLHLGEIVEVTIPSVAQEAARDLVRAREDARGDLMSARHRVSKLLLRQGIVYYGGNAWTAKHETWLRSHYFDQPALQMAFDSACEAMLMTAQRRDRLDEAITTMATASEFTPVVNRLGCLRGISTLTAFGLAVEIGDWHRLSGRSIGAYIGLVPTESSSGGSRSQGGVTKTGNGHVRRLLVEAAWHHRQPYRTPGATMRRRWELASPAAQARGHAGNRRLHDRWDQFNARKKRPVVANAAIARELAGWCWSLAILDDPAQ

SEQ ID NO: 427888 - protein, 384 aa, unidentified
MSKHNILFIGLDTHKEFVEVAYIEDQRGAKPVHFGRQPSSKIAIKKLARQFESKYPDATLHFVYEAGPCGYWIYRLLTSLGHCCYVVAPSLIPKKPGDRVKTDKRDAMMLAKLLKSEDLTPIYVPEPEDEAVRDLSRAREVAMKDLKDAKYQLKAMLLRNNINCKTKDNWNAAHLRWLTELVLPHPAQQIVLQEAIQTITERMSRVERLDNELTHQVTSWRYYPVVKAVQAMRGVRLLVATGVVAELGDLNRFDHPRKLMSYVGLVSSEHSSGGKRKLGGITKCGNGRARRLLIEGAHSYRYNANISTELQKRQEGLPKPIVDIAWQAQLRLCRRYQRLMHKGKHYNVVVTAIAREMIAYIWAISREVVLAQVNPKLRLSRVPA

SEQ ID NO: 427889 - protein, 282 aa, unidentified
MRFYTKPHRYYCGIDLHARRMYMCVLDAEGQIRVHRNGPATPEHFLTTIAAYREDLVVGVECIFTWYWLADLCTQEGIAFVLGHALYMKAIHGGKAKNDKIDAHKIAVLLRGGMLPMAYVYPREMRATRDLLRRRCHFTRKRAELLTHIQNTASQYLLPTLGKIAYHGNRLGVAEQFHDPAVRKSIETNLALIDHYDRLLTELELHLTETAKVHDVNAFYRLRSVPGIGKILALVLLYEIHDIQRFPRVQDFVSYCRLVKCAKESAGKHYGYSGTKIGNAHL

SEQ ID NO: 427890 - protein, 403 aa, unidentified
MNSVGIDISKGRSTVAVMRPFGEVVTSPFEVRHTDSELSELARRLKSLTGETRVVMEATGNYHAPVAKLLHDAGLYVSVVNAKLVHGYGNNDLRRVKTDRKDAVKLANYGLDRWLTLPRYIPEEDTRLLLKNCYRQYRQYSKVQTVLKNNLISLLDTVFPNANRLFSSPIRGDGSEKWVDFVAEFWHCRCVSEKSERTFTNKYQRWCKKHGYNFREAKAQTIHAEASGHIGVMPKSETTKLLVEQAASQLRATSAALAALKHEMQSLASMLPEYPVVMDMFGVGPTLGPQLIAEIGDVRRFYSKKALVAYAGLDAPPNDSGDVTGRHKSMSKIGASSLRRTLFLVMSVYLQTAPLDEPVYQFMDRKRAEGKPYRVYMMASANKFLRIYYATVKAYLESLEHTA

SEQ ID NO: 427891 - protein, 402 aa, unidentified
MNCVGIDVSKGKSMIAVMRPFGEVVVSPFEVRHTANELSELAGLLKSLDGETRVVMESTGNYHAPVAWLLHDAGLYVSVVNAMLVHDYGNNSLRRAKTDKKDAVKLANYGLDHWLTLPRYVPEEDTRLMLKTCYRQYQQYSKVQTMLKNNLISLLDTAFPDANRLFTSPPRTDGSEKWVDFVATFWHCECVCGLSKKAFTAKYQKWCRKHGYNFSQDKALDIYSSACGCFGVMPKTNTAKLLVEQAISQLQTTSAALAALKQEMQSLAASLPEYPVVMGMFGVGPTLGPQLIAEIGDVRRFHSKKALVAFAGIDAPPYQSGQIDVRSRSISKRGSASLRRTLFLVMGVLLQCAPMDEPVYQFMNKKRSEGKPYRVYMMASANKFLRIYYASVKAYLESLEHD

SEQ ID NO: 427892 - protein, 343 aa, unidentified
MQTILDKCCGLDVHKDSVVACLIKTRNPLVFAPKNGQEDVLKEIRVFKTFLDDLKQLRSWLEAEDCCHVAMESTGVYWFPVYDALEGACGGKMELLVTNARHMRNVPGKKTDIKDAEWIATLLRAGLLRGSFIPPLNVRELRQLTRYRKNVVEDINTQKNRIEKTLQQAGFKLSTFLSDIFGVSGRNLIGVLIQKGKLTPIDVENATKRISPEKKKEIKLAINGLLSERQRQFLQLQITMLDDLLEHLTAIEQSIAELSRPFTNEIDRLDTIPGIAVTSAAAIIAEIGVDMNKFPTAEHFCSWAGVTPGENQSAGKKKYPNQLWKHLYKGFNLRMRLGSSPNA

SEQ ID NO: 427893 - protein, 356 aa, unidentified
MTQGKKLDFGGQSIFCGIDVHKKSWSVCLRTADRELQCYTQNPDPELLSDRLNKSYPGASIQLVYEAGFSGYWTQQKLSCRGFDCRIVHASDVPQTDKNRRFKTDPADCRKLAWELSKGSLNFIHIPQPITIENRSLVRSREQLVKDQTRYKNRIHSFLDFMGVAVPENFTKSTHFSRAFLKWLEQLDLPGHSRAALKVKLSMLEAIRGQLLEVNRVLKALAKSDAYQKQMGLLMTIPGIGWLSALIIFTELEDIRRFKNFDHLASYVGFKPDIYASAEKSSVKGITHHCNHLLRETMVECAWMAISKDPALTQSYYQLKGRMHYNKAILRIAKKLLNRVRFVLINEQPYQIETVS

SEQ ID NO: 427894 - protein, 404 aa, unidentified
MTGDDRALIFLGVDIGKSAHYAVAVDRDGQTIYSKPVANEESALRLLVLWARAHQAAVIVDQPGGTAALLLKLCWDATIDIAYVPGLAMARARDFYAGESKTDPKDAFVLADIARAHPNRLVWLRETGAARAQLELLNGYDTDLREDANRLTNRMRALLATYWPALERALGDRLDTIGGTALLKRYPSSPQLRQAGAKRLVALLRATHRVHEPEVWIEQLLVAAKSQTVVVPGAETAAGLVAELAEQLHRVLARRQLMEKEIERAFFALPEASIIKSLPGIGPRLGARILIEIGDIRQFHTSAQLAAYAGLGPTPHQSGTSIRGNRVTRFGNHRLKNAFYLAAFSSLQHPPSRTYYDRKRNEGKRHTQAVLCLARRRVDVLHAMLTTNTPYQAPTPQADLETAA

SEQ ID NO: 427895 - protein, 262 aa, unidentified
MFPVGIDVSKNTLDLCILYDGIKGRIKTRNIQNNRHSVENILRWLRLQHCGPEDVHVVMEATGVYHERLATELHDAGFRVSLANPHRSREFARGMGIMTKTDKVDAYMLACYAFLKKPHHWEPPSPEIRYLAALLRRRDVLLGDALREENRLEKYLSTDTPADIISSCRRMAQLLREEVSNIERQIKAHIKASPALRRDYTLLNSIKSVGPQLGMHMLVELRSHNFASAEQAAAFLGVVPIEKRSGTSVRSRPRMSKIGPLS

SEQ ID NO: 427896 - protein, 322 aa, unidentified
MDTPKRAATVTSLFVGIDVSKAALDVALRPGADPWRCANDEPGITELVSRLKPLEPLLIVLEATGGLERLVVAALALAGLPVAVVNPRQVRDFAKATGRLAKTDALDAAALAHFAEAIRPEPHPLPDAQSQALAALVERRHQVVAMLTAEKNRCQQALPAVRPKVAAHIAWLEQALSELDGELDQLLHASPLWRERDQLLRSVPGVGPTVSLTLLAHLPELGQGSAKHVATLVGLAPLNRDSGAWRGTRAIWGGRRQVRAALYMAALVGVRHNPVLRAFYEQLVARGKPKKVALTACMHKLLTILHAVLRDRAPWQPSPLAT

SEQ ID NO: 427897 - protein, 471 aa, unidentified
MSKGNGTTRGDRRRNARRERLRALLPRDGAVIGIDLAEDKQALAVVDHDVRVLARKTVKVKAFRLGEALDWAVAQAKGKGFAHVTVACEPTGPRWLQVQRLCAERGLPLVCIQPLISHIAREQQDYTTHKTDESDCVMIARLAIELHCYIPEELDETWAHLRHLGRRRQQLITAATASMQRIQDFLSVAWPTVMETCVAPLESKTWLAAMQLVTGRCGGQPARLAEMGEEAFTAAVRGGVAAWGGQKAWGTISGRVFAALTDTEGVVVSSRRGLLRRCADELGDLQRTRAQLRAVEADMVMVLGELGLARLGDIPGLTAVGAAAILAETGDPRRYDGSSSLVKHAGLAPSDNASGAFHGEAHISRRGRPGLRLTVWRAVWPMLRFNPVMAAKYQAMTSAADAAALAAGRHDGKGTRPATAAAATARARRAKARVACAASLLRWIYTIVVHDTSWDPAAASGAAARHQAEAA

SEQ ID NO: 427898 - protein, 368 aa, unidentified
MKMNAIKAAPAASAIALKNEKSAKAKRILIGTDVHLRGYQAARKVDNGVIGVVENFRSEEALLLHVEKQCERAEQVVVVYEAGPLGYTLYRKLTACGVLCYVCAPDSSEQKRKRRKNNKIDARNLTSKLFNYLNGDEGALQLARVPTEAQEQLRLASREHDQMVEERKRLGAKGNALLLSQGFGSWSNWWRPKAWAQLSSLVPEWLLERLKIWVDVLKMLDEKICLAKVALARACSGPRPKGVGALSQIQLQSEVLDWSLYTNRRKIACLAGMVPSEWSTGDTERRGSITKVGVPAIRRIIVEMVWRIVLFQPQYKPVQKWQKVLQGTNPALKKKAVVAIGRQLIVDLWRLQTGRVSAQELNLVMVGA

SEQ ID NO: 427899 - protein, 421 aa, unidentified
MLGIGIDWAEEFHLVALGRPSEGVFEVARVEHAPSAVDSFIARIAALEPDPAEVRVVLETRHGMLVERLVDAGYVVVPVNPALVAQRRGPARKKDDAEDARICCLIALDRHQRLRPLVPHGEEAGELRAIARDDERASRDERRLLNRLRADLVATFPAALAIAGDDLGAPTVLRLLERWPTANALVSATRDELVDFARGAHHGWPERFADRVAAALEREVFVARDYLVRAKADTIRLSAVQLLAISAQRRAWERRMGELLLGAPRTGRARRPKEDGRGQSVPGGEIYLSFPGLGDRLAARIAGEIGDIANFESPNGLQCYGGKAPVTRRSGKSEFVVASRLACNRYLAVAVHQWAFCSLEYSGWAREFYDGQRARGKGHNAALRALGNRWLEVLWHCLTKGIHYDERVHVANRNRALARAA

SEQ ID NO: 427900 - protein, 399 aa, unidentified
MLDDGSQPTKLFNVDNSQLGAEVLVERICSIAKEHCVSDILIGTEATSMYDWHLLEYLAESKLALEFDLKLYRFNAKWIKNFKKSLAPRGKTDPIDSFAIAERLRIGRLPKEYIPDSKYQPLRKLTRFRFHLMQQIAREKNFFLANLFLKASAYSRVSPFASTFSATSLAVINDFFSVDELAAMPIEELTEFILEKGKAHFSKPGEIADNLKRVARESYRLKPELAPTVNLILASTFNNIRCYKEQVKIVDAAIAENLKAFKHTIESTPGIGPVYTAGILAEIGDVHRFLNDSALAQFAGLTWPKYQSGKFQAEETRMSHTGNQYLRYYLVEAANSVKRCDATYKAFYEKKYKEATKHHHKRALVLTARKLVRLVWTLLTKQTLYQPGYCSFEDLSKIS

SEQ ID NO: 427901 - protein, 446 aa, unidentified
MACHGVTGRNARLARLRELVPVDHAIVAIDLADKKQMVVVTDHDSKVLARKTFRCRAWDLGIALDWAAQRAAGKGWAGVTVSCEPTGHRWRVLGQLAADRSMPFVCVQPMVTSWARRAEDLTFDKTDDKDAVLIARLTAQLRCYIPEPVDETWGRLRHLGARRERLIVEAGAQVQQIRDLLECVWPAALETANWPFRSKTWAAALWVILDRDGGDFTRTRRLGLIRFETAVRREITNRGGQRPCLRIVRKLFTALADPTGVVAHRRGALERVQLLLEDWADTQRKLVDTEARMTAVLDELELTELVTSIHGLSPVGAAAILAETGDPTRFATARALVKHAGLAPREKLSGTFTGRTKLTGQGRPGLRLAAWRAVWGSLQTNTVYAARYRHLTTREDNRLTPTQAQTVIAAAILRHLHAVITAGRAWDPVIATNGTRGTNETTTLAA

SEQ ID NO: 427902 - protein, 334 aa, unidentified
MENIALIGIDLGKNSFHIHCQDRRGKAVYRKKFTRPKLIEFLATCPATTIAMEACGGSHFMARKLEGLGHSPKLISPQFVRPFVKSNKNDFVDAEAICEAASRPSMRFVQPRTESQQAMRALHRVRESLVQDKVKTTNQMHAFLLEFGISVPRGAAVISRLSTILEDNSLPLYLSQLLLKLQQHYHYLVEQIKDLESQLKRKLDEDEVGQRLLSIPCVGTLTASTISTEIGDGKQYASSRDFAAATGLVPRQYSTGGRTTLLGISKRGNKKIRTLLVQCARVFIQKLEHQSGKLADWVRELLCRKSNFVVTCALANKLARIAWALTARQQTYVA

SEQ ID NO: 427903 - protein, 405 aa, unidentified
MRYYIGVDWADAEHAIWVEDEAGARVLARAVPHTAEGLAAWGRWLDEQRAAGIELWAAIERPDGRVVDFLLDHGVLVYPVNPKALDRARDRFRMSQAKSDPFDAQVLASFLRTDHAHLHPLQPSSAAAQELKLLTRDYARCVREQTRLVNQLTATLKEYYPRALEVCEDLTTQRARAFLRAYPTPEALAALSPKRWQRFARTQRWSAAQAATRWATLQEPHLPVPAHVVRAKARLAGILVTQLEAAVHAVAEYREAVTGFFGTLPAAEWATTLPAGHGTTVPTLCAELGDAPGRWASWQHLQGHAGTVPVTVRSGKYRSIQFRFACNKPLRTALHQFALCSLQHSEWARAYYDRQRARGHRHHAALRALGAKWLKIIFVLWRRHVPYREEHHLATMARQQLRQAA

SEQ ID NO: 427904 - protein, 408 aa, unidentified
MKVLNRRCAGLDVHKDEVVACVRLAVRGKASHEVRRFATTTRGLLDLAEWLEASGVTDAAMEATGIYWKPVWHVLEERFQLVLANAAHVRNVPGRKSDVNDAAWIADLMAHGLIRASFVPPAPIQELRDLTHTRKQLGREIVQHTQRIEKVLEDANIKLSSLIADLLGASGRRLLKALIAGESDAVALAALGGSRLKCSRAELKEALEGRITPHHRFLVGQHLQMIEELEAAVAAFDAWIEAALVPFHDAAERLTSLPGISDVAAQVILAEIGPDMSPFPTAGHLLSWAGLTPRLDESAGKRRSTRLKKGAPWLKPVLVQCAFAAARAKNTYLQAQFLRLKARRGPKKAAIAVAASILTAVYHMLRDGTFYNDLGPQHFARHDKTRAAMRLVRRIKDLGYDVEIKAAA

SEQ ID NO: 427905 - protein, 360 aa, unidentified
MRHIGVDLSRNKFTACFLEADDSYSLATFPLVPEGLEAFRAQLRGDDRLAVEAGQNTYFFYRQVQALVAEVVLVATHKFAVIAQSKQKTDRNDAVVLARFLKLGCLPTVTMPEERVRELRNLFTARDTLVKMARQLKCVGHAALIRNGVFSSRSDFASHAGRARLAQVTGLGPADRLILDMALRGLEPIEQEIVELERSIIRLGKNLPGLKPLLQVRGFGLIAAIGVLAEIGEIRRFPTAKQLVSYAGLATAVRQSGNAERYGHITKEGRKRLRGFMIESVLSMIRNPGDRNPLVDFHLRKRKEKGAGKAICATARKLLTVIFTLLTKDLDYWFLEERLYQSKLRALGAQTYKGRFPAVA

SEQ ID NO: 427906 - protein, 340 aa, unidentified
MSTINIIGIDIGKFTFHLVGHDSSGREVCRKKLSRPKLIQFLAKTECTTVAMESCGGSHWLARKCQELGHKVRLIPPQYVKPYVKTNKNDFIDADAIAEAANRPSMRFVTVKTETSQVISVIQRIRSNYLKSRTACMSRIGSILLEFGMSFPKSHAKMKTLFQWLTEHGEPIPPMLLLELRDHHDYYLKLNQLILTQDKKLKEIVDHDERAQLLKTIPGVGTLTASRCLSDISNAGDFKNGRHLAAWIGLVPRQFSTGGKPTLLGISKRGNKGLRELFIHGARAVLVRPEKAVAVFGNWILSLLSRKPFNVVVIALANKLARIAWSVLSTKQAFEVRMQA

SEQ ID NO: 427907 - protein, 350 aa, unidentified
MMIIGCDFHTRYQQIAMLDEATGELVERRLDHESGEAHAFYRDLQGPVRVGIEATGPIRWFERLLAELGHELWIGDSAKIRASEVRKQKTDERDARLILDLLLAKRFPKIWVPTPAERDLRQLLWHRHKLVCMRTMLGNQLHALAMSEGLCRKKKLFTQKGRVELVHLGLAPWASRRREELLKLLDQLEPAITELDRAVMEEAHRRADAVLLMTHPGIGPVTSLAFVLAIGPITRFARSKKIASYLGLNPSEESSGGRRRLGAISKQGNTMVRWLLIEAVYPAVRKDPALRQDYQRLKFRRGHAVAKVAIARKLAVRMYWMLRSGAEYARLVRRQGSPGATLVDASSSLG

SEQ ID NO: 427908 - protein, 392 aa, unidentified
MFFLGIDIGKNTHVASLIDDNGKTVFKAFSFPNSTIGAISFLDKLTPFSNEIEIGMEATGHYWLALYSFLVEHGFVIHVINPIQTDGWRNATEIRKHKTDIIDSLIIADFIRYGEFLETSLANEDILSLRNLTRFRNYLVSSIGDLKRKTICILDQIFPEYESVFSNIFGKTSKEILLHFSSPAQFESITSEQLETALEQVSFKKFASKKISCISNIAKTSFGITFGLQSLTLQLKLLIQQINFIEQQVHDVEIQIKQLLHKINTPITTIPGIGDIIGATILGEIGDIERFSNPSKLVAYAGIDASVHQSGDYISTNNKMSKRGSPYLRTALFRAALIASVHDPVFKAYYQKKRSEGKHHLTCLGAVARKLCYTIHAILKNNCEYKVQLPTE

SEQ ID NO: 427909 - protein, 336 aa, unidentified
MENFYFIGVDVSKKKLDICVMCGSKVLTEEQVSNHQQAIIKLLNELKRDFNMTNDNFLICAEHTGQYTYPLICACKSVDCKLWIENPTQIKYCSGLTRGKNDKVDAKRIALYASRFYDRATYYKRPSEELTRLNQLEVERTLYIVDLSKYKAQLTDQKEFMPKALYKSKSDRLKILMKSLEQVLKTIEEEMNSIIESTKVLSRQMDLLTSIDGVGPVVARNMIIATEAFTRFDNPRQFCCYAGVAPFAYTSGSSQHSKNKVSQKACKYLKTLLHMAAVAVVHRKSGELKVYYERKVDEGKNKMTIINALRAKLVARMFAVIKRNEFYSPILSNNIC

SEQ ID NO: 427910 - protein, 339 aa, unidentified
MPHYAALDVSNQETAIHVVDEAGRTVWRGKRASDPEALAAALRRHAPDLVRVGLETGFLTPWLYHSLRAVGLPVVCLEARHARAATTLQRNKTDANDAETLAQLVRTGWYREARVKSFAAHAVRHLVGARAQLKGVSVDLSNQIRSILKTFGLMAGKGAGHAFAIRVRELLEGRPALAAIVDPLLAAWQGVREQIAVLDRRLIRLAKGDSTCRLLMTCPGVGVIVATSFAASIEAPEHFRHSRSVGAYLGLTPTRHQSGETDRTGGISRRGDRLMRTYLFEAAASLLIRVRQNSALKTWGRDLAKRMGFRHAAAAVARKLAVVLHAMWRSNTPFQAWPA

SEQ ID NO: 427911 - protein, 356 aa, unidentified
MSIVAHAHPFVVGVDTHARNHVYAILAATTGALLDAREFPAGAAGISRAISWVARRTGSDADTLWVIEGAATYGAILAGTVASHGYPVAEAPRMDARKRRGVGKSDALDAHRIAATVLPLPVEKLRRPRLNDGLRQGMRILTTARGTMSADRTRSVNALNALLRSNNLGADARKALTASQTSEVSRWRPREEELSLSIARTEAVRLARHILELDKQLQANEKQLDELVKASQAAPLLEEKGFGPISAAKCLTAWSHEGRVRNEAAFAPLAGVNPIPASSGNTVRHRLNRGGDRNLNSALHMVAVTRMTHDAETRQYVEKRRSEGRTDKEIRRCIKRCLARRIYRHLNTAAGGEIGG

SEQ ID NO: 427912 - protein, 350 aa, unidentified
MKTYYVGMDVHRASIVMVVLNGAGKVVMQLVIETGAERVRGFLKQLSGKVYVTFEEGTQANWLHEVVRPLVTEVVVCDPRHNKLLQSGNKSDRVDAQKLAELLRNGSLKAVYHGDNGMRMLKELVRSYDCLVSDTTRVMNRLKAIYRGRAIGCAGHDIYRQDRREQWLEKLTERGAKQRASFLYQQLAALRPLRQEAKRLMVQEARRQRAYPWLMSMPQFGSVSVAQLLAIVSTPHRFRSKRQFWTYIGLAVVTRTTADHEVVNGVLRRSRRPVSTRGLNRNHNHALKRVFKNAATGACHSGPFKAGYELRLAQGMVPSLARLTVARQLAATTLAVWKRGEQFNPERMKQ

SEQ ID NO: 427913 - protein, 324 aa, unidentified
MTQSSEKENIEFIGIDIAKNKIDICLGIHNKKDSFPNSISGFRKLLKVLPPPAESIVVLEPTGGYEKDIIVYLQKKSYRVVLANALKVRRYAEAMGFLAKNDPIDSYVIKSFGEDLYPKGKLTVLIAKSDEFRQLELWLNRSRQLVKLITSEKNRIDKTTDKNIKKSIARMIRCLKKELKTIENKLEKMTNRCQLSEQAEKYKQVKGIGKVCANALVTYLPELGTFSHSKIAALVGVAPYCKESGNHKGKNKIKGGRTTLRGLLYMGTLSAIKHNPVIKVFYDRLTARGKHHNVAMIACIKKILRILNAMAKNDTPWQENYGIK

SEQ ID NO: 427914 - protein, 410 aa, unidentified
MKVLHPRCAGLDVHKDTVVACARIAQIEGGARHEVVTFGTTTRELLRLSDWLTAHGCTHVVLEATGVYWKPVWQVLEGSFELVLVNPGHVRNVPGRKTDVNDATWLADLLAHGLVEASFVPPVAIQELRTLTRTRTQLVRERAQHVQRLQRTLETANVKLASVLSDIVGQSGRAMLKALIAGETDPEVLAALGHHRLRSLQAERVEALRGRVTPHHQFLLKLHLDQVESLERTLAELEAEIERAFEPFRRPFEHLQTIPGVRHVVARIVLAEIGTDMSRFPTVGHLISWAGLCPRNDESAGKRRSTRVRPATPWLKVALIQAAWSAVRMENTYLRAQFLRIRSRRGSRKAVVAVAASILTAAYHILRDDVDYRDLGPDHFDRRERAHRTKHLVQRLRDLGYEVTLRDAAA

SEQ ID NO: 427915 - protein, 318 aa, unidentified
MFIGIDVAKDTLVVAARPTGTLETVANSAAGLQPLLSAWREHPPTLIVVEATGGYEVLAVLTLSLAGLPVSVVNPRQVRDFAKGTGQLAKTDAIDAHVLAHFGELMQPPVRPLADAETRALEALVARREQLRLMLEAERQRLTQPAAHAPAVRTSLEHTIAFLQQQLAHTDDEIGTAVAAHPVWAARSTLLQSVPGVGPMIAQALLGWLPELGQLTRQQIGKLVGVAPFNRDSGRYRGTRRIAGGRAAVRAKLYMGALVAVRYNARIKAFYLRLLANGKPKKVALVACMHKLLTILNPIVRTAMPWDASHHMAAPQLA

SEQ ID NO: 427916 - protein, 370 aa, unidentified
MKMSIGVDLHKTQFTVCCLSEDRKIQESGIYPTKGRGYGAFIEKMLHWIEGGYEIAVAVESTGNTRYFCNQVMKAGVVVKVVNTLKFKIVNESVKKTDKHDARTLAEFLEKDMLPESILCSQESEDIRRLLKSRSVLVKALVSLKNQVHGLLLGYGIESRRGQLQSKKERQRILDGLADHKSDGNAARAVKPLLGTIDQIASEVKELERVLSDLVSGDEDVELLQTIPGVGLITAATIRAYTDDINRYESARKYAAHAGLVPWVQNSNKTIHHGHITKRGPRELRTAFVQMVMGMLRLQDKTYGYWLMRKYQIMKGHKGTGKSIIATARKMSTIVYAILKKREPFDPIRMLPDPKYIQMSKDARHYALAV

SEQ ID NO: 427917 - protein, 341 aa, unidentified
MEEYIGLDVSMKETAVSIRRADERIWRGKCASDPSVVAELIRKRAPSVKRVVFETGPLSVWFYHSLRTEGLPAICIDARHAKAALDMATNKTDANDADGLAQLAEVGFFREVRVKGFDSMLTRTLVAARTRLVRITTELSNQIRGVMKTFGLLVPAGKGSTFEKNVRSLLADRDRLASIVLPMLEAWRGIRVRAAELGRQLVRDARQSRSCRILMSIPGIGAITATSFTTAIEEPDNFRKSRSVGAWIGLTTRRYQSGEVDYDGHISRRGDRSLRGLLYEAAAVILTRSSTHSTLRTWGLQLRERIGFKRAAVAVARKLAVIMHTMLKTGELFNPNAGAAA

SEQ ID NO: 427918 - protein, 345 aa, unidentified
MPIVGGLDIHRKQITFDYLDTVTGEVRRGQIAPADRVHLRAWLARFAGRDDVAFAVEGCAGWRYVAEELAAAGITAHLAEPADTAFARGRKRHAKTDKTDARHLRMLLAEGRLPECWIPPARILECRALLELYNDLRRERTAWAQRIHAVLFHQGAPQLGEGALRTEKGVAGLRAAAAAHLSPAGQLQVATALEVIDGLEARLHAVRHQLLDAARHLAGAKVLAARLYGVGPVTGLAITCWLAGAGRFSSSRQAVRFAGLDITVSSSDRKGPPGKLSRQGPPVLRWAVYEAGKAHARTSAPDHRYYAAVKDRKNSKRACLSEARKILRQAHHILAELGDDALAAA

SEQ ID NO: 427919 - protein, 322 aa, unidentified
MAMLSFGGIDVSKDRLDVMILPEERCSSVNNDAAGWADLVERLSGSSIAAIGIEASGGYERGVVRALLAAGMPVRQVNPFKLRQFARASGVLAKNDPLDARMIASFVTIMPTRPAQRQTPAAERLTEMLAIRRQLSAEKVAAENASRLLEDAMLQRLSRRRIVRLAADIDLLDKRMVEIVATDDALVHRYRLLTSMPGVGAVLACTLIALLPELGRMSRKQVAALVGVAPYAFESGTLKGRRCIWGGRAHIRQVLYMAAMSASNWNPVLKAFHDRLTAAGKLPKVVIVAVMRKMITMLNAMVRDDVVWADRLSGRHVLPTAR

SEQ ID NO: 427920 - protein, 347 aa, unidentified
MSEISIIGLDLAKQVFQVHGADPAGRCVLRKQLKRREVLQFFAKLRPCTVAMEACGTAHYWAREIGKLGHCTRLIPPAYVKPYVKRGKNDAIDAEAICEAAGRPTMRFVPVKPMENQAIVMLHRSRDLVIKNRTMLVNALRAHLAEFGFVAGKGIWKLPDLVKIVSQAPAEALPELVRTTLSGLLDIIAAISSQLDAIEKRLREWHKKDARSKRLDTVPGIGLIAATACRALVPDPKLFRNGRHFAAWIGIVPKLDGTGGKTRLGRISKAGDRYLRRLFVLGATSLLRSLENKSTRLALWVQALLARRTKRAVTVALANKLARIAWAVMTRDEAYKPLAAAQPAGCA

SEQ ID NO: 427921 - protein, 414 aa, unidentified
MTESWTLSVGIDCGSQSHQVCVMDRTGVVIGERRIEHSGSDLEALATWLLTLGETDPMRILIAIEVPRGAVVETLLERGFRIYAINPKQSDRFRERYSAAGSKDDRRDARVLASAVQSPTDRAAFRAVQPDAATIIQLRALSRLDAELGEELTRTTNRLRDQLQRYYPQVLQLCPAADEPWLWTLLAQAATPQQGAQQRMAGGGGRVRQARIRRFTATELHAALTATPLHVAPGTVEAASHYVRVLLPRLQLLYTQRKDLAKQLTTLLEAIATEPAGDGREHHDVTILLSLPGVGVRIGATMLAEASQPLHARDYHAIRTLAGLAPVTKASGKRRFVTMRYACNARLRAACYHWARTAMQTDVAARRHYTILRQAGHSHARALRGVADRLLAVCIGMLNTGTLYDRQRRRGLAA

SEQ ID NO: 427922 - protein, 386 aa, unidentified
MPKPNDLSRSLTAFEQNSTLIAVIEMSLSSWLVSGIVPGIKRHPLKKLDTEKEALLKLLHRWRDEAVKAGCKITRITVAFEAGRDGFWLARWLRTQGIEAYVIHPNSVAVSREHRRAKTDRLDTELLKRAFLGWLRGEPDHCSMAAIPTLAEEDARRPNRERENLVGQRTRIINRMKACLVRFGIRNFKPTLRKASEQLEALNTPEGTPLPPNTLAEMRRDMARLRFVIDQIKEIEAARLKQLKQAPKEGSQAMVLLLARVIGVGIETADMLVHEILSRNLRDQRAVARYAGLTGAPDESGKKRKEKGLAKAGNARVRRGMIQLAWRFLQFQKDSALAQWYRTVTKDARGAIRKTMIVALARKLLIALWRMVKTGQMPENVALRAA

SEQ ID NO: 427923 - protein, 443 aa, unidentified
MSKNRNSHLRGERGQAFADLIRGIPSEQILCVSLDISKYFHVVMMHNGLGEIVKPAFEIDFYQSGFDQLCQAIDQAKAETQAQVVLLGMEPTSHYFENLARHLRQSSQPVTLINSFAVKKNRDQQLMHREKTDPIDCGAIGDLLRRGEGTLYKPATGVYLQLQQLDRVRLSKVKIEGMLKNQIIAHLDRIFPGLVILGKSARERYTPLFQVSFWQCKTLQHLIRVCPNPHQLVDMTPKQLVQAFKAQSYRLGSKIAGKIINQAQKALLPDPALVTIRCELLQHDLRLLEVVRAHIAKLEQRLTGLVAQTPFQIWVQLKGLSAVQVASLAATIGDPSNYTHAAQVFRRSGLVSGRNDSGNRQRKGKGNRITKIGDVYLRRALMNAVTTLILHQPVLGRYHRKLCRKKHPGVARVATARKMVGILWATLRDQYPVTLITCKGANM

SEQ ID NO: 427924 - protein, 490 aa, unidentified
MKKRSIFGQQSQELLRIYEEAGTSKKVLVGAIDYAKKDHVVMLCNGNGDILRKPFAVKNTPEGVDFLLAQMQATCRYHKINPRHAFFGGEDCGSYTENFSECVRERGWLMAGVNAQDAKKQRENLQASTDRLDLLGISRMLINRRGNCAPSQSGPYRNMRTVARDRRKLVNLSTAERNRMHTLVDRLFPGFLDEKMSGLTSFHPPSLRIMEDHFSARQIAKRKRSTLAGLISRAGGQRPEETASKLQSYAATVLHAAPEYVSTMQFSLTRHVALYRCLKGNIDALERETAVWLAQTQGAFLMTLRGIGMVLAAGVAAEIGDPTTQMPVNNLVSYAGIIPRVSQSGGPDSEAHTGSVSKRCNRILKDYIVQSGSHLGLHGVADLMEDHHRRDAAGQHANFGIARRYLRIGMHLMRNSTIYLPPDLRGSNVPTEARVEYYQILWPYLLDKWKKYGAHTVAFAPENPLGQWRNMIQELYHIELKIPGEKKSKR

SEQ ID NO: 427925 - protein, 349 aa, unidentified
MIRYVGIDVGKAKCRAAIVNQQGDVEDEFFFENNNKGISELEALLKVEDRVVMESTGNLWLSIYDALDSMNIKVVLANPMQTKVSSKKKKTDKVDARKLALLLKAGLISESYVPPGYLREMRALVRHRLSLVRMRTMQKNKVHAILDKYCYRCEKSDLYGKAGRVWLGRLKFNGLDQLLVENYLSLIEFIGVQIERVDAAILQKASEEDDVRLLLSLTGVDVFTAVLIKSEIGTIERFDNCKKLVSWAGLAPSVHQSGEVEFHGGITREGSGVLRWAMVEAAWIAVNHDEKLGGFYERVSARRGKQKAAVAVACKMLKIIWFMLTRREVYGGAKKKRYGEKLKKIGVKG

SEQ ID NO: 427926 - protein, 461 aa, unidentified
MSKKNVPAEQKQSGGKKVDWRALEVMHPDAAGIDVGGSEHWVAISPERDPEPVRRFGCFTADLHEMARWLLEKGVRSVAMQSTGVYWMPVFEILEEHGLNVILVNARDTKNMPGRKSDIQECQWLLKLHAFGLMNNSFQPTDKIRTARTLWRQRGNLVAEASSTIQRMQKTLIEMNIQLSSVLSDLSGVSGMAIVGAILKGERDPWKLAALADRGVKATAREIALSLEGNWRKELLFVLGQEVDLYRVYQKKIADCDRQLRKHLESFGSKVDVKAQPIGPKPKGKGSSKNAPQFDLRTELYRITGIDWTQVNGLDVITAQTVMAEAGVDLSEFPTERQFSSWLGLCPTNERSGGKILNRRTRKVVNRATVAFRNAASTLLRSQSYLGAQYRRLRTRLGAPKAITAMARKLACLYYRLIKHGHQYVDKGNEYYEARYREQQIRSLTKKAQKLGIKLVMPDAA

SEQ ID NO: 427927 - protein, 363 aa, unidentified
MQNSITWVGMDVHAENIVLAALRDSSDTVLFRAEFPNTPKGRERLAGKLAENAPVRCVYEAGPCGYELRRFLEGRGIECDVAAPALIPRKPGDRVKTDRKDAEKLARCHRLGELATIFVPTPAQEALRDLLRTREDAREDLLRRRHRLSKFLLRKGRRYTEGVRWTTKHWDWIRAQTFTDHNTETVFREYIVAIEQEVERIRRIELQIVEESRSPEVGNAIARLRALRGVDTITAMTIITEVIDLNRFRSPRELMAFIGVVPRERSSGGRERRGSITKTGNAHIRRVLIESAWHYQRLPAGTPKTILVRREGQPPEVIETARKAELRLHRKFMKLLGRGKPKGIAAVAVARELAGFIWALGRG

SEQ ID NO: 427928 - protein, 403 aa, unidentified
MNNVAGIDVSKGKSMVSVLRPFGEVVAKPFSIGHTGSELKELADYLKSLDGETRVVMEHTGRYYEPVARFLHDEGVFVSAVNPKLIKDYGNNTLRKVKTDKADSRKIARYGIDNWAELRQHTPMDTIRMQLKTLNRQQSLYTKTKTMMKNNLIALLDQTYPGVNALFDSPVREDGSQKWVDFATAFWHVDCVRNMSLTAFAERYRKWCKRHGYNFSQSKAVEVHAGAQDLIAMLPRDALTKTMVRQAIDALNAVSASLERLKAEMQALAAQLPEYPVVMAMHGVGDSLGPQLMAELGDVTRFTHRNAITAFAGVDPGADQSGTHEAKSTRVSKSGAPELRRALFLVMDCLLKTQPQDDPVYRFMDKKRAEGKPYLVYMTAGANKFLRIYYGRVKEYLASLEGN

SEQ ID NO: 427929 - protein, 344 aa, unidentified
MKATTIGIDLAKNLFQIHGVDEHGKVVLKRQLRLEQMAAFFANLPPALIGMEACGSAHYWARKLQGIGHTVKLMAPQFVKPYVKTNKNDVADAEPICEAVARPNMRFVPVKNIEQQAVRALHRARQGFVRARTAQANQIRGLLSEYGIVIPQGFAHIAEQVPDVIEDGANELPGLFRQLVQRLMDHLSVLHRQVLDMDAVILAWHRESDLCRKLEKIPGVGPVTATALVATIGDVKHLDNGRQLAEWLGLVPRQHSSGGKQNLLGISKRGDCYLRTLLIHCARSVIFLSRRKGVCEGWVYELIQRRNHNVAAVALANKIARIVWALWTHDREFRSDYAPAVATA

SEQ ID NO: 427930 - protein, 397 aa, unidentified
MSAVVGIDVGAYKHAAAVCRTGEREAERSVFRLSADRAGFDELDRWLGRQGTVERVVLESSGHYYWLLASHLHRRGYGVAVVNPLQAKYFAKSRLQRSKSDPADARTLAALGMSEEPRVTDPLLGAEAKEAARFWGGLVKEQTQVRQKLLRLVEIGFPELKECFEDPLCQTALAVLREAPTARVAARKRVSTLADTTRPGGRRRLGENKARRLHDLAANTIAPPELDAQMSFEVGMLIQQFDLLDKQIEIAEQRVAEVLDLELARRLQTIPGVGPALAASFIAEIGDIWRFDDFDQLAAYAGVHPKELSSGTKGQNPETSWRMAKTGNSYLRSAAYKMAVVGTQHNPVIRAHYLRKRAQGKSAMNAIGHCMSKALAVVWGVWRSGRDFDPTLGGPRA

SEQ ID NO: 427931 - protein, 406 aa, unidentified
MRYYVGVDWADAADAVWVEDEQATKILSRSVAHTVEGFTEWGRWLDEQRAAGVEVWAAIEKPDGRVVDLLLDHGVVVFAINPKAADRARDRFRASASKSDPFDARVLASFLRTDHHHLSPLRPSSEAAQELKGLTRDYARQVRQQTRLLNQLTATLKAYYPRALELSDDLKHEWVRAFLHDFPTPAAVAALTERQWSRWARGRRLSAERVGALWAALRAPQLPVPPHVERVHARRLGALLEQLDVTVRTVQVYREAIIDFFARMPAATWATSLPGGRSGTTVPTLCAELGDAAGRWESFRHLQAHAGSVPVTDRSGKYAAVFFRFACNQHLRRASYQFAANSLAHSEWAKAYYDRCRTRGHRHHHAIRALAAKWLKILFVLWTRHVPYDETHHLATMARQQLRRAA

SEQ ID NO: 427932 - protein, 343 aa, unidentified
MDHFAGLDVSVKDTSVCIVDDTGKITREVKVASEPDALLAVLTNPAYHFKRIGLEAGPLSQWLFSALAEADLPVICVETRHMRAVLKAQINKTDRNDARGIAQMIRVGLYRPVHVKTLRSQKLRMLLTHRELLQSKAIAVDNDLRGTLRNFGLKVGMVGAARFEARIRELVEGLPDLAVLVEPLLVVRRVLREQIAVLHRRLLAVVRDDEVCRRLMTAPGVGPVVALTYRATVDVPARFRKSKSVGAVLGLTCARDQSGERDRAGAISRCGDKMMRAMLYEAAQSVLVRSTRWSWLKAWAMQVARRRGKKKAIVALARRLAVILHRIWVDGTEFRWTRDAAAA

SEQ ID NO: 427933 - protein, 412 aa, unidentified
METIVERPAALDVHKAQVTACVRVPGGRGRREQHVAEFPTTVRGLLALRDWLAGHGVQQVVMEASGVYWKAPWAILEDEFDCLLVNARHVKQVPGRKTDVSDAAWLCQLAEAGLLKANFVPPKPFRQLRNLTRYRKTQIQERAREVNRLHKALEDAGIKLDCVAADILGKSGRDMLDALVAGTTDADALADLARRQMRKKIPALREALEGHFDAHHRLWIAAILRHIDFLDEQIEQLTGAIEEQIRPFDPAVELLCTITGIQRRGAECIVGEIGTDMTCFASARHLASWAGQCPGNDNSAGKRRSGKTRNGSKWLDFALEEAAMAAIRVKGHYLEAQYRRLKPRRGHKRALGAVKHSILGAIWHMLTTGETYRDLGGEFFTNRDPERQTKRLVKQLERLGHHVTLTEDAAAA

SEQ ID NO: 427934 - protein, 344 aa, unidentified
MHYIGIDYHKQYFVATKMDRKGKIISTQRVSTDRDSIRNYFNNTASKEKVKVAMEACYGWQYFYDEVSDLVDEIIMAHPLKTRLIAEARIKTDSIDSETLAHLLRADLIPEAYAPSAETRDHKNLLRYRSSLTAMKVRIKNVIHSVLARNNIENKFFDELTDKFCKKGIERMREMVLKGNDTAILNNYLDLLNETQKKINQAESLIRKVCREDKICRLLDTIPGIGDILAVMIRYEIDDIERFPTAGKLCSYAGLVPSTYSSGNKRYQGKITKQGNKWLRWAIVEAAQRGFRGDEYLRDFYEKINKKKGSKIARVAVARRLLEIIYWIWIEKRPYYKKPITVAL

SEQ ID NO: 427935 - protein, 398 aa, unidentified
MSRIWAGTDCGKTHHHTLVLDAEGETLLSRRVANDEPELLKLIGDVLDLADGRKVTWALDMAGGGPGLLIALLVNHGQELVYIPGIVVNRASDSYRGAGKTDARDARVIADQARMRRDLQPIRPGDDAGIELKLLTERRVDLVADRTRTTNRLEGLLNSMFPALERALDIGTTGALLLLTGYQTPAAIRRTGLRRLTTWLRNRKARNPEALAAKAVEAAERQHTAVAGESAIAKMVHTLAKEVMALNEKIAETDKLIEGRFREHELAEVIQSMPGIGAVLGAELLVGIGGSLDAFPTADRLAAFAGVTPAPRDSGKVVGNLHRPQRYHRRLQRVFYTSALVSIQFDPNSRKFYDRKRAEGKRHVQAVLALARRRVNVLWALIRDRRCYQVTPPVATAA

SEQ ID NO: 427936 - protein, 351 aa, unidentified
MKKIVKQVLGADVSQKELVVCLGRMHDDWTPELYAYKTFANNSKGFSSLLLWIKKLTDQNIVTRFVMEATGVYHELFAYYLEGRGLEVSIVLPNKISNYARTLDTKTVTDKTASEAITLFGLERKLDLWKKPKDIFKALKQLTREREQVVAERTMVKNQLHAEKAEAVPNKKSIARIMKRIELMNKQDREITGEISAIIKGDKEIQQLAIVICSLPGIGLLTFSIVMAETNGFDLIRNKKQLTSYAGLDVQEKQSGTSVKGKPKISKKGNKYLRKAMHLPALSAIRHDERFKAIFIRLVSKHGIKMKAAVAVQRKLLEMMFTLYKTNKKYDKNYLKIEGIEGEEKHEDIAA

SEQ ID NO: 427937 - protein, 414 aa, unidentified
MAKNDRIVVGGVDTHKDVHVAAVVDEIGRILGTSAFPTTARGLAELHAWMRSFGDVGRVGVEGTGAYGAGLARHLGGEGVEVVEVNRPNRQMRRRRGKSDTVDAEAAARAALNGEATVAPKAQVGVVESIRVHRVAFVSARSHRTQVALQIRDLIVTAPPELRAVLGPLTTEERVARCARFRLMGDPADPSVGVKSALRSLARRHEALTIEMAELEATLDRLTAVANPALRGAKGVGTDVAAILLTAAGDNPGRLRHEAAFAAMCGVSPIQASSGKTQRHRLNRSGNRQANHALWRIVNVRLTCDPASKAYLERRTAEGKSRREIVRCLKRYVAREIFRLLVVPEAVPDGADLRTARIASGLSQTPVATALNTSVNAISRLERSRIFDTELARRYESFLASISENEPHAVPAAA

SEQ ID NO: 427938 - protein, 431 aa, unidentified
MSKFFYRPVVGIDVSADFSVVAILAPDGEIYRKPFKIMHNRNGFDYLVDQIKKVEKEFSMKTGIFMESTGVYHLTLFHFLKDTFETCILNPLITNCNKNGDIRKVKNDKKDALTIATIGKFQNVKYSSNFDVEIYTLKSLCRDYYKFTDSKSTFKKKLSTDLKVIFPSYSSVFSDITGKTSIAILKAYSSPEAVLNADRDDVINLISTNSRKGLAHSENTYKKLYDAAEEATYIGLKSPSLFVKIINTIAIIEALESQIGNLLTEIQLLMNSNRIPDEFKKNVQLLYSIPGIGQLSAITIMSEIGNIKGFVKPKHLVAYFGLDPSVSQSGKFNSDKNVMSKRGTRIGRRALYAIALASIRKNRNGEPINRVLLNFYKENMHGKSKKVGLVAIMHKLINYIFSVLKNQKEYELRDPKIHSKMYLNNKSSHAA

SEQ ID NO: 427939 - protein, 338 aa, unidentified
MNTVTLLGIDIGKNTFHLHGQDARGHQVLRKKLNRNQLLPYLAQMSTCKIAMESCGGSQWLARKIKEQGHRVQLIAPQHVKAYVSGNKNDFIDAEAICEAASRPRTRSVQVKTVEQQVLCTEHRLRKSLVSRRTAVINQVHGFLLEFGVIFPAGYAALDRVSGLMQSRELPIRLINAIERMLEDIRQLTGEIKKLDVEIKQNLVQNDAGQRLQSIPGIGPLIASALVADVGDASIFKSSRDFAASLGLVPRQYSTGGETVLLGISKRGDKYLRSLLVQGAHSVLYRVDHRTDALGRWAKNLLARKPLNKVACALANKMARIIWVLLTKGGTYNSQLLA

SEQ ID NO: 427940 - protein, 405 aa, unidentified
MNAVGIDISRGKSTVAVLRPFGEVVMLPFEVKHSNAELLALAEQLKSIDGETRVTMEHTGRYYEPVANALHNSGLFVSTVNPLLIKEYGGNSLRKVKTDKADAQKIARYTLDNWAELRDYTPMDTVRYDLKTLNRQFNLASKQKTASANNLIALLEQTFPGIRKCFESPVRNDGSQKWVDFAITFWHADCVRKYSKEAFAERYRKWCKRHGYLVRSNTVQEVYTLAQNAVVLVSKSQTAKVIIVEAAKQLTAISRSVELYRSEMNRLAEMLPEYPVVMQMFGVGSTFGPQLIAEIGDVLRFARKQSLVAFAGIDPAPNDSGDKYGRNSGTTKRGSPYLRKTLFNIMKCYLQNAPEDEPVYQFIDKKRSEGKPYFVYMTAAANKFLRRYYAKVNEYLVSSENTISE

SEQ ID NO: 427941 - protein, 417 aa, unidentified
MQVVRPICCGADIHKDIIVATIATSNQNGIAEYIQRKFCTQNYDLINLKSWLKEHNCFEFAMESTGKYWIPIFNVLEDEIKVYVVHPKYTKSIKGKKTDKKDSKWIAELFRHGILTFSFIPPREIRELREISRYRIKLVAMRTSERNRYQNAMTVSNIGLASILSDPFGKSSKAIMEEVLKSSSLSEGKIRSLLNKSAKKKAKEVFASLEGSRIEPDQRLKMTVSSEHMNQIDLHIDTLELDLVQRCLPYANLINLLIDIPGISYISAIAVIAEIGIDMSVFKSSKQLTCWAGLAPANNESANKKKSVRISRAGTYLKPLLIQCALSAIKSTSNPYYRIKYNTIKKRRGHKKAIVAIARMILVNIYAILSTGEVYNPCDFKEVTSPKPSKKEMTIENALFFLQAQGIDTSALVLNVS

SEQ ID NO: 427942 - protein, 355 aa, unidentified
MKTIGVDLHKDQMTLAVLDEQGAVIRRDQVATKCRKQIREWFASYGTDCQVAVESVGFYQWFWDLLQPVVGKLVLADPAGLKPLRPAKQAKTDRKDAELLARLLFESRLPTAYVPPRSLRALRELVRHRHSVARALALQRRCLRWVMLKLNLPGPKNLTSDATQKWLLSQEGKFSPAQTFIARQRLDQIVALERQLTDTQRLIDEAVAADPWLQQRAQLLESIPGIGRLVAITILVETGELTRFDTTDQLGAYAGLTPRVSQSADTVHHGHISKMGPPILRWVLQQAAWVAVRVDAQARRLWLRISRKAGEKRAIVAVARKLLIYAWSVCRRNEPFHWPDQPVPALAAGPVDYCI

SEQ ID NO: 427943 - protein, 311 aa, unidentified
MNRQVVSYIAIDVAKDSLEILIQGQSRSRSIANCKEALRRLLKSVQPLQGLHFVCEATGGYERTLVNFLHEQGVTVSIVSPARVRAFANSEGIKAKTDPIDAEMLLRFAREKNPRATPAPTPSRKALIALMDRREHLSEQLKREKTRLKNCDALIAPSIARMIEIVNEEIKQIEGAIKKVIQDDPTMKQLYDIISEVKGIGPVSAWTLLAYLPELGKLSRGEVVALAGLAPYNQDSGKTKKLRRIFGGRSKVRRCLYMAAVCAARHNPVIRDYTNAILARGKPFKWAIVAAMRKLLLRTHYLIKNNEIAIA

SEQ ID NO: 427944 - protein, 350 aa, unidentified
MELAKINTKYVCGVDLHSSTMYICIMNKEGNILLHRNMRNDFELFNSLIAKYKDNISVGVESMHSYYWLADGCIEEGISFYLGHAFYLKAIHGGKKKNDKIDSKKIADLMRSNHFPTGYVYPKEFRSTRDLLRRRIRFMIIRAEAYSHIQTIFRQDSNNITPGEVKSKKNRRKLIDKFNNTSIQSNIAMDLDLIDFLDPKLNKIEQQIRAEAKLRHRTEHNLLLTIPGIGDMISLIILYEIGDINRFDSPQKFSSYSRIVKCQRESGGKKYKEKNQKIGNPNLKWALGEIIVHAPRTSPVIRKYYDRLINKHGKKKAKSIITHKFGVAIYYMLKNKQGFDENKFVDTNMK

SEQ ID NO: 427945 - protein, 377 aa, unidentified
MKKNIRFVGLDVHAETIAVAVAEGSGEVRSLGVIPNRPEPVRRLVRKLGPAQSLRVCYEAGPCGYVLYWQLTGLGVHCDVVAPTLVPVKAGDRVKTDRRDAQKLARSYRSGDLTAVWVPDAAHEALRDLVRAREAAKKDQLRARHRLQKFLLRRGLQPPEGIKSWTLKHLNWVKTLRLEQFALDVTLLDYVTEVDRARERIERLERAIDQAVETAPAAIRAVVDALQSLRGVARLSAATIVAEVGQLSRFPKPRQLMGYTGAVPSEHSSGASVRRGAITKTGNAHLRRILIEAAWAYRHRPNLGSELRHRQAGASEEVKAIAWKAQHRLHHRYARLSARGKTRQHIVTAIARELAGFIWAVGVEVESKLTTNSARAA

SEQ ID NO: 427946 - protein, 355 aa, unidentified
MDSIKYIGLDVHQSTISVAVLNADGKLVMQSVIATHATTILDFLRGLRGTLHVTFEEGTHSAWLYDLLVRRVAKLVVCNPRKNALLKAGNKSDTIDARQLAELLRAGLLSPVYHGQNSAQTVKQLVRSYAALTEDTTRIMGRLKALYRGQAIACAGQQLYGRRHRDQWLQQLPEVGLRRRAERLYAQLDAVQQLRREARRDLIVECRRHPEAKILRRVPLLGPIRVALLIGRVQTPHRFRSKRQFWAYCGLALETRSSADYQMVKGQLERRKKPVFIRGLNRNHNHDLKNLFKSAATSAAARPGVFGEFYENLLKKGMRAEMARLTLARKIAAITLHVWKKGEAFDAQQLKSPAA

SEQ ID NO: 427947 - protein, 346 aa, unidentified
MDHCGIDLGMRESQVAILTEASEMIEGRVRTDRQHLQEFFRPYAPMKILLEAGTESEWVARCIEEMGHEVIVADPNYAPMYAQRSRRVKTDRRDAQALAVACRVGAFRPVHRTSDERRHVRALLAARDALVRSRVKMAVLIRSLVRREGIRIPGGNPKRLRDRMVKVVVPSDIQGEIAPLLAMIEPLNVQIAALEKEITTFTQNDQGTRLLMSCPQVGPITAAAFVACIDTPSRFRDAHQVEAYLGLVPREWSSGEIQRKGPITKAGNSRTRWLLVEVGCGVMRHANPDTLALRSWATRIAQRRGARTARVALARRLAGILWAMWRDNASYNPASLGKTQRIQKVA

SEQ ID NO: 427948 - protein, 412 aa, unidentified
MKDLLEISCGLDVHKEKIVACILTGPLGKPTHSEIREFSTLIPDMIALRNWIVSKNCHHVAMESTGIYWMPIYEILEDAFSGDITLLVVNARHMKNVPGKKTDMRDSEWISTLLRAGLLNGSFIPEKRIREFRALNRYRKSVIRDITSQKNRIEKFLQSSGFRLSSFISDIFGASGRNIILHLVEHGQIDKTALDSCLKTKTRNRIDEILMSVNGTLSEHQKAFLRILMTHYDSLKKHLAEIETSLEEDMAPFALQVEQLNSIYGISTTASCAIIAEIGIDMKPFKTAEHICSWAGLCPGNNESAGKRKSTSVTKGNPYIKSMLCEIAWVIAGKRNTYLSAWYWRIKQKKGAKKAIVALARKLLVIIYTMLKQGTLFDESCFETRRKHCEQKQLSRYIRELEKHGYHVEAQS

SEQ ID NO: 427949 - protein, 369 aa, unidentified
MTHYTTSRSMYSIKIICKDMKKICIGIDVSKETLDVTVIHIESYELVEKLGYSKFDNRPSGFRSMTAWVRKVIKSRGQMDEALFCMETTGSYDLPLCHWLHKNGLNVWRESALQIHCSKGFQRGKSDKEDSEVIAQYAARHQSRYTAFVPDAEAIADLKELICYRDSLVERRKECKVRLANKKETLVNRNSKAWKCIERLSKAEIKRLDKVIGECDEEIRNLMKEDEEMEKNYQHLTSIVGIGLINGAALIAYTGNFKKITTPNKMSCYCGCFTFYEDSGTSVHRKSPYRNACSKMLKGYLRMAAKSAMLANTELRKYSERLREKGKPYAVILNNVANKLLHIMFSLVKHDYDYEYNHEMVRRMEREIA

SEQ ID NO: 427950 - protein, 391 aa, unidentified
MEISSDYFCLVGEVVLEPFEVLHTAQNLNDLARKLKALDGETRIVLEATGNYHKPVAFVLHNAGLFVSVVNPVLIHDYDNNSLRRVKTDKKDAVKIANYTLDKWTRLRQYLPEDEARLALKNCYRQYQQAVAIRTMLKNNLISSLDLTFPDANNLFSSPAKSNGCEKWVDFIGEFWHSGCVSSLSADAFAKKYLKWCQKHRYNFTRSKSDEIYSCAVNATSLPKSPTSKLLIQQQVAQLKAVSKSVAAFQQEMLRLSQQLPEFDTVMEMYGVGPSLGPQLMAEIGDVRRFSSKKSLIAFAGIEPQPNDSGKIMGNDKGISKVGSAVLRRTLFLIMTVILQTQPQDEPVFQFMNKKRSEGKPYKVYMMASANKFLRIYYARVKAVMDSECSQ

SEQ ID NO: 427951 - protein, 345 aa, unidentified
MRYFAGLDVSLEETAICVVDEAGRTTKEARAQSEPIALITALTGLGSPLERVGLEACSLAAWLHDELRAAGLPAICIETRAANAAMKTMPNKTDRNDARALAQIMRTGWYRQVHVKSRQSRLWRSLLVARRTLLTEMRAIENVVRAILREGGIKLGTPARAAFAGRVRELSGDDPEIRPLVEPLLTVLGTMLEQLDRLSRQVLGIVRGEAVCRRLMSVPGVGPITALAFRATIDRPERFRRSRDVGAHLGLTPARYQSGETDIQGKISRCGDELARTALYEAAHSLLVRSRKWSSLRAWGLKITKHRGLARARVAVARKLAIVLHRMWRDETSFRFGKAPVPAAA

SEQ ID NO: 427952 - protein, 410 aa, unidentified
MIYVGIDWADDHHDVAITDDSAKTLAQFQVSHDHSGFATLHGQLAKFKQSPGQILIALETSRGLLVHELLRSGYSVYAVNPRAVNRYKDRYVLSRAKSDALDALALAHLLRTDRQRFKALRPFPEDYRLLDRLCQDLRKLVEEKSRISNQITSVLKEFYPKALELVSLDSDIGITFLKAFSDPEALRACHKKTFMTFFKKHHYSRPKKVEELWALVQAPALQSDVVVLKAGRFRLLALLDQLGPLREHLALYEKEVKAILDKLPEAKSISSLPGVGDRLTPELTAALGPKESDSQSRFQCAEEIMRLSGCAPVTRQSGRWKSVSLRYACVKNLRRTFRDWAFASLEQSVWARAYYDFYKAMNMPHSTILRNLGKKWARILFALWSQGILYDEALYIQSLKDHNVRWAMAL

SEQ ID NO: 427953 - protein, 408 aa, unidentified
MNLSLFVGIDVSKASNHVYAMNLARDQLLSTLIPNTQDGAAIIESKLLELLNKHALSKVIVILESTGVYSAHLATYLSNSKHLAVFDSKVYIINPKISRNYRKSFADMDKTDPKDAFILADIARVGRTSELTPFKGAQRLALERLTRHRLHIAELLSTEKVYALNNVFLKFSEFETLFSNNFGKTAVELLLEYKTIDDIIEAPLEELAHFITQSSKNRFDDSIDMASKIQTAARASYRLDKMAYDPINLSLASSINVINCYEAEMREIDKAIMRQVVGFNQNHYTVLMSIPGIGKVYAAGILAEIADINQFESDDALAKYAGITWRKTQSGKFDADDTHLTKTGNKYLRYFIIQAANIARQHIPEYRDFYLKKFNEVTTHQHKRALALTSRKLIRLIYGLLSANRLFQ

SEQ ID NO: 427954 - protein, 340 aa, unidentified
MSKMQIGVDLAKSVFEVAVSTVPGRVQERRRLSRAALTPFFAARPPAEVLLEACGSAHHWGRELQRLGHTVRLLPASDVARYRDGNKTDRADAKALLEAARNEKISRVPVKSLEQQAVVALHRLRQGYLQTRTARINAVRGHLREFGCVIPVGAAQVVPRAYAALDQDAVPALLRPALHTVLEEIAALETRAEAVRTELIRLAAQMPDVQLLLTVPGVGILTATALVAFVGDIHRFRSGRDFAAYLGLTPREHSSGPVRRLGAITKRGNSYVRMLLIHGARSALRAGAVTTHPDDLRTWARALAARKGHNVAAVALANKLARVCWRVWREQRPFERREPR

SEQ ID NO: 427955 - protein, 386 aa, unidentified
MWLSRGVVDFLRELRLVFVFIGCTRLAGSDYPMDTKFLTLSRKIAVAIGIDLAKDHCDVVAYNADNKVCFSKANMSFPKLMEWLANAHPAVVLMESCKGCHVRARDIADLGHDARLVKGADVKALRNVCQKNDIRDADYIARLLYVPGTKFVFVKNQRQQSLQFLQNEYKSFQELRIQVGNQIHAGLEEFGCPARKSTAFIQSRMVAHLEKNAELIPEAVMASFLRRREMWLNLFEQEEGAKKRMEEIAKTDDDAKRIMTIPGGGAQTAVGMLVHIGGDIGRFKNSGQFAASIGLVPKQNSTGGNTTLNGITKCGPKRLRANLVQCGQVILMHADKLKGNFGDWVRKLRDSGKKRGVIACAIAAKLARIIYRLMKDKVDYTPVPSR

SEQ ID NO: 427956 - protein, 461 aa, unidentified
MSRARPSRPARKSAAPAATDEALAILHPNAAGIDIGLAEMWVSVRSDRDPEPLRAFGMNTPDLLAVATWLKACGVETVALESTGVYWIPLYEVLAEQDFEVYLVNARHAKNLPGRKTDETDAQWLRRLHTYGLLNNSFLPSEELRAVRTYMRHRAELIEQRAAHIQHMQKALHEMNLRLSPTVKDITGVTGLAIIRAILAGERDPFKLAQLRDRRCAQPEAEFVAALTGHYREEHLFALKQALALYEAYTQQLVECDHELERKFSALKPIHDRELPPLDRTDKRNTHSKNAPTYDARALLYRLLGVDLVAVDGLNEVTAQIIITEIGTDMGRWKTERHFCSWLGLAPHTAISGGRVLYSHILKTQNRAGQALRLAAQALAKSDTVYGIYFRRMRALHGPQKAIVATAHKLARAIYHMLRDHQPYQPPRADEYLEQERTREIARLEKKATKLGFKLAPATAA

SEQ ID NO: 427957 - protein, 345 aa, unidentified
MSNNIHFSCICGIDIAKKVMQVFKVTSDGVVTNTSVSRKDFLEHFRNIPPALIGMEACATSQHWGRELQGLGHTVKLLSPKAVKPYVKGLKNDRNDAEGIYRALIMGVREVSIKSTAVRDLSLLQTMRAKRQRDKVATINHIRGILAEYGLVMGKSVRAFLSNAGTLIARLQESETTSQLVISELEKLLKEVKEIVSRIEELESSIKKIASENKNYDLFRSAPGVGPITAAMMVVLLCNPTVFKNGRDFAAYLGLAPMSFGSGGRNQVTGIPSKYRCHNEARSLLVQCAHSITRLKYKSDWVASILSRKPKKVAIIAIANKLARQLWVMAKKGDKFEKRLVLAAV

SEQ ID NO: 427958 - protein, 340 aa, unidentified
MKLYSAIDLHSSSNHLAIMNEEMKRVLVKKLANNTQLILDTLAPHREEIAGIVVESTYNWYWLVDALMEAGYRVHLANPSAIQRYKGLKYTDDTHDACWLARLLSLGILPEGYIYPKQDRPVRDLLRKRGHLVRLRTSLLLSLQNIITRSSNVKVAAKDLKKLTEDRVSAHMCGHDALELCGTVSKETIDVLTRQIQRIESSVLKKLKPTASYRTLVTLPGVGPVLALTIALETGPISRFSTVGSYASYCRKVASIWLSNDKRKGTGNRKNGNRYLAWAFSEAAEHARQSHRASRRFYDRKRSQSNLWVAHNALAHKLSRAAYYIMRDNVPFAEHKLYCS

SEQ ID NO: 427959 - protein, 397 aa, unidentified
MIAVGIDVSKSKSTVAILDSYGTVLATPFNMAHTQPEMNALVSRLKEVDEPVTILLKYTGHYHYPVLKKLQDEGFSVCVVNPYQMKKYGDVEIHKAKTDKKDALRIATYALEKSYKLVPYSFMEQKYEALKFLSRQYDQRIAFVAKLKVQLINLLDQTMSGITKILALKSRNPEKSTLMLFIKRYISFDEIQRMGKTRFLSTYATLMKKTTDRHAPQKGLAIYELARDSITTRGEDPYIWATQDQCVDLLATAQNAADEIITQMQNIAETIPEYKVLRAMNGVGDRLGPVILAEIGDIRRFHSAKALNSFAGNDAPPYQSGQFESGNRHISKRGSSALRKACFEVMQALKLTKPQDDPVYQFILKKEQEGKPYNVAKMAGVNKFLRIYYARAMELYR

SEQ ID NO: 427960 - protein, 428 aa, unidentified
MDEVDRNRLEEFRQLRQEVRHSEEYLIVGIDIAKDRHHAFFGTATGKTLLRRLVFSNDDEGFRMLLDQAEALRVRHGLKKVVYGMEPTANYHKPLGEYLIHLGRCVVLVSGVSVKKNRETLDGRWDKHDEKDSANVADLISQGKCLYYEYPPARLRGLRGLLSLKRRLKKQEHGYRVRIRNHLIAQYFPEMDRDYERLGAEGLSVVRWCFPPSQMTPLDVDPFIERVTSRQIRMEKRHRLEGIWEKAGETIGCDGVPGVEHEAKVMVEGLRQIREMIKETEGKIQELCEQFPEYKSLLTIPGFGPDVSSKVLGAIGDPDRFENRKQVIKLAGLDLSADRSGKNSDKAIPEISKRGKADLRYALYQAAMIASLKNRDIMIYYTNKIRGREKEKGIQIKMRVKLAAKLLVIAWTLMKKKEKFNPAYLNAE

SEQ ID NO: 427961 - protein, 354 aa, unidentified
MSIVADHYTSVVGVDTHAATHTYALIESPSGKLIDQKTFPTTPAGLKRAIAWIGRRTGPDVGRVLVSAEGTGSYGAVMAERLSEAGYRVVEAPTPSTKRLRGRGKTDTLDAIVAARSTLIMDIGRLRDRRAGEVQTALKLLTLGREQMNAERLRVLNALTALVRAHDLGVDARRPLTSHQIVTISSWRQRDEQLGATIARSEAVRLAKRIHILDADLKTNRAQITDLVDEHAPALIAMTGIGAVTAAMIMTVWSHPGRVRSEAALAQIAGTCPIPASSGNTVRHRLNRGGDRQLNRAINTIALTRMRCDAATRDYVARRLAEGRTKREITRCLKRYITRQIHRTLTAATTSPTA

SEQ ID NO: 427962 - protein, 468 aa, unidentified
MGQTIRLGIDVACRADHQASCADVAGEFLWSGWRFRTTPADLERLWAKVPDGAEVTVVLEPTRNAWVPLAAWLRAKGAKVVMVPPEQSADLRDYYNKHTKTDRLDSRVLARLPLLHPDGLRPIDHLGPAEPLLRAVRLRSSLVKRRTATAQRLDCLVELLGPSWADVLGTGDYNKSSLAVLERYADPRALKKLGRKRLTTLLIRASRGAWRESKADDLLVAADESIELWAGGGLDFEELAADIATEVRLLRHLTSEITAMDDRNEALYEEADPKGIVISAPGIAATLAAGILGRLGDPNRFDNLAGVRSFTGIVPKIDQSGLQNQHKGLTKAGDPGLREALFLAADLARKVDPTLAARYHRLVVDEGRHHISAVCSIAAVLVTRIAACWRRGECYVLRDVDGTEITDAEGRKICAERYKVSAEVRAARRRTGKAQQMKGAGRGRKESTEAAPASDPPTGNAIPVAGAA

SEQ ID NO: 427963 - protein, 343 aa, unidentified
MPEQKITGIDLAKTNFYLFSINAHGKPAGKTKLSRNQLLNWLVQQPKMTVAMEACGASHYWAREIRKLNHDVMLLPAQHVKAYQRRQKNDYNDAQAIAEACQHGTIRPVPIKTLEQQDVQTFLKMRRLVSMERTQLINHVRGLLAEYGIVFSKGATELRQKLPALLEDAENELTDTMRTLLHRQYIRLITLDNELEWYDSEQKKYVRQDPVCKRLLAIPGFGPLVSQAIKSWMGDGKQFRRGRDASAALGLVPRQFSTGGKQVLLGITKCGDQYVRSMLIHGARAVLFRASEKTDSLSVWVNRIREKRGFNRAVVALANKLLRIAWVIIARDEMFLPATKQNQ

SEQ ID NO: 427964 - protein, 368 aa, unidentified
MTEIIRIGVDTSKSVFQLHGVDAAEQPVLRKKLRRRDFLGFFAQLPPTKVGLEACGGSHYWARELTALGHEPKLLPAQHVRPYVRRNKNDKQDADAVCEAMSRPRMSFVRIKSAEEQAAQMLMTTRQRLIAYRTQLINTIRGHAAEFGLTAAKGPAHVEPLLARVAEDATVPPIAKELFAIHSQEYDRLKIELREIEAKLKAWHRGNEMSRRLAEVDAIGPIGGCLLAIKVPEPQAFRCGRDFAAWTGLTPKDHSTAGKMRLGVITRAGDEALRRTLVVGATSVIKQVRNGKGHPSPWLRDLVARKPPKLAAVALANKVARIAWRLMVSGERYDAARAGIVSPRPSVAPRSRRQGRCAPPAAVACGQP

SEQ ID NO: 427965 - protein, 336 aa, unidentified
MTKYIGLDAHSSTCTFNVTDERGMEVDNTTVESNGRLLVKYLRGIEGVKKLTFEECELSNWLYEILRPEVDELIVCNPVANKDYKKIKTDKMDARKLSKLLRGGFLISVYHDGSKREQFRSLMSGYQDLIEEGVRLKNRYKSLFRKSGKKVKGEALYSDESFLEGLERTDFKFIGTQIYQLLEKMEGSRQEYVKELLRCSKGFKEIKYLKSIPGIGSIQAAKIVSQVIDPERFSSKYKYYSYCGLVRHKRISDGRGYGSEKIWGNRILKCVYKMAGHSVLKGNSSLRKYYDSLRLKGISHDNAYNAVCRKIAALSLSVWRKSKKYDDRLITGNLIK

SEQ ID NO: 427966 - protein, 422 aa, unidentified
MLTRTQDDEEIIERVAALDIGKAELMCCVRVPGEGHRGKRLQEVQAYSTMTRSLLSMSDHLACLGVTRVVMEATSDYWKPVFYLLEAAGFQAWLVNAKDVRHLPGRPKTDKLDAVWLCKVAERQMLRPSFVPPSPIRRLRDLTRYRADLVAARTAEKQRAEKLLEDACIKLSAVVADIFGVSGRDMLAALVAGERDPKVLAQLARRSMRAKITVLEEAFTGHFTDHHAVLLGAMLGRVDAISADIAALDAQIAVQAAPFAELVAKLDEIPGISLVSAYVILAEIGTDMTRFPTAGHLASWARLAPGIKESAGKKKGKGSTGHGNAYLAAALGNAAAGAAKTDTFLGERYRRIARRRGSKRAIVAIGRSILVIVWHLLSDPDARFHDLGSDFYATRIDPERRKLTHIHQLEALGYKVTIEPAA

SEQ ID NO: 427967 - protein, 342 aa, unidentified
MKQYVGLDVSQKETSVCVVDESGKVVFQGRARSDPGALAELLSKRAPGAERIGFETGAMSSWLWHELNRIGLPVVCIDARHAKAVLSVRMNKSDENDAQGLAELVRVGWYREVKVKSPESQATRSLLVARSRLVAIRRDLENQVRSMLKEHGLQFSRSIGSQFWRKVLELLAEDHPLRSVIGTLLRVHEQTCEEQEKLDRQVRRLAHDDCTTRRLMTVPGVGVVTALTYRHTIDDPTRFSSASDVGAYLGLTPRRKQSGETDVSGRVSHWGDRLLRTYLYEAASVLMHRTKKWSTLKAWGIRLSKRIGMKKAKVAVARKMAVLLHCIWVDGTSFQWGSEKTA

SEQ ID NO: 427968 - protein, 344 aa, unidentified
MDHFSGLDISVKDTSVCIVDDTGKIVREVKVASEPDALLPVLTNPTYHFKRIGLEAGPLSQWLFSALAEAGLPVICVETRHMRAVLKAQINKTDRNDARGMAQMMRAGLYRPVHVKTLRSQKLRMLLTHRKLLQSKSIAIENDLRGTLRNFGLKVGIVGKLKFEARIKELVESHPDLAALVDPLLIVRRVLRQQLAVLHRRLLAIVRDDEVCRRLMTVPGVGPVVALTFRATVDVPARFHNSKAVGAVLGLTPCKHQSGESERTGAISKCGDEMMRVMLYEAAQILLVRSTRWSWLKAWAMQIARRRGMKKAIVALARRLAVIMHRIWVDGTEFSWSRQEAAAA

SEQ ID NO: 427969 - protein, 464 aa, unidentified
MIHSVGIDLHQGRHRARCLDERAQPCDSFSFQSTPEGLATLEERVFRDGSNPIIVLEPAGLPWLMVAVYLRSRRPDCRLVKAKTQKVAALRRYLRGPVKSDRLDALTLAKMPFIDPEQLDEIYLPPAKIHALQRLTRQRKRIEQDITGRKVRISAIVDGYLPGVRRAFNDVWSSPVRAFLRSRLNPFIVVRDGEAMLHAYLIKACNRRKWSKVQTREVFLACQAVASVCELSGADGTINEEFFIELQDEIARELRMLEADESESESLAHRIAELYGKLHPSDNLCTIPGVGEHTAPIFLAAVGDPTRFHNQSAFANWEGVVPGARQSSDVQAKGLRMTKAGPSIMRMALYQAGDISRRWDPQLAAVYHREMVYHGKNHRQAMGAVMSHLGARLLRVLKEDTPYVLRDIEGNSISREEAKRLIISKYRVSEDVRRERRRRNPKFGKNRETATNRTNEAAEAPQPV

SEQ ID NO: 427970 - protein, 402 aa, unidentified
MTYDYVIGMDACKYFHHACVLDIDGTQVLSKRINQNEQSLRALFSAFSAHDHKVLVVVDQPNNIGRLTVAVAQDIGIDVRYLPSLAMRQLSRIHAGNAKTDIRDAYIIAHAAKNLPESLRSVDRVEEAFLQLKVLNGIDEDLARSYTRLINQIRSALVGCYPQFEQALRGQIIHRKWVLHLLARYGGPTKIKRLGKAKAAAFARRYKARNPEPVLDAIFAAISEQTVTIAGAHYAEMGVAMSAKDALLKLEHRQQIEKEVIELINDIPHTQFLLSMPGIGPKTAAQILMTADDMSDFPSAGHLASYAGLSPRTNQSGTSIMSNSLNRAGNKKLKNALWQSSFASIRFHERSRQFYERKRREGKRHNAAVVALARRRLNVLYAMMRNHEHYHDPAPSQEDLAA

SEQ ID NO: 427971 - protein, 381 aa, unidentified
MPDVSSTAPADVRLWVALDVHKLSIVAAVLPPSGGQPEVTRIETTEKAVRRFIAKLGGPNGLAVAYEAGASGFALWRLLTSMGVACDVIAPSLIPVRAGDRVKTDRRDAKKLVGLQRAGLLRFVMPPTPELEGLRDLLRCRDDLRRAQTAARNRVLKQLLRHGRVYRDGKSAWTLMHRRWLSAQRLDDGLAHLALVQMLTHMDGIDRQLQALDAELESIASSERWGAQVQTLNRFRGIGTLTALGLIAEIGDFARFSHPRELASWLGITPSEYSSGDRQHRGHITLAGNKHARRLLIEAAWHYRHPPRRPTRGIQPDERAWQAQVRLYHRHRHMTEHGKRPTVATVAVARELIGFLWAAMTNQPLRATDPAIHDHSQEAAA

SEQ ID NO: 427972 - protein, 404 aa, unidentified
MELTAIYRCVAALDVHQSKLTVCILYENESGEIITELKEFGGFKRDRRAMADWVESFQPELVVMESTGIYWKSPYAALEKQGLTIWVVNARHVKQVPGRKTDFADAQWLAILARNGLLRGGFVPPAVFRELRLIARQMQKLTGILSGEKNRLHKILSDGGIRLGVVVSDIHGKSAKAMIKGLLAGESPEQVLKYASNRLKASEEELLDALAGDLSPSHQFVLTELMAHIDELEARIETFRQALLQGLAPYQAILRSLQTIPGLDESGAALLLVEIGDDMSAFGTPERLASWAGVCPGNNESAGKKKTGKTRKGNPYVRRILCEASNAASRTQCRLQDMFKGLLIRRGRKRAIFALAHKILKIVFLLIERGDYYRDATVDYEKLSVQRNAPRWIKTLKKYGYIAA

SEQ ID NO: 427973 - protein, 479 aa, unidentified
MSDHLIAIGCDSSKGRIDVEIRNHHGTVLHTGFFDDTPDDHAALSRLVDGLRERYPEARFLVGIESTGGMERNWLAFFRREKRWVKTMRVFKLNATAVHAFRLSQLHRAPGDAAAASDIARFLLERCATRQPSVEAESGPIVFYRTVRALSGELTATSQRLQTLLVAAQPDLVRFCRYGVPAWILALLERYPTAATLARAKPATVDAIPHIDGERAAELVENTKRSVASLTDAATAATIRLLVARMHDTQARIDQGQADLLAIIAADPQSPLAKAVELLDGIPGIAPWSAACLACEIGDPNRFAHAKAIIAWAGLDPIAEASGDERHDYGISHRGNAHIRALLFPLAMAGVLHNPVLKDFYHRLTTVNGKTHLEALVAVMAKLLRIAHAVMLSGKPFDPAHEAKRRKQADAAQAARSDTKAETPTPPPAKLNAPISRREATRRKKAAAPGAEVRDQSPKRVPGRGPQTQDPALVGQAKG

SEQ ID NO: 427974 - protein, 426 aa, unidentified
MKEHIDYLSTLFVGIDIASRIHVISALDFNQDFYIKMKPFENTKDGAGIVEKMIADVLADNHQFKYVVIGMESTGFYGVHLANYLSTSELLAPFSVRVYCLNPKEVKNYKKSFNDIGKNDGIDSFVIADFARVGRIAIKPWRGSQYLALQRLTRHRMHITECITREKTYMLNNIYLKFSEYALLRNGEHPFSNKYGATAEAILTEFTTNEDIVNSSIEKLVEFINSKSKGRIADPEETAKIVQAAARNSYRLDKCLYEPLTISIASSFNCISSFEKELKAIDKAILQTVQGLNPEEYTVLNSIPGIGKVYSAGILAEIGSIKAFQNANQLAKYCGIVWNDNDSGDFESEDSRMSKAGNRYLRYYIIEATGSVINHCPEYKAFYQKKYAETRNHQHKRALALTSRKFIRLLFGLLDKGQLYSPEKGR

SEQ ID NO: 427975 - protein, 453 aa, unidentified
MKTKSKKVKTSDKMLSIPVVNPDAAGIDIGSKNHFVCVAQDNVKEFPVFTADLHEIARHLQFHGKKSIALESTGFYWRPLFVLLQDYGFEVTLVNARHLKNVKGHKTDVVDSKWLQLLHSIGLLSNSFQPDVFTHQIRTYTRHRKSLIEDASKYITKMNKTLVLMNIQLKAVLRDIAGESGMRVIKAILDGERDAKKLEQLVSLQCESDRKDIEKALTGDWRNEYLFELQDCYDLYHYIWKKIRNIDKEIERLLTLNSKQTQHEVSKNDYKPDKKKRHHKNDPDFKVEGYAYEMTGGVDLLQIPGVGINTVLTMMSETGFNLSMFKTAKHFVSWLGFAPNRKISGGKQLSSRTRQKTNPLAKIIRDAANSAGNSKTRLGDFFRRLSYRKGRMAAITATARKIGVIIFNMLKTKQSFSYEFSQYETERMKSAKIKNILKSMKNYNISTNDLVIA

SEQ ID NO: 427976 - protein, 412 aa, unidentified
MTSISFGWYVGIDWATQAHQVTVLDAERRVLGERSVAHTGSALAELASWLTEICGGEVDRVAVAIEIPRGTVVETLLERGFAVFALNPKQLDRFRDRYTVAGATDDRRDAFVLAASLATDQPAFRRVRLDEPLGIRLRELSRLEAELHQEEGRLTNRLRDLLHRIYPQVLRLAPAADEPWVWELLELAPTPAAAQRLTRPALSKLLRAHRIRRLAADAVLAHLHAPPVSVAPGTVEAVSEHIELLLPRVRLVHAQRVRCLGRIERVLQAMAGAPPGQGEHRDVEILRSLPGVGRLVAATMLAEASQLLAQRDYHALRAQGGIAPVTRQSGTRARVDMRYHCNHRLRNALYHWGRVSAQCDLLSRQHYEALRRRGHSHGRAVRGLIDRLLVILMAMLRSQTVYDPTRRRAYAA

SEQ ID NO: 427977 - protein, 339 aa, unidentified
MKGVTVLGIDLAKSVFQIHGSDSRGKTLFTRKVSRAKLLEFVANIPPCTIGMEACGGSNHWAREFEKLGHTVRMMSPQFVKPFVKSNKNDMADAEAIAEAVTRPNMRFVAVKRVEQQNIQAIHRVRQSRVKARTALINECHGLLLEYGVVLKRASKAFFQDLAELVSPESKTLTADMKELVAGMIEELHQLDAYIAKADAKLKQIAHQNEDCRRIHEIPGIGVITATAIIAAVPDPKSFKNGREFSAWLGLVPRQNSSGGRSVLLGISKRGDSYLRTLLVHGGRSVIRLADQRTDRLSRWAAEKQRTRGTNRAIVAVANKNARIIWAVLAKKEEYRQAA

SEQ ID NO: 427978 - protein, 355 aa, unidentified
MTSTKYIGMDVHKESISIAVRNDAGKLVMECVIETKASMILQFFDGLRGDLQVTFEEGTSAAWLYDLLKPHVTKLLVCDPRKNASMREGNQNDKIDARRLAELLRLNHLSPVYHGEHGLRSLKELVRSYLTITKDLGRVMSRVKAIYRSWAIPCTGKQVYAPRHRAEWLGKIGEPGVRRRAEFYYQQLDALRTVRQEVRRELLAEGKKHKAWKRLCQIPSIGPIRSAVLLGILQTPHRFRTKRQLWTYSGFGIETQSSADHRSVDGQLQRAKKQSSIRGLNRNCNHDLKNLFKGAAIVASSKPGPFQEFYTALLAKGIRAEMARLTLARKIATIVLMVWKRGACFDAQHLKPQTA

SEQ ID NO: 427979 - protein, 330 aa, unidentified
MDSKIFVGVDISKNHLDLATLYKQEPPVLARISNSLSDINEFLASFKKIYKKHSKNIIFCAENMGIYTKFLAAALIKQKIDLYLESPLQIKRSMGIQRAKDDRIDAIKIAEYARKNHLSIRKWEKPRKCVEELATLYSIRRRLLKVKKVLRSSLPTETYFLSTSDRLSRLSYINQTLNAINDDLEKVEQAAAELIKSDKRLDTLRTLIMSVPRIGEVTAAQIIIHTNEFKEFASPKSFASFCGVAPFPWKSGTNIIKRTRVSHFARKELKALLHMAAVGFARNPVGTLGRYYTRKVNEGKNKMSILNAISNKLIHRIFSCVRNNAIYQDN

SEQ ID NO: 427980 - protein, 337 aa, unidentified
MEVWSGIDVSKDFFDASWVGPETGVEDFQKIPHARFELSRGGVQKYGRWLKQQGGANASVRVVMEATGRYSLELQVFLVAQQPTLAPAIVNPKQAKHFHQSLGLRNKTDQVDCRALGLMGKGRRPRPYEPPPAEYQQLRELMRQRRDFIEIRVAQRQRLKELPKGHCPTRNLTQAHLRKLDQLLKRLDRSLNKLLDASPQLAQDFVLLQTIPGVGRIVALTVLAELGDLRRFTRSRQVSAMAGISPYNHQSGKSPGRSRLDKNGHAEARSVLYMAALPAARKSADNHLAHTYRHLIDDNDKCKKQAVVAVARKILVIMRALLITQQPYIDDFAKAAS

SEQ ID NO: 427981 - protein, 323 aa, unidentified
MKPKFYVGIDVSKDKLDVAVKEAGTDDKFSPAKRAAKVWTTSNTAKGHGELARRLKELGPERIALEATGGYEQKAFRALREAGLPAVILQPLSVREFAKAMGKRAKTDAIDALMIAFFAEVRQPEVLPLPTENQDRIAELRGLRTDFVKTRNQFTTRLETCGAEARAHIEQLLADVEAQIAALDAKLHEALQATPEDAAKAALVLSVPGVGPVTAATLIGELPELGKLDRRRISALVGLAPMNRDSGRQSGKRRIQGGRGDVRQVLYMAALTARRWNPVIRAFADRLATAGKPHKVIMVACMRKLLVILNAMVLAGTSWSLSA

SEQ ID NO: 427982 - protein, 445 aa, unidentified
MAMRKREDDEVFPNAAGIDVGASSHWAAVPQHLAERAGCEPVREFGAMTDDLHALADWLLALGVDTVALESTGVYWIPVYEVLEQRGLTVWLVDARQMKYVPGRKSDVQDCQWLQKLMSLGLLRAAWRPGDQVCVVRAVVRQREVLLTEQANWVRRMQKALVQMNLQLSEVLTDVMGMTGQAIVRAIVAGERDPKVLARHRHSRVKASARDIERALTGNWREEHLFVLGQALAMFDSLAQRILECDAKLEALLAPLGCHEIELGGPGKRRGKNTPEFDARTALARWAGVDLTRINGLATTSVLTILSEIGPDLSHFANVKHFCSWLGLCPGTKVSGGKVLSARTRRSTNRVRQALKLAAMSLSRNDSALGAFYRRLCARMDKPRANTAVAHKLARMVYFMLTRGEAFVDQGQQHYEEQQRQRSIAALRRRATALGFQLNPVPVAA

SEQ ID NO: 427983 - protein, 309 aa, unidentified
MEIVVGIDVSKDRLDVHVWPSGEAFAVARHHAGLLELQARLDGLGPARIGVEATGGYETVVAASLAGQGHPVVVVNPAQVRAFAVALGQRAKTDPIDAAVIARFVAATRPEIRPLPDAATQLLADLVARRSQIVAMIGAEQQRRKRTGDRRLLRSLDRLVAALEKELSHVETAIDDAVRGSPAWREKEDLLASVPGVGPQTARRLIADMPELGALDRRQVAALAGLAPFTRQSGRWRGRSVIGGGRASVRSALFVAAMVAARHNPVLKAFADRLKAAGKPRIVALVAVARKLLTILNAVLRDKTPWRTT

SEQ ID NO: 427984 - protein, 342 aa, unidentified
MKITTVGIDLAKNVFQIHGVDQRDIVVVRQRLRRHQVLTYFAQLTPCLVGMEACGGAHYWARKLQAQGHTVKLMAPQFVKPYVKANKTDAADAEAICEAVTRPSMRFVPIKNADQQAILSLHRARQGFVRARTAQANQIRGLLAEYGITLPQGISHVANRLPGIIEDAETELPGLFRALLQRLVVHLRELNHQVQELEEQINAWHRNNAASQKLARIPGIGPLTASALSASIGDAKTFHNGRELAAWLGLVPRQYSSGGKPMLLGISKRGDAYLRTLMIHGARSVVRVAKSKSTPTDRWSTKLLERRHTNVVAVARANKNARIVWALLAHDRDYRMDYELVA

SEQ ID NO: 427985 - protein, 315 aa, unidentified
MPNDKEHFVGIDVAKDWFDVAILGEKRTRQFANTKKGIRDLVRWMNQIQPELIVVEATGGYEEALVLAVFEADLPVALVSPQRVRQYARAKGRLAKTDPLDAQLLAEYGKAIQPRLFVGKSEERKQLSALVGRRNQLNAMLQAEKNRLQGHSGAIRSSLETVIACLAAQLKQMDQEIRALLLQHTDLQAQEKLLRTAKSIGAVTAATLLADLPELGQLDRQEVAALVGVAPMNSDTGKKRGYRKTKGGRPDVRRTLYMATLTGIRYNPVLKPHYEQLRKRGKEKKVAITACMRKMLTILNAMMRDQQPFRYPATA

SEQ ID NO: 427986 - protein, 343 aa, unidentified
MQEITTIGLDIAKSVFQVHGIDASGAVITRRQLRRRQLLPFFKKLPRCVVGIEACATSHHWARELEKLGHEVRLMPPHYVKPYVKRNKNDAADAEAICEAVTRPTMRFVPIKTPEQQSVLMVHRTRHLFVRQRTTLINAIRAHMAEFGIVAGIGRNGVETLLELISKGEDERLPEAARECLMALAAQLELVKRQILEADRRVRAWHRASKTSKRLEAIPGVGPLIATALAASVPDPHVFRSGRDLSAWIGLVPKQNSTGGKDRLGSISKAGNRYLRQLLVVGALSVIRRAKQLGYTRHPWLVRLMGRRSTKVAAIALANKIARIAWALMARNESYQTPLPQSA

SEQ ID NO: 427987 - protein, 386 aa, unidentified
MVTPIRTRIEQETPPQSTLFLAFELGQNTWKLGFTIGVAQQPRERTIPAGALETLQQEITRAKQRFGLPEDACVVSCYEAGRDGFWLHRHLVAHGIQNHVIDSASIEVNRRQRRAKTDRLDVRKLLTMLLRHSAGETKVWSVVRVPSVDEEDRRQLHRELTTAKQDRTRVINRIQGLLAGHGVQLTLQGDVDAQLDQGQQWDGSPLPSALRTRLKRAWQQVCFLTAHIQTLEAERRALLRRHEDPVIAQVRQLFTLRGIGVNSAWLYVMEFFAWRDFQTPKQVGALAGLTPTPYQSGQARREQGIAKAGKRHIRAMAIEIAWAWRRFQPASALAQWYERRFGHGSARLRKLGIVALARKLLIALWRFLKTGVLPEGAVLKAETPSR

SEQ ID NO: 427988 - protein, 344 aa, unidentified
MEYFAGLDVSVNETSVCIVDDAGRIVREVKVASEPGALLAALKNGSYHFKRIGLEAGPLSQWLYSALGEANLPVICVETRHMRAVLKAQINKTDRNDARGIAQMMRAGLYRPVHVKTLRSQKLRMLLTHRKLLQSKAIAIENDLRGTLRNFGLKVGMVGTARFEARIRELVENLPDLAVLVEPLLMVRRILREQVAVLHRRLLAIVRDDAVCRRLMTIPGVGPVVALTYRATVDVPARFRNSRAVGAVFGLTPCKYQSGESDYTGGISKCGDAMMRVMLYEAAQIMLVRSTRWSWLKAWAMQIARRRGVKKAIVALARRLAVIMHRIWIDGTKFRWTREEVAAA

SEQ ID NO: 427989 - protein, 376 aa, unidentified
MERGSLMLNTTTFVGLDVHARSIKAVALDAMTGEVRSATFAYDAAAVAEWVGSLDPAAKCVYESGVTGFDLQKKLTALGVDCVVGAVSKMIKPSADRKRKNDRNDAEFMARMLSVGNVVEVCVPDDECEAARDLVRALDDAREDLKRCKQRLSKFLMRHGYAFSETTPTGRRKGNWTAAHWAWIRSIEFPEKADDEVLAYYIDAVRQAMEDKKRLEKLVEAEASKPRWKKRVDSLRCLKGVDAMTAADIVFEAGEFSRFKNARSFAAWLGLTPSEHSSGESARQGGITKAGNKHLRRVLVEAAWHYISASPHPKDLAKGQAPDPAARRHAAKGIRRLVKRREEMLGRGVHKNKANVATARELACWCWAVGRMVENG

SEQ ID NO: 427990 - protein, 460 aa, unidentified
MNKAKGQASEKFEKMPIVHHHAAGIDVGSRSHYVAVGQGSGDVREFGVYTEHLHALCKYLQQHAVTTVALESTGSYWQPLFVLLQHYGLNPVLVNGKFTKNVKGRKTDVQDCQWIQKLHVMGMLEGSFMPDLFTETVRQYYRHRQTLIESAASYINKMQKALRLINIRLDAVLRDVVGRSGRDIIEAILKGERNAKILASLAQATVKAPVAQIESALTGDWREEYIFELRQCYELYQYYHKKIDECDEEVRKLLTAEIARKQKEEGLKKAGDIKIVKKKVKKNEADIGLQALAVDLTGGIDLSSIEGVGLGLILCIIAETGLDLKAFPTAKQFSSWLSLAPDLRKTGGKVLSSHTRKGKNRLARALMYSANAIGNMKEGSYLVHFFKRIQRRKGRAVAITATANKLAKIIWNMLVKKTSYNPVVPAEYLDKIRRQQIKNMQTKIRQLNIREGELTFLNAS

SEQ ID NO: 427991 - protein, 448 aa, unidentified
MNQAVKLNLLDEHAAFVDVGSEKLHVSIAGGTPEVFGAVTAELHRLRDWLKSQGAQAVAMEATGVYWLPLYSVLEAAGFAVMMVNGKQTRNLPGRKSDMQDCQWGATLHAHGLLRAGFVPPEHVRRLQDYLRLRCDHIANAASCIQLQQKALERMNIKLHDVISSLSGVSGQRVIEGILAGERNPERLLELCDHSIRENKRVRVIESLRGNWQEQHLFALKQAKESWKHYQQLIAACDQEIANVLREINGPPTQTDEPKRSLRKPGVNAPDIADLHGLLVRWCGGKDVTVLPAHTDYSWLQLLGEVGTDLKAWPTEKHFTAWAGLVPGSHQSGKYRRSIGRKRNRTGRIFCVIARSLARSKHLALGGFYRRMAARRGGLLANVALARKLAVWFWRLMVHGGSYVEQGLAKYEEQVLETKRRALVRLARQLGHVVIPNFQPKETPSTST

SEQ ID NO: 427992 - protein, 449 aa, unidentified
MKKLSSERHGLPVIQDRAAGIDIGSRFHVVAVPADLTDVPVRTFQAFTADLEQMADWLVDLGVTTVAMESTGVYWIPVYEILETHGLHVVLANARDARAVPGRKTDVNDAQWIQRLHACGLLRASFHPDREIAALRSYLRLRERHLDYAAAHIQHMQKALTHMNLQLHHVVSDVTGVTGMRIIRAIVAGERDAGRLATMRDTRCKSSVEIIRSALVGNYQPEHVFALEQALAMYDAYQVQLDICDQQIAQSLMRLSQQKPSPSEPLPRPRHRTRQPNALNFDVRTLLYQLVGVDLTQIHGIGPYLALRLVAECGTDLSRWRTAQHFTSWLTLAPGCRISGGKVLSAHTRKTKNRVTAHLRLAAVTIGRTNTALGAFYRRLSARIGKAKAVTATARKIAILFYNAMRFGMAYKDPGADHYEQKYRERVVKGLHRRAAEFGFTLQTVEGVS

SEQ ID NO: 427993 - protein, 433 aa, unidentified
MGLIVPTVMQPERADQPPSYDGFVGIDWGSQQQQVSVLDRDRRRMGERVVDHDGASLAQFVAWLWGLSAGQPQRVAVAIEVPRGAIVEGLVERGFHVFAMNPKQLDRFRDRHSVAGAKDDRRDAFVLADSLRTDQPSFRRLRLDDPQLLVLRELSRAEETLLEAFRRSAKQLRDQLHRFYPQMLQLCSAADAPWLWDLIDLAPTPAHAARLREEQVQGGLKAHRRRRLKAHEVLACLQTPARPVAPGAVQAAQAHCRFLLPCLRGLAEHLQACGQQVGALLHTLAEMPGAGAGPSDVAIVQSLPGVGRKMTAWLFAEAAQPLAERDYQVLRTHGGVAPVTKQSGKRRVVVMRRGGNPRLRHALYHMARVAMQRDAHFNSVYAALRAKGQRHGQALRSIGNRLLRILMAMLRHRTCYDASRIHREPVVQMGETI

SEQ ID NO: 427994 - protein, 345 aa, unidentified
MAEAYDGRQVVGMDLHRRRSVLVRMTMDGRKLETVRVTNSPAALRAVLARCGEHPLVVLEATYGWYWAADVLEAAGAEVRLAHPLGVKAFSCRRVKNDERDAADLADLTRMGKLPEAWIAPAPVRALREVIRYRHKLAGQRTSCKNQVHAVLAKLGVPVTHSDIFGTGGGLWLDQLVLPAPYAAKVASLRALIAVLDGQIARLGQEAAGMLAGDKGYAAVRELDGIGPVLAAVICAEIGDVTRFGKAGQLCSWAGLTPRHHESDTKVIRGHCSKQGSRMLRWALAEAVQHAPAPARPGQARDAIIARRGPQARNIAKTAAARVLLTQVFCALRDGRVRSAGRPAA

SEQ ID NO: 427995 - protein, 391 aa, unidentified
MVYVGIDVAKDKHDCFIVNSDGEVLFDVFTIQNNMDGFEDLLFKIKSAEKDLGNVKVGLEATGHYSCNILGFLKNKGLTTIVINPLYTSLSRKSTSLRKTKTDKVDARTIAGMIMSDVSLKPYSDKLYHNEDLKSLTRYRFDKVMQRAKLKQSVSRLVNILFPELETLVSTLHGKAVYELLLEFPSAQHIASANLKHLTHLLNTSSKGRFKRVTADEIREAARKSISSYLPAKSLELKHTIKLIRELTSEIAEIEAEIKKIMDAIDSPILSIPGIGQNLGAMIIAEIGDFSRFDNPDKILAFAGCSPTTYQSGQLYSSHAKMEKRGSRYLRWALLNAAAYVCNWEPTFAAYLQKKRAEGKHYYVALSHAAKKLVRLLYHLEITGEVYQATA

SEQ ID NO: 427996 - protein, 313 aa, unidentified
MGEGSWVGLDVHARSVVAVVLDGVSGELRSLRAPVVGDETVVWLLQLPAPVRVAYEAGPTGYGLARACAAAGIACVVAAPSKIPRAPGDRVKTDRRDAERLARLLRLGELVAVRVPEPHEEAARDLVRAREDARGDLMRARQRLSKLLLRHGLVYDASAWTLAHDAWLRRQRFERRPLALAFDESYGAVLQAKTRRDALDRAIAELASEPPFAEVVARLVCLRGVSTLTALALTVELGDWSRFRPQSLGPFLGLTPSEDSTGERRRQGAITKTGNSHARRLLVEAAWHQRRPLRASVALEYVYAVVDDHSRLA

SEQ ID NO: 427997 - protein, 389 aa, unidentified
MKIFVGIDIAKLNHFAAAISSDGEILIEPFKFTNDADGFQLLVSKLESFDKNSIIIGPPSTAHYGDNLVRYLVAEFYQVCVLNPIKTCQMRKNNIRKTKTDKVDTFVIAKTLMMQDDLRFITFFDLDMMDLKALGRFRQKTIKQRTRLKIQLTTYVDQVFPEIQYFFKSGLHQNAVYALLKEAPSPKEIASMHMTHLANLLKVNSHGHFTKEQAKELRVLAQKSVGANDSAISIQITQTIQQIELLDSQLEKIEVEMTDIMKFNDSVIMTIPGIGYINGGMILGEIGDIHRFSNPNKLLAFAGLDPSVYQSGNFQAKTTRMSKRGSRVLRYALVNAAWNVVRNNATFKAYYDAKRAEGRSHYNALGHCAGKLVRVIWKMLTDEVEFNLE

SEQ ID NO: 427998 - protein, 403 aa, unidentified
MNSVGIDISKGRSTIAVMRPFGEVVISPFEVRHTGSELSKLARQLKSLDGETRVVMEATGNYHASVAKLLHDAGQYVSVVNAKLVHDYGNNELRRVKTDRKDAVKLANYGLDRWLTLPRYIPEEDTRLLLKNCYRQYRQYSKVQTVLKNNLISLLDTVCPNVNRLFSSPIRGDGSEKWVDFVAEFWHCRCVSEKSERAFTSKYLRWCRKHGYNFREAKAHTIYAEASGHIGVMPKSETTKLLVEQAVAQLRATSTALAALKHEMQSLASMLPEYPVVMDLFGVGSTLDPQLIAEIGDVRRFYSKKALVAYAGLDAPPNDSGDVTGRHKSMSKIGASSLRRTLFLVMSVYLQTAPLDEPVYPFMDRKRAEGKLYRVYMMASANKFLRIYYATVKAYLESLEHTV

SEQ ID NO: 427999 - protein, 342 aa, unidentified
MEHTTIAVDLAKSVFQVAVSHQPGRVDEERRLSRDRFLAFFAQRPPATVLLEACGSAHYWARQLQPFGHAVRLLAPHDVRPYVRRNKTDRTDAKGLLEANRNEEIHPIPVKSIAHQAIASLHCLRSTWLATRTARLNTIRGLLREFGIFIPVGAHHVVPAVRTLLAEPTTVPMLLHTTLAAACDEIDVLEANMRAVERQLAALAADMADVMRLQTVPGVGLITATALVALVMDIRRFPSGRHFASFLGLTPKEDSTGPRRRLGAISKQGDVYLRMLMTHGARSLLWHAKAAKQPTSLQRWAVETEQRRGHNVAAVAVANKLARIVWAVWAHERPFATDDRAA

SEQ ID NO: 428000 - protein, 397 aa, unidentified
MYIVGIDIAKRKHEAAVIDGEGAVIIKPFSFTNNCSGYNRLLAMLAKAKLPLDEVSFAMEATGHYWLALFTRLQKEGFRVQVINPVQTNSIRSFYIRQAKTDPRDALLIAEVIRFGHFSESTLHPENIYELRELCRGRHAIVSMQADVKRKVVALLDQVFPEYETAFTNLFGDTSMAILQTCPTPKELSEMPLEELCHLIEVSSHKRFRMAKAQELQALARNSFGFAMAGDVFSTMIRLYAKHLDFLKQQVREMDRKIAEIMETLDTPITTITGIGPTLGAYILSEIGDISRFSSAAKLAAYAGIDPTMRQSGEYNGVRNRMSKRGSPYLRHAIWLAASSAVLHDPALKLYFQKKRDEGKPYMASVGHACRKMVSIIYAVMRDNKAYTPCIPNEISA

SEQ ID NO: 428001 - protein, 400 aa, unidentified
MDKDRIVAGLDVHKDTIYLCVMDNTEAVIFAKVYGTLTPDLELMCSEMVSHGVTEAAMESTSTYWVPVWNALCESMSLKLVNPYFIKQLPGRKSDVKDAQWIAECLLKNLIRGSFVPDKRVQDMRKYNRRIFDLNEDLTYNSNKQDAALQRCGFRLSNYVSRVNGKSYQKCVRAIITGITDPEELVKLIHGKTLRKYGRNIIKDAVTGDFHQAGICLLKQYAELIEVIERQIEECRNALIAMCQEHFPKQFKRLQSIPGVKERAASAIIAETGADMKPFEKATNLVGWCGLKPRNDISNNKVKSNRTTHGNRFLRQILIEISWVASRTRNCFFSNFSYVQCTQRHKNKMKIQVAIARKLLVAVWHMLTKDEDFIDVYLKRLEKQAEWQNDIQALESLLVG

SEQ ID NO: 428002 - protein, 426 aa, unidentified
MADTTHVKSDCHWVAIDVARYWNAVLIETTSGERHRFKMANSAEDFDRLIEFLHGLGGRCHAALEPTGDYHRPIAHRLLQADVEVSGVSSVAQARYREAMFNSRDKNDPKDAGVILEMLKQGRVQTYVDPMLAGNHDLQELSKTYYQVSRARTRVQHSIINHHLPLYFPEMHRYWVASRNEWWVRFMIEFPTPAHVRQLACDQFVQAAWDLVGRKVNKRARLTEIWQLAGHSAALPHATDSLAVETFRMTLRHYQHITELREEIDAKAESVLCGNPDYENLKSLPGIGPVIALTILAEAGDVRRFRHHRQFLKYCGFDLAKNQSGVYRGREQLSKRGNARLRLAFWLAGQVAVRIRENSFREKYDRYISANPKDADLKRKALTAIAAKMARVAYGMIKKNQPYRRFFEQSLPSGSIPLSRAVGAPS

SEQ ID NO: 428003 - protein, 357 aa, unidentified
MKMTTIGLDLAKNIFQVHGVDEQGQVVLKKSLKRTKVLPFFANLEPCRIGMEACGGAHYWARQFERFGHTVKLMAPQFVKPYVKTNKNDAADAEAICEAVTRPSMRFVPIKPPEQQAVLALHRARQGFVKARTAQANQIRGLLTEYGLVIPQGIGQIAKRLPVVLEDGENALPEVFRALLQRLGEHLKTLNRQVEELDEQIQRWHREQAASRKLAAIPGIGPLTASALVATLGDARQFENGRQLAAWLGLVPKQHSSGGKPTLLGIGKRGDTYLRTLLIHGARGHPRRQAPIESCGKLARSVAPSTKPKCGGGGPGQQKCAEGLGAARARPRVPTGLRPGGDRGVAEPSIESPYSTK

SEQ ID NO: 428004 - protein, 358 aa, unidentified
MQTQRNKIDFKGQKIFAGFDVHLKNWRVTIMTEKLTHKTFTQDPKPEVLVNYLVENFPGGTYYSAYEAGFCGYWIHNSLLEMGVNSIVVNPADIPTTGKEKVQKDDTRDSIKIAKALRIGDLNPIYVPSIQTLEDRGLIRTRATLVKDLARYKCRIKSFLYFRGIEFPEAFSNPHTHWSNRFNKWLESIEIAEPSGKASLNALLDQSNHLRASILQVTKLIREVAKTDCYKIRQGFLRSIPGIGYLTAMLILTEIETTSRFANIDKLHGFVGLIPSTNSSGDKEMVGNLTPRGHVLRSAIIESAWVAARLDPALCKCYHDLCSRMEPNKAIIRIARKLLNRIWFVLKNNQPYVCSVVK

SEQ ID NO: 428005 - protein, 350 aa, unidentified
MEISTIGFDLAKSVFQVHAVDAAGLVVLQRRLRRSAVKAFFAQLPPCLVAMEACGSAHYWARELSGLGHRVKLLPPSDVAAYVRRNKTDAADAAAICEAATRPHLRAVAVKSPAQQAVAAQHRVRDLLVRQRTQLINALRGHLSEFGLVAARGPGGLRTLVAALAEAFDDELPGLARAALQEIVAAIEALEERLTRIDRAIVAANKESETARRLLTVPAVGPIGASAFAGLVGDPSAFRSGRDFAAWLGLTPREHSSGGRQSRGRISKKGDRYLRRLLVIGATSVLRRAGARRLDQTAPRQQARQARHGGAGQQDRPHRLGRHGPKRHLQAHRASRRMNPTTPPDTELRG

SEQ ID NO: 428006 - protein, 331 aa, unidentified
MNYSHFVGLDVGKKTFDASLMSADEKELSHKSFDNTPTGIQSLLDWIAGYHLSLSKLLFCAENMGSYVTELSVSSVSMGFSLALVCPLTIKKSIGLQRGKNDRIDAKRIVNYAVLHYRKLELYKLPDKDLVRLRGWIIIRDNLVKQKVSSIKLLETFSQMAKLADVTDSISFLEEQLKSIKERILEVEEDMEQLIAASTSLYTNYLLLRSIKGIGIINAIVLLCVTDNFQRFDNPRKFACYCGVAPFEHTSGISIRGKTQTSSLANKEVKVYLTRAAITAISWDPQMKAYYKRKIAEGKHKASVINAVRAKIIARSFAVIRRQTPFVTLAV

SEQ ID NO: 428007 - protein, 347 aa, unidentified
MDYVGIDLHKKESQICLLSGGGELSERRIRTEPRRFAEVLGGRPRARILLEASTESEWVARCLEALGHEVVVGDPNFAPMYATRTRKVKTDRRDARALAEACLLGAYRPAHRLSDPQRHVRGRLAVRDALVRTRTGSIALIRALLRQHGWRVPTGSAESFIRRVVALPLPGRLLSEVAPWLAVMRHVNQQLAYSDEVIEAVTRPDARVQRPRTVPSVGPVTAAAFVATIDDAQRFRRAHEVEAYLGLVPRELSSGERQRRGRITKAGNARMRWLLVQAAVSILRCRHPQTEALRAWATRVAARRGKKIAVVALARRLAGLLYAMLRDGTTYDPQAVRRRAAEAVVSI

SEQ ID NO: 428008 - protein, 414 aa, unidentified
MFAVGVDVSNGRSTVAVLGAQRKIVMKPFEVPHTADGFASLVEKLRGLNGEARIVMEHTGRYYEPFAMSMYRAGFFVSAVNPLVIKDYREGVDVRKVKTDRADALKIAQFALDKWEILPQYTPMDTIRYDLKTLHRQFQLSGKTRTALNNNLIALLEQSYPGVNRYFDSPVRPDGSQKWVDFVDTFWHADCIAGVSRSAFVERYRKWCKRHGYNFSERKAVELHVDARQKFPLVPKSDTCRLLVKEAVSQLRTVSRTIETYRAEMNRLAAQLPEYETVMAMTGVGKSMGPQLIAEIGDLRRFAHQKSLVGFAGTDPIKDDSGDKVSDSKPSSKRGSPYLRKTLFVVMTILLQLQLQDDPVYQFLDKKRSEGKKYYVYMTAGMTKFLRIYYGRVRDCLKARGLWEQPMLESGSSD

SEQ ID NO: 428009 - protein, 338 aa, unidentified
MTIVMGLDQHRAQITADWVDTDTGEVKRGRVAPADRAGVRKFLGRFGGQDLDVALEATTGWRFVVQELRSVGAEVHLAEPAETSARRGTKKRAKNDRADARHLRELLMAGRVPESWIPPEHILDLRARVRLRHTLADQRGEWQQRMQAVLYHHGCPQRRQLMTQDGRAWLEDLSLPASAREQVTVAVAMVDALEAQIAPLSDELRSYARRQAGCKGLMAHYGIGALTAVTILAELGDARRFSSSRHAVRYAGMDITVHQSDQRRAPGHLSRQGPPALRWALFEAAQVARRPGSPDRDYYTQAAARLGGNRACLSVARKLLKRSYHTLRELGEEALQPA

SEQ ID NO: 428010 - protein, 347 aa, unidentified
MAKVLKYAIGLDIAKDKFDACLAVIDDTQKVTIKSSRSSVLNNAKGFQHLVTWVAKYLDKSIPVVFCMEATGIYYEHLAWFLYQKGYSVSVLVPRKAKYYIRSMGIKSKDDKSDAKGLAMMAAQQTLKAWKPLSNQLYPLRQLTRFYQQLQDSRTLFRNQRQALLMGRLENDEITGGLNELIQLTEEKIKEIQLAIQKALQKDPLLWKKVQDINTVKGLGLISIATVIAETDGFALFENQAQLVCYCGYDVIRNQSGKRQGKTKISKMGNSHIRRILFMPAFNVVKYNINPFASLYDRVHARTMIKMKGYVAVQRKLLVLIYTLWKKNESYSPKMLPEKETRLSSFC

SEQ ID NO: 428011 - protein, 387 aa, unidentified
MSKKRGRVVGLDVHPDSFAGAVVEGSDPASAQVLSSSTRVELEQLEQWALRHTRKEDALVLEASGNAFAVAERLRAIGRKAEILDSHRAGKVGKVYCANDRVDAVKIARIYLSALSPIVWQPDQKTLERREVFSAYQAVVKESTRAKQQLRSMLNEHCVRLEKGFRLCHPNAITRLLRLREWTPARTMLLQQLHGSLVSARARRTVLRRHMAQEIVADEALLRLSRLCGINLITLYGVIAAVGDVRRFSHSKKLVAYLGLNPSVSQSGNFEGGGALKRHGRGALRALLIQSGKKLLEVTNPLQKWGLAVAARRGRNKAAVAVARKLCVAVWHVLMGHVVGALERLDTLETKLSKFATEMGPAALSALGYHNKADFVEKKLYVLRSYP

SEQ ID NO: 428012 - protein, 315 aa, unidentified
MSDVPCFVGIDVAKAQLDIALRPSGERWAVANDASGVATLVDRVQTLHPTLIVLEATGGLERAVTSALAAAGLPVVVVNPRQARDFARATGQLAKTDALDARALAHFADVIRPTPRPLPDAQTQELRALLGRRQQLIVMRTAEQNRLAGTSERLTKDIVAHITWLNADIATLDNDLETTLRASPLWRENDDLLQSAKGIGPVCARTLLLELPELGTLTRQQIAALVGVAPLNCDSGTLRGRRTIWGGRAHVRTVLYMGTLVATRYNPQIKVFYERLLAAGKVKKVALTACMHKLLTILNAMLKQRTPWQPQEVQN

SEQ ID NO: 428013 - protein, 343 aa, unidentified
MAYFAGLDVSVKETSVCIVDDAGKIVREARVASEPEALLQVLTNTIYRFKRIGLEAGPLSQWLYSVLAEAGLPVICVETRHMRAMLKAQINKTDRNDARGLAQMMRVGLYRPVHVKTLRSQKLRVLLTHRKLLQSKAIAIENDLRATLRNFGLKVGMIGPVKYEMRIRELVENLPDLAVLVEPLLIVRRVIREQLGILHRRLLVIVRDDDVCRRLMTIPGVGPVVALTYRATVDVPARFRNSKAVGAVFGLTPAKYQSGENDRTGAISRCGDEMMRMMLYEAAQSMLVRSAKWSWLKAWAMKIARHRGMKKAIVALARRLAVIMHRVWVDGTAFRWTREIAPA

SEQ ID NO: 428014 - protein, 336 aa, unidentified
METKTKFIGIDFSKATFDATIYEGEHCKFTNDDQGFKEFLAWVETHIDGLSLQDCLFCGENTGNYSVRLSNFLYVHHCTMWLESALRIKRTMGLVRGKDDKIDSAYIARYAARNAEDAVSYEPCCKNIGELRRLFARRQLLVSQRTALMNAGKEANVLGEKSKYDRALEKQNAKLITLLAKEVLRIEKMMLEVIQADERLSRQYQHITSIKGMGPINAIALISVTEGFTKYASDAKKLACHAGVAPFKKESGTSVNGGTHVSHLSNHILKPLLTQAALSAILYNHQIIAYYERLISRGKKSQVALNNVKNKLLHIVIGLIRKDEDYDIQYQPAPKI

SEQ ID NO: 428015 - protein, 376 aa, unidentified
MKNRKRTYRSKKKAGTSEGGRIVAVRASGELQKINEHAAGVDIGSERHYVAVPPGATEHPVREFGVFTKDLYAMADWLRDCGVEAVAMESTGVYWVPLYEALEERGFQVKLVDARKVKNVSGRKSDVLDCQWLQQLESYGLLAGAYRPQDEIVILRGYVRQRGMLVKSAARHIQHMQKALQQMNLRLDNVVADITGQTGMRILKAILAGERDVEKLGEMRDRRCHASAAVISQSLVGNYRQEHLFELKQAVELFEVYQEKIGECEAEIEKYLGSLPHVREDEPPPLPGGEKRQTLSFNVRDHAYKLTGVDLFRIKGLNSETVLRIVSEVGVDMSGFPTGNHFASWLCLSPNRRMSGGKVLSSQTNPSSNRAAAAFR

SEQ ID NO: 428016 - protein, 337 aa, unidentified
MKVTLIGIDLAKSIFQVCGVNRAGKGVFNRQIRRNRLMAFLIQYPESIVAMEACSGSNYWGRQLEQSGFKVMLIPPQHVKPFVKGNKNDRNDAFAICEAAQRPAIRCVRPRSLPQTDTLLVHRILERRKRERTTLMNQIRGLLNEYGVIVAKGKERLRNELPFILEDAENELTETARYHLNQQLLEWRDLDASIGQLEQTIKHQVKSSDQARRLIQIKGVGKMTSSAVEAFIGDGSGYRSGRHFAANLGLVPKEHSSGGKQRLGPITKRGNVYLRRLLIQGAWSVIRYADRCDDRLSRWARQLIERRGKHKAAIAVANKLARIIWAISYHQTEYRPG

SEQ ID NO: 428017 - protein, 363 aa, unidentified
MKQFIGCDAHKAYSVFVSVNEAGQAGRPVKVTHDGNCVREFLEELPSGSQIAVEAGGSYYWIVDAISGAGHVPHLAHPTASRRRIGGRHKTDERDALGCAELLRSGLLPEVWIPPRQLRDERELLRWRMFLAANRTAFKNRIHGVLRQYNLQIDVSDVFGVRGRQALTERLTQLPPYTRESLGHQLRALELCELQLEECQRQLETMLRDDAATGLLQTLPGVGRILSKVLALEIGAVERFPSAEELTSYAGLVPRAYNSGGHCRQGHCGKDVNHYLKWAYVEAVSVLVRQQQRRAGTHVIRLYQRVRRRTGSYGKAAVAVARHLAEASYWMLRRQQEYREPAGPQSKGHRGTPVDARVSASCP

SEQ ID NO: 428018 - protein, 430 aa, unidentified
MKSNTQNAKIEAITEKTLVLGIDVGSEMHYARAFDYRGIEYSKKPFKFSNTEVGFVTFKEWILDLKERHEKDKVIPGMEPTGHYWFNLGKFLQDNEMKPVLVNPHHVKKSKELGDNNPTKNDRKDPKVIAGLVREGRYMIPYLPDGVYADLRTASNIRFQLQAELTRIQNRISRWFNIYFPEYKTVYGKPDAKSGMLILKAAPLPEDILTLGIDGVNQIWRDAKLRAVGKARAKTLIEAAEHSVGSKEGAVSARMEIRMLLEDYESRNTRLQEVMVLIEELIRKIPMAEKLLEIKGVGIRTVSGFLAEVGDISRFNNPKELQKLAGLALVENSLGKHKGETTISRRGRKRLIYLLFEVTMSLVSKNQEFRELHNYYTTRRLNPLKKMQSLMAIAAKLIRVFYAMLTKGVDYDPKKMVSDIKRPAVYLQAA

SEQ ID NO: 428019 - protein, 354 aa, unidentified
MKTYYVGMDVHRASISIVVLNGAGKLVMQSVIETGAERVRGYLKQLRGKVYVTFEEGTQANWLHDIVRPLVTEVVVCDPRHNKLLNSGNKNDRVDAQKLAELLRNGALKAVYHGDNGMRTLKELVRNYDCLVSDSTRVMLRLKAIYRGRAISCAGHDIYRSDRRAQWLEKLREPGARQRASFLYAQLAALKPLRHDAKLVMVKEARRQAAYPWLMSVPQLGSVSVTQLMAVVGTPHRFRTKRQFWPYVGLAVVTRTSADHEVVNGVLRRSRRPIATRGLNRNHNHLLKKVFKSAATSACHSGPFKAGYDARVAQGMDPSLARLTIARQLAAITLAVWKRGEKFNMQMMNQQLAA

SEQ ID NO: 428020 - protein, 386 aa, unidentified
MQTVADRPEAPTAIRTDLGAIFVSLELSRSTWLITSLSPGGGEKMSKHVVRGGDVAGLLERFAQLREKTRARTGKVFPFVVIQEAGLDGFWIDRVLQNKGIESHVVDPASITTSRRRRRAKTDGIDGEALVRALLAYKRGEPRVCAMVKAPTPEEEDRRRLCRERKVLIAERVRHVNRVKGLLFSQGISGYEPLRRDRRGRLDMLQTGDRRLLPDHLKAQVRRELDRLELLLEQIKAVEAERDVLLAAQQAPAPAAMLLDIKGIGPEFAAILWSEGLFRHFDNRRQVASYAGLAPTPWQSGSVDREQGVSKAGNPRLRTTLIQLAWLWLRHQPQSALALWFEERVRRNGGRLKKPTIVALARKLLVALWKYVTAGVVIEGAVMKAA

SEQ ID NO: 428021 - protein, 310 aa, unidentified
MTILCGVDVSKSWLDAWIEPAGHQRFANTAEGVAELGAWCRAHHAALVVMEASGGLEQPAYLALWQAGQPCAIANARSVRKFAEAMGYLEKTDRIDAMMIARFADAKRMVATPPPSADQQRLVALAVRLRQVTADLGVQKQRLHSVRDPFARQSIQEAIAFFTTQASQLASEIAALIEVDPLWVALDRTFRSIKGVADRTVAYILAELPEIGTISNRAVTKLVGLAPLPDDSGQRRGRRSIRGGRAGLRSILFLVADVARRYDQSLTDFRERLLARGLSKMEVRIALARKLLVRLNAKARDVRAELAHAL

SEQ ID NO: 428022 - protein, 315 aa, unidentified
MNQVPPSVGIDVSQGTLDVAVCPGGEQWQLTNDDAGIGQLVERLRTLQPVRIVLEATGGYELAAVAALGIGGLPVVVVNPRQVRDFARSTGQLAKTDALDAQVLALFAARIQPQLRPLPDATTRELSAVLARRRQLIDMRTAETNRLKLALEAVRGDIREHLRYLDKRIQDFDHELHDRLRNSPLWREKDNLLRSIPGVGPILTTTLLADVPELGTTDHKQIVALVGLAPLNRDSGRWRGKRSIWGGRGHVRAVLYMATLSAVRRNPVLKALYQRLLQAGKPRMVAIVACMHKLLRICNAILMHGIPWRYQPLDN

SEQ ID NO: 428023 - protein, 347 aa, unidentified
MALATISVLGIDLGKNVCSVVGLDASGAVVMRRKMRRETLIGLAEKLPACVIGMEACCGAHHLGRVFAAHGHDVRLMSPEYVRPYVKAQKNDDRDAEGIAEAATRPTMRFVDLKSQDQLDIQTLHRSRDRLVGERTALINQLRAILLERGMVAPQGKRKLEQFLTVLMDEQGGEGLSPRMILLVADARAQWAELDRRIAAFDTEFIRWAKENDNARRLTTIPGFGAIVASALVAAVGHAESFDHGRDLAAWLGLVPRQFTTGGKPKLLGISKRGNKYLRKQLIHGARAALPYVAERDTPLGRWAKALMARTHHNVAVVAFAHKLARIAWAVLRRGEPFAVTGIPAAG

SEQ ID NO: 428024 - protein, 428 aa, unidentified
MSVTQEAKIRQVTENTVVVGVDIASEMHWARAFDWRGLELGKTLSFASNAEGYSQLREWCGEIMRQSEKSQVLVGMEPTGHYWITLAAELKEQGIKLVLVNPMHVKRTKELDDNHPSKSDRKDPKTIAKLVLEGRYLVPYIPEGLYAELRVCMNCRWRVVKALTATENQIQRWLKIYFPEHGVVFGSFTGAGSMALLHQAPLPEDLVKMGPDGINEIWRKLKLRAVGRKRAELAFETAKSSVGCTEGSEAARMELRILLEDYDAKQRQYEEIMAKVEELCAQIPEVQQLLEIKGLGIVSIAGILAETGDLRRFDSPRQIQKLAGLAITENSSGKHQGKTGISHRGRKRLRAILFRVSLALVKSNPEFRVIHRYYTTRKDNPLKKKQSIIAVSCKLLRVFHVIATKGCSYDGQKMLDDIRRNQPMKAAA

SEQ ID NO: 428025 - protein, 391 aa, unidentified
MIYVGIDVSKDKHDCYIVNSDGVVLADVFSVENNLDGFDLLLQRLKSVAPDLLNVKVGLEATGHYSYNILGFLLDKGLATFVLNPLHTNLFRKSTSLRRTKTDRVDARTIAAMMSSGIVLKSYTAISYHNEELKSLSRYRFDKVRQRAKLKQAVSRLVTILFPELEKLVPSLHIASVYALLAELPGAKQVASCQLTHLTNLLSAASKGHYGRSKAVEVRNAARRSIGSTMPAKSLELQHTIRLIRELDAEINEIEAAIKQFMDQIASPILTIPGISYRMGAMILAEIGDFSRFDSPDKILAYAGLSPSTYQSGKLDNAYAHMEKRGSRYLRYALYNAAKYVCHWDASFCAYLAKKRAEGKHYNVALSHAAKKLVRLIFALQRSGQPYCPTA

SEQ ID NO: 428026 - protein, 410 aa, unidentified
MTDINITRTKPVLVAIDISKARHEVLIAVPGKKWRRRLTVLNQLEDFNRLIATLSDYGCPVRVAFEATGNYHRALAYHLAAAGFEMKLVSSVALARTREALHNSWDKNDPKDAQVILHMMEIGNEQFYHDPLVRGTNDIQELSKTHDIVSKSKTELWHRILTHYLPLYFPEADRFHRSSRSDWFFAFLERYPSPHFISAMCKEAFTADAWDVVGRKVAKERLLSDIYETAKASVALPVAPDSDAISMFRLVLGEGRSLIAQRNQIEDRAIALLKDFPDYQLLTTVPGIGPINALTILAEAGDLRRFRHHRQFLKFCGMDLATIQSGTFRGQTKLSKYGNARLRRTLWMAGQVAILQRTNSFRDKFERYISKDRHNTHLRRKAYTAIAAKMARTVHGIIKHGEPYRPFFEG

SEQ ID NO: 428027 - protein, 342 aa, unidentified
MYYCGLDLHAKSSTFCFLNGEGRLKREGAVRTSVRGYREMIEAGEGEPVRVVLEASTRTSWAVQVLEKLGAEVVVVDPRKVRVIAETKHKTDRTDARILADLLRTGALPKPVWQAKRSTRELRDQVRLRWGLVRQRATLMLRARSMLASVGIELGKRALASPTTWERLEKKREIPLHMKRLLEILRRSIVQLGEAIMAVENEYAPRLTDPVVRRLQEIPGVGPVVALTTVASLGDPGRFRDSRAAAAYTGLIPSERSSGARRRRGPITKQGPSELRRVWIQAAQAALRSRHHPLEAWARKLLVRRGRGVTVVALARRLFRWAFALWRDQAHFDPKRALGIVR

SEQ ID NO: 428028 - protein, 313 aa, unidentified
MDPVYVGIDVSKDTLDFCVYPNGKEGLFRNNRVGIGRLIRMLIKVKPALVVFEASGGIEMPMYLAMSEARLPVAPVNPRQVRDFARSMGILAKTDRIDAQVIARFASAASIEPKLIPDTQDLKEMLTRRDQLVQMITMETNHLRTASRELRKSIEEHIAWLKQELVDMDTMLKGRIQQDPVCSDKDTILQSAPGIGPAVSAMLIGRIPELGNLNRRKIANLVGLAPLNRDSGQYRGKRTIWGGRSRVRALLYMATLVATRCNPVIRCLYLRLLEAGKPTKVALVACMRKFITILNSMVKHHATWSNSYTLSPG

SEQ ID NO: 428029 - protein, 404 aa, unidentified
MYNAVGIDVSKSKSTVAVLQPGGTVIRKPFDISHTSQNLNELADYLSSLDGTTKIVMECTGRYHEPMVKALSEAGLFVSIVNPHLIKNFGNNSLRKVKSDPADARKIARYTLDNWTELRQYSGMDNTRTQLKTLNSQFSFFMKQKVAAKANLIALLDNTYPGVNKLFESPTREDGSEKWVDYAYSFWHADCVRKIGLKAFTERYMSFCKKHHYIFQQDKPEKLFNASKELVAVFPKEKTYKLLIQQSIQQLNLASEHVERLRREMNELASTLPEYSTVMGIYGVGKTYGPQLIAEIGDVSRFTHREALTAFAGVDPGVDESGQHKSKSNRASKVGSARLRKTLFQIMTTLLQNAPEDDPVYRFINKKRSQGKPYYVYMTAGANKFLRIYYGKVKECLRNLEQTE

SEQ ID NO: 428030 - protein, 412 aa, unidentified
MEVLYACCCGIDVHAKMLVACLLKPGKKEVRTFSTMTEDLLRLLDWLTQEGCTHVAIESTGVYWRPVFNILEGGMEVMLTNARDAKGYKARKTDVIDAEWLADLLRHGLLKPSFIPPLPIRELRELTRYRESLVREQTALANRIQKLIESANIKLGQVASDALGVSGKLMLRALAAGETDAEKMSHLARRALKRKQPQLQQALEGRVTPAQRWILGQLLDQYDQVEAALQSVAERIRQEVDSSADPFVPEAIKLLDTIPGVGETVAQIIVAEIGVDMDRFPTDHHLASWAGMCPGNNESAGKRKSGKTTKGSRYLRAALVQAAWAASHQQGTYLAAQYKRLVKRMGKKKALVAVGHSMLVMVYHVLQNRTRYQELGGDYFDRRNVAKQRKRLIRQLESLGVKVTVEEIQQAA

SEQ ID NO: 428031 - protein, 454 aa, unidentified
MEKNLQKEKLSGLPVINFHAAGVDVGSVLMVVAYTDSQGSQWLVRTGCFTKDLKELTVLLKSEGVKDVAMEATGVYWVSLYEMLEDAGICVTLIHPGHYNKSSDPKTDAKDSQWIHQYHSCGILRNSHIASELYRELRHYIHERNVVQHQKSETLTRIQRILTLMNVKFQHLISDIEGVGGMNMIRAIASGVTDPEKLVNLIDVKRFKASREDLVSALEGIYKEHYVNLLKMKLQEYDFFVSQMRHYETFIEETLKKITAKVEKPATVLSEPLVETKSKYVRKNQYSFDAKEYLYQLLGTDLTKVEGMDEKMLLDVVSVTGTDMSKWPTEQHFTSWLNLSPRRMESGGKYLGNKKRSTTNPATQAFRISAQSVGAKSKGPLGKLFHRLVAKKGKKTATKAVARKLAVTFYTLVKNKQEYNPLFSAKRMEEQEAKKIRNLMKLAKKLGYSMQKIS

SEQ ID NO: 428032 - protein, 377 aa, unidentified
MKKVRFIGLDVHADTIAVAVAEPGGEVRSLGMIPNRPESIRKLMKKLGPPASLRVCYEAGPTGYVIYWQLTALGVHCEVVAPTLVPTKAGDRVKTDRRDAAKLARSFRAGDLTAVWVPDAAHEALRDLVRAREAAKKDQLRARHRLGKFLLRHGRRPPTAMTAWTQRHLTWIRQVQFAHPAQEATRLDYLHEVDHAVGRIERLDRAIDEAVKTAPPRMRTVIEALQALRGIALVSAVTIVAEVGDLSRFARAPQLMGYSGMGAREDSSGPRTRRGGITKTGNAHLRRIAIEAAWAYRHRPAVGGALRKRQATLSEAVKAIGWKAQLRLHARYRKLLGRGKCQQQVVTAVGRELLGFIWAIGITVERQQRTTSSSIAA

SEQ ID NO: 428033 - protein, 347 aa, unidentified
MGYFAGLDVSLEETAICVVDAAGRIVREARVASEPEALVAFFEACGMAMERIGLEACSLSAWLHAGLTQAGLPAICIEARQAKAAMGAMPNKTDRNDARGIAQIMRTGWYRAVHVKSPSCRSWRALLTARRLVLNKRRDVENGVRALLREAGLKLGTPSRKDFSARVRELAGDDPVLAGLSESLLSVIEIMTQEVDRLTKRVLDEVKVEPTCRHLMTVPGVGPLTALAFRATIDQPGRFRKSRDVGAHLGLTPRRYQSGETDLQGRISRCGDELARTALYEAAHSLLIRSNKWSALRAWGMNVAKRRGMARARVAVARKLAVILHRMWADGSEFRWGKQATAAAAAA

SEQ ID NO: 428034 - protein, 388 aa, unidentified
MDVLLSSACGVDVHEKMIEACILMQKDSEIIAIRQRFSTLPKELSAFVKWLRENQCFDIAMESTGVYWKPVYETIEREIQAKHNVVVGNAYHIKNVPGRKSDVKDAEWIATLLLYGLISKSFVPDKRIRSLRDAARTYKKCVGENCRYKCRIEKFLQTHGYKLSSVMKDIFCVTGRNLLDSLARRGSLTLEDVIICRKGRIKSSAEELFSAVDIPLDEIDKSILSFLLERLKTSEEDLKKVVKLMDEIAKPYSRQIEILDSIPGIDRIAALLIIAEISNEPQKDFASHGNLTSWAGLVPRNDESASKIYSKKVLPGNQYLKPILNQVSWSAVRQRETPFHDWFWTRQGRLGKNKAITAISRKMLKLIYTLISSNTLYNNAIALSNVKH

SEQ ID NO: 428035 - protein, 344 aa, unidentified
MEYYAGIDVSLEQSSVCVVDATGKIVREAKVASEPEALVRFFSQLEVRVTRIGLEAGPLSQWLHAGLSAAGFETVLLETRHVKAALSAMVVKTDRKDARGIAQLLRMGWYRPVHRKSADAQEVRALLVGRKLLQGKLRDVEFSIRGILRGFGLKVGEVSKGRFAARVEELIGGHAMLEAVIGAMLAARAGLHSEFMRLHRRVLAIVRTDQVCRRLMTVPGVGALVAVTFKVTVDDPGRFTSSKAVGAHFGLTPKRYQSGETDVTGGISKVGDAMVRTALYEAANVLLSRTTRFSTLKRWAIAVAQRRGAKRAKVALARKLASVLHRMWVDGSAFRWGKQAPAAA

SEQ ID NO: 428036 - protein, 369 aa, unidentified
MLRPRQQEKLARGAKDEEHAMSHKLNAGIAVIGIDIGKNSFHVVGLDRRGAIVLRQKWSRGQVETRLANLPPCLIGMEACVGAHHLSRKLTSLGHNARLMPAKYVRPYSKGQKNDFRDAEAIAEAVQRPTMKFVATKTAEQLDLQALHRVRERLVSQRTGIINQIRAFLLERGVAVRQGLRFLRAELPRILATPRDVLSSRMVRVLEGLADDWRRLDERIEGLSSEIEVLARRDAGCERLMSVPGIGPIISSAMVAAIGAGDAFSKGRDFAAWLGLVPKQISTGDRTILGKISKRGNRYLRVLFVQAAWAVLIKPTSWDRHGLKSWLEAAKKRLHHNVLAIALANKLARIAWSVLAHGRTFEASKIQAA

SEQ ID NO: 428037 - protein, 414 aa, unidentified
METVRSYSDDNCTSICFALEVTGIYSTNVYNFIKDNLNDNESIKFLNTDFVNQWRNAHNIAKSDPLDAQTISTIIGTDSDVQYVNDNVFKNKNGYQDLKALVHRHYQIKKIYSQEINRLIAQCDCLFPELQYVFEPKSAAFIAVLSSYPTTHDIINASRLEVFNVVYEATKHRCSMDKIDKLFDLCHDTLVPDNISSYGRSIILDLVENIKNIKGQLKMIERYIRDVASLNPAYKLLLTITGCGPLTAATVIAETGDIKRFKNADCFVSYSGTSPRNKRSGTSVETMGKISKRGSRYLRHAIYMIAEFARRHNPVLKQQFERIKNGNKKRHKLANIAIANKIARYIYSIMKNESGFVIFHEHIMRLPEETQNTFFNSISLDFPENTRKQIYQYSDIDGEVHKFVYTKLEETMII

SEQ ID NO: 428038 - protein, 436 aa, unidentified
MTLINFVAANQKYYAFNLLSVFIMVFWSVQYLLQHLLVRTQVSHQLLQPLILILQLPQTPQFRHARPGKFFLPVNGMDYFLPLRLTVRNVLTRRITMNIVFLGIDLAKNVFQLCGLNQAGKPVYTKRTGRKELLQTLANIPACLIGIEASTGAFYWQREFEKLGHKVKVISPQYVRPFVRGQKNDGNDAQAIAVALMQPTMQFVPPKSPEQQDIQALHRARQRIVNHRTATVCQIRGLLLDRGIPIGSAVSRARRAIPLILEDAENGLSSRMRRTIAELYDLFNDLGRRIHFFDKEIETVFRQSEACPRIAKVKGIGPKTATAVVAAIGKGTEFKNGRHFAAWLGLVPRQHSSGDRQVLMNMTKKGDKHLRTLFIHGARAVVRVATNNNDGHMNQWVNQLKERRGFNKTTVAVANKNARIIWSMLRNDTGYQVVCN

SEQ ID NO: 428039 - protein, 355 aa, unidentified
MNGIKYIGMDVHLATISIAVLDAGGKLIMEVTITTQAGALLDFIRGLSGTLQVTFEEGTSAHWLYTLLAPQVAKVVVCDPRQNPRRLGEKKSDRLDARKLAEWLRLGTLKPVYHGNTLGPALRELARSYRTLVSDTTRVMSRLKALYRARGIRCAGTRVYSPRFRDQWLAQLHEPGVRGRAERLYKQLDFLMPLRQEARAAMLAESRKHPAQKILRSIPWLGPVRVALLIALLQTPYRFRGKRQLWTYAGLALVTRTSADYQMVDGQVVRSRKPALVLGLNANHNHVLKSLFKDAAVTALSRPGPFKDFYTTRVAQGMKPELARLTLARKIAAITLTLWKKGECFSAEYLKAQAA

SEQ ID NO: 428040 - protein, 429 aa, unidentified
MRAESTPGARGPVFCGVDTHADSHWLCVLDWRGRKVLSRQFPADAAGYEALAGAIAAAGEPACVAMEGTSSYGAGLTRHLASLGMPVREALSPAGMQRRRPGQGKCDEADAERAARAAMSGSKLGTPKSQDGWVDGVRCMLAARSGAVKARTSAVNTARSLLTTAPEGLRSRFRGMGGPRLMEELPSVRAEGALGAALGALADLWAAARDAALDMERAIEASLEENCPALLAMYGCGPVSAAKLAVAAGDNPGRLRSEASFAAICGACPIPASSGKTVRHRLNRGGDRQANSALHEIARQRVMRDPETAEYAERARGRGKSDREVMRCLKRYVAREAYRALMHPHEIRRPEDASGLVAARRAAKVSQVRAASILGTSEKYISMLERGQRELKPIRRAYEAWVEAGLPLDWDRQAFEAERKMDSKKHLAK

SEQ ID NO: 428041 - protein, 401 aa, unidentified
MKSLSGGIDIGSESHHVIIMDDSGKILCDRKVSHRFSEFHEAIGEFKGIEKQHQGEITFAIEGKNGYGAPFDRILMENGFKLYNVDNLKLRRFRDVFGAEWRNDRRDAKMLAKMLKLKDHMDAEEEKAFISVEKTPAVHEKLRILSRHQQSLIDEKIRIQNRLRKRLLEVCPDILEYGDTGSKKLLQLLKKYPDFSRYKKITIAMLLKIETIGKKTAVSILEGLQDIEYVEELTGIYKTIISSYCHRILELKEEIEMLDRELEETGEKSAEVMQLKSIKGVGTKLSSRLAGEIGDIRRFNKESQLAVYCGVACINDDSGKSKKTKAVYKANRICKATMIEIAGCTIRYVQESKTYYEKKRAEGKDHNHALRCLARQLIKVIFKMLTENREYICKEELKKAA

SEQ ID NO: 428042 - protein, 400 aa, unidentified
MKVSGLDVHKDSIFCAICNGKKVEEVKEYPTFTHSIREMGVYLQKEGVKKIAMESTGIYWIPVWNILEEMGFILTLVNPYIIKQIPGRKSDVKDAQWIATLLHKGLLRGSLVPDKTIRQLRSYSRKYVRLQSDITRVFQEMERILEMCNIRITSLVSNNNSVSVKNIIEQIIQGNSSPEELACYVHGRILKAKGELVQLSLEGFIQEHHRFSLELAYEQYHLFQKQLLLVESKMEEICNAHYQEQMELLESIPGIKKQAAMQIIAETGADMTAFENSGKLTGWAGLRPKNDQSAGKMKSTSVTKGNKYLRRIMVQSAWAASRTKGSFYKSKFEQLCIRKSRKKALIAIARKLLTVTWHVLSEKKGYNKNILPTYNPEKIKHKIIYHQRELLKLESLGFSL

SEQ ID NO: 428043 - protein, 465 aa, unidentified
MRYEGLGPRLRGRVNLGPRLRGQVNLGPRLRGQVNLGPRLRGDVVRLTTPKPILPRSREGGSLMSESPALNKINGSPSGATLVVVRGQVNLMKWTPPTCNGIEVPKWKCHQPPKVGGGVMKEIKVIGLDLAKNVFQVHGMDATGGKIVSKKLKRGEVLNWFAQQPPVLVGMEACGGAHYWAHEISRFGHTVKMMAPQHVKPYVQGNKTDARDAAAIAEAAQRESVPTVAVRDLAGQQMQALHRVRDLWMKQRVALSNQTRGLLAEFGQVMPLGLARLKTEVALWQARDEPAMVVLKELITQLMTAIGELDTKISQIEVQITQLHRSNAASRLIETIPGVGLLTATAVVASFGECAQFPRARQFASCLGITPREHSSGGKQTLLGISKRGNPYIRRLLVHGARSVLTARMNKPAYADDWAVKLAIRRGHNIAAVALAAKNARRIWAMLHTGEVFRADHAQAKPACA

SEQ ID NO: 428044 - protein, 369 aa, unidentified
MKKLSTVRGRGSKIFKEHKLTIGLDLGDRSSYYYCVLDEGGKVIQEDSVGTSKKAMAKVFGSMGHCRIALEVGTHSPWVSRVLCALGHEVVVANPRQVKLISASSRKDDRVDAQTLARLARIDPQLLRPIRHRSAKAQGDLMVIRVRSALVEARTGLVNTARGLAKSLGERLPICDTDQMGIEQTKSLPAELQRVLEPLLKEVVSLTEKIKEMDRRVEQIAREDYPETKLLQQVKGVGPLIALTFVLTLEDKARFQKSRDVGCYVGLRPRRGDSGESQPQLRITKEGDAYLRKMLVQGAHYILGYRGPDTDLRRWGLKLAARGGKRAKKAAVIAVARKLGILLHRLWVTGEVYEPLRNAHAQHVKKAAA

SEQ ID NO: 428045 - protein, 345 aa, unidentified
MKAITIGLDIAKSVFQVHGEDATGKIVLQKRLRRSQVVEFFAGLEPALIGIEACGSAHYWGRELRALGHEVRLIPAAYVKPFVRRNKNDARDAAAICTAVRRPDMRFVAIKSVEGQASRGLERSRELLVRQHTQLMNSVRSQLAELGIIAAQGRRGFAELTQFVTAGDERIPAMLLWVLRLMLQQIDQLRIASAAIEAKIMAVAKADPAMRRLATIPGVGGLTAHAIVTAIGDGKQFASSRDFAAWCGLTPRGASSGLKRREGGISRQGDIRLRRLLALGASTIMRNARSRADRATEWQRGILARRPVKVAVLAQAAKTARIAWAMLTAGTTYRQPAGAAPAQPV

SEQ ID NO: 428046 - protein, 465 aa, unidentified
MISIYVPKKAKRRTIVPQVPSTKIQRNGAPGAIRTPDLVLRRHTLYPAELRARRKVPLILKHFSIPQQSVSSSIGQWSDVITTPASQRPEYTVSVFALTALGPKEAEMRIIGVDFHVRQQTIAMFDTETKELVKKILRHEGEQVREFYSALPRPVQVGIEATGSMYWFLDLLEELRIDRQVGHPAAIRATEPRKQKFDGRDALLLLRLQIEDRFPSIWVPSRELRDLHALLRHRHQWVRMRTRVQNALQAIAVSHGLRRGPSLWSQTGQHAIASLPLAPHAAHRRNELQALYCTLSTKIDELDQRVKDQALQRSGAKLLMSHPGVGPVTALATDAFLGDPSRFADSKTLTSYIGIIPSEYSTGGRQRLGGLSKQGNPLLRFLWCEAGMHAARRDPELKRFYRSKLHQKGLGKVRVAVARKLGIRLWIMLRDQIDYQEFCRRGQLRQKSGAARAGMPEGVHSPATS

SEQ ID NO: 428047 - protein, 395 aa, unidentified
MKNDKFAFFIGVDVSKDKFNCAIINNKLELLKEAEFQMDIDGFNSFYDLIKKYDSSIIALESTGSYHINLLASLVSKKKDVCLINPALIKKFAQSVTLRKTKTDKIDAVIIAKFIAKNIEHFNYFALPESNDIIALARMREHITQQIARVKTQLKQHLTVVFPELVANANVFTQSILHILKHMPTAEIIRNANEDDIQKILDELKFAHKSNITPQKLISLAKSSIGISSDIWATVIKEDVEMLIFLNSRLDNITKEFIDKIKSSKKDDMEIITSIKGINDITAAHFLAEIKDINRFANKGKLAAYAGIDPAIKQSGSMYSNGRISKKGSRSLRRILYLMASGVMKFNEYFRAYYLKKKEEGMPHRKAMIALCNKLVRVLYAMLTKKEVFHMPKLS

SEQ ID NO: 428048 - protein, 316 aa, unidentified
MSDTLYVGIDVAKDSFDVASDPAGLAWSLPNDPTGRQRLLDGLQAHRVALIVLEATGGYERSLVAELIGAGHKVVVANPRQVRDFARGIGQLAKTDRIDARVLARFASMVKPEPRQKASEQAVNLAELVTRRRQLSDLMTQESNRLPHARHPDVRRSLKKSLRALEGQIDHLDKLIRQNIDSDDGLRRKDEIVQSFKGVGPGTSAMLLSHLPELGRINRQEIAALAGLAPWDFKSGQWAGQSRIWGGRMPVRNMLYMAALSAIRFNPIIRKFYQRLESHGKLFKVCITACMRKILVILNTLVRNDCLWSPPLPKNA

SEQ ID NO: 428049 - protein, 345 aa, unidentified
MKEVSIIGVDLAKQVFQLHGATAEGEVVFRKKLSRKQFLAFMQRHPGCLVAMEACATAHYWARTLAPIGHEVRLIAPKFVKPYLKNQKNDMADAEAIAEAASRPTMRFVEVKTPEQQGLGMIFRLRNLLVGQRTQTINALRGHLAEFGLIAGKGRENIDKLRAALEPGHDGTKDLPPAVHHMAQLCFDQIDDLSRRIAELDAQIAAASKRSPFSARLQKMPGVGPVTAMALAAFAPPMETFRQGRDFSAWLGLVPRQHSSGGKQRLGRTSKSGQRDIRRLLIIGAMAVISGAKIKPPAENSWLGRMLARKPRMLAAIALANKMARMLWAMITKDEEFRGGPLMAN

SEQ ID NO: 428050 - protein, 332 aa, unidentified
MKILETVGIDVSKLVIDVIVHSNQCFSQFENTPNGLKKMCKWAFKESSHSAENVLFVFEHTGLYSHTLAVYLSENDIPFAMVPGLEIKRSLGITRGKDDKIDASKIARYAFRLRDEIKPYKLPAKNILKLKSLLSIRDRMVKQRAGYKASLREQKRVYQCNENKVLFSTQENITVQLTKQIGLLDSTIMDIVLSDEQLSNTYKLITSVKSVGQQTALFLIVHTDCFTKFGNSRKFASYCGIAPFPHKSGTSIRGRTQVNSLANKKIKTLFDLCAKSAILHNPEMKKYYNTRVEQGKSKMCVINIIRNKLLSRIFAVVNRQTPYVDLQLYCNN

SEQ ID NO: 428051 - protein, 400 aa, unidentified
MRVIGMDIHRSFAQVAILEEGRIQEECRVDLVHHRFMDFARTLRASDEVVIEATGNSAAVERLLRTFVKRVAVANPRLVKAIAYARVKTDKVDAKILAQLHAAGFLPEVWVPDEVTLTRRRQIAERMGVLAQLVRTKGRIQALLHANLIPQYKGHLFGPAGRRWLQSLPLESEERGMLGRYVDELERVSGQLANLDKVLAQQALDDPRAKRLMTIPGVSSVVASTVLASIGDVRRFPTPEKLSSYFGLTPRIRQSGDHLARHGRITKQGNRDARRMLVEAAWSAKTAPGPLRAFFARTQRKRGAPTAAVATARKLVVMIWHILTSDRDYAYARPAFTAVKLRKVALKAGAPTAYGKAGPGRDYWIKEIRQREAAYVELAERAYERMVEAWSQQPRKSAPR

SEQ ID NO: 428052 - protein, 343 aa, unidentified
MDIVVLGIDLGKNSCSLAGLDASGRVILRRRMRRSSVESFVNGLGRCIVAMEACCGAHHLGRVFVAQGHSVRLMSPEYVRPYVKAQKNDELDAEAIAEAATRPTMRFVTVKSQYQSDVQALHRARERLVSERTALINHLRALLLERGIVAPQGRRKLQEELAVFADEDGIEALSPRIRLLIEDLRSEWRALDERIAAFDAEFVRMAREDEAVRRLTTIPGIGTINATALAAAVGNARAFRRGRDMAAWLGLTPRQMTTGGKPRLLGISKRGNRYLRKNLIHGARAVLPYLVERETPLGRWARGLLARAHKNVVVVALANKLARIAWAVLARGCTYEAAGEAAA

SEQ ID NO: 428053 - protein, 350 aa, unidentified
MSTILGIDLGKFKSVVCVFSTQDGEIRFENLPTHPKTFHHLLARIKPDMVLFETCTAAGWVYDLCKELKFPCRVVNPLGEAWQWKKVKRKTDRDDAHKLVRMYLLGELPTVHMTSIEIRQQRALVNFRQRLIAQRTGIQNHIRALFQAQAITMPPARQAWTAQARAEWSTYARPIHDCAPDQMWRGFLQADLALLEALETQIAQIEKQLDSLGKANPKVQLLTTIPGVGVRTAEAIVAFLDDPHRFHNSREVSAYAGLVPRRFQSGTMDRRGGITKRGPSRLRKLLVECAWMVRRYNPWGAEVVERISKGQKGRVKSAVVALARKVLVCCWTMLKKGEPWRSPGAAPQAT

SEQ ID NO: 428054 - protein, 387 aa, unidentified
MSKKIVAPAYVAAMARAEADPAAARFWVGLDIGFKSTAVCVVDVDGAVVHQVSMKSHATEIGRYLRRNFKSHVTLIGMETGGLSPHLAGKLREQGFQVAVLDALQVHRVLSVKRNKTDTNDARGIAEITRSGRDYLTEVYVKSNLCFEVRASLIMRDRLVKQRRETEAMIRGLVRVYGGRIEPGSDSPATFRERAIDQLCLTADTEGVDLRPRVIPLLDLCERFYIEAGRIERELDLLAASNPVCKRFMEIPGIGTITALSFYSAIEDPTRFRHVDDVAAYLGLTPRVYQSGESLTHGGISKMGNQLTRTHLVGAATVMLANTKSFSTLKDWGMKLSKRVGFNKAKVALARKLAIVMFSLWRDGTHFMAKASDVGPHRDLMQARATA

SEQ ID NO: 428055 - protein, 355 aa, unidentified
MIIIGVDFHPEFQQIALLNTTTGEVEEKRLAHPDEAEKYYRALASAGETVRIGMEASGHGRWFERLAAELQFDLWIGDAAEIRARRGRKQKTDRQDAQHILKLMLKDDFPKIWVPSWENRDLRQLLWHRHRMVQARTRVMNQLQAVALNEGVQCKKKLWRERGRQQLESFALAPWASRRRRDLLDLLDRLNPPIAELTQAIEREVENYPAAQRLRTHPGVGVLTALAFVLILGDAERFRCGKQVASYLGLVPLEDSSGNRRRLGHITKQGSSIVRFLLVEAAQVTVRSLPEWRSKYFHLVLRRGRKIAKVAMARRLAVQLFWMMRKQWDYEQLKKFGSQGRKLCSHTVVTKGSTR

SEQ ID NO: 428056 - protein, 353 aa, unidentified
MEQFIGCDAHKKFSLFIAMNQEGGYGKPMRVSHDREEMRAFLKALPPASKIALETSGSYYWLVEEMERAGHQAQLAHALTAKRRMEGRHKTDERDARGLAMLLRNGTLPRVWIPPAELRDQREMLRWRMSVVESRSQVKNRIHGVLLRYNVEAQAADLFGQAGREELEQLLGQLPEWSRQSVQEQLETIDHLDQQIEECEQKLETLLEASAERDLVKTLPGVGPILSAVIALEIGDIGRFATAQNLASYAGLVPAARESAGKKRPGKCPADCNTYLKWAFIEAGNVVSRFQEKWRDRHVAQLYRRVKHNSRMHGKATVAVARHLAEASFWMLTQQQIYREPNGKRNVLSSTHG

SEQ ID NO: 428057 - protein, 371 aa, unidentified
MNIVTQPAPGRDAAGPVEPVAVVGVDTHTDTHTAALLGRTGAVLAHLVVAANPAGAAQLQAWAAQLAPAGGPLCWAVEGTRSHGVGLTRHLQRAGQHVIEAPRPRRRGRRTGKSDQLDALAAARAVLAALDSGTAHTLATPRADGDREALRQLLIVRRHYTDTRTATVNLFKSLILTADDPLREALRKLSTAGQVRALLTASVPAPAQPDTDSTLRRAHLAELAADIRTLNQRLYANNKQLTARIDTIMPSLLAIYGVGPVTAATLLITWSHHGRCRSEAAYAALAGVNPIPASSGRTNRHRLNRGGDRQLNAALHTIANTRRRNHQPTIDYIHRRRTDPQHPRTDREIIRSLKRYLARHLYRHMQTHTRP

SEQ ID NO: 428058 - protein, 338 aa, unidentified
MIGILLVIAAYQDTVMSLTSQLVTPLGVDIAKAKFDVATLVDGKYKTKVFPNTPAGFEAFLTWLRPFAPVHVCLEATGRYGEALATYLVEQGITVSVVNPAQIHAFGKAELSRTKTDKSDAKLIARFCHLHQPPPWQPLPPAVRELQARVRRLDDLLEMRQMEHNRQDGADATVQPSITRLLDLLDTEIAQTRTAIHDHLEQDSDLRKRRDLLDTIPGLGEATIAVVLACLGDIQRFDNAKGVAAFAGLSPAERQSGKYKGQTRLSKTGDALLRKALYFPAIVAGQHNPVVRAFCERLKAKGKPGKVIVCAAMRKLLTLIYGVLKSGCPFDPKWALAN

SEQ ID NO: 428059 - protein, 358 aa, unidentified
MFYLAIDQHRKQLTVNLRNEHGDVLIKRQVSTRWEPVRKFFAEIRDLARPDGGFTAIVEVCGFNDWLLEMLRQFECRETVLIQAERRSKRKTDRRDADALGELLWVNRHRLLGGQKPHHLRRVILPSRESRENRQLAALRRRLSQCRTQTINKVRHLLRKHNLDQECPTKGIDTKAARRWLASIALDEIDRLEMNLLLSQWQLFNEQLARVEEKLSERHRCSKDAKLLSTIPGAGIFNSIGLTASIGDIHRFPTPQSLPNYWGIVPGCRNSGEATDRLGSITKQGSSMARFILGQMVMHVLRRDARMRDWYRRIKHRRGSKIARVAVMRRLAMIIWHMLKHGRPYVLNGLPPVREPSV

SEQ ID NO: 428060 - protein, 366 aa, unidentified
MFKVGEKSKSVSADRDGSRDHIVKRRGSMSQLSKSATGVVFCGIDVSAATLAVAVEQQDQPVVEREFPNNASGHKALIGWLGQRGHARVSLEATGVYSLDLALALDAAEGIEVQVLNPKVAHRFGQTLSRSKTDPVDARTLAVYSRRMEFTGWRAPSRSQMQLRSLTRHIDNLTAELTRGKNRLHAAKVSDMTPACIVEDLQNALESLECRIHVLRREALALVRADAVLKENFELLISIPGIARVSALQILGELVVLSPELSVRQWVAHSGLDPAHHISGSSIHKPSRISRAGNRALRRVLYMPALVAIQHDPHIKAFYRALVHRHKAKMQALIAVARKLLHAIYGVLKSATPYNGQKLFPQIQTI

SEQ ID NO: 428061 - protein, 346 aa, unidentified
MQIVGCDFHPGQQQIAVLDTETGEFRELKLMHADGQAERFYRELAAPARIGMESVGNALWFERLMERLGHELWIGDAAQIRRSYVRRQKTDRRDAGHLLKLLLEERFPRIWVPSQEQRDQRQLLLHRHRLVEMRSRIKNELQHLALNQGVQKKRQLWSVRGRAELEKLPLAGWTARRRADLLALLATLEAQVEELDQAVAVAAEGNAQARLLMTQPGVGPITALAFVLTLGEVSRFPGSKHVASYLGLIPSEHSSGSKRRLGSISKQGNVFLRTMLVEAAQSAVRHDEQFRKAYRQRCHGKPKGVAKVAAARKLAVRLYWMWKTNTPYPQVVHTEGSPSHPVLGTS

SEQ ID NO: 428062 - protein, 398 aa, unidentified
MTRKNTLKSLPTDTEFRVIGLDLAKSDVSVAAIPVDDNTPSLVDRMTYADLLDWAGKISPTLFAMEPCNGYSLLCLQLENLGHEIKVISGSTVSMWINTHLSGQKTDLNDAIALARLAVSDAELTPIRHKSITEIRIQTVQAVRQQLMSQRSKSIVSFKALAQQWGIPCAAGHRNLKKLRESIEAKVDLITRPVANAMLFLLDAVKSLDRQIGQLNQTLQELVMSDERGRLLQSVLGVGTQISARVITVVGNIERFNSPRSLVAYVGVAPRNFITGHKNLTKKKHGNCPDLSHKGQGKISRRGDKLLRSLFIQGAACLYMQFCKDQLPECQLKRWILKQLARQKPYGKLIVSLAAKLIRIVWAVLTYGEKFNIQKAGMTRSMWSEMALETPLNKEVPA

SEQ ID NO: 428063 - protein, 346 aa, unidentified
MIIVGCDFHPAWQQIAVFDSETGEITEHKLIHGDGEAEQFYRRLPIASRIGIEACGNSQWFVDLLQRLGHEVWIGDAAQIRASYVRKQKTDRRDAAHILRLLIEGRFPRLWTPSAEERDLRQLLVHRHKLVAIRTRVKGGLQHLALNRGLQKKSKLWTAAGQKALRELPLDTWAACRREDLLGLLASLDKQISKLDAAVERAAEEHPQARLLVTQPGVGPITSLAFVLTLGDVSRFQRGKQVASYLGLIPRERSSGGKQRLGAINKQGNSLMRTLLVESAQSVTRLDPGFRKQYLHRCHRMAKGVAKVAAARRLAVRLFWMLRTNTEYPEIVRIESSPTLAVVSES

SEQ ID NO: 428064 - protein, 312 aa, unidentified
MEAKFVGIDVSKATLDVDCLPVSTARQFSNDAGGIAALVEWLLGSGVGRIGVAADGWYVIAVASAVAAAGLPVVVFNPMRVRDFAKAQGVLAKSDRLDARVLALFGERIAPPVRALPEAAQRDLTELLDRRHQLVSMRAQEQARLATVLPVARGDVEQHIAWLDQRIRKHETVLLKRLRANEIWDAKVKLLDSVPGIGPVNLFTLVGRLPELGSLNRQQIAALVGVAPFNDDSGKRRGQRYIRGGRAEVRCALYMATLTAKRCNPVIAQMFERLIAKGKPFKVAMTACMRKLLTILNAILKSTQPWENRLAT

SEQ ID NO: 428065 - protein, 375 aa, unidentified
MVKNSTAFVGIDLGDKRSNLYVLDPEGELIEETRIPTTESAFRRKFASLPPCRVAMEAGTHSRWASRLLEQLGHEVLVANPRKLRLIYGDPRKADEADAEHLARLARLDPQLLSPIRHRGPEAQAHLTVIRSRDSLVRARTLLINHVRGSVKSSGARLLACSADSFHHRVEPSIPAELQPALLPIIETIASLTAQIHAYNRQIEQLCQKQYPETQGLRAVGGVGPITSLAYVLTLDDPDRFRKSREVAPALGLVPKRDQSGDRDPQLRITTPSRCPCGKTGDSYLRRLLVGSAQYILGPFGPDCDLRRWGLKLAQRGGKNANKRAVVAVARKLAVLLHHLWVTGEVYDPFYHSHPDQTSVTQTNLLVPQPEAVCT

SEQ ID NO: 428066 - protein, 343 aa, unidentified
MEHYAGIDVSLEESSVCVVDARGTIVREVKVASEPEALVRYFDELELSVGRIGLEAGPLSQWLHAGLVAAGRDAVLLETRHVKAALSAMTVKTDRKDARGIAQLLRMGWYRPVHAKSVTCKDSRALLVGRKLLQGKLLDVELSIRGILRGYGLKVGEVSRGKFEARIRELTAGHVTLETVIGAMLAARTALWCEFTKLHREMLKIARADKVCRRLMSTPGVGALVALTYRSAVDDPTRFGKSSTVGAYFGLTPKKYQSGETDRDGGVSKVGDAMVRTALFEAAHIMLTRATRFSGLKHWALDVAKRRGMKRAKVALARKLGVVLHRMWVDATDFRWSRAAAMA

SEQ ID NO: 428067 - protein, 376 aa, unidentified
MRRVIGIDVHRTFGEVVFWEDGRLRHAGRIDMTRTALEGLGKTLLTSDEVVAEATANSMAVSRVLAPFVARVIIANPLQVKAIAQAHVKTDKIDAGTLASLRAAGYLPQIWTPDAETERKRRLVARRYQVVRHRTRLKNEVHSILHAHLIPKCPHADLFNARGRAWLAAQQLPDDERAAIDRHVRELDRLAEDLALLDCEIAQVAIDDLAVNRLMTITGVNLAVAAGIVAAIGDISRFDSPQKLVSYFGLNPRVRQSGLGAAHHGRISKIGRSHARHAGRGGLGRGQGARSTACFFRADPRPAWPSGRCGGRGSQAHGALLAFADEGRGLPVGAPGAGRQQDPRDATSSWTSATEGAAGVDQPMPTTSRRCATVRC

SEQ ID NO: 428068 - protein, 419 aa, unidentified
MSFKILKFNCCGLDVHKTWIYACIGITDSNNRTEYKQARFSSFTKGLNELCDWLAKYNCKDVCMESTGKYWIPVFNILEQHNLWVTLSHPKYTKPMKGNKTDRKDAKWICDLYMCGMVKPSFIPPADIRELRDLVRYRYKLTCMITGEKNRAQNCLTVSNLKLDDVFSDVFGKSSRSITEQILQHPGEKFDVAPFVHGRCKTPIEEIQAAVDGAISKEQAVKLRQCLDHIDELNKHISELEQEILRLSDKYEAALNLIRTVPGFDKNPMTAIQVLSEIGGDMSVFPTAKHLVSWAGCCPRNDQSNQKIKSTRISRAGSYFKPVLVQVANALIKSKKHPEFTNRYKRIKARRGHKKAIIAICRMILTAIWHILSDLEPYTPEGFLESRPVKEEKVLSTSQALNLLKQRGYIIKDEPLAVS

SEQ ID NO: 428069 - protein, 357 aa, unidentified
MQRKNTTLNFKGQTFFIGLDVHKKSWNVAIRSNELLLKTISMNPNADELWKYLNNNYPNGEYKSVYEAGFSGFRAHRELIQKGIHNIVVNAADIPTSSKEKMMKTDPSDSAKLARELENGNLENIYIPDDLSQELRSFCRLRYQTMQNQTRIKNRIKSYLAYYGHNLPENHLLVHWSGRFIEHLKTLEFIYPLGKEQLDIYIAELLEIRSRHLLVLKTIRKYIKEYKRQDDLELLLSIPGFGYTTALTFLTELIDINRFPRFDQLAGFVGLVPSTRSSGEKDRTIGLSNRFNKYLRTILIEAAWVAVRSDPALVLSFSQLTKRMSKQKAIIRIAKKLLSRMDHVWRNRTKYVFSVVE

SEQ ID NO: 428070 - protein, 351 aa, unidentified
MEEYIAFDSHKHYTWVEHEQVATGRVRQYRLQHAPGAIRRVLAGCEPGTPVALEATANWYWIVEEIEQAGLRPQLVHPRKAKLMMGLMNKTDKLDAHGMNRLQRNGTLPTVWIPPGRLREFRELTRTRVVLVAQRTRWKNRLTATLAKYGAPSSEYSDPYGKGAREELDSRIERLPEQTRWAARQMLAQLDTLSEQILQFEGRLKELVEVTPEMQRLMTLPGVGVILAATIALEIGEIERFPSAEHLASYAGTTPRVHSSGDRVRYGGTRPDVNRYLKWAFAEAGNSVAVNHTRCPARHVSQLYLRLRLRKGHGKAIGAVARHLAEAAFHVLSRQEAYQDPTVRPGRTREV

SEQ ID NO: 428071 - protein, 359 aa, unidentified
MQTQRKELNFEGQNIFVGIDVHLKSWNVSIYTEDLYHKSFNQPPNAESLSGYLKLNFPNAIYHSVYEAGFCGLHAHYELTNLGIHNIVTNPADVPTTDKEKKRKTDKVDSNKLARSLRNKELKGIYTPSQDILEDRSFVRIRSSIVKDLSRMKNRLKSMLYFYGIEFPEEFQKGSTHWTKRFMVWLKTIQLKSHSGNMALAMLIKEAEQLRTLLLEVNKELKILSITEKYAKKMELIRSVPGFGLITGMLFLSEIENINRFENNNKFAGMIGIVPDCHSSGDNEQIGEISPRRNVHLRSGLIESSWIAVRIDPALSRAFSVYCKRMEPNKAIIRIARKLSNRIYFVLKNEKKYETRIVK

SEQ ID NO: 428072 - protein, 418 aa, unidentified
MKVVFPTCCGVDVHKSFLVATIIKTSQNSLQPSYQKKRFSTFNSDLNRFADWLRENDCLDVCMESTGKYWVPVFNILEKQAIRVVIANPKWVKAVKGNKDDTKDSKWIGDLFRIGLVKSSFIPNKDIRILRELTRYRYKLISMKSSEKNRFQNAFTVCNVALDSVVSDMFGKSATAITDYLTSDVEFDAQHCLSLLQRSLKKKAPAILEAVEGHEIAPEQKTRIGIVRDHLHYIDKLVERVDDCVEGMVQKHEGSITLLRTIPGVDRSSAITILSEIGIDMAQFGSSKRLCCWAGLTPGNNESAGKKKSVRISRAGVYLKPALVQVAHAAVKDKSSTYYAVKYERISKRRGKKRAIIAIARMILTAVFCMLSTGEVWSPVDLYKVDMPEHLKEKQLAKAVKQAVHFLETQGLTVLDFA

SEQ ID NO: 428073 - protein, 424 aa, unidentified
MNLTQNDRIKQVTSDTLIVGVDIGSQTHFCRAFDWRGFELSRRVFKFSNTGMGFLTFLRWTEELMNKTEMKKVIVGCEPTGCYWLTFQKFLQDHDIQLVTVNPFTVNRSMELDDNSPEKSDLKDPKTIALLVKDGRYSTSYLPSGVYAEIREASVCRDQIMKQHVRLSNQIQGWLQKFFPEYFECYAEWDSTSGLMLLKEAPLPQDILKIGAGGINQIWRDAKVRAAGIKRAQILVEAAQNSVGLEAGEAARIEIWVLVNDYILKAEQLKRLDEYLEEKVKEVPNVEKLLAIKGVGMSTVIGFIAEVGDIGRFTDPKQIQKLAGLEIVKKSSGKKKGQPRISKRGRRKLRRTMYESARTLMQWNPAFQDVFLYYRNRKRKPLGSMQAKIAVACKAIRVFYVVLQTGCDFDEEKFRRDIIRPEAA

SEQ ID NO: 428074 - protein, 344 aa, unidentified
MYFIGVDHHKQASVMTVVDKDGLELKTGRMPNLRAKVEGFLSGFRPFTAVVEAGRSSYVMADLLRELGGEVKMANPVEVKAIAHARIKTDKRDSRTLAHLLRAGLIPEIYQRDVWNRRAQRVMRMRAFWVRKETEVKNKIRALLAQQREDVRLEVDKWERSLFNLKGLEFMARLPLEGRDKEVLDDLLEGYREIQAHIKKSDGLVRALYKELEEARRIDTIPGFAATLSVVTAVEIADVRRFPRVEELHAYAGVIPSTYSSGERTYHGRITKQGNAWLRWAAIEAVYPAVKKDLALRVLYSRLAKRKGPNVAKVAVARRLLTIIYRVLSEKRDYIPEMKQQSAA

SEQ ID NO: 428075 - protein, 357 aa, unidentified
MLSSNVKYIGLDVHKDATSIAVLNGVGKLVMESIIETKAATVLEFLHGLRGELHVTLEEGTWAAWLYDVLKPHVEEIVVCNPRRNALLKEGSKSDKVDARKLAELLRAGLLRAVYHGENGLRTLRELARSYLTISKDQARVMSRLKALYRSWGIPCSGTQVYAPRHRDQWLSRIAQPGVRRRAELFYQQLDGLLVVRHTVRGELLTESRKHQAVKILRQIPLIGPLRAALLLALMQTPHRFRSKRQLWTYSGLGVETHDSAQHRYVDGQLQRSKKPQQIRGLNQNHNHEMKRIFKSTAMSASRCAGPLQDFYARLLAKGMKPEMARLTLARKIAAITLTLWKKGEHFDAEHLKSQAA

SEQ ID NO: 428076 - protein, 349 aa, unidentified
MSNNVTHFFGLDYHQDSIQVCVLDGEGKILINKKVPNSIGALVVLAEQYGPVTRAAVEACAGAPCLVETLRHVHGWKIEQAHAGYVARMKQSPDKSDYTDARILADLARVDYLPVVWSPPKYIRTLRDFVRHRAALVKSRTSEKLRLLALLRRNRAKSEHKRWSKDWCLWLSETYQIDEDSRWLVLEHLETILFLNGKIETIEARLKKFTADDPLIGILMKQKNIGPITAWIMRAEIADFSRFKNGKQLSNFCGLSPRNVSSGNRQATSGLIKSGAPILRCVIIEAAQRLSHGKGDESVLFNRLHHKNGKPKCVAIAAVANRWIRKLFHVINAEVRQWALAKEKETTAA

SEQ ID NO: 428077 - protein, 334 aa, unidentified
MEKVTTLGIDLAKSVFSLHGVDGAGQVVLRRTVRRDQLVKVVASLSPCLIGMEACSGAHEWGRRFQEHGHTVRLMAPKFVAPYRKSGKNDGNDAEAICEAVTRPSMRFVPVKSLEQQALLAIHRVRQGFVVERTATINRLRGLLCEFGVVLPLRSVTVRRQAAQAAENLPDLARRAIGDLLDELRSLDERIGGYDREIEAHAKLCEPAQRLMKIRGIGPTTALAIVATVGNAREFKNGRQFAAWIGLTPSQYSTGGKARLGHISKRGDAYLRNLLVQGARSVLNSAGMHPDRMSRWILELQPRRGYYRTLVAIANKNARIAWALLAKNESMRSA

SEQ ID NO: 428078 - protein, 399 aa, unidentified
MNDEYGVYLGLDVGKGDHHAVGLAPDGKRLHDAALPNTEVRLRQLFDKLARHGRVLVVVDQPASIGALPVAVARAAGHQVAYLPGLAMRRIADLHPGSAKTDARDAYVIADAARTLPHTLRRVDTGDETLAELEILVGFDDDLAGEATRVSNRIRGLLTQIHPALERVLGPKVHHKAVLELLSRCGGPVGLRKAGRRKLLSIAAVHAPRMGDRLVEQIMAALDEQTVTVPGTQAAETILPRLADSLRDILRQRDQAAAQVERMLDAHPLAGVLTSMPGIGVRTAARILLEVGDGTAFATPGHLAAYAGLAPVTRRSGSSIRGEHPPRGGNKNLKRALFLAAFAALADPVSRAYYDRKRAEGKRHNAALICLARRRCDVLYAMLRDKIPYQPRPTTPIAA

SEQ ID NO: 428079 - protein, 312 aa, unidentified
MTQACAAGVDVGRDYLDVGLAPSGTVFRTSNGPSGIEALVARLKRAGASKVVLESIGGYGARLVRALAVAGFEVGVIDPKRIRALRIAEGRRAKTDRLDAALIARFALIMQDAARPVPDAKAFEIRALSTRRRQLVEMAAMEKTRLKQTLDAAVADSCRQMIAMLSAERARVEALLQAQLLARQDGPERASLLQTIPGVGPAISMTLMADLPELGSLDRKAVASLAGLAPHPNQSGTRTGQAHIGGGRPCVRAALYMAAVSAARTDKGFKREYLALRQAGKPAKVALVAIARKIVVAANSIIKANQPWQKTA

SEQ ID NO: 428080 - protein, 373 aa, unidentified
MKKNIRFVGLDVHAETVAAAVADSDGEVRSLGMIPNRPESVRKLVRKLGPAHSLRVCYEAGPCGYVLYWQLTEMGVHCDVIAPTLVPVKSGDRIKTDRRDAQKLARCYRAGDLTPVWVPDEAHEALRDLVRAREAAKKDQLRARHRLQKLLLRRGLRPPEGIKTWTPRHLAWVKTLHLAPAALDATLLDYVSEVDHANERIERLERAIDQAIEAAPAQIRALIEGLQSLRGVARISAATIVAEVGMLSRFRRPKQLMGYTGVVSREHSSGDRIRRGAITKTGNAHLRRILIEAAWSYRYRPNIGAELRRRQATASERVKEIAWKAQHRLHYRYARLAGRGKLKQQVVTAVARELAGFVWAIGVEVENQLARAA

SEQ ID NO: 428081 - protein, 403 aa, unidentified
MNSVGIDISKGRSTVAVMRPFGEVVISPFEVRHTDSELSELARQLKSLDGETRVVMEATGNYHAPVAKLLHDAGLYVSVINAKLVHDYGNNELRRVKTDRKDAVKLANYGLDRWLTLPRYIPEEDTRLLLKNCYRQYRQYSKVQTILKNNLISLLDTVFPNANRLFSSPIRGDGSEKWVDFVAEFWHCRCVSEKSQKAFTNKYQRWCRKHGYNFSEAKAHTIHAEACGHIDVIPKSETTKLLVEQAVAQLRATSAALAALKHEMQALASMLPEYPVVMDMFGVGPTLGPQLIAEIGDVRRFYSKKALVAYAGLDAPPNDSGDVTGRHKSMSKIGASSLRRTLFLVMSVYLQTAPLDEPVYQFMDRKRAEGKPYRVYMMASANKFLRIYYATVKAYLESLEHTA

SEQ ID NO: 428082 - protein, 393 aa, unidentified
MTVVIGVDPHKGSHTAVAIDEHEQQLERIQVRSGPRQLEQLLAWAYAFDERVWAVESAGGLGYLLAQQLVGANERVLDVPPTLASRVRVLATSKSHKTDSHDALSIAVAALRARDLRPVERADHTVVLRLLAKRHRDLGRARNRSACRLHALLIELAAGGISKEITVNAAQAFLEGIAPADPVAQIRHDLACEHLDDLRHLDAQMRASKQRLEAAVRASNTTVTDIFGVGPVVAAMVIGHARNIDRFADRDHFAAYAGTAPIEFASGGRSIRRLSLRGNRQLNHAIHIAAVTQIRHRHSPGRAFYDRKLAAGKTKKEALRALKRRITDAIYRQLRADAARTCAGPGGQAGTTHQSSVAGFEPRTPTLRKNHSRTRPNARTGPRRTPSAAANTA

SEQ ID NO: 428083 - protein, 383 aa, unidentified
MKSVCGLDVHKDSVYLCILSEFGELIEKVFGVLTYQLEEMRDLMLRHHVVEVSMESTSVYWIPIWRVLSPHFKLNLANPYFIKQLPGRKSDVKDAQWIAECTMKELIRGSFVPPETIQQLRQYDRRIFDLNEEIVRKLSKLDAVLQRCNIRLSNYVSNVDSKSYKAVVRAISQGITAPEELVKLIHGRIINHHGIDVITASLKGVVSLAEIDMISQLRDELDMAEAHKEKCQARMLEICEREFPEELRRLQTIPGIKERTATSLIAEIGTDMNKFETANHLASWSGLKPRNDESNKKIKSRSITHGNVYLRKTIIECAWAASRTKDCFFSRFSFHQTQVRKKNKMKVLVAVARKMLIAVWHVLHDNTIYIDFTTDRKTSRTKG

SEQ ID NO: 428084 - protein, 312 aa, unidentified
MSAKAVVGVDVAKRTFDVCITGASKPRSYRNTKQGINSFIKSLQLLVAPFVVLEATGSYQRDLVRRLAAAGISYSVVNPRTIRHFAKAGNFLAKTDHLDARVIALYGERMVPRVTVPPTEAAIQLKALVSRRRTLVDFSAREKKRKQSIEPFLRDQIETTIAFVQQQIAALDRQIKQLVQGCERWAAQAQLLNTVPGVGWVLISTLLAGLPELGLLPHKQIAALVGVAPYNDDSGQHTGERRCWGGRAHVRTALYMATISAIRCNPVIKAYYHQLKERGKKSKVAIVACMHKLLRILNAMLRNGKEWETPIA

SEQ ID NO: 428085 - protein, 316 aa, unidentified
MSSAPRFVGIDVARADVVVAQHPPADVWTLPNTDAGAADLVRRLRPLSPTLIVLEATGGYERTVVAALAAAGLPVVVANPRQVRDFARGVGQRAKTDAVDAQILALFAERVHPEPRPFPDAALRALEALVARRRQLLDMLTAERNRLEHAAPPVRDDLQRHIDWLARRVGKLDRDLDKKIQASPLWRTTDNLLQSTPGVGPTVSRTLLGALPELGTLTHKQIAALVGVAPMARDSGRWRGRRRITGGRAPVRAALYMAALVASRHNPVVRAFYLRLLAAGKPKKLALTACMHKLLTILNAMVKSNTVWRPTLAQTT

SEQ ID NO: 428086 - protein, 315 aa, unidentified
MERHPASPSFVGIDVSKDRLDVHVRPSGQAFAVARDGKALEQLVSDLRALAPTLIVLEATGGFEITVAAALASASLPLAVVNPRQIRDFARATGRLAKTDTLDAQIIALFAERIRPEARPLADADSQNLAELVARRRQVVELLGMETNRLHQARNPRVQRMLKATLKTLKAQLAELDRDIDDTIKRSPIWRAADDLLTSVPGVGDVTAHTLIADLPELGQLDRRRVAALVGVAPVNRDSGQMRGKRTIAGGRADVRSALYMAALSAIRWNPIISQHYKSLVERGRPKKVALIACMRRLLGILNAIMRTKTPWQCA

SEQ ID NO: 428087 - protein, 408 aa, unidentified
MADKLAGIDVHKKVVMVVVIDPHNREEKPERRRFLTMPGDLRLLSNWLRDRGVKEAVMESTAQYWRSVWMKLEPHMRLHLAQAYSNRAPRGRKHDFRDAERLVRRLFAEELILSFVPGEEQRIWRNLSRMKLQMVRDRVRLQSQVECLLEDMRIKLSVVVTDLFGLSGLRILHALAQGETDAGRLAELGDERLRCTREQLTEALTGRCHPAHCQMLALQLERLRLIDEQVTRLNALLAQAMNAHQDTVLRLAQVPGFGIDSAQQVIAEVGATAASFASAAEFTSWVGTCPGKEESAEQNHSSRSAKGNKYMRRLLNQAAHAAARSKGTHFQIVFRRLLPRLGYQSAIWAIAHRLCRLIWKILHEGVSYIEQAAGPDPRALINRAKYLAKQLRKFGYDLRVTSANPSPA

SEQ ID NO: 428088 - protein, 334 aa, unidentified
MIYIGMDIHKYFIQGVAIDERGRKVEELKFKNELEEIERFVRRFGFEVKVAIEGTFGWQHVYEILEYLKVETKLVNVRRTKVIAESKIKTDKLDALSIAQCLRTGFIAEAYAPKPEIRKIRDIVRHMLSLKREVKRIKNKIHSILLKNGIKHGFTDLFGKAGTEFLKKVKLREQDRYRLDSYLRILNSLNKEVNETAERINKISKADKQAMLLTTIPGISYYSALLIIAEIGDINRFKSAEKLCSYTGLVPRVIQSGNHVHHGKLIKECDQNLKWILTQCAHVHVRCCNSKITKHYRKVGKKRGNNKAIIAAARELLVSIYYMLTRKGPFKING

SEQ ID NO: 428089 - protein, 353 aa, unidentified
MKQYIGCDAHARYSIFVSLDENGRTGKPVRVEHDELEMRGFLSTLPAGSPVALETSGNWYWLVRAMEEAGLDPRLAHAVEVKKRMPGRNKTDNLDAKGLALLLRNNALPEVWIPPAKLLDLRDLMRTRLSVRQQGSLLKCRIQAALRRYGVRDYRDRADLFTAKSRAQLAGSIARLPQETRLATLHEWELLDFLEAQIGALEERIRERIATIGWVRLLKTLPGVGTILGATIYLEIGDVGRFAAPEKLASYAGLVPTVHASGGKVWQGPTPRSANHFLKWAFVEAANVIVSHQKQWPERHVVRCYQRLKASKCHGKAATAVARHLAESSWWILTKKQAYREPAPATMSSSRNG

SEQ ID NO: 428090 - protein, 457 aa, unidentified
MSIAHSPPENTAIFNAVNESAIGIDVHADLYVAVYQQCSFGAKNVVGHRKFTKGATKADIDELARWCVNLHPQVILMESTGVYWQALYEGLERAGFNQSNIAVVNARDVKNKKGSKTDLSDATHLAEVARRGDFTPSFVPEKAIRQLRCLFRSCCSLKNGKKRALNILHKQLTQVGCRASSVFSDIKGKIATKILEVLIAGISGSELLAAIIDIMENSRGRLKATPQKVYEALTADMDSMVWFSIRKHLDHIKFLDQQIAESEENLRQELQPYWHFVELLMTIPGIKENTAMGVICELGCDLSAFKSVRKFCKWIGLAPGNNESAGKRYSNRITHGNKYLRTLLVEVASGIGLMKQGFLHEVHQRFKERRGTKRANVAIANKLARIIYSIMKSGQPYEEQYKPVLKDHRLDRAVKAIDGLRTAGFTCDDIKVTDIDNGHSTVIFGANKKRKRSRKSP

SEQ ID NO: 428091 - protein, 368 aa, unidentified
MMLRATVQDKQDVQVTLGVDTHADVHVAAALDQLGRLLGTHAAPTTPAGYAALVGWAEQFGTVVQVGIEGTGSYGAGLARWLRARGQVVVEVERPKRQPRRRRGKSDPIDAEAAARAVQAGTATGRPKDGDGPIEMIRTLQAVRRSALKARTQTANQLHALVITAPDALRSALRGRTLPRLVATAAAFRPSLPLTTPTAATKLALKSLAVRYQQLCAEIETLEAQLDRLVTQAAPELLAVKGVSTVTAACLLVTAGDNPERLRSEAAFAHLCGVAPIPASSGKTTRHRLNRGGDREANKALYLLAVRRMGWDPATRAYVARRTTEGLSKLEIIRCLKRYLARELFPLLATNPTLAPLRPTTACLPVPL

SEQ ID NO: 428092 - protein, 360 aa, unidentified
MRIIGCDLHARQQTLAMLDTETGEVVNRTLMHEGNQVREFYSELPGPVLVGIEAIGPMQWFLDLLAQLGIECRVGDAAKIRAAEPRKQKHDRRDAELILKLLVEKRFPAIWMPSKELLDVRALLLHRHQWVRLRTQVQNALQAIALANGLRRGPSLWSYDGLAKIAFLPLPPHTSLRRSALQALYRHMDEEVEKLTVQVAEQVEHHSGAQLLMTHPGVGPVTALATDVFLGDPQRFADGKALASYVGLIPEERSSGRRRRLGRISKQGNPLLRFLWNEGGAHAARRDPELRRFYRRKLVQKGLRKARVAVARKLGIRLWIMLRDQIDYQEFCRRGQKQSSAACAGMPEVGNGANRHRPVE

SEQ ID NO: 428093 - protein, 414 aa, unidentified
MQRTYKVAGIDVHKSMLAVVIADAAREGEFQFQRRKFTTLASGLEQLAEWLRQQGVQEAVMESTAQYWKPVWQQLEGQCQLSLAQAQSNRAPKGRKGDYKDAERLLRRHVAGELILSFVPSPEQRLWRTMTRSKHQLTRDRVRLHSQIESLLEDAHIKLATVVSDLLGVSSRRMLQALAKGEQYPARLAAMADPGLRATAEQLQDALRAAATLHPLHRQILGLFLARLELVESQMQILEKSIGQALQPHQDAVRRLAEVPGFGVDSADQVIAEVGPQAATFASAPELCSWVGVIPGREESAEVSRSNRSPKGNRMMRRVLTQVANAAVKSKGSVFEIAYRKMVGRLGHNKAIWAIAHRLCRLVWKILHQGVSYIEYGMRLNAKAVQKRAQRLLRDLKAIGYQVQIVSSPSPATP

SEQ ID NO: 428094 - protein, 333 aa, unidentified
MQHFIGIDVSKANLDLALLDEAGNLLATERIINERRAIRALFKRWRKELGLEPGDALACLEPTGHYGYLLLEELLGMSMPTWLAHPLDIKHSIGATRGKNDQVDARRIADYARRYQDKARLVGPGSLKINKLKQLLTCRRRLVADKRRHQVLLKDLNRHMDKSLRALFDRFSRERIVQIDKQLGQLEKQILEHIRSDRQLEHQYQLLLSVEGVGPVLAAYLLATTEGFTRFANARRLACQAGVAPYEHSSGSSVHGRTRVSPQADRVLKTLLHMSALGVIHRPGELRDYYQRKLAEGKPPMAVINAVRCKIIHRLFAVIKRGTPYIKTPLQMS

SEQ ID NO: 428095 - protein, 341 aa, unidentified
MNIKRVGIDLAKSVFQLHGVDGQEKVILRKQLRRTQMLDFFKKLPPCLIGMEACSSAHYWGRELQKLGHTVKLMAPQFVKPYVKSNKNDANDAEAICEAVARPTMRFVAIKTIAQQDIQAIHRIRSELVQQRTAKVNQIRGLLAEYGIVVGRRVEVLGKALPLLLEDAENGLSADFRLLLDGLRQDFATLNGRIDEMDKTIKALADSNADAKRLQQIPGIGPITATALVCAIGDGKQFKRGRDLAAWLGLTPRQHSSGGKDCLLGISKRGDAYLRTLLIHGARAVLKVAGQKDDPRSRWLQNLCSRRNKNIATVALANKNARIVWALLSKKTDFLPEGEPA

SEQ ID NO: 428096 - protein, 439 aa, unidentified
MGIESRLQVGIDFSKNKADLALLNSAGEVLEMHRSFANSVPGYEQARVLLLETLGSQAFQGVDIAAEATSYYWLPLYMQLSQDVHLAGFQPRLLLLNAGWVRWFKKSMPADHKSDYRDPYYIAERMRSLPHKNWWSFDAHWLGLRLRTRLRFHLTKSLVREKNHYQLFLFLAHSAYTQVKPFSTPFGQLSQTLLNQPDLLEELQQLPDSALAARLAELGGGSLPDPEQAAVRLKQALANSFPLPETLEPALREALHGLSCVIQTIQEQIQHLDAQIHHIAQSGYPEVAWLQSVPGVGPVFASGIAAEIAGLQRFTTPLKWDKRSKSYRPRTLRDVEDAVAKFAGLWWPQYASGQFSAEERPLSKHGNAYLRYYLIQAADHMRQLIPSYARFYARKYAQVTKHQHKRALVLTGRKAVGLFVGLLHRQEVYRPEEDMVLLP

SEQ ID NO: 428097 - protein, 369 aa, unidentified
MDDITFVGLDVHKATVCIAVAEGTRGGEVRQLGVFENRPEILRKVVSRLSKGGRRLSFCYEAGPCGYGLHRLLTGYGHEGVVVAPSLIPMKAGDRVKTDRRDALMLAKLHRAGELTAIWIPDAAHEAMRDLVRARATAVRVLVKARQHLQGFLLRHERIYRGARAWTLAYRRWLSTVRFDHPAQQIVLQDYIHAVQEAETRRDRLTQQIEELLPNWSMAPVVAALQSMRGVALVVAVTVVAEVGDFRRFANPRQLMAYLGLVPSEHSSGSSVRRGGITKAGNALARRVLIEGAWTYRMSARVSRKLHDRLEGLPAAVRDIAWKAQLRLCARYRRLAATGRPKVVVTTAIAREMVGFIWAIARVAQPALV

SEQ ID NO: 428098 - protein, 372 aa, unidentified
MERVCGLDVHKDSVFMCILKETGEKIEKVFGTLTPDLDSLRDFLVEHNVGKVAMESTSVYWIPVWRVLEADFEVKLVNPYFIRQLPGRKSDVKDAQWIAIALQKELIKDSFVPGPQIQQLRQYNRRMFSLNRSKQRVEQSIDLVLQRCNIRLSNYVSDIGGKSMRKVIEALIEGHQDPAYLLTLVHKRITNKHGQQTIRDSLTGIISEADRDMLGMGMEEVALYEKQLLQCEEKMQEICRRHYAQELEILQTVPGIKSLSAASIIAETGVDMKCFLTAACLVGWAGLRPRNDQSAGKIKGRKILHGNKYLRIILVQCAWAACRTRDSLFYLRFHTLKKRMNHNKALLAIARKLLVVIWNILAKKQAYLANAA

SEQ ID NO: 428099 - protein, 350 aa, unidentified
MTEAYDGRQVVGMDLHRRRSVLVRMTADGKRLETARITNSAAELRRVIAKAGHHPTVVLEATYGWYWAADELAAAGAEVHLAHPLGVKAFAYRRVKNDEKDAGDLADLLRMGRLAEAWIAPPEVRELRELTRYRIKLVRIRSSGKEQVHAVLAKLGIPVTCSDLFGTWGSAWLDGLALPQPYAGKVASLRELIGWLTGEIGLLDAVIADLLGSWPPYYAVRALPGLGPVLAAVAVAEIGDISRFPGPGRLCSWAGLTPRHRESDLKVTRGHITKQGSPLLRWAMVEAIQHQPAGSPPRELKDRIIARRGAQARNIAKAAAARKLLTCVFYALRDGQVRSLAAPGRAAEAG

SEQ ID NO: 428100 - protein, 475 aa, unidentified
MNVNGNRRKKQDAKLSVIDQQVILRKVEEIKSALKASTWHELETNGKFDRNDKLTFISEDMLILGCDIGNETHYARAIDTRGRELSKSAFSFSNTEEGFKSVLDWALKLAAENEKHQIVMGLEPTGHYWFCVATRMVNNGISVVQVNPYAVKQTKEVEDNSQLKDDTKDSKLIANMVKDGNFGMSYLPEKLYAEIRRLSMFRDQLTEDRIRNLNRLHRELKIYFPEYKDAFGKTDGMFCLELLKVAPFPKDLMQLGADGIRQIWHDAKLRGRDYAKAESILDYAKKSVGIKDGSDASWQSVKWFVNKIQELDIQLEDVQQQLNKRCGEIPHAENIKEISGIGETTLTGILAEIGDISRFDDVKEVQKLSVLGLVACSSGKHKGETKISYRGRKRLRYWLFQAAKSAVVHADEYRKLHTYYATRTDNPLKKMQSLIVIACKLLRVIYVILTKETKYNPKKMLGDIKRSEKQLTAVA

SEQ ID NO: 428101 - protein, 369 aa, unidentified
MPHVTSIGLDVHARSVAAAAFNPFTGEVVHRDFGTDAAEIAEWALGFEEPRACYESGPTGFHMARELRALGLDCAVAAVSKMQRPAADARRKNDRRDAEFIARMLATHNIVEVPLPDAAVEAARDLDRALDDATVEYRRARQRLNMFLIRLGHVWDERNAGGTRRGSWTRAHWRWISGIRLEGPQRDVLEYYVTAARCAESDRRQLEKKVLALARTDRWRPAVEALSCIKGIDTLTAFRLAAEAGSFTRFRTAPAFASWCGLVPSERSSGETERRGGITKTGNRLARTALVESAWHYLTCTPRPKAPAPGADVPAAIRARADDCTARLCRRREALAAAGKSSCKANAAVARELACWVWEIGRRAEGTLG

SEQ ID NO: 428102 - protein, 344 aa, unidentified
MSTIKVLGIDLGKSSFHVIGRDYSDNQIIRKKFSRSALIHFLHQLTPCTIAFEACGGAHWLGRQCESIGHTVRLIPPQYVKPFVNSNKNDFIDAEAICEASTRPNMRFVSVKSEEAQVISAIHKARHGYIKDRTACMSRIGALLLGFGVALPTGHSVMKQLFNWLAQQKQTISGLLMQELMELHEYYLFLNENIDRQDKKLKQLVETNPIGQLLKTIPGIGDMTASLCIANISSATDFKSGRNMAAWLGLVPAQHSTGGKPKLLGISKRGNKELRTLFIHAARAVMSRPDKTGKIYGEWLINLRATKPFNVVTVALANKLARIAWAVMKTKQAFNNNALAPSLQ

SEQ ID NO: 428103 - protein, 402 aa, unidentified
MNAVGIDVSKGKSMVAIMRPFGEIVSTPFEIKHTSSDINSLVKLIKSIEGESRIVMEHTGRYYEVLAHQLSEANLFVSAINPKLIKDFDNDSLRKVKTDKADSVKIARYALDKWQNLKQYSVMDELRNQLKTMNRQFGFYMKHKTAMKNNLIGILDQTYPGVNTYFDSPARSDGSQKWVDFASTYWHVDCVRKMSINAFIDHYENWCKRKKYNFSKSKAEEIYGKAKELVPVLPKDDITKLIIKQAVNQLNSASTTVESLRTLMNETASKLPEYPIVMAMKGVGASLGPQLMAEIGDVSRFTHKGAITAFAGVDPGVNESGSYEQKSVPTSKRGSSDLRKTLFQVMDVLIKTHPQDDPVYQFIDKKRAQGKPYYVYMTAGANKFLRIYYGRVKEYLSSLPES

SEQ ID NO: 428104 - protein, 340 aa, unidentified
MQEVALVDTETGEYDERQLNHSDREAEKFYRNLKQRGVNVRVGMEATGHARWFERLMAELGFELWIGDPAEIKAARVRKQKTDREDARLLLRLMSENRFPRIWVPNPENRDLRQLLWHRHRLVQMRTRVMNQLQAIAMGEGVRLRKSLWSRSGRAKLESLQLAPWAAKRRKDLLELLDHLTPKIEELNVAFEQEAWNRPEVRHLMTHPGVGPVTGLAFVLIIGTPQRFGCGKQIGSYLGLIPCEDSSGGRQRLGHISKQGSSLLRFLLVEAAQQAVRFDADWKRQYLHLAMRREKRIAKVAMARRLGVRLYWMWRTGWDGKQALQFGSHAGQLVRSHGLT

SEQ ID NO: 428105 - protein, 387 aa, unidentified
MPQPNDLSRSLVALDQNSTIIAVVEMSQSSWLVGGVLPGTERQPRKKLEPSPERLLALLHRWQDEAVRAGRTITRIALAFEAGRDGFWLARWLEARGVEAHVIHASSVAVSREHRRAKTDRLDTELLKRGFLGWLRGERGHCSMARVPTIAEEDAKRPNRERDCLVGERTRIVNRIKSTLARLGIRNFKPTLRKAAERLATVHTPEGMPLPPNTLAELQRDMARLGFVVSQIREIEDARQKRLEQQHATGPHAMVRLLARIVGVGVETADLLVHEVLSRPMRDRRAVARYAGLTGSPDESGARRREQGLARAGNARVRRGMIQLAWRFLMFQKESALALWYRARTADSRIGTRKTMIVALARKLIIALWRFVTAGEPLEGVVLRPAS

SEQ ID NO: 428106 - protein, 344 aa, unidentified
MSEVITIGLDIAKHVFHAHGADATGRAVFSRRLTRGKLLDFFAAHPRCRVALEACGGAHHWARELRAMGHDVRLIPPAYVKPYVKRHKNDAIDAEAICEAAQRPAMRFVAVKSEEQQAAALVFRTRDLAVKQRTQIANAIRGHLAEYGWVAPKGAAHLGLLADLLEDGEIGDTLPQAARPMFAMMVDMLADLDRRIAVLDKEIARRAREDEVARRLITIPGIGPITATAIAAIAPPAETFAKGRDFAAWLGLVPRQASTGGKQKLGAISRMGERTLRRLLIIGSSAVVLHASRRGAPAGSWLEGMLARKPRMLVTVALANKMARTVWALLVKQEDYRAPVPIAA

SEQ ID NO: 428107 - protein, 459 aa, unidentified
MKSTLVLGVDVSKGYGDFVLLDTCKKVVEESFRLDDNKQGHDILKKQLLHWKKKHSVARLLLVTESTGGYEDNWLRVGKDKALGSFVESYRINAKIIFHEYEAQRRNSIDDGISALTIAEHVVKNLENFSSTNSFNETAYTSARSLVRHYTSLQQECTSHKNGLLKLIYQYLPSLEAVKPREWPSYWLEIFVRYGSRKSIQIAASKGFKQLKRVPKGKAKEIAEALANGIDVRHTPEMVVFAIRSKARQIKRLNEEIQEIKEMIIDQAPVDCDQVDLLKSIKGMGEITPVILLSFIEEVSRFKDAKHMASFFGVQPRVKRSGDGSYKTKMSKQGAGLVRRELYLLAFRTLTTEPYLRAIYAKARKKGMAHDAALGVVMHKLLRIIYGMLISNTRFNPGIDQLNQHQTGEEPKPQKQKKDASRRFQPASMVAPISFRQRRKRKKDYELQADGISESAESS

SEQ ID NO: 428108 - protein, 401 aa, unidentified
MLSIGIDVSKGKSTVCGMKPGGEIVYTPFEVQHTREGMSELVSLLRGSGEEVRVVLESTGSYHCPVVAALLENGIFVSVVNSLRMKRFCSQSIRRVKTDQIDAMQIALYGLAYWQELQPTRLPENTYRELQLLARQYYQMTSLLIKAKVDFNALCDQVLPGMQELMSDHAGRHKLSDFVLRYHHTAHILKMGETRFRKDYCKWAEKKGYRNHERMAALIFATAQNGIPVLPDAPSTQIVITEAIRVLHTVEASRDAILTQMQALAKTLPEYSLVREMPCIGDTLAPRLIAEIGDVRRFHSKRALIAYAGIDAPPYQSGKFSANNRHISKRGNRYLRKTGYEVMQSYVMHKPANDPIFTFIEKKRGEGKSGKLAMVAGLNKFLRVYYGKVTELYRSLPARIS

SEQ ID NO: 428109 - protein, 405 aa, unidentified
MGEVFVGHDWAEMHHDVFVEDADGQRLARARLPEGIEGVARFHALIAAHVDGPEQVVVATETDRGLFVGALVATGYTVVAVNPMSVARYRERHSTSGAKSDPGDAKVLADLARTDRHNHRPVAGDSDLAEAVKVLARAHQSLIWSRQRQLNQLRSTLREFYPAALEAFPDLGSAEALAVLAMAPTPALGRRLSLSKIAAGLRRAGRQRRVEERTEEIQRALRAEQLQAPDVVADAMGTSSSALVAVIVELSAQISRLEAELADRFEQHPDAKIIRSLPGLGMTLGAQVLGEFGDDPNRYADTKSRKNYAGTSPITKASGRSHVVLARFARNTRLADACQQWAFCALNASPGARAFYDQRRRNGDTHQRALRALANRLVGLLHGCLRHRTLYDEHTAWGHRQEQAA

SEQ ID NO: 428110 - protein, 349 aa, unidentified
MIGIDRHKRTHTAAAVEQATGELLGELTRPARERGQGELVRWGRSLGEERLWALEDCRHVSGRLERFLLACGERVVRVPARLMAGLRRSARSRGKSDAIDALAVARAALREPCLPAAQLEGRSREIRLLCDHRDHLVDERTRIQQRLRWHLHELCPELEVPAGALDRRVWLQRIARRLARAQQLTQVRIARELVRRIGELTRRADELERELEGLVRSEAAPLLELVGCGTLTAAKLIGETAGVARFASDARLAMHAGAAPLDASSGEQRRHRLNRSGNRQLNCALHRLAVNQGRWHPGAAAYLARKQAEGKSRREALRCLKRHLARVVYKILVNVTQPTAAPATTLALT

SEQ ID NO: 428111 - protein, 419 aa, unidentified
MLADLTWEEQEMQVVHERCAGLDVHKKTVVACLLTGAGKQIRTFGTMTQQLLALVDWLEAERVTHVAMESTGVYWKPIYNLLENRGLELLVVNARHIKNVPGRKTDVKDAEWITDLLRHGLLRASFIPDRGQREARELVRYRRTVIEQRAHDVQRIQKVLEGANIKLGDVASDIMGVSGRAMLERLVEGEEDPVALSQLAQKGLKKKQGQLQQALAGTVGAHQRAMLRYLLDHVKFLEQQIAELDRQIEEQLRPFEAAIAHLDAIWGLGRRTAEELLAEIGIDMSRWPTHQHIASWAKISPGNHESAGKRYSGRTGMGNRWLRAILVEAAMNVSRNPHSYYAALYQRISRRRGKKRAMVAVAHSLLVAIYHMLKQGTVHDDLGSDHFERLDREQIARRAVRRLERLGYQVTIQEAEPAA

SEQ ID NO: 428112 - protein, 316 aa, unidentified
MSGYIGIDVAQAELVVAREGVAGCKVYPNTERGHRDLVRDLKEAQLIVLEATGGYERGVVASLGGAGLPVVVVNPRQVKDFARATGQLDKTDLLDAHVLASFAATVKPELRALPSEDEEELRDFLKRQQQVQQMLLAERSRLLQAQGRARQALRRQIKSHISYLERELKTLDSDLDGLIRKSPLWREHDDLLQSVPGIGKQTSRVLLGVLPELGTASAAEIARLAGLAPIARDSGKMRGKRWIGGGRPRVRAALYMATLAATRFNPVVRNWYQRLLSAGKPKKVALIACMRKLLVVLNAMIRSKARWQYPQITSTA

SEQ ID NO: 428113 - protein, 360 aa, unidentified
MRIIGCDLHARQQTLAMLDTETGEVVNRTLLHEGQEVREFYSQLPRPVLVGIEATGPMQWFLGLLEELGIECQVGDAARIRAAEPRKQKHDRRDAELILKLLVEKRFPAIWRPSKEQLDLRALLLHRHHWVRLRTQVQNALQAIALANGLRRGPGLWSYDGQAKIAFLPLPPHASYRRSMLQALYRKMAEEIEQLTAQVAERARQRCGARLLLTHPGVGPVTALATEVFLGDPQRFADGKALASYVGMIPREYSSGERQRFGGLTKQGSPLLRFLWGEAGAHAARRDPELQRFYRRKLVQKGLGKARAAVARKLGIRLWIMLRDQIDYEEFCRRGKKHSGAVCAGMPETRFGANGHRPVD

SEQ ID NO: 428114 - protein, 338 aa, unidentified
MKTFVGIDYHKKFSYGTIMTETGQILKQTRFSNHPEEVARFLGEHSGPDCSAVLEATRNWCVMHDWLEELAGSVTLAHPLKVKAIAEAKIKTDKIDSATLAHLLRCDLVPAAYVRSPQARILTNLLRHRMFLVRLQTMTKNRIHVLLDRHPQIRSQRTATEIFTKIGIMWLKQLQLPKYDRYILDSELSLLEHLQEQIKQADCLLSDIGKKDQRVGNLMTIHGIGRAFACLIVCEIDDIRRFRTAKKLHAYAGLIPSTYSSGGHTFHGRIVKNGNKYIRWALVEAVWPAIQKDLKLNLYYQRVAARKGANCAKVATARQLLTIVYKVLKENREYKNVV

SEQ ID NO: 428115 - protein, 337 aa, unidentified
MGIIRIGLDTAKHVFQVHGVDEKEQPVLRRRLSRKEVERFFAKLPPTRIGLEACGAAHYWARVMRGLGHEAVLLPPQYIKPYVKRGKNDALDAEAICEAMSRPGMRFVPVKSAEQQAALMLLRTRELLVKQRTMLINAMRGHAAEFGVVAAKGLGKVSELLQRAHAEAAGVPALALQMLDLLASQLDALDRKLKTIEARLMAWHKADPVSQCLATQPGIGPIGAVSFALKVTDPKAFRSSRHFAAWLGLTPKENATGGRSRPGRISRQGDESLRRLLVLGATTVIQFAKPGRASPWLIQLLARRPRKLAAVALANKMARILWAMMVSGELYRRPQPV

SEQ ID NO: 428116 - protein, 322 aa, unidentified
MTEILGLDISKETIDACLLGNDSELAKKVSNNAKGFAQLKKWLENRRLKSVHVCMEATGSYFEAVAEYFSDRGFMVSVVNPAQIKAYSQSLLLRAKTDAVDAMAIAKFCAAQQPPAWIPPTLKERELRGLVRLCANLKDTRASYEVQRQRPNIVGTVERSIVEVIAGLDDQIEKIEEEIANLIDDDRDLRNRRNLLTSIDGIGDVTAAMILAEAPRIEEFRDAKAVAAFAGLSSQTKSSGTSVRGSGKICKTGNARLRKALWWPAITAMRCNDRLRAFADRLRAAGKPNKKIIIATMRKLLVLAYGVLKSQKPYQAALTEAS

SEQ ID NO: 428117 - protein, 351 aa, unidentified
MKRFIGLDVHAASTTFAVINESGKRLGAYVVETNGQALVERLKTIPGDTYVCLEEGTQSAWVYEILSPHAKAVTVAVVSESRGQKDDERDAFALAERLRTGAIERKVFKDTGEFKMLRELARTHGMLVQDSVRVQNRIKAILRSRGVATSGQSVYSETDREEYLKKLPDASRGAAKTLYAQYDAIEKIRRQAEKDLVQEAHRHPISRVLETCPGLGPIRVAQMMSIVVSPGRFRTKRQFWSYCGLGIVMRSSSDWVQKKDGGGWVRATVEQTRGLNRNHNHVLKYVFKGAAMTVITQLASDPLHQDYQRLIAAGTKPNLAKLTIARKLAAIALSVWKSKEKYDPTKHRKQS

SEQ ID NO: 428118 - protein, 398 aa, unidentified
MINKVAGADIDKDFIHIAVRFNDETRIIDFVNDVNGLKDAVEFLSNLGVDRVVMESTGSFWIRLAEMLSEKGIGCVVLHPGDVKRIGAHKSDIRDAEWLLIIGEVGLISGSYIPPKIIRVLRTLTRARMRLSDRISSAKQRILNLLYSRGIRLSAIGGINSRLVRLVLETAVKNGSLGDVDDYVKKALGEIIDALNEEERVLLGFYLAELKMLEAMARRYDALIRETAEPLMDKIKLLMSIPGIGFFTAVAIIAEIGDINRFASPAKLASYAGVVPRLNQSGGRNRRSRLIKRSNRWLRRALFLVARAAINSKSRIVREFYTRLRRRGKHYLSAIIAVARKLLVAVWHILTKKTPWSENIKKISVPTTPLHGKRPSILALVKLLISIDYSDVVSRTWR

SEQ ID NO: 428119 - protein, 361 aa, unidentified
MDARVIIGVLTSISTKEAPVSEDYDGRQYVGMDLHRRRSVLVRMTEAGERLETVRIVNDREQLAAVMARAGEDPEVVLEATYGWYWAVDALAELGGCVHLAHPLGVKGFAYRRVKNDERDAADLADLLRMKRLPEAWIAPPATRELRELVRHRAKLVHLRTSLRCQVHAVLANHGVGVPVSDLFGVQGSMLLERAALSAAGRARVDSLLRLIDTFDTQIDQVAKTTARQLANHSGYTAVQTLPGVGPILAAVFVTEIGDITRFPAPAKLASWAGLTPRHYESDTTVHRGRISKQGSRLVRWAAVEAVQRVGKHTYIGGYRDRITARRGRNIGNVAAARELTEYVYHALRDGTCRRALTTTA

SEQ ID NO: 428120 - protein, 379 aa, unidentified
MERVHFVGLDVHTQGTEMAVVSQTGRVTRRERCKTTIPDLLTIIKSIGRPRYVVIEEGPIADWLLRNLSDSVDSLTICDPRRNHLIAKDSDKDDPIDAEKLAQLHRGGYIKPVHHPESFDRVVFKRHVNLYHDRVRQRVRQANRIMAELRQYGVFVQESAFNKVADSLGRAELLRRLPRNATVCADLRCLWKGYDAVVEQVEEMEERLIRLAKKQPQIRRFTALPGVKWIRAATFFAYVDTPWRFKSKSALWKYLGIGLERRHSGGGTENVHLAMWTHRRLKYTILGAAQSATASRDNPFADQYERWIHEGLTPRIARRNVARSQAAVMWGMWKNGSVYRPELVGVTNNGRTMRSSQADRRITRGRRSSPGGIGPSLRT

SEQ ID NO: 428121 - protein, 451 aa, unidentified
MRQPILAVGVDPAKRLHRAVAVLFPDEVVLDVELPNAFDAVANLDLRLCELANQHGADLVYGLEDHRRYGRLFCQVLTERGRDVRVVNPLWTNRQRAFYGQDKDDAIDGRSIAAVVLRRHHQLPLASDFGEVAQAIREAERSLQDLSKVGTQLVNRLHLQLSDTYTAAYEEYFGKLKSPLALRFFRRFPLPQDLVGHNVEMLASLLLDLAGGKVGPHKGGNRLIAMRSKAQAILETSGAMRASPRTLALELKAELIRQLCDELLANHDRIIRLERMLREQLLPATKQTITTITGISTILAATIIGETGSISRFRSPAAFAVYNGTAPARNSTGGRDRHKARRDCNHRLKRAFYLAARAAVLHDPIAKAYHQSCKSRGLSYVEALKRVARRMSDVVYALLKSGKAYDRSIIEHAIERRREQAAHAARSHAKQSLVHSRPRKSNSPLSQRQVM

SEQ ID NO: 428122 - protein, 350 aa, unidentified
MEAYDGPQIVGMDLHRRRSVLVRMAEDGHKLSTVRIASSPARLAAEIKRAGLHPKVVLEACYGWYWAADTLTAAGAEVHLAHPLGVKEFSHRRVKNDELDARDLADLLRMGRLAEAQLAPAEIRELREITRYRGKLVQLRTSCKDQVHGVLAKLGIEVTCSDIFGAWGTQWLDELPLPQPYSWKVASLRQLTGWLSAEITVLEQVTADLLAGHDAYRAVQALPGIGPVLGAVIVAEIGDITRFRHPARLCSWAGLTPRHYESDTKVVRGRITKQGSRPLRWALIEAVQRTPAGTPIHQARDAIIARRGPQARNIAKVAAARKLLTYVFYAMRDGHVRALDTPGAAAPETA

SEQ ID NO: 428123 - protein, 422 aa, unidentified
MIDQEKFTWFAAIDWGTESHQACVLDAGGGIAGERAFSHDGAGLALLCDWILSIAGSATGVAVAVEVPHGPVVDSLMDRGMAVHAINPKQLDRLRDRFSVSGAKDDRRDAYVAADGLRTDRHLFRRLHVADPRLIELREWSRLAEELQQERVRLSNRLHNQLWRYYPQMLKLTDDVAADWLLDIWTLAPTPPKSKHLRKTSVERLLKRNRIRRIDAETVLHTLRQAAIKVADGVTEAATIHIRSLIARLRVVNRELRDATHKLDELCAGLEETPAAAAEHGGEQHDVKILKSMPGIGRINLAILLAEASGPLSLRDYQALRTLSGVAPVTKQSGKSRVVVRRYAAHGRLCNAVYHWARIATQHDPKSRSRYVALRQRGHSHARAIRGVADRLLALACTLLQRQTMFDPDFGTTEVPELNTVP

SEQ ID NO: 428124 - protein, 338 aa, unidentified
MIGVDLAKNVFQLHAASMNGQLQYRKKLSRQAFGTFMAEQPPAVVVMEACGSAHYWAREMVRLGHEVKLIAAQYVKPFVKRQKNDAADAEAIVVAAQRPEMRFVEPKSAEQQSRAILFRARQRLVHQRTELINALRACLYEYGHAVPQGAHQIKRIAEILDAPNSDLPDLMREECTELLDQIAEQTTRINARTAKIKKLAAEADTARRLQTIPGVGPLTALAVEAFAPPMENFKCGRDFAAWLGLVPRQFSSGGKERLGRISKAGQADIRRLLIIGAMSRLNWLGRKSIPENSWLARMVARKPRMLVAIALANKMARTIWALLTKNEDYQVPAQAVAA

SEQ ID NO: 428125 - protein, 403 aa, unidentified
MEERTAGLDLASEEHRLVVVADGRRLDQRRIVHSEDGVAALVRHLRESRVARVAIEQPNGLVVDRLLDAGIAVVAVHPNQLAAARDRYRAGGGKSDGFDAYVLAELARTDMHRLRLLEPDSDETKALRALTRTREDLVEQKVALANQLRAQLDAFWPGARAIFFDLDSPIALCFLERYPSPADARSLGTKRLAGFLARNGYSGRRSAEELLARLRSAPEGRAGDAEQEARRAIVLALVAALKPLVEQIRLLTSQIAGAVRAHQDGQIFLSLFRDPKSVVTAAELLAEIGDNRARHPTSATLEAIAGQAPVTVQSGKKNVACFRWACNKNLRAAVSVLADSSRHHNPWAADIYQRARARGHDHPHAIRILGRAWLRIIWRLWQDRTPYDPDQHGSRNRLLAAEG

SEQ ID NO: 428126 - protein, 315 aa, unidentified
MQVGKLIVGADVAKAELVIHHDDRDEIIKVKNTKPEIKKWLKQQPLNTAIAVEATNVYHLDLVELAHSLGFEVYVIDGFQLSNYRKSVGVRVKTDPTDARLLSRFLRNEGEDLRPWTPPPAVYGKLQSLLRPRAALVTARTAMTQSWANEALLKAAFTTFVKSIDRLDLLIQKKIKEVLREAGLHEQVARCQAVEGIGFLTATALVMAFMRGEFKSSDSYIAFLGMDLRVIDSGQKNGRRRLTKRGCSEIRRLLHNAAMSASRTATWKGIYEQHRNAGKATTQALVILARKLARVAFALMKNQDEYVTKGGKAPC

SEQ ID NO: 428127 - protein, 278 aa, unidentified
MSSTKYIGMDVHTESISIAVRNSLGKLVMECVIETKASTIVQFIDGLRGDLRVTFEEGTWAAWLYDLLKPHVTEVLVCNTRKNASRDSSKSDRIDARKLSEQLYMNNIKSVYHGEHGLRTLKELARSYLTISKDLTRVMNRLKALYRSWGIPCAGKEVYAPRHRAEWLAKISEAGVRRRAEHYYQQLDVLRPLHQEARRDLLLEAKKHKPWKLLRLIPGIGPIRAAIVIAVMQTPHRFRTKRHLWTYSGLALETYDSAQYRVAEGQLQRSKNPRRFVV

SEQ ID NO: 428128 - protein, 338 aa, unidentified
MFVIGIDPHRGSHTAAVLDDTEEVLDELRVVADRRQRDRLLEWAASFTPRTWAIEGATGTGALLAQQLVAAGERVVDVPPTLSARVRLLDSGRSDKTDSHDARSAAVVALRHTSLRPVRGEDHVAVLRLLAKRHHDLIAARTRAVCRLHTTLCHLAEGHFPKRMTARQGAAIVARIRPADPVSVERKALARDLLAEIRRLDRDLVELGERINTAVAASGSTVTDIVGVGPIVAAYLIGHTGDIARFPTAGHYARYNGTAPIEASSGQVKRHRLNPRGNRQLNHALHMTAVTQVRYETAGRGYYLAKQAAGKSRKEAMRALKRRISDAVYRQLAADTGR

SEQ ID NO: 428129 - protein, 442 aa, unidentified
MSELAVLDPRAAFVDVGSEKMHVSIGGGSPQVFGTVTSQLQALRDYLVERQVRSVAMEATGVYWLPLYGVLEAAGLDVRMVDGRQTRHLPGRKSDMQDCQWGATLHAHGLLRAGFVPPAHVRRLQDYLRLRGEHVAAAAGHVQHMQKALERMNIKLHGVISSLTGASGLAVVRAILAGERDPAALLELCDVRIRKVKAERVVESLRGDWADEHLFALGQAVQSWDHYQAQITDCDQRIATVLARMPGGDPPAAGVEKPAKPRTRPGVNAPDIPNLRELLRHMCDGKDATTLPAHSEYTVLQLVAEVGTDLTKWPTEKHFASWTGLAPGSAQSGKRRTAVKRRRNRAGQIFCVMARALARSKYIALGGYYRRMAARRGGLVANKALAHKLAILFWRVMVKGMDYVEQGLAHYEAQVLETRQRLLRKLAKQFGQQLVPILPNAP

SEQ ID NO: 428130 - protein, 457 aa, unidentified
MKGYLGIDVSKGYADFTLLDKNRKELEKVFQLDDTRKGHDKLRALLEKMLKQHGLNEIYCGVESTGGLENNWYNSILQWSNSMKVFVVRLNPYGVKCNTQASLQRNVTDALSALYIAEYLISQGETLSYNKQSNQYSSFRSLHKHINLHKKQNTQIINQLKIVLYSVFPELIVYCRKSIPAWVLEVLKKYPGVQKLAQAKPEQLCKIKHVDMDKAKSIINKAKTSVSSRNHKTDSQLIKQMAMEIQHKQMLIQELKNLLAEQCEGPEIDLLKTIVGIGEYSAAAIMIEIEDIDRFSSPKSMVCYFGLHPELKDSGDKKAKYKMSKKGRASMRGTLYMCALTAVMHDAHLKKIYHKHRSKGFNHMQAIGVIMQKLLRIIWGVLTSKSKYNALIDEQNQQKKITKPEDTKREELNSKRRYQELDKEAPISGKQTKTRKVHSESQVEYIDQVRDHQNTPM

SEQ ID NO: 428131 - protein, 325 aa, unidentified
MMATHRIGVDVGKAELWISIDGETAQPCPNELPAIRRWVRGLEGPADFALEATNDYHLALALEAHHQGHRVYLINGYRLNRYRESIGGRAKTDAGDARLLVRYLQREQDELRPWTPPPEGYRTLQKLLRQRATLVRARVMLEQSLRGVPELQSNLKQLLQEIGRLDAVLQRVLRETVGRAGWSDHARRCQQIEGVGPLTAAGLTMAFQRGAFRSGDAFVAFLGLDVRIRDSGTKRGQRKLTKQGDPELRRLLYLAAMQAKSKPAWNDYYQRCLGRGLATTQALNALARKLARVAFALMNNQTDYQPKIPCGETQNLLQVSEPPQV

SEQ ID NO: 428132 - protein, 470 aa, unidentified
MSRSRSPDPFAQGEIRSTEGLPVVNPHAAGADIGAESIYVCIPGPGQTQIVRSFGTYTADLHAIADWLVENGIQTIAMESTGVYWIPLFEVLEGGGIHCCLISGNLARRLPARHKTDVLDCQWIQTLHSLGLLTESFRPDADLIALRSLLRHRAQLIEHRSPHVLHMQKALIHMNIRLDQAVSDVTGQTGLAIIRAIVAGERDPHKLAALRNPRCKKTEDEIAQALTGTWREEHLFVLKQSLEFYDFYTRQIEACDLEIERTYSAIRPDWPDPAPDDREPLPPNKRGSHSKNLPKETPIRVRQHLRRLTGVDITAVDGLSLDLAQKIVSEIGTDMSQFPTVKHFTSWLRLCPNNQVTGGKTIRSSTGKSHNRARQAFLQAAASVACSDCAFGAFYRRLKARVGPAQAQVATAHKIARVVYHMLKFKVEYLPTSAQEYEQQFREREIRHLQRKAARLGFTLSPQPASGAVS

SEQ ID NO: 428133 - protein, 418 aa, unidentified
MKKNNNSGRKSEQPTKRAKRRGPMPRDTKEVLAELVVKLKEKLGPKKVAATSAREEGQRGELRPNLDRLTVGVDLGDQWSHYCILGLEGETLAEEQLRTTPEDFATFFQGLSAARVVVEVGTHSAWVQENISGCGHEVLVANPRLMEGSKRRKRKNDRIDAHKLARLGRVDPQSLHPIQHRSREVRQDLVMLRARDALVAVRTELINTTRGLVKSTGTRLPKCSSRSFAQKGEEAVPVEIREALLPLVRLAATVSSEIREYDKKIETLGREKYGHTALLRQVKGVGPITSLAYVLTLENPKRFAKSRDVGPYLGLVPKQEDSGESQPQLGISKAGDTMVRKLLVGSAQYILGPFGPDTDLRRYGLRLCERGGKNAKKRAAVAVARKLAVLLHCLWVSGEVYEPLRQGMSATMTETAAA

SEQ ID NO: 428134 - protein, 409 aa, unidentified
MELLIARCAGLDVHQATVVATVRVPDEQGGRLIVTESFGTMTADLLALRDWLQAYGVTHVAMESTGVYWKPVYYMLEDRFTLLLINMQELKHVPGRKTDVTDSAWLAQLLECGLLKSSFVPPPPIRELRDLTRYRVQQVRDRTREVNRLCKVLEDAGVKLTTVVTDVMGVSGRAMLRALVDGTTDPTVLADLARGKLRKKLPLLQRALQGHFRPHHAFLIEQIFAKIDFLDETLDRLTAEIDRRVAPFEPMLAALDTIPGVDRIGAISIVAETGGDMSRFPSEGHLCSWGAMCPGQNESAGKRHSGKTRKGNRYLRGTLIQAALGAMRKNGSALQARYHRVKRHRGHKKAVVAVGHQILEISYFVMRDGVTYDELGSDYFDKRHAERAVKRHVRQLEALGFHVTIEKAA

SEQ ID NO: 428135 - protein, 427 aa, unidentified
MIETNTCTDFAALIGLDWGWDSHAIALAPADGPTQTSTLKHSAESLHQWLDQLEKTYEGRAVAVAVEASKGAVVAALLERPWITVYPIHPATSTRQRSAFRPSGAKDDTPDALVLLFILQHHRDRLRPLQPDDEATRTLANLVEARRKAVDRRSLLANQLKSTLKNYFPQALDLVGEDLAIPMALDFLDKWPRLTDVQASKDITLRNFYYRHNIRRAQLIQSRIDFRRSARLLTRDSAIIEVNVRIVRMLVAELRVLAEHITEFERAIEEAFAEHPEKSFFRELPGAGPVMAPRLLAAFGTARDLFPDAASMQRYFGVAPVTEKSGGRRWIHWRWNAPKFLRQTFVEWAGQTVVFCPWAKAYYEQQRNKRTGHHAILRALAFKWLRILWRCWQTHQDYDQEKYLQQLEKRRSPIAARARQLALEMTA

SEQ ID NO: 428136 - protein, 425 aa, unidentified
METSPSIPPIVAWVGLDWADQQHVGRLQASGSAQVEAFVLDQKPEILRAWVQQLRTRFPGGAVAIALEQSRGALLYALMNYDFLVLYPVPPRSLAAYRRAFYPSGGKDDAVDADLLLDFLRKHQDRLRPWRPDDALTRQIRLLVEQRRKLIADRTRLTNRLSAALKEYFPQALEWAGELASPTACQFLSRWPTLEKLQQASGRQVRDFYHAHRRLTPLEWEDLQEQIRKAQPLTSDLAVVQSWALVVPLWVEQLRCLLPALERLDTALQLLFQQHPDHLVFDSFPGAGEALAPRLLAAFGSDRERFQDAAEVQRFSGIAPVTERSGKTHYVHWRLACPKFVRQSFHEFAAHSRHWSPWASAYYQQLRERGVSHHAALRALAFKWIRILYRCWKDRTLYDEHRYQQALKRRGSPLCLALLSQEVPA

SEQ ID NO: 428137 - protein, 441 aa, unidentified
MAVVHPNAAGIDVGDTLHAVAVPANRDEQPVRTFGTMSADLEEIVVWLEKCRIDTIAMESTGVYWKPLFNYLIRHGFEVYLVNARHVRNVTGRKTDQSDAQWLQQLHSCGLLKSSYLPDNEQESLRTLVRYRRTLSEESSRFVLRMQKALELMNIKLHTVITDLTGKTGTAIVEAIIAGERNAVNFLPLIDRRIEADHGVIVKSLEGNWRAEQLFTLEENYTCYKFFQERIAKCDQAIEAQLQRYSAIQNEGEASLAQAKNTELAPVKKKKNKGAPAFDIRSFLAGILGVDVLAIYGLSEISALEILAETGTDMSKWGSEKHFASWLNLCPNNKVSGGKLMSSRLLKKKPNAASQAFRMAANSVQRSNHWLGDYFRRMKAKGGNKYAIVATGNKMATIYYKMVRNQVEFSPLDLQQYQEKRQQAKIAYLERKLEQLKKGVA

SEQ ID NO: 428138 - protein, 407 aa, unidentified
MISVGIDISKEKITVCALEQGNKIIWKPFDVSLKKTKVEELIEKLEKLKEEVKITMEATGKYHLPILYELKDRGYFVTVVNPLKMKQYCRALNFRKAKNDKIDAKQIAEYGLMYWKELEEYKVDGDNYRVLKELNRNYQHYMELRIDQMNYIDQTIHQTFPGIKKLILHNSGDFSKDKLLDFLEKWRHKDLVLEKTEEEFIEEYKRWAKEKRYHPNANKAKAIYQLAEDSISTQPSHNTKMETNIREGINLIKQINQILNRILSQMIEISEPLEEYQEAKKFSGISEKLAVQIVAEFGDLSKFKNKKSLISFIGIDAPPYESGNFKADQRKISKRGNAILRKVGYQAMKCMMSAKKPENEIYNYMIKKEKEGKAKKVCKFAGLNKFLRIYYARVMNSKAAKKELQAA

SEQ ID NO: 428139 - protein, 332 aa, unidentified
MYIGMDIHKRYAQVAVMNETGRIVEETRVDNASLDEFAQRRDGATVALEATSNYYHIQDTLSKHLDVHVADPEELKLIGHSMQKSDQLDAKQLARLARLEAIPESYVPSQQLRECRELVRGRHSLIEQRKDTANRVHALLNKQGITRNVKPLSQDGREALRDLSVEDPADGILASYLSVIETLTEEITEIDQKIEEKASSIDAVQRLMTIPGVAAYSALTIYAERGEVDRFDSEKEAVSYAGLDPVIRESGDSRKEGGISKQGSAHLRWVLVQCTMSAVHTVGDEYLSRFFNRLDKRKHSMVARVATARKLLVSIYHMLDRQEVYDPPGVSA

SEQ ID NO: 428140 - protein, 344 aa, unidentified
MVTTIGIDPHKATHTAVAIDDDETVLGEFTLRADQDQASKLIDWATSVDGDGRVWAVEAATGLGHLLSQQLVASGETVVDVPPVLASRIRVLSSGTSNKNDENDARSVAVAALRRESLAEVKREDEAAVLRMLAKRHLELTALRTQAVCRLHAILATLKPGGMGHRLSARQAARMLSGIRGLDAVGEQRRLMAKAHIVDIRRLDRDLEANKVRIRTAVAAADTSVTDIYGVGPVVAAFLIGYTPPIERFTTPDRYAAYNGTAPIEVSSGAKTRHRLSRRGNRTLNHAIHTAAVTQIRHHTPGKAYYDRKIDEGKTNKEALRALKRRISNAVYRQLRTDAERRDG

SEQ ID NO: 428141 - protein, 261 aa, unidentified
MSQNNLPILYAGLDVAKLSLQLHLAGRFHTLANDAKGHAQLLKLLRPHLHVHVVCEATGGYEQSVVRALQAATVPVSILEAGRVRYFARAQGQRAKTDPIDAAVLSEYGQTFQPAPLPPTSPEQQKLADWVQRRRQLVRLLVIEHNHAEHYTNPFARRQSRQLIKLLEKQIDQCDQAITKLIAEDASLTHKAKRLQTIPGVGPVVASTVLAEMPELGTLNNQTVAALAGVAPYNRDSGTQKGRVLLVVAVVRFGAPCTWPL

SEQ ID NO: 428142 - protein, 312 aa, unidentified
MREHCYGGIDVSKDRLDVMVLPDSKSFSVDNNAAGYSELVKRLRDLPIAAIGIEPSGGYERAVIRTLLAAGLSVRRINPNKLRQFARARGVLAKNDRLDARLIAEYVTIMPTRLVQRDPATEQLAEVVTMRRQLCDEHVAVENQTTHLEDAMLRRLNKRRLARLEADILLLDTRMAQIVASHANLTRRYELLTSMRGVGPTLAFTLIALLPELGQMSRKQIAALVGLAPYDFDSGRLKGHRCIYGGRLPVRNVLYMAALSACRYNPALKVFHSRLAATNKKPKVIIVAVMRKMITTLNAMLRDNVAWQPKSA

SEQ ID NO: 428143 - protein, 394 aa, unidentified
MKLIGIDIGKNKHFFCVMDQQTGEIISQPVSFSNDKEGFDFLVQKIKSYPKDSILIGMEDTGHYHFALLKYLLDLQYTVALINPKTTDFNRKMQGGITKNDKLDTINICDVLDTPERKKQYRITKVNSFDLYEQKQLTRHHHNLKEEENVYKNRLQKCIDIVFPEFNKLFNSKYGIVYMNILKMFGSAENIANTDIRTIRKCFEIEGRGNRISLTPERLKECARSSIGISSSAEVIQIKHLTAQIELIEEQLTEIDKKIEEFSIQNNSPILSIPGISHFSGTSILAELGDIRNYSKPSQIIKFAGVAPLHYESSQFNAQHTAITKKGSKYLRKTLYQIILPVIRHNPVFNKYYQLKISQGKGHRCAQGHCVRKLLRIIYHLLKTNQQFDPQLLR

SEQ ID NO: 428144 - protein, 352 aa, unidentified
MTRITTIGLDIAKSIFQVHAIDAGDRVVVTKAIRRAQMLAFFGRLEPCLVGIEACGSAHFWAREIGELGHTVKLMPPKYVKAYVKRGKTDAGDAEAICEAVTRQTMTFVAVKSAGQQALAMLHSVRETLIGQRTQAINALRGHLSELGVIAPQGLLGQAELARIVRDDDDARLPLIARVALKLLVAQIEAVSGRIAETDAALRAEHKSSAQSRALETVPSIGPVIASALRARVGDAHGFENGRHMAAWIGLVPEQDSSGGKVKQRGISKKGDRYLRRLLVSGAMAMVQHAQRKPDKYPWIAKLLGSKPPKLVAVAVANKTARIAWAIMARGGTYDPGFHAKRTAAAVLAAPV

SEQ ID NO: 428145 - protein, 366 aa, unidentified
MMGWMAPLRHLSAKLLDRISSDGEPSMGEVTTIGLDLAKHVFQVHGVDAEGATVLRKQLRRAQVLAFFSRLPPCLVGLEACATAHYWARELRALGHEVRLMPAQYVKAYVKRNKHDAADAEAICEAVVRPTMRFVPVKTADQQAAVLLHRGRERLVRQRTGLVNALRGHLAEFGVIAPQGLRNVGKLIAIVRDERDARLPDLARQVLQVLAAQIEQLEAAVAAIEKQLMAWHKSNPVSQRLASVPGIGPIIATAIAATVVEPSGFRSGREFAAWLGLVPRQNSTGGKHRLGGISKRGNQYLRRLLINGASANLLRSKATNADPWVIGLRRRRPPLVVAVALANKTARIAWAVMHRHENYQRVAAAA

SEQ ID NO: 428146 - protein, 341 aa, unidentified
MQITTIGLDIAKNVFQVHGIDAAEKVVVRKQLRRSQIIAFFEALAPCLVGMEACATSHHWARELTKLGHEVRLMPAKDVKAYVKRNKNDAADAEAICEAVRRPTMRFVRIKSAEQQGQLMLHRARDLLMRQRTQLINALRAHLAEFGVTAAQGREGIKELLAIVAQDESSRLPIDAHASLTVLAAQLQAVQTMIGSIEKRIVAQHRSNEASKRLETIPGIGVVGATTITAVVTDPKAFRSGRDFAAWIGIVPRQDSTGGKQKLGPISKQGDRYLRRILIVGAHSVLRRARQHPEKYPWLTQLLARRPFKVVAVALANKMARIAWALLARGGTYRAPQLVAV

SEQ ID NO: 428147 - protein, 322 aa, unidentified
MSVSVLGIDISKQKFDAALLIDGKTKHKTCKNSTEGFETLMLWLEKQGIQKIHACLEATGNYGEDLAISLHEAGHIVSIVNPARIKGFAQSELIRTKTDKIDAGVIARFCLAMKPGAWIPPSPEIRSLRALVRRVDSLIDMRSQEKNRISTAHESVIVLIKEHIVYLDQEIEKIGRQIADLIGQNPHLTRRKELLDSIPGIGKATIPHILAELDDLEKFTHVRAMVAFIGLAPKETLSGSSMKGKPRLCKIGHARLRKALYMPALVSIQCNPVMIAFYNRLKDKGKNGKVIVCAIMRKLVHVIFGVLKSGKKYDPNFKPILA

SEQ ID NO: 428148 - protein, 410 aa, unidentified
MEVLYAVCCGLDVHKASVTACLRSPGDGPRRQQEVRTFGTTTRELLQLADWLTAAECTHVVMESTGVYWRPVYNLLEASFTLSLVNAQHVKMVPGRKTDVRDSEWLAQLLELGLLRGSFVPLAAQRELRDVVRYRKRLIEERAREANRILKVLETANIKLGSVVTTVLGVSARAMLKALIAGAGTPEELAELAQRSLRRKRPALAEALTGRVTAHHRFMLDHLLRHIEFLDEAITTYDRHIAALTAADADALAQLDTIPGVARRTAETIVAELGCDMTRFPTAGHAASWAGLCPGNHESAGKRLSGRTRFANRVLRQALVESARGAVFKRDSYLAAQYRRLIKRRGDKKAIVAVAHSILVIAYHILRDGGSYRELGGNYFDHLNAQRLTRYHTQRLTALGYAVTLTKSAA

SEQ ID NO: 428149 - protein, 345 aa, unidentified
MNITAVGIDLAKNVLQVHGVDARGKVVLRRQLRRDQVVLFFANLPPCLIGMEACASAHHWGRTLERFGHAVRLMAPQFVKPYVKTNKNDVADAEAICEAVSRPNMRFVPIKSVEQQAVWSLHRVRQGFVKARTAQANQIRGLLGEFGLVIPKGIWHIAPRVPALLEDASNELPLALRQLIDRLTCHLKELDHQVRELEREILAWHRSSDLSRKLEQIPGIGPLAATALVASIADARSFDNGRQVSAWLGLVPRQNSSGGKSTLLGISKRGDVYLRTLLIHGARSAILAARRRNDNKNGWLANLLNRRHPNIAAVALANKNVRTVWALLAHGRNFKPDYVPARAAT

SEQ ID NO: 428150 - protein, 442 aa, unidentified
MNKFAPLVEFNHLKATVRRNNNILLVGIDIAKRNHVCSFELTSGQIIRKTFRFSNDIEGFQMLIDKINTYRHQHQVEQVICGLEATATYWKPLALHLASEGLYVVLVSTLAVKQNRQTLDVSKDKNDAKDAHNICDLMAQGKFQYLNLRKGPVAELSRLFRIRFGLTKDKAKIRIKLRQILGDIFPELEAHFKNMLGATALALLKQYPFPNDILELGVEPLTQLIQAASHHRLGKNKALAIYALAQQSVGIDIEAEAVRFELQLLLKNLAGLLADLKATENKIVKIIQHDKNYSLLLSIKGIGPVIAAGLIGEIGDINWYSSAKELTKLAGLDLWSNNSGDSIRSGKHISKKGRKYLRTIAYEAAINCVRCNPQFKAKYQHLLDNQARCNKIKSIAYVAIADKVLRMVFRMLKDGTPYDPNYDDILKERYRCKKNNFQHKNQ

SEQ ID NO: 428151 - protein, 338 aa, unidentified
MPLYGGIDLHANNSVVVVLDDQDQVMYQKRLPNDLPSILKQLSPYQASLHGVVVESTYNWYWLVDGLMERGYVVHLANTAAIQQYAGLKYTDDHSDARWLAHLLRLGVLPEGYIYPKEGRAVRDLLRKRSQLVQHKTTHLLSIQNLLTRNTGRAMSGNRIKQLTAADVDGLLPEPELALAVKSNLAVMRCLETQIATIAQTVTQRVKLQAEFNDLLTVSGIGQILALTIMLETGDIRRFPAVGNFASYCRCVGSQKLSNGKRKGSGNTKNGNKYLAWAFVEAAHFAVRYNPCIKRFYQRKQAKTNTVVATKAVAHKLARACFYILRDQVPFDVSKAFQ

SEQ ID NO: 428152 - protein, 358 aa, unidentified
MLKYSLGIDISKKDIHACLSVIDTKQQVKVKASSKFGNRAQGFKEMLLWLARHKKEITIPLVITMEATGVYYENCALFLFKAGFDVAVVLPNKAKNYLKAVGLKTKNDKIDAAGLAQMGAQQCLELWQPLDEFFYTLRALTRHHQSLQELKTNINNQLHADQHSIYSSKTVIKQLKKLITGLDKQLNEVEQEIHEHLYSNAGVAEKVDQIIQIKGLGYMTVATILAETNGFALFKSIPQLVSYAGYDVIENQSGDHKGKTKISKKGNSHIRRAMHMPAFNMIRYDVGDFKPFFARILEKHHQKMKGYVAVQKKLLVLIYTLWKRNEAFRPNAKGITSGNEDTVSSFALAGGQNEVAPA

SEQ ID NO: 428153 - protein, 345 aa, unidentified
MEITTVGLDLAKNVFQVHAINGAGEVVVRKAMRRAQVLRFFERLDPCLVGIEACGTSHYWAREISKFGHEVRLMPPAYVKPYVKRGKTDASDAEAIFEAVSRPTMRYVAIKSCEQQAALTVHRTRDLLVKQRTQLVNMIRGLLAEFGIEIRRGITHALSLAERIATDGMPGIPALAAKMIACLAGQILDLQARLREIERELLAWHRSSDIARRLATIPGVGTICATAFAASVTDPHQFRSGRQFAAWLGLTPLQHSSGGKERLGRISKMGDKYLRRLLVVGMTSLVRRAKYKPDAVNRWLAALLSRKPARVVTVALANKAARVIWAIMARGGIYRAPQPAGAAVA

SEQ ID NO: 428154 - protein, 351 aa, unidentified
MGEYIAFDSHKRYTWVDRQDQSTGQETCHRLLHAPGAVRSYLSGCAPGTGVAVEATGNWYWIIEEIEQAGLRPLLVHPRKAKLMMGLTNKTDKLDAQGLNRLQRNGTLPTVWIPPGPLRDLRELTRTRLVLVAQRTRLKNRLTATLAKYGAPPSESSDPYGKRGRVELEKNLERLPEQTRWVSGQLLAQLDFVSAQIRELEQRLDALVEVTPEMQRLMSLPGVGVILAATIALEIGDVQRFPSARHLASYAGTTPRVHASGGKVRYGALRSDVNRYLKWAFAEAGNSVAVNHARCPERHVSQLYRRLRQRKGHPKAIGAVARHLAEAAFHVLQGEEGYRDPVFGRGRTSEV

SEQ ID NO: 428155 - protein, 350 aa, unidentified
MGEISRIGLDTSKAVFTLHGVDASGRGVLRLNLRRSQLLAFFSRLPPMEVALEACGSSHHWGRQLAALSHRVRLIPPQYVKPYVKRGKNDRVDAEAICEAASRPDMRFVAVKSVAQQAEGLVPKLRETLMCQRTQLINTLRGHAAEFGVTAAKGTAHVTALLASLAADPTIPDVAKEMLALLGQQIDQLNSRITALEARLHAMHKASATSRRLATIPGIGPLIALSLTLEVDPAAFRSGRHLSAWLGLTPKDHSSGGRQRLGGITRAGNERLRALLVSGAMAVIRHANRPASKTATDWLRQLLQRRPRKLAAVALANKIARIAWAVMTSGQDYRPPARPTSACPAAMVSA

SEQ ID NO: 428156 - protein, 347 aa, unidentified
MLYAGLDLSRQRLDVCVLDEEGRTIEVTAATPEVFGLRELVARISGHGDEVTAVIESMNGARFVHDQLELYGWDVEIADAVKVKGLAPLAAKTDKIDARVLAELGRRNLVPAIWLPDPSVRAERERARFRLHLVRHRTALKNRIHATLIAFGHPVPVSDLFGTKGRELLAGLAIPEPWSTTLATSLRMVDELEAEIDRCTADLQAAGADHPYIPLLMTVPGIAWVLGYTIAAELGDVARFSSPKKLAGYTGLCPLVRQSGHRDDRGPLAKNGPKYLRWALIEAATHAARHPAYRDRYEHTKRRLGRQRGSKVARVEIARELATAIWHMLVKNEPFNPGRSPARPLVA

SEQ ID NO: 428157 - protein, 341 aa, unidentified
MTPTINPTNAPSFFLGIDVSKKDLFCHIIGPDRLSSERFDNTSTGIKSLLKWLKKEAAVAQLSACLEQTGHYGDAIATALHNFQICSLHVVNPYQIKAFGMQKLRRNKSDTADARLIARFLKSEHSELRLWQPRSQQQQRITELSRYADSLTQDTARLKTKLDAQPEKSITASLKRRIKFQENELKATRKSIVGIIKSDAEISDKDKLLKTIPGIGDIASQIIIAELPDLSEFEDARQLAAWTGLTPQHYQSGTSGRTRTPITRIGSVHLRRGLFMPAMTARVFNPLLKTFGDRLKENGKNPKQIIIVIMRKLLHQIYGILKSGQPYDPEKRGFAGTKNGS

SEQ ID NO: 428158 - protein, 438 aa, unidentified
MTSNIVFNSDDLFISVGIDVGADFSWMSIALPNQQFVGKPYKLTHNCMESLETAVFKIKEAEKLYSLEIRIFLESTGIYHYPLFCYLRDKGFNCSVINPIITKNSTNINIRKVHNDRFDSKKAALVGLKPDLKVSIMPSELALNCRNLCREYYSLMDCRSAYANKLQGELRMAFPQYIGIFSKVTTNTSLTLLETYASPKALIDADEQEVIRIIKSTARFGLKYAENKYNAIIKAANDANEFGCISYSNIIRIRLYISFIRKYDEEISRLLETMKQLVKANEDTEFVRQLKLIETFKGAGFLSAISLMAEIGDFSAFKKPKQLFAYFGLDPAVKQSGKFEGTKVKMSKRGSAIARRVIHILTLQSISPARNGNAKNPVLREFYLKKCESKPKLVAMGAVSHKVCNMIFAILRDSKPFEIITPREHIRQYNSSKSNTAA

SEQ ID NO: 428159 - protein, 370 aa, unidentified
MTEATTIRFVGLDVHRDSIAIAVARRDGLPAESLATVPNDVEGLIRRLLRLGPPEALRCCYEAGPTGLGLARRLNQVGIACQVIAPSLIPVQPGARVKTDRRDAKNLAHYLRSGDLTAIHVLDPATEAIRDLERARDDAKRAERSARQQLTKFLLRHQRWFLGKTTWGPAHQTWLAQQRFDQPAQQDVLNDSREAVEMASARVARLTRQLAERSAAWEQAPLVTALQALRGVDLVSAVTLVAELGDFRRFASASELMSFVGLVPSEHSSGGSRRQGRITRTGNSHVRRILVESAWHYRRQPRLSKAIRERNERVSPPVRVIAWKAQHRLHKRLGRLLGRGMPAPRAVTAVARELAGFVWAIAREEVLLAS

SEQ ID NO: 428160 - protein, 412 aa, unidentified
MEGETVIAGVDTHKDVHVLCLLDGLGRKIWSGSFRADPEGYDRLAEAIGDPGSCAVVGVEGTASYGAGLTRRLVELGYNVVEVLRPKRDKARPGEGKSDPLDAERAARKAASGRGCSVPKSQDGWVEAVRQLYVARRLAVATSTSCVACAKSMLTTAPGALRERFRGRERPKDLMPLLARRRKAGDALEESVLASLRSVAAVWKEARSQVESCDERIRALLEANAPALLGVEGCGTTTAAALVVAAGDNPGRLKGEAAFSMLCGVSPIPASSGKTDRHRLNRGGNRQANWALYEIAIKRMAYDERTKRYVARRTSEGKSRREAIRCLKRYIAREVYRVLMDPNPDGAAPEGPELAKMRKAMRVTQKQAAEGLGLSAATLGHLEHGRRRSTKLERRYYELLCELKGALPQTAS

SEQ ID NO: 428161 - protein, 355 aa, unidentified
MCAKKTGSIEDLAVVGIDIGKDTFHLVGFDRSGQFVIRKQIKRLALNATFEQLPPCIVGMEACLSAHFVSRTLRGMGFEPRIIPAIYVKPFNKGQKNDYNDAEAIAEAALRPNLRTVSEKNQDQLDLQALHRVRARLVSRRTATINQIRAFLIEQGITVRSGLRALKNSFEKILDQRRDEISPRMRGILIGLYGDWLWLDKRIEDVSGEIEEISRTEENCANIMTIPGIGPMISTAMVAAVGKGEAFDRGRDFAAWVGLVPRQFSTGGRTILGRITKRGSRYLRMLFVQAAKVIMMRPHRWSDFSFGPWLTEAVARMPRNKAAIALANKLARTAWSLLRHGTRFDAPKDAAMEAI

SEQ ID NO: 428162 - protein, 458 aa, unidentified
MRKSDKKQLRVKGPEKSGLPLINPDAAGIDVGAREHYVAVPADRDPQAVRCFGAFTQELHRLAQWLVQCGIKTVAMESTGVYWIPLYQMLESYGLAVKLVNARHVKHVPGRKTEVQDCQWLQQLESFGLLSGSFRPEAKICVLRSYMRQREMLIRDGSRYIQQMQKALTQMNLKLQHVISDLSGQTGLRIVRAIVVGERDRLKLAALKDRRVKSDVATIAKALEGDYRAEHLFALKQGLELYDYYQQKIAECDAEIRKEMQTLETRGSASAVLKRKPRSRHATGFDSQAELYRVLGVDLTNIDGVNESTAQLIVSELGLDICQKWATEAQFTSWLGLCPNNEISGGKVLKRGTRKVVNRVANALRMCAQSLLKSKSALGAYARRMRSRKDMPVAITAIAHKLARLIYRTLKYGEEYVDAGCELYEAKYKATMVKSLQRKAKLLGYRLVSDQILDAVVP

SEQ ID NO: 428163 - protein, 347 aa, unidentified
MNEQRHYVGLDVSLEATSICVIDDAGGIIWRGKCRSDPDTITAALRQHAPDVVRVGLETGQLSNWLTLSLRRRGVPVVCMDARHAKAALSLQINKTDANDAFGLAQVVRTGWYREVTVKSMDAHTLRMLLVARSRLVSQRQATANTIRGLLKTFGLVVAQGSKGLFPVRVREQIAGNPALIAIIEPLLAVWYAIREQVMMLDRQMIARARNDHVARRLMTIPGVGVVIALAYTAVIDDPARFRRSVSVGAYLGLTPRRYQSGEVDTTGHISKCGDSLLRGYLYEAAAVLLYRDARASTLKSWGLGLAKRIGMRRAKVAVARKLAVIMHRIWSDRSEYRWTAIPPTAA

SEQ ID NO: 428164 - protein, 412 aa, unidentified
MPLALPEALFFTGIDWAAATHAVCVMDAAGKITAEFTIAHSADGITQLIRRLARYGDPACIPIAIERPNGRLVDLLLEAGHPVVPVSPNAIKTWREGEVLSGAKSDAGDAAVIAEYLRLRRHRLQVAVPCSGETQALRTVVRTRSDLVDMRVAATNQLSALLEASWPGAKAIFADVESPISLAFLTRYPTPAPAAHLGEKRIAAFCASQGYSGKRPAAELLARLRSAPAGTADPALTTALGTAVLAMVAVLRALNTAVRDLDRSAAARLGEHPDGAIFTSLPRSGQVNAAQMLAEWGDCRQAYGGPDSVAALAGCTPVTRESGKHRAVHFRWACNKRFRKAMTTFADNSRHASPWAAKIYNDARAAGKDHPHAVRILARAWIRVIWPCWLNHTPYDPARHGAAAALAEPIAA

SEQ ID NO: 428165 - protein, 415 aa, unidentified
MAHTNDEVVYKRCSGLDVHQAEITAAIRIVSDVGQVTGHSRRFETTPAGLTALRAWLKEFEVTHVAMEGTGVYWEPVYAALRDHFDMTLCNALHVKKIRGQKTDQTDASWLAQLLSYGILKKSFVPKDDIRELRELTRSRVHHVENRARVVNTIHRLLERIGLKLCSVVTDLQGTTAQAILHDLANGICDPEKMADHARGKLRSKRKQLIEVLSVRVSSVMRKLLGQQLEALELHTKHIEALDTMIYEAVAAYSKHMQTLLSVPGIDFVAAAAIFAEVGPDMSVFEGSGALSSWAGVAPGNHESAGKKKQVGTSRGNRYLRRILFQVVLSIARLKEPNDIADYFRKKQARGFKKAAVAASHKLLVRIWRILTDQTQYAPPPRKPLTSAQRQRRLERIAEQLKQLGYEAKLTPLAA

SEQ ID NO: 428166 - protein, 345 aa, unidentified
MQVSTVGPDLAKNVFQVHAIDEAGAVLVRKALRRRQVMPFFSRLAPCLIGMEACGTSHFWAREIAALGHEVKLMPPAYVKPYVKRGKTDAGDAAAICEAVERPTMRFVALKSPEQQSMLALHRSRDLLIRQRTQLVNMIRGQLAEFGIVLAKGIQHALKLVGRLLDGEALDIPALAAKVIIILAEQVRDLQVRVGILERDLKTWSRDNQVVVRLQTIPGIGIITASALAASVTDPQQFTSGRQFAAWLGLTPRARSSGGKERSGRISKMGDQYLRRLLVNGMTSRLRWLRHHPETQPWAAGLLQRKPAKLVAVALANKVARIAWAVMTRGETYRAPQPSTREVTT

SEQ ID NO: 428167 - protein, 516 aa, unidentified
MSVGKRQSTNARILQQPLQPTPTAPIVNPPPKDAQSQAITRPHQAAADLQRAARIAERLRAEAEACAKLAAQPVRHPHAAGIDIGDASHWVCVEATPDGSDTLREFPAHTPGLRQLVAWLRLCAVTTIALEATGVYGHVLYLTLLEAGFEVITAPPQFARQIKGRPKTDKRDCQWIQRLHKLGMLPSIFQPNEATHALRDYVRQRANLVRLSGQHIQRMQKALESMNLKLTKVLGDITSATGLKVIRALVAGQRDPAQLAKMRDRRCQHSAAELAQALDGRYRPEYLSELRNCLALWDSYQEVIAALDAEIAGHLRSMRRQTELPPLPPKPRVRGRKPHDPRFDVRTALYYATGVDLTTMEGIDELHALTLVSELGSDFTKWPTVKHFTCWLGLCPNWQKTGGKVKSSRVRRGKNRAALALRLAAWSLMRSHSYLGAYLRRQRSRLGAPKAITATAHKLARIVYHLMRFGETYMKQTEEAYAAQVRERLEKQLHRRARELGYTLSKVETTAPTAAE

SEQ ID NO: 428168 - protein, 317 aa, unidentified
MTQNGGIVGIDISKRKADACIRASGASLSKPSTPAGRAELIGWLREHGVGLAVMEASGGYERDWAEALREAGFEVSIVDPKRVRYFARSMGCLSKSDPIDAAMIAWYAEIVAARARKQTHDADRERLDRLMTARAMLKRLQTQVEQLAEHHQPPAVVKVQQALAKTIKAQLAKLEATIATQVQANKTFAERDGIIQSVPGIGPTFAAAAIAWLPELGHITNKEIAALVGTAPYVDDSGEHKGERHIKGGRREIRDLLYMVALGAATKHNPVLKAHYQQLLARGKEKKVALVACMRKLIVILNTMLARGQKWTPPALA

SEQ ID NO: 428169 - protein, 417 aa, unidentified
MLKIVHKVCCGIDIHKKFVVATIGKTNEAGTTDYETREFSTFTETLIRLRDWLVSNGCREVCMESTGKYWIPVFNILETECNVFVANPKYVKGIRGKKTDKRDSVWLCDLHKHGLVQNSFIPPWRIRQIRDLMRYRFKLTNMKSSEKNRIQNSLTVSNIMLSSVVTDTFGKSSMRIVNHLLENPEDTTFDVGSLMHKGIKASPEEVSKSIQGTLTKPQAEKMIVCLTHLDDIDKYKASIESAVLELSLPYQAQIELLLTVPGIKDIYTAIGIVGEIGVDMSVFISARHLCSWAGLTPQNNESAGKKKSVRCSRAGAYIKPLLVQCAHAAVKSKECPYFRLRFEQISRRRGKKKAIIAIAHMLLNCIYHMISRNEAFNYELYRIDNAPKPKQVPEITKEQAILLLESLGAQVIMPAVV

SEQ ID NO: 428170 - protein, 483 aa, unidentified
MVLRVPIGSWMPYKRINLPKTTRHGAILTLKFKNMSKIKTKNEKVKRISQLPVIRPATAGIDVSDAEMMVAYPISSEQLEIRAFGCFTTDLHSIVKCLKENGITSVAMESTGVYWVALFLLLQEEGFEVYLVNAKHVKNVTGRKEDESDAEWIQKLHSCGLLNASFQPDNMTRTLRSMVRHRKNLVRTSSSYINRMQKALELMNIKLHTIISDIDGKTGLRIIEAILEGERNPEILADMRDKRIKASREDIVKSLEGYWTTEHLFELRQCYQLYCTHRQMIEECDREIEKQLVEQIASGNEGIIPDIPKVKRKVSRGKHKVPFNLTAHLREILGVDVTEVVGISEISALTIMSEVGTDMSKWKTEHHFTSWLGLAPNTKVSGGKTISSRIMKKKHHAGQAFRMAANSLYNSKSPLGDHYRRIRAKAGAAKAVVATARKLAIIYYKMVANKEAFNPKALEDYQQKYKQKKINQLKKKIALLEAA

SEQ ID NO: 428171 - protein, 406 aa, unidentified
MEVLYPRCAGLDVHKDNVVACVRIAEGRSVEREVRTVGTTTRELVRLLAWLEESGVTHVAMESTGVYWKPIWHVLEGQFELVLANAKQVKNVPGRKRDTKDAEWIADLLAHGLISGSFIPPAPIQELRDLTRTRKQLSRERTQHVQRLQKVLDDANVKLSSVLSDILGVSGRAILHALLKGQTDPKRLAALARPGVKATPAQIAEALEGRLTEHHRFLLELHLRQIDLLESTIAGLEHRIERSLQPFCRQADHLMTAPGIKEQVAAAIIAELGVDMSHFASDGHAVAWAGLKPGTDQSNKKLKGTRTKKQRWLKTMMVQAAWAAVRSKDSYLRAKFLRLRARRGEKKAIIAVAASLLRSVYHMLKNDADYKDLGADYFQGDKERTARQLQKRLQRLGYSVDLRPAA

SEQ ID NO: 428172 - protein, 300 aa, unidentified
MEYYVGLDVSLKQTSICVVDQTGSVVREGVVDSDPEAISVYVRSKAPDAVRIGLETGPTSTWLWTELKQLGLPVICIDARHAKAVLKMQINKSDRNDAIGIARIMQTGWFKEVHVKDIDSHSVRALLASRALLVKIKRDLENHVRGLLKNLGLVIGRAKFNVFAVRVDELIEGRPELVAAVRPLLEARNAVEQQVCELDRKVTRLARHDAHVRRFMTVPGVGPITALAFKATIDDPARFVRSRSVGAYVGLTSRRHASGEVDWSGRISKCGDAMLRSYLFEAAGVLLTRVPKWSAVKAWG

SEQ ID NO: 428173 - protein, 357 aa, unidentified
MSKKNAAGVDTHRDSHSIVIVDPVGHVLKQWTIATTVEGYQQAIAAAAEFGEVDWGIEGTGSYGRGLADALLRAGATVYEVPGNLTKRHRRHSSRKGKSDQQDAHAIAEVVLREGDRLPRVEQSDEQEAVRLLYDRRDRCVRSRTEAINRLRAGALRLALRGLPQDLTTGPALDGYEDALGTVSASSHTSRALLDEMTDTIEDVRRLNSTILALERRLVPFVSRLVPNLLQLRGVSTIVAAGLLGHAGNLNNCRNADAFAMRAGVAPVSCSSGRSESVRVNTGGNRQLNRCLHIIALTQIRSEGHLGKVYYDRKRTEGKAHRSALRALKRQLATVIFLRLKAASNDAIAAALEAIAA

SEQ ID NO: 428174 - protein, 410 aa, unidentified
MLFVGDDWAEDHHDIEIVDEQGRRLVRRRLEEGAAGIAALHALIADHLDDQGEPEQVVVGIETDRGPWVQALLAAGYTVYAINPLQASRYRERHGVSGAKSDPGDAHVLAELVRLDRDHHRPVAGDSAIAEHVKVVARAHQSMIWSRQRQTNTLRSMLREYYPGALAAFDDLAGRDALAVLALAPTPAVGRRLRVARVEKALRAAGRQRNLTTTAQRIVEVLGGEQLEAHPGVVEAYAASAKALVAVISELARQCEVLKGEVEAGFGRHPDAELYLSQPGLGPVLAARVLAEFGDDPTRYADTRARKNYSGMAPVTRASGKARVVLARHARNRRLADALYFQAFAALNASPGARAYYDAHRARGNTHHQALRALANRLVGILHGCLRRQQTYKEAVAWPALAEHAHSSAA

SEQ ID NO: 428175 - protein, 393 aa, unidentified
MKRQPVQPAGVPTFIGIDYHKAYSVYSVLDAQGSRLGQGRIDHAHPEDFGALVRRWPGCHVVFEAGMNWHWLFEILEREMPSERIVLANAFKTRIIAEAQIKTDKVDARILADLLRGRLVSSVHIPGRETRQIKEVLRQRCFFVRQRTMLRNRIHRLLGGQHEVKLPQCSDLFGRKGLGFLERLELPAPARLLLTQQLTLLKELAARIREDEKALEGLLEQSRALQHVRSLPGMGPILAAVVVTEIDGIERFPSAQKLCGYAGLCPSTSSSGGKTFQGKLLPHCNKWLRWAFVEAAWVAIGCSAYFGDFYKRKRALGKKPNIAILATARLMARITWQLLTQRRDYTSVVETQYLRSRPAERIPCAVGLVKEVQKPLKDPSDFPRRRLSPAAPK

SEQ ID NO: 428176 - protein, 353 aa, unidentified
MHTHQQSTEPVATIGLDIGKNTFHLVGLDRRGAIAMRIKVSRNQLVRRLVNLPPCLIGLEAGSGSHHIARQIQSLGHDVRLIPAQYVKPFLKGHKNDYRDAEAIAEAVQRPTMNFVAIKTPEQSDLLSLHRVRSRLVRQRTAIINQIRGFLIERGITVRQGPGPLRKVLPEVLCSPPEALSPRLLRLISELDQDWRRLDDRLEVLSGEIESLSENDAACQRLMTVPGIGPIISSAVVAAIGTGSGFKQGRDFAAWLGLVPKQESTGDRTKLGRISKRGNKYLRTLFVQAAHVVLERRPAAAMRALWPWIAQASKRLAHRNLLAIALANKLARIAWAVLARGRDYEPRITPNAP

SEQ ID NO: 428177 - protein, 427 aa, unidentified
MEQIPQPIVKPEPEFAALIAIDWADQKHYWSLRAAGQDGLQRGTLDNTPEAVEVWIMALHVRFGGRPLAVALEQRRGALAVMLSKYAHVHLYPVHPTTLAKFREAWYPSRSKSDPSDADLLLEILTTHRSRLRRLDPDTVEMRLLQNLVENRRKLVDERTALSNRLTDLLKLYFPQILWWFNDVASPVVGDLLEQWRSLQDLQQVQPAKLEKFLRDHHCSEIPERLTQIRQAMAATHDRALLDSAPNLVAAWVRQMAVLRESIRQLEKRIAELAAQQEDWPIFQSLPGAGAALAPRLMVALGTQRDRYSSAGDLQCFSGIAPVKEASGNTQWVHFRWACPKFLRQTFHEWAACSIAQCEWAKAYYEQQKTRGKQHHVAVRALAFKWMRILYRCWKDRQPYREEIYLASLAKRRSAMVKALAQASQLP

SEQ ID NO: 428178 - protein, 376 aa, unidentified
MREKLRFLGMDVHAETIAVAIAEPDGEVRSLGTIANREDSIRKFIRKLGTAEQVRACYEAGPTGFVLYWQLTQLGVDCAVIAPTLVPKKPGDRVKTDRRDALKLARSHRCGDLTAAWVPDEDSEALRDLVRQREAAKQDQLRARYRLTKFLLRTGQRPPLGLKAWTERYMRWLAQVRYTQPAQEVTRLDCMNEVEHMSARVKRLEEAILEVVKLAPQPMQDVIRGLQALRGVAHISTVTIASELGNISSRFQSARKLMGYCGVFPSEDSSGNRVRRGGITKSGNAHLRRIVVESAWCYPHLPRVGEKLRKRHEGVPPAIIEIAWKAQNRLHRRYLTLSMAGKDQRKIMTAVARELLGFIWAIAIKAEVSCRQPIAA

SEQ ID NO: 428179 - protein, 392 aa, unidentified
MIFVGIDVAKNKHDCFITNTDGESLFNSFTITNNLDGFNDLYRKISSVTENITKVKVGLEATGHYSYNLLGYLLDKGFPTYVINPLHTNLYRKSLSLRQTKTDKVDARTIASMLMSDVNLKSYSDTSYHNEELKSLTRYRFDKVKERSALKVSISRLVCILFPELENLVPTLHMTSVYSLLYEFPGASFVASAHLTRLANLLSKASKGHYNKDTAVLFRQTARDSIGSVMPAKSLELKHTIKLIQELTSEIDEIEAAIKQIMDEEIKSPILTIPGISYRMGAMIIAEIGDFNRFDSADKILAYAGMSPSTHQSGQLDNCHSRMEKRGSRYLRYALYNATKYVCHWDKSFGAYLEKKRSEGKHYNVALSHAAKKLVRTIFAMERSGQSYIASV

SEQ ID NO: 428180 - protein, 339 aa, unidentified
MQVTTIGLDLAKNVFQVHGITEDGTVAFNRSLRRAQMFAFFEKLEPCLVGMEACGSSHYWARELSKLGHAVKLIAPIYVKPYVKRGKSDAADAEAICAAVTRPTMRFVEMKSPEQQAILSLHRARDLIVRQRTQIINMMRGLLAEFGIIFAQGAGHAIQFAKRVIEGHSPELPQAASDVVTDLSEQLLMLHERVNWYSRRMTKVAKSEPRIALLQTIPGIGPITASAIVATVGSGEQFRSGRDLSAWLGLTPINKSTGGKERLGRISKMGDRYIRRLMVVGMTSRIKQIKSTPERFDPWFADILQRKPAKLAAIAMANKTARIIWAVLSRNEPYQARTV

SEQ ID NO: 428181 - protein, 400 aa, unidentified
MSEPRARVWAGVDAGKGHHWAAVVDETGATLWSQKIDNDESAILIALGEILGRAGEVHWAVDISGTSSALLLALLAAHGQQAVYVPGRTVNRMSGAYRGEAKTDARDAYVIAETARHRSDLATIDVPAQLAADLALLTAHRSDLVADRVRMTNRLRDVLTGVFPALERSFDYSNHKGALILLTGYQTPASIRRRGRARLTAWLAARSVRGADAVAATALEAAQAQQTALPGEEVAAQIVADLAAQIIALDERLKRIDRQIRDTFRHHPQAEIIESMPGLGPILGAEFVVAAGDLAAYADAGHLASAAGLVPVPRDSGRRTGNLHRPKRYSRRLRRVFYMSAQTSIIREGPNRDFYLKKRGEGCKHVQAVIALARRRTSVLWALLRDNRAFTSAPPVTQTA

SEQ ID NO: 428182 - protein, 441 aa, unidentified
MMAVMIGVDPHKASHTAVAISAAEEPLGELRVRACAVQAGRLLEWAAAWPERAWAVEGADGVGHLLAQQLLAAGERVLDVPPKLSARVRLLATGNTNKNDPNDARSVAVAALRSAGCREAKRDDHAAVLKLWSKRYRDLGRTRTQVACRLHAVLCELIPGGVCKEITAAQAAQILASITPADAVAVARLQLAAEFTEDLRGIDAAIRETRKKLAIAVRAAGTSLTGLFGAGPVIAAAAIGDVRQVSRFVSRDHFAAYNGTAPIEVSSGPRKIYRLSRRGNRRLNHAIHMAAVTQIRHRHSQGRAYYDKKLAEGKTPKEALRCLKRQISDAIFARLQADARRAAAAAAKSPGGQPGNDSVASAAGSHPEHRLFGQATPGPATYPTTPAGEDAPAPFPAWLPSRASERPGQGPGVARPRSNAASLSPAAGCQLVPVTFGLRAG

SEQ ID NO: 428183 - protein, 350 aa, unidentified
MVVVGADVHKRTHTFVAVDEVGRKVGEKTVTAVTAGHAEAVMWAREHFGDDVVWAIEDCRHLSARLERDLFGFGQNVVRVPPKMMAQVRASARTRGKSDPIDALAVARAFLREPDLPVASHDEVSRELKLLVDRREVLVAQRTAMINRLRWRIHELDPERAPVARSLDLAKHRVILGDWLNTLDGLLAELASDELADITRLTEQINALAKRIGEHVRAVAPVLLAMPGCGELTAAKLVGETAGVTRFKSEAAFARHSGVAPVPVWSGNTHGRVRMTRSGNRQLNAALHRIAVTQIRLDGLGQTYYRHRLAQGDSAPEALRCLKRRLARVVFRHLHTDHNNRQKPCQLAAA

SEQ ID NO: 428184 - protein, 346 aa, unidentified
MTTVDATRLVTGGVDTHLDVNVAAALDRVGGLLGVAEFPTTPAGHRQLAEFLSSFGTLTRVGVEGTGSYGAGLSRFLRRAEVEVVEVDRPNRQSRRRTGKSDPVDAIEAARAALSGRAQGAGKSRDGNVEAIRTLVVAKRSSRSTKIKTLNQIRHLSFTAPEELRSRLKGISRQHLAAEAAALRPRAGGDPVIFATKTALSLLGRRVLVLDAERERLNVLLAELVEQTAPQLLEIHGVGVDTAATLLVTVGDNPGRIRSEAAWAHLCGVAPIQASSGKVTRVRLDRGGDRQANSALWGVVITRLRSDPRTQAYMERRLKEGRSKPEVIRRLKRYVAREVYHRLPRT

SEQ ID NO: 428185 - protein, 440 aa, unidentified
MQGKKKRAAKQVLQELREEVKASSNTLLVGIDVGKTRHCACFMVSTGKLLRRKLFFGNTIDGFNKLLRQAKFYQKKMNLPKVLFGMEPSGFYWVHLYEFLELREKRAVTVSPLAVRRNRETIDVSKDKSDPKDAYNVTDLIYQGKFYLPIYRDKEIRQLKRLMQVYHKLIQQKASLRCRLRGVVGYVFPELERYFCDITAKSMILILENFPFPKRIKEIERREFVHFLVKRNPRLSWKRAEKIYDLAGSSVGITGEEEAVSLEIRLLLDELKRINENIALINAKVNSIVGKREDYELLLTIPGIGPVTAAQVIAEIGDVSNFSSGRQLIKLAGLDLCGAQSGTSINTLRHISKRGRKVLRTVLYQAVVNCIRCNSHLRTCYLRILANQQGKKKVKPKAIVAVACKLLRIIYRMLTEKKAFDPNYDKILRERFFVQALKVA

SEQ ID NO: 428186 - protein, 316 aa, unidentified
MNKKNHTEVNIGIDTSQTQLDIYVRPCGDYFSVENTPKGAKEAACRLRSYQPTRVLIEATGRLEMLFVCAAHKARLPVVVCNAGQVRQFAKASGRLAKTDKLDAQDIAHFGEALEPALTELKPEKLRQISDLIAVRSQCLDMSTMQKHRLHRMPQSVHKPIQRILKAVQTEVERIDKQLDKLVEAIPQWRDQRDLLMSAKGVGKVVAYTLMSELPELGKLNRKEIAALAGVAPMNRDSGSYRGKRRIYGGRRKVRTVLYVSMLSAIQYDPKIKALYERLVAAGKPKKVAIVACMRKQLTILNTMMKNGTHWDEKLA

SEQ ID NO: 428187 - protein, 412 aa, unidentified
MKTTMSFSVFVGLDWADKKHDICIQKKGQSNRSFQQIIHSPESIDSWINSLHKRYKGKIAIAVELNKGPIVYALQKYPYVTIFPIHAATLAKYRETFTSSGAKNDPKDAEIALDLLLNFPNKFKPLELQSGSIRKLAILVEKRRGLVDDKRRFVNQLICTLKQYYPQPLDWFTRRSTDLFCDFICRWPTIQQLKRSRENTIRKFFQSYGGKSMVGLEGRLEQLKSAQPLTNDPAVIEPYQLLAKSLSMIIKTTTMAIREFDKEISTLFHSMEDAELFNSLPGVGPCLAPRLLVAFGEDRRRFQNAGQVQAYTGVAPVTVSSGQKTWIHWRWQCSKFVRQTIIEWAAKTIRTSYWAALYYEKQRSKGNSHQAAVRALAYKWIRIVFKCWKDRKFYSETKYLQALRKRSSPLLS

SEQ ID NO: 428188 - protein, 364 aa, unidentified
MEQITRGERGRVVVRVGVDLAKRVIQVHAVDAAGQLVLGRALARDRFIAWCAQLPGGCVVAMEASSSAHHWARKLCSLGLDARIIAARLVKPYRKQGSSGKNDANDAAAICEAASRPSMHFVPIKSVEQQSMLCVHRLREGIKEERTACINRIRGLLAEFGLVFAQSPKVLRLALADTIEDASNEMGTLARLTLQRAHAQWRELDEHLAWCDERIAEHTRTNEQVKTATTLLGVGPLTASPVVATVGDFRQFRNAAQFGAWIGLTPKQHSSGGKTRLGKITKRGDTYLRTLLIQAAKSAVLTAHRRSDRISNWLCTLRERSGWQIAAVALANKNARILWALMTKGEAFDANHLSIKPGMSSQQT

SEQ ID NO: 428189 - protein, 342 aa, unidentified
MTYFTALDVSLRFVSICVVDDTGQVCFEAKVPADVHRIATCLRKFSDQVKIVGFEAGALTQYLTYGLQAAGFEVVCLEARQVNAALAAMRNKTDKNDARGIAQILRTGWYSRVHVKSLQSHQIRALLASRKAILKKCVDLENELRGLLRVFGIRLASKVPHGAYDAVVREQVETEPLLARALLPLLDAREVLYRTYLKLDNEVKAIVRHDRICQQLMSVPGVGAITALTFKAAVDDPHRFKRSRTVAAHFGLTPRRYQSGETDNPGRISKAGDPDVRCALYVAAHSLLSRSATWSSLKAWGVRLAKTRGHRRAVVAVARKLAVIMHKMWIDGTEFRWSAESA

SEQ ID NO: 428190 - protein, 405 aa, unidentified
MFEIEDVGVFLGLDVGKTAHHGHGLTPGGKKVFDKPLPNSEPRLRAVFDKLTAKFGTVLVIVDQPASIGALPLTVARDTGCRVAYLPGLAMRRIADLYPGEAKTDAKDAAVIADAARTMPHTLRSLELTDEITAELTVLVGFDQDLAAETTRTSNRIRGLLTQFHPSLERVLGPRLDHQAVTWLLERYGSPAALRKAGRRRLVELIRPKAPRMAQRLIDDVFDALDEQTVVVPGTGTLDIVIPSLAASLAAVHTQRRAMEAQINSLLEAHPLSPVLTSMPGVGVRTAAVLLVTVGDGTSFPTAAHLASYAGLAPTTKSSGTSIHGEHAPRGGNRQLKRAMFLSAFACMNADPASRTYYDKQRARGKTHTQALLRLARQRVSVLFAMLRDGTFYETRTPKDVELAA

SEQ ID NO: 428191 - protein, 336 aa, unidentified
MEPTTIAIDLAKRVFQIHYVEPDTGTIRSKVLKRAQLVPFFANRPASRVVMEACGSAHHWARVLARLGHDVRLIAAQFVRPFVKSNKNDAADAAAIWEAAQRPGMRFVAVKTEDQQAMLAMHRIRQQLVRIRVMQVNQLRGLLYEFGVVLPQGRRASIEAAKLALTSLADQLPAMLADSLQDQFSRLRELDEQIARIEQRILEWRRDDDACRRISEIPGVGVLTATAAVSVIGQANTFRSGREFAAYLGLVPRQNSSGGKTKLCGISKRGDVYLRTLLIHGARSVIAASKHLPERVRALLVRRPTNVVAVALANKMARTIWALLAHGRTYQPTPAQ

SEQ ID NO: 428192 - protein, 416 aa, unidentified
MSYTVAGIDIHKKVLMVVAATGGDEVADPAGEALTFECRRFGAGAAERKHIVAWLRERNVREVVMESTAQYWKPVWLDLEPHFEKLHLAQAHSNRAPKGRKHDFRDAKRLTRRLLADELMLSFVPDSEQRGWRTITRGKQQLIRDRVRLQNQLEALLEEGRIKLSSVISDLFGVSGRRILQAMAGGESDPHRLAALGDDRLQCSAAVLADALDGSLDSIQRALLKLYLERLHLLDQQIGQLDQMIATALRQHQDAVIRVAEIPGFGVDSAQQLIAEMGVDAEAFSTAGQFASWSGVCPGTEESAEQNHSSRSAKGNRMVRRILTQAAQAAVKKKGSYFQSLFRRFLPRLHYNGAIWAIAHRLGRLVWKILHDQVRYIEQGQEANPAAKKRRARKMVQALRKLGYAVALTPIAEPGR

SEQ ID NO: 428193 - protein, 360 aa, unidentified
MNCVGIDVSKGKSMIAVMRPFGEVVVSPFEVRHTASELSELARLLKSLDGETRVVMESTGNYHAPVARLLHDAGLYVSVVNAMLVHDYGNNSLRRAKTDKKDAVKLANYGLDRWLTLPRYVPEEDTRLMLKTCYRQYQQYSKVQTMLKNNLISLLDTAFPDVNRLFTSPPRADGSEKWVDFVATFWHCECVCGRSEKAFTTQYQKWCRKHGYNFSEDKALDIYASACRHFGVIPKTDTAKLLVEQAISQLQTTSSALAALKQEMQSLAASLPEYPVVMGMFGVGPTLGPQLMAEIGDVRRFHSKKALVAFAGIDAPPYQSGQIDVRSRSISKRGSASLRRTLFLVMSRSETSRSLHRLLI

SEQ ID NO: 428194 - protein, 419 aa, unidentified
MSFKILKNNCCGLDVHKTWIYACIGITDSLKRTEYKEARFSSFTKGLQELCDWLSKYNCTDVCMESTGKYWIPVFNVLEKNNIWVTLSHPKYTKPQKGNKTDRKDAKWICDLYMCGMVKPSFIPPADIRELRDLVRYRFKLTCMITGEKNRAHNCLTVSNLKLDDVFSDIFGKSSRSITEQILQHPGETFDVSPFVDSRCKTPTEEIQAAVDGAISKQQAVKLRQCLNHIDELEMHKVEIEREIFRLSDKYESILNLIRTVPGFDKTPMTAIQVLSEIGGDMSVFPTAKNLISWAGCCPRNDQSNHKIKSTRISRAGSYFKPVLVQVANALIKSKKHPEFTNRYRRIKARRGHKKAIIAICRMILTAIWHILTDLKPYTPEGFLESRPVNKSKVLTTSQALNLMKQRGYIIKDDVVPVT

SEQ ID NO: 428195 - protein, 409 aa, unidentified
MHVLYPRCCGLDIHKKTIVACMLLTDPDGATQRFVRTFGTMTADLLALGDWLEFHAVTHVAMESTGVLWRPVFNVLEEGRTLILVNAQHIKAVPGRKTDVKDSEWLADLLRHGLLRPSFIPPQPIRVLRDLTRYRKSLVELRTQEINRVHKVLETANLKLGAVASNVVGVSGRRMLRAIEQGESDSQVLAELAKGRLREKLPALRLALAGRVQPHQRQLIGELLDHIDYLEQSIHRMEVRIATLVAEQEQAVQLLLTLPATGPVTAAAILAEIGPDMTRFPSAHHLASWAGVCPGNRRSAGKQLSGASTKGNKQLKTILCEIAATIARSPGTYLHAFYHRLARRRGKPRAMLAVAHSLLVSIYSMLRDQVPYQDLGPDHFDHLHTQRLERHYVRRLEALGFEVRLTPAS

SEQ ID NO: 428196 - protein, 470 aa, unidentified
MAAVMIGVDPHKASHTAVAISAAEEPLGELRVRACAAQAERLVAWAAAWPRRTWAVEGAGGLGHLLAQQLLAAGERVLDVPPKLGARVRLLATGDVNKNDPNDARSVAVAALRSPGVREVRADDHAAVLKLWSKRYRDLGRTRTQVVCRLHAVLCELVPGGVAKAITAGQAAHVLGSIAPPDAVAAARCELAAAFVEDLRGIDARIRGTRSTLAVAVQATGTSLTGLFGVGPVIAAAVIGDVRHVSRFPSRDHFAAYDGTAPIEVSSGPRKVYRLSRRGNRRLNHAIHMAAVTQVRHRHSEGRAYYDKKLAEGKTPKEAMRSLKRQVSNAIFACLQADARRAAARAEGPGGQQGNGSVASAAGLHPRHRLFGQATPGPGHHPTTAAASPAPGPAGARGRAGHSSIAAPLPPATPQVQVERPQRSEDERPGGAARRRPHSAARKASGQRSTVKPQRPKGTSQGAKGTDGTP

SEQ ID NO: 428197 - protein, 329 aa, unidentified
MDSSSPLPIVGIDVRKVTLAVCYHVNDQVKHLEVRNSKAGFQQLVKVCGAHCRFVMEATGTYNLALAYYLHEQGGQVAVLNPLVIKRFIQMHLSKGKSDRKDAQWLLRYGQQQAVKPWKPDESVLVECRQLEQVTEQLLKQKTMVSNALEALQRQPIVSKLALKRLQQTLKALTQQVEVVEAELLALLEQRFASEMTLLCSIPGIGRKTAGMLLLFTGGFTRLDNYRQLIAMAGLSPREHTSGTSIRGKVRITKMGGGLIRGKLFMCSFSAKKMNAACQALFDRLVARGKNKKLALIAVCNKLLKQAFAIVKSGVPYQADFSSKLTLTP

SEQ ID NO: 428198 - protein, 370 aa, unidentified
MKKRITFVGLDTHKNSIEVALADEGANSEVRLYGSIGGDLDSLDKMIRKLRIPGAELRFVYEAGPCGYEIYRHLRAQGLHCDVVAPSMVPRRSGDRIKNDRRDACNLARLYRAGELTAVYVPHEDDEAMRDLVRGRQDAINAQRKARQQLGGFLLRHGVRYPGKCLWSLAHGRWLAGVKMPHPAQQIMMQEYIHTVEECTQRVIRLNEQIQQLLPDWRMHPLVTALQALRGVAPVVATTVVVEIGPMGRFKNPRQLMAYLGLVPSERSSGGSVRRGAITKTGNGHARRALIEAAHSYRHPARISRTILKRQETLTEPVRQIAWKAQLRLCARFRRLIARGKSRNRVMAAVARELSGFMWAIAKQVPVPQG

SEQ ID NO: 428199 - protein, 339 aa, unidentified
MSNTKLMAIDLAKSVFQVCGLNEHNQVIFNKKLRRNQLVEFIAKQPPSPIYMEACYSSNYWARRFNQMAHQSFLIPAQHVTPFVRGNKNDANDALAIAECSKRPNLRFVPIKTPRQQEIISTHRIRRRLVKNKTQITNQAHGLLTDFGIIFPKGIKGFKKAMNEIDENENLSSEFKQNILSLRDEYQFASDKIKQLDQYLNHYFETDSDCQIVSSIPGFGLITTTLLIAMIDKGQAFSKASDIGVWVGLTPKQYASGDQSKLGRITKRGDRYLRTLLVQAAQTAINWSNKRDDQYSLWIKQLVHRLGRKKASVAVAHKMIRLAWVLLQKQERFKVKMSH

SEQ ID NO: 428200 - protein, 355 aa, unidentified
MTEAYDGRQIVGMDLHRRRSVLVRMTEDGRKLGTARITNSPAALRKEIARAGQHPRVVLEATYGWYWAADVLEAAGAEVHLAHPLGVKAFTYRRVKNDERDSADLADLLRMGRLPEAWIAPREVRELRELTRYRLKLVGLRTSCKDQVHGVLAKLGITVTCTDIFGTAGSAWLGGLGLPQPYGGKVTSLRHLAGELTAEITMLSEVIASLLAGDRGYQVIQQLPGIGPVLAAVIVAEIGDVTRFRTAGQLCCWAGLTPRHRESGLKVARGHVTKQGSRLLRWALIEAIQRLPHDSVIGSAKAAIIARRGPQARNIAKVAAARKLLTLVYYGLRDHQIRALATPASEPPAPPALAA

SEQ ID NO: 428201 - protein, 524 aa, unidentified
MAVKSSSKNRRKAQPHALHKPRGVIHPRVQAVGPEHFALVCVDCAKARSKMMVADFYGRVLLEPTTVEHNQSHFDTALKSVRDAMARHHIQDTIVVIERTGRYHGPVQRAFGAAGFEVRIVHPFTTKQYRLPADPGNKTDDTDLSAIHRAAVNGFGLLEHEPDPVYVQLQLLARHRRDLVRQRVALQQKMLEHLQSFMPGYSKCVEDVFGSPVVLWVARKLGSAAAIVQADLAGLSQQVRQAGIKVHRSTLEKIVAWARSAPPAEEPASLHHRIFLGLDADQLRKAQSIQAIESELAGLLAQTPYLLLLSIVGINVVSAAEFAGEMGPIARYPKARAITGRAGLFPARYQSDQVDRRDGALVRHANHDLRYAILMIADNLIKCNDHFKVLAAGWRLKGKDARGVRVQVAGRFSRIAYQMVAGRMTFQHPCARQRDSILEKLIRFALEHSTAPDQLARALDAAVTQLPCTAYGEEAVPLVEELARVQKPRGAGPHPLAEILPAVLARLGVNLVRSPESGEADPTG

SEQ ID NO: 428202 - protein, 323 aa, unidentified
MMSTQYNYAGIDIAKRNFVIAVSSLSKTKTETNNPKGIAHTIEYLKKHNVALVVMESTGGLEIPAAKAIHRAGIAVIIANPRQTHQFAQSQSLTKTDAKDAKMLAFFAQMTAQKEGWQTMLYQPPTEAEEVLEALVNRRNQLVDMRTAEKNRLHQVHETQVESVKQLIAHFDRLIDELDKQIDDHTHTHFDGKAKVAKQIKGIGSTTTATLMAMLPELGRLSHKRLASLVGIAPHPRESGETKFKSRCFGGRSAVRKALYMATVVATRFEPLIRDFYQRLLSKGKPYKVAVTACMRKLLTILNARMRDYFTENGTTENGIQTA

SEQ ID NO: 428203 - protein, 465 aa, unidentified
MKAPAVQKQQASSRQNLPPEFAHLEQINLHAAGIDVGSAEHWVCVPVGRTEPQVRCFGCFTPDLEAMAAWLVSCGVTTVAMESTGVYWIPVFQILESHGLAVKLVNAHHLKTVPGRKSDVLDCQWLQKLHTYGLLAGSFRPDDQVCVLRSYVRQRERLIQGAALHLQRLQHALIQMNVQLHKVISDISGVTGMAIIRAIVAGERNPLTLAALKDPRIRSTHEEIAKALTGNYRDELLFVVQQELLLYEQHQQQLAACDTQIEQCLSGFDARTEQAPPPARNKRRKTTQNAPAFDLRGHLHRISGVDFTQINGLDALSVQTILSEVGLDPTRFPSVKHFCSWLGLCPGTRITGGKPLSSQTRRVVNRAANAFRLAAQAVSRSHSALGAFYRRMRTRLGAPKAITATAHKIARLFYKFWSTDETYTDPGEGYYEQKYRERLVKHLKKTAHSLGFDVVPQSPNPESVS

SEQ ID NO: 428204 - protein, 358 aa, unidentified
MMYVGVDVHKRVCRAAMVNDEGELVGEFSFMNSKRGIEDFMMKLEAFKDRMLVAVESTANLWMRLYDSLDEQGIKVVLSNPSKTRLIAEARVKTDKVNARILAQLLRADMLPLCFVPTRMQRDRRQFVRHRVHLVKMATEVKNRIHALLDKHGLKSPYKTLFSKKGLEWLNGLKLGFTDDAVLRSDLALLQALNEQIGFMEAKIAALAVNDERVRLLMTMPGLGYFAASLLVAEICDIGRFSSDKRLVAWAGLAPGVHQSGDKTVQGRITRQGNKLVRWVMVQSAHVARLHDERFREFYERYVKRRGDKKAVVAVAHEMLRIVWFMLKRNEAYRGERRGLSWRKFKGLERVAGIGLQV

SEQ ID NO: 428205 - protein, 336 aa, unidentified
MSKKVTLKQCLGIDVSMKKIDCCLSFYTEDLKIKVVATSGFENNPDGFVKLREWLNRKQDNALALHVNMEATGTYHEEAAYFLAGVGYRLSVIQPTKGKQYAKSLDEKNKTDKIDAGMLARMGLERELMPWSRPNEQLRCLKRMSRERIGLIRDRNALTNQLHALNHSFDAFRDSVERLKERIALATKQLSEIEAQMRELTESDPELSKRTKHVITIPGVNFVTAITVIAETDGFAGVGNRRQLVSYVGLDVVMKESGTLTWRPHISKRGNAYIRAGLYMAAVSSIIHNKTLKTYFNRLKDNGKPGKTGIVALERKLLVLIYTLYKNEQDFRLDYQ

SEQ ID NO: 428206 - protein, 350 aa, unidentified
MKIVGCDFHPSYQQIAVLDTETGEVWEKKLSHGNGEASKFYRALQGAALIGMEATGNARWFELEVEKLGHELWIGDAAKIRASYVRKQKTDKRDAAHILKLLVEKRFPRLWVPDVRQRDMRQLLTHRHKLVRVRTRLKTELQHLALNQGIQKKRQLWNEKGRALLASLPLEGWAQQRRKDLLQLLGLVEPQIEQLDKAVELAAKADPQAVLMMSQPGVGPITALAFSVTIGDVSRFERSKQVSSYLGLIPTEHSSGSKRRLGSISKQGNVFLRALLVEAAQSVVRHDPGFRKEYQHRCHHKEKGIAKVAAARKLAVRLYWMLKSNKSYTELVLNGGSPRHPVAAKAKPLS

SEQ ID NO: 428207 - protein, 311 aa, unidentified
MNNTIGIDISKDTLDAHRLADGQHKQFLNGKTGHAQLVKWIGKQSDPLIIFEATGAYHRQLERVLCTHIIPFVKVNPKQARRFAQASGKLAKTDRVDCEMLAKMGAALQLMPKPFTAENLYDLKELLSARRALIKDRTAAKARKATVINALIKQQLEKRLRQIKNDIAKIDALMLDVAREDQYMSERLDILFSIPGIGVITALMILVDMPEIGALNNKQVASLAGLAPMSQSSGKWMGKARIQGGRPNLRNAIFMPALVAIRHNADLKTKYDQLVTAGKEKKVAITAVMRKLLVLANALLRDNRKWAEKAA

SEQ ID NO: 428208 - protein, 412 aa, unidentified
MHNRQNYLYVGVDLHKEHHTAVIINCWQEKLGEIQFENKPSAFSEFLLEVETYVSNGLSVVFCLEDVGGYGRALAKYLVDHEQVVKEVNPALSFLERKSQVMIQKNDSWDAECVARILVNKFNQLPDAKPNDLFWSIQQLVSRRNALVKAQSALKNQLHIQLNHHYPSYKKFFSELDGKTALAFWQQYPSPSCLEGTNIKRLTAFLLDVSNNTCSVKKASEILKLVKEDGHTMKEYQETRDFLVRSIVRDIEFKKTEMKYIERELKQLVKLLDYQLETMPGIELVTASALIAEIGDVRRFPNANKLARFAGIAPVYFRSGGKGKVHKSKQGNRALHALFYNLAVQQVQVAKGSKLSRNPVFHAYYQKKLKEGKTKGQALVCIMRRLVNIVYGMMKYKAAYELPVVEEKEVVQ

SEQ ID NO: 428209 - protein, 359 aa, unidentified
MKLYVGLDVGLEETSLCIVDSEGVTVREVKVSTEPEAIRSELEGSADRLDRVGVVASSPGICLYRELQPAGVPIIVAEARHIRVSLSTMRNKTDRNDARGIAQMMRLGWYGAVHVKNIDMQKMRTLLSNRNLLKRKLIDIENHIRGALRAYGLLVGAVVRGAYEARIRELLERSDPIFAMTIEAMLDVRRAIFEGYERLHRVLLQVVQYDPVCRRLMTVPGVGPVAALSFKVGVDDPRRFARSRTVGAHFGLTPRRHQSGTSIDYEGRISKQGDVAVSGGAMRGGCKPSAAGQEMVGIAGVGPADRQTVEHPVRDRRGRAQACKYSASNVGQRNRLPRRLRCQGHATTQIEACAVIAAR

SEQ ID NO: 428210 - protein, 374 aa, unidentified
METIYIGVDFHARQQTICYLKTETGELVTCELKHQDKPAVRAFYAQFHGQVIVGLEASGYSPWFERLLEELGCEVWLGHATEIRRRARWRQKNDRRDAELILDLMLHDEFPRLHRPAVQSREVLRMLRYRQKLIKIRTMSKNSLQALALQSGLAKGSRLFTQAGQQELSAAVMSPVMHWQREHWLQLMEPLNQQLLETMVWFKAQSKDDVCIKRLRTHPGIGLLTSLCIVHSLQPVSRFRNSRKVAAYAGFDPIERSSAERKCFLGISKAGSRVLRFLMVEAAHTAIRKDEDLKRFYQRLAARRGRPKAKVAAARKLLIRAYIMLRDEIDYAEFRRRAVAARLARRSQRPNVPEVLIGQPASADHRDELTSESQ

SEQ ID NO: 428211 - protein, 343 aa, unidentified
MQIHSVGIDLGKTTFHLVALGAAGKVLVRKKFTQRQLLTYTANMQTSLIGLEACSGAHFLGRALRKQGHDVRLIAAQFVKPFVKSNKNDFVDAEAIAEAVDRKNMRFVPIKTDDQLDLQAIHRVRDRLISRRTAVINQVRAFLLERGLVFAKTPAKLRAAMPDILENAEADLTPQMRNLIDLLWGEWKTVEQQIEVLSLELERISAADAGCTRIRQIPGIGPIVATAIVAAIGNGAAFRKGREFAAWLGLVPGQYSTGGKAKLLGISKRGNVYLRKILIHGARAAVLRIKRDRSSIGVWMDALDARAPKNVVVVATANKLARIAWAVLSSGEDYRPIANGLAA

SEQ ID NO: 428212 - protein, 476 aa, unidentified
MARQTSPRASLQAVPMLAQETLYVGVDVGKKAHVAGFISSTLLTRHQRFEHCPALAFENSREGFRSLIDRIKTYVPLTQVQALLEVTGHYHRALLQYLQELDIPVFVIHVQKRQEGLLKTDKRDALGLANQLYNQLEKGIQVGDPLQAVRRLVPPTEAAASLRGLVRHHYELVAESTQRKNKLTAICDELFPEFTRLLRNPNLPTALALRERFPTPADLAVASFWGLRAARGRTCSVSDVKLLELQRLAAQTIGTKDPARIRSLVIEQKQLIRELHVIAEHLAQLETEIAQVVEGSREGKILTSIPGIGSQAAATLIAMIGTIANFERAAQLKSYMGWVPKVAQSGSSLDWTRLSPRGVRQMKQTMYLIVWRAIQWDAEWKAMYERLLARKCRLDERTRRLIGREKVIGRLAGQMVCVIYALLKKDQELLAHLAPGEQPPEPTLYDPEVHRQHRLGQYQPRGARGKPPQLFELPSS

SEQ ID NO: 428213 - protein, 416 aa, unidentified
MMCEARWFAGIDWASRKHQVCLLDATGQIRGEREFAHGGAGLAELCDWLATESGAEPDAIALAIEVSHGPVVETLLERGFRVHALNPKQLDRFRDRFSLPGAKDDRRDAQVLAACLRTDPHCYRPLALDDPLVVELRAWSRLGEELQQERTRLANRMRDQLWRYYPQALQLTDDLAADWFLALWLAAPTPAKAARLRESTLAHLLKAHGVRRLAAAEALRILRQPPLLVAPGTAAAACAHIRSLVARLRLVSRQWREVQQNLDRLCVAAHDQDPAPGQPNEPRDAAILRSLPGIGRIVLATLLAEAHEPLKQRDYHALRALSGVAPVTRSSGNKRLVVRRLAFQRRLSNAVYHWSRVAIQHDPISRRRYAALRRRGHGHGRALRGVGDRLLAVACAMLANRSLFDPNRHANTASHS

SEQ ID NO: 428214 - protein, 402 aa, unidentified
MKKCNATKIRVETAASGMVLKANEPSCGYGAYVGLDVHKDTIAVAVARPGREAPQSWGEVASRPQAVAKLVARLYAEFGGERLLLAYEAGPCGYGLYRQLLELGCDCQVVAPSLIPRAAGERIKTDRRDALKLARALRSGDLTAVWVPDAEQEAMRDLSRARDDLKAQERKARQQLNAFVLRHGHHWPANKSRWTQTHSHWLESLRFAHDWQQVVLQEYIEAVKAAGRRVAELTDQMMRVLPQWSLAPVVDALVALRGIDKLAAMVVLAELGDISRFDSPRQLMAFLGLVPSEHSTGSRRRQGSITKTGNGHARRVLVETAWSYRFPARQTMHLKRKAAAAPAAAKAIAWQAQKRLCGRYQALIRAGKNTKQACVAVARELVGFIWDIACREMPKIHAPAVR

SEQ ID NO: 428215 - protein, 336 aa, unidentified
MEHLAIDLGGKESQICIRSCDGQIVEERRCRTAALPEYLASRPRSRVVVETCSEAFSIADAALLLGHEVRVVPATLVRSLGVGARRLKTDRRDAQVLSEVSCRIDLPSVHVPSQEARQRKTLCSMREALVGARTKMLNTVRGWLRAAGRRPRSGDVSTFTARVRALYAETALPTYVDRQLRTIDALTVEIDAADRELAATAKADPIARRLMTVPGVGPSTSVRFVAALDEISRFSGAHAVESYLGLVPGENSSSERKRRTGITKAGAPALRWCLVQAAWAARRARRKDPMQHWADEVEKRRGTRVAVMALARKLAGILYAIWRDGGVYEPHRSSAA

SEQ ID NO: 428216 - protein, 417 aa, unidentified
MKQFNYEFFVGIDLGQWLHVASVLDANGEFLGERGFAHSHKGLSDTVDWLLKLAAQDSERIAVAIEKPHGAVVEILLDSAIAVFSINPKQVDRFRDRHSMSGAKDDRRDAFVLADALRTDGHRFQRLQLPPPEIIAMRGLLSTRDQLVKNHVALSSQIRDLVARCWPHLVSLAPKDKALDSFFCELLHLFLDAHNPADIGREAIQQLVKKHHIRRAQTDHILEILPQTPLRVAQATTKATSMHIKLLLPQLLLVRQHRRDSDQLLERWFNQQRTTEDEGFTDAAILASFPGVGAFVLASVLCYAHDPVRLRNLQAFRSLGGIAPVTKQSGKRRQVLLRRARSQPLNNALYHWARIAVLRDPHSKEHYDRLRARGHSHARALRGVMDRILPIAITMLRNQTLYDPTRRSTTKRSGDDS

SEQ ID NO: 428217 - protein, 417 aa, unidentified
MVRELIGMEVLYDRVAGLDIGKASLTVSVRTPGARRGRHQETRTFKTTTGSLRVMRDWLVEQGVTIAAMESTSTYWKPPLYCLEEVMEVWLLNAAHMKAVPGRKTDVRDAEWIAQLLEHGLLTPSFVPPPPIRRLRMMTRYRIQLHGDRTREIVRLELMLEDASIKLSTVASSLKTVSARAILAAMIDGESDPQVLAEMAKGRMRKKIPDLAQALEGHFDVHHAQLARSILDRIDRVEQAMAELDLAIEAECAPWAHQLELLQTIPGVGPKVAQVVIAETGGDMSKFPTAAHLASWAGLAPAIYESAGKRAPAGRRRGNKWLSAMLVEAAGSVARMHDKNYLAVQHARLTRRRGMSRAQIAVAHSILTTAYYMLKRDEPYRDLGPEWLAKRNEEAHTRRLVAQLEKLGHTVVIDPAA

SEQ ID NO: 428218 - protein, 399 aa, unidentified
MTVVVAIDVGKNEFAMSVTDASRNRLLKPLLGCPMTASSVRDVVAKITGLLPVGAAVKIGIEAAGHYHLPLLAPLVWPCGWELLELNPGHVSEQRKVLGKRTIKTDAIDLEAMTELLLAGRGLPVGHREAVLVELAAWAGHRSRRVQIRTATKNQLLGQLDRTFPGLTRALPDVLATKVGRLVAAEFADPTRLAALGVNRFIRFGATRGLQIRKPLAGKLIAAARDTLPMPDAAVARQVLAADLVLLADLDTQIEAAATELARLLPLSPFRTLSTVPGWGPVRAGNYAAAVGDPGRWPGPKQLYRAAGLNPIQYESAGKRRDFTISREGSVELRRALIDLGLGLWLNDPAAKQRAAGLRARGKKGGVIACAMAHRANRIAFALVRDQTNYDPKEWITHD

SEQ ID NO: 428219 - protein, 347 aa, unidentified
MRFYTKQHPFYCGIDLHARSMYVWIVNQEGDILLHRHMKAAPAPFLKAVAPYRDGLVVAVECIFTWYWLADLCAQEGIPFVLGHALYMKAIHGGKAKNDKIDSQKIAALLRGGMLPQAYVYPAEMRATRDLLRRRTHLMRKRADLLAHVQNTHSQYNLPEIGKKIAYKANRDGVAERFVEPAVQKSIEVDLALITYYDQLLGDIELSIVQAAKHHDANTLYLLHTVPGIGRILSLVLLYEIHNIARFPRVQDFVSYARLVKCAKESAGKRLGTSGKNIGNAHLQWAFSEAAVLFLRNNPPGQKYLARLEKKHDKGKALTILAHKLARAVYYRLKRQTAFDMDKFLHG

SEQ ID NO: 428220 - protein, 373 aa, unidentified
MARIDGDTANTAYVAIELSKGSWLVGALLPDRDKPSIYRLSGGDTAGLLSRLERLRHLGANRLVLCFEAGHDGFWLARFLLCHGIDVRVLDPASLQVNRRARRVKTDRIDVLSLLNALVAIDRGDRHVCSVVRVLGVEEEDARRSHRERDRLIQERTAHINRIKGLLFAQGIRDVEPRLRRAKIDFGELRTAEGHPLPPRLRAELEREYARLDMVEDQLRAVEKERDLADAQDPAVEVKRQRLERLQGVGGAASSIMAREVFARTFASRRHLASYLGLTPSAYDSGSITRCQGISKAGNSWARRILIEISWLWLRHQPQTALAQWYGQRTRGQGQRVRRVMLVALARKLAVVLWRYVETGDLPHGATLSRQAA

SEQ ID NO: 428221 - protein, 459 aa, unidentified
MQPFYMGIDVSKGYADFMIIDRQKNSVIKGFQLDDTFDGHRCLYKTLERFFAHHPDSTMFVGMESTGGYENNWYQSLTRLQGSLNIQTARLNPFGVMHNSKADLKKNTTDRISAQNIAEYLVAHPEKVAYQKEDQLAGLRRQWGFIQMLTKQCGQFLNQLNSLMYTACPELLHYCQTGVPDWMLKLLVQYPGSAKLKRARIKSVAKIPYVTQKRAQQLITEAKSSVASATDPAIQQLIVATARQILHMRKTITDQTKQLVDQCNLPEVELLKSFPGINNASAVGLLIEIQTVKRFANVKKLASFFGIHPVYKTSGDGIGGIKMSKQGRKAPRQILYMIALSALQHNPLVRQVYEKHREQGTHKMAALGICMHKILRIVYGMLKHNKPFDPQIDVANQQRCVRIENEECEKATNRRFQTYDTNAPISRRQRKKRLERERPHSVDDAKFGVTAPVPLMNIS

SEQ ID NO: 428222 - protein, 467 aa, unidentified
MRNVIGIDPDAKGFVCSLVKLEESNVIRRRFTATWKDVQSFIRWVKTVEDVIVAIEGSNGQSRPIEKGLREAGVVFYSFKPADTDRFRKAVLGQNKNNDKDAESVARCAMALEMQGKLERYRRVWFPDAELQLLTRSYERISQETTAEMNRLWKTLRLASPDLYLALGGNNPEVELEENVLKTKGILALLAAKPDIGEWKKLSDEELLAAMGTRTFPARRTIIQELRKVISRFPSMTAPMAMMIGSGAEQIGLFKRKEVEITKLLEEITQGNAAVQALRSMRGIGTITSTTMVAEIIDIRRFAREDSLACYSGLGLLEHSTGDTTRMIHTEMFNHRLKDAFMTAARNYVHFNPDSHLAGYYRNLVKKGMSPLEAYKRVARALVRVIYKKLTSLVESSTHTSGGEDRREGESDMASGVTRSDLSHESDMPLSSPAQGSTGEGGRIKRGGVKTKRRGSVNKRRAVKKIA

SEQ ID NO: 428223 - protein, 351 aa, unidentified
MATMAINDIVTTIGVDLGKNVFHIIGMNARGAVVLRERLSRAKLPRRLTNMTSCLIGMEACAGAHHVGRQLAALGHDVRLIPAKYVRPFLKGHKNDYRDAEAIAEAVQRPTMRFVALKSTEQLDLQSLHRVRSRLVGQRTAVINQIRGFLLEHGITVRQGPAGLRQALPSILAQQTGELSPLLLRLLEDLVDDWRRLDGRIEDITTQIETLAKEDENCRRLMGTPGIGPLIASAMVAAIGNGAAFIKGRDFAAWLGLVPKQISTGDRTILGGISRRGNRYLRTLFVQGARSVLFRHKSWTKYGFARWLTDAARRLHKNVLAIALANKLARIAWAVLHRGSWYAPEFAAGAA

SEQ ID NO: 428224 - protein, 313 aa, unidentified
MNFVGIDVSQSTWDVHIRPQGRWLSVPADHDGATLLREQLVALGPCLVVLEATGGLERGLVAELIDAGLLVAVVNPRQVRDFARALGRLAKTDRIDAETLALFAEKVQPRRSQKCPEKQAEIDALVTRRRQLVQLRSMERTRQHQATIKAARRSIDKLLKVLDQQIAALDKAIGQLLESDDDWRTRCELLQSVPGVGATTSATLVAELPELGRLNRQEIAALAGLAPFNHDSGRFRGQRRIRGGRSAVRSTLYMATLTARRCNPILQRFAKRLEQAGKPFKVVITACMRKLLTMLNTIVRNGTPWAPSSMAPR

SEQ ID NO: 428225 - protein, 359 aa, unidentified
MDAQEGAVRRIIGGVDTHKDLHVAAVVDEQDRVLGTQSFASTRQGYRQMLAWMRSFGEVQRVGVESTGSYGAGLLRFLQQAGVTVLEVTTPDRQDRRRRGKNDDFDAQNAAHAAFAGIRTVTPKSRDGMIEALRVLSACRKTAVTARRIALQMIQNTIVCAPESLREMLRRMTRMQLVRTLAAWRPDLTAYRDVEAAYRISLKSLARRYLELHDEIAGLDAMIAAIVDELAPNLVARNSIGHRGAAQLLLTAGDNPQRLRSEAGFAALCGVSPVPASSGKTARHRLNRGGDRAANSALHIIAIGRLRTDARTQAYVAKRIGEGHSKLEAIRCLKRYIAREVFTLIKQRQREINQTRIAA

SEQ ID NO: 428226 - protein, 334 aa, unidentified
MENIALIGIDLGKNSFHIHCQDRRGKAVYRKKFTRPKLIEFLATCPATTIAMEACGGSHFMARKLEELGHSPKLISPQFVRPFVKSNKNDFVDAEAICEAASRPSMRFVQPRTESQQAMRALHRVRESLVQDKVKTTNQMHASLLEFGISVPRGAAVISRLSTILEDNSLPLYLSQLLLKLQQHYHYLVEQIKDLESQLKRKLDEDEVGQRLLSIPCVGTLTASTISTEIGDGKQYASSRDFAAATGLVPRQYSTGGRTTLLGISKRGNKKIRTLLVQCARVFIQKLEHQSGKLADWVRDLLCRKSNFVVTCALANKLARIAWALTARQQTYVA

SEQ ID NO: 428227 - protein, 427 aa, unidentified
MPFRIAGIDVHKAMLAVVVADVEVEGDWQFTRRRFGATPSQLRLLTEWLVEHEVEEVVMESTAQYWRPVWDALERDWQPTQRRREDAGPTTGALHLAQAQSNQGRHGRKRDFPDAERLVKRLVAHELTLSFVPDVTQRLWRTVTRRKYQLTRNRVQLQNRLESLLEEAHIKVSTLVSDLLGGSARRMLRAVATGETDPAAIAALGSPRLHATPEQLCDALGAATDMHPLYRRLLAMTLAELDLLESHRQQLDEELAALLRVHQDAVQRLAAVPGFGVDSAQQIIAEVGPTVTTFPTAKRLASWVGACPGHDESAGINRSHRAPSGNRQMRRLLNQAAHAAVKTKGSIFELLYRRFVVRLGHAQAIGAVAHRLCRLVWKILHDGVTYEERGPAVTKSRVQRRAAKMIRELRSLGYRVEPVPAPSSNRA

SEQ ID NO: 428228 - protein, 383 aa, unidentified
MIYVGIDIAKLNHFAAAISSDGEILIEPFKFTNDADGFQLLVSKLESFDKNSLIIGLESTAHYGDNLVRYLVTELYQVCVLNPIKTCQMRKNNIRKTKTDKVDTYVIAKTLMMQDNLRFVSFFDLDMMDLKALGRFRQKTIKQRTRLKIQLTTYVDQVFPEIQYFFKSGLHQHAVYALLKEAPSPKEIASMHMTHLANLLKVNSHGHFTKEQAKELRVLAQKSVGANDSAISIQITQTIQQIELLDSQLEKIEAEMTDIMKFNDSVIMTIPGIGYINGGMILGEIGDIHRFSNPNKLLAFAGLDPTVYQSGNFQAKTTRMSKRGSRVLRYALVNAAWNVVRNNATITRLIMMPRELKAGLITMHLGTVPANLSESSGRCSLTT

SEQ ID NO: 428229 - protein, 355 aa, unidentified
MGQIIRIGVDTSKNVFQLHGVDEAEQPALRRKVRRRDMLTFFARLAPTRIAMEACGGSHYWARELRALGHEVALIPPQYAKPYVDRGKNDAADAEAICEAMSRPKVKKRFVAVKTVEQQARQMLIGVREGLLKRRTQVSNSIRGYAAEFGLSAPKGLGRLEPLLERIKEDQALPELVRDLFAMLGGQYRHVSAQIREIEAKLMALCRASPLSRRLLGVPSIGPVLAAALPAKVADPKAFGSGRNFAAWVGLTPRDHSTGGKARQGGITRAGDETLRSLLICGATAVIQQVRRGKGDAPPWLVSLVARKPPKLAAVALANKIARIVWKMMVTGEPYDPRRGEGRHPTGADALAEAA

SEQ ID NO: 428230 - protein, 444 aa, unidentified
MQLVHTHCAGLDVHKKTVVACARIVQDDGTRTTHIRTFPSTTAGLLNLLDWLLSLGITQVAMESTGEFWKPVYNLLEGNVTILVVNAQHMKQVPGRKTDVKDAEWIAELLAHGLLRASFVPPAPQRALRDLTRQRTNLVQERARVVNQMQKVLEWANIKLSSVVTDVTGVSARAMLEALVAGSTDVSALAEMAKGRLRAKRSELEQALAGTLQSHHAFMIAQHLSHLDFLEEQIAAFDQAVETAISVGGRPSEPDAPTSEGGESSRPEGVGDEAGNTSWLAARTLCDAVPGIGKRVAETIIAELGTDMSRFASAGHAASWAKLAPGQHESAGKRKSSRIGKGNRHLRAALIQAAQAAVKKSETFLSAFYRRLAARRGKKKAIVAVAHKLLVIVYTLLKTGECYQERGATALDERQKDRLLVRLQRRIAQLGYTVSLEPNPVAAS

SEQ ID NO: 428231 - protein, 341 aa, unidentified
MGQHIGLDVSLKDTAIAIREDGRRIWRGKCRSDPALIAQTVRNHAPEPQSVVFETGPLATWFFHVLKGEGLPAICIEARHAQKILGETLNKTDANDAEGLARLAETGFYKAVRVKSFEAMLIRSLVAARTQLLSMTTQLTNQIRGLMKTFGLVVAKSKGSVFEANVERLLEGYAELAQIILPLLEAWRAIRKHVSALNRQLRHAARQSQSTRLLMTIPGIGAITAISYVAAIEDPKNFPKSRSVGAWLGLTTRRYQSGEEDFDGHISRRGDHRLRGLLYEAATSLLARTRADTVSDLKTWGLQLRERLGFKRAAVAVAHKLAVIMHSMLRTGQDFIPTREV

SEQ ID NO: 428232 - protein, 406 aa, unidentified
MKVYTGIDWSENKHDIVFMNQAGASVGRFTIPHTPAGFLRLVSECEALGVERAECVIGLETAHNLFIDFLWAQNYTQVYVIPPSVVKSNRGRHGSSGARTDQSDAYLLADILRTDRNRLQLWHPDGLLTRQIRAKSSYIAHLTRNIVRTSNRLRAVLLRYHPAVLHVFSSMRARIRLRFLCAYPTPQATRELTFAEFTTFAAQYGYKRPAKLRAYYAELQGVHPTPAAETVQIYQQEAVQLATSLLGLLDTKYTATRELGHLFAQHPDAFIFESLPGAGELLAPGLLAKFGDDRRRFSQAASVQALAGTCPVTKSSGKRKVIHFRRACDREFRDLAQKWAVASLSQSAWANAYWHDVRPHCRSSSHAYRCLANRWLAIAWKMWQTKTAYDETYHMQQRAKHSRPRR

SEQ ID NO: 428233 - protein, 346 aa, unidentified
MLYAGLDLSRKRLDFRLLDAAGETVEVGAAPPDADGLHSLVVRISRFGEPVFAAIESMNGARFVHDQLELAGWRVEIADAVKVKGLAPLACKTDRIDAWVLAELTRRDLVPAIWLPDPEIRAERERARFRLHLVRHRTSLKQRVHAVLLAHGKPCPVSDLFGVAGRDLLERLELPEPWTSTVAASLQLIDELDQQISDCERDLHRLGVEHRYVPLLVTVPGIGWVLAYTIAAEIGDISRFATPTKLTGYTGLCPRVYQSGQSDRRGALAKNGPRYLRWALIEATMHASRHPLYRDRYQHTKQRLGKQRGAKVAQIDLARRLAEAIWHMLTRDQPFAPASATDPLAA

SEQ ID NO: 428234 - protein, 355 aa, unidentified
MKKRDKYMGMDVHQATTVTCVMDAEGKTVLETTVATEAGPLLRLMDGINGPLHVTFEEGTQAAWLYEVVRGYAKEVIVCDPRRNRLLEEGSKGDKPDARKLAQLLRAGLLRSVYHGHEEATRKLKQLVRAYENLSDDTQRTMVRIKAVYRSRGIACRGQEAYQPTQRKQWLEKLSEPGARQRMEWLYEELDQLAPLRRRAKQAVIREGGKHRAVALLRTIPQVGPLRSALIVATVDTPHRFRTKRQLWSYSGLAVVTHMSSEYQIQEDRVIRSRKPIATRGLNRNCNHRMKDVFIGAATGGAQIEPYRTYLERLEQTGMRAEMARLTLARKIAAVALSIWKKGEVFDPKKLNWTT

SEQ ID NO: 428235 - protein, 397 aa, unidentified
MFYLGIDIGKNNHVASLIDEKCKILFKAFSFPNSYVGGDSLLDKLASFNISVNNVEIGMEATGHYWLSIYSFLVEKGFVIHVINPIQTDGWRKGTEIRKRKTDIIDSILIADLIRYGDFLETSLANEDTISLRNLSRFRNYLINSIGDLKRKTVCVLDQVFPEYQSIFSNIFGQTSKEILLHFNTPDDFENISSEQLQQVLSEITMKKFAMDKINEISSAAKKSFGIKFCLDSFSLQLRLLIEQINFIEKQVTDVEEQISVLLDKINSPITTIPGIGNVTAATILGEIGDISRFKNPSKLVAYAGIDASISQSGEYNSTNNKMSKRGSPYLRKALFSAALVASNCDPVFKAFYQKKRSEGKHHLTAIGAVARKLCYTICAILKNNCAYEVKLPKNDC

SEQ ID NO: 428236 - protein, 415 aa, unidentified
MHSTSTIDQRKAAVQGAVMGGVDVSQGWHYIQWLLPNGLSAGTPIRFVNTRSGFESMWARRPAGTRLVIGLESTGAYWRPLAHWLRQQPGVTVVLVNPLHTRKLKEVDDHTPSKNDAKDAGIIARAVAEGRYLPWTPREGVWSELATLAVTRRQQKADVIRWHNRIQGWLDVYAPEFRRVFKAWDGLAALWVLDTVPFPADVLAYPFEDLVAGLLEASHHRVGRKRAQALVTAYRDSIGVPGHASARAQLAAYLAHWRAARAALAATEAAQQKLVASVPGADALRKIPGFGPVIIATLLGELGNLADYAHPQQVVRMAGLNVVSDNSGKHQGKTHLAKRGRGQARQVAYQAALVAIAHEGPARVHYQELRQRLAPKAALIALACKLLRIAWACWRHQTPYDAERAFARALTAAAA

SEQ ID NO: 428237 - protein, 330 aa, unidentified
MRISPHSPLHGCQGLVRILSPKRLIKGLRLGNLDLFTSKSKAMKVQHIIGADLSKKTIDLFSHECHSHISIKNDPEGFKQMTKWMSGQNINSSEVMIVMEHTGLYSFHFEGFLHQKGIAFSKVSALQIKRSLGIARGKSDKIDAKRIARYGYEKRDILTIEPQTSKELQRLQLLTATRERLVRHKAAMICAIKEYQNIGLSEKDPIMVCQTRMVRQFEKEIEKIEEQIDVLTESNSSIKQNQDLLLSIKGVGKVLSLETIIKTRNFSRFKNARKFACYCGTAPFPCESGTSLKMKTKVDSHADKRMKTLLDLSAKTAIQHDKELREYYLK

SEQ ID NO: 428238 - protein, 358 aa, unidentified
MTDPARTVTGGVDTHKDAHVAAALDGLGRVLGTESFPATATGYRQLDEWMRSFGQLDAVGIEGTGAWGAGLARALTARGIRVVEVQRPNRQHRRRHGKSDPADAIGAARAVQAGEANGTPKAATGSVEAIRLIQIARRSAMQARTQAANQLHAVVTTAPEQLRASLGGLTTGELVGRAARLGPGTPSSPTAAAKLTLVTLARRWQRLTEEITELDRHLDQLTATTAPTLIELNGAGTQTAAALLTAAGDNPDRLRCEASFAALCGTSPLDASSGRQQRHRLNRGGDRQANAALYIIVMSRLRWDPATKAYMQRRLAQGKTRKEVIRCLKRYVARQVHRAITTDLAATATPTTTPHAAT

SEQ ID NO: 428239 - protein, 347 aa, unidentified
MRPYQAQHRAYCGVDLHARTMFLCILDPQGKTLLHEDIPANPDAFLQSVAPHRDGLVVACECTFCWYWLADTCREHGIPFVLGHALEMRAIHGTKTKSDRIDSEKIAHLLRAGLLPQAYAYPAEMRATRDLLRRRSYLVRRRSEALTHVQLINWQYQHDTPTGKLRYASNRAGLLDRVDDECVRRTLQVDLELAAHLDGQIAELEAFLAAQAKGHDLPNYYRLRSIPGVGKVLALTLLYEIGDIRRFDAPGRFLSYARLVRPAKESAGKVVGRSNAKLGNAHLKWAFREAAALMTRHEPGVKAWAAKKAKATGKGKAQAILAARLGRAVYAMLRRGVPFDAEAFMRS

SEQ ID NO: 428240 - protein, 436 aa, unidentified
MRGCRCSMIMGFTKPIEHFNLQRKKVITMNTLYVGIDVSSKSNVVYLMFPNGDKHSNFSVANSHEGSTLLVKKIYSALTSHSLDTVLIGLEATSVYGDNLVYFLREDATLAPFNRKIHVLNPKQVKKFHDTYNDLPKNDYVDSFVIADCLRFGRINKEVYMGDYRYKALQNLTRARFFAVQNLVKEKQRFMNVLFKKYSTMTQEKVFSDAFSTTALAVYDEFESAEALANMDLHELTDFIIEKGKNRFPDPDAVAKAIQKAARSSYRLPKTVNDSVNQVLSISITSMKALESQIKEFDKAIKALMELLPNVLISIPGIGPVYSAGIMAEIGDINRFDNQASLAKYAGLAWKQHQSGGFEAEVTRLIPSGNRFLKYYLCEAAFSLVRCDKEYSDFYHLKYKEVNRCQHKRALALTARKFVRLVFRLLKDNRLYCPAK

SEQ ID NO: 428241 - protein, 347 aa, unidentified
MLTIGIDTHKATLAVSAIDATGREHGARTFPNDHPGHVKLLHWAQALGAERRFGIEGSGSFGAALARLLVAAGEQVVEVPAILTDRERRHLRRAGKSDPGDALGIARVALREEGLGPIPMPGITEDMKLLVDARDQRVGERTRVANRLHANLVVLAAGYKRAIPNLASVSHRAALAHLLTDLVGVRADLARADLARLLELDAECTALEKRLRSLVRLSGSSLPTITGVAAITAAKLLGETGDPRRIRSTPAFAAMSGTAPIPASSGQTSRHRLNRGGNRQLNRALHTIALVQARTDPRAQAYMARRTTEGKSRLEAMRCLKRHLADVVLRTMLADVERSAAPVKVGA

SEQ ID NO: 428242 - protein, 259 aa, unidentified
MDHIIRIGMDTSKHVFQLHGVNAAEEPVLRRKLRRNDMVVFFERLAPTIIAIEAAGASHHWARLLRSFGHEVKLIAPQLVKPYVKRGKNDAADAEALCEAMSRPTMRFVPVKTAERQAALMLLGLRDRLVRNRTQLGNAIRGYAAEFGLAAAKGIAHLAPLLARIQSDESLPGLARELFAAHAQEYAQLQAQIDEVEEKLMAWHKTNPGSRRLAQIPGIGPIGAAMLIMKTPAPETFRSGRQFAAWIGLTPKDHSTAGK

SEQ ID NO: 428243 - protein, 352 aa, unidentified
MRRPKHQVISGEDLFVGIDLHKHRWHVTVRTVDLELFSASIPGTWEALQRVLARYHGHQLQAVYEAGYFEFRLHDRLVDHGIPCIVTPPSLVPQEYGNRVKTDRRDSRKLAHLLAKGLLKRVWVPSEEELYHRQVIRRRRQLVRDRVRTQSRIKAELRFYGIHLDEPRGRWTQMYFETLKSVRFENRWMQESFNRLLEQYEFLSVQIDKQTQLLRELSETPRYRKRVEILQSIPGIGLISAMELLLELQDVSRFRRAEQLAAYVGLTPSQYSSADKVRMGRITGIGKDTLRSLLVEAAWTLIRKDQAMREKYDRIKVRSGGKRAIVAIARTLLLRMRRMLLDEQAYALPRAA

SEQ ID NO: 428244 - protein, 355 aa, unidentified
MSQEKYIGMDVHQATISVAVMDGRGKLIMECILETKASTILEFIQGLHGSLSVTFEEGTSAAWLHDLLKPHVAHLVVCDPRKNALLKDGSKSDRIDARKLAELLRLNKLNPVYHGEHGVRTLKELGRSYLTITQDLTRVMARIKAVYRSWAIPYSGTTVYAPRYRAEWLAKIVEPGVRLRAQRLYQQLDLLQPVRQQARHDLLRESHKHPAVELLRQIPAIGPIRAALLVALLQTPHRFRTKRQLWAYSGFALQTRDSGEYRMVRGKVRRNRERLTVLGLNDNHNHDLKNLFKGAAISASTRPGPLYDFYVALLEKGMRPTMARLTLARKIATITLTMWKKGVDFDANQLNRQAA

SEQ ID NO: 428245 - protein, 381 aa, unidentified
MSQFSGSPQAAIDYNSTIIGALELSEKKWVLAVQLPGVDRHSRHVLDGGGETLASFVERLKVRCVSAGRKIARVILTHEAGRDGFWLARFLARRGIEVHVMQPSSLPVDRRARRAKTDMIDVEMLLRTLMAWLRGEPRVCSMVPIPSEADEEARRAHREREDLTRERRSIVNKIDGILATLGVKGYKALRRDRREQLNYARQPGGDPIPQKARARIERLLDRLDLVLKLIDQVESARDAVLKKDAPADEAEEMIRSLTELRSIGPDVATLLVREAFVRQFRNRRALAGYVGLGGTPFSSGGSEREQGIGKDGNRRVRAAMVELAWMWLRWQPDSALSVWFRARVGAMGGRIRKIMIVALARKLLVALWRYVTDGVVPEGAN

SEQ ID NO: 428246 - protein, 413 aa, unidentified
MTNNIITAVGIDVSKGKSMVAIQRPGGEVLRMPFEVKHNTTDLKSLIKLLKQIGGEVRIVMEHTGTYWYPIARTLHEAGFFVSVVNAILIHNFSDNSLRKVKTDKADALKIANYALAFWGTLHQYTPEEETRLILKTQSRLYERTIDTSVVLRNGLISLLDQTFPGVNKLFTTAYRNSSGHYKWVDFVRRFWHRDCVAGVSERSFSESYAKWCTHEGYQYSAACAARIYQAAKQAVAVFPKNDSVKALIVQAVDTLNAVYASLQVMREEMQRLAEQLPEYEIVMGMYGVGAVTGPQLIAEIGDVRRFTNKAALVAFAGVDAPPYQSGTFDSKSRHISKRGSPHLRRIAFMVCSAILQKSNPNNQVYAFMDKKRAEGKHFYVYMVAGTAKFLRIYYARVMEHLNSLESTEQIPA

SEQ ID NO: 428247 - protein, 342 aa, unidentified
MYYIGLDVHKKTISYCVKDASGQVLQEGKVGSTRTELDCWMKTLPQPWMVAMEATLFSGWIYDHLLPHAAQVKVAHPLMLRAIAAAKKKNDRIDASKIADCLRCDFLPECHMVPTEIRDRRRTLRYRHLLVRQMVQMKNRVSGLLMETGVEYNKQSLHRAGYFRELLSTNPEVHPSIRPLLKLSREMIERCQKSEYALVSSLRRDPMLAERIKRLRTVPGVGPITALTWALEVGDVSRFRTIKQAISYCGLCGDERSSADKVTRMPLSKQRNKHIQCVLVEAAKLAPRYSHELAMLYDREKQRGNRNRATLAVARKMVAYMLAVDREERDFIPAEERRVAAA

SEQ ID NO: 428248 - protein, 338 aa, unidentified
MAMYCGIDLHSNNNYVAILDGDLGDVVCRRLHNDIDQVKKFLAPHRDEIVAVAVESTYNWYWLADGLKKAGYDMRLVNTTKASDYSKLKYTDDRHDARWIARLLALGILPEGYIVPPEERGVRDLLRRRAFFVQKRTAHLLSLRTYFERSTGRQVPTDEIQTWDRETVHKLIDDRFVAESIAVVLPVVRLFTAQIKAIEKIALAEGKLRDEFQLLRTAPGIGVVLGLTIMCETSDIKRFPKVGNYSSYCRCVKSELKSNYKKKGVGNRKNGNKYLSWAYAEAAHHAVRYEPRAKRYHARKRARSHPMVAWRALSNKLARGCYFVLRDQVPFDPTRAFS

SEQ ID NO: 428249 - protein, 359 aa, unidentified
MSGLSNKSLSYSIVLMLNTDLTHYQKMNTIGIDVGCKELVVVVMVNGKARKAKSFDNTPSGHQSIIQSLTKLKGETKVCIEATGVYHFDLAVALSRADDIEVMVINPKAAHNFAKALMTRSKTDEIDAENLAIYAERMPFEAWDRPADESISLRATARRIAALSKQKTQTKNQLHALKSTVETPALVIEQTEQLIDILDVQIKTLRDSAINIIHQNKGLEQAYTLITGIKGIAQSSAIQILSELMILPKDMTARQWVAHAGLDPRIFDSGSSVSKKPRISKVGNKYIRQALYMPALVASRFEPNIKGYYHHLIDDNGLKKVQAVCAVMRKLLHAIHGMLRTNKEFDGTRFYTLPIATDS

SEQ ID NO: 428250 - protein, 374 aa, unidentified
MGVIIGMDPHKRPATIEVIDERAVVLAAGRYGTDKAGYTQMLAAARTFAGRVWAVEGCNGIGRHLAHRLVHDGEVVVDVPPELSAQVRVFAAGNGRKTDEVDAHAVTLVALRTPGLVQVQVEEDLVVTGMLADRRDELGRARTQVVNRLHRLLPELLPGGAEKFLSARQARALIASVRPRDLAGKTRRRLAVELEMIDKKTRALDKELTGLAAARGSALMDLHGIGPSGAARLLADAGDIHRFASRDRFASWNGTAPLDASSGSQARHRLSRAGNRRINRVLHIMAAGWLRNQTKGRAYYDARRAGGMPSMMAMRALKRRLPNVAFSCMLADQKRREAGPGGQSGTPADSSVTGPDPGHRPFGQATSRTRHSTA

SEQ ID NO: 428251 - protein, 338 aa, unidentified
MIVIGLDVHKQSVTAVAVDEAGRPLGEQVIRVGGDELLGWASALDGERLWAVEDCRQLTGWLEQQLLGLGEELVRVPPKLTVPERRAGRTRGKSDPIDALAIARAALREPNLSRPRADERVYRELKLLVDHRDDVVDQRRRTQQRLRWHLHQLDPTFEVPLRRLDRPKHLERVSRWLARRQPELQVRLARELVSTCRALNRAVAELDLELEQRTAEIAPGLLELPGCATLTAAKLLAEIGPIDRFKTDAQLARHSGVAPLEASSGRTQRHRLDRGGNRQLNAALYRIAITQARYHPDARAYLERKKAEGKSRREALRCLKRLLARVVYNTLKASPALT

SEQ ID NO: 428252 - protein, 356 aa, unidentified
MTQSTPAPTFPTTIGLDLGGRRTHWNKLDEYGKPAGHGSVATTREALRRQLEGAPARVVMEACGTCRWVAALCRDLGHEVIIANPRQFHLISKSKCKTDPRDARMLAEVGQVRPSLLHPIRLRNENCQRGRVLVSARKHFVEQRTVHVNFVRGQMRTLGMPLASCSTEAFAKRFRDAIPEEYHEMLLPVLDEISALNDKIAMYDHAVERVSREQYPETEVLRQIKGVGPILALTYVVTIESPEHFEDSRLVGAYVGLTPKAHSSSGHDPQLRITKCGDRMLRTLLVSAATWILTHGEDSGLRRYGERIRARGDQASRGKARIAVARKLAVLLHRLWKTGEVYEPLHGAHEVNGHAA

SEQ ID NO: 428253 - protein, 418 aa, unidentified
MQMELSQFAAIIGIDWADKKHDICIQVTDTGQRKTYQIQHKADKIDEWARSLHRQYGGPIAVALELSKGPLVSALQKYDFFVIFPIDPTTLANYRRTFTPSGAKDDPTDAEYALELLLTHTGHFTALRPQSVEMRTLMTLVEQRRRLMDDRVRITNRLRSALKQYYPQALEWFDRIDTQLFCDFIKRWPSLAQARRARKSTLEKFFHEHHMNRKALLERRMTAIKSALPLTEDEAIILPYRLQATTLVAQLEVALASIRIYDEEIASLAPQHPDYCLFDCLPGAGPSLAPRLLVAFGEQRERFSKAAELQKYAGIAPVTERSGQSTWIHWRWQCPTFLRQTFVEWAAQTINKSYWAGLYYYQQRAKGCSHQAAVRALAFKWIRILYRCWVTRTPYDEAKYLKALQERGSPLLKIAEAA

SEQ ID NO: 428254 - protein, 354 aa, unidentified
MALKPESKIATIGIDIGKNSFHSVGLDDRGALILRQKWSRGQLTARLANMPPCLIGMEACIGAHHLSGKLRALGHDARLMPARYVRPYSKGQKNDFRDAEAIAEAVQRPTMKFVATKTGDQLDLQALHRVREGLVRQRTAIINQIRTFLLDRGIAVRQGKYFLRRELPRILAAPHEVLSPCIVHVIEDLSADWRRLDERVERLSAEIEALAHKDVGCERLMSVPGIGPIISSATVAAIGTGDGFSKGRDFAAWLGLVPKQISTGDRTILGSISKRGNRYLRVLFVQAARAVLLRPQSWERHGLKPWIEAAKRRLHHNVLAIALANKLARIAWAVLAREKGFEARAISGETVQAT

SEQ ID NO: 428255 - protein, 414 aa, unidentified
MFAVGVDVSKGRSTVAVLQSKSTVTLKPFEVSHTPEGLGKLVERLNSLGGETKVIMEHTGRYYEPIAMFLDSSGFFVSALNPILLNRYQENPSLHNVKTDTADAVKIARFGLDNWDQLRQYEPMDTIRYQLKTMHRQFQLASKSETAFSNNLIALLEQTYPGIRMFLSSPARPDGSQKWVDYVGTFWHADCVQKLSLKAFTERYLKLCQRHKYNFSEDKAAELYRHAQNVVTLVPKSDISRLLIKEAVSQLNATSRMVETYRAEMNRLASQLPEYDTVMGMYGVGPSTGPQLIAEIGDIRRFPKKNSIIAFAGIDPGKDDSGDVTRKSNRSSKRRSPYLRKTLFVIMNVLIQLKPADDPIYQFIDKKRAEGKPYYVYMTAGGTKFLRHYYGKVRDCLREKGLWDKSVDDGQASE

SEQ ID NO: 428256 - protein, 427 aa, unidentified
MINNDKPTEFAALVGLDWGWESHAIALEPAGGATQTSTLKHSAESLHQWFDQLEKTYEGRPVAVAVEASKGAVVAALLERPWITVYPIHPATSSRQRSAFRPSGAKDDTPDALVLLFILQHHRDRLRPLQPDDEATRTLAHLVEARRKAVDRRSLLANQLKSTLKNYFPQALDLVGEDLTIPMALDFLDKWPRLTDVQASKDITLKNFYHRHNVRRSELIQSRIVLRRPARLLTRDPAIIEVSVRIVRMLVAELRVLAQHITEFENAIEEAFAEHPEKSFFRELPGAGPVMAPRLLAAFGTARDLFPDPGSMQRYFGVAPVTEKSGGRRWIHWRWNAPKFLRQTLVEWAGQTVVFCPWAKAYYEQQRVKRTGHHAILRALAFKWLRVLWRCWQTRQDYDQEKYLQQLEKRKSPIAVRARQLAIEMAA

SEQ ID NO: 428257 - protein, 324 aa, unidentified
MTDAVLGIDVSKNTFDTNLGAGTKARSKSFANSPNGWHQLIAWLGEHKIGRVHACLEATGRHGLGIALALHEAGHVVSIVNPAQIRDFARTKLGRNKTDQVDAVHIREYAELFKPRPWTPPSPAMRRLCELQTIRAGTVAGLTEWKNRRGSGMADDMALSLAETTIQHFTSQLEAVDEAIAETIDNDPDLCAKRDLLVSINGVGEALAGIVLAELPGPDVLGSSAAAAAYAGLNPQQHQSGISVNRPVRISKIGNAVLRTALYMPALSAMRYNPAVAALVDRLKAQGRLKGKQIVIAAMRKLLVLCFGVLKTGKEFDPAMAMGK

SEQ ID NO: 428258 - protein, 320 aa, unidentified
MSETSVVVGIDVAKDQVDVSVLGAELGAEQFDNSSEGHTALAAALKPLKVSLVVLEATGGYEAALVCALQAAGLAVVVINPKQARDFAKSMGRLAKTDRVDARMLAELASVLLRREDLARFIRPLSDTHQKDLAALVTRRRQLLSMLTFERQRLQLAPQLIRPGIEAMIKTIRAQIDDLEAQMERHLREHFAELDQLLQSTRGIGPVASATLIAQLPELGKLDRGAICALVGVAPMANDSGTTRGRRRVKGGRFEVRRVLYMAVVSAIRFNPLIKAFYRRLRAAGKPPKVAIVACMRKLLVTLNAMVRDSTRWDPNYSRA

SEQ ID NO: 428259 - protein, 371 aa, unidentified
MKKHNSCTRSPRGRAKARPGSITIGMDLGDKASRYCEVNGGGETIQEASVGTTKKAMTQVFGSRPRCRVAIEVGTHSPWVSRLLNSLGHEVMVANARQVKLISQSSRKDDRLDAQTLARLARVDPQLLRPIRHRSEKAQGDLMRIRVRAALVDTRTGLVNTARGLAKAMGERMVVCDPDALNMERLEELPTGLRDALEPLVKMVEALTAQIKHSEAEIEQIARDRYPETALLRQVSGVGTLIALTFVLTLEDPQRFRKSRDVGCYVGLRPKRSESGESQPQLRITKEGDRYLRKMLGQGAHYILGWRGPDTDLRRWGLKLAERGGKNAKKRALIAVARKLAVLLHRLWTTAEVYEPLRNSQAREGGRKAAA

SEQ ID NO: 428260 - protein, 405 aa, unidentified
MKRSHFIGIDVHCQFCELAVVNAAGQVVQRDRCDTAIPALLQVIDGVARPRAVVIEEGPLAGWLWRELHGAVERLVVSEPRRNRLIVEDGDKDDDIDAEKLAQLLRGGFVKEVHQVASLERAVFKQQVAVYHFRVRQRVRESLRLTSLFRQHGMMIREKAYAASTDRPALLARLPANAVLREAVRLLWLAYDELVDQEETWRRRLVELARQQEVVHRFQALPGVGWIRAATLYAYLDTPWRFRSKAALWKYLGIGLERERSGNGPGHVGVPVLTHRLLKSTILGAARSAVAQGENPFADLYRRWMEQGLSSRLARRNVARALSATLWGLWKNGRAYRQEWVGVAAAAQRGDAGVSARTMADERAERSSFAMHGPAWRSPHRLNEPAPIGSLRSVIFMDLPRESPR

SEQ ID NO: 428261 - protein, 345 aa, unidentified
MDEAYDGRQVVGMDLHRRRSVLVRMSMDGRKLETVRIENSPAALRRVLARCGQRPLVVLEATYGWYWAADVLAAAGAEVRLAHPLGVKAFSCRRVKNDERDAADLADLARMGRLPEAWIAPAGVRALREVIRYRHKLVGQRTSCKDQVHAVLAKLGVEVTHSDIFGRGGGLWLDQLVLPAPYAAKVASLRALIGVLDGEIARLGQQAADQLAAGKGYQAVRELDGIGPVPAAVICAEIGDVTRFGKPGQLCSWAGLTPRHYESDVKVIRGHCSKQGSRLLRWALCEAIQHQPEGTRPRRAKEAIIARRGNQARNIARTAAARVLLTQVFYALRDGYVRSAGRPAA

SEQ ID NO: 428262 - protein, 452 aa, unidentified
MKKAKKIAKLPIINPNAAGIDIGATQIFVAVPPDRDAESVRCFATFTADLEKLADWLAACKIQTAAMESTGVYWIPLFQILEKRKIEPVLVNAQHLKNVPGRKKTDVEDCQWIQHLHAVGLLRGSFRPADEICTIRSLWRHRENLIQLASIHVQHMQKALDQMNIQLHHVISDLTGTTGLAIVDAILSGERDPAKLAQLRNPHIRASQQTVRESLVGDYREEHLFVLRQSLESYRHFQRLIHEVDLEVKQMVKELPSKVGVQDPPLPKAKNPRKTPWRNEPPELREDLYQAFGVDLTQVPGLNTLTTQILLTEIGPDFSRFPTSGDFCSWLRICPDPKITGGKVISSKTRPSKNRAALALRMAAQGLHRSQSFLGNYFRRMKARLGTPKAITAAAHKLARIVYHMVTSRQEFDATIFEALERRSRDHKHLRLCAQARELGFDLVKINPEAAN

SEQ ID NO: 428263 - protein, 466 aa, unidentified
MKRRENSSKPRKRAELAALRAIRPMVAGIDIGSREHWACGPARQDGEPNVRVFGTTTAQLDELVAWLAEQGTKSVAMESTSVYWIPLYELLESRGIEAVLVNAHQMRNVPGRKTDFHDCQWLQLLHSCGLLRGSFRPGPAITAMRATHRQLANLVEERGRYVQWMQKALDQMNVQVHRAVADLTGTTGMAIVRAIVGGERDPGRLSALRDPRCQKSAEEIARYLTGTWREEHLFNLDCALQLYDKIEALIAVYEARLLEAMACLQPDERKVAPVPMHPNRAKRNAITGRGDEPDRAALWRTAGVDLTRIDGINVGAAKVIVTEVGLDLSAFPSEHHFASWLRLCPRRPISGGKPLKTKRNGLGAHRVANALRMAAVSLRHTKTALGAAYRRIARLKGADIAVFAMARKLAQLVYRMLRYSQDYVDAGEVAYESRFQARRLAGLKEAARSMGYSLTSDPAKTVAPAG

SEQ ID NO: 428264 - protein, 363 aa, unidentified
MPMLADTVDGVIGVDTHRDTLAAAAVTPVGGILAQIATSADAAGYHALLDFARAQIPGDPARRCWAVEGTGSYGAGLACFLHATGERVVEVGRPKRPARRSGGGAKTDQVDAVRAARDALAHEHQHLALPRRRGDREALRVLLGCRRNAVSARVAAINQLKALIVGAPDDLRAELRGTATTAQVARCAGLRDRPARCLEHRMTVRVLRTTAQRIQQLHAEIDELGAELTRLVDAIAPWLVDLPGIGPVTAAQLLVSWSYAGRLRSEAAFAALAGTSPIPASSGQVTRHRLNRSGDRQLNRALHTIVLARLRDDPDTRVYAARRTAEGKTPREIRRCLKRFTARQLFKLLERYDQPGVEVLRAA

SEQ ID NO: 428265 - protein, 362 aa, unidentified
MQIIGCDLHARQQTLAMLDTGTGEVVNRTLTHEGNNVREFYSTLPAPVRVGIEATGSMKWFLQLMEELGIDCQVGHPATIRAAEPRRQKHDQRDAELLLKLLVENRFPSIWQPSQELLDLRGLLLHRHQWVRLRTRIQNALQAIALANGLRRGSSLWSQSGQDAIASLPLATHTAHRRSELQAMYARFEAEIEQLNQQVLEQAGQRPSAGLLMTHPGVGPITALATDVFLGDPKRFRDGKALASYIGIIPREHSSGGRQRLGGLSKQGNPLLRFLWCEAAAHAVRRDPELRRFYRRKLVQKGLGKARVAAARKLGIRLWIMLRDRIDYHEFCRRGQMQQKSGGACAGMPRGRYGAKSHRLID

SEQ ID NO: 428266 - protein, 367 aa, unidentified
MDVHAETIAVAVAEADGEVRSLGTIANREESIRKFIRKLGPAEHLRACYEAGPTGFVPYWQLAQLGVECAVVAPSLVPKKPGDRVKTDRRDALKLARSHRSGDLTAVWVPDEGSEALRDLVRAREAAKQDQLRARHRLTKFLLRTGQRPPLGLKAWTERYLAWLHQIHYTQPAQEATLLDCLNEVLHMGERIKRLEQSIMEVVQLAPAPMQEVIQGLQALRGVAHISAVTIAAGLGNISSRFASARKLMGYSGVFPSEDSSGGRIRRGSITKSGNAHLRRIVVESAWSYRHRPSIGARLRQRQQGVSAEITEIAWKAQNRLHKRYMKLMAADKEQRKTMTAIGRELLGFIWAIGIKAEAVATQKMAA

SEQ ID NO: 428267 - protein, 411 aa, unidentified
MEVLYRCCCGLDVHKKSITACVLRVEKGKTRKEKRRFGTFTRELLEMADWLTNCGVTHVAMESTGVYWKPVWNILEGQFEVLLVNAQHIKAVPGRKTDQKDCEWIAELLQHGLLRASFVPDRPIRELRDLTRYRASLTQEINRIANRIQKVLEDANIKLASVASDPLGASGRAMLRSIVDGNENADQLAEMSKGILRNKIPELRVALEGRLTDHHRFMLKLLLEQLRSAEATITKVEQELEKRMRPFEETVHRLDTIPGVDLVTAWSLLAEIGFNMEQFPSAAHLASWGGLCPGNYESAGKRLSGKTRKGSPALRRCLCQVASVISHQHNNYLSARYRRIPARRGNKRAILAVAHSVLVVAYYLISNQKEYQDLGPDYFDRSNADRLRRSLVHRLERLGHRVTLEPLNQPV

SEQ ID NO: 428268 - protein, 336 aa, unidentified
MKRTTKYVALDVHQATTSASVREESGRVIARSVLPTDGAAITEFVRGMRGAVHVALEEGTQAQWLHDLLAPLVDRVVVCDRRGAPRQGNKADQVDADQLSEQLRRGGLRAVYHGSVDRTTLKELTRTYRNLVEDATRVMLRLKALFRARGIPASGKRVYHPRARAQWLAQLQNPGARLRAEALYAELDVLRHLRPTAKAAMVTEARRDPAWLVLRTIPFFGSVRVALLLATMQTPWRFRTKRNLWAYAGLAVVTRSSARGLNRNHNRVLKDVFKGAATAATARPGPLQDFYHSVIARGTREELARLTLTRKLAALTLRLWKKGERYDPTKLTTPAR

SEQ ID NO: 428269 - protein, 348 aa, unidentified
MTVTIVETRAITGGVDTHADTHVAAALDSIGGLLGVQEFPATAAGYARLLGWLGGFGTVCLVGIEGTGSYGAGLSRHVTAAGVRVVEVDRSDRQDRRRAGKSDPLDAVSAARAAQSGRARGAPKGRDGTVEAVRALMVAKRSARSERTQTINQARALVLTGPADLRTRFARHTVVALVAETAALRPRPGDVVGYATRVALRELGRRAEFLDSQLDRLDELIIPLVTVHAPGLLALYGIGPDTAALLLIAAGDHPERLRSEAAWAHLCAAAPIPASSGKVTRHRLNPGGDREANHALWRIVITRMSSHPPTRRYVERRSTQGLTKKEIIRCLKRYVAREVYPRLRAAAD

SEQ ID NO: 428270 - protein, 429 aa, unidentified
MNDLTDRLELFRRMRGSVRGSEKYLLVGVDVAKNNHHAFFGTPNGRTLRKNLVFDNSTKGFESLRSLARDILKQHGLGEAVYGLEPTASYHKPLAEYLIRQDEHVVYVSNVAVAKNRALLDGRWDKNDKKDAANVADLVGQGRCLYYDVPEESLRELRSLIAFRMRLKKQEHALRMRLRNNVFAQFFPELDKLYIRAGQPDDLVLSIAEHCLDPREIAGMEFEAFLKLITKRKIRIEQERRLRELWEVAKESAGCQVHDAARWEAKSLVSQLKAVRETVKGNEQLMEKVAQQFPEYGSLLSIPGFGPIVSAMVLAAIGNPFRFENRKQVLRLAGLDLSAERSGKNSDSAKPVISKQGKAALRYALVQAAIVASALNADIRSYFSTLLKGRELERGIKLKMKVKLAAKLLVVAWTLMKSKEQFKSSCFTG

SEQ ID NO: 428271 - protein, 343 aa, unidentified
MSIDTMIGVDLAKSVFQIHGASMNGEILFQRKLSRQAFSVFMAQHSAAVVVMEACGSAHYWARLLSGFGHEVRLIAPRYVRPFVKRQKNDAADAEAIVVAAQRPEMRFVEPKTVAQQSAAILYRSRQRLVRQRTETVNALRAALYEFGHIVPQGIQHVSRIGAILEAPNSDLPPLMREECLAMLDQVAALSGWIDTKTAKIKELAATTPISKRLQTMPGVGPLVAMAVETFAPEMATFNNGRDFAAWLGLVPRQFSSGGKERLGRITKAGQSDIRQMLIIGAMSRLNWMGRKSIPESSWLARMMARKPRMLVAIALANKMARQIWAMLTKNEDYRNPTPVKAA

SEQ ID NO: 428272 - protein, 316 aa, unidentified
MTQISTAAGIDTSKAKLDIAVHGRVEHWQVENTLVGWRRLAAELSATGVTRVGIEASGGYECGVVGYLRDKGFVVLLLQPIQVKAYARLHLRRAKNDKIDAVLIAACAAMIDQAPIDPDQRLAKLAQHLTFVEQIEEDIARFKVRLEHVGDRRHRRIVVTDITRLKARRAAELARIVMALRAHDDLARRLDLVLSVPGIGERTAIALIVRMPELGRVSREQAAALAGLAPFDDDSGKHNGERHIAGGRRRLRRSLFAAALPAAFHWNKALIKLYARLIARGKAHNEALIACARKLLIYANTVVQRGTPWTERPAAA

SEQ ID NO: 428273 - protein, 443 aa, unidentified
MEQLQRNGEPEFAAFVAIDWADTEHVWCMQPGPGQRRETGRIHHSPESVEEWITSLVVRFHNQPIAVALEQSRGALVFMLSKYAQLHLYPIHPRAAAQFRSALFPSGAKDDPKDADLLLEMLLQHRGYLRRLDPDTEETRTLQMLVEDRRRFVNENTRQSNRLTSKLKLYFPQILTWFDEVDSPLVGAFLQRWPTLETAQRARPETLRKFFHNHNCRSDERIELRLQQVRNAVPATRDPAVIRSGTAAVAVLVQLIQTLRNGITSLDKEIEIVSRAHPDFAVFESLPGAGKVMVPRIIAAIGSRRDRFVSAAELQSYSGIAPVMQRSGKSQWVHFRWACPKFVRQTFHEWAGHSVASSDWARSCYQQQRERGKGHHAAVRTLAFKWLRILFRCWQDQRPYDAARYEGARGRRAEVHPAPAAGDNLRIQWKSCAGFSKPTFFAT

SEQ ID NO: 428274 - protein, 338 aa, unidentified
MLYSGIDLHKRTVVIATVDETGKVVCEASLPTSRFAVARYFAELPDSTRATVEATSSWYWLRDLLHQEGVPLTLAHAKFVKAIAYAKVKTDAVDALTLAQLHRVDLIPRAHMVSPELRPLRDLLRTRLQLVEKRVSAKNSVHRLLEKFNVPDPASLPDEAALSASLYEEQIELLDSQIRRIEQQLQPRLIPEPDIQRLLWIPGIGKITAFTLYLEIDGIDRFPSVRQFFSYCRVVPGAHNSGGKNRHGRRKDGNRYLKLALSHAAVRAIQYYPEIKRFYQRKARQKNPAIARTLVQKELARSVYIVLAEGVEFNHTFKGQPLERRKQSKWPRQASPDV

SEQ ID NO: 428275 - protein, 319 aa, unidentified
MGKSKVEYEQVIDRGCGLDVHRDTVVATVMGKGIKTETRTFGTTTSSLNELGEWLQSLKVTDGAMESTGIYWKPVLHVLRAYPLNLIVVNARHIKNVPGRKTDKADSQWICKLLISGLLKGSFIPPENIQELRDLHRYKKKLVGIIASEKNRIIRVLEDANIKLSSVVSDTSGVTASYLIKGLIEGRKDLEKLIAECYHRKLQANPQQIKEAINGRLTSHHGFILKSMQRHIASVEEQIAEIDLEIEKYIKDFEKEIELLQTIPGVGKEGAIGIVSEIGVDMEVFPNEHHLASHSGMCPGNNESAGKKKVQKLDLGIKI

SEQ ID NO: 428276 - protein, 344 aa, unidentified
MLYVGVDAHKAHSQMTVMDQTGKILKRRRVASSREGVLEALEPHRADGGEPMKAVLEAGYGWGAIYDWLEEVADEVILAHPLKVRAIAEARIKTDKLDSEMLAHLLRADLIPEAYAPSKETRATKRVLRQRMFLVRLQTMVKNRVWALLWQHGIEPPPVSDLFGKKGLTWLREQTELPEPDGRLLREEVGLAETLKEKIRSTESLIAELAEGDEALGWLRSLPGIGEFFSVLIGHEVGEMERFPSSKKFASYTGLVPSTYASGRRITHGRLTKEGNKWLRWAFIEAVSPAIRCSPYLRGYYMRIRTRRGTKDARTATARKLAELAWTVCTQKRPYVECSKERPT

SEQ ID NO: 428277 - protein, 350 aa, unidentified
MKVTFQTCCGVDVHKSFLVATIIKTSSGIEPSYQKRRFSTFNNSILEFKKWLLENECLYVCMESTGKYWIPVFNLLEDEINVTIANPKWVKAVKGNKDDTKDSKWIGDLFRLGLVRGSYIPCKKIRILREFTRYRYKLVSCRSSEKNRYQNALTVCNVALDSVVSDIFGKSSTSIIDYLLGQSGTSIDHEVIASKLLKRLKAKEDAVIESIEGYQMTDAQKYRMRLVRAHIDYITAEINDVDKMIENIISSNPDFENAVQFLCTIPGVKRDSAITIISEIGTDMSQFSSSKRLCCWAGLTLGSNESAGKKKSVRITRAGVYLKPALVQCAHAAVKSDKSPYYKTIPMKKP

SEQ ID NO: 428278 - protein, 327 aa, unidentified
MMRPIVGIDISKHFLDVVLIHVGHSHYKTVDNDAAGFLCLRNWLKAKGCHTAHICMEATGQYGDAVAVFLHSHGYHISVVNPARTKAYAASRLKRNKTDKADALLIAEFCQNEKPPLWTPPRPVFQALKALVHQLDDLMAIKQQEYNRLEFSASVTLVNAILHEHIEFLEAKIKVVQKAISELIEQDSQLKHQKDLLLSIPGIGERTAARLLAEIRDFREFRNARQLAAYAGLNPRQHISGSSIHRKTRLSKTGNATLRRALFMPAVVAKKHNPIIKDFCQRLSDTGLTNMAVIGAAMRKLLHLAFGVIKTDSPFDPYYLQKEVIHA

SEQ ID NO: 428279 - protein, 346 aa, unidentified
MTIVETRAITGGVDTHADVHVAAALDPIGGLLGVEEFPVSPAGYARLLGWLGGFGAVALVGIEGTGSYGAGLARHLACAGVRVVEVDRSDRQDRRRQGKSDPLDAVSAARAAQSGRARGAPKGRDGAVEAIRALMVAKRSAAGERTRTINQARALLLTGPDDLRARFAKHAPAALVTGIAALRPRPGVAAGYATRIALRELGRRAVFLDGQLERLDELIVPLVTARAPGLLALYGVGPNTAALLLIAAGDHPGRLRSEAAWAHLCAAAPIPASSGKVTRHRLNPGGDRQANHALWRIVFTRMGSDPATRAYVERRTKEGKSKAEIIRCLKRYVARQVYPHLRPAGD

SEQ ID NO: 428280 - protein, 386 aa, unidentified
MGGKTFIPQDYDVFAGLDVDKKSIAATFSNQQGFIRSLQMPYSVDHLLNHVRKHFADQKIAFVYEAGPTGYGLYDGLAAQGYRCLIAAPSMIPRAPGQRVKTNRLDSRGLSESLRGGQLKSIHVPSQIYRELRHLTQLRDTVVREAAAHKQRIKAVLLLEGIGFPLAPAGSQWSFMVKEKLRKLACSRIVRFKLDQLLNGLEFCEKQVVNSTKEIRRFCKEDAELSQSIEYLMSIPGIGWIVGSQLLARIGDWRQIDNVRQLGSFLGLVPTENSTGDTVDRGSITHVGDGRLRSKLIQAAWSAIRQDNELREFYRSVSQRNPRGKGARIAIVAVARKLSTRVYAVLKNQRPYIVREQVHSAPLTQEETSPQGTTRRCAEPGETNNS

SEQ ID NO: 428281 - protein, 363 aa, unidentified
MKIMTGIDLHSNNALCGLMDESGRRLVHKKLPCELPAILQLLEPYKDRIATVAIESTYNWYWLADGLQDHGYPVVLANPARMKPYDGIKHTDDVSDAYFLTELLRLGILPTGHLYDRKHRPVRDLLRRRLLLVRQRTSLILSFKSLNERTLGQRVPLSRVKTMSAEDARARFTEPADQLLGGQQIELMGQLQQAITQIEQHVLGVAGKWNSYQRLQELPGIGKILGLTIALETGDAQRFAGAGNYASYCRCVKSLRQSNGKKKGENNRKCGNRYLAWAFVEAAHFACRYDERCRRFYDRKAKQTNPIIATKALACKLAKAAWHVMKENVSFDADRVFGPGRKEAFGETGREPAKGSGRKSPQD

SEQ ID NO: 428282 - protein, 352 aa, unidentified
MIIIGVDFHPEFQQIASVDTETGEVQEKRLAHREEAEAFYRALAGQKVRVGMEASGHGRWFERLVAELQFELLIGDAAEIRTRRVRKQKTDRQDAQLILRLLLEDRFPKIWVPSWENRDLRQLLWHRHRMVPARTRIMNQLQAVALNEGLRCKKRLWRVHGREQLESFRLAPWASRRRCDLLELLDRLNPTIAELSQAIEQEVEKCPAARRLMTHPGVGPLTALAFVLIIGEADRFQCGKQVASYLGLVPLEDSSGNRRRLGHITKQGSSILRFLLVEAAQVTVRSLPEWRSKYLHLMMRRGRKIAKVAMARKLAVRLYWMMRQGWDYQQWVKFGSHAGQPGNRHGVQSNTE

SEQ ID NO: 428283 - protein, 428 aa, unidentified
MEVIYPKACGVDVHKSFIVAVICDSTSITPKYLRKRFSTFNNDLIRFKNWLLENDCQNVCMESTGKYYVPVYNALENNISNVVVANPKWVKAIKGEKDDNKDAKWIADLFKMGLVRSSYIPSKDFRILREFARYRYKLTNTKSSEKNRFTNALTVGNCKLDMVFSDIFGKSSQSIIDIILNNDNFSDNDIISCISKKCKSSSEDILSSIGGIQFTYEQKLRINIVKDHIDYLINQIGKLNDIIDALVVPYESYIDLLCTIPGIDRNSAIGVLSEISNDVSQFKSHYRLTSWAGLAPGCNESAGKKKSVKISRAGVYLKPYLVEIAHNAVKDKTNPYYAKKFEKISKRRGKKRAYIAIARKILVAIYHMFETGEVWNPSDFASVETHVEDRIKYTKNNFNQSLKQLLSLGLTSEELINLINQNANKSPV

SEQ ID NO: 428284 - protein, 316 aa, unidentified
MQSALFIGVDVAKDNVVVACSQETFASRTLLNKTSALKTFLVSLPPQSSIAMEATGSYHQNLADLAHRLGLRVYVLNPRDLYHYAKAMGLRAKTDRVDAALIARFLASEGARLRPYQPPTAAQRQVDHLLRRRAKIVSLKTALQLTCAEAPSIRAETASVLKSFAALLKKIDRQLDELQQAMPGRTQQLERLQTIPGVGALTACWLTNLLDRIRFRNSDALVAFAGMDPRPCDSGQKRGRRRLSKRGPAEGRRLLFNAAMAASRCTAWKEVYTRCRQQGWASTEAFMILARKILRIALAMYKTQTNFDPAFIGKRA

SEQ ID NO: 428285 - protein, 431 aa, unidentified
MNSSLNNDNTQNNYAAFIAIDWADLKHTFSLKVAGQGKKETGTLEQKPEIIGPWVANLRERFGGRLIAVAVEQSRGALIHALLAYDFLVLYPIHPTTVARFREAFKFSGAKSDPLDTDQILEILTKHLELLKPLKPDSQETRLLGRLVADRRKTVYLRTSHVQGLLACLKEYFPQAIELCNDNLSSRLATDLLAKWPTLEAFQQAKPSTLKRFYYGHNIRSPELIEKVLSLATTAKALTTDPAIVESGRRLAQMHAQLIQTLNPVIEGYDERIEKVFHDHPEFPLFSKLPGAGPVMAPRLLAFFGTDRSRYPNAENVQTFCGISPVSKSSGKTRVVYFRRACPKFQRQSFHEFARLSVASCQWARNYVDHYTAKGKKYNTVIRALAFKWIRILFRCWKDRTPYDDKKYMEILKKRGSIFATLPLEQKNENG

SEQ ID NO: 428286 - protein, 418 aa, unidentified
MSYRVAAIDIHKKVWMVVVASANSEVKDPAGEALEFEARRFGTGSAERAHVVGWLRERDVKEVVMESTAQYWKPVWMDLEPHFGKLHLAQAHSHRAPRGRKNDFGDAKRLARRLLAGELLLSFVPAAAQRTWRTLTRSKHQLVRDRVRLPNQMEALLEEMRIKLSSVISDLLGVSGRRILSALSAGERDPAKLAEWGDERLKCSREELSDSLNGAPPPTQLAVLNLFLERLDLLDRQIESLDRLAAGELSQHQDAVTRVAELPGLGADSAQQIIAEVGTDAETFPSAAAFRSWAGVCPGSNISAEQNHSSRAAKGNRFVRRILTQAAQAAVRKKGGHLQSVFRRRLPKLGYNGAIWAIAHRLARLVWKILHDGVRYREPGEETHPKAKQRRAQKLTQALRRLGYVVTLTPIPETQAAG

SEQ ID NO: 428287 - protein, 337 aa, unidentified
MSKIVLIGLDVAKHVFQLHAVAADGRVVFRRQVRRPQLTTLLMSIPSCRIAMEACGTAHYWGRQLEELGHEVLLIPPDYVRPFVKRQKNDAADAEAIAEAAQRPDMRFVRVKSEVSQAASIVFRARDLVVRQKPQLLNAIRSHLAEFGYIFPQGAAASAKMQEVIESDDDLPPAAQGILRSLWQHLSSCEAQLGEFDKEIQKRARDDLDARRLTSVPGIGPVTAAAIAALAPDPATFRKGRDFAAWVGLTPLERSTGGKQRFGRISKMGERTLRRLLIMGASAVVSWVRRGKINPSAWPASILHRKPPMLAIVALANKMARVAWAILKHGGSYMQPA

SEQ ID NO: 428288 - protein, 418 aa, unidentified
MKVVFPTCCGVDVHKTFVVATIITTPADSLQPNYQKKRFSTFNSDLNRCADWLLEHNCLDVCMESTGKYWVPVFNILEKRGIRVVIANPKWVKAVKGNKDDTKDSKWIGDLFRIGLVKSSFIPDLNIRILREFTRYRYKLVSMKSSEKNRFQNAFTVCNVALDSVVSDMFGKSATAITDYLTSDESFDAEHCVSLLQRSLKKKAEQVLESIEGFSIADEQKARIKIIREHHDFIEEMIATVDTRVNEMVAKYEGNINLLCTIPGIDRRSAITIISEIGTDMGQFGSSKRLCCWAGLTPGNNESAGKKKSVRISRAGVYLKPALVQVAHAAVKDNDHPYYKLKYERIAKRRGKKRAIIAIARMILTAVYSMFCTGEVWNPVDLYKVDMPGCLKEQQLAKAIKQATRFLKSRDYLWLSSD

SEQ ID NO: 428289 - protein, 355 aa, unidentified
MDSKKYIGMDVHKESISIAVRNGAGKIVMECVIETKASMILDFIAGLRGDLQVTFEEGTSAAWLYDLLKPHVTKLVVCDPRKNASMREGNQSDKIDARGLAELLRIDHLHPVYHGEHGLRSLKELVRSYLTITKDLGRVMSRVKAIYGSWAIPCTGKQVYAPRHRAEWLGKIREPGVRRRAEFYYQQLDALRILRQQVRRDLLVECKKHPAWKRLRQIPSIGPIRAAVLLGILQTPHRFRTKRQLWAYSGLGIETHSSADHRSVNGQLRRVKKQISIRGLNRNCNHDLKNLFKGAAIVASSKPGPFQEFYTALLTKGIRPEMARLTLARKIATIVLMVWKRGVSFDAQHLKPQTA

SEQ ID NO: 428290 - protein, 363 aa, unidentified
MTSMTTNSTAVTGGVDTHGQTHHAEALDSLGRQLGDREFPTTPAGYRALVNWLQTYGHLERVGVEGTGTYGAGLTRQLRAAGVTVVEVNRPDREARRAQGKSDPLDAYSAARAALAGKATGVPKTRDGRVEAIRMLRVARSSAVKARSQATNQLKALLVTAPAELREQLRTLSNTKLIATCARLRPTGDIADPAHATKTALRRLALRHKYLSEEISAADTELRTLVTAAAPALIALPGVGTEVAGQILITAGDNPDRLHSEAAFAHLCGVAPIPASSGRTHRHRLNRGGDRRANNALYIVVLGRLRYDSRTRAYAARRTTEGLSKPEIIRCLKRYVAREIFTVLTARAAGDQPHQAHTMSTAA

SEQ ID NO: 428291 - protein, 347 aa, unidentified
MEFAKVDSEFSCGVDLHARSMYVCVQNKIGDILVHRNLKNDFPLFLQTIKPYQKSIAIGVESTFNWYWLADGCHKADIPFYLGHALYMKAIHGGKKKNDRVDSKTIADLLRSNLFPVAYPYPQEMRATRDLLRRRHRFVALRAEGYTHIQNTFSQQAILDPLSLEVKNKTTRRELCQRFSDPDLAMTIHCDLDLIDTLDEMVSKIEKQIEAQAKHHDRNAYALLRTTPGIGKMLALTILYETHTITRFHSASNFSSYCRLVKIEKTSAGKRTGQENNKIGNPHLKWAFSEIILRAQVDSPPIKKYYEKLKSKHGPQKAKSLIAHKFGVAVYYMLKNGQAFDEKRFVA

SEQ ID NO: 428292 - protein, 460 aa, unidentified
MLPTKPQLQTESLQSLKQINLNAAGIDIGADNHWVSVPADRDTQCVRRFGCFTAELYALADWLAKCGVNTVAMESTGVYWIPVFQILEARGFEVKLVNAHYVKTVPGRKSDVLDCQWLQQLHTYGLLSGSFRPDDQICVLRSYIRQRDNLIRSSTTHVLRMQKALTEMNIQLHRVITDITGTTGLTIIRAIIAGEHNPQKLASLKDCRIKSSTEQIAAALTGDYRAEQLFILQQELHLWEVYQSQIASCDEKIEQCLAAFDSKVDVSAKPLSKPKQRGIKPRGNSPAFDLRTHLYRISGVDFTRIDGFGVLTVQAILSEVGLDPSRFPTVKHFTSWLGLCPGSRITGGKVKSSQTRPVINRAAHAFRMAAQSLRNSRTALGAFYRRLRARCGTPKAITATAHKLARIFYHLWTTGGEYADPGVDYYEHKYHERMVNQLKKKAQSLGFELVAPPSVTECVS

SEQ ID NO: 428293 - protein, 364 aa, unidentified
MEITTIGIDLAKSAFAVSGADSSGRVVVRRQLRRAQVLSFMRGLPQCTIGMEASGGAQYWARQLSALGHEVRLMSPALVMPYRKGNKTDRNDADAILEAVTRPSMRFVTVKSVAQQDLLALHRVRAQLVKSRTALCNQLRGLLRERGVVVRVGVAGLKRGLPAALADESSELSGELRELLGEMGQWLRTLEQRIASCEAQITRKFKHDERCARLAEVPGVGPLTATALVAAVGNAQRFKNGRELSAYLGLVPRQHSSGGKTVLLGITKRGDRYLRTLLIHGARSALRQCKDDARSDWARRIRAERGPNVAAVALANKNARVLWALLARGDRYRSTRVATPAALHSSAPPAVKRARATRLRVLKD

SEQ ID NO: 428294 - protein, 356 aa, unidentified
MSDTIIAIDLGRYKSVVCAYTRTTRAHTFRTIDTTPDELAKVLAKHPRAAVVIEACSNAGWVHDRAVAAGHTVKVANVTGEAWTFTRLKRKTDHDDAKRLAELEAIGQLPTVTLPDPTTRQRRLLIAFRQELVGQRVACQNRIRALFATHAVAMPTGAKAWTADGLDVLDAQAKELSGCGPDELWRGMLRMAVDQYRDLEDRIKEAERALDQLSAADPGTQLLLSIPGVGPRTAEAIAAHLVDPNRFASGKQVGAYAGPVPTQYQSGVTDRKGRITRRGPAILRKLLVECAWCMLRYNPWARAHYAGLTGGGVSRKNPAIVALARKLLVRCWAMLRTGQTWRADPIPNSGPGAAPA

SEQ ID NO: 428295 - protein, 387 aa, unidentified
MEVLYQSCAGIDVHQANIVVCILHGPLTSTRPKREMATFDTTTKGLRACHDFLSQFHVEAVGMESTGVYWRPVWHALCDDFELILAQPAHMKAIPGQKTDKKDAHWIAKLTRIGLLPRSFVPDETIQELRELTRQRKHYVESRNRETNRIHKFLQSGGIKLTTYIEDIMGLSGRNLLQLLVDGTPITPRIVHQSVYTSLKKKVPQLLEALDGYFSDHHRFMLKQSLEIYDFYQKQIELLEERMNVYLSQYEKHVEILDSIPGIDVITASVIISEVGVDMSQFPTFGHLASWAGLCPGNNESAGKKRSTKIRHGNSYLKKCLCQAAFAVKRQKGSPLAERYYQIQSRRGSQKATIALAHQLLKIAYILLKEQMTYPEFLAQKRLLGTS

SEQ ID NO: 428296 - protein, 377 aa, unidentified
MSRIRFIGLDVHADTIAVAVAEPDGEVRSLGTIPNRLESVRKLVARLGPATQLKACYEAGPCGYVLYWQLTALGVACEVVAPTLVPVKAGDRVKTDRRDAAKLARCYRAGDLTAVWVPDADHEALRDLVRAREDARQDQHRARHRLSKFLLRRGQRPPQDVKKGWTLKYMTWIKEQVHFDQPALEATLLDYVHEVDHMAARIERLEKAIGEAIQKAPPAMRAVVEALQALRGVAQITAVTVVAELGTLSRFDSPRQLMGYSGLVSREFSSGNRILRGSITKTGNAHLRRVIIESAWAYQYRPWIGGFLLKRQQGLDQEVKDIAWKAQWRLHTRYKKLAGAGKKKPQIVTAIGRELLGFIWAIAVKTEAKLQPQRKAA

SEQ ID NO: 428297 - protein, 484 aa, unidentified
MSCRNVGVDLGVTAKHKAYVCDEQGRKIADFSFQISKENLDTLCSKALSGATQETKLRLICEPTSMAWLPLAIYAENNNHEMIRVKSHKTHDLRKFFSRNKKNDKLDAKILATMPTVDEQTVEEIHLPNAKMFALERFNRQKDRITQDIASIKNRLSSLFHWVMPGLLDCFNDSFDNRAIMFYRRFSNPLKAKKSGINRIRKVLDKACRQSMKPNLPEELYSVVCNACELYSKSSEHVDFDEIQCEVQIELQLLEMLKKTLSEVEERVESLYKDVHPEKHIETIKGIGKNLGASIVGIIGDPNRFSSQDNLRSFAGLIPKQNDSGESNKKGLHLTQEGPSRFRRDLFLAADTARQWDPQLSKIYYEDMVLKGHHHFHAVCAVMSHLINRILCVMKEKRPYELRDTDGKPVTAKQAKQIIKEHFVVPEEIRERTRSKRSCRNKKEEYTRNLFKRQSNIHWTPQNSYNIPPSTIIQNFEKFAKVFS

SEQ ID NO: 428298 - protein, 382 aa, unidentified
MQTIDTVNPTILLAIELSASTWLVAARVPGWEKPHLHRIDGGDTAALLALISSLQARAARGLDAAIDIVCCFEAGRDGFWLHRLLAAHGVVCHVLEPTSILVNRRARRAKTDRLDAEGMLRVLAAYLRGDHQACSMVRVPTPEEEDAKRTHREREKLVQERLRIENRIEALLFTQGIRKRPSLRSWERDLAVLRTGDGREIPRHLRAELDRLRRRLVMTLELIREVEAERDQAAKTKPQDRACHKIAALSRIRGIGENFAAVLTREVFYRSFDNRRQIASYVGITPMPYQSGGMDRDRRISRAGNPRARTTMIQLAWLWLRYQPGSELAEWFRERVGTLAGRTRRIAIVAMARKLLIALWRYAETGVIPAGAEIRAETTVAA

SEQ ID NO: 428299 - protein, 346 aa, unidentified
MKILALDLGKNKSVFCDYHAETAEHRFGKINTIPAEMQALLLKQRPDRVVIEIGNSAGWVYDLAVTMGIDIQVAEVGEESWRWRKRKTKTDRVDALKLARVSAMNQLPTVHMPSPAVRQWRSLIQYRQSLVGRRTKIKNTIRSLLESQGLKMPSGWKAWTEAGVKQLQERALPMAEASETELWRGMLDNELKALQQIQEQLAPVEAKLDGMAQTQERVRLLRSVPGVGPRLAETVVAMIDDPKRFTRGKQVGCYAGLTPRQWQSGQMDRQGHISGRGNRVLRSMLIEVSWLGLRNNPWMKAIYERTLKGGKRKKVAIVAVARRLLVVLWAMLRDGTAWNPELAMAE

SEQ ID NO: 428300 - protein, 385 aa, unidentified
MKNTIVHHEGAASLEAAVKKVKLSGSIIKIGLDVHARLYVAVAQYDCLLPKPVRRLGPSEFVPWVKQLLRAGHTVHVVYEACGFGFGLYRELKAAGAHCYVIAPRKLDEQCTRVKTDPRDATTLCQRLSRYLDGNTRELAVIRVPTEGEEQARHVSRQREQLVCLRQKLEAQGRSLLVNHSLPSPAHWWKNQTWSRLLKLLPGWICLRLEVHRPVLLGLEQQIGALSAQLEATAPADVPAGVGKLTTVIMTREICSWERFTNRRAISSYTGLCPGEHSSGSKRVSGSVTKRGNPRLRAALVECAWRMVRFQPQYPPVKKRLAILAKGAHATGAQRKKAIVAVARHLAVDLWRVHTGRCSAAQLGLKSAETLIVRGEQKAELNALA

SEQ ID NO: 428301 - protein, 368 aa, unidentified
MNTVKFIGMDVHKNSITIAICDADRHDQPRIYGAINNDLDAIDKFCRKMVSTANQLHFVYEAGPCGYGIYRHLTQKGFDCMVAAPSMIPKKSGDRIKNDRRDAKMLARLHRAGELTAVYVPDERDEAMRDLTRAREDAVLATRKAKQRLSAFLLRNRVIYTGRTRWSKDFFNWLSDIAMPFPVQQVVLQEYIDTVNDNLKRVERLTEQIRLQVPSWRLAPIVSALQAARGVSLIVATTLLAELGDLSRFDNPSQLMAHLGLVPSEYSSGESIKRGGITKTGNGHARKVLVEAAWAYRLQARVSRPLLKRQQKLPDRICQIAWKAQLRLCARFRRLTAQGKAKQLVVTAIARELSAFLWAMAKQVQPVA

SEQ ID NO: 428302 - protein, 350 aa, unidentified
MNYVGVDIHKRYSFVSATDEQGHRLREARIEGNAPSAFAQFFAGLDGSSKVVLEACWNWGLLHDVLDELEPVEEVVLAHPFKTRLIADAQIKTDRLDARALATLLRGNLVARVHIPSPQARQRKNLLRQRLYWARLRTMLRNRIHALLDRQRGLALPQCSDIFGVKGLNFLRSLQLPEPDGTLLAEQLALHDLIAQQMRAQEKRIVAETRTDPIVQRLQSIPGVGKVLAVVLAAEIDVITRFPSAERLCAYAGVVPTTHASGGKVHHGRLLPWCNKWLQWALVEAAWIAVGCSGYFGGFYRQHRERGKPANKAITIVARRMCRIVWTLLREDRDYEERANMISPAAPAKD

SEQ ID NO: 428303 - protein, 414 aa, unidentified
MFAVGVDVSNARSTVAVLQSKTKVAIKPFEVQHTAEGFAALTGTLNALGGEARIVMEHTGRYYESFAMSMHQAGFFVSAINPLAIKEYQDGVTVRKVKTDTADALKIARFALDNWEILPQYTPMDTIRYNLKTMHRQFQLSSKTKTALNNNLIALLEQSYPGVDKYFDSPARPDGSQKWVDYADTFWHVDCVAKVSQKAFTERYRKWCKRHGYNFSAQKAVELHADAKQKFPLVPKSDTCKLLVKEAIAQLNAVSRTVETYRVEMNRLASQLPEYDIVMGMYGVGPSMGPQLMAEIGDIRRFAHQKSLIGFAGTDPIKDDSGDKVSDSKPSSKRGSPYLRKTLFVVMTILLQLQPQDDPVYQFLDKKRSEGKKYHVYMTAGMTKFLRIYYGKVRDCLKEKELWDQPSLDEVNPV

SEQ ID NO: 428304 - protein, 466 aa, unidentified
MTPCPPKKPRPPRRSDALRITHPHAAGIDVHSSVHWVAVPPGDAPPPPADHPAHLPAHVRAFGACTADLHQLADWLAECGVRTVAMESTGIYWIPLFELLEARGFEVFLVDPRQSRHAPGRPKSDVLDCQWLQRLHGYGLLTASFRPAEQVVVLRSYLRQRQMLIRYAGRHVQHMQKALEQMNVKLTEVVSSVTGVTGMAIIQAILRGERDPLELAKLRNDKCKRTEAEIARALYGTWRAEHLFALRQAVALYEFYRQQLQECDGQLQAHLGTWADRSQGRPRPARRRRHSKKGNEPAFDVTGALYRLAGVDLTVLEGVDPSTALVLLSEVGPDVSRFPTVKQFTSWLGLCPQHQSSAGKIRRRRVRRGAHRAGRALRLAVQACWRAQNALGAFYRRIRARAGAPKAIVATARKLAERVYRLLKYGADYVCQEIAAYEAAYRQRLVKGLARRAAELGYRLEPAAVT

SEQ ID NO: 428305 - protein, 343 aa, unidentified
MTIKVLGIDIAKNTFQLHGADDAGKAVLKKRLPRNRLSPYVANLHPCTIVMESCGGANYWARVFQRSGHTVKLISPQFVKPFVKTNKNDANDAEAIVEAASRPSMHFVPIKRPEQQDVQSIHRVRSRLVKNRTALINEIRGLCLEYGVIIALGAARVKKSLCAVVADSGNGLTPSSRDCMQELYEELVDVEARLKKLDARNRQLCRQNDSCRRILSIPGVGELTATAIVAAVGDAQEFKNGRHMSAWLGLVPRQSSSGDKRVLLGISKRGDRYLRTLLIHGARAALSHYKTTDNDYGLWLARKKATLSFNKAAVAAANKNARIVWSLLNSGEEFNYGVQTAAA

SEQ ID NO: 428306 - protein, 345 aa, unidentified
MTSMSYIGLDVHKRTISYCVKDASGQIHREGKIGSTRRELACWMQTLPQPWTVAMEATIFSGWIYDHLLPHAAQIKVAHPLMLRAIAAAKKKNDQIDASKIADCLRCDFLPECHMMPAAIRDRRRTLRYRHLLVRQMVQMKNRVSGLLMETGVEYNKQRLHTVSYFRELLSENEEVPPSIRPLLKLSRETIERCQRTEYALVSSLQRDPVLADRITRLRTVPGVGPITALTWALEIGDVSRFHSIKQAISYCGLCGDERSSADKAMRMPLSKQRNKHIQRALVEAAKLAPRQSHELAMVYDTERQKGNSNRATLAVARKMVAYLLAVGRQQRDFVPAEERRTAAA

SEQ ID NO: 428307 - protein, 348 aa, unidentified
MTHFVGWDVSVKETSVCVVDDAGKVVCEQKVPTEPDDIVVLLTSVGEDYVRIGIEAGPLSQWLVNGLTGAGLPVICVETRHMKALLRAQQINKSDRNDTRGIAQMMRVGPFKPVHAKTLAAQEQRMLLTSRKLVQRKLIDIESDMRGTLRNFGLKVGVVSTIGYEARIRHLVEGFPRLAAIVEPLLTVRRVMRQQFAVLHKMLFDTVRHDPVCKRLTTAPGVGAVVALTYRATVDQPQRFVHSRAVGAHVGLTPRRHQSGEIDYDGGISKSGDTMLRTMLYEAAQVLLTQSRHWSWLKAWGMKVAQRRGMPSAIVAVARRLAVVLHRMWTDGTNFRWGSEPGTAIAVA

SEQ ID NO: 428308 - protein, 361 aa, unidentified
MHYVGLDVHAHQSTYCVLDGNGKVFQRRTVFGPWHKLISKLDRMPKPFAVCYEASLGYGFLYDRLSKIAERVEVANTSQLRLIFRSKHKNDRADAEKLAKLLFIDQVPVIHVPKPEIRAWRSIIEHRHSLVSERTRIKNGLRAILRSRAIVPPMRLWTKAGITWLAGIDLDRDLDALRRDRLLERLCSVEKMVARVEKTLDARGTAHPGVRLLMTIPGVGLRTAEAVMAYIDEPGRFTRNKAVGRYFGLVPTQDASSRKNHLGHITKEGSPTVRKLLVEAAWQGKRRSRRIKAFYERILRDDKQRKKIAIVATAHYILRCMLAMLTTGEVWRNRGTDKIYSPPQRLRRVIDKPILAAVAGN

SEQ ID NO: 428309 - protein, 342 aa, unidentified
MMKLCVGVDVSEKELAMAYWDKDKPVFVGTYPNTDDGFQAIRRKIEELLGATNAFVHLVMEPTGGYEQPFAHFADRQGWRVSLPNPLKPKQWAKATGKRAKTDPQDARMLAHYANAQDPLPWKPLPKEVEQLEHLLNRQDDLSGMLRQERNRAHSAGYMVNPHEAVSKDMAESISCLEQRITAIQEAIKEHLKANPELMDQKKLLLTVSGIGEKNVLYILVTLHRWGILTGGKGEAKGLVAYLGLDPAPYESGSSIHKKARISRQGNRSLRSRLYIGALGGVGGNNPLRAFYQRLVGRGKPKKLALIASARKILVWAWAVFRSNKPFDVTRFNHITYIEPLS

SEQ ID NO: 428310 - protein, 357 aa, unidentified
MKIVGCDLHARQQTIAMVDTETGEFTEKTLSHEGNAVREFYAALEGPVVVGIEATGSMQWFLELLEELGIECRVGHPAKIRAKETRKQKHDRRDARLILDLLIEDRFPEIWMPSIEQRDLRTLLRDRHQWVRMRTRLQHTLQAIALNHALRKGHALWSAAGQSALGVLPLPAYTSQRRTELLRLYVQLQQRIQELDKEVEEQAQQRPQARRLLTHPGVGPVTALATEVFLGDPSRFATTNQVASYIGMIPCEHTSGKRQRLGKLTKQGNSLLRYLWTEATMHAVGKDPELKRFYRHKLIQKGMSKARIAAARKLGIRLWIMLRDQIDYEEFCRRGKLRQSGEAQAGMPDFNSGPARQ

SEQ ID NO: 428311 - protein, 408 aa, unidentified
MKDSGKRYIGLDVHKHYLIAVGVDDDLNVVLPVRRVEFSYLEAWMKKTLTKQDEVALEMTTNTWQLYDELCAYAGSVLVVHPPHVALITRSLVMNDKIAASILARLLAKGLLVGVWVPPQEIRELRGLVAQRKKMTGLATQAKNRLHAVLQRHHWLPPEGNPFHALQKKWWLTLPMGPLEKVNVQSDLDTLQFAEKQLMQLTSMMAEIANQNEEVTRLLQLPGFGVVTAVTVWGAIGDIHRFEDAQHLAGYAGLGTKVHDSGMTTRTGRITKAGRRDLRVVLTEAAQVAANSHPHWKAELAHLQPRLGRNKAIVAIARKLLVAVWYILAQRKTDRFAQPEAIAQKLLKFAYQLGKETRPKGQSAAQFVRQRLDALQLGQELTSIAWGSKKPILLPPSTNKVSDVPNTK

SEQ ID NO: 428312 - protein, 341 aa, unidentified
MDHYAGIDVSLEQSSVCVVDASGKIIREGKVASEPQPLIDWFGALGFDLVRIGLEAGPLSQWLYAGMKQAGLAVELLETRHVRDAFKAMPVKSDRNDARNIAQLMRLGWFRPVHCKSISAQEVRAMLTARKLVQSKLRDIEMSLRGTLRGFGLKVGNTTLTRFAARIRELVGENATLQVIAESLLAVHAVLLREFRGFEKRLRLMARCNVAAQLLMSAPGVGAIVSLTVASAIDDPARFKSSKQVGAHFGMTPKKYQSGETDITGRISKIGDKAVRTALYQAAHIVLTRPVKGSALKSWAMRLAKRVGMRKAKVALARKLAVILHRMLADRKPFAFAATAA

SEQ ID NO: 428313 - protein, 378 aa, unidentified
MSDTLPLFVGLDYHQQAVQVCVLDAQGRQLLNRPLDNDCQAIAAAVAQLGGTVQRAGIESCSGAADLAQELADQCGWSIDLAHPGYVNRMKQSPDKSDYSDGRMIADLVRVGYLPKVWLAPEPIRELRRMVRHREALVNERRAAKQRINAILREQRLRCVDHSRWSKAWMNWLCDVAPLSPAGRWIIDRQLQHLRHLCGEIQEAEKQLTLMTRADLTVKKLKTLPGIGEVTAWIVRASIGRFDRFATGKQLSRFCGLSPRNASSGTRVADAGLIKAGDPLLRATMIEMSHRLIRTERRWRELAEKMRAAGKPPCLIVAAVANRYVRWMFQQMNQKPNQPAASSSSASSGRTIRKNQRKNQRKNQCARWPGPKLMNVSS

SEQ ID NO: 428314 - protein, 462 aa, unidentified
MQKTRTNGKTRGGGRSGQGLQVIRAQVAGIDLGSREHYVCCPPTPEGAVQVQRFGSTTPELYRLADWLKAQRVESVAMESTGVYWIPLYEILQSRGFEVLLVNARALASVPGRKTDMLDCQWIQRLHSCGLLKGSFRPTEALCALRSLVREKTTMESQRSDWLRRMQKSLDQMNVCVHHAVADISGTTGMAIIRAIVGGDRNPLNLAKFRDPRCRKSLEQIAKDLTGNWRPEHLFSLKQALRMYDHIGTLITEYENEIQRVLATLQPPEHRSSAAPEVRNAGKRRNFRARGQEPMREALFRLGGFDLTTIDGIGVDTAEDILSELGTDLTCFPSEKHFVSYLKLAPKLAISGGKPLPCKRRGSATTRLGSTFRMAALTLRNSNTALGAEYRRIARRKGASVAVFVLARRLATLVYRLIRHGQTYVDQGVKVYEDRFKAARLRSCQEVANQFGYKLIPKDQAA

SEQ ID NO: 428315 - protein, 427 aa, unidentified
MLKHNTEQDPAQDVVAFLALDWADEKHAFRLQGVGQSQIETGTLEQKPQVLGPWVAKLRERFGGRPIAVGLEQSRGGLIHALMAYDFLVLYPIHPTTVAKYREAFKSSGAKSDPLDAGQILEILTQHRDRLHRLNPDTVQTRLLGRLVEDRRKAVDLRTAQVQALGASLKEYYPQALELTHGNLSSRLACDLLLKWPTFADFQQAKPSTIKRFYYGHNVRSPEVIERALALGQPSQALTTDPAIVESGSRLSQMYARLIAALNAVIEDYDQRIQRVFDAHPEAKLFSGLPGAGPALAPRLLAFFGTDRSRYAAALNVQSFTGIAPVTKSSGKSQVVYARAACPKFDRQSFHEFSRLSVSQCQWARNYVQYYTAKGKKYHTIIRALAYKWIRILFKCWQERTPYDEDKYMETLKKRGSIFAVLHLQKT

SEQ ID NO: 428316 - protein, 340 aa, unidentified
MTLYAGIDLHSNNNFLAIRDHDGKRIFQKKLKNDPNKVLATLEPYKKELNQIAVESTYNWYWLVDLLMDEHFEVKLANPSAIKQYKGLKHVDDKDDAFWLAEMLRLGILPTGFIYPKETRPIRDLLRKRGHLVRLRTSLILSLQNIFLRNHGKTMNVEKIKQKTHNNVAEALQEENEDLALSGKVSKESIDYISQKIQEIELHIKKEIKSNIAYKFLHTVPGIGPILALTITLETGPIERFPHVGNFTSYCRKAPSKWTSNDKKKDKGNPKNGNKYLSWAFAEAVQKARQHDKPARDYFNKKVSKSNYPVAYASLANKLARASYYIMRDEVPFDHRKLFA

SEQ ID NO: 428317 - protein, 404 aa, unidentified
MNMNAVGIDVSKGKSMVAILRPYGEIVSTPFEVKHTVSGIRSLIEHIQAIDGESRIVMEHTGRYYEPIVRELSQADLFVSAVNPKLIKDFGDNSLRKVKSDKADALKIARYTLDSWTELRQYSFMDEIRNQLKIMNRQFDFYMKHKTAMKNNLIGILDQTYPGANTYFDSPAREDGSQKWVDFATTYWHVDCVRKLSLNAFVDHYQKWCKRRKYNFSQSKAVEIYEASKEIVSVLPKDDLTKLIVKQAVEQLNMASQTVEQLRAMMNEAASKLPEYPIVMAMKGVGRSLGPQLMAEIGDVSRFTHKGAITAFAGVDPGVNESGSYEQKSVPTSKRGSSDLRKTLFQVMDVLIKTHPQDDPVYQFLDKKRAQKKPYYVYMTAGANKFLRIYYGRVKEYLASLPES

SEQ ID NO: 428318 - protein, 415 aa, unidentified
MGYKVAGIDIHKKVLMVVVMLIQAGGLVEKIERRRFGTTTPELEKLAAWLQALGVQEAVMESTAQYWKPVWGALEGKIPTLNLAQAFSNRARRGRKDDFRDAERLVRRLVAGELVLSFVPDPEQRNLRTMTRMQVHLTYDRGRLHNQVECLLEEMRIKLSSVLSDLFGVTGRHILGAMAKGETDPRKLAAWAGNRLQCTAKELVAALTGHVQPMHQRLLGLYLERLQLIDQQIDELQHMIAEALQSEQDAVQRLAEVPGFGADSAQQMIAEVGPQAATFPSAGEMSSWVGTCPGQNQSAEENHSSRSAKGNRYARRVLTEAANAAVKTKGSHWQVVFRRLLPRLGYQQAAWAVAHRLCRVVWKILHDKVRYVEQGVNRDPKARAHRARTLARALRQLGYNVELTPLTPAPAPTSP

SEQ ID NO: 428319 - protein, 409 aa, unidentified
MNVMHERCAGLDVHKETVVACRRVMEGARVVREARTFATTTRGLLALADWLREAGCTHVAMESTGVYWKPVWHVLEGELELVLANAAHIKNIPGRKSDVNDATWIADLLAHGLIRSSFVPPGPIQELRDLTRTRKQLVREVVQHQQRIQKVLEDANIKLDSVVSDVLGASGRRMLRAIIAGEENPDKLAALGNEHLKASRQTLAEALYGRVTRHHRFLLKQHLDMVEHLEKSVGEFEAQIEAALEPFRPVIKRLVTIPGVSATAASVIVAEIGVDMKRFPTVGHLISWTGLCPGLNQSAGKTKSRALREGAPWLKTVLVQSAWTASRNKKGYLYAQFLRVKSRRGPKKAIMAVAASILTAAYHLVRDAVPYKELGPVYLLRLDHERTAARLTQRLRTLGYEVEIKKAAA

SEQ ID NO: 428320 - protein, 343 aa, unidentified
MQSITTIGLDIAKSVFQVHGVDAGGQVVVRRQLKRRYVLAFFQKLPPCLVGIEACASSHHWSRELKTLGHTVRLMPPAYVKPYVKRQKNDATDAEAICEAVTRANMRFVATKTPGQQSGLMLHRTRHLFIRQQTAVINAIRAHLAEYGIVAPVGRNGVEQLLAVVADANDKRLPEVARACVAALGAQLQMLKSQILEFDRMIRAWHRSSEASRRLDEIPGVGPALATALVASVADPKTFRSGRDFSAWIGLVPKQHSSGGKDRLGSISKQGDRYLRSLFTAGALAVIRYAKIHGTKHRPWLTALLARRPTKVAAIALANKIARMAWAMMAKGERYKEPAALAA

SEQ ID NO: 428321 - protein, 335 aa, unidentified
MEGLLELIERIRTRVARELNRPVEVISCYEAGYDGFWLHRLLEAHGVRNLVIDPASLQVDRRARRAKTDKIDAERLLRSLMAYLRGEPKVWSVVRVPSVAEEDDRRLHRERDRLINERVQHVNRIKGLCAVHGIYDYEPLRSNRLARLKQLRTGDGRELPQRLTAEVVRELQRLELVLKMIKTIEAERDAIAVSKISTHTHAKKIQDLVKLKSIGPEIATALVGEVFYRRFNGRHQVASYVGLTPSPFQSGSLNHDQGISKAGNPKARTIMIELAWLWLRHQRNSPLSVWFRERVGTARGRIRRISIVAVARKLLIALWRYLETGMVPTDAVLKG

SEQ ID NO: 428322 - protein, 411 aa, unidentified
MEILHRCCAGLDVHQGQVTACVRITKPDDKATAHSKEFQTTPSGLTSLRDWLRGHGVTHAAMEGTGVYWMPVYEALREACDLTLCNAHHVKKVPGRKTDQSDAAWLAQLMASGLLNKSFVPTADIRGLRELTRSRVHRVEDRTRVVNGIHRLLERGGVKLCSVVSDLQGVTARAILADLAQGASDAATLSQHARCKLRAKRGLLAEVLQTPLNVVERIMIGQQLAMLDLINAQIADLDIIIAATVQPYAAQMKILMSVRGIEFVAAAAILAEIGPDMSVFKGSDGLSAWAGLAPGQNVSAVKRKRAGTRPGNPYLSRILVQVAFVLFRSKTQHDLTDFFRKKLPKLGFKKAAVATAHKLLVRIWRMITDGKEYAPPPPKPLTENQRTRRAKRHYDMLIQLGYKVALERAAA

SEQ ID NO: 428323 - protein, 418 aa, unidentified
MKSTKTKKITKINDKTVVATLDIGKNVQYGYFRAPNGNDVKPFAFYNSKKSYNAFWEKLRQFQKQQGLEQIVIGFESTGPYAEPLFHFLRKKPVELVQVNPVHTKRVKELTGNSPNKTDKKDPRVIADVICLGHALTLVVPEGPAAELRRLTQARERAIKTRTSMINQLQHLIFVIFPEFLTVLKISTKTARYLIKHYTTPEKICALGLESVGQLVKKVSRGKLGQDRAKQLHEAARDSIGISEGKQSIVFEIEHLVGRIEAEDQFIDSLEKQMYVYLQQIPYSQNILSIKGLAEVTVAGLIGEVADFNKFDTISEVMKLAGLDLYEISSGNHRGQRRISKRGRPLMRKLLFFAAINAVKSKGIMHEKYHQMLDRGMLKMKALVAISRKLLGLIFAIVRDKTKYVQNYSDNYHYKLAA

SEQ ID NO: 428324 - protein, 456 aa, unidentified
MTRKSPSRLQRDLAPVHPHAAAVDIGARMHVAAVSPRCDSEPVRTFGTFTGDLQRLADWFEQCRVATVALESTGVYWIPLYEILTQRGFAVVVVNAREVKQVPGRKTDVCDAQWLQRLHEYGLLRASFHPQGEIATLRSYLRQRERLLEAAAAHIQHMQKALIQMNLQLQHVVADITGQTGLRIIRAIVAGERDPDRLAALRDGRCKTPLVTLRAALVGNDREEHVFALAQALELYEIYQTKVAACDERIAAVLERLQAQNPPPAALPLPRRAQPQANEPAVPVRAALHAILGVDLTQIDGIGPSLALKLVSECGTDLAAWPSAQHFTSWLGLAPHNKISGGKVLSSRTRRSGSRVAALLRLAAGAVGRTQTALGAFYRRLAARVGKAKAITATARKIAVLVYNTLSHGMAYADPGASYYEERYRQRVLSNLRRRAKSLGYVLEKTEPASTAVVVS

SEQ ID NO: 428325 - protein, 346 aa, unidentified
MLYAGLDLSRQRLDVHVVREDGTTVLATAVSPDADALRTLAHRVAGEGEDVRGTVESMTGARFIHDQLELAGWDVLIADAQRVRGLAPLAAKTDKIDAHVLAELTRRALVPEIWLPTPGVRCERERARFRLHLVRHRSAIKNRIHATLMTFGHPCPLTDLFGVAGRELLDRLALPEPWHTNLAASLALIDDLTRRIDDLELELRHLGVDHPSIPLLLTVPGVGPILAYTIASEIGDVRRFASAKKLAGYTGLCPLVRQSGNRDIRGPLAKNGPKYLRWALIEAATHAARDAHYRERYERTKQRLGRQRGAKVARVDLARQLAEAIWHILTKNKPFAPAGPAIHLVA

SEQ ID NO: 428326 - protein, 412 aa, unidentified
MQVVYERCAGLDVHKRTVVACATTPKADGHPQKDRQTFSTMTVEICQMRDWLKSLGVTHVAMESTGVFWKPIYNVLEGHFELLVVNAQHIKAVPGRKTDQKDAEWIADLLRHGLLRASFVPSAQEREVREFTRHRTKLSQERSRVINRVQKVLEDANIKLAAVASDVMGKSAHAMLQALLQDDVDPATLAELALGKMRAKRDLLEQALTGLLKEQHRFLIREHLEHIKTLDQAIVRASHEIAERLRPFEAQLRRLETIIGIKRRLAEIILAELGTDMGRFPSSRHLASWAGMCPGNRQSAGKRFSGKTRKGSPWLRTALVEAAHAAARSKNTYLSAQYHRLAIRRGAKKAAVAVGHSLLVIIYHVLTQENDYEELGGNYFDERSRQAVEKRLVRRLENLGYQVSLTQTAPTP

SEQ ID NO: 428327 - protein, 406 aa, unidentified
MIFINCLGIDIGKSESVVAHYKDEVLVKEMVIQNNQNGYRYLKNYIKHLDSLFILFESTGIYSRGMKRFCEIHKIDYLEMNPLEAKFKTSSLRSWKTDKSDAHKLALLAFRMKDSKVQRQSEEIYFELRERARFHLEMEINQNRLKVELVETLHQTFPGLEKLFTNRYSKIALNIAKAFPHPDFVSTLTNDELVEKVLHSTDKGISVNKAHKYVQKLIEIQINSFPNVHKSSFLLQKVQYLCDKLLIGIEEMKEFDQEMIDLAENTTEFENIISIPGIGELTAALLIGELGNIREFKTNKQLNAFVGIDIKRYQSGTSKSRDTINKRGNKKARRLLYLIIMNIIRGRNHYQSHIVDYYYKLREQPHGKTHKTAVIASINRLLKTIHYLIVNNKGSLSTSVGETITH

SEQ ID NO: 428328 - protein, 356 aa, unidentified
MNLIKERRPKMNLSNNKKEKNIYQYDHYLAIDWSQVNVAIARMKKNSTESKKIEMDSEIKEVKKYISGIKGSKILTIEETTSTHWLYVELKETVDKILVCDPYRNSLLGTGPKTDKIDAGKLCELLRGNFLHEVYHSLDEDYRIRKLSSAYEDLVKFGVRLKNQKSAIYRAEGMRYKKDDLPDNPILQFIEDNQNEGIELYENERKQYHSYFDKLSKKNELINNQEKIPGIGRISAVTIYAIVIQASRFEDKYKYWAYCGLVLNNKESGRRSYGKRKPRCSRKLKSIYLSAAMAAIGGNSDIAEYYNHLLQSGLPARDSRRAVARYIAKVSYGMLKTGEKYIPYKWRKSKEKEEIK

SEQ ID NO: 428329 - protein, 313 aa, unidentified
MGPQSVYVGIDVAKATLDVAVHPTGARWTTTHTEREVAGLVPRLTPLQPALVVLEATGGLEGPLAGALAAAGLPVVVVNPRQVRDFAKATGLLAKTDALDAAVLAHFAAAVRPTPRPLPDAATQTLAALVTRRRQLVEMLTAERNRLGSAPRALRAEIQAHITWLQRRLGRLDDDLNEAIRTSPVWRAQDDLLQSVPGVGPVLSRTLLASLPELGRLNRKAIAALVGVAPLNRDSGTFRGRRMIWGGRAAVRAVLYMGTLVAVRHNPVLRAFYQRLRGVGKLPKVALTACMRKLLTILNAMMKHQHRWNPTHA

SEQ ID NO: 428330 - protein, 346 aa, unidentified
MNQIIRIGMDTSKHFFQLHGVDAAELPVLRRKLRRHEVLAFFAKQPPTVIGMEACGAGHYWARELRKLGHEVKLIAPQHVKAYVKRNKNDGRDAEGLCEAMSRPTMQFVPVKTEEQQAALMLAGVRQQLIARRTQLSNAIRGYAAEFGLITTKGLDKVEPLSLRIAQDESLPELAREMFAVHGREYARLQVELKAIDARLMAWHRANADSWRLAKIPGIGPIGATVLVMKAPDPRLFPSGRHFAAWIGLTPKDHSTAGKTRLGKITRAGDEMLRSVLVAGATAVIQQAKKGRGRSSPWLLALLARKSPKLAAVALANKTARIAWKLLTTGESYEVGRKPIASANAT

SEQ ID NO: 428331 - protein, 341 aa, unidentified
MQITTIGLDIAKNVFQVHGIDAAEKVVIRKQLGRGQVMKFFAALPPCLVGMEACATAHYWARELTKLGHEVRLMPAKDVKAYVKRNKNDAADAGATCEAVRRPTMRFVPVKSAEQQAQLMQHRARDLLMRQRTQVINALRAHLAELGITAAQGREGIRDLLAIIADEADARLPIDARASVMVLAAQLQALQTLIGSIEKRIVARHRSSEASKRLQTIPGIGILGASAITTIVTEPKAFRSGRDFAAWVGLVPRQDSTGGKRKLGPISKQGDRYLRRILVVGAHAVLKRARLHPQKYPWLTQLLVRRPFKVVAIALANKMARVAWALLAKGETYRMPRLAAA

SEQ ID NO: 428332 - protein, 341 aa, unidentified
MNITTIGLDLAKNVFQVHAVDQKGRVIVRKKLRRTMVNTFFAKLSPCLVGMEACGSAHHWARELQRLGHNIRLMPPQYVKPYVKRSKNDATDAEAICEAVTRPTMRFVPIKATEQQASLMLHRTRDLLVKQRTMLANAFRSHLSEFGIIAATGMGNIAKLITIVKENKDDDIPKAARIALRMIIGQLSDLKTRIDRLEKEIITCHRKNPESKRLATIPGIGPLTASALSATITDASQFSSGRQMAAWLGLVPRQNSSGGKEQLGRITKQGDGYLRQLLVLGATSMLGVVNKKRTPDDDWVIALLQKKPPRLVTVALANKMARIAWAIMIRKESYSPREIRV

SEQ ID NO: 428333 - protein, 407 aa, unidentified
MELAALYKRVIGLDIHQAQITACALIEEADGSTHVEQLQFGGFKRDRRELADWVASLHPDEVVMESTGIYWKSPYAALEAVGIRAKVVNARHVKNVPGRKTDVGDAHWLATLARAGLLRGSFVPPAKLRELRLISRQRQKLVGQLASEKNRLHKVLTDSGVRLGVVVSDLHGQSARAMVKAIIAGEPPSEVLKHASRRLKASREELFDALQGDLSASHRFVLDELMQHIEEIEARIARFDARLLAELESERNTLALLQTIPGIDLIGAAMLLIEIGTDMDAFGSADRLASWVGICPGNNESAGKRKSGHVRKGNLYVRRLLCEFAHAASRTTSVFKSKFQALVVRRGYKRAIIAIGHKILRTIFFMLKRREHYRDSATDYEALSVQRNAPRWIKALTKFGFISPAST

SEQ ID NO: 428334 - protein, 356 aa, unidentified
MSRDIKYIGMDVHKEAIVIAVLNGSGKLVMETVIETKASSILQFLHGLRGELHVTWEEGTWAAWLYDLLQPQVQEVLVCNPRRNALLKEGSKSDKVDARKLAELLRSGMLRPVYHGENGLRTLRELARSYQTIGKDLTRVMNRLKALYRGWGIPCAGTQVYALRYREEWLSKIPQTGVRRRAELLYQQLDGLQALRRNLRPEFLAESRKHKAAKLLRQIPCIGPIRAARLIALMQTPHRFRSKRQLWTYSGLGIETHDSAQYRYVGGQVQRSKKPQQIRGLNQNHNHEMKEIFKSTATRASCGRGPFHDFYAALLAKGMKPEMARLTLARKIAAITLTLWKKEERFDAEQLKTQAA

SEQ ID NO: 428335 - protein, 417 aa, unidentified
MQVVRPICCGADIHKDIIVATIATSNQNGIAEYIQRKFCTQNYDLINLKSWLKEHNCFEFAMESTGKYWIPIFNVLEDEIKVYVVHPKYTKSIKGKKTDKKDSKWIAELFRHGILTFSFIPPREIRELREISRYRIKLVAMRTSERNRYQNAMTVSNIGLASILSDPFGKSSKAIMEEVLKSSFLSEGKLRSLLNKSAKKKAKEVFASLEGSRIEPDQRLKMTVSSEHMNQIDSHIDTLELDLVQRCLPYANLINLLIDIPGISYISAIAVIAEIGIDMSVFKSSKQLTCWAGLAPANNESANKKKSVRISRAGTYLKPLLIQCALSAIKSTSNPYYRIKYNIIKKRRGHKKAIVAIARMILVNIYAILSTGEVYNPCDFKEVTSPKPAKKEMTIENALSFLQAQGIDTSALVLNVS

SEQ ID NO: 428336 - protein, 348 aa, unidentified
MRYYQGRHPFYCGVDLHARKMYVSVVDEAGTLVQQRNLDAGPERFLSLIRPYRTGLVVGCECMFAWYWLADLCRDEGLDFVLGHALYMKAIHGDKSKNDRIDSEKIARLLRGGMFPPAYVYPREMRATRDLLRRRSHLVRMRTDAIAHVVNTTSQYNLPAFDKKLRNAANREGVAEQFPDPSVRRMIESDLSLCDHLDEQIRTLELDLVRSARVDDPQAYQRLQTIPGVGKVLALVLLYELHDVGRFADVRNFVSYCRLVRPKHESNGKTTSAAKKKKIGSAPLRWALGEAACLMLREVPEAKRLVARLEKKHGKAKALAILAAKIARAVYWMLKRKEAFDVTKCFKP

SEQ ID NO: 428337 - protein, 415 aa, unidentified
MALKNVYKICCGIDVHKTFVVACIASTNEKGVTTYESHRFSTYTCGLKNLLQWLLSRNCKDICMESTGKYWIPVYNILENDCSIVLAHPQYVKAIRGKKTDKKDAKWIADLFKHDLVAGSFMPPADIRQLRDLMRYRFKLTCFKSSEKNRLQNCLTVSNIQLGTVVSDTFGKSAQAILDKLLENPADTSFDLDPLIHKSLKKKLPELRDAIDGYITPEQAGKLKVIKSHYEDLESRKAELEELILALAAPYQQELAILQTAPGISSIFTAIGIISEIGTNMEAFPSAKHLCSWAGLTPTNNESAGKKKSVRVSKAGCYIKPLLVQCANAVVTSKKHPEIRNRYLRLKKRRGHKKAIIAIARMLLTALYHMLKNGENYNSELYKKSDSLPVDREITVEQASIIARNQGYKIKSATA

SEQ ID NO: 428338 - protein, 409 aa, unidentified
MYFVGIDIAKKTHQAAIICSDGKLIGKPFKFSNTIDGFNLFLEKLTAVNTDLSQFEIGMEATGHYWLNLYTWLSDKSFRLHVINPLQSDALRNLYIRKTKTDSVDAKIIADVIRIGQYSETQLADENIIALRDLNRQRFYLVDMAADLKRKIIAMMDRIFPEYQDFFSDMFGKTSVQVMKEYTSPEQILQIPTERLTQLLKKASRGRFTETKAKELKALAANSFAALLSSEMTTLLIRQMLEQLDLLENQIADIEHIIAAQFTQFNTKLTTIPGIGTTLGATILSEIGDINRFDKPKQLIAYAGMDPSVKQSGNFVGTQSHMSKRGSPYLRRALWLAAVVAVNHDDLFKYLFQQKMNAGKTYAQAMGYICHKLLNTVFAILKTGEEYKPVYPSQIDVSKFADQPINSQL

SEQ ID NO: 428339 - protein, 349 aa, unidentified
MIIIGCDYHPSFQQIAFVDMDTGEFQEQRLTHREEAEKFYRELAARGGKLRVGMEASGQARWFERLLAELKVELRIGDAAEIRAKRVRKKKTDREDARHILQLLLEDRFPGIWVPNWENRDVRQLLWHRHRMVQMRTRIMNQLQAVALNEGLRCKKRLWREKGRKQLEAFALAPWASRRRHDLLELLDRLNPTVGELTQMIEQEVEKYPAAQRLRTHPGVGALTALAFVLVIGDAERFRCGKQIASYLGLVPAEDSSGERRRLGHISKQGSALLRFLLVEAAQVTVRSDPEWRSKFFHLAMRRGRKIAKVAMARRLAVRLYWMWRQGWEYQQLLKFGPHAGQPGNRVGV

SEQ ID NO: 428340 - protein, 370 aa, unidentified
MSVRRILAKTINTDLEYEAIGIDLAKNCVSVALLTTDGEVVCIDRLDYSELEKSAQVLCPTTFAMEPCTEMNYLVQKLEAWGHRCLVIGGKNVQNYVENHYSGQKTDLNDAQALAFLAQDTQLRTIKAKDMEQRKYASLTTLREQYIKQYRQTIVSLKGICQAWGLNISKGISGKARLKDLIENHAAFPEELKESLVDMVTHAQTAQKALNKITKTLEELAKNDKLCQLIRTIPGLGLICSCRLRATIGDIKRFKNPKDFPAYYGLVPRSIATGHNERKGKITHRGDRTMRSLMVQAAGSLVNMATKGKLKSKQLTKWILKKQKEKMPWGKLVCAVAAKLLRIVRAVLISNKPYNSKIAGVAKCSLPKGS

SEQ ID NO: 428341 - protein, 409 aa, unidentified
MQVVYPRCAGLDVHKKDVYACALVVDENGQKRQQIRKFSTVTVELLKLADWLQSHAVTHVAMEATGVYWRPIWAILEGQFELLLVNPHHVKAMPGRKTDAKDCEWLAALLQHGLVRGSFVPPTEIQDLRDLTRYRIELTQSQNRVANRIQKVLEQANIKLSSVASDTLGVSGQLMIQAIIDGEEDPERLADLAKRKLRQRIPELQVALSGRIRPHHRFMLREHFDEWKTLSERIQRVEQEIDRAIAPFEQAVMRWKTIPGIDRVTACCLVAELGVNMAQFPSAQHLASWAGICPGHNESGGKRMSGKIREGNRWLRRALCQAAWAATRKKNSYLSAQFKRLSARRGVKRALIAVAHSILIIAYTMMKNAQDYKEVGGDYFERLNHTQLQRHLIRRLQRLGLTVTVQLAT

SEQ ID NO: 428342 - protein, 364 aa, unidentified
MQSYLGCDAHKHYSVFVAVDERGKATQPIRIEHNVAAYQRYLDTLPNGTEIAIESTGNWYWIVDLMEQAGHKPHLANPSEAKKRMGKTHKTDALDAKGLAILLRNGTLPESWIPPGELRDQRELLRTRMALRDLRTSLKHRIHSAIDRYGLHATGISDLFGVKGRAYIADTLPDLPPETARMVALELDSIDQLNVKLMVLEQHIDCTLASSPGIRLMHTLPGVGKILAPILWLEIGDIERFQRAENLASYAGLVPRVIASGGHIRHGGTCRNVNRYLKWAFVEAATCATHLRAYREGHIGLLYRRLAPGKGHGRAIVAVARHLAEASYWMLRKREPYRQPQPHNPSSKFGQARDTSDHAAQVSG

SEQ ID NO: 428343 - protein, 358 aa, unidentified
MSKIIRIGMDISKSVFVVHGVDAVEQPALRKKLRRRQVLEFFRKLLPTKIGLEACGAAHYWARELRALGHEVVLLPPQLVKPYVARNKNDDADAEAICEAMGRPRMRFVPVKTAEQQAALMLAGVRQQLTDRRTQLSNMIRGHAAEFGLVAAKGHDKIEPLLMRIAADEGLPALAKSLLVALGEEYRQATARLRAVEAELMAWHRENELSRRLAEIPAIGPIGATLMVMKVSDPEAFRCGRNFSAWLGLTPKDHSTAGKQRLGVITRAGDEALRRVLVAGATAVIQQVNKGRGRPSPWLVALLKRKPPKLAAVALASKTARIAWKLMVSGERYNPTHALVRMAASHRTGQETPAMANA

SEQ ID NO: 428344 - protein, 317 aa, unidentified
MTTPDTEVFIGIDVSKHALDIAQWPGERTWRIVQEDAAILALVEELRMLHPVRIVLEATGGLEAPVTAALAQAGLPVAVVNPRQARDFAKATGHLAKTDAIDAKLLARFGQALAPPVRALKDEETLELTALLTRRRQIVEMLTMEKNRLHTVSKAVRRDITAHIAWLTKRLKDVDGELRGMIASCEALRVKDTILRSAPGAGRVLATTLLSSLPEIGHLNRREISALVGVAPFNCDSGSLKGTRRIWGGRAAVRTVLYMATMSAIRCNPDIRVFHARLVAAGKKPKVAITACMRKFLTILNAMVRSNTPWQTRISAG

SEQ ID NO: 428345 - protein, 391 aa, unidentified
MIYVGIDVAKDKHDCFITNSDGEVLFKAFSIANNRNGFNDLYQKIESVMEDVTKVKVGLEATGHYSYNLLGYLIDKGLPTYVINPLHTNLYRKSLSLRQTKTDKVDARTIASMLMSDVNLKSYSDTSYHNEELKSLTRYRFDKVKERAKLKSSVSRLVCILFPELEKLVPTLHMASVYTMLSEFPDAKQVANAHLTRLTNLLSESSKGRYGKETAITFRNAARTSIGSNMPAKSLELKHTIKLIQELSSEIDEIENEIKLIMDEINSPILSIPGINYRMGSMIIAEIGDFNRFDSPDKILAYAGFSPSTYQSGQLDGAYSHMEKRGSRYLRYALYNAAKYVCNWDPTFAEYLAKKRAEGKHYNVAISHAVKKLVRVIYHLEKTNQQYIKAV

SEQ ID NO: 428346 - protein, 449 aa, unidentified
MMEPQEIEDGEYEQILERVAAVDVAKASGMVCTRVPREDQPGKRRTRVWQVDAATSAILELADHLVGEGIEKVTLESTSDYWRIWFYLLESAGLSVQLVRAQDVKQAPGRPKSDKLDAVWLAKLTERGMLRPSFVPPVEIRQLRDYTRLRTDLTRERTRHYCRLEKLLEDALIKVSAVASKLDTLSVRDMLEALIGGERDPQVLAGLARGRMRAKHDRLVQALTGKFDDHHAELARMLLDQVDALSAQIGKLTTRIEELIAAIPAAQGVDADGTTGPTAGLGARAPVLPAVDRLDEVTGIGREAAQAIVAEVGLHMSVFPTPAHLVSWAKISPRTFQSGGRSRAGRTGKGNPYLKGILGEAAAAAGKTDTFLGERYRRLARRRGKLKALVAVARSILVIVWHLLADRTTRYHDLGAGYYTSRIDKNRKMRNHIRQLEALGYTVTLAQAA

SEQ ID NO: 428347 - protein, 420 aa, unidentified
MEEITEAPGALVERIAALDIGKATLTACLRVPHEDKPGARRQEVRTYATLTPALLELRDWLICQGVTLVVMEATSAYWKPPFYLLEDDIECWVVNARDVKNVPGRPKTDKLDSVWLCKLAERGMLRASFIPSRPQRQLRDLTRYRRTLTQERTREKQRAEKLLEDAQIKLSSVISDIFGASGRDMLAALIGGQRNPHALASLAYRNMRAKTSVLQEALTGHFTDHHAFMLGMMLARIDALTAQIDTLTTRIGEAIAPFAAQVAQLDEIPGIGITAAQDILAEIGTDMSRFPTPGHLVSWAKFAPRARQSAGRSKAATTGTGNPWLGGTLGEAATSAARTKTFLASRYKRIARRRGKQRALVAVGNSILTIAWHLLSDPAAHFTDLGPDWHDRLAPLRRKRQLIAELERLSGKKVTLNDAA

SEQ ID NO: 428348 - protein, 346 aa, unidentified
MMIIGCDYHPSWQQICWLDTMTGETGEKQLEHGSGEAERFYRQLPAPARIGMESTGNCQWFVEMATTAGHEVWVGDAAQIRASDVRQQKHDRRDAALILKLLLEERFPRIWTPSGPEKDVRQLLIHRHKLVRIRAQVKNELQHLAMNQGVTRKRKLWSKAGEKVLQELPLKPWASRRREDLFKVREMLNGQIDRLNQAVVEVAEKNEKARLLMTQPGVGPITSLAFVLTMGDVTRFQRGKQVASYLGLIPREYSSGGHQRLGSISKQGNRFMRMLLVEAAQIAVRCDPQMRSEYLHRCHRKAKGVAKVAAARKLAIRLYWMLRTNRGYPEVVRVESSSRVPLVSAS

SEQ ID NO: 428349 - protein, 366 aa, unidentified
MKKISTMQAFSNEILKEQKLTIGLDLGDRWSFYCVLDEAGKIILEQKVATTPEAMKQTFGKIPRSLIALETGTHSPWVSRQLTELGHEVIVAPAQKVELITKSNRKDDRHDARTLARLARIDPELLGPVRHRSAKAQIHMTVIRARAELVSARTALVNAARGLVKSFGERLPKCGTYQVNEKLAEGVSAELRDVLAPLLREVESLNERIKEYDERMEKIAKEVYPEVALLKQVKGVGTQIALTYVLTIEDPYRFPKSREVGRFLGLRPGRRNSGESEPQKSISKEGDRYLRTMMVQGAHYILGPFGEDSDLRRWGLKLAERGGKNAKKRAVVAVARKLAVLLHRLWVSGEVYEPLRNSQKAMRAVA

SEQ ID NO: 428350 - protein, 449 aa, unidentified
MNKLNSRRNGLPVINNRAAGIDIGSRFHVVAVPADLDEQPVRTFKAFTADLECMARWLSDTGITTVAMESTGVYWIPVYEVLESHGLQVILANARDARAVPGRKTDVNDAQWIQRLHACGLLRASFHPDREIAALRSYLRLRERHLDYAAAHIQHMQKALTHMNIQLHHVVADITGATGMKIIRAIVDGERSPAVLATMRDIRCKSDIATIQNSLVGNYQPEHVFALTQALAMYDAYQAQLELCDQQIAHTLLRLAQQKAPPCAPLPKPRHRTRQPNALNFDVRAMLYQLTGVDLTQIHGIGPYLALRLVAECGTDLSRWPTAHHFTSWLTLAPGCRVSGGKVLSAHTRKTKNRVTAHLRLAAVTVGRTHTALGAFYRRLSARIGKAKAVTATARKIAILFYNAMRFGMDYKDPGADHYEQKYRERVVKSFYRRAAEFGFTLQPLDGVS

SEQ ID NO: 428351 - protein, 406 aa, unidentified
MISVGIDVSKGKSIVCVMKPGGEVLKPPFRMLHTMEGILALAKLIKTYDEEVRVVLEDTGHYHWPIVTLLVENSIFVCTVNALRMKKYCSQSLRRAKTDKIDSVRIATFGLTYWSELNPVLPPEDTYRELKLLTRQYYQTVSMLIKAKVNLGNLLDQAMPGIQNLMSDSANNHKLTDFVKRYWHYSHILNMGEKRFEADYCKWAEKQGYRMYEQLAKKILAAAQNGIPVLPNSLSTKIAVTEAVRVLHEIEVSRNAILAQMQILAKSLPEYSVVREIPCIGDTLAPRLIAEVGDVHRFHSKHALIAYAGIDAPPYQSGTFNATERHISKRGNRYLRKTGYEVMQSFIQHKPKGDPVYEFIQKKRGEGKCSKKAMIAGLNKFLRIYYGKVTEVYDSMHEQMIFDSEI

SEQ ID NO: 428352 - protein, 378 aa, unidentified
MEHCIFVGCDLHVKTMLMRVATDAGEPETWRYANRHADRLALLKALGARARALGGARVLLAYETSSLGYVLYDEVVEAGFECSVIATTKMPRTWKHVLEKTDERDAQLLLDLLRSHVLAGTALASVWVPTHQERDDREMIRARLDLVDKLTRVKTQVRSLLCRYDLKCPPDVGKGWTQKFVAWLHSLVGSALRYGASVRLGVLLAEFEALGAELAYVDNQMKALASSERYAPLVSALCEVKGVGLVTALTFLVEMGDLCRFSNRRQVGSYLGLVPRCHESGESSDRKGHITRHGPPRVRRVLGQAVGHWVRWSPGAKARYEHMVGKRPKDKKRLKKIAKVAMMRRLGILLWRRGLEVMVQGAPQPPQDVVTRFCTPAE

SEQ ID NO: 428353 - protein, 339 aa, unidentified
MKLYAGIDLHANNNYLVVIDERDQAVFRRKQANVGTEVLRNLAGFQGQLVGIVVESTYNWYWLVDELMPAGYRVHLANPAGIRQYEGIKQTNDWSDAHWLAHLLRLGILREGYIYPRERRAVRDLLRKRRQLVQQRSAQLISIQTLVNRNTGDQITSSHIKQLSCPEVEGWYEEPERVMAVQASLRVQQALEQEIKRIEKQVKGRVKLEAGYQRLLRVWGIGEILALTIMLETGELSRFASVGDYSSYCRCVQSQRLSNGRKKGENNAKCGNRYLAGAYVEAAHFAARFYDRAQAFVARKTAQVNRALALKALANKLCRASYYVMRDGVEFEPTQLFGS

SEQ ID NO: 428354 - protein, 336 aa, unidentified
MLYVGLDVHSRQSSLCILNSSGGMVNQIQLKGPRSTVVDRLRKLDQPFSICYEASCGYGHLYESLRPLAAHVAVAHPGKLRLIYKSKRKNDRVDAQKLAKLLLLDMVPPVHVPHIDVRAWRSLIILRQRVMAQVVRAKNQIRGVLRENDIAGAKWLWSKKQLAWLESLELHPVAKLRLELAVEEFKSLDQKIKRLEAELQKYADRHPAVRLLMTIPGVGIRTAETFVAWVDDITRFRRTRQLGAYFGLVPCQDASADKNRLGHITRDGPPVMRKLICEATWTAIKKCPAFQSFFERIMAGKPERKKIAIVATAHRMIRVMGAMMRNGAAYDANYKG

SEQ ID NO: 428355 - protein, 353 aa, unidentified
MTSTKYIGMDVHKESISIAVRNDAGKIVMECVIETKANIILDFIRGLRGELQVTFEEGTWATWLYDLLKPHVAKLVVCDPRKNSRQGNKNDRIDARELSDRLYMNKLRSVYHGGAGVRTLKELARSYLTISKDLARVMSRVKAIYRSWGIPCAGKQVYAPRHRAEWLAKITEVGVLRRAEFYYQQLDALRPLRHEVRRELLAESKKHKATKLLCQIPSIGPIRAALLIALIQTPQRFRTKRPLWKYSGFAIEMHSSADYRSVKGQLQKSRKRISVRGLNRDCNHDLKNLFKSAATIASVKPGPFQEFYAALLAKGMRPEMARLTLARKIATIVLIVWKKGVSFDAKYLKPQTA

SEQ ID NO: 428356 - protein, 354 aa, unidentified
MPKTTSAQIAVIGIDIGKNSFHVVGHDSCGAIILRQKWSRGQIEARLANLPPCLIGMEACVGAHHLARKLTAFGHDARLMPAKYVRPYAKGQKNDFNDAEAIAEAVQRPTMKFVAVKTTDQLDLQALHRVRERLVSQRTGIINQIRAFMLERGIAVRQGIRFLRAELPIILASRTDVLSPRMLRVIEDLAGDWRRLDERIETLSREIEEIARQDAGCDRLMSVPGIGPITSSAVVAAIGSGDVFSKGRDFAAWLGLVPKQISTGDRTILGKISKRGNRYLRVLFVQAAWVVLVKPKSWERHGLKSWIEAAKKRLHHNVLAIALANKLARIAWAVLAKGRGFESTRTIGGSTQAA

SEQ ID NO: 428357 - protein, 347 aa, unidentified
MKLSAVGIDLAKSVFVIHGVDERGKAVLRRQLKRAEVAKFFANLPPCLIGMEACGGAHHWARKLLGFGHTVKLMAPQFVKPYVKTNKNDARDAEAICEAVQRPNMRFVAIKTPEQQAVLALHRARQGLVKARTAQANQIRGLLAEFGWVIPKGIRHLPKRVPEILEDGENGLPGYARQLFAGLLEHLQELERRVAELEKQIVLWHRSHAQSRKLEKIPGVGPITASALVATIGDARSFKSARQAAAWVGLVPRQHSSGGTDRLLGISKRGDVYLRTLLIHGARAVVSHVQRRADRAPGWLTGLLERRHKNVAAVALANKNVRMAWALLANDRDYEPDYARAFKAGRA

SEQ ID NO: 428358 - protein, 397 aa, unidentified
MSKVFVGIDVSKDFSTAQGVDKNGKKIFYLRFAMNAGGFSELLKAMIKSTEHITEITAAMESTGCYHINLFSFLSSEGVACVVVNPLLITNFARLSLRKTKTDKKDAQTIAQFLLANEKSLSAIAFSQDTQDIKDLSRERESMTVLISGMKNDIKRLLQGTFPELEKLCSPYGETMLHFLKRFPSARLVRAAKQRDIEKALICPDEKRKRVMVSAEDIIAAAKTSVASSGAAKELILSEKISTLLYLQEKNERITEVLIETCESLMIEKLDIIRSIDGVNDITGSTFLAEIGDINNFTSYKHIIAFAGLDPSIHQSGQYVGRSTISKRGNRHLRRIIFLMTLCAVRCKNAFREYFLRRKQEGLPPKKAILATAHKLIRVIFAMLSNKTLFRKGVAAE

SEQ ID NO: 428359 - protein, 399 aa, unidentified
MAAPSLWAGIDAGKLDHHCVLIDASGERLLSRRVRNDEAALTALIDDVIALADGGLVQWAIDLNGGGAALVISLLLARDQHLLYIPGRIVHHASAAYRGDGKTDAKDAAIIADQARMRRDLLEFRHRDEFTVELRTLCARRTDVAADRNRAINRLRAQLLEYFPALERAFDYSHRKGALILLTGYQTPEALRRIGRTRLEKWLRGRNAYNSVAIADRAIAAANAQHVVVTGQRLGSTIVARIAQQILDIDAELSDLDDMIEERFSQHQQAALIRSMPGFGPLLGAELVAATNGGLDSFHSADRLAAVAGLAPVPRDSGRISGNLKRPRRYDRRLLRVFYLAANNSIKTCPQSRAYYDRKRAEGKHHRQAILSLARRRVNVLWAMQRDNTAYQSTAKTAA

SEQ ID NO: 428360 - protein, 514 aa, unidentified
MHKLAERPFPGRHSSSSKLVNNSAAGHNVVGGRPALARSRSLPLNPKRVTERLPAEPAALAPTSNRKAPQEGHYIRAVDSRAKGRKSEKQQDKTMNNSEQWQQHRAFGALDWASEEHFVIVVDQAGKVIEEFEIEHSALGWKKFREKLQPYGSIPFAIETNQGAAVEQLLEAGMIVYPINPKSAQAYRERKAPSGVKDDRLDAWSSADALRVDGQDWKALRPEEPLIKELRLLCRDEVALIEQRTAFIQQLRHALAEYYPAALEAFEDWTSVSAWIFLQRFPTPEALAQAGKRRWQKFLHSRRLWGSDQGPRRMEIFAHAGEFVGSPPTIQAKSLLALSLVQMLFAIEKQLAIYRQRIEELFARHPDHDLFGSLPGAGPKLAPRLLSEIGDDRQRFDAEAQALQCLGGTAPVTKRSGKGRKYWHVHQRWACDKHLRHAMYLFAEQSLSRCVWADIYYQHHRQKNHSHANAIRRLGHRWLKIIHRMWMDRTPYDPELHHRNQLQHGSWIFRLKEC

SEQ ID NO: 428361 - protein, 478 aa, unidentified
MPLSLLTRLRLVLLGHEDLASIVFWAALVGLCAALSSVAFREGLRLFELLFTGQSSSLERAASGMVWWRRVLLPLGGAVLAGLVLRQAGKVLAKKRLPEGAAGMAQLHALIGQFVPEDDMDSTEVVIGIETDRGPWVAALVAAGYTVFPVNPLQASRYRERHGVSGAKSDAGDAHMLADMVRTDSHQLRAAAGDSPEAAGIKVLARTHKTLIWERTRATQRLRHQLREYFPAALEAFEDLDAADTLELLGKAPEPARAAKLTRAQVSAALKRARRRNIPDKATAILAALRSEQLGQPEALTAAYAATVRSLLAVITVLNQQVKALQGQVGEHFGRHPDAEIYQSQPGLAAILGARVLGEFGDDPGRYADAKSRKNYGGTSPITRASGKKKVVIARFIHNDRLIDALMSWAFSALNASPGARAYYDQLRTKGIEHNDALRRVANRLVGILHGCLKTRTLYDEATAWGHRENLGQSHVAA

SEQ ID NO: 428362 - protein, 355 aa, unidentified
MSQEKYIGMDVHQATISVAVMDAGGKLIMECLLETKAATIVEFIEGLHGTLSLTFEEGTSAAWLHDLLKPHIRRLVVCDPRKNALLKDGNKSDRIDARKLAELLRTNQVKPVYHGEHGVRTLKELGRSYLTITKDVTRVMNRIKALYRSWAIPCAGATVYAPRHRAEWLAKIVEPGVRVRAERLYQQLDGLQPVRLEARRELLLESHKHAAVKLLRQIPSIGPIRAALLVALLQTPHRFRTKRQLWAYSGFAVETHDSGEYRYVRGKLQRNRERFTVRGLNDNHNNDVKNLFKSAAISASTRPGPLHDFYVARVEKGIRPTMARLTLARKIAAISLTIWKKGVDFDAQPLHRQTA

SEQ ID NO: 428363 - protein, 314 aa, unidentified
MTAEAPMSVGIDVSKGSLDIAVEPTHQRWQVRHDAAGIKDVVKRLQRMHPDRIVLEATGGFELPLLAALGCADLPAVAVNPRQVRDFAKAIGRLAKTDALDAQVLAQFAAVVKPALRPLPDVATRELSGLLARRRQLVDMRTAESNRLGMAVERVRPDIREHMRWLDKRIKELDRQLHDRLRASPLWREKENLLRGIPGVGAVLTTALLADVPELGIVRHKQLAALIGVAPFNCDSGKWRGRRRIWGGRASVRAVLYMATSVAVRHNPVLRELYQRLLAAGKPKPVALVACMRKLLSICNAVVMHRTPWRYQPA

SEQ ID NO: 428364 - protein, 482 aa, unidentified
MKKRNIYLNQSQELLSLFEDAGNNSKVMCVPMDYAKKDHIVMFCDGTGHILKKPFSVRNNPEGVEYLTDQVARSCHYRQISHKHVFFGGEDVGSYAENFVDTLRSGGWIVAGVNAHDAKKQRANLQASTDRLDLMGIASMLLNRRANCSPAQSGIYRNLRTVVRHRKKLVALSTEVKNRIHTVVDRLFPGFLDEKKSGICPFSRASLYLMEDRFSPHQIRRRKQHKLIEILHRYGTKKPEDTAKKLQSYANSVLNTPKEYISTFQLSLTHHVKHFRCLRDSIEQLKHEIAVWLAQTEGAFLTSIRGIGIVLAAGTAGEIGNPHNQKPVKNLVSYSGIIPRVKQTGGTQGKTHTGKVSKRCNHILKDYVVQSGNHLGLHGPQDLMTDYKRREAAGQHADFGIARRYLRTAMCLMRNPQIYLPPELRNAETKPEERAGYYLMAWPALRDKWKKAGALETAFDDNHFLGRWRNMVQELYEIKLKL

SEQ ID NO: 428365 - protein, 401 aa, unidentified
MLPVLARSTIEELIMEANVCNREPSLSNSVEEAAIFVSIELSRARWLVTSLSPNTNKFSRHSVPGSDIAELLRLLGELRAKAERRINAGVRIICIQEIGFDGFWIHRVLESNGIESHVVESASIAVSRRHRRAKTDAIDGELLLRTLMAFKRGEPRVCAMVVVPTPEDEDRRRLSRERKTMVKERIEHINRIKGLMASQGIVGFEPMRSKSRDLLDNLRTGDGRPLPERMKAEITRELKRLELLRKQIAEIEAERDALLRPCETTEPSPGAQLLKLRGIGPEFASVVWQEGLYRQFANRRQLAAYAGLAPSPWQSGDMNKEQGIAKSGNPRLRTTMIEAAWLWLRHQPKSALTLWFQNRVKGDRGRHRRIAIVALARKLLIALWRFATLGEIPEGATLKIA

SEQ ID NO: 428366 - protein, 345 aa, unidentified
MKYYCGLDVSLNNTAICIVNHDGDIIRESEVPTEPVAIDQWLKATGLPMERVGLEAGGLTPWLCHELLAADWPAICIETRHAKAAMQAQQVKTDRNDARGLAHIMRTGWYKEVHLKSHQSQKLRVLLGNRRCLLDKRLDIDSQIRGTLKVFGHKTGKVTVATYERRIRELVEDDEELQAYIFPMLEVRRHLVQQCNTLEKMILNWVKKDQICRLFMTIPGVGPLTALAFKTCVDRPERFRHSKAVGAAVGLTPRKYASGEVDYDGHITKCGDAFLRSHLFEAAKCMLSRGEPNPLKSWGLRLAKRSSKKKACVAVARKLAVIMHAMWRDGTVFQMDEEATVATAA

SEQ ID NO: 428367 - protein, 371 aa, unidentified
MIIIGADYHPSFQQIALVDTETGELQERQLQHREEAEKFYRHLRAQRASVRVGMEASGHARWFERLLGELQFELWIGNAAEIHAKRVRKQKTDRQDAQLLLRLLIEDRFPRIWVPSWENRDLRQLLWHRHRLVQARTRILNQLQAVALNEGLCSGKKLWRDPGRKQLEAFTLAPWASRRRQDLLELLDQLDPTITELTQAIAQEAAKRPEAMRLMTHPGVGPLTALAFVLILGAAERFPSGKPIASYLGLVPTEESSGKRRRLGHISKQGNSLLRFLLVEAAQATVRSDPEWRSRFFHLAMRRGRKIAKVAMARRLAVRMYWMWRQGWDYDQVRQFGSHAGELENRVGVESNTEKMTGPPAPLLGSSKSES

SEQ ID NO: 428368 - protein, 337 aa, unidentified
MMYSGIDLHSNNSVIAIIDDGDRVVAQKRLPNDVTMIVGFLVRWQEQLAGVVVESTYNWYWLVDGLQDAGFHVHLANTAAIKQYEGLKHSGDETDAQHLAHLLRLGILPTGTILPREHRVVRDLARKRMQLVQSCTTHVLAVENIMARQLGGRMTSNQIKRLTDDTINSLPLEWDVGLAIKANVAVIATLQSQIEVLEKRLQERVKPRPQYGLLTSVPGIGQTLATVIFLETGPIDRFAQVGNFASYARCVDSVHTSNRKKKGEGNVKNGNKYLAWAFVEAANFARRFCPEAKRFYERKKAKTNNVVATKALAHKLARASYHILKEGKPFDVTRCFA

SEQ ID NO: 428369 - protein, 352 aa, unidentified
MGLYMINNFLGIDISKERFDVFLSFISKKGRRETRKRSFKNEDSGFQGLLSFLQKHNVEEVKACMEATGCYSEALAEFLHNAGHFVSVVNPYCIKSYARSKLVRQKNDQIDAEIIADYCQRQELSRWTPPSPEMKKLKHLYRCSAALKDELTLMSNHLEKKERLPKEVANAWEDLAMNIEQKIETIKNSIRELLKQHKELLENFQLLLTIPGIGEESAIAILAEVPDIKAFRDARQLAAYAGVIPRNITSGSSVHAKPRLSKVGSRTLCKALFFPAIVAKNHNPIIMSFCQRLKEKGKHNMAIVSAAMRKLLHIIFGILRSKSAFNPDHIKNYRARRLTSDLNQKVLPSDLM

SEQ ID NO: 428370 - protein, 357 aa, unidentified
MRFYTKQHPFYCGIDLHARSMYVCVLSQDGEIRLHRNMKAAPEPFLKAVAPYRDGLVVAVECIFTWYWLADLCAQEGIPFVLGHALYMKAIHGGKAKNDKIDSQKIAALLRGGMLPQAYVYPAQMRATRDLLRRRTHLMRKRSELLAHVQNTNSQYNLPEIGKKIAYKANRVGVAERFSDPAVQKTIEVDLALITYYDELLKTLELSILKTAKHHDAQTLYLLQTVPGIGKILSLVLLYEIHQIDRFPSVQDFVSYARLVKCAKESAGKRLGTSGKKIGNAHLKWAFSEAATLFLRNNPQGQKLLARLEKKHHKGKALTILAHTLARAVYYMLKRKTAFEMDMFLRTEGSRAGEPSA

SEQ ID NO: 428371 - protein, 300 aa, unidentified
MLIIGVDYHPSFQQIAFMDRETGECGERRLNHSDGEAERFYRELKQQGVSVRVGMEATGYSRWFERLLAELGINVWIGDAAKIKTKRVRKQKTDREDARLLLKLLLEDNFPRVWVPSPENRDLRQLLWHRHRLVQMRTRIMNQLQALAMNEGTRRKNRLWSAQGRAHLEKLPLAPWASRRRQDLLELLDRMNPTIAELTAAVEQEAKKRPDVLRLMTHPGVGPLTALAFVIIIMTPERFPCGKQIGSYVGLIPCEDSSAGRQRLGHISKQGNALLRFLLVEAGGKQRCVVMRTGGVGTYT

SEQ ID NO: 428372 - protein, 312 aa, unidentified
MTKIICGVDVSSRTLDARIGRDGAASRFERTAAGIEALVAFCEAHRVELVAMEATGGYEKLPFALVWAAGIPAVILNPRAVRRFAEAMGFLEKTDRLDAGIIAWFAEVKRLVPQKPASQTQERLEALVTRLHQLTRLRTTQSNQRRLLTEAAVLASIDAVIALVTRQIRSFEAQIAELIAGDPLWRKLDETFRSIKGVAARTVARLMAELPEIGTLSNKAVAKLAGLAPIARDSGRVSGKRPVRAGRSGVRAILFVVAEIVRRHEPDFADVHRRLSQAGKPRKLIRIALARKLLVRLNAKARDARNELAHAT

SEQ ID NO: 428373 - protein, 389 aa, unidentified
MKIFVGIDIAKLNHFAAAISSDGEILIEPFKFTNDADGFQLLVSKLESFDKNSIIIGLESTAHYGDNLVRYLVAEFYQVCVLNPIKTCQMRKNNVRKTKTDKVDTFVIAKTLMMQDDLRFITFFDLDMMDLKALGRFRQKTIKQRTRLKIQLTTYVDQVFPEIQYFFKSGLHQNAVYALLKEAPSPKEIASMHMTHLANLLKVNSHGHFTKEQAKELRVLAQKSVGANDSAISIQITQTIQQIELLDSQLEKIEAEMTDIMKFNDSVIMTIPGIGYINGGMILGEIGDIHRFSNPNKLLAFAGLDPSVYQSGNFQAKTTRMSKRGSRVLRYALVNAAWNVVRNNATFKAYYDAKRAEGRSHYNALGHCSGKLVRVIWKMLTDEVEFNLE

SEQ ID NO: 428374 - protein, 421 aa, unidentified
MKNSAASKLKQVPAGYLRVGVDPHKKKHAAVAMTEDLVVQSKFKFANSRHGFEEALERARAEMVRTGCRGVIFAIETAGHYWRNLAYFLDEKGVPFRLINQFTLKRRREGKDLNRRKNDFRDAEVAAQLLCGGEFTETRLPQGVYAELRAAYNAYRRLVKDRTRITNLLKGLLDGLFPEFTQVFKDPCGWTALSVLSICAVPKIIAEMTEDGFVSTIKARHQGRLMRRKLRALHYAARSSIGICAGAQSVSSEVSFLVEKLHLIEWQVSRIEEVLVRLVDETEEGKYLLSIRGLNYVSVAGMLAELGSFSSYHNARQLIKMAGSNPTESESAGKRGSRTPMSKKGRPGLRYCCWTAVIPMLRHNPDFRAWAKRLRERPVHANPLNGREIVGAALNRLLRLAFTLVKKHAFYQVPELAEVAN

SEQ ID NO: 428375 - protein, 387 aa, unidentified
MARKRTLSTLDTSIAYEAVGLDLAKEDTAIAAFGPDHEGPYLIDRMPYDKLYELLADMAPTLVAMEPCSGAHQIAEQIQELGHEVMMISGRHVQAWVKDHCNGQKTDLNDAFAILNLAYDRWLTLIRGKTREECRLLALQASYRQLKGQRTKTMVHVKATLHAWGFPIRAGSFNQKVLHELIDANREAFGDEVVETLHLMINRVRDLDHDIATVLKLLTEATKRDPRASLLRSIPGFGILTMSRWCAVIGDIARFDSPKQTMAFIGLVPNNRITGHHTETSSGREARGQGRMSKRGDKMLRSLCIMGAGSLCLMVRNDRLPDCPFVASIKERLASPRPWFKVLVYVAAKLVRIATALLKYGETFSYEKAGISKAVLKQWELEQAKAA

SEQ ID NO: 428376 - protein, 342 aa, unidentified
MKIIGCDFHPSFQQIAMVDTETGEQTERKLNRSEAAAFYRGLEGKVIVGMEACGNTLWMERLLAELGHELRMGDATRIRSMEVRKQKTDRRDAELLLRLLLEQRFPQVWVPSLEQRDTRQLLLHRNKLVSVRRQIKNQLQHLALNQGVQQKRKLWTEKGQALLQELPLTGWTARRREDDLKLLDQLNRSIAELDAAVEQEAKNNPIARLLQSHPGVGPITSLAFVLTVGRIDRFAHSRNVISYLGLNPAEHSSGGRQRLGAISKQGNPMLRSLLVEAGQSAARGDTDLKRAYQRLRHRKHSAVAKVMVARKLAVRLYWMWRTQQPWAATRMQDSPSHVVGAR

SEQ ID NO: 428377 - protein, 341 aa, unidentified
MEHTTIAVDLAKSVFQVAVSHRPGHLDEERRLSRDRFLAFFAQRPPATIVLEACGSAHYWARQLQPLGHAVRLLPAHYVRPYVRRNKTDRTDAKGLLEANRNEEIHPVPVKTIEHQAIASVHRLRSTWLATRTARLNTLRGLLREFGIFIPTGSQRVVPRMRALHEDPAVPPLLHATLAAACDEIERLESNMRAVERQLAALADDMPDVQLLQTVPGVGLITATALVALVTDIRRFPSGRHFASFLGLTPREDSSALRRRLGAISKQGDVYVRMLLTHGARSLVWHAKAAGRPTSLQQWAMQTELRRGRNVAAVAMANKLARIVWAVWVQQRPFVADHRLG

SEQ ID NO: 428378 - protein, 425 aa, unidentified
MSSPILPKPEFAAWIGIDWADQHHDVALHAAGSDRIEQKRIQATPEALSEWIAALRGRFRGQSVGVCLEQSKGALIHALLEHDFLVLYPINPSTLDQFRKAFATSGAKSDPSDAALLLELLEKHGDRLHAWKPEDPKTRALARFVEARRKAVDQRTRFIQRLNAELKGYFPQALEWAGQDLSSAMASDFLRRWPTLQAVQRARSETLRRFYTTHHCRSVETIQRRIQQIRTAVPLLTDPAIVEPSAMTVQLLAEQLRPLAKGIKAYDTRIQELFAEHPDSHLFDGLPGSGAVMAPRLLAAFGADRSRYPAAANLQQYSGIAPVTEASGKSRWVHRRWAAPKFVRQTFHEFAGHSIRQSVWARAYYDQMRSRGKGHHAAVRALAFKWIRILWRCWQDQIPYDEALYVEALRQRGSSLVQQLPALAA

SEQ ID NO: 428379 - protein, 376 aa, unidentified
MSEGISFAGLDVHKKSISVALLKPGAREPIEWQQANDAQSVKRLVRKLKREGGETVRCCYEAGPCGFGLQRTLCSAGIECEVIAPALIPLKPGERIKTDRRDARKLAELHRADLLTAVRAPTPEEESVRDLCRCRDDVREELMSARHRLGKFLLRRDLRYGEGRAWTQKHRRWLKSVQFEHRAAKATFDSYLHAIEVLEERMRAVDKELAAVAAEEPYREPVAWLRCFHGIDTVTAMTIVAELHNFRRFETPRALMAYLGLVPGEHSSGAKTSRGSITKAGNKHVRRILIETAWHYRHKPTVGANLRRRREGQPAAVIAIADRAQHRLHRRYWRLLLHNNKVPNKAVVAVARELVGFLWAALYDGDWSASGGCPTS

SEQ ID NO: 428380 - protein, 355 aa, unidentified
MTIGMDLGDKTSRMCFLDEEGEVIREGSVATTKNGMTQKFGGMGHRRIALEVGTHSPWVSRLLKSFGHEVIVANARQVKLISQSSRKDDKLDAQMLARLARMDPELLRPIRHRSEEAQADLMTIRIRAALVEARTGLVNAARGLAKAMGERLPKCDTDQMGEERLAEVPEALAERLKPLLKEVESLTGRIEERDGKIEQIARDRYPETKLLRQVKGVGPLIALTFVLTVEDKERFAKSRDVGCYVGLRPKRSESGERQPELRITKEGDVYLRKLLVQGAHCILSRRGPETDLKRWGTKLAERGGKNAKKRALVAVARKLAILLHHLWRTGKCTSRCAPAARWKENRRQRKKRFGL

SEQ ID NO: 428381 - protein, 372 aa, unidentified
MTSIIYVGMDVHTTNYTLCCYSMEDDRFFAEVQVEPDAKNILKYLARIEKQQSRDCRIVCGYEAGCLGYSLYHQLHAHGIDCVILAPTTMMTKPGKRIKTDRRDARLISKCLAFHTYSPVYIPTEMDDAVKEYIRMRDDANSALARVKQQIIAFCIRHGKTHDGKSYWTNKHLEWLSSLDLGNKILSEVLQEYLIRYYQLREQVDMYDMRINELAQAEPYRQKVEKLGCFRGIAAHTALSFCVEVGDFRRFATAQQFASYLGLVPGECSSGDKQQYTGITKAGNSHLRKLLVETAQVFGRSATKSGKSVALKERQAKCDSLTVAYADKANARLKKKYFKIAMRSKVNIAKTAVAREMACFIWGMMTDNISCA

SEQ ID NO: 428382 - protein, 370 aa, unidentified
MSQSRTLFIGMDVHKDSIAVAYVAQDHGAEVTYLGARGTRQCDIDQLVRKMQSKAKHLLFVYEAGPCGYWLYRYLPRKGSDCWVVAPSLIPHKPGDRVNTDRRDARQLARLARSGDLTVVYVPKVEEEAIRDLSRAREDAISDLKDAKFRLKAFLLRQDIRYVGRAHGGPAHLRWLSEVVCPTPAQQIVFQEYVRAVQEHTERLQRLEQELQEQVNAWRLNPVVEALQALRGVQFTVAVTMVAEIGDLTRFDTPRELMQFLGLIPSAYSSGEQRRQGSITKAGNTHARKAVVEGAWAYRYPAKVSRHLQLRLEKPPKMIQDLSWKAQVRLCTRYRRLVSRGKHANVVTVAMARELVGFMWAIATQVPLTA

SEQ ID NO: 428383 - protein, 325 aa, unidentified
MDIVGIDISKAKFDAALLLGERVRHAVFSNTEAGFEQLLAWLAKHRPDPAAPLHACMEATGNWGLELADFLHAQGIRVSIVNPARIKAYGESELARNKTDKLDAGLIARFCRAHVPPAWVPAAAHLRELRELVRRCDALKAARVQELNRQKAGFASPAVARSIAAHIGWLDGQIEAVMDEARHLIAADPTLSKNLALLRSITGFGEISATILLAELPNIADFTPKALAAFVGLSPSEHSSGTSVRRPGKVSRIGTERLRSTLYMCALSAKRSNKPLAAFVARMTAAGKPPKVILIAVARKLLVYAYAVIRTQKAFESSPDVLLPT

SEQ ID NO: 428384 - protein, 364 aa, unidentified
MELSRSTWLITSLSPGSGEKMSKHGLPAGDVGALLARFAELRRKALARTGVSFPIVVIQEAGLDGFWIDRVLQQEGIESHVVDPASIATSRRRRRAKTDRIDGEALLRALLAHKRGEPRVCAMVKAPTVEEEDRRRLSREREVLIAERISHVNRVKGLLFSQGVSGYEPLRRDRRRRLDALRTGDGRALPTHFKAQIGRELDRLELLLDQIKAVEAERKALLAAQPVAAPGPAAMLLNIKGIGPEFAAVLWLEGLFRHFDNRRQVASYAGLAPTPWQSGSVDREQGVSKAGNPRLRATLIQIAWLWLRHQPQSALALWFKERVTRNGGRFKKSTIVALARKLLVALWKYVTAGVVIEGAVMKSA

SEQ ID NO: 428385 - protein, 360 aa, unidentified
MRIIGCDLHARQQTLAMLDTATGEVVNRTLMHEGHEVREFYSQLPRPVLVGLEAIGPMQWFLNLLEELGIECRVGDATKIRAAEPRKQKHDRRDAELILKLLVEKRFPAIWRPSKELLDLRALLLHRHHWVRLRTQIQNALQAIALANGLRRGPGLWSHDGQAKIAFLPLPPHASYRRSALQAMYRKIDEEVEKLTEQVAQQARQRAGAQLLLTHPGVGPVTALATEVFLGDPRRFADGKALASYVGIIPREYSSGERQRFGGLSKQGSPLLRFLWGEAAAHAARRDPELQRFYRRKLVQKGLGKARVAVARKLGIRLWIMLRDQIDYQEFCRHGQKQSGAICAGMLEVGYGANRHRPVD

SEQ ID NO: 428386 - protein, 349 aa, unidentified
MKIIGCDFHPSYQQIVMWDKATGEMLERALSHERKEEVRAFYAGLQGPVRVGIEVSGQSQWFERLLAELGHEVWIGDAAKIRASCERKQKTDRRDAELLVKLLDEERFPRIWVPTPAERDARQLLLHRHKLVRMRTQLKNQLQALALNQGVQRKWKLWSETGRKQLEALPLMPWASRRRTELLVLLDQLEASIGELDGAAIEQANTRAAVRRLMTHPGVGPITALAFVLTIGPAQRFRRGKQVASYLGLIPTEHSSGGRGQRLGHISKQGNPFLRGLLVEAAQSAVRHEPEMRREYQRLAQRKCRALAKVAMARKLAVRLYWMLRTEVDYAQLIQGSHAGQLESFRGRV

SEQ ID NO: 428387 - protein, 332 aa, unidentified
MAKSPLIPSERKAGASGAVTVGIDVAKATLDVWVSGEAQGWTVPNDEVGIATLIEQVQSRPVRLVVLEPTGGYEYAVVVALTVAQLVVAIVNPRQARDFARATGQLAKTDRIDARVLAQFGAAVDPAARPLPSEETRELDQLVTRRRQVRDMLQAERNRRDHARGTVKGRVQAHIDWLADELTTVEAELRTRIEASPLWRAKEDLLRSVPGVGPTVAFTLLAELPELGSLTGRQISALVGVAPFARDSGTLRGKRAIWGGRASVRTALYMAAVSASCHNPPLKAFYLRLLAAGKARKLAILACLRKLLVILNAMVASGTPWDLNFAQNAENA

SEQ ID NO: 428388 - protein, 313 aa, unidentified
MAFLHQQPQLCLGFDIAKDTITVSDGTTTRTIANQRRAIRAFLKGYKHIDLVVCEPTGGHEGLLLEECLRAGIACHRADTLKVKSFIRSYGTHGKSDAINAGMLSGYGRERWAKLALWQAPDPDETRLRALVRRRQELIAMKVAEKNRAKAPGGCDLAISFEAVIKVVERQIQAIDAAIRELIANSSTLKHRAAICTAMDSLGPIVAAKLLAILPELGSMTRRKAAALAGVAQHPNDSGQKHGYRKIRGGRPDVRTALFMPALRAAAGKGEFAAFYKRLIANGKKPMVAIAAVMRKIVVTLNARLRDAAIPQS

SEQ ID NO: 428389 - protein, 286 aa, unidentified
MEYFAGLDVSMAETHVCVMNRDGAVVYEVKVPSTPADIAAGLAKAPACGRIVFETGRMAPMLYHGLRQLGLPIFCIESRQAHQALKSLATHKTDRNDARGLAHLARTGFFKPVYVKSLPAHALRSLIIARKKLVGQRVTLENQIRGLAVVFGVRLPRALRPAFVRQALQASEGIPGLSAAMRGLVAARAAVLAAVSAIDADIRQLVRASAACRRLMTIPGVGQLTALAFTAAIDDPSRFRRSRDIGAYLGLVPRRYQSGEVDYTGSISKCGDRRVRTLLYEAATSC

SEQ ID NO: 428390 - protein, 366 aa, unidentified
MFYSGIDLHKDNCFITTVDDGGAIVKQERLHNIPDIILAYFDSLQGPHKAVVECTAGWYWLNDLLEPHGVELILAHAKYLKAISYAKVKTDKVDSQPLATLLRLDSIPQAHKIERNLRDLRDVMRSRLRLVQKRTSCYVSIHNLGRKLNCSDQIVIEQRSVPEILPEAYRLHLRNLYEQVDLLDKQILNLEHFLQPVLIPNDDIQRLVWIPGIGKTTAFTIYLEADGIERFLSDKHFVSYCRLVPGAKNSNKSIRHKSGCKDGNKYLKIAFTDMAVRAIQYYPEYRRLYQKIRRRANEPIARTVVAKELARIVYHILKNKTEYRGLKGQPISHQKATQYPRLKHRSMATPGKPVRLSDHAVAGSAA

SEQ ID NO: 428391 - protein, 338 aa, unidentified
MKLYGAIDLHSNNNVTVVIDEQDKVVYEKRLPNDLAIIAHQLSAYQSSLEGIVVESTYNWYWLVDGLMDKGHRLHLANTAAIQQYEGLKYTDDHSDARWLAHILRLGVLPQGYIYPKEERAVRDLLRKRGQLVRQRTANLLSIQNLITRNTGSSMNSNRIKTLEPQQVDELLADRDLALAVKATVAMVQCAKGQIEILERTVRDRVKLRPEFCFLKTVPGIGQTLALTIMLETGDIGRFADVGNYASYCRCVGSQKISNGKKKGKGNTKNGNKYLSWAFVEAANFAIRFSARIKSFHQRKKAKSHGVLALKAVAHKLCRACYYIMKNGVAFDVTKAFA

SEQ ID NO: 428392 - protein, 312 aa, unidentified
MVEHCYGGIDVSKDRLDVQVLPQGRCFSVANTSAGWSQLVDRLRGLSIAALGIEPSGGYERGVIRALLAAGLSVRRINPNKLRQFARARGVLAKNDRLDARLIAEYVAIMPTRVVHRDPAAEQLAAVVTMRRQLSDEHVAVENQTAHIEDAMLRRLNKRRLARLEADILLLDKRMAEIVASNANLARRYDLLTSMRGVGPTLAFTLIELLPELGQMSRKQIAALVGLAPYDFDSGKLKGHRCIYGGRVPVRNVLYMAALSAARYNPALKTFHNRLAAANKKPKVVIVAVMRKMITILNAMLRDNVAWQPKSA

SEQ ID NO: 428393 - protein, 429 aa, unidentified
MNYKQNQRLNQLTDETLIIGIDIAKEFHVARAQDVRGIEFGKSIKFNNSLSGYLELDSWIKEIKLAEKKTTVIIGMEPTGHYWLNIARYLKDNAYTVVTVNPMHVKKIKELDDNLQTKTDKKDAKIIAQLVKDARYSTPNLLEGEYEELRNAKNLRQVVIKDLNRTKNQIHNWLDRYFPEYKEAYASWKSKSFIKIIKKYIFPSEIEKLSPNEIYEMLPPKMRRGVGLAKIERLVIASKNSIGIKEGLSFAKIEINYLLDKYEGFLQQIEEIDNYVTDICSNLDETAKITQIKGIGIVTASGIVAELGDIGRYKTPKQMIKMAGLSLTENSSGKVKGTTSISRRGRKDLRRLLYQVILGMIRTNTAFKKMYIYYTTRRKNQLTGKQAIIALCRKLLRIIHTIILKDIDYDESKMMSEIKYPEEFLNSAA

SEQ ID NO: 428394 - protein, 343 aa, unidentified
MKLIRVGVDLAKNVYQLHGVDCFGETVLKRRLKRHQWLQVLLDKTETDCVIGMEACGGAHHWARELQARGYTVRLIPPQFVKPYVKSNKNDANDAEAICEAMSRPNMRFVAVKSVKQQDIQATHRVRAECMAHRTAKGNQIRGLVSEYGLVAPQQSAALRAAIPCWLEDAENGLTSRFRALLHGLWEDLLRLDERVAVLDADIALIAKTDPVAKRLQQLRGVGPLIATALIASVGSGEQYARGRQMAAALGLTPRQHSSGGKDRLLGISKRGDGYLRGLLIHGARSTLWHARHKQDRLSRWMNDLSARRHPNIAAVALANKTVRMAWAMMRNESDYDPEFATA

SEQ ID NO: 428395 - protein, 423 aa, unidentified
MKGSTLCVGADVHLDDIVLHLVDKADGQKVAERFRVTNNLPGAQAATTIISEVATRLGYTRIEIAWEATGMLWIPFHRYLSHSSLMRDFELELVCFNPQLINKFKQGLVLRKPKNDPLDAETTAARLRIGELPISFVPSDFWQGLRRLTRYRYRLSRSISREKQRFQSIAFLKCSDWKRVKAFSDVFGATSIALLTEFTTAELTQMTSDQLADLISRRGRGHFHDPHGTARAVREALRTSYPIDDRMDDMVTATLASCWEHIRFIKRSMKQVDQLIARHIDPFPNPLITVKGLGAVITAGILAEIVDISRFPEHKHLAQYSGLTWEMRSSGRSVSQHTRLTKVGNVYLRHYFVLGANGLRRFNLEYKAYYLRKYQESSKYKHKRALVLTARKLVRLVYALLTKNVPYVRPQMPIALQEDELLQ

SEQ ID NO: 428396 - protein, 403 aa, unidentified
MNAVGIDVSKGKSMVAIIRPLGEIVAAPFGIKHSASDIKSLVNLIHSVEGNSRIVMEHTGRYYQVLAHQLSQTNLFVSAINPKLIKDFDNDSLRKVKSDKADAVKIARYALDKWQNLKQYSVMDELRNQLKTMNRQFGFYMKHKTAMKNNLISILDQTYPGVNSYFDSPARNDGSQKWVDFVSTYWHVDCVRKMSLNAFIDHYQKWCKRKKYNFSHSKAEEIYGKAKELVPVLPKDEVTKLIIKQAIDQLNSASVTVEELRSLMNETASKLPEYPIVMQMKGVGPSLGPQLMAEIGDATRFTHKGALTAFAGVDPGVNESGSYEQKSVPTSKRGSADLRKTLFQIMDVLIKTMPQDDPVYQFLDKKRAQGKAYYVYMTAGANKFLRIYYGRVKEYLSSLPESE

SEQ ID NO: 428397 - protein, 370 aa, unidentified
MGNRSMFVGLDVHKDTIDVSIAEGERDGEVRHYGVIASDLEPLDKVVRALRAPDRRLHFVYEAGPCGFGIYRHLTTHGEECVVVSPSMIPKRSGDRVKTDRRDSLMLARLHRAGELRAIYVPDDTDEAMRDLVRAREDAVIVGTQAKYRLKAFLLRQGRRYPGREGWTLPYRRWLTDLSLPSAPQHIALQEYRNAIDETEQRIDRLTEQLRQLAPTWRWAPVVAALQALRGVSFITAVALVAELGDLTRFRHPRELMAYLGLVPSEHSSGPSVRRGGITKAGNPHVRRLLAEAAWAYQGIPRIGRQHGYRQEGLPKVVCDIAWKAQLRLTARFKRLVARGKAKPKVATAIARELSGFVWAIALEVSPTPR

SEQ ID NO: 428398 - protein, 393 aa, unidentified
MICVGIDVAKDKHDCFILSSEGEVLADVFTISNNAEGFDTLLQTIHRCARPEDKIKVGLEATGHYSYNILGFLLDKGLHTFVINPLHTNLYRKSLSLRKTKTDRVDARTIAAMLMSDVDLKSYTDTVYHNEELKSLTRYRFDKVKERAKLKQSVSRLVTILFPELEKLVPTLHMASVYALLSEFPGAKQIARAHLTHLKALLNDASKGRYGRDMATELRDAARCSVGSVMPAKSLELQHTIRLIRELNTEIEDIESAIQTIMEEMQSPITTIPGIGFRMGAMILAEIGDFSRFDSPDKILAYAGMSPSTYQSGQLSLSGTYSHMEKRGSKYLRYALYNATKYVCLWDSTFEAYLAKKRAEGKHYNVALSHAAKKLVRLIYAMEKSRQPYNSVA

SEQ ID NO: 428399 - protein, 378 aa, unidentified
MNRIIKIGMDVHTTNYTLCIFEPSFEHDGTVHCITQVKPEVKNIIHVIETFKKKHENEELNIVCGYEAGCLGYSLYHELKEKGIECVILAPTTMKTEKGGRKLKNDYRDAKMIAECLAYGGYSAVHVPTELDNSVKEFIRMRDDIKENLKSIKQQIIAFLTRNGKQFDGKSFWTRKHIDWINTVSFSEPLLQDTLKEYMIEYNHLCDRVETLDKQIEEISLKEEYVEKVQQLQCLIGIKTHTALSLIVETSDFNRFKKGNMYSAYLGLIPGDDSSGGHEDKLGITKAGNNHLRRLLVEAAQGYTRGRVGFKSKDLKSRQEKCSSEVVAYADRANERLRRKYYRMTLRGKRYNVAKAAIARELACFVWGIMTDHIDLCS

SEQ ID NO: 428400 - protein, 402 aa, unidentified
MTNHTPDEGLVGGIDSHTDTIHVALISAVGQDIADHEFSTTHSGYRAAVAWLSGHGPVTAVGVEGTSSYGCGISTALRAAGIKVVEVNRTRPAERRRQGKSDRLDAYRAARAVLSGEASTPPKRDSIEPLRALCVARRSAVKALQAAWRQIGALLVNAPAHLRDTYRDLPPTKLVVALVSSRPAQVVDPDHADILYSLRTLARRHRDLTKELADLTERINARVGAANPGLLAIKGVGPVVGAQLLITAGDNPDRLRSQASFAALCGTSPVPVSSGRTDRHRLSRGGDRAANCALHLIVNTRMSNDPRTRAYRDAHLAKGWTTKDIYRALKRALAREIYRALLGRCTVPDYSDLRPARHAKNLTLTAAATHLHVWPTAISQIERGRRRDDQLAQAYRDWLNTA

SEQ ID NO: 428401 - protein, 412 aa, unidentified
MEGETVIAGVDTHKDVHVLCLLDGLGRKIWSGGFGADPEGYDRLAEAIGDPGSCMVVGVEGTASYGAGLTRRLVELGYNVVEVLRPKRDKVRPGEGKSDPLDAERAARKAASGRGCSVPKSQDGWVEAVRQLYVARRLAVATSTSCVACAKSMLTTAPSALRERFRGRERPKDLMPLLARRRKAGDALEESVLASLRSVAAVWKEARSQVESLDERIRALLEANAPALLGVEGCGTTTAAALVVAAGDNPGRLRGEAAFSMMCGASPIPASSGKTDRHRLNRGGNRQANWALYEIAIKRMAYDERTRRYVARRTSEGKSRREAIRCLKRYIAREVYRVLMDPNPDGAAPEGPELAKMRKAMRVTQKQAAEGLGMSAAALGHLERGKRRSTKLERRYYELLCELKGVLPQTAS

SEQ ID NO: 428402 - protein, 428 aa, unidentified
MKYNTQNAKIKSITEKTLIVGIDVGSETHFARAFDWRNYEYSKKPLEFSNTEAGFMTLKAWMADFAEKYGKNVVIPGMEPTGHYWFNLGAYLQDNGMKPVHVNPHHVKKSKELDDNKPNKNDRKDPKTIAALVNEGRFSYPYIPTGIYAEIRSLSNLRLQTQEEITRIKNRIARWFSIYFPEIKDVYRNPDSVSGLMILKEAPLPQDIVKLGVDGINKIWRDAKLRAAGLKRAKTLVTAAEHSIGSQEAPDSARIELKNLLNDYEIYKNREEDLMSLTEEKLSEIPHIDKLLEIKGVGLKTVSGFVAEVGDITRFDNPKQLQKLAGYAIVECSSGKHKGESHISYRGRKRLRYVLYEAAISLIARNEEFKEVHRYYRTRKENPLKKMQSVIAVACKVLRIFYTILTKGVTYDGAKMMQDIKRPQMLAA

SEQ ID NO: 428403 - protein, 382 aa, unidentified
MDRKCRWSRIIGLDLSKATFKGCILSGEGFTERKNFSGEMKRDESGYVLINNTIQAGDIVLMEAGSSTFNLARYLLKNSKANDVVVLNPANLRIIWDSQKKNDKADAMKIACIARDMRPEAWPRVTVPSEQEQSERSVIMHWVFLRKQETMLFNRFFALFNSLGYPEIDKPKLRSKSEFRVETINNLLTSNELAFTDAVMLEEQITVIQSQLHFMEDRLRTICLTHPQQALAWLSLPGIGLVNAATLIAYIGDGSRFTKADQLLNYAGMVPKQNQSGTVDIKGKITKRGCSAIRRNIIQGAHITMQLPVICEITKFAYRKKKECPFNGKVAVAVANRLLRTGLALLHHNELYRPMIQDGYDRLERKLAGNKLQALVHYLPSK

SEQ ID NO: 428404 - protein, 342 aa, unidentified
MEISTLGIDLSKTTFHVIGFDARGEIVLRRKFSRKQLLQFTSNRQQMLIGLEACGGAHFLGRALQAQGHDARLMPAQFVKPFRKSNKNDYLDAEAIAEAVQRPTMRFVPIKTDDQLDLQALHRVRDRWVARRTAVMNQIRGFLMERGITIRKGPSHLTTQLQGILEDADSLLSGRLRLLVFELKHEWDELDKRIENSNAELQRIAKQDDACHRLMEIPGFGPLVSTALVAAIGNGITFRKSRDLSAWLGLVPRQHSTGGKTRLLGISKRGNEYLRRMFLHGARSVVAQIGRNPSALGLWLSDLSARSHRNVTVVALANKMARTAWAILSRGTHYCAPSLAAA

SEQ ID NO: 428405 - protein, 350 aa, unidentified
MQKQTEDMQAAKCFPLWFGLDVSKDSFTAAGRSILRGQATMFPPEGKYTLDRKGVGAFLKWAGSKAGVLGYGIAMEATGVYSGRLADLVRKADPERHVAVCNAASVSLYARSFTEAKSDKADAVAIARYACDRNPPEPRRTSPEKARLREIVRARNSMEEQLLQARNRMAGLEDRAVLKIQRRLVAAIEKTVDGLERELEAAVKASPEIRAEVELMATAPGVGFLSAACIYAELGSLRQYSRKQVSALSGVCPVNRTSGTSVRRHTMSHHGSRLLRRILFLDSTQAIRRMPSMGRFHARLLARPDSSKMTAKCACMRKLLLILHAMVVTNTRFDPDHKSEKNFKKVKETT

SEQ ID NO: 428406 - protein, 344 aa, unidentified
MKRYLGVDLHRTQFVVCTRWENQEQEIRQWRIAELAKFVEQLQPEDQIAVEAMGTTARFYDAVVGRVARVVVVNPHQFKVISESVKKTDRNDAAALALYLEKDLLPEVRMKPKQNRELMHLAETRDLLVKQRSALKGKINNLLAMQGIELKREALSSKIALERVLASPVRGMVQLELRVLVGQIRSLSESIAELDEQLEEEGQQLPGYENLTSIKGIGSWSATVLLTVIGKISDFADENKLAAYLGLVPRISNSNESERSGKITKQGNKLARTALVQCGLVAKRYSPYLQRFYKRIKQRRGGGKAKIALARKLVKIVYDTLKNQWVFEDFPSFTLAAKTSQNNF

SEQ ID NO: 428407 - protein, 334 aa, unidentified
MDQIIRIGMDTSKHVFQLHGVNAAEQPVLRKKMRRKEMVDFFAKCPPTIIAIEACGASHHWARLLTGLGHEVKLIAPQLAKPYVKRGKNDAADAEALCEAMSRPTMRFVPVKSAEQQAALMLVGMRERAVAARTQLANSIRGYAAEFGLTAAKGVSHIPGLLERIMADENVPALARDLFASLADEFAQLRERLKEIEARLMTWFRSNECCRRLARIPGVGPIGAVLLVMKAPAPEQFVSGRQFAAWMGLTPRDHSTAGKARPGVITRAGDEALAQDTGRGRDFVASTGESGQRQERLVLAHRDAQAQAAETRGRRAGKQDRQDRVENDDVGRGL

SEQ ID NO: 428408 - protein, 343 aa, unidentified
MSTYYYIGLDIHKRTISYCIKAIDGRLIGEGKIEADRKSLGEWVKGLPGPWVGAMEATIFTGWVYDFLKPYGIDLKVAHPQMLKAITAAKKKNDRADAEKIADLLRVNLLPECHMLSEEIRELRRILRYRNHIVRTAVKMQNKISGLLMEVGASYSKKRLHGKKYFSELLERVEEIPPSVKELLNLSRSSYEMFRSFQKRLVETLRTNSLIRDRVHRLMTIPGVGEITALTWVLEIGDPGRFTSSRQAISYCGLCSAQRESAGKEQRGPISKKRNKHLQTMLIEAAKLAPHWNEQLAIVHERELKKGNRNRATLAVARRLVAYMLAVDKRQTDFTPSAEAQAA

SEQ ID NO: 428409 - protein, 493 aa, unidentified
MSKPTRKIQSVYRNQNAIVRAIFERAGDPRKVLCVALDYAKRKHVALICDGHGDILKAAFPVENNAAGIAHLIKEISATARRRKIPKDQIFLGGEDEAAYVANFTEALRVKGYLVVRVNAYEAKENRENLLASTDTLDLLGIAKTLLSRRARLTGETGTPNPAYHHLREITRCRRNLVRQQTAASNRIHALADQLFPGFLNGSKSALTPFCDASLELMKERFSAPEIARRKVTSLANLLRRHRVQLPDETAAQIILLARAALPPAAHRIATLQRTLAATVDLYQCLQRNAIELRADAALTLATTPYVMLTSIPGIGFVLAAGLAGELGDPKHLGKLDSLCAYAGIVPRTLQSGGPDSPAIQGHASPRCNRILKDWTVQSAQKIHLYGPPELKDRITRWNAEGKHGIFAAARHHLRLVSTLVKNEIPYLSPEGRDRHATPEQIAGAAQTTWTIIQRKWRTISGGLDLITDEAHPLGFWRKVMLELHRIDLPPRP

SEQ ID NO: 428410 - protein, 349 aa, unidentified
MKKLSKMPTQVGETIGIDLGDKVSRYCIVDQNGEVVEEGAFRNQASSIDKHFAGEPRRIALEAGAQSAWISRELKRLGHAVIVANPRELKWITSSDAKNDPGDARKLALLARADVRLLAPVEHRTAEQQAELAVIRARDAILRARTLLINTARSLAKGFGVRLPTSITVTFGQRAVAVLPEYLRTALTGLLEQIDAISRGIAGYDQKISELAGRHPELARLESIPGVGRLTALTFVLTLGRAERFAHSRDVAGFLGLRPKQRQSGARDPQLGISKSGDPYLRKLLVQCSHYTLGHWGKDSELRQWGLSKAEGGKKATLRAIVAVARKLSVLLHRLWVSGDFYKPFPKMA

SEQ ID NO: 428411 - protein, 360 aa, unidentified
MFTERTSVGLDVHARSVAAAAIDGVTGEVFKARLVPAPEVVIRWVESLPGPSAAVYESGPTGFGLARALTAAGIRCEVAAASKLQRPAGDRVKTDARDALHLARLLRLDEVVAVRVPSEVEESARDLVRCREAARADLMRARHRLSKLLLRHGIVYSGGKAWTQAHDYWLLRLSFPLAGTQAAFQDAYETVVLAAGRRERLDAAILEMAADGQFTAVVRRLSCLRGISTLTAFSLAVEIGDWDRFTGAGIGAYLGLVPSEHSSGASRSQGPITKTGNAHVRRLLVEAAWHHRKPYRPTAVLRRRWQLAPPAAVARAQAGNHRLHQRWVGYADRKKRPVIANVAVARELAGWCWSLAMLPE

SEQ ID NO: 428412 - protein, 370 aa, unidentified
MHQSSTLYVGLDVHKESIAVAYVAQAHHAEVVSIGNIGTRQSDIDKLVRQLQSKSKHLVFVYEAGPCGYWLYRYLTKKGHVCWVVAPSLIPQKPGDRVKTNRRDAIKLARLMRSGDLTPVYVPKVEDEAIRDLCRAREDAIHDLKAAKFRLKAFLLRQDIRYTGRATWGPPHLRWLSEVVCPTPAQQIVFQEYLRAVTEHTERLARLEQELTDQVQTWRLRPVVDALQALRGVQFTVAVTTVAELGDLTRFENPRQLMSYLGLTPSEYSSGERRRQGGITKAGNTHARWALIEGAWAYRYPAKVSRHLQLRLEKVPKPIQDVSWKAQVRLCKRYRQLIARGKNANQVVVAIARELSAFMWAIAQAVPLTP

SEQ ID NO: 428413 - protein, 430 aa, unidentified
MKSNTQNAKIEAITEKTLVLGIDVGSEMHYARAFDYRGIEYSKKPFKFSNTEAGFATFKEWILDLKERHEKDKVVLGMEPTGHYWFNLGRFLQDNEMKPVLVNPHHVKKSKELDDNNPTKNDRKDPKVIAGLVREGRYMIPYLPDGVYADLRTASNIRFQLQAELTRIQNRISRWFNIYFPEYKTVYGKPDAKSGMLILKAAPLPEDILTLGIDGVNQIWRDAKLRAVGKARAKTLIEAAEHSVGSKEGEVSARMEIRMLLEDYESRNTRLQEVMVLIEELVKQILMAEKLLGIKGVGIRTVSGFLAEVGDISRFSNPKELQKLAGLALVENSSGKHKGETTISRRGRKRLRYLLFEVAMSLVAKNPEFRELHNYYTTRKLNPLKKMQSLMAVAAKLIRVFYAMLTKGVAYDPQKLVSDIRRPAAYLQVA

SEQ ID NO: 428414 - protein, 316 aa, unidentified
MEAIFDNCCGIDVHKKTLTACIMIGREGKITKKEIRTYSTMTEDIEGLRDWLKSEGVTHVAMESTGIYWRPVYNILEEGFEIMLVNARHIKNVPGRKTDVADSEWLCRLLRNGLLNGSFIPPIYIRQLRDLTRYRSKLNNNIAAEKNRLQKYLEDANIKLSSVATDTFGVSGRLMIREIIKGNTDAEGLSELAKGRLKNKKEELKKSFNSRVTEHHRMLIEMSLKHIEYIEGMMVKLEGEMDELIKKQNLANDLELLDTIPGVDKIGATAIVAEIGADMSKFPTDAHISSWAGMSPGNNESAGKKKAQVPRMETYG

SEQ ID NO: 428415 - protein, 341 aa, unidentified
MTEITRIGVDIAKNVFEVHAVNAQEQVVVRRSLRRNQVLAWFGKLPACLIGMEACGTATHWARELSKLGHTVRLIPPAYAKAYVRRNKNDPADARAICEAVSRPSMRFVPIKTVEQQGEAVTHKARQLLIKQQTMTQNSLRGLMAEFGIVVPQGPQHISKLLVILGDPEDPRIPAVARTALNAMADLLAALEQQVETLDKTIRAQVRANPTARQLDTIPGFGPILSGAIAAIVADPRHFDSGRDFAASLGLVPRQDGTGGKVKLGPISKRGNGYLRRLLVNGATAVLNGKNARNDAWRAKLLDSKPKKLAAVALANKMARIAWAVMTRQETYRPRAVAAAA

SEQ ID NO: 428416 - protein, 493 aa, unidentified
MMKPQEIEDEEHEQVLDRVAAVDVAKASGMVCTRVPHPSRPGKRRTRVWTVDATTNAVLELAGHLVAEQIEKVTLEATSDYWRIWFYLLESAGLDVQLVNARDVKAAPGRPKTDKLDSVWQAKCTERGMLRPSFVPPKEIRQLRDYTRLRTDLTRERTRHYSRLEKLLEDALIKVSAVASSLTTVSARDMIEALIAGERDPKVLAGLARGRMRAKRAALIEALTGQFDDHHAELARVLLDQIDGLSAQVDRLTDRIEELIGAIPAAQGVDPDGSTGPHAGLREDAPVIPALERLDEIPGISRATAQGIIAEIGLDMTRFPTPGHLVSWAKLSPRTIQSGPRTRAGRTGKGNPYLKGILGEAAAAASRTDTFLGELALPADRTAPRQAQGPGRRRPHHPGHHLALAQQPDRPLPRARRRLLRQPHRQRQESPQPHPAAGSARVHRHPRPGRMTRRTAHPAGDHRPVRCRALAEAGDLPVRRLGERSQWTSRHSE

SEQ ID NO: 428417 - protein, 359 aa, unidentified
MRYVGIDYHKRYSVLCATDERGQELKQRRISGNSATGFAQFFSELGEESKVVMEACWNWGWLYDLLAKIDGIDEVMLAHPYKTRLIAEAQIKTDRLDAQMLAKLLRGDLIAQSHAPSAATRARKHLLRQRLFWVRLRTMLRNGMHAILDRQHGLERPQLKNFFSRRGQTWLEEVQLPCAEDQPLLTQDLEVAELLEEKIKQLDRSIGQSQSEEEKLLESIPGIGPLFSSVIATEIDGVGRFNSATKLAAYAGVVPTTHASGGRVFNGRLLWQCNKWLRWALIEASWSAIQFSGYFGSIYRCARARGKNKNIAITMVAHRMIKIIWLLLAERRPYTETLPDRSEDGMTVVVRRKVLGLAS

SEQ ID NO: 428418 - protein, 286 aa, unidentified
MADHSVAYVALDTSKLRNAVAIAVAGRDGEIRYLGEIDNAPAATAKLARRLAKQHATLTFAYEAGPTGYGLYRQLKSLGHDCIVVAPSLIPQKPGDRVKTNRRDALSLARQLRAGDLTAVWVPDPHHEAVRDLTRARGAAVREQRAKRQQVAALLLRLGLHYPGKTTWGRAHMAWLAGQKLAHLEQRIALEEMLHAVRQAGDRIARLEQAIRTAVPDWSLAPSVTALMALRGVEFIAATTLLAEIGDLTRFRTPRELMAWLGMVPSEHSTGERIRRGPITKLAPGT

SEQ ID NO: 428419 - protein, 482 aa, unidentified
MACKPKPPNQPSNAGAKARKGKRRRRTGMCLEDRPILEPNAAGIDIGSREIFVAVPPDRDPNPVRVFPTFTENLQELAAWLLQCGMTTAAMESTGVYWIPLYDILEQRGIKPCLVNARHMKNVPGRRTDWHECQWLQFLHSVGLLRSAFRPEAQVCAVRTLIRHRSELVQAASQHIQHMHKALTQMNLQIHHVISDITGTTGLAILDAILEGQRDPVILAQFRDPRIKASEETIRKSLVGNWRREHLFTLKQSRELYRTYQQRIVACDQEIESLLTEFTPRVDPAKKPLPPDRKRNRAARKRRKKTGNPDATFDLRTEAYKLFGVDVTQIPGVETIALPLFSEIGRDLSKWPTGGHFASWLALCPDNDISGGRVLWRGMRKVNNQAGSLFRLAAYSLHHSLTPMGDYLRRMKSKIGPAAATTATAHKIAIVFYTIVKRQVEYDETIWSTRDINRKKSLEAKLKRQAKQLGYELIPTGEKPAA

SEQ ID NO: 428420 - protein, 331 aa, unidentified
MKSFHTVIGIDVAKTSLSISFFDGKKHLFQEIDYTKSTIKKTLMTPYKKHKQEVVFVMEGTGVYHSKLAHWLYEEGFTVSIVNPLIIKRYSQMLLSRIKTDKADARLIAEYGFEYQHKLTIFQPKNSTQVAVDNLIKAIDDLLHQKNITANQYHALQKQAHHSKEVAKAYKRHLDFLQKEIRDLEKLLHTLLEQAFAKEYALLLSIPGIGLKVAAMIIALYGKFEHFETAKQACSFVGMAPSPYESGSSVKGRGSISKQGNAFARKILFMGALSATVHNPLVRQQYQRLLQNGKHKLVALTAAANKLLRQAFGVLKSGVPFDGNYVKVQTI

SEQ ID NO: 428421 - protein, 338 aa, unidentified
MYYTGIDLHKKTSFITTIDKDGKIVTRANLQNVEEDILVYFATLDKETKIVIESMASWYWLYDLLTEEGFEVVISNPVKTKAIASAKIKNDKIDSHMLAQLLRADLISTVHVSSLETRKLKELLRHRSRLVRDATRMKNRIHMLLMKNNFRSPFSDLFGVQGLRYLEEIDLPDYHRQQVETYLLLYQKLREQIEPLTKRVRALAKENHTAQLLMTIPGIGPITAMFIIAEVDDISRFRSYRNLASYAGLVPSLDASAGKEKRGRITKQGSRYLRTALVEAAQAAARMKNCRLNIFFRRRIVKAGYQKAIVATAHKILQYAFYVWKNQTPYKETYPVCA

SEQ ID NO: 428422 - protein, 444 aa, unidentified
MDIVHPRVAGIDVHKKVVWVAVRLPGEAPGERTVVIKRFKTFWRPLTKMAAWLAELGVTDAALESTGVYWWPVYHALAGAGIEVCVCNAAHMRNVPGRKTDLKDCQWIAELHEYGLLRPSFIPAAEVAALRQRTRYRKRLIEQRTAEGQRLSKVLEDAGIKIDSVASRLLGESGREMIEALIAGERNPGRLADLARGVLRRKTDDLQMACDGRFTGGHGQMCRLHLDAYDHLTAKIAELDALIAEAAAPFAAVIARLMTIPGIGQRTAEVIVAETGGDMTRFATSARLAAWAGLAPGDNQSAGKRKHAAARPGSRHLRAAMTEAAWATARTRTRPGARFRRLARRFGKGHEKKSAIAVARTLICIAWAVMARGQDYADAGEDYYDQRDQRNHEHLIRHHQQALARLGCHVTPGPARGRQPATRHSQPAPRPGSLTASPYHRQTS

SEQ ID NO: 428423 - protein, 395 aa, unidentified
MFIVGIDIAKRSHEAIIIAEDGQVVRKAFSFRNNCTGYNLLLEQVRRLTLVKSQIVFAMESTAHYWLALYARLLKDGYTVMVLNPIQSHSLRELYIRKTKTDARDSLIIADLVRFGRCKASNVPQDKILALRELCRSRAYLVDMAADLKRKLIALLDRIFPEYESLFDSVFSKASIAVLRKYSTPQKVKNAHLGKLTDILMESSNGHFGEWKAHQLKEAACSSFGIDDSGGVYSTLLGMFLEQILSLTAQADSLEKQISVFFQEFNNPLTSIPGVGTVLAATILSEIGDITRFSSADKLLAYAGLDPSVKQSGEFKSNQNRMSKRGSPYLRRAIWLASTVAVHRDPMFQTYYEKKISEGLHYMNVIGHVSRKMTAVIFAVLRDGQPYQPILQSAG

SEQ ID NO: 428424 - protein, 346 aa, unidentified
MLIIGCDYHPSWQQVCWVDTGSGETAEQKLEHMSGDAEKFYRQLPGPVLIGMESTGNCQWFVEMVTTLGHELWMGDAAKIRASEVRQQKHDRRDAALILKRLRDGRFPRIWVPSGPEKDLRQLLIHRYKLVRIRAQVKTERQHLAMNQGVTKKHKLWSQAGEKVLRELPLAPWASRRREDLLKVRRMLDEQIAPLDQAVVEVAEKNEKARLLMTQPGVGPITSMAFVLTMGDVSRFRRGKQVASYLGLIPREYSSGGTQRLGSISKQGNRFLRMLLVEAAQGAVRCDPGFRNEYLHRCHRKAKGVAKVAAARKLAIRLYWMLRTNTGYPEVVRVESSSRVPLASAS

SEQ ID NO: 428425 - protein, 350 aa, unidentified
MNIYYGCDAHKRYSMFASMNERGQTGRPVRVEHTRAMFREFLRGLPPGSPIAIESVGNWYWMIEEMEKAGHEPRLANAGKAKLMMGQINKTDKLDATGLATLLRNGTLPSVWIPPSDLRDERELPRMRMSLVSVRTMLKNRIHATLAKYMIEIDEVSDVFGVKGRELLKKRLEELPPYTRQSVETQLELLDEVKAHLDQAEKEIREVVKTTPAMRLLMTIPGVGPILAVVIALEIGDIARFPSPDHLASYAGTVPRVRSSGGKTSFGKVRSDVNRYLKWALIEAANIIMINQRAWSGTHLGQLYLRLRERKGHAKAVVAVARHLAGAVFWVLKKNEAYKEPQRSISSSQE

SEQ ID NO: 428426 - protein, 310 aa, unidentified
MKDTIGIDISKATLDAHRLIDDEARQFANSPAGLRALRRWIGTKMPDLVIYESTGAYHAAIERSFGGVLPLVKVNPLQARRFAQARGTRAKTDAVDARVLAAMGAALDLAPDVPAGKNQHDLRELQIARMALIKERTRLLNRSKTQTLTVLKRQSKARLAQIKRQLGELEDALLDLARQCPKRARAFDILCSIPGLGRVTAVAILVECPEIGTMTRKQITSLAGLAPMTRQSGQWRGKAFIQGGRKFLRDALYMPALVAARYNPDLRQKYQAMISDGKPAKVALTALMRKLIELANALVRQDREWTPKTA

SEQ ID NO: 428427 - protein, 366 aa, unidentified
MENDSIVWVGMDTDAKKSEIAVYRGWEMEPAAEWEAGMDGKGIRKLIERLKREGKDVRCVYEAGPCGYPLARKLRQAGIGCDVIAPSLTPRRPGDRVKTNRRDARNLARLYRAGELTVIDVPTEAQEAVRDLTRAREDVREDLTRRQHRLSRFLLRHGYSYTEGDKWTLKHWAWIRKITFEDANVQLVLEESIRAVEQSQEQMKTYDVRVEEVACQPEYANKVARYQVLRGIKTITAMTIVAEGADLRRYPTAPQFMGSIGLVPSEHSTGDHERRGKITKTGNAHLRRVLVEAAWHYRHRSIPGRTVKKRRKGQPASVVMIAERADQRLCRKFRKLTDRYNKKPSIAAVAVARELAGFIWAIGQQE

SEQ ID NO: 428428 - protein, 346 aa, unidentified
MMIVGCDFHPSWQEVAWLDEETGETAEQKLVNSNGEAERWYRQLPVPSLIGLEATGNAQWLVEMLQQLGHEVWIGDAAQIRASYVRKQKTDKRDARHLLRLLYEGRFPRLWVPSSEQRDLRQLLIHRDKLVQIRSRVKNGLQHLAMNRGVQKKHRLWSGAGQKTLRELPLLGWSACRRADLLRLLAQMDALIAPLDQAVKQTAEQDRQARLLLTQPGVGPITALAFVLTIGEVARFRRGKQVASYLGLIPQERSSGGRQRLGAISKQGNRFMRMLLVEAAHSVVRLDEGFRKQYAHRCHGKPKGVAKVAAARRLAVRLYWMLRTQTPYPEIVRIESSPRVPLVGGS

SEQ ID NO: 428429 - protein, 266 aa, unidentified
MQPDPVFIGVDVAKSTLVVSRAGTAMHLCLDNQAAAIERWLHELPARTAIAMESTGQYHLLLAGLAHQSGRTVYVLNARDVYFYAKGLGARGKTDRIDAQVIARYAAEHHAALHPWTPGSQAQAAVQALLQRRAKVVLHRNAIRTTLRGQDGLEQPLAALEAQFKQLLTQIDRQVQQWLHSEPELSAASTQLRTITGMGPQGAALLAALLGRVRFANADALVAYSGLDPRAHDSGTKTGRRRLSKRGNSLLRRQLFLAAFAAAHCE

SEQ ID NO: 428430 - protein, 370 aa, unidentified
MGKYNYTGKTVYMGMDVHKKTYAVASICENRIVKKDTMPAKPEALIAYIKNNFSGAAVETAYEAGFSGFHLHRKLVEAKIKNHVIHPGSIEVASRDRVKTDKRDAKKIATQLAAGRLRCIYVPTLEQEAKRTTTRLRNNIVRLRHQVGQKIKALLFTQGLIDGEDDTVLSKKWLNKKLNQVDKLNYPTGFYYTLNHYAKLWLKLTEDLKTIMRDLLEMQSEKELALLSVYLSAPGVGKITALKLKDELGDMSQFPSEKKLFNYLGLTPVEYSSGEHVRQGHISRQGRALLRHMLVESAWVAIKKDPHLMEVYTRIAKTRGGKRAIVGVARRLAARLRTCVKDGVCYEINYKGNPLACKSTDGNIESCVTS

SEQ ID NO: 428431 - protein, 331 aa, unidentified
MKKQNWVGVDVGSRELVVAVERNGKRDGTLSFENTAEGHRKLIHFITKRGASARVVLEATGVYGLDLALALERAPRVEVMVANPRAISHFGRASLQRSKTDVLDAEVILEFAKRMPFEPWTAPAREILDLRSISRRMEALTKMATQEKNRLHASDQSAELGEVVRADIAFSIEHLESRVAQLRDRALQLIALHSHLRDAFGHLTSVKGIADVAGIQILAEIAILPKDMKARQWVAHAGLDPRQYQSGSSVHKPARISKTGNAHLRRALFMPALVAVQHEPHVTAFYEKLLDRGKTKMQANVAVMRKLLHAIYGMLTHGQDFKGEKFYAIGA

SEQ ID NO: 428432 - protein, 416 aa, unidentified
MNAVGIDVSSRKSTVAVLRPLGEVVCLPFDVTHDIAGFASLAEKLKALDGETRVVMEHTGRYYEAVAKALHEAGLFVCAVNPLLIKEYGANSLRRVKTDKADAVKIARYALDNWADLRDFTPMDAIRYDLKTLNRQFQLASKQRTASANNLIALLEQSFPGIRKCFDSPVRSDGTQKWVDFAHSFWHVDCVRKQPFPAFCERYRKWCKRHAYLFKLSNAEEVYALAKRAVVLTPKSKVVKVLVQEAANQLISISRSVEVYRAEMDRLAAMLPEYPVVMAMYGVGKSYGPQLMAEIGDVRRFERKQALVAFAGIDPMPNQSGDKNVRSNKSSKRGSPYLRKTLFNVIRTYLQCAPQDEPVFQFLNRKRAEGKPFYVYMLAAANKFLRRYYAKLRDYFASLDTLQSVDPIPATLKASL

SEQ ID NO: 428433 - protein, 351 aa, unidentified
MQIVSALDVHRRQITFRTLELAGGETRRGRISPVAREPLRVWLEQFAGQQATFVLEGTTGWRFVVEEIERAGHCARLADPAETAARRGRKQRAKTDDSDCELQLRLLLAGELPEAWIPPAHILELRTRVRLRKTLIDQRTAWLQRLQAQLFHQGVQQGLKPRTLAGQQELTTLELSPAGREVIELCTRMLDQLDAELTPIDRALAAFARRQPGCRALIAQLYGVGAVTATAILAELGDARRFRSSDDAVRHCGLDVTVWQSDRKRASGHLSHQGPALLRWALFEAAQCAARRGSPDHAYYLQVSKRIDHNRACLSVARKLCRRAHHILRELGDDALTPINPATTTPLVDAA

SEQ ID NO: 428434 - protein, 405 aa, unidentified
MKPTDARVVIGMDPHKRSVTIEVMAADEEVLGGGRFGTDPAGFTSMLDYVTRWPDRVWAIEGCNGIGHHIAMRLLAAGEQVIDVPPKLSARARVFATGQGRKTDATDAHSVALVGTRMAGLRPVVNDAQLAVLRLLVDRRRSLGEDHTRMISQLHALLLELIPGGAKKDLSAAQAKALLASVRPRDVVGKTRRRVAAELIADLERVYARKKAADKELKELVAATGTSLLDLHGIGPSGAARLLVEVGDITRFPNRDHFASWNGTAPIDASSGDNVRHRLSRAGNRQINRTLHIMATVQLRNDTEGRRYYDRRRADGKTPMEAMRALKRRLSNIVYRTMLDDAMRAKATGPGGQRGSDSDSSATGSQPQHRLFGQATPGPVTHPSLERPCHACLDTEGSHVRLSRG

SEQ ID NO: 428435 - protein, 376 aa, unidentified
MTAILNTLCLMVMAIEISAAKWKVASLSSGASKLRMKTLEQEGAAERFEALLAEIVLARKALLVPEGARVLVAYEAGTEGFWLVRALWAAGIEAEVIDPVSLQVDRRARRVKTDRVDAEALVRALWRHGCGELRALNMLRVPSTDAEDSREWQRARDRLAAARRGGVDRMVKKLRTQGIWPLPKTWRADLRAEGLRTFFGKSLGPLLSKSLQMELERVEQIEQKLKELEQQLDHLDPEARRRIEGLQQLRGIGATGARALATTLYWRTFKNRREVGACVGLVGTPYDSGTMRQDQGISKCGDPKLRGLLVELSWLWLRYQPQSALTQWFNQRTEGGGKRHKRVMIVAVARKLAIALWRYLKDGVIPEGARLKRQAA

SEQ ID NO: 428436 - protein, 467 aa, unidentified
MTPHKDYCLDPCPPVLTPMLPPSPILSDALQVCHPHAAGIDIGEAEHWVAVPPGSDPQPVRRFGPFTADLDALADWLIDCGVTTVAMESTGVYWIPLFELLEARGVQVLLIDPRQAKRAPGRPKTDRLDCKWLQRLHAYGLLAGAFRPADQVCVLRGYLRHRQMLLTYAAHHIQHRHKALEQMNLKLTQVVSDITGVTGMAILKAIIAGERDPVTLAKLRNPHGQHSEDEIAKALQGTWRAEHLFALQQAVELYQFYHQQLTTCDQRITAHLETFADQSAGQPLPPKARRHKKTNEPRFDARTPLYRLAGVDLTTIEGIEENTALILLSEIGTDMHRWPSVKHFCRWLGLCPQHQSSGGKVLSRRVRPGAHRVTVALRLAARSLHHSQSALGAFFRRMKARLGTPKAITATAHKLARLVSHLLKHGSAYVQQGLENYEAQYHERKVKTMAKQAKALGYTLVPLAAQG

SEQ ID NO: 428437 - protein, 335 aa, unidentified
MTSKKAAVVRVGIDVGAKELMVAIRQNGTAMKAQSFANTAADHARLIRALAKYPDLIVCLEATGLYHLDLAVALHDAGRSVMVLNPKASHNFAKVLLKHSKTDAVDADTLAQYAERMPYQPWTRPADAALSLRLFARRLNALTHQKTMAKNQRHALSVTRGTPEAVQRDVTLAIAQLEERIDALSRDARAFIDAQPALRQPLAWLMTIKGVAQASAIALLGELLLLPAGLTHKQWVKFAGLDPRHFRSGTSIDKRARISKAGNRYIRQALYMPALSAKAHDPYVRGFFEHLIAAGKTPMQAVCAVMRKLLHAIHGMLTHHQPFDNTRFYATPASA

SEQ ID NO: 428438 - protein, 370 aa, unidentified
MSQSSTLFIGMDVHKDTIAVAYVAQDHGAEVTALGTIGTRQCDIDQLIRKMQSKAKHLIFVYEAGPCGYWLYRYLRKKDYDCWVVAPSLIPKKAGDRVKTDRRDALQLARLARSGDLTAVYVPQVQDEAIRDLTRAREDAISDLKDAKFRLKAFLLRHDIRYTGRANWGPAHLRWLSEVVCPTPTQQIVFQEYVRAVQEHTERLQRLEQELHEHVQAWRLYPVVEALQALRGVQFTVAVTLVAEMGDLTRFDSPRELMKFLGLVPSEYSSGAQRRQGAITKAGNTHARRVLVEGAWAYRYPAKVSRHLQLRLETQPKIIQDISWKAQVRLCKRYRRLVSRGKHANVVTVAIARELAGFMWAIAREVSITP

SEQ ID NO: 428439 - protein, 350 aa, unidentified
MDKELYIGVDVSKQTLDLAYYDGESIDWKKAHIKVSNNNAGFKKIGSWVAKVSKGFDIVLFCMEYTGLYTQNFRLWLEEKHYIYRMVEPRKMHRFEPDLDDGLRSLNRIKTDELDSFRIAIYCEQNHRKILRNPSKLPPPVYFKLKRLLAERKQTVKQSVLYKQQLHDICAYDTDLSVERKNGQLKTLNDALKGIDNEIDMYIKEDADISKNFSLLTSIPGIGRVVALETIVLTENFMAIDNPRKYACYIGVAPFKKESGTSVRKGSSVSKKGFKQAKADLSIACLVCMQHIPNIRDYWERKRKEKCSGIVFNAIKFKVILRMFAVIKRGTPYVETDNYRNGKNKQPGVN

SEQ ID NO: 428440 - protein, 338 aa, unidentified
MKTHVGVDLHQRFCYLTAVDASGKMRQQGQVVNEGEALRAWLRQLPGPRQVVVEASGFWPAFARAVAPEQERLVMVHPQRVKAIASAKLKNDRVDSETLAHLSRCDLLPEAWMADEATQQLRLRVRLRITLGRQRARAKNQLQAVLHQEGFKKPVTDVFGKRGRAWLAELELSAAGRLVVDTWLREVDHLDVELAAQTRELERLARADARACCLRTVPGIGAYAAMVILAELGDVERFGSKRALASYAGLTPVVRESAGKRKRGGITHQGSNTLRWMMLQVAQVAARCSPGARSYYAGLRARKPAQVAKIALARKLLTVVWALLRHGKCFDEESFARG

SEQ ID NO: 428441 - protein, 398 aa, unidentified
MIIAEEPTGARVCAGVDWAKDDHAVCIVGAEGEALQRFMVTHDRAGLTNMVHRLLRAGVDEVGIERPDGPIVDALLTAGLTVLVIPPAQVKNLRSRYGSAGNKDDRFDAYVLADVVRTDRRRLRPFERDTVATSALRTTVRARRDLVIHRVAAANQLRAHLQIVFPAAAGLFDSIDSEVSLQFLERFTTQGQADWLSVKRLSSWLASIGYSGGTDPGVIYARITAAPRGTIGVEAATHAVMTHAYIAVLRTLNTQIRTLAVNIGAQLDVHPDAKIFTSLPRSGSVRAARLLAEIGDARGRFPTASSLACLAGVAPSTRQSGKVKAVTFRWGADKELRDADLYAKARARKCDHPHAVRILARAWATIIWRCWQDHTAYNPAEHGGLQRILTQDQQTVAA

SEQ ID NO: 428442 - protein, 322 aa, unidentified
MRIIALDVHRSFAQTAILENGKLRDAGKIDLEYSRLLRFARKLKPDDEIVIEATGNTSAIVRVLLPFVGRVVIANPILVRAIAWAKVKTDKIDAAVLAKLHASGFLPEVWMPDEETEARRRVVAERTQLVSQMTRLKNRIQSVLHANLIPPYKGVLFSQRGRAWLEAQPLAEDQRRVIVRHAGELDRLGAELAEVDKSLAQAALEEPRVKRLMTITGVNSTVAMSVLAAIGDIHRFSSPEKLVSYFGLNPRVRQSGDKPAYHGRITKQGRAHARSMLVEAAWVISGAPGRYAHSSSGSGTNGANMSLRWQPRASWRSSSGTF

SEQ ID NO: 428443 - protein, 379 aa, unidentified
MESITQNEKVLYVGIDVHKDTYALCCFDFQRNELSDEMIVKGTTKAVISYLEAIKQKHREELLFVCGYEAGPTGYGLCRGLQQAGFGCVVMAPTTMANPEGKRRVKTDRIDARAIARILAYKSYRQVYLPSEAMEALKEYTRARDAKKRMYKKAKQELLSFLLRNGSTYPESGKYWTEKFFTWIKTVQFSEKWMQEAFSEYLAEVYSLKAKIALMDAKIREIAELEIIKEGVDKLVCFGGIDVTTAVETVVEINDFTRFATAAQFVSYIGLCPGQDSSGKSKIMLPLTKAGNRRVRALFCESAKAIKRTNPYGEKSKRIQMRQKNASAEIVAYADKATKRIRTKMKQLEWRGKNYNVASAAGARELACFVWGMMNGRIA

SEQ ID NO: 428444 - protein, 402 aa, unidentified
MNAVGIDVSKGKSMVAIMRSFGEIVSAPFEIKHTASDIHSLVELINSVEGESRIVMEHTGRYYEVLAHQLSKANLFVSAINPKLIKDFDNDSLRKVKSDKADAVKIARYALDKWQNLKQYSVMDELRNQLKTMNRQFGFYMKHKTAMKNNLIGILDQTYPGVNTYFDSPARSDGSQKWIDFASTYWHVDCVRKMSLNAFISHYQNWCKRKKYNFSQSKAEEIYGKAKELVPVLPKDGITKLIIKQAVDQLNSASTTVESLRTLMNETASQLPEYPVVMAMKGVGTSLGPQLMAEIGDVSRFTHKGAITAFAGVDPGVNESGSYEQKSVPTSKRGSSDLRKTLFQVMDVLIKTHPQDDPVYQFIDKKRAQGKPYYVYMTAGANKFLRIYYGRVKKYLSSLPES

SEQ ID NO: 428445 - protein, 415 aa, unidentified
MEPVLECCAGMDVHEKKVDVCIAHGSLDKSPKFEIRTFSTMTSDLEELSSWLKKYKVTAIGMESTGVYWKPIFNIMEGEFTIVLANAQHLKSIPRKKTDIMDCMRIARLLRYGLLPNSFIPPREIRELRDLNRTRRKLVGMMTSEKNRLTKVLESANIKLSSVVSKISGVSSLAMIRSLLEKDKLSKEEIAQLAKGSLKKKVDQLDKALNGKITDHHRFLLKMHIENIDHLAKQIEKIDEEIKRKMIPFQTDAKLIQTIPGISEVSAFAVLSEIGIDMSQFPDEGHISSWAGLCPGNNESAGKKKSGKTQKGNSSLKATLVEAAWAASKTKGSSYSAFYHNIVKRRGKKRALVALAHRMLTDIYSVLKTKEPYQDTGAEATNEIARKRKERSMIRSLEKAGYSVVKTSVTEMAVA

SEQ ID NO: 428446 - protein, 435 aa, unidentified
MRRSETALKGEVYMSYCPVAGIDVSKRFSDMCILSPDNKIFAQEKIYHDETSINRANALLQKAERLFFSKPVIVMESTSHYHLILFQFFSEHGYDVIVVNPLQSNSMKDFSIRKRKTDRVDAFKLAMMYRTKTLRPSQIPQTATRALRQLCRHRAELLNDVSSYKNRLTALLDQTFPGYDKVFSDVGGVTSCAVLVRFPTPTILLVEEESELVEVIAAASKSGYSFAKKKAGLLISAAQKAQTLGIHSCADETLIVCTIQMLRTLSESVLQIETAIDNLLAQIKEMRNNVSLLQSIPGVGSHSAALLLGEIGDISLFKKPKQLAAYFGLDPTERQSGSFRGTKNKLSKRGSPYARAALHMGVVNSICKRGKDSAANPVLLSYYEKKCKNKPAKVAQAASMHKLVFIVFAVLRDQKPFELKTPEQHAVEQGFVKAA

SEQ ID NO: 428447 - protein, 387 aa, unidentified
MQKPHDNSKASPAAFMQDNTLIAVIELSLSNWLVAGLIPGVSREPLKKLEPNPEDLLKLLHGWRDEAIKAGRPITRIAVAYETGRDSFWLARWLRERGIDAHVIHATSVAVSREHRRAKTDRLDTAMLKRGFLGWLRGERGHCTVAIVPTMEEEDAKRPHREREGLVHEQTRVVNRMKSALIQFGVRNFNPKLRKARVKLETVRTPEGKSLPPNTIAALRRDMERLKIIKEQIKAIEQARLQQFEQKPEALANRMVYLLVRIYGLGWETADLLVHELLSRTLRDRKAVARYAGLTGSPDESGSKRREKGLSRSGNARVRKIMIQLAWRMVKFQPDSALVQWFKQRTEHAKGSRKPMIVALARKLIIALWRYANDGVIPEGFRLHSAA

SEQ ID NO: 428448 - protein, 414 aa, unidentified
MPDYDFFVGVDWASQAHEICVLNDAGVVVDAGPVAHSGAGMAELRARLDRLTADPSRIAVAIETPHGAVVDTLLAHGSHVFAVNPKQLDRFRDRHTVAGAKDDRRDAFVAADAVRTDRWAFRRLQPEDPRLLELREISRAYEELVAEQGRLANRLREQRQRFYPQVLTLCPAADEPWVWTLVDRLPTPAAAAAAAGRARGRVVRALLAQHRIRRLTAEEVHHVLTAAALPVAPGVTEAATAHIALLVPRLRLVHEQRTHCERRLDVLLTALTTPAADAEQPEHRDVTILRSLPGVGRVVAATMLAEATRPLAARDYQTLRAQAGVAPVTRQSGKTRLVAMRHSCNSRLRTAVFHWAGNSIRLDDRCRQHYDRLRQRHSHARALRGVADRLLRILVAMLTAGAVYDPGRPRMRAA

SEQ ID NO: 428449 - protein, 462 aa, unidentified
MRTFQRLDYKVFAEPKPACPYEFQLSPLTWKDLMSQTTPKTKEEDFAAFVAFDWADQKHAGAIAPAGAEPEAFELEQSADKIETWAAAMRQRFGGRRIAIALEQSKGALIYALMKYDFFMLYPINPKQLKRFREAMVPSGAKDDPGDAKLLLEMLLKHRDRLHAWQPDDATTRLIGCLAEDRRALIAQRTRLICALKSRLKQYFPLALEMLGQLDTELACRFLLRWTSLEQLQQEDSQEVASFYRIFHCHHPKLIDERLQKIAQATPLVSDSAIVESGRMLVHGLAAQLLALIEPLKQYDAKLADLMRHHPDAEIFQSFPGAGDALAPRLLAAFGTDRQRLTSSDEMQCISGIAPVKVQSGKTQFQIRRRWACNKFLRQTFHEFALHSLAKSAWAKAYYDMMRDRGVKHHAAVRALAFKWIRILYRCWQSRTLYNEVHYFQHLYRRKSPLLQFMGSQPQPTT

SEQ ID NO: 428450 - protein, 343 aa, unidentified
MDHFAGLDVSVKETSICIVDDTGKIVGEAKVASEPDALLQVLKNSAYHFKRIGLEAGPLSQWLFSALAEAGLSAICVETRHMRAVLKAQINKTDRNDARGIAQMMRAGLYRPVHVKTLRSQKLRMLLTHRKLLQSKAIAVENDLRGTLRNFGLRVGMVGKVKFEARIKELIENLPDLAVLVEPLLVVRRVLREQLGILHRRLLVIVQDDEVCRRLMTIPGVGPVVALTYRVTVDVPARFRNSKAVGAVLGLTPSKYQSGEINRTGAISKCGDEMMRVMLYEAAQSMLVRSTKWSWLKAWALQIARRRGMKKAIVALARRLAVIMHRIWIDGAEFRWSKNAVAA

SEQ ID NO: 428451 - protein, 335 aa, unidentified
MVDSTAGELVKRRLEHGTGEAERFYAVLAAPARVGIEATIATQWFEKMLTRYGHELWFGDAAEIRAAMVRKQKTDDRDALHILDLLMQNRFPRIWVPSAAERDVRQLVRHRHKLVRLRTSVMNQLQALAMGQGFCLRKKLWTTVGRQKLESLALDPWASFRRKELLGLLDQLDPSIQQLDRAVISEAESRPAAVCLMQQAGVGPVTSLAFVLTVGPVSRFANSKKLVSYLGLNPSEESSAGRQRLGAISKQGNTMMRWLLVEAAQTAARLDPELRRDYQRLKFRRGHSGVAKVAIARKLAVRLYWKLREAAQPNTAARMQGSPAHSVVGESLSSF

SEQ ID NO: 428452 - protein, 426 aa, unidentified
MAFKILRKNCCGLDIHKTWIFACIGITDSNGRTEYKQARFSSFSNGLRDLADWLAKYSCSDVCMESTGKYWVPVFNLLEDDINVVIANPKWVKAVKGNKDDTKDSKWIGDLFRLGLVKGSYIPCKKVRILREYTRYRYKLVSCRSSEKNRYQNALTVCNVALDSVVSDIFGKSSTSIIDYLLEQSGTSINHEEIASKLLRSLKSKEDAVIESVEGYQMTDAQKYRMRLVRAHMDYITAEINDVDKMIENMISSNTDFENAVQFLCTIPGVKRDSAITIISEIGTDMSQFSSSKRLCCWAGLTPGSNESAGKKKSVRITRAGVYLKPALVQCAHAAVKSDKSPYYKKKYESLVKRRGKKRAIIAIARMILTAIYQMLSTGEQWNPSDLYKIDMPVALVEKQKAKAIKQAKKLLQREGLLPPDEPLAS

SEQ ID NO: 428453 - protein, 436 aa, unidentified
MGSRGGHCYYELGSPLTCLLTPDITGLQPYGVQGAGPGWLASPLAASGLANQERAHPAGTRRGVARQRRDRSVSQVAHRGPFHRRSEERFQLVITIGIDPHKISLTAVAVGPDGQPHPPIRLVVDKSTPAALLTWATQWPERQWAVEGATGLGRGIAQQLISAGEFVLDVPAKLAARARLLGSSSARKTDVADAISVAAVALHNRRLNRVQVEDHTTIMRLLTDRREDLVAEHTRWINRLHVLLRDLHPGGAEVRLDTIDAAALLAKIRPVTAADQQRKQIARDVVRDLKRHEASIKELEKQLRAAVAASGTTLTQIQGIGFLTAAKILALTGAIRRFPNQEHYASYTGTAPIDVSSGEQQTHRLSRRGNRQLNAAIHVAAVTQARDPGPGRDHYRRKIAEHKTAKEARRSLKRRISNAVYRRILADQQRLQLEAA

SEQ ID NO: 428454 - protein, 314 aa, unidentified
MKASQVYIGIDASASSLEVAAHPGGEVWTVSNDGAGISELVERLQATRPALVVLESSGGVELAVTGGLAAAGLPVVVVNPRQVRDFARATGRLAKTDAIDARILARFAAAVQPEVRPLPDESAQELNALAARRRQLVEMVVAEKNRLRTARGRVARQIREHIRWLEHCLEEVGQNLGNLIQASPLWRAKDDLLQSTPGVGPVLSITLLANLPELGKLDRRQIAALVGIAPFNRDSGAFRGKRTVWGGRSKVRAALYMAALVATRYNPVIQAFYHRLVAAGKPKKVALTACMRKLLTILNAMMRHQTPWRICSTS

SEQ ID NO: 428455 - protein, 451 aa, unidentified
MAKRKEKQERRSVVLEPHAAGIDIGAEEIYVAVPPDRDEESTRRFSSFTGDLHALADWLGRCRIKSVAMESTGVYWIPLFQILEARGFKVYLVNAHYLKSVPGRKSDVSDCQWIQYLHSVGLLRASFRPPEAICALRTLWRHRGSLLEMAAEHILHMQKALSQMNLQLHHVLSDITGTSGQAILDAILAGQRDPVALAQLCHSRVQSPREKVAQALVGDYRPEHLFTLKQSLAGYRYYQKLILELDLETARLMQALPSATEQPMPPRTKPTAYHRQGNDPQFDLRSELYRIAGVDLTDIPGVSAATAQVILTEIGTDVSRFRHASAFASWLGLCPEKRVSGGKVLSSKTRKVKHRAATALRMGANSLCRAKGYFGEFFRRLRAKLGTAQAITATAHKIARILYHVLSTKEPYAETVFHRYDEQAQRRAEMRLRKQAARLGFQLLPIQATGE

SEQ ID NO: 428456 - protein, 562 aa, unidentified
MQKILSISCGLDVHKDLIEACILKVNGTDEPDAIRKSYTTLRGDVLELSDWLKEHGCMNVAMESTGVYWRPVYEILEEVEGINLCLVNAHHMRNVPGKKNDEDDAEWIASLYMCGLLEKSFVPEKGIRSLREFTRFYVKLNQSKNQQSNRIEKFLQTHGFKLSSVLSSVTGTVSGRRILEKLCTHGEVSVSDVEESLDRGVKKTVEEIAYAIVGKLTLTLQILLRMLLDSFYSIEKNMGALYENMQNASTPYKSFIALIDTIPGIDILAATYIIAEIGVDMSRFKTVGHLVSWAGLCPRDDISAGKIKSKKIMKGNSYVKVILCQCAWAAVRTRNTRLSNWYWRNAKRLGEKKAIIAVARKLLCYIYYILSTGKPYDKELDKADTEKYRAYKLESAKKQILMLDVGSKTPKAGASCDGNNETTNKADKSKTPSKTKNQGEHKPLNSDSSSIVSLDCIAIPEKTEQPIESPIPGPSDTAALDAITVHEKTGQLKESPIPESFDTVTSDAIIVPKKRGRPRKSPIPESSDIASDTTAVPKKRGRPKKPPALVSSDIASLAVAVT

SEQ ID NO: 428457 - protein, 450 aa, unidentified
MGKPKPQVIEDEEHQRVFERVAAIDVAKASGMVCVRLPGRDGRPRASKVWEVPAVTSAVNDLGRRLLSDRVQMVTLEATSDYWRIFYYLLEALGLAVQLVSPAQARQLKGRPKTDKHDAMWLARLTEWGMLRPCFVPPAPIRALRDYTRARTDYVRERTRCYQRLEKLLEGALIKLSSVASKLTTESAKDMVRALIAGERDPHVLAGLARTRMKAKHDALVEALTGMFDAHHGELAQLELDQVKFLDQNITQLQARIRDTLAAIPEAQGVDADGTTGPAAGTGPDAPVLPAAARLAEIPGISPDLAHTIIAETGLDMTRFPTAAHLVSWAGLCPAANQSGPRVRAGKKKHGNAYLRGALGQAALGAARTGTFLGERYRRVARRRGKAKAQVAVARSILTIIWHLLADPAARYTDLGPDYVASRTDRDKKIRNHVRQLQALGLQVTLTPAA

SEQ ID NO: 428458 - protein, 439 aa, unidentified
MPTPTLPVLDPTAAAIDVGSEQLHVSIAGGPPKVFGTTTGDLHSLRDYFLAQGVRSVAMEATGIYWLCPYEVLEKAGLEVVVVNGKYVKNLPGRKTDLSDCQWQATLHAHGLLKPGFVPPEHIRRLQDYLRLRSDHIVMAGSHQQHMQKALERMNLKIHEVISDLTGVSGLKMIEAILAGERNPVALLALCDGQIQKRKAGRVRAALEGTWKAEHLFALRQAYELWQSYQQKIAECDQAIEKVLQELVGPEDPKHPRPPATKRGGVNTPQIAGLHGLLVRLCGGNDPTQLPGVADYVLLQLLSEVGTDLGEHWKTEKHFTAWLGLAPGSRQSGKRRGSQRRSRNRAGRLFCVIARSVGRSVDKAMGGFYRRIKGRKGGLVANLALARKLAEWFWRLMVHGVDYVEQGLKKYQEKVAQTEQYLLRKLARKYNLLLLPKTT

SEQ ID NO: 428459 - protein, 439 aa, unidentified
MTTPSLLVLDPTAAAIDVGSEQLHVSVAGGSPKVFGTTTGQLHELRDWLKAQGARSVAMEVTGVYWLCPYEVLEKAGLQVVVVNGKYVKNLPGRKTDMSDCQWQATLHAHGLLKPGFVPPAHIRRLQDYLRVRTDHITMAASHEQHMQKALDRMNLKIHEVISDLTGMSGRKMIEAIIGGQRDPVALVALCDPQVQKHKLERLRAALEGTWKEEHLFALRQAYELWQFYQQKIAECDQAIEKVLQEMAGPEDPARPAPPTMKRGGINAPEIRGLHSLLWRLCGHKDLTTLPGVADYVLLQLLAEVGTDLGKNWQTEKHFTAWLGLAPGSRQSGKRRGNQKRGRNRAGRLFCVIARSVGRSVDKALGGFYRRLKGRRGGLVANLALARKLAELFWRLMVHGISYVEQGLKKYEEKVLHTEQRLLQKLARKYNMVLQPKAA

SEQ ID NO: 428460 - protein, 358 aa, unidentified
MEIKRSDVRFDGQEFCVGVDVHHRTWKVTVRTMNMEVKTLAMPPDPRVVHGYMTRNYPGGRYRSVYEAGFSGFWAHRQLTELGFANSVVHPADVPTSDKERRQKEDARDSRKLARSLENGELKPIHIPDPVIEQLRSLCRLRGRSTSHIHRLKNRIKGHLKYYGLPMREDSAYRHWSGPFIDRLQALCSEPGPRSDYLSITLDALREESCRLALITRKLRAHCREGEGARILSLLHSIPGIGPKTAFALYTELQDIGRFPNLDKLDSFLGLIPSTDSSGEDETTTGITPRTNRRMRALLIEASWVAIRHDPELLRAFSELSRRMKKQAAIVRIARKLAARVAYVWRTGTPYKRAVPTA

SEQ ID NO: 428461 - protein, 390 aa, unidentified
MEKQTAVAPTAAAGEVVRIFLALELSRSSWLVASHTPAADKISRHKLAAGDIDGLLALIERLRTRVEQKTGQPVQVISCYEAGYDGFWLDRKLKAEGVINHVMDPASIQVDRRARRVKTDAVDADALLRALMAFCRGEKKVCSMVRVPTRDEEDAKRLSREREQLIKERIRHVNRIKGLCATQGIYDYQPLKADRLERLDELRTGDGNPLPDRLKNEIRRQLERLKLLLELIGTVEAERDAVVKADKPASEADRRIRALAKLRGIGPEIATVLYNEVFYRQFANRRDVAAYVGLTPSLFASGDLRHDQGISKAGNPRARATMVELAWLWVRHQSGSDLTGWFLSRVSGIKGRIKRIAIVALARKVLVALWRYLETGLVPTGAMLKADKQG

SEQ ID NO: 428462 - protein, 295 aa, unidentified
MDVGVDTHKKTHVLVAVGTPGQTLGTRTVANTPAGWAAALQWAREQQQQHIRWGVENNGSLGKGFAQFLLAQGEAEVREVVPHRTAQYRRRGRTQDKTDTADALAMARLLGADGDGLPLVHADDASTELRLLSDHRDNLIADRTRLINQLHAQMLQRDPRYEGRSGPLTQAAGVRFCQEYDPPGADALVRTRLLIVRQLATRIATLATAIAALTALLGQRVAALGTPLLQLRGVGPVVAARLLGELGGTLRVHSAAALAALTGIAPVAVASGNRHGHRANFGATVSVTAPSTSSR

SEQ ID NO: 428463 - protein, 410 aa, unidentified
MQVIYQRCCGLDVHKRSITACRLKWLGRDWEREIRQFGTMTKDLLALSDWLTQEGCTHVAMESTGVYWKPVYNILEGQFELLVVNAQHLKAVPGRKTDVRDAEWIAELLAHGLLRGSFVPPADVRELRELTRYRSSLVRDRARTLNRLQKVLEAANIKLANVVSDIDGVSARLMLEALVAGQRDTQELASLAKGRLKEKREQLVEALSGRLQPHQSFLIAEHLAQIDYLEGAIERLSGEIEERVRPFEQEIAWLDTIPGVSRRTAEVLWAETGGDMSRFASARHLASWAGMCPGNNESAGKRRTGRTRKGSPWLRHCLVEAAHGAAHTKNKYLSSQYHRIGARRGKKKAQVAVGHSILVIAYHLLTRKQPYSDLGANYFDERDRQAVTKRCVTRLQRLGFKVSLEKLLAA

SEQ ID NO: 428464 - protein, 411 aa, unidentified
MHNRQNYLYVGVDLHKEHHTAVIINCWQEKLGEIQFDNKPSAFSKFLLEVETYVSAGITVVFGLEDVGGYGRALAKYLVDHEQVVKEVNPALSFLERKSHVTTQKSDSWDAECVARIQINKLNQLPDAKPNDLFWSIQQLVSRRNALVKAQSALKNQLHIQLNHHYPSYKKFFSELDGKTALAFWQQYPSPFCLEGANIKQLTAFLLDVSNNTCSVKKASDILKLVKEDGQTMKEYQETRDFLVRSIVRDIEFKKKEMKYIERELKRLVNLLDYQLETMPGIELVTASALIAEIGDVRRFPNANKLARFAGIAPVYFGSGGKGKTHKSKQGNRALHALFYNLAVQQVQVAKGSKLPRNPVFHAYYQKKLKEGKTKGQALVCIMRRLVNIVYGMMKYKTAYELPVVEEKEVV

SEQ ID NO: 428465 - protein, 370 aa, unidentified
MKDTIKFVGLDVSKEKIAVAIAEEGREEPRYYGMIAHTHEAIRKLMKKLGEPHTLRVCYEAGPTGYPLYRLLTSLGVHCEVIAPSLIPKRPGERIKTDRRDSIRLAQLYRSGELTSIYVPTPEDEALRDLVRAREDAKEDELRAKHRLTKFLLRNNIKPPTGVNKWTKKYREWLDALKFEKSSLRVVFQEYYHQIKELEQRVRRLEEEIKVQSIEGVHAPIIQALQALRGVALVTATSLAAEIGSFRRFRTPKKFMAYIGLIPSESSSGDKRRQGDTTKTGNRHVRRLLIEAAWSYRYQPAVKGELKRRQDGQSPTVQAISWKAQNRLHRKYFRLISRGKEHGKAITAVARELAGFIWAIAQEVEEASRA

SEQ ID NO: 428466 - protein, 466 aa, unidentified
MGSKVKKVNKKMSTVSSLPSEFERININAAGIDIGAQKHYVAVPKGRDPQGRDVRHFDTFTADLNALADWLKECDIDTVAMESTGIYWIPLFEILEQKGFEVRLVNPRSIKHAPGRKSDVVDCQWIQQLHAYGLLTSAFRPDDQIGVLRAYHRQRTMLVNHTSTHIQHMQKALEQMNLKLTNVISDITGTTGMKIIRSILAGERNPKKLSAHRDSRCKRSEKEIAKSLHGNWRDEHLFALQQAVALYDFYQTQIEACDKQIQSQLCLFEDRSAAGELPPPSGKPNGSGKKLTFDAREHLYRMAGVDLTQIAGLNTPTVLTIISEIGLNMNRWPTAKHFASWLGLCPGSKISGGKNFSSKSKPSANRAAHAFRMAAYSLHRSQSSIGAFLRRKKAQLGAPKAITATAHKIARIFYEMLKTRTEYKDLGVDYYQNRYKERTLRNLKRKAREFGLEFVNSNTDQLVMDA

SEQ ID NO: 428467 - protein, 392 aa, unidentified
MYIVGIDIGKNHHEASIVSPKGKQIGRSLRFATTHKGADSLMSFIFKNIGNSPCVFGMEATGHYWYPIYSFLKAKGYTIYVINPIQSDSLRKMYIRQTKNDSIDSFLIAEVIRFGQFGTTSMADENILAMRQLCRYRDSVISSRTEIKLRIGTIMEQIFPEYEKQFSSLWVSTSMGILEKYLTPENIENTPIDELFEIIKDKSHNRLTKAKAISIKEAAADTFGIKIAQDAFSFQLKQLIDRMNFLDKQIEALDIEIMKYYEQFDCYLHTIPGIGIIGAATILAEIGDISRFKNSSALVAFAGIDPTVRQSGEFNSTHNHMSKRGSPYLRHAIFLAATTCSFHNSPLNAYYKKKRDQGKHHLTATGAVARKLTTIIYAVLRDSKPYEPKKFC

SEQ ID NO: 428468 - protein, 372 aa, unidentified
MNKVAHFVGLDVHKKSIVYACADATSQSVGEAVSLASDATVLMSHLERLGSKETLLVGYESGPTGYWLCRALRDAGYSCVVMAATTIPSAAGDKIKTDRRDARKLARVLRSGDFSAVEVPSVETEAIRDLTRLREDLKAAERVAQQQLQGFLLRIGRVYSQKHWTAKHVAWIEATKFEHPVQQMTCLRYLEQVRARTSEIAAVDQQLETVVDAWSYRDVVRALMAFRGIRLLTAVTVLAELGDLTRFRTAPALMAYLGLVPSEHSSGGTRRQGHLTKTGNGHVRRVLVEASWAYRFRPKQGGAIGKRASATSPDVQRIAMKAQERLHSRYRKLTARGVSKPKVVVSIARELAGFLWAIGQLEEFSKAPAAAA

SEQ ID NO: 428469 - protein, 367 aa, unidentified
MTIVAHAHPFVVGVDTHAKNHALSILATPAGVQVDDGEFPTTAAGMARAIDWVARRTGGDLAVLWVIECAASFGSQLAHAVTAAGYQVVEAARMSAKANRGVGKSDPLDARRIAAAVLPLELDRLRHLRKDDGVRVGLRVLIAARDHMTGERTATVNALIALLRVLDLGIDARKPLTAAQIIEVSKWRTRTEDIGAAIARAEAARLAKRVIVLEAELAENTKTTTDLLRRSPARVLLDKPGIGPVTAAVAMAAWSHDGRLRSEAAFASLAGVNPIPASSGNTVRRRLNRGGDRRLNQALHMAVVVRTRMDPATKAYVERRLTEGHTKKEIRRCLKRYLARQIYRTLTAVTRADEALAAVTSATPIPA

SEQ ID NO: 428470 - protein, 341 aa, unidentified
MNQVSTVGLDLAKHIFQLHGADSAGAVVFRKRLRRGQLLAFLATLPPCTVAMEACASAHYWGREIAKLGHTVRLIAPAYVKPFVKRQKNDMADAEAICEAAQRPTMRFVALKSANQQAAAVVFRTRDLLVRQRTQAINALRGHLTEFGVIAAKGPAHTSTLIAAIEDPASDLPQAARAILAVLVEELRSLDERVAVLDREIARHAKESAIARRLMTVPGIGAVTAAALTALAPPADTFRRGRDFAAWLGLTPVQRSSGGKERLGKTSKMGERSLRRLLIIGASAVARWAARKGVPAGSWLGRMLARKPPMLVRVALANKMARIVWALLAKGGVYRAPVAAV

SEQ ID NO: 428471 - protein, 339 aa, unidentified
MVVLRQNVGIDIAKDSFVATLTKMLDGLIVKHITTRKFANTQKGIDEFHQWVYKHSSNKPDVHFTMEATGVYYENLAYYLFEKEEIIHVLLPNKAKKFAESLNIKLKTDKIDSKTLGQMGVERVLKQWKLSSEIYRKMRTLTRERVQLVKDRTRIINQLHAEEHTAEAVKSTVRRMKNHIRYIEKQIKSIEKELRDLVKSDNFVFEKIEKIITIPGVNFITAANVISETQGFSNTVSIKQLTSFAGYDIRIQESGAWKGKSRISKKGNSHIRASLYMPSLSAKTHSQTYGKFYDRINTKKQNGLISSTAVQRKLLGLIYTLWKNDTTYIENYQLQKKVL

SEQ ID NO: 428472 - protein, 344 aa, unidentified
MKYYAGLDVAMKETFLCILDETGKKVYEVKTPSTSEGIFGGLKKSGFSVEKAGIESGSLTRHLIKGLQNLGVPAVCIDSRKMAAILSVTVNKTDKNDARGIADAIRSNHYKEVYVKSDEDASVEILLKSRKTLVHLTGILKNTIRGFLKTYGVLLGDILPKNFEEGVRKKFQKIPEEAAEGIESLLKSFAANSEQIKEIDKKVKMLSAENEQVKLLMTIPGVGPLIAASFVFNIGEAERFKKSQSVGAYFGMSPRQYSSGETVRMGKVSKSGDADMRRHLTNAAMILMTRTKSWCPLKAWGIKIAQKQGLRKAFMAVGRKLAVIMHRMLITGESFRFKNMEAKA

SEQ ID NO: 428473 - protein, 423 aa, unidentified
MTKLHSTPAGAVLVAIDMAKNRQEVLIERPEGGRRRRMAVLATKADYDGLAEQLAAIGRPIVIGFEATGNYHRTLAHRLLTAGFELRLISSVALARTREALHNGWDKNDPKDAQVILHMLRIGATQLYVDPFAAGINDLQELSKTHEVVSKMKTQTWHRILTHYLPLYFPEIARFAGNSRSDWFLALIERFPTPASITALDREAFSAQAWPLIGRKVSKARLINDVYETACSSVALPVPADSAAITMFRMVIAQGRSLICQRDEIERLAHARLAEHVDYQLLRKIPGIGPINALTILAEAGDLRRFSHHRQFLKFCGLDLATCQSGTFRGRTKLSKYGNARLRRTFWMAAQVAARQRDNSFRDKLGRYVAGHADDADRRRKAMTALTAKMARVAHAVVKTGTEYRPFLERSDARWKDPSLQVP

SEQ ID NO: 428474 - protein, 388 aa, unidentified
MNVGADKSEPLTAIHTDLGAIFVSLELSRSSWLITSLSPGGGEKMSKHSVPGGDFAGLVERFAQLQEKARLRTGQSFRIIVIQEAGLDGFWIHRALQNEGIESHVVDAASIATSRRRRRAKTDKIDGETLVRALLAYKRGEPRVCAMVKAPTPGEEDRRHLCRERKALTAERVRHVNRIKGLLFSQGISGYQPLRRDRRQRLEELQTGDGRAFPQHLKALVNRELDRLELLLKQIKTVEAARDALLAVGQTAKPAPAAMLLDIRGIGPEFAAILWSEGLFRHFENRRQIAAYAGLAPTPWQSGAVDREQGVSKAGNPRLRTTLIQLAWLWLRNQPRSALSVWFHERVSRNGGRLRKTTIVALARKLLVALWKYVTAGVVIEGVTMKVA

SEQ ID NO: 428475 - protein, 413 aa, unidentified
MSVPLQAVPARVCAGVDWAKDDHAIAIIDPDGQVLDRFAVTDDAAGLKSLVRRLLKAGVDEVGIERGDGPVVEALIQAELTVLVIPPGQLKNLRSRYGSAGNKDDRYDAYILADVVRTDRRRLRPLVRDSAATTALRTTVRARRDLVEHRVAAANQLRAHLQIVFPGATSIFAAIDSAISLTFLERFTTQAQADWLSPKRLGTWLSSVSYSGHTDPEILHTRLLAAPRGTTGAEAETHAVTTLAFVAILRSLNTQIEALAASIGEQLAIHPDAHIVTSLPRSGTVRAARLLAEIGDARGRFPTADSLACLAGVAPSTRQSGKVTAVTFRWGANKELRDAVCDFAGDSRHANPWAADLYAKARDRGHDHPHAVRILARAWIHIIWRAWQDNVGYDPIKHGALQALLNSTAQKAA

SEQ ID NO: 428476 - protein, 318 aa, unidentified
MPPDAPAFVGVDVAKAELVMAMRPSGARWTVANDDGGIRTLLKHLRQHAAALVVLEATGGYERAVVAALAAARLPVVVANPRQVRDFARATGQLAKTDRIDADTLALFGERVRPAPRVLPDEAATAFDALLTRRRQILGMIVAERNRLEHALPTVRRGITQHIHWLERQLQDVDRELDTSIKASPVWRAKDDLLRSAPGVGPVLSRTLIGELPELGTLPRKQIAALVGVAPLARDSGTLKGKRLVWGGRSPVRAALFMAALVGTRCNPVIRAFYARLRAAGKPKKVALTACMRKLLTILNAMVRTNTTWRHLAPPETT

SEQ ID NO: 428477 - protein, 406 aa, unidentified
MNMNAVGIDVSKRKSTVAILRPGGKAVGKPFDVPHLSADFQSLIKRIRELDGETRIVMECTGRYYEPVARELSQAGFFVSAVNPQIIRNFQGQDNPLRKVKTDKADSVKIARYTLDSWANLKQYSLMDELRSQLKTMNRQFDFYMKHKTAMKNNLIGLIDQTYPGANAYFDSSAREDGSQKWVDFIDTYWHVDCVRKLSLTAFINHYQKWYSRKKYNFSKSKAEEIYGKAKELIPVLPKDGFTKHIIKQAVGQLNVASQTVEQLRSLMNETASKLPEYPAVMAMKGVGPSLGPQLMAEIGDVTRFTHKGAITAFAGVDPGVNDSGDYSQKSVHASKHGSPALRKTLFQIMDVLIKTKPDDAVYLFMDKKRTQGKPYYVYMTAGANKFLRIYYGRVKEYLAALPTSN

SEQ ID NO: 428478 - protein, 425 aa, unidentified
MKVMHDRVAAIDVHKDMVKVAVRVPGAKRGTRKTDVLEFRAFYGVLQEMGRELRRRGVTHVVMEASGVYTDPVYYALTELDFTEVMVTSPSHARALKGHKTDAKDAIRLLDLYECGLLSGSYIPAPDLREVRDLARYRMKTVQARTSEIQRLQKTLETAGIKLSSVVSDVTGVSATAMIEALTGGERRGAVLAGLAQGRLRSRQKKADLSMALAGRFTDHHAMMCRLHLDRVRALGEEVAGLDARIAPLVARHAREAELLKTLPGFGDVVVAGWLGAIGPAPHEFFATAERLASWATVCPGNYMSAKKSKGGRTGDGGAYIKPLLVQAAWAAIRVPGRLQAKFHRLVRKFGGPRNKGAQKRAIIAIAHALLKIAYSVLKTGTPYQDLGADFYTSRESAEARQDYLIRQLQKLHPGCVITITPEAA

SEQ ID NO: 428479 - protein, 421 aa, unidentified
MKPEKVDYAAWIGIDWGSEHHAVCLQAAGSSRLEACSLEQKPELLHAWFLNLVARFGRGAKIAVAIEQSKGAVINFLLGLDFVHIFRVHPLSLKNYRKALYPSGAKDDPVDAELILQFVRQHQDTIQPWVPDDVDSRLLLRLVEGRRKTVNKRVRLTNELTQLLREYFPQALDWAGELDRVMACDFLRKWPTLQKLQKSKGETVRQFYRDHGSRNGELIDQRIEKISSALPLTTDKAIVESSVLMVDTIVLQLHTVIEAIARFDQKIAMVYKRQPDADIFASFPGAGPVLEPRLLAAMGTDRNRFSCAQEVAEYSGIAPVTERSGKKEWIYRRLACCRFIKQSFHEYAGQTVTYCVWAGAYYKSKRAAGMAHHAALRALAYKWIRILYRCWKDHVAYDEQKYMQSLKRRRPAWLAFLPAGA

SEQ ID NO: 428480 - protein, 389 aa, unidentified
MKIFVGIDIAKLNHFAAAISSDGEILLEPFKFTNDADGFQLLVSKLESFDKNSIIIGLESTAHYGDNLVRYLVAEFYQVCVLNPIKTCQMRKNNVRKTKTDKVDTFVIAKTLMMQDDLRFITFFDLDMMDLKALGRFRQKTIKQRTRLKIQLTTYVDQVFPEIQYFFKSGLHQHAVYALLKEAPSPNEIASMHMTHLANLLKVNSHGHFTKEQAKELRVLAQKSVGANDSAISIQITQTIQQIELLDSQLEKIEAEMTDIIRFNDSVIMTIPGIGYINGGMILGEIGDIHRFSNPNKLLAFAGLDPSVYQSGNFQAKTTRMSKRGSRVLRYALVNAAWNVVRNNATFKAYYDAKRAEGRSHYNALGHCAGKLVRVIWKMLTDEVEFNLE

SEQ ID NO: 428481 - protein, 389 aa, unidentified
MKIFVGIDIAKLNHFAAAISSDDEILIEPFKFTNDADGFQLLVSKLESFDKNSIIIGLESTAHYGDNLVRYLVAEFYQVCVLNPIKTCQMRKNNVRKTKTDKVDTFVIAKTLMMQDDLRFITFFDLDMMDLKALGRFRQKTIKQRTRLKIQLTTYVDQVFPEIQYFFKSGLHQNAVYALLKEAPSPKEIASMHMTHLANLLKVNSHGHFTKEQAKELRVLAQKSVGANDSAISIQITQTIQQIELLDSQLEKIEAEMTDIMKFNDSVIMTIPSIGYINGGMILGEIGDIHRFSNPNKLLAFAGLDPSVYQSGNFQAKTTRMSKRGSRVLRYALVNAAWNVVRNNATFKAYYDAKRSEGRSHYNALEHCAGKLVRVIWKMLTDEVEFNLE

SEQ ID NO: 428482 - protein, 338 aa, unidentified
MGLYGAIDLHSNNSVLVVLDERDQVLYEKRLPNDLGRVLEVLLPYRDQLVGVVVESTFNWYWLVDGLMAVGYRVHLANTTAIQQYKGLKYTDDAHDARWLAKMLRLGILPEGYIYPKEARAVRDLLRRRAQLVRQRTTNLLSMINQFARLTGCGVSVRRLKQLSEAQIDEWVSDPNVASALRANLAVIRVLDKEIERLEGEILRQAKIAAQFSPLLSIPGVGEILALTIMLETGDVGRFAKVGQFSSYARCVDSKRISNGKKKGEGNVKCGNPYLAWAFGEAAALAVRFNPRIKRFFERKRSKASAPLAYKAVAHKLARAAYHVMRERVPYEERRAFG

SEQ ID NO: 428483 - protein, 328 aa, unidentified
MREFTGIDIAKEKFDIGWLRDVATGKKKTKVFKNTPAGRQQAADWLLKNLKVPAEDIVITLEPTGVYHEALMYFLHDCGFQILLVNPGQARKYAESLGQVHKTDKLDSITLAGYGHAQQHQLTPWQPEPPQLRELKVMLRRLDALEKDLQREHNRQEAARVSLPSERVAQSLEDMIATLKAEIQRLQQDIDDHIDRFPELKRNRELLQSIKGIGSVMSRELVYLFASKRFQSARQAAAYLGLIPKLRESGTLKGRTTLSKVGSARLRAKLYMAAVSASTHNPDIKAQKARLLKAGKTKMQALGAAMRKLIQICFGVITHQSEYQPQLA

SEQ ID NO: 428484 - protein, 370 aa, unidentified
MNQSSTLYIGMDVHKDTIAVDYVAQDHGAEVTFLGTIGTRQCDIDSLIRKMQSKATHLIFVYEAGPCGYWLYRDLTKKGYDCWVVAPSLIPKKPGDRVKTDRRDAVQLARLARSGDLTVVYVPQVADEAIRDLARAREDTLGDLKSAKFRLKAFLLRHDIRYTGRATWGPAHLRWLSEVVCPTPAQQIVFQEYVRAINEHTERLQRLDQALQDQVTSWRLQSVVEALQALRGVQFITAVTMVAEIGDLTRFESPRELMKFLGLIPSEYTSAERRRQGSMTTAGNTHARRALVEGAWAYRYPAKVSRHLQLRLEKPPKIIQDISWKAQVRLCKRYRHLIARGKHANVVTVAIARELAGFMWAIAKQVPVTP

SEQ ID NO: 428485 - protein, 342 aa, unidentified
MIDTMIGVDLAKNVFHLHGASMTGQLKFRKKLSRPQFRAFLSTQPPAVIVMEACGSASYWARVLSGMGHEVKLIAPQYVKPFVKRQKNDAADAEAIVIAAQRPEMRFVPPKTKKQQARAILFRNRERLVNQRTELVNSLRSILYEFGHTIPQGIGNVSRGYEILEDPNCDLPDLVRQECRDLLELIEETTVRIAAKLKRIKALSTETETAKRLQTMPGVGPLSALAIEAFAPPLETFARGRDFAAWLGLVPRQHSSGGKPRLGRMSKAGQSDIRRLLIIGAMSRLSRLGRKSIPKGSWLERMLARKPKMLVAVALANKMARALWAMQMTKESYRDPTQTVAA

SEQ ID NO: 428486 - protein, 347 aa, unidentified
MIIIGCDLHTRFEQIAMLDTETGEVVEKRLEHEKGEARRFYAGLKEPALVGIEATGYTRWFAEMLAELGHELVVGEAGKIRAKETRKQKHDRRDADHLLNLLVRGDFPKIWLPSAQERDVRVLLEHRHQLVELRTRAQNGLQAIALSYGLRRRGRLWSERGQEELKKLPLREGMGRRREDLLRLVRQLGVWIKELDQRIEQEVARREDAQRLMTHPGVGPQTALATVLVLGPVERFPDDRHLTSYLGLIPREASSAGRQHFGHLTKQGNRLLRWLLVEAAQTASRYDPRLRRAYRRLAFRKGSALAKVAVARKLAIRLYIMLRDKIDYQEFCRRGSHAGMLGDVALV

SEQ ID NO: 428487 - protein, 334 aa, unidentified
MRFYTRQHRHYCGVDLHARSMYVCVLDGEGNVLVSQNIASAAQPFLELIAPYREELAVAAECMFTWYWLADVCEREGIAFVLGHALYMRAIHGGKAKNDRIDAHKIAALLRGGMLPQAYVYPQGMRATRDLMRRRNYLMRQRAELLAHITNTNHQYNLPALGVRPARPAERSGLAERFAEVPVRKSVELDLSLIEHYDRELPRLERYLESNAQAHDPMALAIVRTVHGMGKVLGLSILYEIHDIGRFTRVQQFLSYCRLVNPTRESGGKILGHSGKKIGNAHLKWAFSEAAVCFLRANKPAQGLRVRLAAKLARAVYFMLKRGEAFDPERFFAH

SEQ ID NO: 428488 - protein, 320 aa, unidentified
MASRESLFIGIDVSKQTLDVAFGADPHAPRETIPYTDEGVQLLVTRLQRLQPTLIVLEATGGLERMVFAQLLQAGLPTARVQPRRVRALAHAEGRQAKTDRLDARLLARFAERVRPPHHQATDEQRASLRDLLVRREQVIQMRTAEINRLTAAAPNLRPGIQQHIDWLDQEIRARAQERDNEAERTDEVRRKRELRESVPGIGAITALNLLLRLPELGTINRTEAAAFVGVAPYANQSGAQHKPRHISGGRRDVRSVLYMATLAATRRRLVRRAFDQRLCQAGKPRKVAIVAAMRKLLTILGAILRQQKPWDPAVHTSAP

SEQ ID NO: 428489 - protein, 364 aa, unidentified
MVVVGTDAHKYSHTFVATDEVGRQLGEKTVKATTAGHATAIMWAREQFGLELIWGIEDCRNMSARLERDLLAAGQQVVRVPTKLMAQTRKSARSRGKSDPIDALAVARAVMRETDLPLATHDETSRELKLLTDRRDVLVAQRTSAINRLRWLVHELDPERAPAARSLDAAKHQQALRTWLDTQPGLVAELARAELTDIIRLTGEINTLAQRISARVHQVAPALLEIPGCAELTAAKIVGEAAGATRFKSEAAFACHAAVAPIPVWSGNTAGQMRLSRSGNRQLNAALHRIALTQIRMTDSRGQAYYQRLQDAGKTKRAALRCLKRRLARTVFQALRTVHQPSSEHTQPAAACHRSYCSRSCLSG

SEQ ID NO: 428490 - protein, 322 aa, unidentified
MNSSTVIPVGVDIAKRKFDVARLQDGKYRHKVFDNTQHGFEAFLNWLSSYGPEPVHIAMEATGAYSLPLAEFLAARGYWVSVVNPAQIKAFAESELRRAKTDPADAKLIARFTRERRPPRWNPPPPTIHELQALLRRVEQVLEMRQMERNRLDTAHPAARASLETLIKTLDQELASLRATIRQTIDDDRELRRRRDLLDSIPGVGEATIAHLLVLFSPHYGFHSAKQVVAFVGLAPNPHQSGEVMHTRLSKIGDALLRKVLYLPAWVAWRHNPVIKAFCERLKAHGKSGKAVACAAMRKLLHIAFGVLKSGRAFDPKLALAK

SEQ ID NO: 428491 - protein, 341 aa, unidentified
MKSSSVALPNSIVMNKVNDYYGIDVSKDTLDVAGGENVHLVFTNDLNGFKELLKWSGSDVHFVMETTGVYHQRLAHFLHSKSCKVSVVNALVIHRYSQMLLRSTKTDKADAKMIMSYAITNAADLKLWEPLPAYIQSCKDISGTINLLLKQRTSLKNRRHSLKAKDASKTKLSRSIEKSIKSLNTEIDVLETMMEELIVEHEGVLFDQLKSIPGIGPKTAMFLIVVTNGFRTFDSSKQVSSFLGMSPSLKMSGSSIRGQSRITKTGNKHMRKLLFLCSFTAYKYNPACKDLYDRITDKGKSEKLALIAVGNKLIKQAFAIAKSGEYFDPEFVSVNPALNVK

SEQ ID NO: 428492 - protein, 352 aa, unidentified
MPKRTRIVIGGVDTHGRTHHAAVLDEQGRLLGDREFPADRDGYRQLLGWLGRHGQVGVVGVEGTGSYGAGLAGYLGDQQVRVVEVDRPDRRIRRQRGRSDPIDAEAAARAVLAGTATAAPKRRDGIVEAIRVLRTARRGASKARTAAINQLKALLVTAPAPVREALDDLSMSALVTTCARFRPDEAGLADPAQASKAALQAIARRIQLLEAEIDLADQRLATLVGRAAPRLLGLLAIGKDHAGQLLITAGQHPERLRGEAAFAHLCGVAPIPASSGKTRRHRLHRGGDRDANRALHLAVVVRMQFCPRTRAYVERRTKEGLSKPEIMRCIKRYLAREVYHALVADFEALHAT

SEQ ID NO: 428493 - protein, 350 aa, unidentified
MEYIAFDAHKRYTLASVVRPDGRLIREQRIAHEPGALQQFLERCERGSPVAVETIGNWYWIVDEIEAAGCVPKLVHARKAKLMMGEINKTDKLDARGLNRLQQAGTLPTVWIPPGELRDQRDLPRTRMVLVRQRTQLKNRIHATLAKYALHDVAVTDLFGVRGRTLLRRRLDCLPPHTAYASRQLLEQIEGLDGRVRAFEQRIQGIFKPTPVIQRMLTLPGVGLTLAVVIALEVGDVTRFASAEKLASYAGTTPRIHASGGKTRFGPSRPDVNRYLKWAFVEAANAICLTRGRTPHRHVSRLYERVARRKGHAKAIGAVARHLAEATYWLLSKEELYREPKASRRFVHGG

SEQ ID NO: 428494 - protein, 430 aa, unidentified
MGLIEPTPMPPERDEQATSYNWYVGIDWGSQPHQVCVLDRDRHVVGERVVDHDGSSLAQLATWRWALSAGHPQRVAVAIEVPRGAIVEGLIERGFHVFAIHPKQLARFRDRHTMSGAKDDRRDAFVLADAVRTDQPSFRRLQLDAPQLLLLRELSRAEETLLEAFRRSANRLRDQLHRFSPQMLHLCSGADASWLWDLIDLAPTPAHAALLSQEQRQRVLKAHRLRRVKATEVLTCIQASALPVAPGAAEAAQVHCAFLLPCLRVLAEQLRSCAQQGEALLKTLAEAPDETGGPSDVAMVQSLPGVGRKITAWLCAEAAQPLTEREYQVLRTQGGVAPVTKQSGKRRQVVMRRGCNPRLRHALYHMARVAMQRDAYFGGVYEALRAKGQRHGQALRNIGDRLLRILIAMLHDRTCYDATRSRREPVVQMG

SEQ ID NO: 428495 - protein, 415 aa, unidentified
MRTHRICCGLDVHKKMITACLLREDAQGNSVTEKRLFGSMTRELHALAQWLCAAQVTAVAMEATGVYWMPVWNVLEQYGLQLLLINPEHYKAVRGKKTDLKDGTRIAELLQDGRLEGSYVPPVAIRVLRDLTRYRIKLVQYQSSIANRIQKLLEQCNIKLASVASDTLGVSAMAMLRALAEGETDAARMAGMAKKRLRNKIPQLQLALEGCVLPHHRLLLREMIEDLDHVGAKITRIEETIEQQMRPFQNAVNRWLTVPGIKHRVAWTLVAEVGPTVEAFPSAADMVSWAGVCPGNNQSAGKRKSGTTRAGNPWLRRALCEAAWAASKSKGTYLQAQFRRLAALRGPKRALIAVASSILTAGYYMLQRATTYQDLGPDYFDKRNTLRATHRLVKRLEALGHRVILEPRFNAEPSS

SEQ ID NO: 428496 - protein, 360 aa, unidentified
MAKTKSVRPPFVVGGVDTHKDLHVAAVVDENNRVLGSDFFATTRQGYRQMLTWMASFGTVARIGVECTGSYGAGLLRHLQNAGITVLEVTAPDKMERRRRGKSDTIDAESAAHAAFSLIRTVTPKTRSGMIEALRVLKVCRKTAVAARRIALQMIQMNIVSSPDELRDQLRNLTRMQLIRTLAAWRPDVTAYRNVQDAYRIALKSLARRYLELHDEIADLDIMIASIVDELAPELIKRNAIGYESASQLLITAGDNPQRLQSEPGFAALCGVSPVPVSSGKTNRHRLNRGGDRAANSALHIIAIGRLRTDTKTQEYVAKRVAEGLSKMEALRCLKRYIAREVFTLLRNQNRQINSTQITT

SEQ ID NO: 428497 - protein, 331 aa, unidentified
MEEVKRFVGIDVAKVALDVFIGSAGAAFSVTNDEVGIRELLRHLAPDDFVILEATGGLEMPVASALAAAGIAVAIVNPRQVRDFARSTGRLAKTDRLDAEVLARFGEAVRPAARPLANEQAQALEALVTRRRQLVEMLTAEKNRRARAPKILHHSIDEHIRWLEKRLTGFDDELGELIRDTPLWRERDELLRSVPGVGKVLSITLLAQLPELGMLNRKQIAALAGLAPFNRDSGTLRGSRCIWGGRAQVRRVLYMATVAGVRCNPIIKTFYLRLRTNGKHAKPALIACMRKFLVILNAMLHNKTHWQTPALTSSTIALSPLPGAVSEHGCC

SEQ ID NO: 428498 - protein, 343 aa, unidentified
MDKIATIGLDIAKQVFQVHGADAHGATLFNRKLRRAEVPAFFEKLPPCIVAMEACGSAHYWGRAISALGHEVRILPAQYVKPFVTRGKTDAADAIAISQALKRPDIRSVSLKTAAQQAATMVLSTRTFFVRQRANAINALRGFMAEFGLVAPRGITNVGKLVNVLSERGDAGIPPAARLMLDEILAEIETLTARIQRIDDQIAAHAKQDEDIRRLTAIPGIGTLTAAAIQAHVPDPGRFRSARHFSAWLGLTPKQNSSGEKLRLGEISRMGNGDLRSLLYMGAMGVLNAARRFGTRSGWLRRLMDKRPFKVVAIALANKTARVVWALLTKGGTYQAPTELAGN

SEQ ID NO: 428499 - protein, 339 aa, unidentified
MQEQFTFFVGTDVSKLTLDMSIISKGIEVHCTQIANTKKAIDTWFKKMSNATGISVTNTLFCMEFTGIYNYHLVEYLDSKAAKMWIMPGAQLKHGKGMDRGKSDKADAKKIALYGFTHPHEVRLWKQPRLVVKQLRTLIKNREGIIKTRHQYERRLKESKGLVDKKELAITKKYCQPMLDLVAKQIKAIDKEIKELIATDEKLNELSGYIQSVDGVGIVTAAEMIVTTNEFENYDDAKKLACHCGVVPFKKESGTSIKGRASVSHKANKKMKRLLHLAALSAIKVKGEFKQYYERKKAEGKHVMSVLNAIRNKLVLRIFACVKNKRFYQKDYQYSLVKL

SEQ ID NO: 428500 - protein, 420 aa, unidentified
MDVMVERCAGLDVHRDNVVATVRVPGTGRRRWDQQTQTFRATLAGLAELAAWLAEVGVTLVGMEATGVYWKTVFQALEDRFECWLLNAHHLRNVPGRKTDVKDSEWICQLVQHGLVRPSFVPPPEIRRLRDLTRLRKAQTNERGRTIQRLEKVLQDAGIKLSSVASTTYSKSARAMLEAMLSGVTDPEQLAELSKSRMRLKIPELREALQSRFTIEHHGIMVAQLLAHIDTLDAALQNLTERIEFVLAPHAEVIELLCTIPGVQAHAAQVLIAECGLDMSVFPTVGHFASWAGACPGHNESAGRRRSGRSRPGPSWLTSQLTECARAAVRTKGTYLAAHFAQLRGRRGEPKAIGAIRHDLLVAYYHIVRDQVPFRELGPDWQRRRYSVEHRAQRLQRQLEALGYAVTLDQVEQPETEQAA

SEQ ID NO: 428501 - protein, 424 aa, unidentified
MLGVGIDWAEEFHLVALGRPGEGVFDIARVEHDPRSIDALIARIASIEPDPAEVRVVLETSYGMLVERLIDAGYTVVPVNPDLVARRRGPAKKKDDAEDARIACVLALDRFERLRVLVPPGEAAAELRSITRDDERASRDERRLLNRLRADLIATFPAALVIAGDDMGAPTFLRMLERWPTVNILAAASRDDLVAFARSCKHGWPDRFAERVESAFASDHFVARDWLVRAKTDTIRLAATQLLALGTQRRAWERRMGELLLGAPRTGRASQPKDGDRGPAVPGGEIYLSFPGLGDRLAARVAAEIGNVTNFDTPNGLQCYAGKAPVTRRSGKHELVVANRLACNGHLRDAVQQWAFCSLRGSGWARDFYDAHRAKSNGHHAALRALGNRWLEVLWHCLTRNVAYDEAVHVANRNRALGLTSKAA

SEQ ID NO: 428502 - protein, 381 aa, unidentified
MGDHIAAFVAFDTSKLRNAVAIAEEGRTGEVRFLGEIDNTAEATAKLVTKLAAKYARLAFCYEAGPTGYGLYRQITDLGHECMVVAPSLIPKKPGDRVKTNRRDALGLAKQLRAGELTAVWVPDGRHEAMRELTRARGAAVQDVRQKGQQVSAFLLRLGRHYDADKKTWTKAHMNWLASQKFEHPEQRIAFEELLLAVHQARERVARLEEAIRQAVPDWSLAEVVPALMAMRGIDMVTATAFLAEIGDLSRFRTPRQLMAYLGLVPSERSTGDTVERGPITKAGNRRARRLLIESAWAYRHPPRVGKDKQAKVAAAPRAVREIAWKAQHRLYARYRALTRKGKLKTVAITAMARELAAFIWAVNREIANTGGAEAQQGIRG

SEQ ID NO: 428503 - protein, 365 aa, unidentified
MNTQDPQSTADSAQAKPEVIKLGLDLHARQVTECRQLDGSTPKPAQKWEPKKLLAQVEAWVKAGIKVYSCYEAGACGYWFHRELVQRGAVNVVVAPRPLGPYRAKGQKTDRLDARGLLDLLDSYLRGNRQALSVVAVPSLELEQQRAVVRHREQLMRHRRRAEAQGRALALTQGIVAPVGWWRPAVWAAFEPQLPPWLKPQLRYWQQTALALNGQERQVRSQLEQMVSQALPVGVGALSWITLQLEIRGWERFDNRRQIASYTGLCPGLHQSNGRGHEGSINHCGNPVVRYMLVEMVWRLLRWQPAYPPVQKLRQATSKRGRRRLAVAAARRLAIDLWRLATKRATPETLGLQMHLLSMTQSPPR

SEQ ID NO: 428504 - protein, 446 aa, unidentified
MDSTDTLVEVDSTDAEIVARVAAIDVAKDSGMVCTRVPHQTQLGRRTTVWSVSARTNSIIALADQLAEQDIERVVLEATSDYWRPFYYLLEARGLTVWLVNARDVKNVPGRPKTDKLDAVWLAKLNERGMLRPSFVPPVEIRQLRDYTRLRVDLTAERSRHIQRLEKLLEDALIKLSSVVTDMMGVSGRAMIAALIAGERDPRVLADLAKGRLRVKHTALIEALTGRFDEHHAELAAILLDQADNLSAQIERLDTRIEQMIADIPAAQAPADTRAGDGVTAPAYLAAVDRLDEVTGIGRHAAQVIIAEVGLSMATFPTSAHLVSWAKISPRTIQSGAKNRAGKTGKGNRYLKGVLGEAAAAAARTNTFLGARYRRLARRIGKLQALVAVARSILVIVWHLLADPTSRYHDLGPEFFDSRIRPERRKINHIRQLEALGFTVTLTPAA

SEQ ID NO: 428505 - protein, 291 aa, unidentified
MKNHLELLSQNLGVDVAKDTLDVAFSTIDMQQQVKVKASRKFANTPAGFKQLQKWLESKRIKDVELRILMEATGIYYEQFAWFLYEREYAVSVVLPTKAKRYLQAIGNKSKNDKIDAKGLARMGLQQRLPLWQPLSKNIYRLRLLTRQLEDFNNQRTAFLNQLHALNYSAYSVKEVEKSLKKMVKELEKGIGQLEKAIEKLIQEDEVLSSKVEKVLSLKGVGLKTIAVLLAETNAFATFEKQGQLVSYSGYDIVENQSGQRSGKTRMSKKGNAHIRRAMHMPALGVVRNHR

SEQ ID NO: 428506 - protein, 448 aa, unidentified
MKQEPEEIPDAEHELVLERVCAIDVAKDSGKVCVRVSSRAGRRVSKVWDVAARSGAVAELAEHLLGEGIEKVTVESTSDYWRIWLYVLEAAGLSVQLVNARDVKNVPGRPKSDKLDAVWLAKLTEKGMLRPSFVPPAPVRELRDYTRLRIDLTRERSRYWQRLEKLLEDALIKVSAVASTLDTLSVRDMLEALIAGERDPRRLADLARGRMRVKHGALVEALTGRFDDHHAELARLLLDQIAALATQIATLTTRIDELLTAMEPATRADEPDTPGAVGTVVDGARKSTTIERLDEIPGIGPGAAQIILAEIGFDMSRFPTAAHLVSWAKLCPRTIQSGAIQRGGKTGKGNPYLKGALGEAAAAAAKTNTFLGERYRRIVKRRGKLKALVAVARSILVIIWNLLNDPTARFRDLGADYHTTRINTERRTRNYVAQLTAMGYHVTLEPAA

SEQ ID NO: 428507 - protein, 344 aa, unidentified
MEIKALGLDLAKNSFQVHAVDEAGAVVLKKTLRRAQVLPFFTSLAPCLVGMEACSASHYWARELGRLGHTVRQMPANYVKPYVKRGKNDANDAEAICEAVTRPSMRFVALKSPEQQAVLSMHRARELLVKQRTQIVNLLRGVLREFGLEIACGVDRALNTAREILDGKDLALPAEAAEVVTILSRQAIELHLKVRSFELALHRWHRSNELSKRLATIPGIGPIGASALAASVTDPQQFRSGRDFAAWLGLTPRQNSTGGKERLGRITKMGDHYIRKLLYLGMTSLLQRAKRFPERVDPRLLSLMAKKPARVAAIAFANRTARIAWAIMARGESYRVGHVPTLAN

SEQ ID NO: 428508 - protein, 425 aa, unidentified
MKSRLIKAQNQRVERVSTSTLVIGIDIAKEKHAAQAINFRGIVLTNRPIMFSNDHAGFEHLISSIRKLQNMHNLNDVVVGMESTGHYWFNLAHWLMKQGISVVLVNPMTTKRNKENRDNSPSKNDPKDALVIADAVSRGFYTPFSPKEETFRRLRVIVTNREHWVVKSGRIKNRIHRWLDIRFPEYRQAFEDIFSPRSLATLRRFPAPSDVLQLTPEQMVQTWGVYMARPGGVRGRNKALQLQALARHSVGDAAALEEDKWDLRHLIEEYERICHIIDEADEMIEKLLPEIPCSDLVRSVGVSVPATAAIFAFGGDLRKLSHGNQLLRKAGLNLAERSSGKYKGHIKLTKRGNSLLRKHLYFSVFHLLSHNRAFQDLYAHNIEVKRMTKMQSMMKLIGKLARMLVAMAREGQTFSADKAQPPLAA

SEQ ID NO: 428509 - protein, 347 aa, unidentified
MSTTIAVDVAKSVFEIALSHRPGRVAKRDRLSRGQFARFLATHPPATVLMEACGMAHFWGRHAEASGHRVVLLPPHTVRPYVPRNKTDRADATALLEAARNEAIHPVPVKSVAQQMLTALHRLRSAWLATRTARLNTVHGLLRQLGVTIPIGARQRVPRITALLAAEDSAIPAGLRPGLAAVVTEIRELEGRIRTVEQQLKALAIATPLVARLRTIPGIGLLTATALVGFVSHAHRFPSGRHFASYLGLTPREHSSGLRRRLGAISKRGDPYLRMLLIHGARAVLCHAKKAAGPRRLQHWALQLERLRGHNKAAVALANKLARIAWAVWTTGTPFRDSTAPPLAPAV

SEQ ID NO: 428510 - protein, 381 aa, unidentified
MDHDQQCSEPLDCYVALELSRRTWLVGALLPESTKVRTFTVPGGDTVGLLQGLDRLKERAAKSGFGDIRLRVCFEAGYDGFWIARFLLDAGIDTTVLDASSFLVSRRGRRVKTDRVDVEAMCNTLKAYLLGDRSVCRPVRLPTPEEEDSRRMARERIQLVKERTRHVNRIKALLNLNGIRDCTGLLTGRLKARLDDLRTGDGRLLGPFIRRELLRQMARLELVRAQLKVLEAERAEALAQETVPKSAQVEMLMQLRGIGEVGAATLVAEVFQRKFQNRKHLASYLGLAPSHYASGDVQRDQGISKAGNKLARVMMVELAWCWLRYQPDSALTRWYRKRFCAIDSSTPRKIGVIALARKLAIALWRYLEHGLVPEGAVVKTR

SEQ ID NO: 428511 - protein, 421 aa, unidentified
MDVVVQRCAGIDVHKDTVVTCVRTPGADGQREVVTKTFGTVTAELLALREWLVAMGVTLVGMESTGVYWRPVFYMLEDVTECWLLNARHMRNVPGRKTDVADSEWICQLVEHGLVRPSFVPPKPIRELRILTRHRKTEIEEHTRVAQRLDKVLQDAGIKLSSVATDILGKSGRDMLEALVAGTSDPDVLAELARGKLRKKIPALTQALEGRFGTTHALVVGEILAHLDFLDEAIERLSGRIDEVIAPFGTERDLLCTIPGIDRRLAEAILAEVGVDMSRFPSAAHLASWAGMCPGQYESAGKSRSGRARHGNSWLQRHLAVAAMAAARTKDSYFAAQYARLVRTRGKPKARKAVGHSMLVAIWHMFEAGVPYQELGADWFEQRNSPDRRARRHLADLKSLGWSMTDTPEGIVLTRPQPAAA

SEQ ID NO: 428512 - protein, 372 aa, unidentified
MILIREVADAPVIMGISKPADLKSPCGEVKIVNPLFVGIDVSSRSNVAYLMNPDGSKYSSFSVQNNLGGAKLLSERIVSALSSMRLSDVVIGLEATSIYGDSLVYALREDGSLGRFQRKIHVLNPKQVRKFKEAYPDLPKNDFVDAFVIADHLRFGRIAKEVYMDDYRYQALRTLTRARFDVIQNLTREKQRFANYLFLKCSGMAQDKDIQNTSATTIALMERFETVDDLANADLDELTAFIAETGRGRFADPNAVAKVIQTAAKGSYRLPKTVNDTVNQAMSVSIASMRALKEQVKVLDKAIEQQFEIIPNTLTSIPGIGKVYSAGIIAEIGDIHRFSSQASVAKFAGLVWHKSQSCARFLYPYKRRNEFE

SEQ ID NO: 428513 - protein, 387 aa, unidentified
MQKTHDNSKACPTAFVQANTLVVVIEMSLSSWLVAGLIPGVSREPLKKIAPDPDGLLQLVYRWRDEAIKAGKEITRIAVAYETGRDSFWLARWLRKRGIDAHVIHATSVAISREHRRAKTDRIDTVMLRRGFLGWLRGEPGHCSMAAVPTMVEEDAKRPHRERESLVHERTSTVNRMKAVLIQFGVRNFNPALRKAREKLDAVRTPEGVPLPPNAVAALRRHMERLGVIHEQIKTIERTRLQHLQRNPADKFNAMVFLLVRIIGFGVETAEQLVHEILSRNLRDRKAVARYAGLTGSPDESGSKRREKGLSRSGNSRVRNILIQLSWRLLKFQAGSELVLWYQSRTANARGSRKRMIVAFARKLVIALWRYVNTGLVPEGFELRPVA

SEQ ID NO: 428514 - protein, 370 aa, unidentified
MRKNTLWVGLDTDKKHIDVAVAEALPDGEVRLWGRTANTPASVDRLVKKLGQGGRELTVCYEAGPCGYGLYRHLASKRGVKCLVVAPSMTPRRPGDRVKTNRRDALKLAKLLRAQELTEVWVPDAAHEALRDVVRARTTAVSSLMRCRQHISSFLLRQGIYYTGKPWTKKHRLWLGRLEFEHAAHRLLLVELLAALDHQQARRDRLTDHIRELVPGWSLAWLVEAVQALRGYDLINAANVVSEIGDLRRFTSPRQLMGFVGLNVCEASSGDTVRRGHITKTGNKRARKALIEAAWTYSRPTTATGKPIAARLPVEVQQIADKARHRLSRRYRHLLAHGKLKQVAIAAIARESLGFLWAIAHAAAPTSAPS

SEQ ID NO: 428515 - protein, 346 aa, unidentified
MKYFAGLDVSLEETAICVVDEAGAMVREARVPSEPEALVAFFQGSGLVLERIGLEACSLSAWLHESLVAAGLPAVCIETRRAKAAMGAMPNKTDRNDARGLAQIIRTGWYRAVHVKSPACRSWRALLTARRLLLNKMRDLENGLRAVLREAGLKLGTPTRKEFAARVRELTAADPVLSVLAEPLLTIIAAMTRELAQLTKRVLDIVRDEPVCRRLMGVPGVGPLTALTFRATIDQPERFRHSRDVGAHLGLTPKRYQSGETDVQGAISRCGDELARTALYEAAHSLLVRSRRWSALRAWGMQVAKRRGMARARIAVARKLATILHRMWADGTEFRWGKEGPMPAAA

SEQ ID NO: 428516 - protein, 425 aa, unidentified
MNYKQNEKINQVKESTLVIGIDIGSTTQYARAFDWRSIELGKVFTFSNSREGFEAFKAWMQRLQDKYRKSDVIVGIEPTGHYWFDLGAYLEDEGILLVMVNPYAVKQTKELDDNSQSKNDRKDPKVIAKLVTEGRYSAPYTPDGVYADLRIMVANRKRLIREMTQIKNRFARWFAIYFFEYTDVFGDYEAQSSMLLLKKVCTPEAIVELGAEKINQIWRDAKLRAVGMKRATTLCETAKRSIGLKKGSSAARYEMKLLLEDYEYKKAQLDAVMEEIEKLCRKIPESEQMLAIKGIGVITVAGFLAEVGDVRRFESPRQIQKLAGLSLRENSSGKHKGQTTISKRGRRKLRAVLFNAAIPLIAKNPEFKSLHEYYTTRANNPLKKKQSVIAISCKLIRVFYAILANGVTYDAQKMLSDIHRQPQAA

SEQ ID NO: 428517 - protein, 340 aa, unidentified
MNESALEIEAFVGLDVAKAKVDLYVVREGKGKSKVFGNTVSGHRELQTWLLDRGFIAERTQVCLEATGPYSESLALALVEGGFKVSVVNPARVKGYGQGELSRNKTDKADAALLARFCQAMRPGLWTPPSAAFRQLRAWVDRLQSLKDMHQQEMNRREAMEVSGQEDVVAHVQIHLDWLSSEIAKLEQDIDDHIDRHPDLKADAALIESIPGIGKTTTAKVLAYAGDIRRFSSAKALSAFIGVSPRQRLSGSSVKGRTMLSRSGHQALRNALYMPGMVARRRNEAMRIFGDRLAAAGLAPKAVIGAVMRKLAHLIYGVVKSGMPFDMNKAMPRVDFQDGN

SEQ ID NO: 428518 - protein, 486 aa, unidentified
MAKRKKSTFERLQDRHLNRQQRRELQRKFDADSAELAIVHAHAAGVDIGSASHFVSVPPDRDEMPVREFGSWTNDLRKMTNWMKACGITSVVMQSTGVYWIAVYDVLEQAGFDVYLVNARGTKNLPGRKSDVQECQWLRKLHTYGLLRKSFRPPQQIREVRTLWRVRSRVLEDSSTSVQHIQKALITMNVQLTNAISDVSGVTGMKIVRAIVAGERNPHKLAKLRDPHIRASEEEIAHSLEGNWQRDVLFELQLALETYDYHRQQLKKIDAELESYMASLPTREVVGEVAAEPSKVSSKLRKKLKANRKTKDNRPAFDIGMELARLMGVDLRLIDGIDVMTAQTIYSELGADLSAWPNEDAFSSWLELTPRDDITGGKVIKKKKRPSNNRVTTALRNAAESLVRSDSYLGAKYRYFTRRLEGLKGVKATAHYLACVVYRLLTKGQAWVDRGAAYHEEKRHHREMVGLQLKAAAAGMKLVPLAQASA

SEQ ID NO: 428519 - protein, 377 aa, unidentified
MHSENIAAYVGLDVHKETLAVAIAAPERLGEVRYYGTINNEAQAVRRLFQKLQGLYGNILSCYEAGPCGFGLYHQLTAMNIKCQVIAPSRIPKSPTDRIKNDHRDAISLARLLRAGELTPVWIPDLTHEAMRDLIRARAAAKRDSRVARQRILSMLLRTDKHYAGKHWTGKHRTWLANQSFSQPSQQIAFQHYCQSLEQIEDRMLQLDQEISRLLPEWSLCNLVCQLQALKGVGQLIAITLVAELGDFSRFSNPKQLMAFLGLVPGEYSSGNSIRPRGITKVGNSELRRLLYEAAWSYRTPAKVGAWLIYYRPDSVTQYSKDIAWKAQQRLCSRYRSLTAKGKKSQVAITAVARELTGFMWDIALAAQSSFSQQKQN

SEQ ID NO: 428520 - protein, 450 aa, unidentified
MGNASGVSRGDRNRNARLARLRSLVPVTNAIVGIDLADAKQMVVVTDHDSKVLARKTFRCRAWDLGAALGWAAERAAAKGFSGVTVACEPTGHRWRVLGQLAADRSMPFVCVQPMLSSWARRSEDLTSDKTDEKDAVLIARLTAQLRCYVPEPVDETWGRLRHLGARREQVIVEMVSQIQQMRALLECVWPAALDTAKQPFRSKTWVAAMSAICERDGGDLDRTRRLGPARFEQAVRREILKRGGQKPSLRIARRLFAALTDPTGVIAHRPGALERVAFLLVDWHTAGDKLTDTEARMISVLGELKLTALATSIPGLSPVGAAAILAETGDPNRFASGRALVKHAGLAPREKLSGTFVGRTKLTGAGRPGLRLAAWRAVWGTQRGNTVYAARYRHLTSREQNKLTATQAQTVIAAAILRQLHAVITTGQAWDPDIATNGTGHRKQMPIAA

SEQ ID NO: 428521 - protein, 436 aa, unidentified
MHRGYPAKDMIKVAIRAPGENGERTTEVLEFRAFYGVLQEMARFLRERGVTHVAMEASGVYTEPVYHALCEQDFEQVLVVNPQHVKALKGHKTDARDCRRIAGLLECGLLRGSYIPSAEQKEMRDLTRYRKKTVQARTSEIQRLQKVLESAGIKLGSVVSHVTGKSATAMIGALIDGERRVDVMADLALRSLRAAGKQAGLKMALAGRFTEHHAMLCRMHRDQIKLADQAVGKLDQQIAVMASRWQRELDLLLSIPGFGVVVAAIWLAEIGPAPHLWFDSHGKLASWVTLCPGNHISARKRKHGKTGDAGTYIKPALIEAAWGAIRGKGRLQSRYNRLLRRFGGPKNPGAKKKAITAIAHTLLKIAYQVLNSGQPYTDPGADFYTRRESPARQQAWLERRLQQLYPGRTVTVTIGPPPGSNPPRGAPVQAALPGHH

SEQ ID NO: 428522 - protein, 337 aa, unidentified
MIIIGCDFHPSFQQIAMLDTECGTTTEHKLMHASGEAEGFYRALASSALVGIETVGNDQWFVQLLQRLGHEVWVGDAAQIRASYVRKQKTDRRDAGHILKLLIEGRFPRIWVPGAQMRDHRQLLVHRHKLVQIRTRVKNELQHLMLNQGMQKKQKLWSTEGRAALETLSLDPWADRRRHDLLHLLGILDAQLEKVDDAVKQVASQYPDVQLLLSQPGVGPITALAFVLTIGDVRRFPRGKQVASYLGLIPRERSSGGKQKMGGITKQGSRIMRFLLVEAANIAVRFDPDFRKEYSHRCHQKHFIVAKVAAARKLAIRMYWILRTQTPYPQVLSSRAA

SEQ ID NO: 428523 - protein, 410 aa, unidentified
MEVILRCCAGLDVHKESVEACIRRMSGVGKVEHEVRHWGTTTRELVEMADWLCSSGVTQVAMESTGVYWKPIFNILEAQFEILLVNAHHMKNVPGRKTDIKDCQWIAQLLQHGLLKGSFIPPRPQRELRDLTRQRTQLVDEASRISNRIQKVLEDANIKLGSVASNVVGASGRLMLGAIIAGQDDPVQLADLAQRRMRSKIPQLEQALYGKLTDHHRWLLRLLLDQLQATEQFTARMDERIAELTRPLEPVLEKLDAIPGVDRRVAEVLMAEIGPDMTPFPSDAHLASWAGISPGNNESAGKKRSGKTTKGSRWLRQALVQAAWAASHKKGSYFQAHARNLMHRRGRKRGLVAVAHSLLTVIYHMLKGGTAYRDLGPQFLDRLRANHLIRFHLRRLQQLGLHVAIAHAEG

SEQ ID NO: 428524 - protein, 444 aa, unidentified
MARKSKKQRLQIIHSDCAGIDIGSREHWVAVDPDKAKEPVRCFSSFTDSLNEMADWLESLGVKIVAMEATGVYWIPLYELLDRRGFDVQLVNSRSTRQVTGRKSDVLDCQWIWQLMSYGLLKGAFRPTDSVCSLRAIVRQLATKVQDQSRCIEHMQKALTQMNIQLDNVVSNLMGKTGTAILRAIVAGERDPQQLALLRDNRLRADKETVARSLYGNWREEHVFALTQALEHYDFLSQQIEQCNQCIGQQLVNLPKLADNPPEPVKELRNPHRTKNQQIALHQALYGVMGVDLTAIPTIGIETVLVLASEIGADLSRFPNEANFCSWLNVAPPTCISGGKRLHGQKPHIFNRAGQALRQAALNARNSQSFIGASHRARLARMDGASAIKATAHQLARLVYAMLTKGQPYVEKGIEAFEARTQERQLKALQKKAQKLGLELVEMV

SEQ ID NO: 428525 - protein, 355 aa, unidentified
MFESTTVAVGLDVHARSVRLAAVRADELLEERTLPYDEEAVERVLRRWPAVRCCYEAGPTGFGLYRYLVERGIDCRVVAPGLVPQRPGDRVKTDSRDARKLARLLAGGLLEPIHVPSRELEAARDLVRAREDARLDRMRDRHRLSKFCLRHGRTLPTNSWTVVRRKWLGEQRFEFVAQQQTFDTYVHTVDLVDARIEALERGPWCQLVARLRCLRGIDSLTAFALAAEIGDFNRFKSAEEVMAFVGLVPSERSSGEKRRQGSITKVGNSHVRRLLVESAWHARRHPKVGYELARRQRGQDAALIERSWRCQQRLYQRWQRMAGRGKPQQKIVVACARELAGFVWAIATEQPLRNT

SEQ ID NO: 428526 - protein, 341 aa, unidentified
MQITTIGLDIAKNVFQVHGVDAAEKVVVRKQLRRGQVMKFFEALPPCLIGMEACATAHYWARELRKLGHQVRLMPAKDVKAYVKRNKNDAADAEAICEAVRRPTMRFVEVKSAAQQGRLMQHRARDLLLRQRTQAINALRAHLAELGIVAAQGREGLKKLLAIIADEKDERLPVDARASLIVLALQLQALQTMIGSIEKRIIAQHRASEESQRVATVPGIGTLGASAITATVTDPSVFRSGRDFAAWIGLVPRQDSTGGKQKLGPISKQGDRYLRRLLVVGAHAVLRRVKQSPQNYPWLAQLLARRPFKVVAIALANKMARVAWALLAKGGTYRAPVLAAT

SEQ ID NO: 428527 - protein, 342 aa, unidentified
MSIVILGIDLGKNSCSVAGLDASGRVVLRRRLRRQTIAGFARQWRGCVVAMEACCGAHHLGRQLVAQGHEVRLMSPEYVRPYVKAHKNDDRDAEAIAEAATRPTMRFVEIKSEAQLDLQSLHRARERLVSERTALINHLRALLLERGIVVPQGRRKLERALPGILADESSGLSARLRRLASDLREEWRALDERIAAFDAEFVSQARTDEAARRLATVPGIGSLTATALVAAVGNAKAFARGRDMAAWLGLVPRQMTTGGKPKLLGISKRGNRYLRKNLIHGARAVLPYLATRDTPLGKWVQGLLARAHKNTVVVALANKLARIAWAVLAHGRSFEAAHVTAA

SEQ ID NO: 428528 - protein, 338 aa, unidentified
MSLYCGIDLHSRDCWIAILDDQLKVVHEAKVGNDLEAVRGVLAPFGSELKGVAVESTFNWYWLVDGLAEAGYQMRLTNTWAIKQWEGLKYSDDRHDAKWLAHLLALGILPEGYIYPRQTRPVRDLLRRRAFLVRKRTSFLLSMRGAFECRTGLRTRSADVRRWTDEDVSFHIEDPTSALGITCLLKPVQALDEQIRIIEKEAIRHAKLRNEFRPLLGVWGIGKILALTVMYEVGEISRFKKVGNYASYCRLVKTDRLSAGKRKGSGNSRNGNPYLSWAYSEAAHFAVRYHPVAKKYFQRKMSKSNGIIAIRALAHKLARASYYVMRDQVDFIPEKVFG

SEQ ID NO: 428529 - protein, 330 aa, unidentified
MKNYVDVIGIDVSKLTIDARLHKRGSHRLFANSTKGFIKLLSWVKKEVGLAQVFYCFENTGNYSLKLSIFLINKSLVYVEENPLSIKRSSGIVRGKADKLDAAMIARYAWLHREELFVSTVRDNKLQELGRLLAFRDQLVRDRTGMINSFKELKSLLRSPSTDTCCKSIQGSIAYITKQILVLENRMKDLMKSEVSLDKNFSLLNTIRGVGLILACQLLYHTSNFKRFDSWRQFSSYCGTAPFEYSSGTSIKRRNRCHHIGDRKMKTLLTLASVSAIQCDNELRLYYKKKVAEGKPKMVALNNVRNKLLARAFAVIKRGTPYVELQQFAA

SEQ ID NO: 428530 - protein, 408 aa, unidentified
MQVVHPICCGLDVHQARLTACLRHVNDAGQVTTEWREFGTLYSELLALSDWLVAQHCPIVAMESTGVYWKPIYHVLVGVVEVLVGNAREMRPRPGHKTDPADARWIAELLAHGLIRPSFVPPPETRALRDLTRTRVGLVQTRTQAKNRVQKVLEDSNIKLGSVVSDVFGKSGRQMLKALIEGERDAQKLASLALGRLRRKLPELALALTGQFTEHHGRLIALSLELIELLERQIAALDEQIRLLVEPLLPQIEQLDSIPGVDAIAARDILGEIGTDMSRFGSAARLASWAKVSPGNNASAGKRRQGRTGKGNRYLRRVLVQCAWAARKTATFLGRTFRRLEARLGGKRAAVAVGHKILVIVYHLLWQGTYYEEQRYADQRPKQEERDCKRAITALKRLGYDVTVKRIA

SEQ ID NO: 428531 - protein, 345 aa, unidentified
MTQYKRIAIDLSKAVFTLHGIDQQDRPVLRTNLRRAQMIPFFAKLATTEIAMEACGGAHYWARELIMLGHKVRMIPPQYVKPYVKRGKNDRNDAEAICEAAGRPGMQFVPVKSVTQQAQGMVLKVRETLVAQRTLLVNTLRGHAAEFGVIAGNGISKIGPLLSAIEQETAIPLEAKEMVVLLGQQIADLDSKITAIEVKLSAAHKANEVSRRLATIPGVGPVTALTLAIEIDPAAFESGRHLAAWAGLTPKEHSTGGKQRMGEISRAGNERLRALLVTGATSVIKAATKPGSKQMTDWLRAILSRKPRKVVAVALANKMARVAWALMTRGEVYRRSVITVRAVVA

SEQ ID NO: 428532 - protein, 338 aa, unidentified
MNYYAGIDVSLELSSVCIVDATGEIVKEAKVESHPDALVRFFKVFGLPLTVIGLEAGPLSQWLYADLTEAGFVTSLMETRHVNAALSATTVKTDRRDARGISQLLRMGWFRSVHAKSAGSQEVRALLVARKLLQHKLRDIELSLRGILRGFGLKVGRVTDKTFEARIRELVTGHPMLEQIAEAVLLEQFNKLHKAVLKIVRQDEVCRRFMTTPSVGAIVAITYKSALDDPGRIKKSRNAGPLFGLTPKRYQSGETDITGGISRVGDEMVRTALYEAANVLLSRVTRFSALKRWGLEVAKRRGMKRAKVAVARKLAVILHRMWIDGSTFRWTKTEAAYA

SEQ ID NO: 428533 - protein, 388 aa, unidentified
MIYVGIDIAKTNHYASIVNYSTGEVIENPFLVTNNKQGFDFLYSKIKDFNKEKVLIGLESTAHYGNNLIFYFHEKQFNLGIINPIQTAALRKTKIRKVKNDKVDSLLICEALSLGYYNLLSNYDIKLLEIKSLCRFHKDLKDKAAEAKIQLKTYVDQLFPELNGFFKDNLDIKTAHELLKLYQSPEDISKVNLTKLSNLLIKSSRGKYDKYRAIELKKLASNSVGINNFALSTQIKMTIELIELLESQIKDIEKQVSDFIKKSDNVITSIPGIGDMTAAIIISEIGDINRFNNPGQVLAFAGLDPSVKQSGNFNASSTRMSKRGSSLLRYALILAANNVQLNTKTFNNYYNTKRLEGKLHYNALGHCAGKLIRTIFYMLKNNVKFNLD

SEQ ID NO: 428534 - protein, 422 aa, unidentified
MNYLTDNAFTAYVGIDWADSKHDICVQAADDQQRELDCIPHQVDQIEEWAQSLHKRFGGVIAVALELSKGPIVYALQKYDFFVIFPVNPSTLAKYREAFTPSRAKDDPTDAELALDLLVRHPDRFKPLKPQSVEIRTLACLVEQRRNLVNDKIRITNRLRSALKQYYPQMLEWFDQLDTVLVCDFIARWPTLKQVKRARKNTLEKFFHEHNMRFSHVLDARLKSIKAATPLTLDAAVVTPYSLQALVLTDQLRVSLQAIRRYDDEIAELAPKHPDYGLFSALPGAGPSLAPRLLVAFGEQRERFASAAALQKYAGIAPVTERSGKKHWVHWRWQCPTFLRQTFVEWAAQTINKSFWAGAYYRQQRDKGCTYQAAVRALAFKWIRILYRCWQTKTPYNESVYLKALKRRGSPLLNPSTSVKIT

SEQ ID NO: 428535 - protein, 341 aa, unidentified
MKNLFIGIDFSKEKVDVAVIFAEGLVETSVRVFNEFKNSVSGYKQLVKWVEKNANGIDSSLWLFCGENTGDYSKPLCNHLYGRGFDMWLENSKCIKDASGIRRLKSDRADAAMIAEYAMRNHDKAIIYEPLSESLTQLREYYLYRQMVIRHRCSFEVRRGEKRLMMEKSAAKTVIAQSGKHIVSELNKEIAKIDRKIASLIESSDELSEVYRIVTSVPGIGTQNAVCLMVYTDNFRKFNYDARSIACYYGIAPFGQDSGTSVHVDPHVHYMANRHIKAMLTQAALAAVRYNPIIAQYYQRLIGRGKKMPVAMNNVKNKLLHIVTSMVKNKQVYKPEYRLSA

SEQ ID NO: 428536 - protein, 364 aa, unidentified
MKKVTTAATNWMGKQQGLTIGLDLGDRSSYYCILDESGRLVVESKTATSPKAMEAVFGGMIRSRIALETGMHSPWVSRLLSQLGHEVIVAHARNVRLIGESRKKDDRLDAQTLARLARIDPELLCPVKHRSAKAQADLSLIRARAGLVRARTALVNTARGLAKSYGQRLRGCNVRNMNPEKAEALSPELQAALQPLLAGIEAVSEQIVEYNERIEKLAQQNYPEVKLLKQVKGVGTLIALTFLLTLEDPYRFGKSRDVGCYLGLQPGRRNSGQSEPQMHISKEGDPYLRTLLVQGAQHILGPFGPDCDLRRWGLKLAERGGRNGKKRAIIATARKLAVLLHHLWVSGEVYEPLHNNRTAIAVAA

SEQ ID NO: 428537 - protein, 329 aa, unidentified
MKAIRKSQSLYCGVDVSGDTLDICYQTEHGNFEWAKASNSPAGFKEIWKLTGRSYHFVMESTGVYQLPFCFFLEGKKARYSVVNALQIKRFIQMKLERNKTDKKDAFHICMYGIEHMPEYYKMPDQLYFECRALNNAIETITKDITSYKNKIHALSRLAIDSKVILVGYKKILRDLHAELKNLETELYKKLQAWQPALVQQVRSVVGIGKRATAILIVTTKGFKNTQSYQQLISYAGLSPKEYSSGSSIRGKVRICKQGGSLLRHTLYMCALNAKETNGACKELFDRLVAKGKNKKLAVIAVANKLLKQVFGVVRNECLFDRNYYKKVA

SEQ ID NO: 428538 - protein, 415 aa, unidentified
MRVHRNCCGLDVHKKIIAACLIKEDGEGNSIQEKRLFGSMTRDLQELAQWLCAAQVTAVAMEATGVYWMPVWNVLERYGLQLLLINPEHYKAVRGKKTDLKDGTRIAELLQDGRLEGSYVPAMAVRVLRDLTRYRTKLVQYQSSLSNRIQRLLEQCNIKLASVASDVLGVSAMAMLRALAEGETDAVRMADMAKKQLRKKIPQLQLALEGCVLPHHRWLLREMIEDFDHVGTKITRVEETIEQQMRPFQSAVERWVTVPGIKHRLAWTLVAEVGPTVETFPSAADIVSWAGVCPGNNQTGGKRKSGTTRAGNPWLRRALCEAAWAASKTKGTYLQAQFRRLAALRGPKRALIAVANSILTAGYYMLQRATTYQDLGPDYFDKRNTVRATHRLVKRLEALGHRVILEPRFTADPSS

SEQ ID NO: 428539 - protein, 344 aa, unidentified
MNQIIRIGMDTSKHIFQLHGVDATEQVVLRRKLRRNQVLEFFAKLPPTVIGIEACGAAHYWARELRKLGHAVKLMAPQHVKAYVKRNKNDGRDAEGLCEAMSRPTMQFVPVKTEEQQAVLMLAGVRQQLIARRTQLGNAIRGYAAEFGLTAAKGLDKIEPLLAQIAQDETLPEMARELLALQGRDYARLQIELKAIEAKLMAWHRANPDSRRLAQIPGVGPIGATALVMKAPDPRLFPSGRHFAAWIGLTPKDHSTAGKTRLGKITRAGDEMLRSVLVAGATAVIKQAKHGRGSPWLLALLKRKSPKLAAVALANKMARIAWKLMVTGESYDGARMLGASAFAA

SEQ ID NO: 428540 - protein, 338 aa, unidentified
MRTGQTAQTYMLFVGVDIAATTAAVSIQRSGAHASRSFTIDQTSEGYTKLVHQLQATGHVPSRILVVMEATGAYWISLATHLVHEGFVVSVINPAQAHYFAKALLKRAKTDAIDAQTLAQLAMVLQPEPWRPPPPIYHALQQRLAQRDDLLNLRQQVDNQLHALRQHPEVIPEVRARMERLLATFEGQLTEVEAEITAALRQDSAWAAAAQRLQSITGVGWVTAAWTLVSTLNFTTCDTVEALTAYAGLAPMPRQSGTSVWYRPSIGHTGNGRLRTALYMATLSAVQHNPVIKTFYGRLRAAGKPEKVARCAAARKLLHIAWAVVKKDQAFDPHYARG

SEQ ID NO: 428541 - protein, 360 aa, unidentified
MLTVGVDAHKQTNMAVAIDATGREVARWRGPNSVAGWQQLAAWAAARDADVRWGIEGAWNYGRGLAQQLVEAGATVYEVNARWTAAGRRRARTMAKSDGLDAHAVALVVWREAAALPPVAADDETGVMDLLVGERDGVVAEATRLRNQLHQLLLQLDPDYRRGIPSLKTQRGLRALAAYATADPRPLQQQRAAAVRRLAQRLQLLVTQARELAAQIRDQAARYASLTAICGVDLLTAAALAGILGPGRRFASDAQLAAYAGVAPLEASSAERVRHRLNRGGNRQLNAILYRIALTQARCSPAARAYLARRVGEGKTKREALRALKRFIWSEPFLPALPQLPCSPLELGDKWGPTTGNRRS

SEQ ID NO: 428542 - protein, 374 aa, unidentified
MSRASNFRFKAGGPTSVSPKKLVKQCVGIDVSKDHLDVCFSQMDDQQTIIIKSTKKFANRIGGWKALEAWLKRFSASELPLWLVMEATGVYYEGAAHFFTSQQYQVAVVLPNKSKSYMQSLNLKTKTDAMEAKALAQMGLERKMKQWKCFSSTMLTIKRLSREREAIQEYLVSTSNQLHAHKHEHQPEKKTLQRAQSHLKFLQKQIKDIDLQIEQTLSQDPELKAKVDRVCTIKGIGTLTAVTIISETNAFELIENKAQLVSYAGYDVVERQSGSSVKGKTRISKKGNAHIRRALHYPALSAARYDVTLKALYERVVERNPKAKMIALVAVQRKLLVLIYTLFKKNMEYDPNYANNQTQEPKQNRQEPGPAYAA

SEQ ID NO: 428543 - protein, 358 aa, unidentified
MKDPTTSPIVVGGVDTHKELHVAAVVDAHDVVIGTESFSTTRAGYRALLRWMREFGDLARVGVECTGSYGAGLMRHLDAAGIDVLEVTAGDKADRRKRGKDDTIDAEQAAHAAFARIRTVTPRTHDGMVESLRALKIARSSAISARRVVLQLIHATIISAPAELRDQLRNMTRMQLIRTLASWRPDLPGYRDPVTATKISLKSLASRYLELHDEIVDLQVPMHALVDELAPDLLARVGIGYESTTQLLITAGDNPDRLASEASFAMLCGAAPLPASSGMTTRHRLNRGGDRAANSALHMIAVSRWRMDPTTQAYIARRKTEQHSNPEILRCLKRYIAREIYYLLRNHQRVVNQVATAT

SEQ ID NO: 428544 - protein, 373 aa, unidentified
MQYNTLFVGMDVHKESFTLCCYDMSRDKVSYTQKTDADYTRVLQYLQTVRKAMGSDVQFVCGYEAGCLGYTLYHQLTKSRVQCELLAPSTMMQAGGRKRVKTDRRDAERIAKCLAFHTYSPVHIPTDQDEKVKDYLRMRDDHKLALKKVKQQILAFCLRHGYVFTGTSTHWTESHLKWLRQLEGEGLYNEILSEYLLTYQTLKEKIERMDRRIEELAQEDAYREPVKKLSCFLGIKTHTALATIVEVGDFKRFPTADRFASYLGLVPGERSSGDSQIRLGITKAGNCHVRTLLTEAAQCFSRGRVGYKSRVLKKRQEGNTPEVIAYADRANERLRRKYYQMVLGKNKKANVAKTAVARELACFIWGMMTDHIA

SEQ ID NO: 428545 - protein, 372 aa, unidentified
MEYLSKTLYVGLDVHKDSIAVAYAPEERGAEVVSLGAIGTRQCDIDKLIRKVQSKGATTLVFVYEAGPGGYGRYRYLTGRGFACQVVAPSLIPRKAGDRVKTDRRDAMTLARLMRSGALSSIYVPGIEDEALRDLSRGRDDALQDLKRSKRRLKSFLLRQDIRYQGRATWNAAHLRWLSEVVCPTPPQQVVFQEYLRAVSEQQERVQRVERELHEAVKGWRLYPVVEAIQALRGVELTGAIILMAELGDLTRFDTPRKLMSYLGLTPSEYSSGARRHQGGITKAGNSHARRALVEGAWAYRYPAKVSRHLQLRLEKLPAEVQAIGWKAQVRLCKRYRQLTARGKHVNQVVVAIARETAAFTWAIARIVPLAS

SEQ ID NO: 428546 - protein, 351 aa, unidentified
MIIIGVDYHPSDQYIAFVDTETGEYEERQLNHSEQEAEKFYRELAARGVSVRVGMEATGYSRWFERLLAELGIEVWIGDAAEIKTKRVRKQKTDREDARLLLRLLRENNFPRIWVPSAENRDLRQLLWHRHRMVQMRTRIMNQLQALAMNEGQRRKSKLWSEAGRAQLEKLPLAAWAARRRKDLLELLDRMNPSIEGLTAAIEQEAKKWPEVLRLMTHPGVGPITALAFVLIIGTPERFQCGKQIGSYVGLIPCEDSSAGHQRLGHITKQGSSLLRFLLGAAAQAAARWDADWRRRYMHLALRRQRNIAKVAMARRLAVRMYWMWRNGWEYAEWVKFGSHAGQLGTRHGVN

SEQ ID NO: 428547 - protein, 317 aa, unidentified
MADPLFVGIDVSKAELAIAVEPTAEAWTSATSTDALEPLVQRLTALHPRLIVVEATAGYELPIVSACAAAGLPIAVVNPRQVRAFAQAIGRTAKTDAIDAALLARFAARVQPEVRPLPDADTQALAALVGRRRQLLDMLGAEQRRLAQATTSAVRRDLRNHIRWLERRVADVDDDITGAVQRSPVWRVQEDLLRTVPGIGPIVARTLLAELPELGRLDRRTIAALVGVAPFNRDSGQWRGRRMIWGGRRSIRAALYMAALVASRRNPPLARFYQRLRDHGKPAKVALVAVMRKLLTILNAMMKHQTPWSDGTAPVSL

SEQ ID NO: 428548 - protein, 360 aa, unidentified
MRKQSNTLNFEGQNIYVGIDVHLKSWTVSILSDHLHHKTFVQPPSPEALFSYLHAHFPNGNYLSAYEAGFSGFWAHYKLVEMGIQNIVVNPADVSTSQKERLQKTDAVDSRKIARSLRNNELTAIHVPCRETLEVRTLLRSRDALVRDLARMKQRVKAFLYYYGIDYPKEFQHSGTHWSRAFMNWLRNGIRMDTEEGGAGLSLLLDSVESQRRLLLEATRKLRALSRSDGYATDYELLRSVPGIGMITALSLLAELEDIRRFANSDRLAGYIGLVPTSHSTGEKDNKGEMTFRGQMQLRSKLIECAWFAARIDPALNMAFSKLTRRMEPNKAIVRIARKLLNRIFYVLKYKRRYKNETVE

SEQ ID NO: 428549 - protein, 361 aa, unidentified
MAPLSPSEAEAAPAPPARPRYQLGAGIDIAAKTFTASKCLPDAEPTKAEDFKQTPADFARLEKRLCASGFPPEQILVVMEATGNYWIELATYLDQAGFAVSVINPASAHSFAKSLLLKIKNDLLDAQTLARQAITLKPAVWTPPPQIYWELAQRLQQRNDLLATRTRLKNQLHALSVTRAVPKVVERLTKLIEVVNGQLKELEEEIERVVAQDEKWHHSVLLLQTITGIGPLTAWWLVMLTLNFSLCRRAESLTYFAGLAPIKRQSGTSVHPRPVIGQGGNYQLRALLYMAAASAIRFNPLVKAYFEALVAKGKPYKVARCAAARKLLHLAVGVITSDKAFDAEYGLGLRTKRLAPKGKAS

SEQ ID NO: 428550 - protein, 442 aa, unidentified
MEELREDHDDGAVARVAAVDIAKASGMVCLRVPHDTIEGRRIQQVWNVASTTNAILELGDRLVCQGVERVVMEATGSYWRPFFYLLEARGLDCWLVNARDVKNVPGRPKTDKLDAVWLAKLAERGMVRPSFVPPKPVRRLRDFTRTRTVFVQERTRHKHRVDKALQDAQIKLSGVVSDLFGLSGRAMMNAMVAGERNPRALAELAQGSLVKKKAALAEALTGQFEDHHARLLGVLLSTVDHLTGQIHDLDRLIAQTLEEITTPPDGPGAGDGPTATVNARVLAERLDAVPGIGPTTAQIILAEIGADMSRFPTPEHLVSWAKLCPRTIQSGAKSSAGPAGQGNPWLKGALGEAANAAARTDTFLGARYRRIVKRRGHAKALVAVARSILVITWHLINEPDASYQELGADWHRRHLDPARKTRDLVRQLQALGHQVALTPTAA

SEQ ID NO: 428551 - protein, 412 aa, unidentified
MTAKDQFAAYVGLDWADKKHDVCVQFKNGDRIFHVIEHTPEALDIWLNELHQRAKGRIAIAVELKKGPVVYALQKYPFVTVFPVHALSLARYRQAFWPSGAKDDPQDAELALDLMLRYPHKIKAIEVDNPDIRLLQQLVEQRRLLVEDKRRFVNRLINTLKQYYPQPLEWFSHRDSSLFCELIIRWPSLQQLKRARSDTVRHFMNAKGGPAVAYTEQRVASIASAIPLTTDKTVIEANALMATALASQIKLAGDLIRTYDERIESLFDTLPDEELFKSLPGMGPCMGPRMLAALGDNRDRFNSAEEIQNYAGIAPVTERSGQKSWVHWRWQCAKFVRQTFVEWTAKTVNSSYWARLYYQSQREKGKSHQSAIRALAFKWIRIIYRCWKTRTRYDEAKYLLALEARKSPLLKP

SEQ ID NO: 428552 - protein, 352 aa, unidentified
MSQNSNTSIAVAGIDIGKNSFHIVGLDQRGAIVLRQKWSRGQVEARFANMPRCLVGMEACVGAHHLSRQLKALGHDARLMPAKYVRPYSKGQKNDFRDAEAIAEAVQRPTMKFVATKTADQLDLQALHRVRERLVSQRTGIINQIRAFLLERGIAVRQGQRFLRAELPRILPTPPDVLSIRMVRIIENLASDWHRLDERIEGLSREIEALARQDAGCERLMSVPGIGPIISSAMVAAIGRGDAFGKGRDFAAWLGLVPRQMSTGDRTILGKISKRGNRYLRVLFVQAAWVVLIKPKSWERHGLKPWIEAAKKRLHHNVLAIALANKLARIAWSVLAHGRNFETRTISVAAAQ

SEQ ID NO: 428553 - protein, 430 aa, unidentified
MPFVGLDVHRREVEAAIVGEDGGLQLRSRFPATREAVQEFAANFLHATDHVALEATTNTWGVVDLLHPHVAEVVVSNALRTKAIAQAKIKTDRVDALVLAQLLRCDYLPRVWEPDEKTRRMRRLTSRRASLVADRTGIKNRIHSVLHQRLIPAPEVDLFSAKGRTWLRGLALDEQGRQAVDSDLRLLDATETEMAELNGILARAGYEEPRVRLLMTLPGIDLAVAQAIVAALGDVSRFPSGDHAAAYLGIVPRTHQSGDHCYHGPITKQGKGHVRWLVVQAAQHLATHPGPLGVFFRRVAKRKNRNVAVVAAARKLVVIAWHMLRSNEPYRYAVPKLTEGKLARLRVAATGKRRQGGVPKGSARPASYGTGNPTRGIRSLDQAYEAEELPPREPLAAGEEAMLAAAGVIEFVRSLAQPKREPKRRKAAAE

SEQ ID NO: 428554 - protein, 320 aa, unidentified
MTYIGIDVSKDSFVSAYPSKSGYTTKSFPNTTSGVRRFISSLPEDCHCVMEATGNYSMLLLYLLQQADITVSMENPQKIKHFARAMLSTTKTDEIDAKLIAMYGEKMEPAPYKIPSESIILLKQKRTVLRQLKKQLLMMTNLHESMAVLPKQDPTSKASIEQTIRFLRKQISKMEEEITNISNKEYKRQMTLLTSIKGIGDTIASALIIATGGFTYFSSAKQISRFLGLCPTYQQSGTSVNVKGHINRNGDTYLRSQLYIAAMSSIASNSACREAFLKMKERGKSGKVALIAIANKLIRQAFAVVTNNRPYADGYVSSFA

SEQ ID NO: 428555 - protein, 390 aa, unidentified
MIYVGIDVAKTTHYAAAADSDGVVLVEPFAFDNDAPGFAKFISKITSFPKEQSVIGLESTGIYSENLICFLFDSGYKLAVINPIQIATLRKTNIRKTKTDKVDTLLIIKSVMVNSYRLYTEQDTQSLKLKSLCRFRQSLKKSKARLKIQLSGYVNLLFPELLSFFKSGIHISTCYTLLKRCSSPAEIAALRLDSLSRLLSNASRGRFSRSTAEALKSLAKSSVGVKNPYISIQIAQTIQQIELLEQQIDEIEKVIKDTICELDSVIMSIPGIGAIDGAMILGEIGNIDRFASPAKLLAYAGLDPTVCQSGKFKARSTKMSKRCSKILRFALINSAWQLTLKNDTFFNYYQLKLSQGLSHYGALGHVAHKLVRVIFTLLKHNVLFDPTRLV

SEQ ID NO: 428556 - protein, 430 aa, unidentified
MHNKNYISVGIDVGSAFSFMTILAPDETVILKPFKITHNNKDSLERAVSEIKKAEDLYSLESRTFLESTGIYHFPIFCYLVDCGFNASIINPIITHSTKNGNIRKVKNDKIDSKGIAKLGLSKDVPVSQFPEKLVLELRSLTRKYYDLTDERSAHINKLKGDLHTVFPQYLDIFCDVTGKTSTMILRQYGTPDKILRGHKKTMIEKISKASRKGLAKASERYEKLCAAANAAKTFGCQIDSIYFNISLTLDLVEKLDSALDSILNRIRQLITFNKNEKFIQQIKLLNTIPGVGFLTAVTIMCEIGDFSAFRNPKQLFAYFGLDPEVNESGKFVGTQLHMSKRGSRIARRAIFAVALASIRTKRNGEGINPYLRKYYELKSGQKPKMVAIGAVMHKVCNVVFAVLRDEKAFELRSPEEHCKQYQRPALAAA

SEQ ID NO: 428557 - protein, 430 aa, unidentified
MDHQFRYFVGIDWATQTHRVALLDSEGRAVEQYNAAHSGEGLAALVEKLKRRTACDPAEVAIAIEVAWGALVETLMESGFSVFSINPKQVDRFRDRFTVAGAKDDSRDALVLASSLRTDRKSYKRVEVESPDILRLRELSRFEEELKSELRRMTNRLWQQLHRYYPQMLSLSPAADDPFIWDLLRTAPTPKQGAKLRRVQVQRILAGNRIRRISADEVLLALKEAPLVLAPGAGEAACEHVLLLLPHVSLLDRQLRDVGLRVKQLLERLADPGTEPGGLPCDAALMLSIPGIGPAIAAALLTEATRPIRERDYQAIRCYAGTAPVTKQSGKRKTVNMRYACSPRLRQAVYHWASTSINCDKRSRQQYDDLRASGHHHARALRGLADRLLRILISMLMQGKTFCPLRRQGSLPQPSSTDAAVGTLQLQPGV

SEQ ID NO: 428558 - protein, 332 aa, unidentified
MNAVGIDVSKSKSVIAILRPYGEIVSPPFEIKHISGNIQSLIEQIKSIDGESRIVMEHTGRYYEPLAHELSQANLFVSDINPKLIKDFGDNSLRKVKSDKADAIKIARYALDSWTDLKQYGLMDKIRNQLKSMNRQFTFYTKHKTSMKNNLIGILDQTYTGANTYFDSIARNDGSQKWVDFAATYWHVDCVRKMSLNAFLDHYQKWCKRKKYNFSKAKAEKIYGTAKELIPVLPKNDLTKLLIKQAIEQLNIVSKTVEELRSLMNETASKLPEYPVVMAKKGVGKSLGPQLMAEIGDVTRFTHKGAITAFAGVDPGMNQSGTYDQKSIHASK

SEQ ID NO: 428559 - protein, 407 aa, unidentified
MELPALFPCVVGLDVHQAKISACAMLEQPDGTVRVEQREFGGFKRDRRALAEWVRTLGPDLVVMESTGIYWKSPYAALEQVGIAAWVVNARHVKNVPGRKTDVADAQWLATLARAGLLQASFIPPADIRHLRLIARQRQKLGGMLASEKNRLHKLLADAGIRLNVLVSDLHGQAGRAMVKALIEGQPLPEILDLAGRLRASREDLFEALQPEELSDAHRFVLSELMAHIEELEARMGRFEQRLLGGLSAWEPQLVLLQTLPGVDRIGAAMLLVEIGTDMASFGSAEKLASWVGICPGNNESAGKRKSGKTRKGNAWVRRLLCEFAQAASRSRCGLKEKFQALSIRKGYKKSIVALAHKMLRIIFAMLKNHTPYQDQAVDYEELLVQRNAPRWIKMLVKHGYIRTASA

SEQ ID NO: 428560 - protein, 403 aa, unidentified
MDYSTLFVGIDVSKLKHDIAIVNEHKKVVHKPFVISDSRQGYQYLVNKLNWLKQTYHTQRFKIGMEATGDYWKNLYHFLKNQSPYVEVTVINPVQTRAFAKSELRRAKTDAVNAKDMARYMVEKRPAASVARPLIYEYIKDIDTQIYAEKKQLTMSINKLRIELGKVAPEIEHATARLAGQQILALLKHYPTAESIASASVEQLCALRYGEKQWTLPMAFIMKIKTLAENSIAYKIGPGTGIVVQSLIRRIMGHQQEIDALQTQMIQLHQHIKPHKSVLASIPGISCQTAIVLEAYIGDVKRFASAKQMVAYFGMNPTINRSGKSIKRVSYLEKKGSGIVRHKLFMAVLTNIRHKRGPIYEYYKRLVAAGKSKLVAIGAAMRKLLVIIYTMLKNQTEFDPNKK

SEQ ID NO: 428561 - protein, 333 aa, unidentified
MQEVVVGLDLHLKKTQGTVMAMNGKIVKQERFETNKEKLGEFLKGLPGGTKVALESVGFCWPWIDYIEDLGHEPLLANPLKLKAIAEDVKTDRIDSEWLAKLTRMDELPTVYVPSKEMRQLRSLLRHRAFRRKISTALKNRTWSEFRKRDIEFGADLGTIKGRRMAGCTGIYEVSQNLEILEVVESQIRQIEAGLKERYGEVEPVRRMQSIPGFGFLTSLTLYAEICDIRRFRNPDKLAHYTGLVPRVRQSGEHTRFGRETKANRWLKWVLIEAAWSHINWCPNGRLAKVYECAYRRKSDAKKAIKIVARKLVNIVWEVWTYGKEFAMIPDKV

SEQ ID NO: 428562 - protein, 406 aa, unidentified
MEVMYPRCSGLDIHKKSVVACAITPGGQETRTFTTMTRDLLELKGWLLGLGVTHVAMESTGVYWKPIYNLLEDKLTLLVVNAQHIKAVPGRKTDVKDAEWIADLLRLGLVRGSFIPDRHLRELRELVRSRRSLIRDQSRIINRIQKTLEGANIKLSSVATDVVGVSGRLILHAMIDGVSDPKELAAMARGRLRQKSASLEESLLGLVGPHQRRMLESQLGHLDYLDKEIAKLDDDISESMGPHQHIIDQFDTVHGIGKRGAQEILAEIGPDALSRFPDAHHLASWAKICPGNNESAGKHKSGRTGHGNPWLGSVLVEAAWAATKVRGSYFSGLYHRLAGRRGSKRAIVAVAHAILVTLYAMIKNGTVFQNLGEHFHDLLNETKVLNRSVARIERMGYDVLVTKRAV

SEQ ID NO: 428563 - protein, 312 aa, unidentified
MPQDRVFVGVDVSKDRLDVAVLEGEAFSVSNDAAGLRDLVRRLRAARASLIGLEATGGYEKPALEALVAAGLDARLLNPCKVRRFAQACGVLAKNDRIDAALIARFVALMPSRSARIDPAAARLAELVDARRRLVEEQARLDNAARLVRDPVLTRLAQRRRQRTRLDLVLIEKRLTQLIAEDADMARKDALLRSVPGVGPVLAWTLLARLPELGDLDARQVAALVGVAPYDHDSGARRGRRAIRGGRPIVRNVLYMAALVGARFNPALAAMKDRLAKTGKPPKVVLVALMRKLITILNAMLRDNASWRAAIA

SEQ ID NO: 428564 - protein, 352 aa, unidentified
MKNDRISFEGKTVFVGLDVHKKTYSLTAIVESSVVFKMTMKADFKALATMLLDRFKGAKLIHVAYEAGFSGFGLQRYMQFKGITCSVVNASSIHVAVNDKVKTDLRDSRKIAEELSCGRIKSIYIPSRKEELKRQITRRRGQIVQMRAQTSQQIKSFLMFNSLMDIDDSRPISRRYLKAIQEKVEGIDELEYVVRSYVHQWETFTLQLLEFRKVLQKQGDDEKHVHAIYESTPGIGLISARILANELGDMSRFSNEKKLFCFLGLTPCEYSSGENVRRGHISRQGPSRLRALLVEVAWRAVTVDGGLKLTFDNLKKRIGAKKAIVAMARKLIGKVRACFRTNTPFRLSVATP

SEQ ID NO: 428565 - protein, 370 aa, unidentified
MKPNFEPGKWFMQCVGIDIAKGTFTACLCMYEFDQGCSTAPVVFNNDKTGFNKFIKWSRKEALRGYPLRYVMEPTGVYYEQLAAHLSKLGLDVCVVLPNKAREFAKYEGILTKTDDMDAYTLGMLGCLDKRLKPWTPPSPIYRELRQMTRFVADINKVKTELRNHLEALTHSETAEKSIVKHYNKLIDEIDKQLVSNQKAIREKIKQEPGLSERIDRITTINGVGFMTVATVVAETNGFALITNRKQLTRYAGLDVPAHQSGPVDPKRHISKQGNVHIRTALYFPAIVSTQCNPQMKDFYGRLCARNTQSKMIGVTATMRKLLLLIYSLWKSGEKYDPTRDKPACNRQKKEAETTEGQPHGIDVGTLAEE

SEQ ID NO: 428566 - protein, 350 aa, unidentified
MIIGVDYHPSFQTIAFFMEETGECGEQELKHSDGQAEKFYRDLKQRGICVRAGMEATGYSRWFERLLAELEFEVWMGDPAEIKAKRVKKQKFDREDARLLLRLMRENNFPQIWVPGPENRDLRQLLWHRHRLVQMRTRIMNQLQALAMNEGYRWKKKLFSEQGRAQLEKLALGPWASRRRQELLELLDRMNPTIEELTAAIEREARKRPEALRLMTHPGVGPLTALAYVLIIGTPTRFQRGKQIGTYVGMIPSEDSSAGKPRLGHISKQGNSLLRFLLVEAAQAAARIQPDWRRRYIHLAMRRHKSIAKVAMGRKLAIQLYWMWRNGCEYSPSLEFGSYAGQLGTGHGVK

SEQ ID NO: 428567 - protein, 350 aa, unidentified
MIVLGADTHKSSHTIAGVDTATGQVLGDRTVAVGARGFAALVLWARGLDGERVWALEDCRHVSGALERFLICRGERVVRVSTRLMAGTRRSSRERGKSDQIDAVSVARAALAAGIETLPTAALAGPELDIRLLVDHRERLVRTRVALNNTLQWNLHDLWPELTLPGGALFSKKWTTKIARRLARAEQTMRVRIARDELRRMRELTQAIKALQAEITVLVTEIAPQLVAEPGCGPLTAAKLVGEIAGAERFTSDAKLARAAGIAPIPASSGRTDRHRLDRGGNRQINAAIHRMAVTRARCDPETQDYIARKKTEGKTQRDAIRCLKRHLARRIWHLLQPPTPSETSLNLLT

SEQ ID NO: 428568 - protein, 342 aa, unidentified
MQISTIGLDIAKNVFQVHGIDANETVVVRKRLRRSQVLAFFKALPPCLIGMEACATAHYWARELTKLGHRVRLMPAKDVKAYVKRNKNDAADAEAICEAVRRPTMRFVQVKSAEQQGQLMQHRTRDLLMRQRTQSINALRAHLAELGIVAAQGDKGVKELLAIVADEKDARLPIDARASVIVLAAQLQAVQTLIGSIEKRIKTQHRSNEASKRLETIPGIGVIGASAITATAADPTVFRSGRDFAAWIGLVPRQDSTGGKQKLGPISKQGDRYLRRILIVGAISVLRRAQENPGKYPWLTQLLARRPFKVVAVALANKMARMAWALLAHGGTYRAPVLAVAA

SEQ ID NO: 428569 - protein, 343 aa, unidentified
MGVFAALDVSQDQTAVCVVDADGTIVCEAKVDTCPDAILAWLERWSGELENVGMETGPLAVWLWNTLSAKGLPIVCIDARHASGVLKMMPNKTDRHDARGLAQIIRTGWYKSVQIKSHGAYVVKSLLASRDALVGIRVKLENEIRGLLKTFGVMFGKRVGGFMRRAEEIISGDLALTPELLPIFEALVSARCAIRERIRTLDAEVRAIVRRSETARLMMTVPGVGPITALAVMSAFDDASRFQRSSSAGAYLGLTPRRYESGEISRNGRISKRGDKMTRTYLFEAANAILTRKIGGSRLRDWARAIAERTGPRKAKVALARKLAVTLHAMWRSGTPFKEEPMT

SEQ ID NO: 428570 - protein, 317 aa, unidentified
MVKEARVASEPEAFIAWFAELGLEMTAIGLEAGPLSQWLYAAMVEAKLPAVLLETRQVRDAFRSMPVKTDRKDARGIAQLMRLGWYRRVHCKSPVAQENRTLLAGRKMLQTRYIDLEMCLRGLLRGYGLKVGPTNRKTFDGRVRELAASVPGLENTVDALLKARAALLEQFRRLDGLVNSRARQDERAQLLMSVPGVGALISLTFVSAIDDPARFRSSRTVGAHLGLTQRKYQSGETDITGRISKCGDQEVRTALYEAANIILTRPVKGSQLKSWAAKVAARAGMKKAKVALARKLAVIMHRMLCDGTFFDPKLAAA

SEQ ID NO: 428571 - protein, 469 aa, unidentified
MEQGRIPVMLRARKAVWSGHRCEPKTVAPLCGMSTRSRLVVFRCPPPLSSTGEEEHTMEPIYTSCCGLDVHGKSIQACVRRIGKDARIHQEVRAFGTMTKDILALADWLSSEEVTHVAMESTGVYWKPIYNILEGRFTILLVNARHVKNVPGRKTDVKDCQWLAQLLQCGLLKGSFVPDRPQRELRDLTRHRTQLVNEKSAVINRIHKILEDANIKLGVVATDILGKSGRDMIRALIRGEKDPGEIADLARKQLRGKIPELRSALEGHVTDHHRFILRELMDHLEYLEGQIERFSQRIEEVSGPFEEAIEEVARLPGFEKRSAENVIAEIGCDMGRFPSEEHLSSWAGMCPGSNESAGKHKSGKTTKGSRWLRATLCQSAWAASRKKGCYFQAQYHRLAGRRGKKRALIAVGHSLLVVIYHVLNNKTGYKELGADYFDKLNSKRLVPYLVKRLKNIGYEVNLVPCQKAA

SEQ ID NO: 428572 - protein, 408 aa, unidentified
MNTLYVGIDVSSKSNVVYLMLPNGDKHSNFSVANSHEGSTQLVKRILSALTSHSLDTVLIGLEATSVYGDNLVYFLREDATLAPFNRKIHVLNPKQVKKFHDAYNDLPKNDYVDSFVIADCLRFARINKEVYMGDYRYKALQNLTRARFFAVQNLVKEKQRFMNVLFKKYSTMTQEKVFSDTFSTTALAVYDEFESAEALANMDLHELTDFIIEKGKNRFPDPDAVAKAIQKAARSSYRLPKTVNDSVNQVLSISITSMKALESQIKEFDKAIKAQMELLPNVLISIPGIGPVYSAGIMAEIGDINRFNSQAALAKYAGLAWKQHQSGGFESEVTRLIPSGNRFLKYYLFEAAFSLVRCDKEYSDFYHLKYKEVNRCQHKRALALTARKFVRLVFRLLKDNRLYCPAK

SEQ ID NO: 428573 - protein, 369 aa, unidentified
MAKASTFVGLDVHKNSIVIALLRPGQATPLEWKVRNEPGAVQRLIRKLEHEDGVQCCYEAGPTGYVLKRQLDRAGISCQVIAPSLIPVKPGSVIKTDRRDARKLAELLRAGMLTEVQPPTEDEEAVRDLTRSRDDAQRDLTRARNRLSKFLLRRGCVYAIDRKPTWSQKYRSWLRALRFERVADQVVLEDYVLAAEQVEGRLEALTDRIEQFAEQEPWRERVQALRCFHGINTVTALALVAEIHDPRRFAHPRRLMSYLGLVPRESSSGMRERRGGITGAGNRHVRRLMVEAAWHYRHKPVVGRALRLRRREQDPKAIALADRALRRLTLRQRRMLYQGKHPNLVNIAVARELVGFVWNVLHTRATAQA

SEQ ID NO: 428574 - protein, 354 aa, unidentified
MRIIGAFDVHRKQITYKWLDTETGEIQRGRIMPGVRKAVREFLVPFEGLDAHFALEATTGWRFVAEELSRVGLVAHLAEPADTAALRGSKRRAKTDRRDCDHMMDLLGTGRLPESWLPPAHVLEIRTLVRLRKALTDTRREWQQRVQAQLFHQGVPRIPAITTQGRAQLAAVDLSAAGRQVVTTGLAVIDHLDYQLAPLDTYLVRFAKVQPGCRALKQRLFGVGDLTAVFIWAELGDCVRFSSSDDAVRYAGLDITVYESADKRPPGHLSRQGPEALRWALYEVAQSAARSSSPDYAYYLAVKRRLNHKRACLSVARKVCRRAHHLLRSFGDDAFAPVKGSVLPSFDRPAMATA

SEQ ID NO: 428575 - protein, 419 aa, unidentified
MENHNTKKVRRVNEKTLIVTVDISKIKHTGYCRCPDGTEVKPFDFFNNGRGFQEFWGRVCQTMKVYQLEEVVVGFESTGPYGEPLFHFLKSKGVKLVQVNPFHTKRLKELQGNSPAKTDQKDPKVIADIIELGHALSVVIPEGVSAELRRLTHARERSLQRRTALLNQLQDLVFLIFPEFLQVMKDIKGKTSQYLLSQYPIPEDILAKGVDDLTQILRKISKGKLGRGRAEELYRVAQESVGIKEGRRGIVLEVTECLLAIGASERFIGAVEKEMADYLREIPYSRCILSIKGVGKVTVAGLIGEVGDFGQFRTLSEITKLAGLDLFEISSGKRKGKRRISKRGRSLLRKLLFFASINTVRRGGVMRETYQRYIGRGIPRKKALVAISRKLLRVIFALVRDHSQFSKDDSVSYQFEEAA

SEQ ID NO: 428576 - protein, 340 aa, unidentified
MRFIGVIPNTPEAVHKMAKQLTRHGELDFCYEASGCGYGIHRQLTRLGHKCTVAAPSMIPRKPGERIKTDRRDSEKLAIPHRSGDLTPVWVPDTTHEALRDLVRARVDASMHLMRARQQLLAFLLRHGRSYPTGKHWTQRHRCRLAGQTFQEHAHGIVFQDYLETVWTAQQRRDALIERISAMVGSWSLGPLVEALRGLRGIDMISAATFIASTGDLSRFESPRLLMGYLGLVPSEHSSGGTIRRGGITKTGNREARRMLIEAAWSYQYPARIAKEKAEILVRLPKNVRDIAWKAQTRLCVRYRSMIARGKKPTVVVAAVARELAGFIWAIGQEIRSNLA

SEQ ID NO: 428577 - protein, 338 aa, unidentified
MNLYVALDVSLEFTAVCVMDEEGELVLERKVASDPAAIAGLLFELPERPSCVGLEAGPLSEWLARGLAQAGLDAVLMETRHVRAALSAMVAKTDRNDARGMAQLLRMGWFRPVHRKTMNAREQRALLAARSTLGRRLRDVENSVRGILRGFGIRVPRLPRGRWSDGVRGALQGNTVLRGVVEPLLAATQALRDQLAVVDKRARDAARQDAVCRRLMTMPGVEAIVALTYRAGVDQAERFKSSRQLGPCFGLTPRRYQRGGTDRSGAISRAGDASVRVALFEAAHLMLTRSTHWSKLKAWAVAVAKRRGAKRAKVALARKIAVILHRMWIDGTEFRFVA

SEQ ID NO: 428578 - protein, 322 aa, unidentified
MNTSAATPASTPTAFIGCDVGKSEIVVFDSRTRRSQTLRNTPAILDDFAQRLDAACLAICEATGGYEAELLHALAGAGRAVHRADPAKVRAFIRSFGTLGKTDCIDAQALAVYGAERHSRLPLWQPPEAARDRLHELVMLRRDLVEDRTAWHSRAVAPGAAERDGYIRPVLTCLEDSIAAIDADIAAIIASSQSLRRDADALCEIPGIGLRTAAALLALMPELGSLTRRQAAALAGLAPHPRQSGASNAYRRAKGGRPELKRTLFMPAMVAGKHHPELRAFRQRLLEQGKKPLVVLVAIMRKLIVIANAVLRDANRRSLVRA

SEQ ID NO: 428579 - protein, 351 aa, unidentified
MRKIAYLGMDVHSNHCVLGDMDAKGNFRGAQTFCTSEQSIIKALQDVKATEKYLTLEEGNLAYWVAQVAAPYVTEVIPCDPKENALIYKGSNKNDKVDTKKLCRLLRLGELKRVYHPETDERAIFKAAAQHYIDLRDQQISLKQKIKAMYRHWGVIDVAGEAVYSPKKRDNYLCQIKHLAIRNEISRLYYLMDQTESMQERALKAMKQLGRKYPEIKQFQKMPGIGEVLSHIFDAFIQTPLRFPDKHKLWRYSRLGVTDRSSDGKPLGFKRLDRSGISELKSLTYQAWMSALRSDNEVKRFYKNSLERTFSRVHARLNTQRKIIATMYGMWKRGEPYNPKLFLDSPQSGVV

SEQ ID NO: 428580 - protein, 341 aa, unidentified
MNIITVGIDLAKNVFAVHGVNDSGKAALVKPKVQRADLLPLIAQLPPCLIGMEACSGAHHWARLFRQYGHTVKLMAPKFVAPYRMTGKRGKNDAADAAAICEAVTRPNMLFVPVKEEHQQIILCLHRTRQGFVEERTASYNRLRGLIAEFGIVLPQKVVCLRREIGAHLEELPGYANLCVGDLLAHADELDKKISEYDRAIAKAAREDARSKRLMQRPGIGPVTASALLASIGCGHDFSSGRQVAAWIGLVPGQYSSGGKARLGRITKAGDSYLRSLLVMGARAVLNSLGDKQDRFSRWARSLQERRGYWRAVIAIAAKNARLAWAVLKYGEDFKGEPGKD

SEQ ID NO: 428581 - protein, 351 aa, unidentified
MTCKKDVAVVRTIGIDTGKNTLHMIGLNEKDAIVLREKVSRDRIAARLVNIPPCLIGIEAGMATHYMSRDLLALGHEVKQVPPAYAKPFRQGHKNDFRDAHAVAEAVQRPSTRCVPIKTDDQLDLQALHRVRSRLIGDRTAVINQVRGFLLEHGIAVRQGPRSLRQQLPQILATRTDVLSPRMLRIIEDIVHDWRYLDDRIERVTDEIEGLARTDVNCGQLISVPGIGPIIASATVAAVGNGTAFAKGRDFAAWLGLVPKQMSTGDRTILGRITKRGNRYLRMLFVQGARAILLRPKSWAKYSFGPWLMAAARRLHRNILTIALANKLARIALTVLVQGRSYESRIVPAAA

SEQ ID NO: 428582 - protein, 419 aa, unidentified
MSNRNRWMRVSAIGLDVHYKFSSVTMRDKEGKVVARESLEHRDRAALRQRLSQWPKGVPAVLEASFGWGWLSDEMAAVGIDVQLSNCYKVEQMRKARGGAKTNKKDADLLSLLPGEADAWWRIWLAPPEVRDQREWMRYRSDLVGMQTQTKSRIHAVFHRHGIFHDFSDLFGGKGRIFLAELCREGRHAGGQLPPGSLAALRGQVRLLDQLRGQLGEIARRLRRELERDELTRRLASIAGFGRVLSHVLKAEIGQIERFGGNHNRLASYSLLGPRAMETGEQDPTKTPLGRHLGHRGNRTLKWAFIEAAHAAVRHGGRFGAMFDRVTQGGTKDRNRGYIRVARELVKVVTAVWKNGTTYQEIPPARPGSGNSRKGSGSWDACSKSTVASSPRKQMEKFLGNTRSGTGQLYHPMVVAAQA

SEQ ID NO: 428583 - protein, 427 aa, unidentified
MKSNTQNKKIEAITEKTLVIGIDVGSETHYARAFDYRGIEFSKKPFKFSNSEAGFEMFKAWILDIKEKHEKDKVVPGMEPTGHYWFNLGKFLQDNEVKPVLVNPHHVKKSKELDDNNPTKNDRKDPKVIAGLVKEGRYMIPYLPDGIYADLRTASNMRFQIQSELTRVQNRISRWFNIYFPEYKTVYGKPDAISGMMILKKAPLPEDILTLGVEGVNQIWRDAKIRAVGKKRAQTLVEAARHSVGTKEGATAARIEIRMLLEDYESRNNRLQEVMFLIEELVKQIPMAEKLMEIKGVGIKTVSGFLAEVGDITRFSSPKELQKLAGLALVENSSGKHKGQTTISRRGRKRLRYLLFEVAMSLVGKNPEFGTLHHYYTTRKVNPLKKMQSLMAVATKLIRVFYAMLTKGVEYDSAKMLGDIKRPAVYM

SEQ ID NO: 428584 - protein, 341 aa, unidentified
MTLYIGVDIHARQQTLSYLDTEDGTTGQLELQHERDDVKGFYSKFEGEVIVGIEACGYTNWFEELMEQLGHKLLVGDAAEIRRLARRRQKNDRRDAELLLDLLVHNEFPALFRYSQESREVLRQLRYRHKLVKLRTMVVNTLHALAINCGLSLRAKLLTRGGRQQLRGLQLSVISQQQRDELLSLADELTRRIQTVEQWLQTQAKSDARVQRLQTHPGVGLLTSLCLVHTLGDLSRFSSTRKVAAYVGFDPMEDSSAERKAYGGISKAGSRLLRYLLVEAGQTAAKDDEHLKQFYRRLLPRRGKARAKVAVARKLLIRCFIMGRAEIDYAEFLRRGQQEAE

SEQ ID NO: 428585 - protein, 426 aa, unidentified
MPQPNDLSRSLVALDHNSTIIAVVELSQSSWLVGGMLPGIERQPRKKLEPSPERLLAVLHRWRDEAIKTGGNITRIALAFEAGRDGFWLARWLAARGVEAHVIHPSSVAVSREHRRAKTDRLDTELLKRGFLGWLRGERGHCSMVRVPTLAEEDAKRPNRERECLVKERTRLVNRMKGALARLGIRNFRPTLRKAAEHLAALYTPEGSPLPPNVAAELERDIARLGLVIGQIKQIEEARRQRLEEEPESRPHAMVRLLVRVVGIGTETADMLVNEVLSRPMRDRRAVARYAGLTGAPDESGAKRREQGLAKAGNARVRRGMIPLAWRFLRFQKDSALARWYQARTADRRAATRKNDDRRTGAQTAHRTLALCHHWRDAGGRRLTSSSLKGVTGTSIATELFGARAGFRRTAELTIRVVGSRDSNWL

SEQ ID NO: 428586 - protein, 418 aa, unidentified
MKVVYPICCGVDVHKTFLVATIISTTKEIEPHYMKKRFSTFNNSILEFKKWLLDNHCHDVCMESTGKYWVPVFNLLEDSVNVTISNPKWVKAVKGNKDDNKDSKWIGDLFRIGLVPGSYIPAKPIRILREYTRYRYKLTSCKSSERNRFQNAFTVCNVALDAVVSDMFGKSASSITDYLITSDEFNPNTCASLLQKSLKKKTNTVIESIEGYQMTQPQKERMILIRSHLEFVEKAIVELDKKLDKLAEPYENAIQLLCTIPGIERQSAIIIISEIGMDMTQFASSKRLCCWAGLTPSNNESAGKKKSVRITRAGVYLKPALVQVAHAAVTSNISPYYKNKYERILKRRGKKRAIIAIARMILTAVFQMLSTGEIFNPCDLYKIDMPQDLKEKQKEKAITNACKLLTSLGMIIAPSQSL

SEQ ID NO: 428587 - protein, 401 aa, unidentified
MKEFNPEQHRIETASALEVVRNAGGMEVYAAYVGLDVHKETIAVAVAEPGREEPIYRGEIANKPKTVEKLLAKLSEGYDGGLLLFCYEAGPCGYVLYRQILACGHDCQVVAPSKIPKTPGERIKTDRRDALKLARLLRGGDLTAVWVPDQEQERMRDLSRARDDMKAQERKARQQLNAFLLRHGHHWPRGKTRWTPAHENWLAELKMDHPWQQVVLQEYIDAERAAGERVAQLTDHLMRALPEWSLAPVVDSLIALRGVDKLAAIVLLAELGDISRFDSPKQLMAFLGLVPSEHSSGPRRRQGGITLTGNGHARRMLVESAWSYRFPARQTKHLKGKARNASPQAKKIAWTAQTRLCGRYRTLTRAGKNTKLVCVAIARELAGFLWDIVRHEMPRLAPQEG

SEQ ID NO: 428588 - protein, 358 aa, unidentified
MRQVTRKSAKDKGVPVGRSDAVYVGLDVHKRSIHAAVRVNGREVETGVLPARAGAVLAFLEPYRLGWKQVVYEAGPTGYGLVRRLRRAGVPADVVAPSKTPRTPGVSSKSDRLDCRALARFDEAGLLKRVAVPTAQEEADRQVVRLRDQVVDKRRRVKQQIKSFLLQHGLGEPPGLSHWTRASVAALERMTMSATLRFCLDMLLRDLANLEAMLGEVNRAVRRLSRTRRHAGRVDRLMKEPGVGPVTAMEFVTEVYQAQRFTSPREVAAYVGLAPRVRQSGERRRDGPLLKAGRGRLRAMLVEASWVRIGHDPLAKATYRRLVHNTGCPNKAIVGVARHLAIRLWRLLTCPQTDAPTA

SEQ ID NO: 428589 - protein, 346 aa, unidentified
MKIRIIGIDLAKAIFQIHGVDEHGKVVLRKQLKRKDIAKYFANLEPCLIGMEACGSAHYWARKLERYGHTIKLMAPQFVKPYVKTNKNDMADAEAICEAVSRPNMRYVSVKTVEQQAILSVHRARQGFVKARTSQSNQIRGLFAEFGIVIPQGIQSIMKQMPEILEDGENGLPGMMRNLLERLTENLKELDRQVDELEKQIVLWHRENEASRRLAEISGIGPITASAIVATIGKAKEFKSGRQLAAWMGLVPRQYSSGGKQNLLGISKRGDTYLRTLLIHGARAVIRFVENKAETESWLRKLMTRRNKNVAAVALANRNARIVWALLANDRTFHPDYTSATIVAKM

SEQ ID NO: 428590 - protein, 341 aa, unidentified
MELFVGLDVSVRTTSVCVMDAAGKLIRESKVESEPEAIAELLHAVGGPYKRVGLEAGPLSQWLYSGLASAGFPVICVETRHMKAALSAQINKTDRNDARGIAQMMRVGLYKPVHVKTVRSQEIRMLLTARKFVQARIIDAENNLRGLLRNFGMKVGAVTRLQFERRIIELIEQSPQLRLVIEPLLEVRRVLREQYQKLHKAMERLAESDETCKLLMTAPGVGPFTALSFRAGVDEPARFDRSRSVAAHFGLTPSRYQSGEIDRDRGISKCGDRSIRSALYEAAGSLLCISKRSSPLKSWGLSVARRRGMAKATIAVARRLAIILHRMWVDNTPYRWEAKAA

SEQ ID NO: 428591 - protein, 351 aa, unidentified
MLIIGCDYHPSVQQIAFVDLETGETGERQLLHKDGEAERFYRDLKLRGISVRVGIEATGHARWFERLLAELGFELWIGDPAQVKAARVRKQKTDRQDAQLLLKLLVEERFPRIWIPSPENRDVRQLLWHRHRLVQMRTRVMNQLQAVAMNEGVRRKKALWSKSGRAQLESFVLSPWASRRRQDLLEVLDRLNPTIDELSTAVEEEAKKRPEVLRLMTHPGVGALTGLAFVLIIGSAERFACGKQIGSYLGLIPCEDSSANRQRLGHISKQGNTLLRFLLVEAAQAAVRGDAEWRRKFVHLAMRRDPRIAKVAMGRKLAVSLFWMWRKEWNYEQVIKFGSHAGQSDYVHGVK

SEQ ID NO: 428592 - protein, 568 aa, unidentified
MGYRARRVYHPLVGLPHEVSGNALTFAHMSLRVTPQRCAHFCLEETVELRVESVAVQTVKTGPPLVSMDPFASMVPIRRGFFIGGPFGTPFKSVPSSLLIGSGPFPFQETCTMSKRKQPQKMKVQVNALEQINPHAAGADIGAEEIWVAVPPDRDEQSVRSYPTFTADLHSLADWLQRCGIETLAMEATGVYWIALYEILEERGLEVCLVNARHLKNVSGRKTDVLDCQWLQQLHTYGLLSASFRPPEQIVAIRSLVRHRETLVQSRSTHIQHMQKSLTIMNVRLTNVLSDITGVTGMKILRAIIAGERDPKVLAQFRDDRCAKSEAEIAKSLEGHYKPEQVFILQQAVELYDFYDRQLQRCDAELEALYGQFSPPEDPATPPPTLRTQKRRKNQAHFDLAPALYRMSGGVDLTPIDGVDELTIQKVLSETGTDMSKWPTEKHFASWLHLCPNNKITGGKVIQRGVQPTQNRASTALRVAAASLHHSDSALGAYYRRIRARSGAPAAVTATAHKLARIIYAMLKDRQSYHDVGAHYYDQQYRDRVLRNLNRQATKLGFRLEPVAPASA

SEQ ID NO: 428593 - protein, 411 aa, unidentified
MENVFPCCAGLDVHKESVEACVRRIEPNGRVHSETHHWGTMTCDLLAMADWMTAQGVTHVAMESTGVFWKPIYNILEGRFTMLLVNARHLKQVPGRKSDVRDCQWIAQLLQYGLLKASFIPPRSQRELRDLTRHRTQLVEEKARAANRIHKVLQDTNIKLSSVATDVLGASGRAMLEALITGEEDPVKLADLAQRKLRGKIPQLEKALEGHLTEHHRFMLKLLWKQLAQQEELIAELDRKIEEQTRPFEAEIDRLDAVPGVDRRVAEVVLAEVGPDMKAFPTHENLVSWAGMCPGNEESAGKRVRKRITPGNRWLKRTLAQATWAASHSKNSYLAAQYRRLAGRRGKKRALIAVGHSILVIFYHMLKTGTTYTDLGGDFFDRLEPQRLTRYYVKRLESLGHKVTLESCAAA

SEQ ID NO: 428594 - protein, 589 aa, unidentified
MLPQSTTATQTRIGVGIDTSRYGHYAAFLRDDLHAAAGELQFVESAAGYAQLRQRFQEIDAKHGNVHFFIRLDAAGQYADNLLHFLRSLATPPTKVGGSPFTFTISCGDPIRNKNYRVALFGAKKSDPVEARATARYALTEQPAASAILSDAMRTLRQVAGRLQAVVRQRTRLINQFHHLLALTFPELALLIKDIATGWVLELCHRYPTARHLAQADADQLQQIPYLPHDRINALLEHARSSIASLYNDAVAELVRDQVRQLRDARARQLRLEKALADAYHALPEPNHLDTIPGIGAVTAAVLTAFMLDIERFDTPNKLVAYFGTMPIEVGSGVDRDGNARASKRYVMCRRGNDLVRRYLWMAALSAIRANPAVRALYARVLAKHPDRKAIAVGHAMRKLLHLVFAVWKTGKPFDKENYPWDTPAHVEVPGEPPASAGGGGPAQEQTAGLTLGEPAKQEVTAARSITSTVILPPPKPLDENAFLDFAHLKKQLPITRVLEHLGLASKLRGPGAQKRCACPIHRADGRGRTFSVHLAQNVFQCFEVSCQKKGDVIDLWAALHGLDLRAAALDLARTFDLEPTPATEKRNG

SEQ ID NO: 428595 - protein, 361 aa, unidentified
MKSTTIIAFDQHAATTVAAVLLPDHRTPALHSLTSDCAAIVRFVERFCRRGAVDCCYEAGPCGFDLQRALAAREIRCDVIAPALIPRRAGDRIKTDRRDAGQLAVLYRAGALTAIHIPTEQEEAARDVLRCREDIKADLLRARHRLSKFLLRHGRRFTGTKKAWSKRHDGWLREQTWPIAALDQTHRAYLRAVDEALARLRSVEEDLRALLTVEPLRPRVERLRCFRGIDDLTALTIAAELGDPRRFASAPRAMAFVGLVPSEHSSGTKQARGAITKTGNTHLRWVLVEAAWHYRHRPFVGAALRRRQQGAPAPIVAHAWTAQERLYRRYHRLRARGKPNQHVITAVARELTGFVWAALVQ

SEQ ID NO: 428596 - protein, 399 aa, unidentified
MGALWAGIDAGKRAHHCVVMDSDGVVVLSRRVDNDESRLLDLIGEVLTLADGDPLVWATDLNAGGASLLIGLLQAHAQQLLYIPGRIVHHAAATYRGDGKTDAKDARIIADQARMRRDLQPVRGGDQASTDLRLLTTHRTDLTYDRVRMINRLRALLLDYFPALEAAFDYSKKAPLTLLTGYATPDALRRLGTARLAAWLRARGCRGSAAMADKALAAAHAQHTTLPTQATGAVLVARLAAKITALDADIAALDAEIAEHLARHDDTDIIISMPGFGPLLAATFIANTGDLTAFGTADRLASMAGLAPAPYDSGRISGNHHRPRRYNRRLMRTCYLAALSSLKNSAASRAFYARKRAEGKSHKQALIALARRRLGTLWAMLRDRSTYRESAPAPLAPAA

SEQ ID NO: 428597 - protein, 348 aa, unidentified
MKYYTSTTEYNCGIDLHARQMYVCVMDSKGKKLVHTNVKNNDFAFFLKLIAPYRHDITVCCECMFGWYWLADACIEANLTFVLAHALYLRLIHGGKNKNDRLDSEKLAHLLRANLITPSYVYPSEKRPLRALLRQRIYFVWARAELLARIQSHQLAHNRPVLKQTRINRDPWLEQLLASEDHPLRQIAIKNDMAMIAHFDKQITHLEAELERQTKKVAARDFSLLRSIPGIGPCLGLTILHEIGDISRFPTVKNFLSYCRLVKGTVASAGKIKGLRGANLGNPYLRWAFGEAAVIAKRDHPIRPLADRLEAKMGGNKFKANTVVAIKLARSAFFMLKNKTAFDPERLA

SEQ ID NO: 428598 - protein, 402 aa, unidentified
MNNVAGIDVSKGKSMVCVMRPFGEVVLEPFEVLHTAQNLNDLAGKLKALDGETRVVMEATGNYHKPVAFVLHDAGLFVSVVNPVLIHDYDNNSLRRVKTDRKDAVKIANYTLDKWTRLRQYLPEDDTRLALKNCYRQYQQAVAVRTMLKNNLISSLDLTFPDANKLFSSPAKSNGCEKWVDFIGDFWHSECVSSLSSDAFAKKYLKWCQKHGYNFIRSKSDTIYACAVNAASLPKSPTSKLLIQQQVAQLKAVSQSVAAFQQEMLRLSQQLPEFDTVMEMYGVGPSLGPQLMAEIGDVRRFSSKKLLIAFAGIEPQPNDSGKIVGNDSGISKVGSAVLRRTLLLIMTVILKTQPQDEPVFQFMNKKRSEGKPYKVYMMASANKFLRIYYARVKAVMDSKHSK

SEQ ID NO: 428599 - protein, 432 aa, unidentified
MSPRLVSVRGLTQQRRDDEALSGLSRSRIVGRDSLSVSRELEGANGQMMIIGVDPHKSTHTAIAVDPQTNRAVASICIHASLAESRRLLAWARQFDQRRWAVENAEGLGRHLSSWLLARGEHVVDVSSAATARVRQLSRGAGRKNDQIDAAAAACVAALQGEGRPLQAEGITDALALLDESRMNLAQSRVRLVNQLHALLRDLLAGGAPTDLSAATAAALLRRVRPSGDAERVRKQIAAGLVGQIRSVDSLLKSNARQISELLAASGSTLTGTVGIGAITAGRLIGRTGKARRFPSSASFATYAGAAPVEIASADKARHRLSRGGDRQLNAALHTVAITQIRTPGSRGHTYYNTKLAEGKSPREARRCLKRRLADHIWRTMITDEQRAAGPGGHLGTTLQSSVAGPTPTTNSSDKSLPRPATHDSTTAKPAA

SEQ ID NO: 428600 - protein, 374 aa, unidentified
MGYHSEAFVGIDTSKLRNAVAIADAGRGGEVRFLGEIENTPAATAKLVRKLAAKYKRLTFCYEAGPTGYGLHRQIKGLGFECTVVAPSLIPKRPGDKVKTNRRDALSLAKLLRADELTAVWVPDGRHEAMRDLTRARETAMLDLRTKRQHVSAFLLRLGRPYPESRKTWTKAHMSWIASQTLEHPQQRLVLEEMMLAIRQAQERLQRLEQAIAAAVGEWSLAPLVTALMAMRGLDLIAATTLLAEIGDLSRFRTPTELMAYLGLVPSEVSSGDTIKRGPITKAGNRRARRMLVECSWSHPPRVGQAKQPKVDAAPPAVREIAWKAQCRLYRRYRTLIRNGKLKTVAIVAIARALAGFIWAVARVVTSTRFAAAA

SEQ ID NO: 428601 - protein, 422 aa, unidentified
MKNNAARKLRQVPEGYLIIGVDPHKKKHAAVAITQDLTIHDRFKVDNTREGLEFLLQRVKTEMVKSGSRGIMFAIETGGHYWRNIAYYLDERGVPFRFINQYTLKRRREGKDLNKRKNDYRDSEVAAQLLCTGEFVESGIPQGVYAELRTAHNAYRRLVKERTRITNLVKGLLDALFPEFVRVFKDPCGLTSLSVLSTCSTPGIIAEMTEDQFIALIEAAHHGRRLMRKKLGELRSVAKSSIGIKAGAHSVSVEIAFLIEKQKLIKGQIQTIERTLIKLVDASEEGKYLLSIRGIHYIAVAGLLAELGCFKSYRTAKQMIKMAGSNPTESESGGKRRSRTPMSKQGRPVLRYCAWTSVIPMLRLNPDFRAWAKERRERPAHANPLNGREVVGAALNRLLRLCFAMVKNKTYYRSPHLVQVSS

SEQ ID NO: 428602 - protein, 320 aa, unidentified
MAMSVLQSIIGVDVAKAEVVVYQIDTDELKIVPNIKSELKSWLKALPAGSAIAIEATNIYHLDTVNLAHSMGHKVYVVDGYRLNHYRKSTGGRAKTDASDARLLARYLKNEQAELRAWNPPPKIYTKLQSLLRRRAALVKMRVALNQSWAGELLLKASSKSVSACLERHEALIEKRILEAVTEAGLLHQIKRCQAVEGIGFLTAVALTMAFQRGEFQSADAYIAFLGMDLRVTDSGQMNGRRSLSKKCDGEIRRLLHNAASAGIRSEAWKPLYQQYLARGLKTTQALVIIARKLARIAFSLMKNQSEYQSKAVLRASPQP

SEQ ID NO: 428603 - protein, 409 aa, unidentified
MERQLERCGGLDVHKETVAACVRVGGRTGKAEQHVQTFGTTVSDLLVLRDWLAAHGVTHVAMESTGVYWKPVFYALENDFTCLLVNAAHIKQVPGRKTDVKDCVWIAQLLEHGLLRGSFVPPAPIRDLRDLTRYRKALIHDRTRVANRLHKALEEAGMKLASVASDILGVSGRAMLAALVQGTTDPAVLADLARGRLRGKLPALRQALASRFRPHHAFVIGQLLAHLDYLEEAIMTLSAEIERVMAPWAETLRRLDTIPGINQRTAEVILAEVGADMSVFPSARHLASWAALCPGHHESAGKHKSGKTRKGNRWLRTALIEAAAGASRAKHSALQARFRRVLRQRGPKKAVVAVAHALLRVVYHVLADGTVYREPGANSFDRHHSQRATRRALQTLERLGYRVTLEPAA

SEQ ID NO: 428604 - protein, 347 aa, unidentified
MRYFAGLDVSLEETTVCVVDDGGLIVREARAASEPEALVAFFRGCGLVMERVGLEACSLTAWLHQGLTEAGIVAICIEARQAKAAMGAMPNKTDRNDARGIAQIVRTGWYRAVHVKNPSCRSWRALLTARRMVLNKRRDVENGVRALLREAGLKVGTPSRKNFAARVGELVADDPVLAGLARSLLSVIEVMTQEVDRLTKRVLDEVRVEPTCRRLMTVQGVGPLTALAFRATIDRPDRFRRSRDVGAHLGLTPRRYQSGETDVQGRISRCGDELARTALYEAAHSLLIRSTKWSVLRAWGMNVAKRRGMARARVAVARKLAVILHRVWSDGSEFRWGKQVVTTTAAA

SEQ ID NO: 428605 - protein, 417 aa, unidentified
MAEVTFPQLIQRACGIDVHLKVVVATIDGAGIQRETRSFKTFTSSLNELKEWLLSNGVTHVGMESTGVYWKPVYKVLEDSIPNVWIVNARHIKNVPGHKTDKMDSEWICKLLLAGLLKPSYIPPKEQRQLRDLTRYRNKLIQQIASEKNRMMRILEDCNIKLSSVVSNTSGTTATSLIDMLCEGKVLTLDDINSVYHGKLSASPEELLEACTGFVEEHHIYLLQMIRKDIDQTQTLVDDLSERIKRLLSKYENVLELLREIPGFSTKVVEDLVSEIGLDMSHFPSEKHLSSWAGLSPGNNESAGKKSARITHGNKQVKAVITEAAWAATRTKNTFFSERYHRIAARRGKKRALIAVGHSQLISVYLILSTGSRYHELGAQYMQSKIEQKRKVYLSSELKKLGYNVSLTKVPQAVTLN

SEQ ID NO: 428606 - protein, 339 aa, unidentified
MIHPDVIGCDIAKAHLDFFDSGLERHFRIDNTPAAISAWLDGLDGRGVHIVFEATGRYDRQLRIALETRELPYSRVNPARARDFAKAIGLLAKTDAIDARLLARMGQSLPLSTQAPDDPARHVLARLHTRRDQLVAMRQQERTRLHETEGIERDSAESHMAWLDAEVARIEMACRDVLKAEKTLQEQEARLRSIPGIGPVAALTLIAHMPELGNRSAKAIAALAGLAPFNVDSGTSRGKRHIRGGRKRIRDALYMAALTASRMPRAFKSHADQNEGGRQALQGRHHCACPQIARHRKRHHQGQNNLPTNHLTNTVASQSKALGWKTLPDQPSNRARNIT

SEQ ID NO: 428607 - protein, 391 aa, unidentified
MVCVGIDVAKDKHDCCILDSDGMVRADCFTIPNNMDGFKQLLQTIRNCTKKSDKIKVGLEATGHYSYNILGFLLDNGLANYVMNPLHTNLYRKSLSLRKTKTDRVDARTIATMLLSDVDLKSYTDIAYHNEELKSLTRYRFDKVQECAKLKQSVSRLATILFPELEGLVSSIHGTSIYALLSEYPGAKQISEVHLTKLTNLLTTASKGRYGKEKAIQIREAARASIGSVMPAKSLELKHTIKLIQELASEIDEIEDSIQKIIDELNPPILSIPGMGVNSAAVILAEIGDFSNFSSPDKILAYAGCSPSTYQSGKLTNCYAHMEKRGSRYLRHALYNATKYVCYWNPVFAEYLAKKRAEGKHYNVALSHAMKKLVRLIYALQKSGKTYLTAA

SEQ ID NO: 428608 - protein, 394 aa, unidentified
MRFVGIDVAAERHVVAVVDETDRVLIKATPFSEDAEGYAKLLGLLGAPTDALVAMEATGHYWKNLVAALVAAGFAVALLNPLRTRRFAGEDLQRTQTDAIDAVGIARFAAQKRPPASRLPDRATEELRELVRFRDRLRQDFGDRVRQLHRLVDLGFPEFTRHVRDLGSELATALLSAYPTAAGFHDVPVRHVAALRYDGRHKVGDELAGALISAAGTSVGRHHGEAYRLQVRYTCEDLDVLRRRLRDLERDIDRLLEQHEIGRLLTTIEGIGPQTSARLVATFGDFSSFRSAGALASYVGAVPALKQSGQRTFQRASLTPIGAAHLRAKLWMPVLTAVRTNPWLRAYYERLIARGKLPKVALVAAMRKLLHAVYSVATHRRPFVANLATAEVRP

SEQ ID NO: 428609 - protein, 410 aa, unidentified
MDLLYQRCCGLDVHKDTVVACLRLVSDGKVTTEVRTFKTTTAALLQLSAWLAANNCTHVAMEATGVYWKPVWHILDDGEFELVLANPTHVKNVPGRKTDVNDAMWLAELLAHGLIRSSFVPDTQTQEMRSLLRTRKQLIREQSSHTLRVQKTLEDANIKLDSVLSDLMGQSGRAMIEALIAGETNPAKLASLANRRVRASHEELREALRGRVTKNHRFLLRLHLNQIDALDAAIATVDEQVEGILEPFRIAVELVMSVPGIKNLSAQVIISEIGTDMSRFPSDQHLISWAGICPRNDESAGKRRSNRLRKGAPWLKTTLVQCAWAAKNKKDSYLQAQFYRIKARRGPKKVIMAVAASILTAIYHMLKDGTMYQDLGRKHFDRRSNDQQKRSLVKRLADLGYTVEVKPLTP

SEQ ID NO: 428610 - protein, 423 aa, unidentified
MEIIYDRVAGLDVHKATIVACVRLTEAGKVSRECRTFGTTTAALLDLLAWLRESGCTHVAMEATGVYWKPVWNILSEGDFELIVANAAHIKNVPGRKTDVNDATWIADLLACGLIKASFVPGEAFQELRSLARTRKQLTSEQTRHVQRIQKTLEEANIKLDSVISEILGVSGRRMIEAMIEGVRNPAKLAALADRRLKASPKQLYDALHGRLTDHHRFMLRLHLDQYDALAAALGRIDQEVEAAVARIEEEGPPGRPTFRSLSGLLSTIPGVADRSGTAILAEIGTDMSRFFTDGHLIAWAGLCPSQNESAGKRKSSRLRKGAPWLKTTLVQCAWAAVRKKDSYYRAQFHRLRAKHGSKKAICAVAASILKAIYHMLKNGVEHRDLGANHFDRQSNDTKAKRLVAQLSNLGFQVQLQPIDQAA

SEQ ID NO: 428611 - protein, 335 aa, unidentified
MQIYGIDLAKEKFDVSFFDLTSKKVSNQPSHKVVKNNFKSIGRFLETLPSDAVLVAEHTGVYGDTLLKCCMDSNVKIAFVGGYVIHRYRATPDRAKTDVLDCALLREFGERYPDKLKYKTFPEEALYELRQLARHREMLVEQRKQLITADKSEDCRPIRSLTVKRSMDRIKEMLDTEIAETEKEMLKVINGHESIRHNYELVKSVDGVGLITAVELLVKTENFTKITTARQYAAYAGTAPYEKSSGKMDKGAHISKIGNRRSKTLLYICAESARLHNKEIKLYYERRTLIDKKPRHYVLNAIANKLLRIIFTLVEKGEYYDANFIRQDPRVVKYN

SEQ ID NO: 428612 - protein, 320 aa, unidentified
MTSFLGIDVGKTDFHATLLVDDRSWAKSFPNVKSGLTQLASWLRNHKIEQVHACLESTGGFEEALALDLHERGHIVSVVNPSRVKAFAQSELLRTKTDAVDSALIARFCRAHLPEAWLPPAPEIRALQALVRRHAGLQDMLQTESNRLGAARVDSAVERSLREHIVYLEGELQRVLDEIENLVNRHPPLRGQRDLITSIPGIAALTAARILGEMPNIADFGSAKAVAAFAGLSPREHQSGTMRGRTRLAKTGNSRLRKILYFPAMSAARCNPILKALYQRLVAAGKPKIVALAAVMRKLLVLAYGVLKSKRPFDAAYANA

SEQ ID NO: 428613 - protein, 421 aa, unidentified
MSRIQRIVGFDCGEDTHSAVLLDTAGKFCRKSEVTNERGQIQELLAELMLVIGLEAELVVVVESKRSHGRIVSDVAVELGCDLWQVNTVALNHYRDLEGQPRKDDDWDAYLAARMVFLEMGGCRKAIVTTEEERTLSRLTRTHSRLVEDRKRHVARLRAVLLELVPEMLHTAWKGPKPGSKAMQYMLERWPGFEGLEKAQLRSIVKILRQCRYGSRAADVAKLIRKVARGISVAEEERRAITFELDLLVQQIRFCSESVDRLYTKIAQRVERDPVGEKLLEMHGFGPIITGVLVSELVPVARTSTEPKCATYAGVTPLSRKSGKSLDNDRLTQGVNQRVLHALYTSSVVAIQNSAIDRAYYEKKLRDYSGHPKPHVAAFIALSRQRHKLVYKLITTEARYDKEILIASHLDRLEQDRSAAA

SEQ ID NO: 428614 - protein, 389 aa, unidentified
MIYVGIDVAKDKHDCCILGSEADKLFPVFTIPNNKAGFDELYEKMFSVTDDKTKIKVGLEATGHYSLNLLGSLIDKGLPTCVINPLHTNLYRKGLSLRKTKTDKVDARSIAMMLMTNKTLKPYSDISYHNEELKSLTRYRFDKVQERAKLKSSVARLVNILFPELEKLVPSLHMASVYSLLSKLPGASYITECHLTHLKNLLETASKGHYGRDMAITLRNTARDSIGSVILAKSMELKHTIHLIKVMTEEIDEIEDSIKSIMDTCNSPIMTIPGISYRMGAMILAEMGDFTRFNYADQILAFAGLSPSTYQSGQLDSSYSHMEKRGSRYLRYALFNAAKFVCKWDENFGAYLSKKIGEGKHYNVAIGHATKKLVRTIYRMELTGEAYRR

SEQ ID NO: 428615 - protein, 346 aa, unidentified
MKRFVGLDVSQATTAICVVDSEGKTLAEGVTATEPGAIAAFLHRRAPDAERIGLETGPLSVWLWNELRALDLPVVCMDARHANAGLKVMLAKTDRNDAAGLAQLVRTGWFRQVHVKAESSHVVRAELATRTLLVRMRCDLENQIRGVLKTFGLVIGKAPSRLVKRAHEIVADELATKPELASLVESLLAMRASVVERIEALDGRLRARAKTTLVCRRFITVPGVGPITALAIWASIDDQARFARSRDVGAYFGLTPRRYASGEMNRSGRITKRGDGTVRTLLYEAANVLLVKISRTSALRSWGLAIAQRSGLKKAKVAVARKLAVLLHRLWRDGTEFRWSAEPTAV

SEQ ID NO: 428616 - protein, 351 aa, unidentified
MTITTIGIDLAKNVFAVHGVDQNGKTVLVKSRVIRAALPGLIAGLPLCVIGMEACSGAHYWARLFRQYGNEPRLMAAKFVSPYRMAGKSGKNDAADAQAICEAVRRPHMRFVPVKDESRQAMQCLHRPRQGFIEEKIATYNRLRGLISEFGVIAPQGTDALRHIVSAQKNSLPLQVQQCVDDLLEHVDRIEANITEYDQILPRIAKTDHRSQRLMKLKGVGPTTTCALVACIGNAHDFKNGRQLAAWLGLIPSQYSSGRKSKPGRITKAGDSYLRTLLVQGARSVLIGAEKRTDSFSRWVCSLVERRGYWRAVVAIAAKNARLCWAGHHCITVMISGCIQPAKAGRNRMTI

SEQ ID NO: 428617 - protein, 415 aa, unidentified
MQVLYPRCAGLDIHKDIIVACVRCVSAPEHHEVQSFRSTTMGLLALSDWLSVHGCSHVAMEATGVYWKPVWHVLEGSFELVLGNAAHIRNVPGRKTDVNDAMWIADLLAHGLIRSSFVPPAAIQELRDLTRTRKQLTREIAQHCLRIQKVLEDANLKLGSVLADVLGGSGRAILKAIISGEDDPVLLAALAQGHARRKTGELREALRGRVTSRHRAMLALHLQLIDALEHALTDLDAAVGLALTPIRQHVQLLRTIPGVGDLTARVLVAEIGVDMTRFPDSAHLISWAGLCPRNDESAGKRRSTRVRKSGTWLKTALVTAAWAAVRTKNSYLFAQFNRIKARRGSKKAIIAVAASMLTAAWHMLRNGVEYADLGADYFTRHDMQSTVKPSFDFSNSRNPHQRRVSAIFWGYHVAM

SEQ ID NO: 428618 - protein, 415 aa, unidentified
MPLPSGWKEQLLVFVGIDWSEKHHDICVVDREGEILAKGRVAEGVEGIARLHELVAEHAEEPEDAIVGIETDRGLLVGALVTAGYQMFAINPLSVDRYRDRHSTSGAKSDHGDAKVLADIVRTDRHNHRPVAGDSELAEAIKLLARTHQGFVWERQRHVNRLRSSLREFYPQALEAFGTGLASRDAVAVLSIAPTPDLGRRLSRSKIASGLRRAGRQRNIETRAEQIQAALRSEQLQAPQTVTRAYGSIVSSLVTLIVGLNDQIAGLEQELEEAFEDHPDAKILRSLPGLGTVLGARVLAEFGDDRTRYLDARGRKNYAGTSPITKASGTKRVVLARFARNEQLFDACFLWAFSSLTKSPGARAYYDLQRARGKTNNQALRSLANRLVGILHGCLRHRQPYDESVAWPSLMERAA

SEQ ID NO: 428619 - protein, 408 aa, unidentified
MNAVGIDVSKGKSMVAALRPMGEVALLPQEFLHTAVGLEQMAYAIIAPGEDTRVVMEATGRYHEPVAAALHECGIYVCVLNPLFIKQSGGGSIRKVKTDKADAMKIAKYGLDNWVDLREYTPMDTIRQQLKLCSRQYNLYIKTVVSLQNNLISLADKTFPGVNELFSSPERADGHQKWVDFATTFWHCDCICRVSEKAFTERYQTWCKRKDYHFRAEKALDIYAGSCGHFTTLPMNDNTKLLITTAAQQLLAGKMTLAALRAEMTRLAKQLPEYDTVLAMYGVGETTSAQLMAEIGDVRRFPRRSSIVGFAGVDPAVDQSGKHEAKSTPTTKRGSPHLRKTRYQIVCTYLRKAPEDEPVYQFLDKKRTDGKPYFVYMTAAQNKFLRIYYARVKECLEAFDAQQDTVQN

SEQ ID NO: 428620 - protein, 361 aa, unidentified
MQSTTIIAFDQHAATTVAAVLLPQHRTPALHSLSSDIPTIQRFVARVKRQGAVSCCYEAGPCGFELQRALTARQIPCDVIAPALIPRRAGDRIKTDRRDAGQLAVLYRAGALTAIHIPSEEEEAARDLLRCREDIRADLLRARHRLSKFLLRHGRRFTATKKQWSKRHDAWLRAQTWSLCALDQTHRAYLRAVDEVVARLRDVEVQLHDLLTLEPLRPRVQRLRCFRGIDDLTALTIAAELGDPRRFASAPRLMAYVGLVPSERSSGTKRAQGGITKTGNAHLRRVLIESAWHYRHHPFVSAGLRTRQRGAPATVIAHAWTAQQRLHRRYARFAARGKRKQHIVTAVARELTGFVWAVLTQ

SEQ ID NO: 428621 - protein, 392 aa, unidentified
MGTLYVGIDVSKDRSSADGIDDHGKRRFEISFDMDGAGFAELLRVIEANSDGYVIAAMESTACYHINLYSFLSAEGIETVVINPLLIANFAKLSLRKTKTDKKDASTIAQFILLHKESVKQLAISQDLQDIRDMARERESLCHQISAAKVEIRRILQTTFPELESMSNPFTKVMLHFIQRFPSARLVGMAKPSIIAKTLKEKPCSCRIRFTPSELINIARKSIATISPGKEIILSGKIGTLLHLQKQRDELSKALTKYCESSIIEDLKIVTSINGIGNNTATTFLAEIGGINNYASHKNLIAFAGIDPTVYQSGKYEGASKISKRGNRHLRRVIWLMTMRVINHNPLFRKYFLKKRNEGQPFKKAVFATAHKLMRVIFAMLSDRTYFKEECI

SEQ ID NO: 428622 - protein, 402 aa, unidentified
MFYAGIDISKSSARCVFLDNEGEKLKAFSVGTDKEGFDKLLAFIKELKLNKENSLFGIEATGILWENLFSFLTELGFKVILLNPYQTKRYREALRFKAKTDDIDAYVIAGLLRSKDFSSSFIPEDRIQALRDFTKLRYELIKDRTNYQRQALSLLTLVFPEYSNTVLKHPFGIASLAVLKQFPTAKHLAATKVKQIEAIVRSIKGNNFSVDNIQQIIDTAKLSVFSGRASDARALNLKILLSQIESFDNSISSLDAQIEALLTDDQQNNTPGSNLLDIPGIGPKTVAAMLSAVGSDGKAFHAGSNFIGYVGFFPMINDSGETKLKRHIAKTGPKYLRWALYLAAVSCIKHNEQFKRIYQVKRSQGKSSKQALICVAVKLAHTMLSMLKSGKPYDPKRVFVCS

SEQ ID NO: 428623 - protein, 368 aa, unidentified
MLMQSHYKVGCDAHKHYSFFSVFDGQGRAVQRTRVDHQRGAIRDFLSRFPAGTPVALETVGNWYWIVDEIEAAQCTPLLAHALLAKKRMGYVHKTDKLDADGLATLLHMGTLPAVWIPPGDLRDERELPRTRMAFSKVRTMLKNRIHSTLAKYALSLDTESDIFTPKWRPQLSVLLQQLPAETRRCVDQELELLALLQAHIQRLEARILEQVRITPTIQRVMSIPGPAEILSIVIERELGSIDRFPSHKHFASYAGVVPRVQASGGKVHYGRMIKQANNYLKWAFIEAANVVARQRRHPNWRRKYVVRLFEHTRQRKGHAVAVGATARYLAEATYWVLKKGEPYREPVSRHPAGLKSSVSLKQGQARA

SEQ ID NO: 428624 - protein, 340 aa, unidentified
MIIQTLGIDLGKTVCSLAGLDATGRVVLKKRIRREKIMAFAANLPACTIAMEACCGAHHLAHRLIELGHTVRLMPPEYVRPYVKAMKNDDRDAEAIAEAATRPTMRFVEPKNAAQLDLQTLHRRRERLVGQRTALINQLRAILLERGITVVQGPAKLAASLADILADDALSPRMCRLIEQLREEWRGLDATIAELDAEFRNIARQEEASRQLMTIPGFGPLAATALRAAIGRGEVMRNGRDLAAYLGLVPRQASTGGRTKLLGISKRGDRYLRTLLIHGARAALPHLAARDNPLGRWLRGLRARCHHNVAVVALANKLARIAWAVLASGRPFDAEKAAAA

SEQ ID NO: 428625 - protein, 343 aa, unidentified
MLKSTIFGIDLAKNIIQVCEISKHGELVSNKAVGRQKLKELLAKAKPAVVAIEGCGSSHYWGRYAQSFNHDVRIISPKKVKGFLQGHKTDANDALAIANASLQIGMKSSKPKTEQQTIQTLETSRFHLSRSITSLSNHLRAMLYEYGIVSARGVKALTTIVQDTINDADSIPECIRSTVNQLWSTYLHLREELDQLIKTKNALIRQLQPCKKLMDLEGVAEVCAGMLYSSIGDGKQFKNGREASEFIGLTPKQHSSGGKVFMTGIDRTGGIKELRSALYQGALSYIGRLPEEPKTAKQAWLIKLVQRAGIKRSCIALANKTVRTAWAMLRHDNKYKQQPLLAI

SEQ ID NO: 428626 - protein, 345 aa, unidentified
MKLCSGIDLHSNNCVIAIINEHGETLTVKRLNNDMSVILSFLSPYKDKLIRLVVESTFNWYWLVDALMDEGFTLHLANPAAIQQYSGLKYADDHSDACWLAEMLRLNILPEGYIYPRELRAVRDLMRKRMDIVQQSTKNLLSVQSCYMRHLGYKLSSNKIKQMAAIRKGVNVEQVHTDFNSMNTALSVISNLTLIRCAQQQINAIESAILQQTSLTPEFINLTSIDGIGNTLALTIMLETGTIKRFDSPGNFSSYCRCVKGAKYSNGKKKGTTNQKNGNRYLAWAFTEAANFAIRYNPTIKKYYQRKLAKTNQVIAIKTVAHKLAKACYHVLKDNVPFDEHKAFS

SEQ ID NO: 428627 - protein, 453 aa, unidentified
MAKKPPRDAKAHKAMLPVMRPDAGGIDIGATEIFVAVPVDRAAQNVRSFPTFTQDLYALADWLKECRVTTVAMESTGVYWIPLFQILEERGFEVYLVNARHVKNVPGRRTDVSDCQWLQFLHSVGLLRASYRPAQEVCAVRALLRHRESLVQMAATHVHHMQKALDQMNLQLHHVISDITGQTGLAIVDAILAGKREPGELAKLRNERIKASEEVIAKSLVGDYRPEHLFTLRQSLEAYRSYQKLIDSCDREIRHGLEKFQTPRQPDMPVGERPKKPSQSPSPNSLLGAELKRVFGIDLTKIPGVRVGIAQILFGEIGPDFRKFRSASAFASWMGLCPDNEISGGQVLWVGTRKVNCRAATALRMAAQSLHHSKSALGDFYRRMRAKLGAPKAITAAAHKLARIIFHLITTGQEFDDSRFAADQARHQKRQGAKLRAKAKAMGFELVPIVQPG

SEQ ID NO: 428628 - protein, 382 aa, unidentified
MPDGIRWVGLDVHARESTFAVFDQGSGEVITKRVVGRPHELLPYLRQIERPARMVYEAGPTGYGLARRALAEGIELGVCAPGKTERPPADRIKTDKRDAVRLARLLAAGELVLVTIPSVEREQLRDLVRCREDIRADLVRARHRIGNFLLRREIYWEGPGETWTRKHRSWLTSIRFADHASQATLGDYLHAHDVLISRRDQVEADLAQLAVSAPCAHTVARLRCLRGIDTLTALGLCAEIGEWGRFDHPDQLSAYLGIVPCEHTTGAQRRLGSITKAGSTHARRLLVEASYHYRRGPVVGAPLEHRQRGQAPEIINISWKAQRRLNARWRQLKDARRKPGGVVAVAIARELAAYCWEIATCTITAIEPTPTPTTRKRLTNSR

SEQ ID NO: 428629 - protein, 387 aa, unidentified
MASEFNAHKPATAFDHDSTLVLALETSGKAWDLGAVVPGVSRRPKRRFEARAVEALLAAIEGWKAEALRAGRPISRVALTYEAGRDGFWLARHLRGLGIEVHVLQPSSVPVERKRRRAKTDSLDLDILLAAFLRWLRGEPRACTMVRVPSIAEEDARLPGRSRAVVIAERLAVENRLENLLCLHGIVGFKPRLKKAAEKLEQLRSFEGEAVPPEMMAELRRLLAVHRLLSGQLAALDASRAAVVEKAEPDREERMIQLLAYIVGLGVETATELVREVLCRPFKDRRAIAAFVGLTGTPFQSGGMDREQGISKNGRPRVRALLQQLAWRWLRHQADSPLSRWFAERVGGEKGRLKKIMAVALARKLLIMLWRYAETGVIPDGVRLSAA

SEQ ID NO: 428630 - protein, 453 aa, unidentified
MAKRKVKGNPNATISMPVVNPNAAGIDAGSRSHFVCVSQDNVKEFPSHTDGLHEICKHFRTHGVKTVALESTGFYWQQLFSTLQAEGFEVIVVNARHLKNVKGHKTDVVDSKWIQLLHSIGLLDNSFQPNEFCAELRQYTRHRRSLIQDSSKYTAKMNKSLVLMNIQLKTVLRDLTGESGLKVIRSIVNGERDPDKLEKLVGKNVKASREEIKKALRGNWRSEHLFELSQNLSFYDFVWAKIKETDQQIEQILEDWQDKNGNENKRAEYKKIKKKPRQRNDPKFDVKNFAYQMTDGVDLSQIEGVNINTILTIMSEVGFDLTSKFKTHKHFTSWLGVAPNRKITGGKVMSSNTQKVKSPLVYAIRQAANSAGNSQGRLGDFFRRLAYRKGRQVAITATARKIAVIIYKMLENGQDYCYEYSKEESERLKRSQIKRIRKTMTSFNVNMADIVPA

SEQ ID NO: 428631 - protein, 369 aa, unidentified
MNDTTMFVGLDVHKKTIAVATVEGRVSADVRFYGTIANTPEAIRSLLRKLGKGGQRLHLAYEAGPMGYNLYRLSTGLGHRCDVVAPSLIPRKAGDKVKTDRRNAMTLAQTLRAGQLTEVWVPDEAHEAMRDLVRMRALAMKDQRKARQQLHSFLLRHGRSFPGKHWTKAHRRWLGELTFAQPAQHLVLEELLARIERAEELCGRLKQAIVDLVPQWTLAPVVSAVQALRGVSILVAATVVAEVGNFSRFENPRQLMAYLGLNPSEHSSGATIKRGPITKTGNSLARTCLVEAAWTYRHPARVTQIIRERLKGLPEPIRAIAWKAQVRLSARYRKLTAAGKSAPKAIVAVARELVGFIWAIARLVEPKAA

SEQ ID NO: 428632 - protein, 367 aa, unidentified
MKKISTVAVKQSKNISGQKLTIGLDLGDRSSWYCVLDEAGEVLLEQKLATTAKAMREVFSGMPHSRMALETGMHSPWVSRLLSDLGHEVIVAHARNVRLIGESRKKDDRLDARTLARLARIDPQLLSPVKHRSAKAQADLTVIRARAGLVRSRTALINTARGLSKSYGERLRGCNPRNMNPEKAEQLSPELQAALEPLLAAIEALSERIHEYNQQIEKIARESYPQVARLEQVKGVGTLIALTYLLTLEDPHRFRKSRDVGCYVGLQPGRRNSGKSEPQMHISKEGDPYLRTLLVQGAHHILGPFGADSDLRRWGLKLAERGGKNGKKRAVIATARKLAVLLHRLWVSGEVYEPLRNSNQRAMPAAA

SEQ ID NO: 428633 - protein, 340 aa, unidentified
MNIIFLGIDLAKNVFQLCGLNQAGKPVYSKRTGRKELLQTVANIPACLIGIEASTGAFYWQREFEKLGHNVKVISPRYVKPFVRGQKNDGNDAQAIAVALMQPTMQFVPPKSPEQQDIQALHRARQRIVNHRTATVCQIRGLLLDRGITIGAAVSRVRRAVPLILEDAENGLSAGMRRAIAELYDLFNDLGRRINFFDKEIDAVFRQSEACQRIAKVKGIGPKTATAVVAATGKGTEFKNGRHFAAWPGLVPRQHSSGDRQVLMNMTKKGDKHLRTLFIHGARAVVRVATNNNDGCLHQWVNQLKERRGFNKTTVAVANKNARIIWSMLRNDSEYQAVGR

SEQ ID NO: 428634 - protein, 358 aa, unidentified
MVDKVTEAAVVGGVDTHKDLHVAAVVDQNNKVLGTQYFSTTRQGYRQMLAWMTSFGTLKRIGVECTGTYGSGLLRYFQNAGLEVLEVTAPDRMERRKRGKSDTIDAECAAHAAFSGIRTVTPKTRDGMIESLRVLKTCRKTAISARRVALQIIHSNIISAPDELREQLRNMTRMQLIRTLGSWRPDASEYRNVTNVYRISLKSLARRYLELHDEIADLDVMIAAIVDELAPELIKRNAIGYESASQLLITAGDNPQRLRSESGFAALCGVSPVPVSSGKTNRYRLNRGGDRAANSALHIIAIGRLRTDDKTKEYAARRVAAGHTKMGAIRCLKRYISREVYTLLRNQNRQVNSIPITA

SEQ ID NO: 428635 - protein, 454 aa, unidentified
MAKRPRVLRSKRKIIGDLVVVNPDAAGIDAGSEEHWVSVPEDRSDQPVRSFGTFTADLQALADWLVECRITTVAIEATGVYWIPLFEILEERGLNPKLVDSRSIGSRKKKSDVVDCQWIRQLDTYGLLNGAFRPGADMLPLRALMRQRDMLIRYAADHIRHIQKALDLMNVKLHLAVSDTVGVTGLRIIHAILSGKRDPMELAALREPSCKSSEETFVKALTGNYRAEHLFALKQAMDLFTTYQSKIKECDAQIEAALSKFDKTPATASLAPKPAKRRRKNQPHFDGRTLLFEITGIDLTSVPSLEASTILTIISETGTDMSAWYNGKHFAAWLNLSPNNRITGGKRIYKKMPVIRPNRAAQAFRIAAQTLERAQCALGAFFRRVRSRLGRSGAIKATAHKLALIFYSMLKNKTQYREAGVDYYEARYRERLVNSLKKKAAEFGFNLTPIQEVH

SEQ ID NO: 428636 - protein, 460 aa, unidentified
MDQVPVIGIDLAVTAASELAVASGPAIESSRKVASTPKGLTEGIAKAAKGRAVAIVVESTAMAWLVAAVAALRSGVEHRLYRVSGRKSAALRAFYRSHTKTDHIDARVLARMPAVDDSLLSFSLPTPAELALKRLVVARYKLTTESTKVQNRVRSMLHWAAPGILKAGGGTVSAGVVAVLSRWPDLASLAKARAATIAQQAEWGSERAEAVRAAAAEAVAFYEGFVDFAAVGLELEISLAQLGFLGSQVERLEERIAALHAQLHPKDRLLSVPGVGPVVAGVVRAVVGDLSRFANLASFRAYTGLVPREDSSGEVRRRGRISKAGPSVLRWGLYLAADAARQCDPALADLYRRLMVERGRTHTQAVCAVASHLAGRIYAVARAGRDYLWRDLEGNEITKEQPRAIAQSLRVDPETRARLRARREGGPRTPYARQPEVPQDVTQPSGDKLIDAALELASKR

SEQ ID NO: 428637 - protein, 455 aa, unidentified
MAKRRKKAPPRGLAPVPVLEANAAGVDIGATEIYIAVPVDRDSRPVRRFTTFTEDLIAAADWLERCGVRTVAMESTGVYWIPLFQMLESRGLKVCLVNARHVKNVPGRKTDVSDCQWLQYLHAVGLLRASFRPEPAVCAVRSLMRYRESLVEMATVHLQHMQKALDQMNLQLHHVISDLSGTTGMAILDAILAGERDPRKLAALRDPRIKADAKTIARSLAGDYRREHLFTLRQSVVAYRHYQEQMAACDVEIEQMLGEFSSPAEGGGGPLPPSAKYRQKPRRNELRFDLRGHLYRIFGVDLTEVPGINALTAHTLLSEVGRDLSAFRNVAAFASWMGLCPDNRVSGGKVLSSRTRRVNNRLAKALRLAAQSLFRSQSWLGHYYRRMRARLGAPKAITAAAHKLARILFHLLTTSQAYDESVFAQQEIQNNQRMHRKLQQQAKSYGFQLVEITQP

SEQ ID NO: 428638 - protein, 352 aa, unidentified
MEMIALDCHKHYSVASVQSPEGHCLAERRIEHRRGSIRAFLAPYSDGCPVAVETIGNWYWIVDEIEQAGKVPRLVHARKAKLMLGSINKTDKLDVRGLNRLQQTGTLPTVWIPPAGLRDQRELPRTRMVFATARTRLKNRIHSVLDKYGFQDQFTGISDIFGAGARPRLEGCIKQLPPQAAYTSGLLLEQLEAVQETIEALEQRMAEVFKPTTELERLDTLPGVGLILGVVLMLEIGDIQRFGCAERLASYAGTVPRVHSSGGKTYYGRTRPDVNHYLKWAYTEAANAVAVHREHLAHRHVGQLYSRIRSRRGHASAVGAVARHLAEATYWMLTKKESYRERGITEVSPQGV

SEQ ID NO: 428639 - protein, 443 aa, unidentified
MSNLAVLDARAAFVDVGSEKMHVSIAGGPPAVFGTVTSQLHALRDYLAEHQVRSVAMEATGVYWLPLYGVLEAAGMEVVMVDGRQTRNLPGRKTDMKDCQWGATLHAHGLLRAGFVPPANIRRLQDYLRLRGEHIAAAAGHVQHMQKALERMNVKLHEVISSLTGASGLAVIRAILAGERDPQVLLGLCDVRIRNVKAERIVESLRGDWAEEHLFALAQAVQSWDHYQGLIAACDRQIAVVLRQMPDTKAPPSAASTKTGKPRTRPGVNAPDIADLRQILAQICGAKDLTTLPAHSEYSVLQLIGEVGTDLTKWRTEKHFTSWLGLAPGSAQSGKRKTSIKRRRNRAGQMFCVMARALARSKYVALGGFYRRMAARRGGLVANKALARKLATLFWRVMVKGLDFVETGVAQYEAKVLETKHRILQRLARQLGQQIVPNPAAVV

SEQ ID NO: 428640 - protein, 350 aa, unidentified
MEIHTIGIDLGKTLFHLVGVDSSGAVVIRKRCSRTQLLAYTANMRVHRIGMEACSGAHFLGRALREQGHDVRLKPAQYVKPYVKTNKSDYIDAEAIAEAVQRPTMRFVPIKTEEQLDLQAVHRVRERWVMRRTAVVNQIRGLLLERGLTLPKGRSHVDHALPEILADTQSKLSNSFRVVLAQLKLELDQLSARIDEMDRVIRNVATEDEACRRLTTIPGIGPVTATALLAAIGNGTAFRKGRDLSSWVGMVPREYSTGGKQKLLGISKQGNSYLRRLFVQGARTVMQHRTKQALGLRCWLDQLLARTHQNVAIVALANKLVRTAWAVLRKNETYRCPVLLTSSCDPGVPG

SEQ ID NO: 428641 - protein, 409 aa, unidentified
MKLFVGLDVSSFDIKVCFLNGEGDELKSFTVTNDLPGATELRDEILNVVQDKSVSELKIGLESTSVYSFHPSMFLHNDEYIRAFGGQVLVMNPKQIANFKKSYSDMDKTDEIDAFVIADYLRFGRLPMSIVKEEQYVALQQLTRARYQIVRQITQEKQRFLQYLSYKCNTFTEEVESSVFGKAMMDLFLENYSLDELSNMPLEDLADYLKAKGKNRFPDPKYVAKSIQKAVRSSYRLDKVVEDSIDTILGTSITLIRTFEKQIKELDKSIERILKGLPQTLQTIPGIGPVFTAGIIAEIGQIDRFEDEMKIAKYAGLYWRKHQSGRFTADDTSLSRNGNQYLRYYLVEAANSVRRHIPEYSEYYAKKYQEVPKHQHKRALVLTARKFVRLVDALLRKNQIYTPERSVNT

SEQ ID NO: 428642 - protein, 343 aa, unidentified
MKYFAGLDVSLNATAICVVDEQGGILKEGSVPSEPDEIMTWLCSLGVTISRAGLEIGGLSRWLYGELRAVGLHAFCIDARKLRATTKTMPVKSDRNDARAIAQVMRVGWYSIVHVKSQKSQEMRMLLTNRRTLLIKQIDIENEIRGTLRVFGVKLSGRISQANFERIALELVAPLPRLEVMIRPMLIARAALREQYAVLHKMLLQSVREDETCRRLMTIPGVGALTAVTFITTIDDPDRFQKSRDVGAHLGMTPRKYASGEVDRNGGISKCGDASMRTTLYQASLALLCRSQRWSKLRAWGMALAKRRGLRRAIVAVARKLAVLMHRVWADGTEFKWGNEIAA

SEQ ID NO: 428643 - protein, 320 aa, unidentified
MQSPSAVLNIGVDVAKDAMVVACSEGSFPVREVANQRPAVLAFLKGLPAGSRIGVESTGTYHELFAETAHQLGFPVFLLNPKDTRHYAKAVGLRGKTDRVDAELIARMIAHEHTKLHAWNPPTPQQREIDRLIKRRATLISLREAVEMSLHDLGGFADELKALRTRFNQLIARIDLRTKALVEASPDRKQNFTRVCTITGVGPVIGTALVNTLERVPVKSADAFVAFTGLDPRPDDSGQHRGKRRLSKRGPGELRRLLFLAAMSAAKTKTWRPLFEHYRAKGLSGTAALVILARRIARTAWSIYTYKTEFDPLRLTNPLT

SEQ ID NO: 428644 - protein, 370 aa, unidentified
MSEPTPLFVGLDVHKDSIAVAHAQGQSADPPVYVGAIGTRQADLDKLIRRLQAKTPSLVFAYEAGPCGYGLYRDLTGQGFACQVVAPSLIPKKPGDKVKTDRRDAVELARLLRSGDLTPVYVPTVDDEAIRDLCRARDAARLTMKNAKLRLKGFLLRLGLHYVGRADWNAAHQRYLAKVVCPTPAQQIVFQEAIKAVDEQVDRVARLEAELRECASAWRLAPVVQALQALRGVQWLVAITVVAELGDLTRFTSPRQLAAFVGLIPSEYSSGSSRRQGGITKAGNGRARRALIEAAWAYRHPAKVSQHIQTRIDVLPKPIQDIGWKAQVRLCKRFRRLTTRGKHPNVAVTAIARELIAFMWAIAKEIPMTA

SEQ ID NO: 428645 - protein, 343 aa, unidentified
MEYYVGLDVSLKQTSICVVNQTGSIVQEGVVDSDPEAIASFVRSRAPGTVRIGIETGPTTTWLWTELNRLGLPVICIDARHAKAVLKMQINKSDRNDAAGIARIMQTGWFKEVRVKDLDSHAIKALLASRALLVKIKRDLENQVRGLLKNLGLVIGRAKFNVFAVRAEALIEGRPELVAAVRPLLDARKAIERQVGDLDRKVHKLARHDAQVRRFMTVPGVGPITALCFKATIDDPTRFKRSRSVGAYIGLTTRRHASGEIDWSGRISKCGDAMLRMYLFEAAGVLLTRVPKWSGLKAWGAKLTKRNGLRKAKVAVARKLAVILHRMWIDGTEFNWSTKKAAA

SEQ ID NO: 428646 - protein, 349 aa, unidentified
MRSFTPPAETRFYAGVDLHARALYLVVLDRDGQVRCARNLPAAPEPFLRAVAPFRDGLLVACECVHCWYWLADTCRDHHIPFVLGHAWAMKAVHGCKTKCDRKDAEAIARLLKGGNFPPAYAYPRERRGLRDLLRARLRLVRQRAHLYGHVHTARRQANLPPVSSDVKYRCKRAACTADIADPFVRRRVETHLALLEPLDATIRRLEKEISDAAGQIFPTELAVLQSAPGVGKVLSLTILLEIDTIDRFGTRQQFCSYARLCGAVQTSDNKRAGEGNRKAGNAWLKWAFSEAAVLSAQKDERIGGLLQRLASKLGKAKAYSALAHKLGRAFYHMLHTEEVFDVNRFVRR

SEQ ID NO: 428647 - protein, 366 aa, unidentified
MKKISTVRVNGNMIFKGHKLTIGLDLGDRWSNYCVLDEAGEVLLEQKLATTPEAMKQTFERIPRGLIALETGTHSPWLSRLLKELGHAVLVAHAQKVELISKSKRKDDRHDARTLARLARIDPELLGPVRHRSAKAQIHLTVIRARAELVSVRTALVNAARGLAKPHGERLPKCGTGQVSRELASELTAELREVLEPLLKEIESLNERIKEYDARMEKIARESYPHVELLKQVKGVGTQIALTYVLTIDDPHRFPKSREVGCFLGLRPGRRDSGQSQPQMHISKEGDRYLRTMLVQGAHYILGPFGEDSDLRRWGLRLAERGGKNAKKRAVVAVARKLAVLLHRLWVSAEVYEPLRNSHKAMRAVA

SEQ ID NO: 428648 - protein, 358 aa, unidentified
MADKVTEASVVGGVDTHKDLHVAAVVDQNNKVLGTQYFATTRQGYRQMLAWMTSFGALKRIGVECTGTYGSGLLRYLQNAGLEVLEVTAPDRMERRKRGKNDTIDAECAAHAAFSGIRTVTPKTRSGMIESLRVLKTCRKTAISARRVALQIIHSNIISAPDELREQLRNMTRMQLIRTLGSWLPDASEYHNVTNVYRISLKSLARRYLELHDEIADLDVMIAAIVDELAPELIKRNAIGYESASQLLITAGDNPQRLRSESGFAALCGVSPVPVSSGKTNRYRLNRGGDRAANSALHIIAIGRLRTDDKTKEYVARRVAEGHTKMEAIRCLKRYISREVYTLLRNQNRQVNSISITA

SEQ ID NO: 428649 - protein, 321 aa, unidentified
MNKSTIFIGIDISKDVFDVYSPDQGHSQFPNNVKGFNSFKKELSLNHWCVMEATGCYHQQLALYLFDEGIRVTVMNPLVIKRFIQMKLNQVKTDKSDAKMICHYGQEQKMQLWQPSPEYVEECKQLQTITQLYFKQSTAIKNKLHTLQTRGYKRSKMISSLKRQLKSLQKEIKLLETEMELLIKTNQQELYTRLKTIPGIGNKTAILLIVTTNGFKDFESSRQISSYLGLAPNERSSGSSIRGKTRISKTGNPLVRNHLFLCSFTASIYNPQCKALYERIVAKGKSKKLALIAVCNKLIKQAYGVSKSGLPYDKNYVSKLA

SEQ ID NO: 428650 - protein, 405 aa, unidentified
MREDRFAGVDWASEEHAVCVNDSQGRIVEGRRFRHDERGVRTLCSRLLELGVELVAIERPDGLLIERLLDAGLRVIAIHPNQVAAMRPRFSVSGGKSDSFDSFVLAELARTDAHRFRVLVPDSDATKALRALTRAREDLVAHRVAIANELRAQLGCFWPGAAEVFADIDSPIALAFLRRYPSPVDAHGLAEKRMARFLARHGYSGRKTPRELLARLRGAAASRADQLETEARRQIVLALVAALEPIVARISELTSEIRAALADHLDGETFRSLFRDPKSAITAATMLAEMGDCRERYPTKAALAADAGQAPVAVESGKSKRARFRWACDHRLRNTINTLADTSRHHNPWAADIYVRARARGCSHPHAIRILGRAWTGVIWRLWRDHTSYDPTRHTGLQRLIAAGG

SEQ ID NO: 428651 - protein, 405 aa, unidentified
MKVYVGIDAHSTNFTLATRRENTDDAENVATYSPRVSNIVKYCNAIRKEHGEDSEITVGYEAGSLGFKLKRDIEEAGIRCIILAPTSIPGTQLNRKRRKKTDKRDAMAIARCLINHDYSEVYTPDEEDEAVRDYIRMREDHRKQLKVIKQQIGAFCRRHGYHYEEGRDYWTVKHLKWLRSLQKEGILKETLDEYLHSYETVLDRLELMDRRIQEIAETDKYRQSVHKLICFKGIKTLTALALIVEIGDFTRFLKAKNFAAFLGLVSAEDSSSEDHNLYGITKQGNRFLRRLLTEAAQCFSRVTLGKSKALKERQSGNTAETIAYADKANERLRKRYYHLMMRNRKVTKQGSFPNENALYKLLYLRIQELYKKWADRPVSNWAMVRNQLIINDQFRPIIEKYDPIG

SEQ ID NO: 428652 - protein, 357 aa, unidentified
MTLKHTQADFRGQDIFVGLDIGKKSWKTSIMTEELEHKTFTQVPRVEVLVNYLHRTFPGATYHCVYEAGFCGFWIYEQLSQHHIHCIVVNPADVPTKHRERAFKSNRVDARKLARSLRNGDLDALYIPSRAAQEDRTLVRTRQSLVNDQTRCKNQIKSMLSYYGVTLPEGITDKHWSKRYLTFLEQITMERASGDHALKLHLAKLSSLRLLLADVTITIRRLAEDERYRSSVQYLISVPGVSTLTAMILLTELIDINRFHSLDDLACYCGLVPGEHSTGEEDTITTITSRRNPFLRRVLIESAWVAARKDPALLASFTLLSKRMPKNQAIVRIARKLLNRIRFVLKQQQYYHTSIAA

SEQ ID NO: 428653 - protein, 364 aa, unidentified
MNKCHSNTELSSHEETRCQFNGGTGAIKLGIDVHQDFYVVVEQVGGSNPKPPQRFQKQAFLHWAAKLKQRGAEVHAVYEACGFGFTLQRQLNALSIHCHVVCPQKLDEQNRRVKTDGLDAKALCLKLDRFVQGNRDALARVRVPSEKEEQLRAVHRQREQLVKVRKQLEAQGRSLLVNHGIEPVKSWWKPRTFATLAAPGWMKELLCNWQPILLALQEKIAALTVQLQSAAAPNQLRGLGLMTSVIIDREIGDWRRFNNRRQIASYTGLCPGEYSSGNTRLQSCVTKHGNPRLRAALVELAWRLVRFQPNYKAIVKWRQILVKGALATGAARKKAIVAVARQLAVDLWRIKTGRLRPEELGLIN

SEQ ID NO: 428654 - protein, 345 aa, unidentified
MKITTIGIDLAKSVFAVHGVNEHGREVLKKVLKRDQVAKFFANLQPCLIGMEACGSAHHWARKLQGFGHDVRLIAPQFVKPYVKTNKNDAADAEAICEAVARPNMRFVPVKNVEQQAVLAQHRVRQGFIKARTAQANQIRGLLAEFGLIIPQGIANIAKRVPELLEDATNELPGSFRLLVQRLMEHLKELDRQAGEIEAQIVTWHRDNELSRKLAEVPGIGPITASALVATVSDAKNFDNARQLAAWIGLVPRQNSSGGKNVLLGISKRGDTYLRTLLIHGARSVICAFQRKKDKVDGWLGALLARRNPNVAAVALANKNARIVWALLAHDREFRPGYTSAQASA

SEQ ID NO: 428655 - protein, 418 aa, unidentified
MNEDGNTRGTRRYVALDIHKHYCVIAAVDREGRVVLHSQRVEHADLEGWLKKNLCPTDHVVIESTTNAWHVYDLLEPLVERVVVANPIKVKQIARARVKTDIRDTLILARLLAANLVPDVWVPPAHVREMRQLLSQRRQLVETHTQIVNRMHSVAHRHHLKHERGRRFNEKNTLWQKDKRLSKVEQFQLELEMEDRGYIEKRISRIGKEVAKMSHQKPWAESMTYLMQLPGFGVITAMTVLAAIGEIQRFGSAKHLASYSGLTGGVDQSGTHLVQKGITKEGRKELRWAMVEVAQRAVKSDPRWTRKFQEMEKRMHRNQAIVAVARQLLELVWYVLTRCQPYSHFSQERIAYKYLTWAWQMDEAARDGLTRQQFARYYLMRLGIGHDLTRIALNPKYPRKLASETELLALRPELDRIE

SEQ ID NO: 428656 - protein, 383 aa, unidentified
MTQTREPPVVKIIRIGMDTSKNVFQLHGVDEQEQPVLRKTVRRRDLVSFFAKLEPTKVGIEACGASHYWARTLKQLGHEAVLLPPIYVKAYVKRGKNDKIDAEAICEAMSRPSMRTVSVKSIEQQAGQVLIGTREALLRRRTQVSNSIRGYASEFGLVASKGLGHIEPLLVRVQEDKTMPSLAKEVFAMLAGQFQHANAQIKEIDAKLMAVHRTNELSRRLAQVPGLGPIGATAMAIKVTDPKVFRCGRDFAAWIGLTPKDHTTAGRKRRGVITKAGDEMLRSLLICGATAVIQQAKKDRGKPSLWLSGLVKRKEPKLAAVALANKNARIAWKLIVSGERYNPKRNDSEDAAREGRCAALLGGSTTRPSLSSTTRERKLAMTA

SEQ ID NO: 428657 - protein, 387 aa, unidentified
MSQVDDLSRSLAAFDQNTTLTVVVELSEASWLVAGLVPAVDRQPLKKQEPDPRALLRLLERWRAEATKTGRMIERIVLAFEAGRDGFWLARWLRARGIEVYVIHSTSVAVSREHRRAKTDRLDTGMLMRVFLGWLRGERGHCRMVAIPTLEEEDAKRPSRERESLVGERTRIINRMKSALARLGIRGFKPALRKAPQRLEALRTPEDTPIPPNMLDEVRRDMIRLAVVREQIDTIERARLVRLEQAPARGSHPMVRLLARVIGVGIETADMLVQEVLSRKLRDRRAVARYVGLTGSPDESGKRRREKGLAKAGNARVRRGLIQLAWRFLRFQKDSALAQWYRARTEGPKGVRKTTMIVALARKLLIALWRLVMTGEIPVGVVLRAAA

SEQ ID NO: 428658 - protein, 381 aa, unidentified
MPDVISTAPDRVRIWVAIDQHKLSLVAARLPSSGGEPEVVRLENTERAIRRFIDRLGGAAGLAVAYEAGPGGYELYRLLSSMGVACDVIAPSLTPVRAGDRVKTDRRDAKKLVRLYRAGELSFVAPPSPMYEGLRDLMRCRDDLRDARTAARHRVAKTLLRYGRVYREGKAWTVRHRAWVVSQRLSEPLAQAALEHMLAHLEALDAQLAAVDHQLEQIAAREPWADPVAWLCCFRGISTYTALGLLAEIGDFRRFGEPRELMSYLGLTPSEYSSGQQQHRGHITKTGNRHARRLLIEAAWHYRHPPRHSTRTLQCSEHVPPDVAARAWQAQIRLNHRHRALAERGKRSTVANVAVARELTGFIWAAMTNTPLRDAEEAAAA

SEQ ID NO: 428659 - protein, 341 aa, unidentified
MGWTVAIGIDTHRDTHVAVALDRLGTARGSISVPADAKGYLSLWSWAQELGDPAFAIEGAGSYGAGLARFLVSAGAAVYECERPRRVDRRRGKSDLIDATLAAGRLLAEAPLPRLRGGGVREDLRLLLLERRGVVRAHTAALNQLQAVLVTAPEELRSRLRGRTGQQLARSVARLRERPDESTVVRGVLRRIARRVRSLDQELAELERELEALVSELVPELLDECGVGPVCAAQLVVSGGDPTRMAKEASFAALAGTSPVEASSGLRQRHRLNRGGDRQLNRALHVIALNRVRWHSETAAYHEKLLASGKTPREARRCVKRMLARHFYRRLQENPALHLTP

SEQ ID NO: 428660 - protein, 359 aa, unidentified
MQTQKKELDFKGQNIFVGIDLHLKSWTVSIMTNHLMHKTFTQPPRPEVLSNYLRQHFPGGEYHSAFEAGFSGFWTHYQLVSMGINNIMVNPADVPTTQKETLQKTDPIDSRKLARSLSSGELSAIHIPTQATLEDRSLVRMRASLVKDMTRFKQRIKSFLYFHGISFPPEFERSGTHWSKRFMGWLSQVSLEHPTGTEALGFLIRQVEQQRRLLMEVLRRIRVLSRSERYASRMELLRSIPGVGFITAISFLTEIESIERFRSTDHFAGFVGLVPNRHSSGEKDKHGEMTFRGQNTLRKLLIESSWFAARLDPALALSFSRYVQRMEPNKAIVRIARKVLNRMYYVLKNQRQYVTGVIS

SEQ ID NO: 428661 - protein, 324 aa, unidentified
MNSVKYIGMDVHKDTISIAVLNSSGKLVIEWVIETKASTILQFFQGFNGSLHVTFEEGTWAAWLYDLLKPHVTELVVCNPRRNALLKEGSKSDRIDARKLAELLRSSLIRPVYHGEHGVRALKELARSYLTISKDLGRIMSRLKAIYRSGGIPCTGKQVYASRYRAEWLGKIAEAGVRRRAEFYYQQLDALRPLRQQVRQELLAEANKHEVWKLLRQIPFIGPIRAVLLIAILQTPHRFRTKRQLWSYSGFGIETHSSADHSCVHGQVQRSKKKTSVRGLNRNHNHDLKNLFKSAAAVAAAKPGPFQEFYDALVAKGLSRRWRV

SEQ ID NO: 428662 - protein, 318 aa, unidentified
MGSIERTRKNTVIVGVDPHPGSHTACAMDTSGRVLGQWRAHNDAEGSAGLLAWANEYGRCRWAVEGPANSYARGLVRALWEAGEEVVAITPAMTAEYRRKRWRGKDDEIDAANAARALLANPELPVYAPPAYQGQLRELTRTYQRVSQQLRAMRMAARSLETDQARTALQPVIASLEQAVRELKGIIRATVTPLAAPLLACQGVGPITSGVVLAETGRVDRFPSRDHFASFAGSAPIPWSSGAYQAVRVNAGGNRRLNWAIHIIVLGRLRIDPRTRAYRDRKLAEGKTQREVIRALKTYVCRELYDVLKTLNPTPMHA

SEQ ID NO: 428663 - protein, 434 aa, unidentified
MGLIVPTTIHPEREDQPLPYEWFVGIDWGSQQHQVYVLDRDRRRVGERVVDHDGASLARLADWLWTLSAGQPQRVAVAIEVPRGAMVEGLLERGFHLFALHPKQLDRFRDRHSVAGAKDDRRDACVLADSVRTDQPSFRRLQLDAPQLLLLRELSRAEETLLEEFRRSANRLRDQLHRFYPQMLQLCSAADAPWLWDLLDLAPTPAHAALLSAEQVQRVLKAHRLRRITAPEVLACLQAPALPVAPGAVEAAQAHCGFLLPCLRVLAEPLRACGQQVDALLRPMADEPGAGERPSDVAIVLSLPGVGRKMTAWLFAEAAQPLAERDYQVLRTHSGVAPVTKQSGKRRLVVMRRGCNPRLRHALYHMARVAMQRDAHFSSVYTALRAKGQRHGQALRTMSDRLLRILVAMLRNGTCYDASRIRRESVRESVVQMG

SEQ ID NO: 428664 - protein, 347 aa, unidentified
MNFYTKQHKFYCGIDLHTTKMYLCILDKDGLVRLHRNIKTQPGLFLKAIEPFREDVVICVECMFSWYWLADLCARQNIPFVLGHALYMGAIHGGKSKNDKIDSRKIAGLLRGGMLPMAFVYPEKMRAARDLLRRRNHLMRKRAELLAHIQNTAKQYNLPKNLGCISKARQRTNLLERFHDPIVRTSIKANLDIINAHDSVIADLEREIVKNAKHHDPTSYALLQTIPGVGKIIALDLLYEIYNISRFPTVQKFASYCRLVKCVKESNGKKYGSSGKKIGNAHLRWAFGQAAQLFYMRNKRGKKLMNKLTAKYGKGKALSVLAHKLGRTVYYILANRKGFDMDKFLTA

SEQ ID NO: 428665 - protein, 399 aa, unidentified
MPSTNLQNSIDFKGQNFYVGLDVHKKSWAVTIRSMGIEVARFTQPPNAAALLAYLQKNYPGGKYFSAYEAGFCGTGIHEQLCKLGIANILIHAADIPATDKQKKNKTDLHDSRTIAERLEKRDLNPIHVLTRGQQELRSLFRLRECKVKDMVIANNRLKSFLMYFSIELPQTIGRKEYLSIKAMEWLSNLELAGNAGTITLKQYIEELRYQRKQLYQITKLLREQIQATDMQTYQYLLSVPGIGGVTAMGLISEIADFKRFGDPDQYCSFLGLCPWEDSSGDIIKTKGMQPRCNRHLRPLLVEASWMAIRKSPALFAYYSKHAVRNPKSAIVKVARRLALIAKGVATSQQLYQADYLQNMKQKQQEQKNDRKTKRFSSGIAQQHINKQPDNDIPIPLPG

SEQ ID NO: 428666 - protein, 414 aa, unidentified
MMQITIGVDPHKLSATIEVVDQHEKVLGSGRFTTNKTGYAAMLAYVAGWPRRTWAVEASNGAGRPLAQRLLADGERVVDVPAKLAARARVLDTGHGRKTDAHDAHSVAVAAVRAKELRVLAEDPELESLRMLIDRRDELTRQRVQTVNRLQRLLAELTPGTAKKDITALQAKAILATVRPRDLAGKTRRRIAADELADLVAVEKKLKVVTRELKTMIAATGSMLTDLPGVGDIVAARVLAEVGDVTRFADRNRFASWTGTAPLEASSGEQIRHRLSRAGNRRMNHMLHIAATTQIRLDTPGRAYYRRKLAEGKTRMEAMRCLKRRISDGVYRQLLTDAQAASPGAGPGGHCGATKKSSAVDLPPHIDTSDQPLPGPARTTLQLDPRPRKSTNADPQDSWLTTEGSRNDAPSSPP

SEQ ID NO: 428667 - protein, 368 aa, unidentified
MAQVLEDSGRQVMISVDPHKASWTAAAVDASLRPLATIRVSVGDDGYRSLRRFARKWSNTHWAIEGATGLGAPLTRRLSEDGVDVVDVPAKLAARVRLLSTGHGRKSDDADAVSVGVAALTAHGLTTARMDAAVTALRAIVEHRDDLVKTRTQTVNRLHVVLTHLIPAGAPRGLSAVRAAEMLRRVRPRDLAGKTMRGLAVDLVGEIRQLDRRIAKATSDIEAAVAVSGTSLTELCGIGTLNAGKILARVGSIHRFRSAAAFASYTGTAPIEASSGDVVRHRLSRAGDRQLNCALHTMAITQIRRDTPGRAYYQRKRAAGKSHREALRCLKRRLSDVVYRQLLRDSATELAAGPGGHSGAALSSCAAG

SEQ ID NO: 428668 - protein, 337 aa, unidentified
MWHVGIDLHRNSLTLAAVHDSGELRPPVRIECLDTGGIVSAVSAIRPFRAVVEATSHYRWLADLLAPHGRVLLAHPQRLRALTLRRSKTDRLDSQLLAQLLRLDQVPLAHIPAPRHQRLREMTRLRGRLVRGRTQVKIGLRLLLARHNRAAPYKCPFGPRGLYWFSRQDFGPVDNFIRDELLERFEHYRKQVAAIDERLEGLRPEYPEVAALIDMPGVGLYSALLVIGEFGDVTRFRRPKQAAAYTGLTTRVYQSGDRCHHGRISRQGSGWLRWVLLEAAMKFVRKDVPLANFHERIRKRSGAKIARVAAARKLAEICWKRLVRWHRSHPEGATTTT

SEQ ID NO: 428669 - protein, 338 aa, unidentified
MTSFVGVDLHRNNFTYCIRENGEEKKIGKCEISELKGFASLLGKDTAMAVEATGNTFMFCRFLKAHVGRLVVVNPSQFKVISTSTKKTDKHDAKILAEFLEKDMLPEVRMKDDLQAKISSLTQTREKLVQLRTVLKNKVNNLLAANFIVLKREELSTETGLRKALSFHFDPITDTELFVVVEQIRSLNQSIEKLDKAIEDHGSKMDGFKNLRSIKGIGSKGAATLLSTIGNIHDFRSSKQLAAYIGIVPRVSNSNDTVCHGRITKNGSKIARTTLVQCALIAKRYSPYLHAFHESVKSRRGGAKANIALARKFLDIVYRTLKNNWMFEDFTQFKLVKN

SEQ ID NO: 428670 - protein, 343 aa, unidentified
MQIRSVGIDLGKTTFHLVALGASGKVLVKKKFSQKQLLAFTANMQTSLIGLEACSGAHFLGRALRQQGHDVRLIAAQFVKPFVKSNKNDFVDAEAIAEAVERKNMRFVPIKTDDQLDLQAMHRIRDRLVARRTAVINQIRAFLLERGMVFAQKPTRLKAAMADVLENADNALTPMMRNMIGILWEEWKTVEQQIVELTDSLEQIATNDAGCCRLRQIPGIGPIVATAIVAAIGNGAAFGKGRDFAAWLGLVPRQYSTGGKTKLLGISKRGNVYLRKILIHGARAAAMRIKRDRFSIGAWMNALEARAPRNVLVVAMANKLARIAWAVLSTGEDYRSGVILAAA

SEQ ID NO: 428671 - protein, 403 aa, unidentified
MKTIKNNNIANNSLTLQNKTSKRTGTVHPSPGAITPRCSKNVPVPSPKSEQLPEPPSRESSNTQGRIYFTPSLQNKQCIIGIDVSKSSLHIASFPKVFSPFEIPYDSSEHWETLISTLHKFNPLLIVLEASGGYEKPVCKKLKEAGFKVEVVNPERVRYFAKSLGYLAKTDKIDARVIAHYGAVLVENGIVYGKEDKELEKLKELKRRRDQIVEMIVKEKNRLKQTEKGVLGEEIRRSIEKVLEVLEKEKRRLEEEIEKRLNEAKEIKRRVKLLETIPGVSTVTAVSVVVEMPELGKIERRKVVALSGLAPFARESGNLKGKRMIKGGRKRVRQALYMAVLAGIIWNKKIRGYYERLVEEKKKAKKVALTACMRKLLLIMHQMLKNGVGWQENYDGKNLVAAS

SEQ ID NO: 428672 - protein, 366 aa, unidentified
MLQKAELSRTLIQRTTTEAPRDHMYYIGLDVHKKTISYCVKDAAGQVHREGKIGATRLDLDNWIKTLPQPRMMAMEATIFTGWIYDYLLPHAEKVKVAHPLMLRAIAAAKKKNDRIDARKIADLLRCDLLPECHMASTEIRDRRRTLRYRGLVLRQTVQMKNRVSGLLMESGVSYDKQRLHKMGYFSELFSTNEQISDSIRPLLRLGREHILRGQRLDRALIRSLEQDPLLSERLRRLRTIPGVGPITALTWALEIGDYTRFPSVKEAISYCGLCSAEKRSADKVMRMPISKQRNKHIQQVLVEAAKLAPRYSHELALVRDKEMQRGNRNRATLAVARKLVAYMLAVDRRKQDFVPAEELAGKVAA

SEQ ID NO: 428673 - protein, 381 aa, unidentified
MLYVGIDVAKNKHDVTVIDNTGKMVLKPITITNRKQGFELLHNTLKQLRQDCLIAMEDTGHYALNLLTFLHQNNYKIYTYNPLLIKEFTKSLSLRKTKTDKKDARTIALKLLSDPNRALFMHDNRQEELKIMTRHMNRLKKHQSDWKVQYTKCLDIIFPELHQVVTKHSDYVYELLKRFPSPEKMVTAGFDKLIEIKRLTAKHALDILELAPNSIGTTSFAREFELVEIIENIQHYEKLIKQAEKKIDELMAELNSVITTVPGIGNRLGSVILAEIRNINTFTNPAQLQAFAGLEPSIYQSGQLDTQGKMVKRGSSHLRWALIQAAIKVARYSPTFKAYLRIKLEQGKHFNVAISHVAKKLIRVLFRLLQNNEAFEEDKLR

SEQ ID NO: 428674 - protein, 354 aa, unidentified
MSSEKYIGLDVHQATISVAVMDSQGKVIMESILETKAATLLEFLAGLRGSLFVTFEEGTWAAWLYDLLKPHVTEVLVCNPRKNALLKHGNKSDKIDARKLAERLRLHDLKPVYHETGVRMLRELARSYLTVVKDLSRVMSRLKALYRSWAIPCAGRDVYYTRHRSQWSEKIPEAGTRRRAEQLYQQLDLLQRLRQQARRELLAESRKHTITAKLRQIPSLGPIRCALAVALIQTPHRFRSKRQLWTYSGLGLETRDSGEYHYVRGQVQRRKKQATIRGLNKDYNHDLKGLFKGAATRASVQPGPFQEFYQRSLAKGIKPTMVRLTLSGKIAAITLTLWKKGEDFDINKLNSQAA

SEQ ID NO: 428675 - protein, 340 aa, unidentified
MQYGSIDLHRRSSVICLAGAADGSYEEQTVGTSRAALTAFFTGRPPCRILIESSTESEWVARLLESLGHEVVVGAPSYAAMYATRSRRIKTDRRDGRALCDACRAGRYKAAHRTAEPWRSVRKQLSVRDALVRSRTRMINVVRALCRQEGCVIASGNADAFAARAQQAQLPPELAQAVRPLVRSIGLLSRRVDRCDRTLAALAGGHERVRRLMTLPCVGQVTALAFAAVVEPAARFASSAAVACYLGLVPSEDTSSDKRRLGRITKGGDRRVRWLLVEAAHRLMRSKDPKAADLRKWSGRVLKRRGRGPAAVGLARKLAGRMWLIDKQERDYEARACGSG

SEQ ID NO: 428676 - protein, 404 aa, unidentified
MSVQSALVTSSTIVVAVDVGKTSALFSVTDAARDQLISPTEFAMNRSGLTCAAHRAMAVVPASGQVKVAVEAAGHYHRPVLDYRWPDGWEVVELNPAHVAEQRRVQGRRRIKTDVIDLEAITELVLAGHGRSVGDRDSVFGELSAWAGHRSRRVATRTATKNQLLGQLDRAFPGLTLALPDVLATKIGRLVAAEFCDPSRLAALGANRLIRFAAARDLRLRRPVAERLVGAARDALPTRDAVIARHILAADLNLLADLDAQIQAAEDELAALLPRSPFTTLTTVPGWGVVRVSNYAAALGDPGRWPGPRQIYRASGLSPMQYESAHKRRDGSISREGSVALRRALIDLGIGLWLTEPAAKAYAGGLKTRGKRGGVIACALANRATRIAHALVRDHATYDPTRWA

SEQ ID NO: 428677 - protein, 343 aa, unidentified
MQTIATIGLDIAKSVFQVHGVEATGQVVVRRQLKRRHVLEFFAKLPPCLIGIEACASSHYWARELQAVGHIVRLIPPAYVKPYVKRQKNDAADAEAICEAVTRPNMRFVPIKTLEQQGCLVLHRTRHLLVRQQTATINSIRAHLAEFGIVAPVGRRGVEHLLEVIADANDTRVPEVARACVATLGVQLRQLKAQILEFDRRILAWHRSSEASRRLNHIPGVGPLLATALVASIADPKVFRSGRDFSAWIGLVPRQNSSGGKDKLGNISKRGDRYLRTLFTAGALAVIRYAKIHGTKHRPWLVALLVRRPTKVAAIALANKLARIAWALMTKGSRYRQPAALRV

SEQ ID NO: 428678 - protein, 357 aa, unidentified
MKIVGCDLHARQQTIAMVDTQTGEFTEKTLSHEGDAVRAFYAALEGPVVVGIEATGSMQWFLELLEELGIQCRVGHPAEIRAKETRKQKHDRRDARLIWELLIEDRFPEIWMPSSKERDLRTLLRDRHQWVKMRARLQHTLQAIALNHALRQGHALWSAAGQRALEALPLPPYTRQRRDELLALYAQLQKRIQELDKEVEAQARQRPQARRLLTHPGVGPVTALATDVFLGDPSRFASGNQVASYIGMIPCEHTSGKRQRLGKMSKQGNALLRYLWTEAAMSTVRKDPELQRFYRRKLIQKGMGKARIATARKLGIRLWIMMRDQIDYEEFCRRGKLRQTGEAHAGMPDFNSGPAQQ

SEQ ID NO: 428679 - protein, 399 aa, unidentified
MMSRIWAGIDSGKGHHHGLAVDTEGKTLLLRRVANDEPELLKLIGDVLDLADGRQVTWAVDMTGREPALLLALLVNHGQEVLYMPGRLVNRAADGYRGEGKTDARDAYVIADQARMRRDLRPIRPGDEAAIELKLLTGRRADLVEDRTRVVNRLRGTLLSMFPALERALDVTNTGPLKLLTGYQTPAAIRRAGTTRLTKWLANRKIRNARALAEAAVEAAERQHTAVPGEKTIAKLVHTLAGEVMALNEQIAELDKLIKGRFREHELAEIVLSVPGIGTVLGAEFLAAVGGSLDEFDSPDALAAFAGVAPRPRDSGKVSGNLHRPLVYHRRLQRVFYTSALVSVRYDPNSRKFYDRKRAEGKKHVQAVLALARRRVNVLWALIRDRRCYEVTPPAATTA

SEQ ID NO: 428680 - protein, 343 aa, unidentified
MSLYVGIDLHSNNMFVAIMDSNEKLLCQKKISNETGLILQLLEPYPTDEVSVVVESTFNWYWLVDALHGHGYSVKLANPAAMQQYSGLKYTDDRSDAIWLARMLKMNLIKEGYIYPKDQRPTRDLLRRRMLFTRQRTQMILSLKSLIDRELGQRVSANMITSKQNPFPVRDILQNEELIFTAECMLSTIDGLKSNIDKIEKRLKNKLKLKPEFVNLTSIKGVGTILALTIMLEVGDIRRFKTVGDFSSYCRCVSSKRTSNNKVKGKGNSKNGNKYLEWAFVEAANFLRRYNTEAQRYYQKKAAKTKTIVATKTLAHKLARAAYYMIRDNVPFDETKMFATSPR

SEQ ID NO: 428681 - protein, 366 aa, unidentified
MNTKRSQGTRKVESEQGKVTIGIDLGDRFSHYCILNGEGKVIETGRIKTSREAFAAHFQDLPPARIAVEAGTHSAWVSRLLEESGHEVLVANAREIPTISHSNKKNDNGDAEKLARYARYDPKLLSPIKHRSPSAQLDLAVIRVRERLLAARTMLINATRGIVKSSGYRLRSCSAESFAKQSRSQVPKVLSEILIPMLDQIATLTEQIRGFDQRIEQMAESKYPETQVLRGVKGVGALTAMSLVLTVGDARRFGKSRDVGCYLGLRPRRSQSGERDPQLGITKAGNRPLRATLVQCAQYVLGPFGPDSALRRWGLTLAQRGGKNAKKRAIVAVARKLAVLLHRLWVTQKPYEPFYGLPAGAMPATR

SEQ ID NO: 428682 - protein, 356 aa, unidentified
MSQKLDTSPAVIGIDIGKNSFHIVGQNQRGAIVLRQKWSRGQVEARLANLPPCRIGMEACVGAHHLSRTLKALGHDARLMPAKYVRPYSKGQKNDYRDAEAIAEAVQRPTMKFVATKTADQLDLQALHRVRERFVGQRTGIINQIRAFLLERGIAVRQGLRFLRAELPGILATRGDALSPRMLRMLEDMSADWRRLDARIEGLSSEIEALARQDQGCERLMTVPGIGPIISSAMVAAIGAGDAFAKGRDFGAWLGLVPKQLSTGDRTILGSISRRGNRYLRSLFVQAAWVVLVKVGPKHWDRYGLKAWIEAAKRRLHHNVLAIALANKLARIAWAVLHKGRAFECVKTNETAYRGA

SEQ ID NO: 428683 - protein, 317 aa, unidentified
MAKHSTKAAGIDTGKHKLDVALSCGEAVLQVANNEAGYGELCNWLRRHRVKRIGIEASGGYERDVVAWLRGRGHIVIIFQPLQVRAYAQFHLKRAKNDRIDAGLIALCAADSKQIREPSDPRLAAFKERLRLIEQIEEDASRMKTRLEGYRDKSLISRLKAEIKRLCAWRRSALKALFAELALHADLHRKIELLSSIDGVGPRTALAMLVHMPELGTLTREEAASLGGLAPFDHDSAQRRGQRHIFGGRRRLRRSLYAAALPAAFHWNNALMALYKRLTAAGKPHKVALVACARKLIIYANAVLERGTPWAASAQAG

SEQ ID NO: 428684 - protein, 354 aa, unidentified
MPRTSQSASAALSAIGVDIGKDVFHIVGFDRAGKIALRRKIKRSALVETFEALPRCVVGLEACLSAHFVSRTLRQLGFEPRIIPAKYTKPFVKGQKNDYNDAEGIAEAAMRPNLKTVAEKSQEQLDLQAMHRVRSRLVSRRTATINQIRAFLIEQGIAVRTGARALRNSLFAILKNRESEISPRMTSIIVGLYEDWISLDKRIESLTLEIEKISEVETNCERLMSVPGIGPMISTATVAAIGTGEAFDRGRDFGAWLGLVPRQYSTGGKPILGRISKQGNRYLRTLFVQAAHIILMRPKNWLKFGFGRWLEQASTRMHKNKLATALANKLARIAWSILRNGGTFGTHVRTAEAI

SEQ ID NO: 428685 - protein, 367 aa, unidentified
MEKSSTAYVGMDVHKESVDIAIADGREARLFGRVGGDAAAVERAVRKIRSVHRDVMFVYEAGPCGFWLYRRLAAQGLRCMVVSPSMTPRRAGDRVKTDRRDALQLARLARAGELAPIYVPDAKDEAVRDLVRAREDAVCMQRQARQRLQALLLRNEIRYVGRSAWTQAHRRWIAHLKLPDPAQQIAFEEYVTAVEEGTRRLERLEGSISAQLAHWRWRPVIEALQALRGVSAIHGVRIVAELGDLSRFESPRKLMGYLGLTPSEDSSGGRRRQGGITKAGNSSARRAFIEAAWAYAHPARVSWVIARRHTGLAKSVTDLAWKAQLRLCARFRRLAARRLPRNKVVVAIARELSGFVWAIARQVKPLA

SEQ ID NO: 428686 - protein, 402 aa, unidentified
MKASKQYLRFCGIDMAKHKHVACIIDQNGQYLQRPKSIRNDADGFQQILNCLKQTGRTKSILIGMEATGHYWYSLHDFLTRQGYNVVVLNPIQTAQQAKQAIRKCKTDKYDAFHIANLLRTDQYKAAVVPSELAMTCRQITRLRYRIVKQGAMIKQLVNSRLHPAWPEYEGLFSNKFGTTSMKLLQTASTPKELMELDPDDLTELIHKASRGRFGPAQTQKVLQSAKNSVGMQRGHYGTSTGIKFLLEQIEALEPVRKKMDAEIVKLTAKVPEYLFTLPGATELTIVSLYGEISPIEAFKKPSQLVAFAGLDPKVFQSGQYDAPRRRISKRGSPYLRRSLWQMAYRALCTEGDLRDFWRRKHRQNKHHLVAVTAVANKLCHIVWRIMTDRRDYIPKGYNPKS

SEQ ID NO: 428687 - protein, 337 aa, unidentified
MEITTIGIDIAKSVFQFHGVDAAGQTVLQKKLRRSAVLDTLAKLPPCLIGMEACATSHHWAREITALGHDVRLIPPAYVKPYVKRQKNDAADAEAICEAVTRPNMHFVAIKSVDQQAAMMLHRVRDLLVRQRTMLINALRAHMAELGIIAPQRPQNVLGLIQQLEEDSNGGITEVARSALLSLAGQLTSLTQEISALDRKILAWHRSSETSQRLSTIPGVGVLTATAMAASVTDPSLFRSGRQFAAFLGLVPRQNSSGGKERLGRITKMGDGYLRKLLVVGATAILRRVADTQTRTANWIRSLLERKASRLVSVAMANKTARIIWALLARGGTYRAS

SEQ ID NO: 428688 - protein, 385 aa, unidentified
MASAAIEPSANPAESLCFMAIELSKAKWLVGMLTPLSNKISLRSIPCGAVAELLEFVERTIEKVSRTTGRRVRIISCYEAGYDGFWLHRVLDARGIVNHIIEAASVHVSRKARRAKTDRLDAENLVRVLMAYWRGEPKVCSVVRPPSIEEEDAKRQHREREFLMKERVQHIGRIKGLLATQGVYDFQPNRRDWQSRLSKIVTGDGRPLPPRLAREIDRHCQRLVMVNAMLKEIDAARDAASETSTAPSIPSAQHVQRLVQLKGIGPQVADVLATEVFYRGFKNRRCLGSYLGLTPSPFQSGGMDRDQGITKAGNPRARTMSIELAWLWLRYQPGSALSRWFHDRTNGAKGRMRRILIVAVARKLIVALWRYLETGLLPDGAELKA

SEQ ID NO: 428689 - protein, 347 aa, unidentified
MRFFNQQHKYYCGIDLHARNMYVCILDQKGKVKVHQNIKTDSELFFELIFPYMDDIAVGVECVFCWYWLADLCAEHHISFVLGHALYMKAIHGGKTKNDRIDSYKLATLLKGGNFPVAYPYPAKWRATRDLLRRRMYLARRCGELVAHIQNTNTQYNLPAFRKKLSRKYNHDGVAERFDDPQVRESVQVDLDIIQALNQRLKKLEWHLEKTARAHDYHTLYLLRSVPGVGQILALVILYEVHDIKRFARVQDFSSYARLIRPVKESDGKWAGHSNKKIGNHHLKWAIKEAAILMLRDCSQAKYYVSKLEKKYNKGKALGIFTHKLGRAIYFMLKNKEAFDMKRFFAQ

SEQ ID NO: 428690 - protein, 428 aa, unidentified
MDEVDRNRLEEFRQLRQEVRHSEEYLIVGIDIAKDRHHAFLGTATGKTLLRRLVFSNDHEGFRKLLDQAEALRAQHGLKKVVYGMEPTANYHKPLGEYLITLGRTVVLVSGVTVKRNRESLDGRWDKHDTKDAANVADLISQGKCLYYEYPSAELRGLRGLLSLKRRLKKQEHGYKVRIRNHLIARYFPEMDRDYERLGTVGLSIVRWCFPASQITELDVEPFIQRVTSRRIRVETRQRLEEVWEKAGASIGCEGVPGMEHEAKVMVEGLRQIREVIKETEDKIQQLCEQFPEYPYVLTIPGFGPDVSAKVLGAIGDPNRFQNGKQVLKMGGLDLSADRSGKDSDKAIPEISKRGKADLRYALYQAALIASVKNRDVMIYYTNKLRGREREKGIHVKMRVKLAAKLLVIAWTLMKKKEKFNPAYLNAE

SEQ ID NO: 428691 - protein, 368 aa, unidentified
MSKITKYVGLDVHKDSISIAVAEEGRSEARFLKRIPNDGSRLLRVLRTLGALESLHCAYEAGPTGYGLYRLLSSKAVRCDVVAPSEIPTRKGRKVKTDRIDASGLAHFLRSGSLVPIRIPDKAVEAMRDLVRARADTKEVEKAAKHRLSKFLLRHDRIYPGKTNWTNMHLDWIRRQSFEHEAQECVLREYLHAVERAREQVERLADAIARLTEESELAPLVKALQAMRGIQLLTAASIAFELIDLKRFASAPKLMGYLGLVPSEDSTGGRRNQGAITKAGNKHVRRLLVEAAWNSRYKPKRTIYLRKRQEGVSQEVQDIAWKAQERLHHRYRSLSARGKRHQCVITAMARELAGFIWAVGQQERLLAA

SEQ ID NO: 428692 - protein, 360 aa, unidentified
MTAYYIGADVHSNSTELAIERNKKIVQRYRLPTSIAALSGVLDSIKGEKHLAIEEGPMAGWLYRNLSKKVDELIICDPRRNKLIDSDGDKDDKIDAAKLACLLRGNFLRPVYHSDDQSRAGLKHWVSLYNDRVRDAVRNINKIRSCCRMHGISIPRVVIRQTKGRAQWLSRTNNQSLTAQLNMLWLGYDSTSQQVRIARGQLSRLSSRYKIIKFWGELPGIGLIRATTLFAYLDTPWRFEKKNKLWKYCGVGLQRTTSGTDRKGRPKPARLQLPWAVNRTLKNAILGAATSAIRQKNNLFRQYYERMLEDGIMPSNARHAVARKLLTVMWAMWKTNSRFDENMLIKPDTELSLASSRLSL

SEQ ID NO: 428693 - protein, 315 aa, unidentified
MDEQRTVFVGIDVSKDRLDVHLRPSGEAFCVPREGKGVDDLVIRLQGLSVALVVLEATGGFEATVAAALAGVGLPLCVVNPRQIRDFARAMGRLAKTDTLDAEVIALFAERVRPQARPLREPERVHLAELVGRRRQVIEMIGMEANRGRQAIDKPLARRLARHVAYLQKELDAIDHDIGDAIKHSPAWREAEALLKSVPCIGDVTARTLLAELPELGTVSRHQVAALVGVAPINRDSGLMRGRRAIAGGRTSVRAVLYMAALTATRRRSPFRAFYDQLTARGRPKKVALVAMMRKLLTILNAILRDHTPWRPLNA

SEQ ID NO: 428694 - protein, 419 aa, unidentified
MENSKPKKVKPVNEKALIVAIDIGKTIHYGYFRGPDGRDIKPFPFYNFQKSFKDFWARVLHFKQQKQLEEVVVGFESTGPYAEPLLNFLAKKSVRLVQVNPMHTKRLKEMTGNSPNKTDSKDPRVIADVISLGHALTVIVPAGAAAELRRLTQARERACKNRTATMNQLHHLIFVVFPEFTQVIKKITSKSALYLLNNYPFPEDVVDLGLERLQEGLRKVSKGKFGQTKATTLFEAAESSIGIGEGKKGLLLEIKYLVSGIERESEFIDQIEKQMSHYLKQIPYSQSILSIKGIGEVTVAGLIGEVGDFKQFRRIPEIMKLAGLDLYEISSGKHKGQRHISKRGRVHLRKLLFFVAINTIRTNGIMHDKYLKMVNRGVPKVKAIVAISRKLLRIIFSLACNNTTYRENYDQLNIVKIAA

SEQ ID NO: 428695 - protein, 410 aa, unidentified
MKMAGIDVHKKVLMVVVVDTSRPQEKPARRRFVTMPSERHRRLTWLREQEVEEAVMESTAQYWRSVWLELEPHLRLHWAQAFSNRAPRGGKHDFKEAERLVRRVMADELMLSFVPSGEQRIWRSMTRRKLQLTRDRVRLQNQIECLREEMRIKLSIGVSHLLGASGLRLLHALASGETDPKKLAQRGGERLQCTEEQRVDALTGTVQPVHGERLGLQLERLPLIEEPMTGLNSMIAAAMKSHPDAVIRLAEVPGLGVDSAQPIIAEVGAQASTFASAAELTSGVGTCPGKDESAEQNHSSRSAKGNKYLRRVLNQAAHAAVAKKGSHFQALFRRLLPRLGYPSAIWAVAPRLCRLVWKILHPAVRFIQQGTEVGPREKKKRAPMLARALRKLGYEVTITPISQLAPNPAV

SEQ ID NO: 428696 - protein, 426 aa, unidentified
MKNREILSTLFVGIDVSSKTNEVCAIDFDETRYLKTSVTNNHPGAVSLAAKLAGIMTAHPEFTRLVIALESTSSYSTHIATFLSSTEILMPFKPFVYCLNPKTVANYKKSYISVGSTDTIDAFMIADFARVGRIKTEPWRGSQFLALQRLTRHRLHLAKAITREKTYMLTNMFLKFSELAVMSKNEEPFSDNYGVTAAAILTEFLSPEEIVSMPSSELVEFICIKSRNSFANPQNVVKLLKQAASNSYRLDKCLYEPLTISIASSFNCIRAFEGEAKTLDKAIAKAIRGFNTNEYQSLLSIPGIGPVFSSGILAEIGTIKAFRSHDALAKYAGLVWNPNQSGNFTAEESSMSKAGNRYLRYYLIEAANSVRNRSQIFADFYNKKYAEANTHHHTRALALTSRKLIRLIFGLLDNNQLYSNSVEQKT

SEQ ID NO: 428697 - protein, 347 aa, unidentified
MRFYTHQHKHYCGIDLHARAMYVCILDQHGTKLVHKNLPTTPEAFLRIIAPYREDVVVGVECIFTWYWLADLCQKEDVAFVLGHALYMKAIHGGKAKNDKIDAHKIAVLLRGGMFPQAYVYPSEMRATRDLLRRRCHLVHKRAELLAHIHNTTSQYNLPEIGKKLAYKANREGVEEHFPDPSVRKTIEVDVSLIDHYDQLLGEVELYIIRTAKAHDVQTFSRLQSVPGIGQILALVILYEIQDIARFPRVQDFVSYCRLVKCAKESGGKRLGTSGKKIGNVHLRWAFAEAAVLFLRHNQPGKEYFTKLEHKHGKAKALTVLAHKLGRAVYYLLTREQAFDLTRFVTA

SEQ ID NO: 428698 - protein, 334 aa, unidentified
MENIALIGIDLGKNSFHIHCQDRRGKAVYRKKFTRPKLIEFLATCPATTIAMEACGGSHFMARKLEELGHSPKLISPQFVRPFVKSNKNDFVDAEAICEAASRPSMRFVQPRTESQQAMRALHRVRESLVQDKVKTTNQMHAFLLEFGISVPRGAAVISRLSTILEDNSLPLYLSQLLLKLQQHYHYLVEQIKDLESQLKRKLDEDEVGQRLLSIPCVGTLTASTISIEIGDGKQYASSRDFAAATGLVPRQYSTGGRTTLLGISKRGNKKIRTLLVQCARVFIQKLEHQSGKLADWVRDLLCRKSNFVVTCALANKLARIAWALTARQQTYVA

SEQ ID NO: 428699 - protein, 353 aa, unidentified
MTNDKYVAMDVHMASVTIGVRNASGKLISRAVVETKAQSLKDYIRGLSGTIHLTFEEGTHSAWLYDLLRPLVAECIVCDPRHNKLLESGNKSDEIDVDKLSDLLYLGRLRAVYHGDHGTRALKELAHNYEALVKDSTRIKNRLKAIFRGRGISYEQGEIYNYEQRAEWLAKLPERGVRERASQLYEQLAELDIWVSKARLQMVRESRKHKARKILEQIPTLGEISVAQLIATIDTPFRFRSKRQFWTYCGLSVVRRTSADYHFEEGELRRRTKPGTTRGLNHNYNRRLKRIFKRAALTGSTKAPFKSYYERLIERGLAPELAQVTLARKIAVMTLTLWKRGANFDPQKLVKSE

SEQ ID NO: 428700 - protein, 361 aa, unidentified
MNATTASIDLAKNIFQVALADGTGKVLEQHRLTRAQFERFFDNRAVSRIVMEACGSAHHWARVFASRGIEVTLLPARYVRAYVRRSKTDAADALALLEAARCSEIAPVKIKSIEQQSLQALHRTRSLWMGTRTSRINALRGFCRELGLHVPVGARTGLEAMGRAVADEQSPIPALLRPTMQQLLEEIRVLEVRIAQLERQLAQVAKESSACKLLMTIPGVGLLSATGIVAATSGAVSHFKSARHFAAWFGLTPKENSSGGTRRLGRISKMGDRYLRMLLTHGARSVMLAARIAQTKGTAPSGLRYWALQLQSRSNHNKTACALANKLARICYAVLRDQTPFGQPATRLGKKMQRQSFELAH

SEQ ID NO: 428701 - protein, 351 aa, unidentified
MPHKLNSAIAVIGIDIGKNSFHVVGHDKRGAIMLRQKWSRGQVEARLANLPPCLIGMEACVGAHHLSRKLQMLGHDARLMPAKYVRPYSKGQKNDFRDAEAITEAVQRPTMKFVATKTAEQLDLQALHRVRERLVSQRTGIINQIRAFLLERGVAVRQGLRFLRNELPHILAAPCDALSPRMLRVIEDLTGDWRRLDERIEGLSGEIEARARQDKGCERLMTVPGIGPIISSAMVAAIGTGDAFSKGRDFGAWLGLVPKQISTGDRTILGSISKRGNRYLRALFVQAAWVVLVKVGPKHWARYGLKSWIEAAKKRLHHNVLAIALANKLARIAWSVLAHGRTFEASKIQAA

SEQ ID NO: 428702 - protein, 355 aa, unidentified
MSQEKYIGMDVHQATISAAVMDPSGKLLLECLLETKAATILEFIQGLRGTLSLTFEEGTWAAWLHDLLKPHVSRLVVCDPRKAALLKEGNKSDRIDARKLAEMLRTNQLKPVYHGEHGIRTLKELGRSYLTVSKDLTRTMNRIKSLYRSWAIPCSGNSVYAPRHRAAWLAKIVEPGVRVRAEHLYEQLDSLQPIRLEARRELLRESHNHAAVNLLRQIPAIGPIRAALLVALLQTPHRFRSKRQLWAYSGFAVETHDSGEYRWVRGKLQRNRERITVRGLNDNHNPHLKNLFKGAAISASTRPGPLQDFYLARVAQGMRPTMARLTLARKIATITLTLWKKGASFDPQQLRRQAV

SEQ ID NO: 428703 - protein, 429 aa, unidentified
MNSTQNKKIEQVKETTMIVGIDVGSEKHYFRAFNWRGIELTRKPVAFLNSMEGFNSFYNSVVELMQKNELKEALVGIEPTGHYWFDLGQFMGEKNIKFVMVNPNHVHKTKELDDNSPSKNDRKDPRVIAGLVRDGRYFYSYMPTGVYAELRNASNRRFVLVEEQTRAKNRLHKWIAVYFPEYKGIYTHIDAKGGLLVLKQASTPEEIVRLGVEGIIKIWKDAKLRGNGHKKAMLILNAAMKSIGLKAGLTEARMEIQDLIEDYELQTKRLERVNDLIKELCQQVRYADKLLEIKGIGITTVAGFIAEVGDITRFDSTKELQKLAGLELVADSSGKHNGKTKISKRGRKRLRYLLFEAAISVVGKNEEFKEIHRYYTTREKNPLKKMQSLIAVACKLIRVFHVILTKGISYDASKMLKDIRHPGEQLKAA

SEQ ID NO: 428704 - protein, 353 aa, unidentified
MFHQPGEATTMKITTIGLDLAKNVFQVHGVDEQGKAVLRKQLRRNQVAAFFANLPPCLVGMEACGSAHHWARKLEQLGHTVKLMAPQFVKPYVKTNKNDAADAEAICEAVSRPQMRFVPIKNVEQQAVLALHRARQGFVKARTAQANQIRGLLGEYGIIFPQGICHITKRLPAILEDGENELPGSFRALLARLGEHLKELDRQVGELEVQIHHWHRENEASRKLEQVPGIGPITASALVATIGDANSFKNGRQLAAWLGLVPRQHSSGGKSVLLGISKRGDSYLRTLLIHGARAVIRVAERKEGYAQSWLGQLLGRRQKNVAAVALANKNARIVWALLAHDRNYQADYAPSAV

SEQ ID NO: 428705 - protein, 295 aa, unidentified
MKRIAVDLAKSVYQVAESVRSGQVVQRKRLNREAFRRYIQEQAEPVEWVMEACGTAHYWGRVAQALGHQVRLLHPRYVRPYRRRNKTDRNDCDAMLEAARCTDIHPVPVKSHSQQQLQQLHGLRETWKKSRTQRINLLRGLLREAGIEAPASTAAFIRAASERVDQPELAPLSRLLHIVLAEINLYEQCMAECEQQLKRWHADDDIVRKLDEVSGIGLLTASALTAAVGRPERFASGRQLSAWLGMTPREFSSGERRKLGHISRQGNVYVRTLLIHGSRAALLAAQRCQARTPES

SEQ ID NO: 428706 - protein, 427 aa, unidentified
MNEIKTNRVDEFRQFKRHIRGSKDYLVVGLDIAKRKHHAFFGDASGRTLLKGLIVENSAEGFRHLLTQVRFYMDREGFSRVVFGLEPTSVYHKPLAEHLIEQDHLVVYATNEAIKKNRSLLDGRWDKNDTKDSANVADLVAQGKCHYYDLPELRLRDLRSLLLYRRRLKKQLHSCRVRIRNNLVAQYFPELDLFWNNAEAENLAIVRWFLDPARIRPLTCEQFIAKVTTHNGGLRQQRRLRHIWEAAGRSIGCRPGPAMALEAELVVESLKSVKEQLDRVEQAIEQLAEGFEEYGYLKSIPGFGPYVSAMTLAAIGNPHRFENRAQLIRLAGFDLSASRSGEKSKSAVPVISKKGKADLRYALYQAALIASSLTTHFRDYYNRLLEGRQREKGIRTKMRVKIAAKMLVIAWTLMKRKEPFNPAFIQS

SEQ ID NO: 428707 - protein, 357 aa, unidentified
MVTGLKHQMEKRSMEHFAGLDVSVNETSVCIVDDAGSIVREVKVASEPDALLAVLKSGVYRFRRIGLEAGPLSQWLYSALGEAHLPVICVETRHMRAVLKAQINKTDRNDARGMAQMMRAGLYRPVHVKTLRSQKLRMLLTHRKLLQSKAIAIENDLRGTLRNFGLKVGVAGAVRFEARIRELVKDLPDIAILVEPLLVVRRTLREQLGILHRHLLTIARDDEVCRRLMTIPGVGPVVALTYRATVDVPARFRNSRAVGAVVGLTPCKYQSGESDRTGAISKCGDEMMRVMLYEAAQILLMRSTQWSWLKAWAVQIARRRGVKKAIVALARRLAVVMHRIWVDGTTFRWTREEATAA

SEQ ID NO: 428708 - protein, 362 aa, unidentified
MRIIGCDLHARQQTLAMLDTVTGEVVNMILKHEGDNVREFYSKLPRPMLVGIEATGSMQWFLNLMEELGIECRVGHPAQIRACEPRKQKHDRRDAELILKLLAEDRFPAIWLPSKELQDLRALLRHRHQWVRMRTRVQNALQSIALANGLQRGTALWSHDGQSRIAALPLAPHTAYRRSELQAMYEKFEAEIEKLNQRVEEQACGRDGARLLMTHPGVGPITALATEVFLGDPARFADSKALASYVGMIPREYSSGGRQRLGGLSKQGNPLLRFLWGEAGAHAARKDPELQRFYRRKLVQKGLGKASVAVARKLGIRLWIMLREEIDYNEFCRRGQKQQNSSDACVGMPETPNGANSHRPVD

SEQ ID NO: 428709 - protein, 352 aa, unidentified
MITIGVDFHKRSSSYTVLDQNGTMIKQCKFENTPERITRFLSQWEGPKQLAMEATYNWGLFYETARPYVDKFLLGHPAKMKAITASETKCDRHDAFMIAQLTAMGFLPKAYIPCHDNRQLRSLVRFRSFLVRQRSAIRNNTQVLIDRNLWPSERPKLFKNIYCRKGRLWLKALPLPDKERFILDELIYVFEQLDEQIKRIESFINQEAFDIPEVEYLRTVPGLRQSKVYLYSILFEIDDIRRFTKARHLARYAGLIPSEHSSGEKQRSGRLIQRSNHALRTSIIEATLSALLADKQLKAYYQSIKARRGSGAAIIACARKLSYAIYYVLKEQRSYRPFPPAAASSPLAVNPL

SEQ ID NO: 428710 - protein, 368 aa, unidentified
MFTERTGVGLDVHARSVAAAAIDTVTGEVIERRLDGDYGSVIDLAHRLEAGHGPLRITYEAGPTGFGLARELAAAGLTVQVAAPSRLLRPAGQRVKTDRTDAMLLARLTINDDIVAVRVPTLSQESARDLVRARDDARADLMRARHRLSKMMLRRGWVYPGRTTWGPAHDAWLRRIRTNDVPALGSGAAAAFDDAYDAVAHALARRDRLDEAITALAADCEFTDTTTRLSCLRGISTLTGFALAVEIGDWNRFTGATIASYLGLVPCEHSSGQTRSQGGITKTGNTHARRLLIESAWQHKPAWRPGPTLRAAWAKAPAVVAERADRGNRRLHRRWTALAARHKRHAVANTAIARELAGWCWSLATMDA

SEQ ID NO: 428711 - protein, 408 aa, unidentified
MPELDHRGPFAAVDWAKDAHAVSIVEESGAERLAEQFPNTEAGLRALTGALLEGGVERVAIERPDGLLVDRLLSAGLCVVAVHPNKLASARERHSASGKKSDGFDAFVLADLLRTDGHRFEALRPDGDETRALRALSRTREDLVGARVALANQLRAGLEAFWPGAAVIFAEVDSPIALAFLERYPSPADARRLGVRRLEGFLARHAYCGRRPAVELLARLRGAPEGRSGEAEVEARRQAVLSLVAGLRALVEQIGLLEAEIAGAVRSHADGAIFSSLFRSKATVTAARLIGEIGDVRERYRSADALAADAGMAPVSRSSGRSRVVTFRWACDKRLRNAVACLADTTRHHHPWAGSVYRRARARGCDHPHAIRILGRAWLRVIWRMWQDRVPYDPALHRGLQQLNPAGG

SEQ ID NO: 428712 - protein, 316 aa, unidentified
MAIEEVFVGVDISKLRLDVCVRPGGSPWSVAYSDAGLAELVEKLGAHRVKLIVVEATGGMEIGVTAALAVAQLPVAVVNPRQVRDFAKATGTLAKTDALDAAVLAHFAEAIHPEPRPLPDEQTEALSALVTRRRQIVEMLIAEENRQRTAPVKLRKGIQQHVEWLRKRLEQLDDDLAGAVRESPVWREKEDLLRSVPGVGRVVAITLLAELPELGKLNRKQIAALVGVAPLNRDSGTLRGHRTIWGGRAQVRAVLYMGALVGIRHNDVLRAFYTRLVAAGNTKKAALTACVRKLITILNAILKAREPWRTVAEEGA

SEQ ID NO: 428713 - protein, 348 aa, unidentified
MRTGQTAPTYTLFVGVDIAATTAAVSIQRAGALASRSFTIDQTPEGHTTLVHQLQATGHVPSSILVVMEATGSYWISLATHLVHAGLVVSVITPAQPHYFAKALLKRAKTDAIDAQTLAQLAMVLQPEPWRLPPPIYHAPQQRLAQRDDLLNLRQQVDNQLHALRQHPEVIPEVRARMERLLATFEGQLTEVEAEITAALRQDSAWAAAAQRLQSITGVGWVTAAWTLVSTLNFTTCDTVEALTAYAGLAPMPRQSGTSVWYRPAIGHTGNSRLRTALYMATLSAVQHNPVIKTFYGRLRAAGKPEKVARCAAARKLLHIAWAVVKKDQAGLTAANAGKFTVTPPAAN

SEQ ID NO: 428714 - protein, 409 aa, unidentified
MYDKTKYIYVGLDLHKEQHTAVIMDCFNEKLGEITFENKPSEFTKLITKCKKHCTDSKGIVFALENSYGYGRGLAAWLIERDYIVKDVNPALSYAYRKSVPQYKKNDSYDAQCVARVAINELNKLPDAMSEDMYWTLSQLVNRRANLKTHHIRLKNQLHEQVCVAYPSYKQFFQDIGRPTALYFWEHYPSPRLLRGKTVEELAEELIPVSHNQFSTRKCQIILDAVKADGDTTRDYQPERDEITRGLVKDVRHYVEQLEAVDKSIADFLPRFECPLNTIPGVSDTTVAKLLSEIGDIRRFPNADKVANFAGIAPVNFSSAGKGDDKHSKQGNRRLQGTIYFLAIQMIQLSSKGLPRNPAFYAYYQRQLARGKTKPQALILISRRLISIIYGMLKNKTEYVMPKVQDNLG

SEQ ID NO: 428715 - protein, 415 aa, unidentified
MSGKREIACGVDVHNKFIVATILSSDGLRIQSRFNTTLDDLLKFKHWLKENGCHKVAVESTGNYWIPIYSVLEGSINFILANAYQIKHIPGRKTDALDSEWIAEICLKNLISASRIFTRDHRELRSLTRTRESLIKVRTKIKNRITHELEAACIKLSSVLSDIFGKSGRHIVDGLLNGIDLEEILESIPSKQVRAIKEEIRGIIQSNLSPTQIFLIRSHLDMVDAITKQIVEIDSEISDLIASRKEEMRIALSMPGMGIISASTILAEIGNFRDFCSPDKLAAYCGLVPSVYQSAGKLINGHITKHGSPHIRGMIIEVAHAIIRTKRNSRLKKFFLRVKARRGTKIGLVALARKVLCILYHLIVSHETYQDDLFGKPRAVKYSRGQSVAMSLDDMIRTITKAGYEVRKNGNPESG

SEQ ID NO: 428716 - protein, 391 aa, unidentified
MIAVGVDTHKQQHLAVALDGLGQVLGEIVIATTFAGYSQFVCWLRDLGESVLVGIEGAGSWGAGLCEFLQAEEIEVFEVERPQRRERRGGKSDRIDALLAAKKVLTGDGLSTPRGSGKRLALQMLLAGYRSIVSERSRLYNQLQALQVSAPYALRERIGQARNGAALANRLTGMRTRPTASQQENLTLHVLRDIANRARALDAEAENYTRQIEEMVSSLAPTLLEEPGVGPICAGRLLAFNPSRFRSEAAFARANGTAPQPASSGKTVRHRLSRGGDRQVNAAIYTIAHSRSVHHAPSRAYMQRKITEGKTKREAMRSLKRHLSHHLYNQLAKNTLDNIEASNEIRFKPSSSVESHLQMPPTDSEDGIAASLARPCRSKTRRATRVAAHAA

SEQ ID NO: 428717 - protein, 452 aa, unidentified
MEREEKRLEQFRWLRKEIRGCQDYWVVGIDISKDLHNAVIRTVSGKMHRRLTFHNTREGFENLLLAVDAVKVQHGPTEVVFGMEPTANYHKPLGEFLINRDHQVVLVSPEAANKNRSLLDGRWNKHDGKDCANVADLICQGKFLYYEYPSAELGDLRNLLSLNRKLKKFEQGLRLRMRNHLVAQYFPEMDQYCHWGASEGLALVQWCLDPALMASLSDEELCQRLGSLGRTIAQRKRLSALKEQAASSIGCRFSRSVEFEGQNLVKLLKEVRQRMENTREQIEEVCQKFKEYSCLLSIPGFGPTLSAMVLGAIGNPWRFQNGAQVLKMVGLDLSASSSGKSQGSPVVSKKGKAEIRYALYQAAMVASTRDKHFVRYFTDQLRGREKETGIKTKKRVKLAAKMAMIAWTLMKKQERFDPGYLAAGDQRIAAATNAKVQNGGIPNVQPDAARAL

SEQ ID NO: 428718 - protein, 317 aa, unidentified
MWFIGIDVSKAALDAASLSDDGEIRRIHVANSDSGHAQLIEWLREAPGSCIAMEATATYHRALVAAFAKAALPVSLLNPAQVSHFVKSQQRRNKTDRADAMWLAVYARERHPAPTAPVCFRHQSMSREIYALDKDLTRLKNRLDAAQAGEAHPDVIASLQRRIQLLQQEKQALEEQLERDVRTDHPDELALLTSIPGIATRSACLLLAEFQNVRRFSSARKLVAFAGLTPAHFESGATVHRYTRISRMGSSAIRRILYMPCLSAIQHNDVIRSFFSRLVERGKPRKAAVVACMAKLLRIIYGVLIHRHPFSPQPVTP

SEQ ID NO: 428719 - protein, 397 aa, unidentified
MRFIGMDVHRDFCEVAIAEDGRVRSAGRVTTEEAELELFAASLGTEDLVALEVTGNAAAIARIIEPHVSRVVLVDPVKLRGKLRAGPKTDRLDARALAKLGAGGFLDAIWTPDEKTRVRRRLISRRGQLVRHRTREKNQIHAALIRNLKGKPPMSDLFGVNGRKWLTAQVLPPDEAETVDACLRQVDFLDAEIETIERRIAEQMLASEEIRRLMTLPGISTVSAVALMAAIGDVSRFPSPGHMAGYLGLDPKVRQSGSEAARHGRISKRGPGYARHYLVEAAWHAGRAAGPMRAFRERVEKRRGVNVATVAVARKLVVIAWNMLTREEDYAFARHSRVRAKIRAAELAAGAEPHKGKRLKRGTATRQKELEKEVAAQAEVAYRRLVADWQPAGQQSG

SEQ ID NO: 428720 - protein, 394 aa, unidentified
MIYAGVDIAKTDHVIGAVDERGAEMCPPMPFKNTEAGLERAVAWLEGLAGSPSDVVVGMEATGHYWMACYSFLVARGYSVAVINPMQVKAVRKLKGLDKVKNDRVDAGLIAEALRIGQYDETRLATDEVASLRSLSRYLQSLRGMVAELKTQCICLMDAHFPEYAGIFSDMFGAGSRAVLSKSPLPFELARRRADSLARDIAEASRRGGKSSGYAAKIKAAAKSSIGVRLGQEAASFQVKSLIRQIEFADSECAGVEARLRSLLDEVEPLVLTIPGVSYVTGAQIVSEIGDVSRFRNAPALVSYAGLNSSVSQSGQFDSGGGPITKHGSPYLRRALWLAANRARQHDPGLRAFYDRKRAEGKPHRVAVTAVARKLCHIVFAVMRDQVPYDPGRE

SEQ ID NO: 428721 - protein, 372 aa, unidentified
MDQVTTTFVAMDTHKQTISVAMAEGGRRGETRFLGEIPSRPEAVAKLVERLSKKHTKLAFCYEAGPCGYGLCRQIVALGHECVVVAPSLVPTRPGDRVKTDRRDAVTQASLFRSGELTSVWVPDEAHEAMRDLCRAREAAVETLRRARQQVTSFLLRHGRIYSDGKHWTGKYRKWLASQRFDHPARQIAFEELVQAMEEALARRDRLAGQMHELLPSWSLAKVVAAIQALRGVAAMSAMTLVAEIGDFHRFSNPRHLMAYLGLCPSERSSGAKTARGGITKAGNRRGRRMLVEGAWTYRLPARVGLAILERNKLLPPPIREIAWKAQVRLCARYRRLAKMGKPINIVCVAIARELAAFVWAIATNDAVSAIA

SEQ ID NO: 428722 - protein, 354 aa, unidentified
MNTIRVVGIDIAKSVFQVCVWMIDGSVAWNKKVTRQKLLDTLGQFEPGTMMVMEACSTSHFWGRTLSAMGFSVRLIPAQHVKAFTKSQKNDANDALAICETACRPGIHFVPIKTTEQQDIKALRNTRQLKVEQRTALANQLRSLLAEYGLIIPVGIQCLDQQLPEFIEDASNDLTFTLRRLLNSLREDMQVLNERVICLDKEIAALSSQQTAYHHLLTIPGVGPLISAAFISEVDALLFSSGRELSAWCGLVPRQHSSGGKQRLSSVTKNGNRSLRTLIIHGLGFKSMKTAYATIKGIEAMRALGKGQAEPWYYGTSSGRSASGELCFQPISSRIEGKIYPKPLFATVPTKLVV

SEQ ID NO: 428723 - protein, 350 aa, unidentified
MLIVGCDYHPGFQQIAFVDTETGEFEERRLQHRGEAEKFYRDLAARGVKVRVGMEASGHARWFERLLAELQLELWIGDAAEIRAKRVRKQKTDRQDAQHILTLLVQDRFPRIWVADWENRDLRQLLWHRHRMVQTRTRIMNQLQAVALNEGLRCKKRLWGKKGRQQLEGLRLAPWATRRRRDLLELLDRLNPVIAELTHEIEQEVEKCPVAQRLMTHPGVGALTALAFVLVIGTAERFQCGKQIASYLGLVPAEDSSGERRRLGHISKQGSAILRFFLVEAAQVTVRSVPEWRSKFFHLAMRRGRKIAKVAMARRLAVHLFWMWRKQWDYQQLNEFGPYAGKPGTGVGVH

SEQ ID NO: 428724 - protein, 390 aa, unidentified
MNPRALGWDIHRKFSKVSLMEISADGEIRAVERARLEHEDREAMRQWLSRLDPEIPVALEAAFGWPWVADLLAELGHPVHLGHPPAIKVLAQHEAKSDRCDGDRLGKFQLRGILPESYLAPPEVRQLRERTRYRMALSRLRTGVKSRVQAILHRLGILHPFSDLFGKAGRHFLEKLPLPEASREALCGLLELLDQIQARITEVERWMEENLEVDELVRLLMTIPGIGLILAHVIRAEMGEIARFPSHRHLASYSGLAPLSRQSADRDGPRHCSPACNHILRWAFIEGTTGLLNSKGQAWRLKRLHARLTHGGRSNKNQAKVAIAHELSQLVYVVWSKHVPYSDVPPPRPGSRADKRNNKESQTAQITLRPDQPRHPMVRRRSKTVGKTLM

SEQ ID NO: 428725 - protein, 413 aa, unidentified
MEKIYDICCGIDVHKKLIVACLNHKRKKELREFGATTRELMELAEWLQKNECEIVAMESTGSYWKPLYNIMESYGLHTIVVNPAHMKAVPGRKTDVKDAEWIAELLQHGLLQPSYIPSKDQRELRELVQYRKSLVGERTRELNRLQKMLEGANIKLSGTVTNINGKSARKILEYILSGNEIDEKKYDEMYEEKLIAHNLKASKEQILDDLKGLMSPLQRRMLKELLQHLDELNVHIENLNDEIDNFMKPEEKQASQVIQDVTGIGNTSAQAIIAVIGTDMERFPSDRHISSWAGLCPGDNVSAKKRKGGKIRKGNALLKSTLVLCAHAAVRHKSSYFHAQFKRISTHRGKKRAYVAVAHSILIAIYHILKDGVKYQDLGAEYYNQFNAERKIHAYLKKLKALGWEPPKEAVPA

SEQ ID NO: 428726 - protein, 339 aa, unidentified
MDNRDHAGIEVSKDELLVALRRDEQTLPLKSFPNTPPGHRDLARYLARKGRLVRVCLESTGVYGLDLALLLHKRAGLEVMVANPRAVRHFAQALMQRSKTDPLDTLMLLEFAVRMPFRPWQPPSGPALHLCALARRIEAIKDLCAAEQNRLHAASVAQALPAVVRQDLRRSIAFHERALARLTTQTLKRIADDPLLQERFDYLDSAPGIAPTSAIAILAELTLLSPDLDVRQWVAAAGIDPREYSSGSSVHKKTRISKAGNRHLRRALFMPALVAVRHDPHLGAFYQHLLGKGKAKMQALVAVMRKLLHAIFGMWKHHQAYDGSQLFALPAEPSIAEVA

SEQ ID NO: 428727 - protein, 366 aa, unidentified
MLRPARKAPTQKAHSENPMNALHYIGFDVHKKTISFCVKTAAGEIVEEGSLQAQRGALREWASARRQPWRGAMEATLFSGWIYDTLKPYGEQLEMAHPAKMKAISAGKKKSDTIDARTIADLVRCNLLPACYVAAPRIRELRRLLRYRGLVVSEAVRMKNRMAGLLMETGALYVKEKLHRKKYFASLLEELEEVPDSVIDLLRSSRGALEMFESTQKRLVRELLADPELAQRVERLMTIPAVGEITALTWALEVGDPQRFRSGSDAMSYCGLTAALKSSAGKLQRGPISKQRNRWLQTMLIEAAKLAPRWNPQLAARHARELERGHRNRATLAVARKLVAYLLAVDKSGQPFQPRMPSEVPTQKAA

SEQ ID NO: 428728 - protein, 316 aa, unidentified
MNETIVEKFVGIDVSKSTLDVRIEPAVQTLHVAYDEAGTHQVVSRLKELNPTLIVIEATGGLEVRIATALAGEGLPVAVINPRQARDFAKATGQLAKTDQVDAAVLAAFAKAIRPQARPLKDEDTRALNDMVGRRRQLIDMRVQEILRLGTAASKPLQKSLAKHIAWLNKQITEIDKDLSKRLRESDVWRAKDNLLRGIPGVGAVTTLTMLAKCPELGTLNRREIAALTGVAPLANDSGKHRGKRFIWGGRADVRAVLYMATVSAIRCNDTIKAFAERLKKGGKPPKVVIVACMRKLLTIMNSMLKNNTPWDPKIA

SEQ ID NO: 428729 - protein, 346 aa, unidentified
MSEYVGLDVSMKETSICVVDAADEIVAEGKVASSPEAIAAFVARHAPGAVRIGLETGSMSGWLWRGLVRLGLPVILIDARHAHAGLKLQLNKTDRKDAQGLARIMRAGWYKEVHVRSPESQQARHLLASRSLLVAHRVDLENQVRGLLKGYGLVVGPVGQKGFAPRALELIGDEPALQAVIGPLLTVREVLRRQIAALHKQALAGARQDPVTRRLMTLPGVGAITALAFRATIDDPRRFANARMVGAYLGLTPRRYASGEINRMGRISKCGDRVTRTCLFQAANVLICRVTKWCALKVWAQRLKKRVGHKKAVVALARKIAVVLTCMWRDGTSFRWTKQHQDQAAA

SEQ ID NO: 428730 - protein, 332 aa, unidentified
MKKIIHFIGIDVSKETLDIALIRNNDKSNIYSSKVTNNTTGFKKMKQWLKGEKISLQEAVFCIEHTGMYSKPIGHFILSLQGNLWMEMSLKIIRSMGVQRGKNDKIDAIRIALYAQRCQDEMKLYEPPRPIVEKLRTLLQLRKRLINSRNSLQVPCNELTTIDEKAGKEATRLIRSSVSALEKNIDVINEEIDELIASDEQLTHEFEIGTSVPGIARITLAYIICFTNEFKNYSGGKQLACYCGVVPFEYTSGKSVRGKPHVHNMANKFLKKLLHMGAIAAVTYYDEFKWYYKRKVEEGKPKMLVLNNVRNKMVLRLAAVIKNNKPYQKIAA

SEQ ID NO: 428731 - protein, 324 aa, unidentified
MSLPTVGLDIGKATFHAVLLINGKNLRRALPNTAAGHTQVLSWLAQKGAAKAQACMEATGSYGQALAMRLYQAGHIVSVVNPARIKAFARSAGERNKTDRRDAAIIARFCQVMQPDPWTPPEADELLLQKLSRRRDDLKAMRRQEENRKNTPETAQTVVQSIEAIIEVLNAQTTEIERQIAELIEKNARLRREHDLLTGIKGIAHDTAVTVMAEVGNVARFHDARQLAAYAGLTPKNNQSGTSVNKKTHLSKCGNARLRSATFYPAMVAMRYNPIVRAFAERLRKAGKPNMEIVGAAMRKLIHIIYGVLNSGMPFDPNFQPIHP

SEQ ID NO: 428732 - protein, 316 aa, unidentified
MNTKTNQSINVGVDTGKHQLDIYIRPLDIYFTVENNEKGIKEAVKTIKKYKPERIVIEATGRLEMPFILACASANLPFTIANPVHIKRFAGALGQRAKTDKLDAQLIAHYSEAIKPRLSRLKPDTMQAMSDLVTRRNQLLNMQTMEKNRLQIMPKELVMTIKPVLTLFKNQIIKIEDKIVKLIESCPEYQAKNMILQSMTGIGKIAAASLISNLPELGYINSKQASVLIGVAPMNRDSGRYKGQRKIQGGRPQVRTVLYMAMMSAMQSNPVFKSTYQRLLAAGKPKKVAIIACIRKMIVILNSMLRDGVMWEAPKV

SEQ ID NO: 428733 - protein, 360 aa, unidentified
MEIGQTVADHDVVGGVDTHKDLHVAAVVDALDRVLESRCFATTRHGYQQMLTWMRSFGQLRRIGVEATGTYGAGLLRYMQNAGVEVLEVTTPDTHDRRKRGKNDDLDAQNAAHAAFAGRRTVTPKSRDGMVESLRVLKACRKTAVAARRVALQMIHNTIVCAPDDLRETLRRMTRMQLIRTLAAWRPDLTDYRSVVSAYRITLKSLGRRYLELHDEIADLDTMIVAIVDELAPALVARNSIGHGSAAQLLVTAGDNAERLQSEASFAALCGASPVPASSGKTTRHRLNRGGDRAANSALHIIAIGRLRTDPRTKAYIAKRVAEGHSKLEAIRCLKRYIAREVFSLISQRKREINQGRNAA

SEQ ID NO: 428734 - protein, 366 aa, unidentified
MKKISTGAKRGNEISKEPKLTICLDLGDRSSHYCILDEAGSVLLEHSLPTTPKGIHQVFSRIPRSRIALETGTHSPWVSRLLTQSGHEVIVAHARNVRLIGESRRKDDRIDARTLERLARIDPQLLSPVQHRSAEAQIHLTVIRARAGLVSARTALVNAARGLVNSYGQRLRKCGTQQASREMAAGLSAELRDALEPLLREVESLNERIKEYDRRIEEMAKQTFPEVALLQQVKGVGELIALTYVLTIEDPHRFRKSRDVGCFLGLRPGRKNSGQSEPQMHISKEGDRYLRTLMVQGAHYILGPFGEDGDLRRWGRKLAERGGKNAKKRAVIAVARKLAVLLHRLWVSGDVYEPLRNSQKAVCAAA

SEQ ID NO: 428735 - protein, 400 aa, unidentified
MAVMIGTGPHKGSHTAVAAGAAEEPLGKLRVRACPDQAGKLVAWAQAWPERTWAVEGARGLGRLLARQLIAAGERVLDVQPELAARVRLLEAGDTNKTDPDDARSVAVAALRSKSRQEVTADGHAVVLKVWAKRHRDLSRTRNQVVCRLHAVLCELIPGGVPDGITAGQAARILEQVAPAGAVAQARCELAAELLAGIRHLDAQRREVNKKLAAAVTASGTSLTEVSGVGPVIAATVIGDVITAARFPSRDHFAACNGTAPAGVSSGQRTIHRLSLRGNRRLNHAVHTAAINWIRHKHSDGRACYQRKLAEGKTRKEALRCLNRRISDAIYARLRADARKAGPGGQPGNDIGSSVTGSHPGHRLFGQATSGPEPSLRAPATFTQATPALEQSAKKIQRAT

SEQ ID NO: 428736 - protein, 359 aa, unidentified
MKNTLNHAVKRSTLPTPETQVRIQQLKLGVDWHADHFRVVRMCDGQSPQPAQRFTPASFLPFVQKQLTLADQVFVVYEAGPGGFHLHRQLTALGVSAFVVHPQKLDPQHKGVVTDKTDARELTLNLDRYLRGNVRAMSVVRVPSPAEEQRRALSRQREQLRRERQRLAAQGRSLCLTQGMRLRGSWWKSPLTLPDWLEQRLSVWRQLIVAVEAQLATLTQQVRALAPSVRPKGLGPLTLGMLSAELCDWSRFKNRKQIGSYTGLCGGVSSSGQSHCDLSITKAGNARVRWLLVELAWRMVLYQPQSRAVQRWRHVLLNPQAALRQRKRALIALARQLAVDIWRWQTGKVTPEQLGWVMV

SEQ ID NO: 428737 - protein, 366 aa, unidentified
MQKINTMRRCGDKISKKSQLTIGVDLGDRWSCYCILNESGEIVQEQKAATTPQGMQQAFGKMARSRIAMETGTHSPWVSRQLTALGHEVIVAHAQNVRLIVKSRRKDDRLDARTLARLARVDPELLSPVQHRSAEAQLHLAEIRARAALVSTRTALVNAARGLVKSYGQRLPKCHTQKVGREVASELSSELREALQPLLREVESLNERIQEYDQRIARMAKEQYPETALLKQVKGVGDLIAATYVLTIEDPHRFRKSRDAGCFVGLQPGRRNSGDSEPQLQISKQGDEYLRTLLVQGAHYILGPFGEDCDLRRWGQKLAARGGKNAKKRAVVAVARKLAVLLHRLWVSGEVYEPLRNSDQAMTTAA

SEQ ID NO: 428738 - protein, 342 aa, unidentified
MRIGLDTSKDVDKLHGVDSEEEPVLRKKLRRKEVVAFFQKLAPTVIAIEACGGSHHLARSLATFGHEVKLIPPHYVKPYVKRGKNDAADAEALCEAMSRPSMRFVPVKTAEQQAALMLVGLRERLIRNRTQLANSIRGYAAEFGVIAARGLCRIGPLLERIAADVSLPALARELFAIQGKEYALIEAELKVIDAKLMAWHRDNACSRRLSQIPGVGLIGASMLVMKTPDPRLFRSGRQFAAWLGLTPKDHSTAGKVRLGVITRAGDEALRSTLIVGATALLRRVREGSNRKSSAWLLDLLRRKPPKLVAVAMANKIARIAWKLMVSGETYRANAASFVAAAA

SEQ ID NO: 428739 - protein, 374 aa, unidentified
MDTNITKIALDTHKKQHTVAWVNCQTGETDVFTVLNTNKDITKMVKKLRKKTGTRLHFCYEAGVCGFALKRLLEKLGCMCDVIAPSLVPVKPGDRIKNDRRDAKKLLEHFIVCQLTTVYAPDIKQEAVREITRCRQAAKENLNRIRHQILKLLTRHGYRFTEGKNNWTLKHMVWLRALKFDSADLAKVFDYMLTELMHCDQRLDNLNKEVEALGERPELKGIVGVLRCFRGIDTLTAIIIITELFDLGRFSSPRALMGYLGMIPSEYSSGDKQCHGHITKAGNSRVRRMLIESAWHSRHRICLGRALKIRRKDQPQWAIDIADKAMARLHKRYKNLNDRGKMPCKIAVAVARELAGFIWAMFREYSVRQSLKVA

SEQ ID NO: 428740 - protein, 387 aa, unidentified
MPQPNDLSRSLAALDQDSTLVAVIEISQSSWLVGGIVPGVNRQPLKKLAADETALLQLLSRWRDEATKAGRTISRIAVAYEAGRDGFWLARWLRGRGIEAHVIHPTSVAVSREHRRAKTDRLDTELLKRAFLGWLRGEQRHCSMAMIPTLEEEDAKRPNRERENLVSERTRLVNRMKSALARLGIRGFKPHLRKASERLDTLRTAEGMALPPNTLAELRRDMARLRFVMDQIREIEAARLARLEQHPEQANHAMVRLLARVVGVGIETADMLVHEILSRHLRDRKAVARYAGLTGSPDESGARRRDKGLSRAGNARVRRGMIQLAWRFLMFQKDSALAQWYRRQTTDGRGATRKTMIVALARKLLVALWQLVTTGEVPEGVVLRRAA

SEQ ID NO: 428741 - protein, 363 aa, unidentified
MVDGTAVAVGLDVHKASVRLAAVRGDELLDERTLPYDNEAVARSLSRWPGARVCYEAGPTGFGLHRHLVARGIACDVVAPGSVPARPGDRVKTDRRDARKLARLHGGGLLEAIWVPGVELEALRDLVRAREDARLDRMRDRHRTSKFLLRRERRMPGQSWGVKRRKWLGDQRFELVAQQLAFDTYVHALDLVDARVHVLERQIAALAVEGEWAPLVARLRCLRGVDTLTAVGVVCEIGDFGRFGGAEEFMSFVGLVPSEHSSGQSRRQGAITKVGNSHVRRLLIEAAWHARRPPRVGYELARRQRGQDPEVLERAWRAQQRLHQRWRRMAGRGKPHQKIVTACARELAGFVWAIATDQPLRHT

SEQ ID NO: 428742 - protein, 393 aa, unidentified
MDKQLQLIVGIDIGKRFHQATVIDASGNMLGKSLRFPNTTVGGELLMSKITSVNPKGLPLLFGLEATGHYWLPLFAYLTEKGYQIVVLNPYQSDAFRKVSMSQTKTDKEDALLIAELLRFGSFPQTKMADEDMIALRNLTRFRLTLNQQVTDSKRRILTILDKIFPEFESMFSDIFGKTGRSLLKKYPTPEEMETVSLRKLTSLITKLSKGHFKEEKAQEVKMKAKTSFGITLALESLTMQLKILLETLEFTEKQLKVVDTQVEDLLPDTCVLLTLPSVSKVLSAAIISEIGDIKRFRTSAQLVSFAGINPTVRQSGNFLGSRNHMSKKGSPYLRLALWQAAITSSRFNPILKEYYQLKIKEGKSHMTVTGAVARRLTGIIFAMLRDQTVFTV

SEQ ID NO: 428743 - protein, 349 aa, unidentified
MSHTLDTDIAVAGIDIGKNSFHVVGLDRRGAIVLRQRWSRSQVEARFANMPPCLIGMEACVGAHHLSRKLHGLGHDARLMPAKYVRPYSKGQKNDFRDAEAIAEAVQRPTMKFVATKTADQLDLQALHRVRERLVSQRTGIINQIRAFLLERGIAVRQGQRFLRTGLPAILATPSDVLSPRIVRVIEDLTGDWRRLDERIEALSGEIEAIARQDIGCERLMSVPGVGPIISSAMVAAIGAGDAFSKGRDFAAWLGLVPRQMSTGDRTILGKISKRGNRYLRVLFVQAAWVVLVKPKSWERYGLKPWLEAAKKRLHYNVLAIALANKLARIAWSVLARGRGFEASKLQVA

SEQ ID NO: 428744 - protein, 337 aa, unidentified
MEVQQQYVGIDLHRRRSVIVRRNEVGETLETVRITNDPFALAVELGKAGEHPEVILEATYGWYWAADVIQECGGNLHLAHPLGNNWGHRRVKNDERDATDLVDLLRMGRLAESWVAPPSVRELRELVRFRAKLVHLRSSMKSQVHSVVAKEGVAVPMTDLFGVAGRRLLDETPLADAYRMRVQSLLELIKHIDTDVQMLDAHLSPVFAADPGFCAIRNIPGVGAVLGAVFVAEIGDISRFTSAKHLCSWAGLTPAHRESDTKIRRGHITKQGSRLVRWAAVEAVSHQRGDSPIRRHHHRVAERRGIQVARVAAARKLLMLVYYGLRDGEIRCLAQTR

SEQ ID NO: 428745 - protein, 346 aa, unidentified
MLYAGLDLSRQRLDVHVLDEDGRTVEVMAVRPDADALRSLTARVLLHGEEVSAAIESMTGARFVHDTLERYGWDVAIADAVKAKGLAPLAAKTDKIDARVLAELARRDLVPEIWLPTPGVRAERERARFRLHLVRHRTALKNRIHATLMTFGHPVSVSDLFGTKGRQLLEGLDVPEPWRETLTTSLRMVDELNLRIDACAENLRTLGADHPSIPLLLTVPGVGWVLAYTIASEIGDIARFSSPKKLAGYTGLCPLVRQSGNRDIRGPLAKSGPKYLRWALIEAATHAARDPRYRERYERTKRRLGRQRGAKVARVDLARQLAEAIWHVLTKHEPFAPAGPAIPLVA

SEQ ID NO: 428746 - protein, 409 aa, unidentified
MKMAGIDVHKKVLMVVVVDTSALQEKPARRRFVTLPSELQRFRIWLQEQGVEEAVMESTAQYWRSVWLELEPHMHLHLAQAFSNRAPRGRKHDFKDAERLVRRLIADELILSFVPNGEQRIWRSLTRMRVQLTRDRVRLQNQMECLLEEMRIKLSIVVSNLLGASGLRILHALAQGETDPKKLAELGDERLHCTEEQLVDALTGRVQPMHRGMLALQLQRLQLIDQQMAQLNHLIAQAMKSHQDAVIRLAEVPGLGVDSAQPIIAEVGAQASTFSSAAELAAWVGTCPGKEESAEQNQSSRSAKGNKYLRRVLNQAAHAAVAKKGCHFQVVFRRLMPRLGYKSAIWAVAHRLCRVVWKILHEGVRFIEQGREVGPREKKQRAQLLARALRKLGYEVTITPINQLAPKPA

SEQ ID NO: 428747 - protein, 399 aa, unidentified
MRSRKDDCCPERSVSTQAKRVFPSHLSWATLKGTPDRQVLYPHCCGLDIHKKTVVACLLLTDPDGTIHRSIRTFGTMTADLLALGDWLSLHKVTHVAMESTGVLWRPVFNVLEEGRTLLLVNAQHIKAVPGRKTDVKDSEWLADLLRHGLFRPSFIPPPPIRVLRDLTRSRKNLVEHRTQEINRVHKVLETANIKLGSVASNVVGVSGRRMLEAIKQGESDPQVLAELAKGRLREKLPALPLALDGRVQAHHQLLIGELLDHLDSLERAIHRVEVNSAALVAKEEKALELLLTLPATGPVTAAALIAEIGVDMSRFPSPAHLASWAGVCPGNKRSAGKQLSGASTKGNKQLKTILCEIAATIARTPGTYLHALYQRIARRRGKPRAMMAVAHSLVVSIS

SEQ ID NO: 428748 - protein, 356 aa, unidentified
MQIIGVDLHTRQQTVAMLNVETGEIVEKTLQHEGNSVREFYSTLAGPTRVGIEATGSMQWFLELMEELGIDCQVGHPAKIRAAEPRKQKHDRRDAALVLQLLVENRFPSIWMPSREQRDVRSLILYRHQWVRIRTRVQNALQAIALSHGLRRGSSLWSEAGQHTIASLSLTRYTAERRTALQSLYRRLEEQIGELNRKVEELAWQRPQARRLMTHPGVGPITALATETFLGEPKRFVDGKAVASYVGLIPSEHSSGGRQRLGGLSKQGNPLLRFLWCEAVGHAVRKDAELQRFYQHKLVQKGLGKAKVAAARKLGIRLWILLRDQIDYQEFCRRGQLRQKHGGAHAGMPAREHDPA

SEQ ID NO: 428749 - protein, 410 aa, unidentified
MEVIHARCAGLDVHKKTVAACVRIAAGAAVRHEVRTFGTTTAELETLGAWLRAEGCTHAVLESTGVYWKPVWAVLAGEDLTLVLAHAAAVRNIPGRKSDVKDARWLADLLAHGLVRPSFVPPAAQQALRELTRTRKQLVREITAHTQRVHKLLESANVKLGAVLTDVLGPSGWAIVEALAQGETDAERLAERLHARSQGKRPAVVAALQGARLQAHQRVLLQQHLTLIRSVEASVAVIEAEIAAALKPFRGAVERLVTIPGISMTAAAIVVAEVGTDMTRFATAGHLRSWAGLCPRLDESVGKHGSRRIRQGAPWLKPIIVQSAWAAVRVPNSYSRALYHRLARRSGKKPAIVAVAAALLTAIYHMLRTDQPYRDLGPHHLTTADRRRKAHRLATQLKHLGYEVTLHEAA

SEQ ID NO: 428750 - protein, 406 aa, unidentified
MEVIYPRCAGLDVHKQTVVACVRIARDGAPLQEVRTFDTTTSGLLALADWLESFGVEHVAMEATGVYWKPVWHVLEGHFELVLANAAHVKNVPGRKTDVNDAMWLADLLAHGLIRASFVPPVAVQELRTLTRTRKQFVRERAAHVQRIEKVLEDANLKLSVVLSDILGKSGRAVLQAIIDGQNDPERLLSCIGRVKASRAALLEALRGRISAHHRFMLKLHLGHIDALDKAIADIEKEVGLGLEPFRKAAKLLSTMPGLSSVSAHVIVAEIGIDMSRFATPGRLLSWACMCPRNDESAGKRRSTRLRRGGKWLKTTLVQAAWAAVKVKGGYLQAQFHRLRARRGTKKAIIAVAASMLTAAWHMLRDGTEWHDLGAAHFDRADAHKTAARLIRRLQQIGYTVHATPA

SEQ ID NO: 428751 - protein, 321 aa, unidentified
MNNYTLEVARTAGAKELKNQKAAKAKRIVMGTDVHSRSYQAARKIDNGPIGAVAKFRSQEELLLYVEKQKEQAEEVVVVYEAGPLGYVLYRALKARGLRCYVCAPDSREQKRKRRKNNTIDTRTLTSNLFNYLHGNERALQLVRVPTEEQEQARWQSRQHDQLVEERKRLGAKGNALLLSRGFGSWENWWRPKAFSRLSQLVPGWLLELLETWVDLLRKLDEKIRRAKVALAKRCSGLRPKGVGAPSLVQLQSEVLDWGRYSNRRKIGCLAGMVPSEWSTGDTQRRGSITKVGVGAIRRIITEMVWRIILFQPQYKAVQKW

SEQ ID NO: 428752 - protein, 291 aa, unidentified
MYYIGLDVHKRTISYCVKDAAGRVQMEGKIGSTRRELDAWIKTLPQPRTIAMEATIFTGWIYDHLLPHAEKVKVAHPLMLRAIAAAKRKNDKIDASKIADCLRCDFLPECHKSSTEIRDRRRTLRYRGLLVRQMVQMKNRISGLLLEKGVTHTKRRLRKVGYFAELMSGNEEIDASIRPLLKLSREHIVRAQKLDYALVSSLGRDPLLAERLKRLRTVPGVGPITALTWALEIGDVTRFRSIKQAISYCGLCGAERSSADKAARTPIFQAAQQTHSTCAGGGREAGSEAVP

SEQ ID NO: 428753 - protein, 482 aa, unidentified
MKKKNIYVNQSQELLNLFEQAGNNEKIMCVPIDYAKKDHVVMFCNGYGHILRKPFSIKNSPEGVKYLTEQVTRSCSHRKIETKHVFFGGEDVGSYADNFVNTLRSGGWIVAGVNAHDAKKQRANIQASTDRLDLMGIASMLLNRRANCAPAQSGIYLNLRTVVRHRRKLVVISTEVKNRIHTIVDRLFPGFLDEKKSGIQPFSKSSLYLMEDRFSPHQIRRRKLQTLINILQRYGTAKPESTAAKLQGYTVRVLNTPDEYITTLQLSLAQHVKHFRCLQDSISQLENEIAVWLAQTQGAFLTTVRGIGIVLAAGASAEIGNPYEQKPVNNLVSYTGIIPRVKQTGGPEGKTHTGKVAKRCNRILKDYVVQSANHMGLHGPEDLMADYKRREAAGQHADFGIGRRYLRMAMCLMRTSQIYMPQRLRNTEVKPEERAGYYLMTWPSLREKWNKAGALEAAFEKDRPLGQWRNMVQELYEIKLKL

SEQ ID NO: 428754 - protein, 395 aa, unidentified
MRVVFGIDVSKASSEVAVVIDMKRIKLFEIENNRPGFNLLGQELSAFENPEIIFEATGVYSNRLCRFLNDNNYVYTCLNPLEAKKQLDSLRKRKTDANDAWRLAETQFRFSRPTSHAVSPIYSELLILSRHYDQISCDLVKCKNRIHRSLQNTFPEIEMVVDKKDTTFYWNIIELFAHPDLVTSLTLNEVFLKLQQISTHHAKSWLLKKAKYIQDLAGITYPVCDVTSSEVNQIQYLADQAVQLIKRKDMLIKRMAKLAENYPDLEIIKSIPGIGEKTAVLLMGELGDLHRFKGSSKLNAFVGIDIRHYQSGDSVAPDRISKLGNAHARKVLYQSVMSIASVKSPCHIKDFYKHKKQSSSSTKKTAIATMQRLLRTIYHLVLNNQMYSYEIAKGR

SEQ ID NO: 428755 - protein, 414 aa, unidentified
MDLLHPRCAGLDVSKRDAKVCVRVASGTRAAARSTVTTWGSVTNQVLALREHLIAEQVTLVVMEATGDYWKPFYYLLEDAPFKVELVNARHVKNIPGRKTDVSDAAWLAQLGAHGLVRGSFVPPEPIRQLRDLTRTRTTMVRDRAKEIQRLEKLLEDAGIKLSSVASDISGVSGRLMLDALIAGQRDPGALADLAKRRLRSKIPALTEALTGRFTEHHAFLARVHLDLIDQRSHAIAELTTRIEVVIEPFRGARDLIVSVPGISVLVADVIIAETGADMSRFPTAGHLASWAGTCPGSNESAGRVKSTKTRPGNPYLKGALGIAAMSAARSHDTYLAAKYRRIASRRGPVKAIVAVEHAMLIAIWNMITNGVFYDDLGGDYYTRLNPEKAKQRALNQLRQMGYDVTLNPLQAAG

SEQ ID NO: 428756 - protein, 395 aa, unidentified
MFIVGIDIAKRSHEAIIIAEDGQVVRKAFSFRNNCTGYNLLLEQVRRLTLVKSQIVFAMESTAHYWLALYARLLKDGYTVMVLNPIQSHSLRELYIRKAKTDARDSLIIADLVRFGRCKASNVPQDKILALRELCRSRAYLVDMAADLKRKLIALLDRIFPEYESLFDSVFSKASIAVLSKYSTPQKVKNANLRKLTDILMESSNGHFGEWKAHQLKEAACSSFGIDDSGGVYSTLLGMFLEQILSLTAQADSLEKQISIFFQEFNNPLTSIPGVGTVLAATILSEIGDITRFSSADKLLAYAGLDPSVKQSGEFKSNQNRMSKRGSPYLRRAIWLASTVAVHRDPMFQTYYEKKISEGLHYMNVIGHVSRKMTAVIFAVLRDGQPYQPILQSAG

SEQ ID NO: 428757 - protein, 347 aa, unidentified
MNYCGIDLGGMSSYAFVTDEHGRKLWSGPVETTKPGLMQLVQRFCSEGLAIAVEAGNQTAWVYEELVLHGAKVTVVNPNQVKLIAESRRKTDKVDAKILCELLRVGGLPRPVHMPTAGARELRGLLVARRQLITARVKLCNVVRGMLRQTGVRLAARELSSKAGWQRLLHVGFEHDHLLDIVTAYYDSFLALTKSIQELDKQLSEREMSEPRAARLKTMPRVGRIAALTFLAAVDDENRFASSRKLIGYSGLAPSVRQSSERTQHGAISRQGRRELRAVWVQIAHLVARDRSRATQPLRSWFNRVAGKRGKKTALVALARRLLVIAFQLLKTEQDYDVNRLRKRRAA

SEQ ID NO: 428758 - protein, 317 aa, unidentified
MQTKNTVIYAGVDVAKATLQLHLQGQQIEFSNSPDGLKQLCTHLLKVPNVHVVCEATGGYERDLVKTMHQVQIPISVMNPALVRAATKATGQRAKSDRIDSRMLTDYGQRYQPKPTPPTSTTQDRLVALTGWLKQLIGGRALAKTQAEHHQDPFVLKQHAKLMTTLQSQIKAVEKQIEALLEQDADLKQRVSCLVEIQGVGSRTAWMVLAHMPELGRLNRHQVAALAGLAPWTRESGKMKGICCIGGGRPEVRLALYMAALSAARCNPVLRTLYKRLRAKGKVAKVALTAVMRRLLIYMNHCIKAISPETATAGAKE

SEQ ID NO: 428759 - protein, 333 aa, unidentified
MKSGTVHIGVDVSKEKLDVYVPPHGGVRAETKQLDNSVAGFRTLRGLARKAKATVCVEPTGGYELELIAFMHKFGVAVAYADALRVRQFARAEGCLSKNDAIDAALISRFADKIGVRVLEPQEVEAVELKRKAKFRQTMTDSRTAMINRLETEVDPEMKALLKEQIKHMDKVISKAERLCLKTVEKDERMNALRERFTRVGGVGDMTAMSILAGLPEIGKLPDAKLNRLVGIAPEEKQSGTKEWQRRIWGGRKDVRNALFMACLASIQWNSILGAYYHKKRAEGHLHKWAMVPTMRKLLSLLNRIARDPNFTPKPEPESTKKNTRAGRKKKTA

SEQ ID NO: 428760 - protein, 338 aa, unidentified
MNTVTLLGIDIGKNTFHLHGQDARGHQVLRKKLNRNQLLPYLAQLSTCKIAMESCGGSQWLARKIKEQGHQVQLIAPQHVKAYVTGNKNDFIDAEAICEATSRPRTRLVQVKTVEQQMLCTEHRLRKSLVSRRTAVINQVHGFLLEFGVIFPAGYAALDRVSGLMQSRELPIRLINAIERMLEDIRQLTGEIKKLDVEIKQNLAQSDAGQRLQSIPGIGPLIASALVADVGDASVFKSSRDFAASLGLVPRQYSTGGETVLLGISKRGDKYLRSLLVQGAHTVLYRVDHRTDALGRWAKNLLARKPLNKVACALANKMARIVWVILTKGGTYNSQLLA

SEQ ID NO: 428761 - protein, 350 aa, unidentified
MIIIGCDFHSRFQQIAMLDPQTGEVIEHRLEHENGEARKFYAGLATPARVGMEATGYAQWFEGMLAEQGHQLWVGDAAEIRAAMVRKQKTDSRDACHILDLLLKDKFPRIWIPSTEERDVRQLLRHRYKLVCLRTSLKNQLHAMAMGHGICRKKKLWTAVGRKELQGLSLGPWASRRRQHLLGMLDQLEPVLEELDRAVIQEAEKRAAAVRLMTQPGVGPVTALAFVLTIGPVSRFQRSKQVVSYLGFNPSEESSGGRQRLGSISKQGNSMLRFLLVEAAQTASIYDPELRRDYRRLKFRRGSGVAKVAIARKLAVRLYWKLREQPSPVPPAPMQGSPAVSVVGESLSSS

SEQ ID NO: 428762 - protein, 364 aa, unidentified
MEEDRMNSIGIDVGKKRCRASIKDQHGRILDELSFTNDSAGIRNLLSKASRYGMARAVVESTGNMWIRIHDTLEENGIDTILAHPLKTKLIAEAKIKSDKLDSRILADLLRGDLVYESYVPSKEFREKRSLVRHRVALVKARTSIENKIHALLDKYEYRTELTDIFGKAGLQWLKGLELSPIDSVIMDTSLASIENLSIQISIVSRHTAKYAWNNRDVTLLLSMNGLDIFSAMVIATEIVDIGRFATPWKLVAYAGLAPGLRESAGKTRRGKITKQGSRWLRWIMVQSARRAVIHDDRFRTYYQRIRERRGDAKAITAAAKEMLVVIWHMLTKNETYRGVKEELYKRKLAKLERIALEPQVIDE

SEQ ID NO: 428763 - protein, 344 aa, unidentified
MSKHSIRAGDVAGLLMRLAQLKEKARGRTGRDFPIIAIQEAGLDGFWIHRVLQSEGIESHVVDAASILTSRRRRRAKTDGIDGETLVRTLLAYKRGEPRVCAMVKAPTPEEEDRRRICRERKTLVGERVEHVNRIKGLLFAQGVSDYEPLKRNRRARLEELKTGDGRPLPAHLKAQISRELDRLELVLPQLKAVEAERDALLKPVSEGCPAPAAMLAQLKGMGPEFTAILWSEGLFRSFSNRRQLAAYAGLAPTPWQSGSVAHEQGVSKAGNRRLRTTMIQLAWLWLRHQPTSALSVWFQERVQSNGGKMRKTTIVALARKLLVALWKYSTSGVVIEGAVMKTI

SEQ ID NO: 428764 - protein, 467 aa, unidentified
MGKGSGGNGMTRGDRRRNARRERLRAMLPRDGAVVGIDLAEDKQALAVIDHDVRVLARKTVRVKAFRLGEALDWAVAAARVKGFAHVTVACEPTGPRWMQVQRLCAERCLPMVCIQPLVSPIAREQQDYTPHKTDESDCVLIGRLATELHCYVPEELDEAWAHLRHLGRRRAQLITAATASVQRIRDFLSVAWPVVTEACAQPFESVTWLAALQVVTARCGGDPARLAGLGLEEFTALVRGAVPGWGGTKGRGKITGRVFAALTGTEGAVTWSRRGLLRRCADELGDLARTRAQLRVVEADMVMVLGELGLSRLGDIPGLTAVGAAAILAETGDPRRYDSSSSLVKHAGLSPSDNASGAFEGQARMSRRGRPGLRLTAWRAVWPMLQFNPVMAAKYAAMTQAAAAAAADAGPQQARTAAAAARARRAKARVACAASLLRWIYSMAVHGTSWDAAVASGTAASQPEAA

SEQ ID NO: 428765 - protein, 340 aa, unidentified
MKKLYGAFDLHSSNNYLGISDEVDRRVYKKRLPNQPDVILAELEPYRNDLVGIVVESTFNWYWLVDLLMEEGYRMHLANPAGIQKYGGLKHSDDKDDTFWLAHLLRLGILPEGYIYPKEERPVRDLLRKRGHLVKLRTSLINSLQGIIHRNCCVKLNATKIKALKVNNVAPLLSGQEDLALSGMVSKEAIDYLGQQIRKVENIVLGKVKLKKEYLYLLTIPGIGKILSLTIMLETGTMARFQKVGNLTSYCRKVPSKWTSNDKKKGKGNKKNGNKYLAWAFSEAAEFARRYDDNARAFYNRKAAKKNFMVAHSALAHKLARAAYYVMRDQVAFDPQKLFA

SEQ ID NO: 428766 - protein, 315 aa, unidentified
MTTKAEVHVGIDVSKDRLDLAVLEGKRIEQYANTAGGIKELVKEMMKLEPAIIVVEVTGGYERAVVNALFEAGLPVARVSGYRARQYARAKGLLAKTDELDALNLADYGKHVQLRLFEAKSEQGQWLSGKLARRRQLGEMVKAEKNRLRLVYGNTGPSIERVIEFLQGELKQLDEEIRAYVDNDAQWLEQEQLLRSVKAVGPVTAVTLLAELPELGKLDRKEIASLVGLAPINQDSGKRSRYRKTGKGRPSVRSVLYMSVLTGIRYNPVIKKHYDGLVARGKVKKVALIACMRKLLTILNAMMRDQQPFREVVRA

SEQ ID NO: 428767 - protein, 387 aa, unidentified
MPQPNDLSRSLTALDQDSTLIAVIEMSQASWLVGAMVPGIERHPLKKLRPEAEELLRQLQRWRDEATKAGRTVRRIAVAFEAGRDGFWLARWLRARDIEAHVIHASSVAVSREHRRAKTDRLDVELLKRALLGWLRGERDHCKMAAIPTLELEDARRPSREREALVSERTRIINRMKSTLVRLGIRDFRPNLRKAPERLRALRTPEGVAVPGNTRAELERDMARLQLIKEQIREIEQMRLTRMAQPPADAPHAMLVLLARVVGVGIETADMLVNEVFVRNLRDRRAVARYAGLTGAPDESGARRREKGLARAGNARVRRGMLQLAWRFLMFQKDSALAQWFQRRAADRRPGTRKTMIVALARKLLLALWRLVTTGEVPQGVVLRAAG

SEQ ID NO: 428768 - protein, 351 aa, unidentified
MPCKKDITVVRTIGIDTGKNTLHMIGLNEKGAIVLREKVSRNRIAARLVNIPPCLIGIEAGMATHYMSRDLLALGHDVKQVPPAYSKPFRQGHKNDFRDAHAVAEAVQRPSTRCVPIKTDDQLDLQALHRVRSRLIGDRTAVINQVRGFLLEHGIAVRQGPRSLRQQLPQILATRTDVLSPRMLRIIGDIVDDWRYLDDRIERVTDEIEGLARTDVNCGQLMSVPGIGPIIASATVAAVGNGTAFAKGRDFAAWLGLVPKQMSTGDRTILGRITKRGNRYLRMLFVQGARAILLRPKSWAKYSFGPWLTAAAQRLHRNILTIALANKLARIALTVLVQGRSYETRIVPAAA

SEQ ID NO: 428769 - protein, 341 aa, unidentified
MEQATTIGLDIAKHVFQVHGADGAGHVLFRKRITRVKLLGFLAAQARCVVAMEACAGAHYWAREIGKLGHHVRLIAPAYVKPFIRRQKNDAADAEAICEAAQRPSMRFVPVKTEEQQANGIVFRARDLLVRQRTQCVNALRGHLMEYGHVFPKGITHVETLVALVEDLQSSLPDRVRVILKLLVDTFTALEAQITALDGEINQRSRSDPTARRLMTIPGVGPITSTAITALVPAAEGFPAGRDFAAWLGLTPLQKSTGGKQKLGAVSKRGERTIRRLLIIGASAVVQQASRRGAPKGSWLAQMLARKPKMLVIVALANKMARVIWALLVKGGTYRTPAVAA

SEQ ID NO: 428770 - protein, 401 aa, unidentified
MEGPIVSIDVSNGNSHYMCFIKNNKRFGKVKKIDHDIEGFKRLLEDIQKLEAETNEKVCAVFEATGVYTKPLERFLSKNSIKTYIINPLESARKRKEEIHNKKTDKLDPISISKVYYDKEEMMELKKKYETYNWLRKKNRLYEDQLNHLRKYKVTFQNQLSICFPGYLDLFKDGYSDIPMTILKKYPHPDLLKNKKAETVARYLEKNTCHTHKVSLEYALKIIEFAKKTYPGCEKDDVEVEIFKILLDKVIETQRECEKTLNEMITVASTLEEYRYISSIDGIGPNLAARIIAEIGDIEEFKSREALVAYAGLDPHIYQSGDQDGKHLKISKKGNKYLRCLLFLAVGCSIRGAKDNPVNRFYQKKKQQSNPLNSKAAKTACTAKLLKIIYGICKNKTTYER

SEQ ID NO: 428771 - protein, 377 aa, unidentified
MSKVLFVGLDVHAETIAVAVAEQGGEVRSLGVIPNRLESIRKIVHKLGQVQQLRACYEAGPTGYVLYWQLTQLGVACEVIAPSLVPTKAGDRVKTDRRDAEKLARCHRVGELTAVSVPSAAQEALRDLVRAREAAKKDQLKARHRLGKFLLRHGRQRPEGIKAWTKKHREWIQSHVRFEEAALEATLADYVDEVDHVATRIVKLEKAIDAAIRQAPPEIRAVIEALQALRGVAQTTAASIVSEVGSLSRFPTAPQLMGYSGLVASEHTSGNRVQRGSITKTGNGHLRRVLVEAAWAYQHRPNVIGHLARRQKDLAISDEAKQIAWKAQQRLHKRYKAMAARGKNKNQIVAALGRELLGFIWAIGVKTEQQQKLAKTA

SEQ ID NO: 428772 - protein, 361 aa, unidentified
MAMRKRLSKKQMFFNKINLTKDDDVYVGIDAHKESYSVAIWLNDAPAIDFVMPADNTKLLKLLEKVRIGLKMVVYEAGPTGYILARCLQKAALPIKVIAPSKTPRQSARDSKTDCLDARTLAKYAAKGLLRAIAIPTRQQEADRQLTRAREQMVSKQSCVKLQIKSFLLQHGIKQPTSLRAWSANATKELNALKLSKQLRFCLDVLVEELQFLQNQLTKIEYQLKKIFGSQRHAQKVDLLQTHPGVGPVIARQFTAEIFTPKRFKHKTELAKYIGLSPTIIQSGQSFRDGPVTKTGRPQLRSNLIQGAWIWTIRDPKARKTFHRILHNTGHKNKAITAMARRLAIHMWKMICDNKPYINAV

SEQ ID NO: 428773 - protein, 413 aa, unidentified
MDIIYRRVAGLDLHKKTIVAEVRCINQRGKLERELRTFGTMTRDLLQLSDWLTEHAVTHVAMEATGVLWKPVWNILDGRFELLLVNPRELKQVPGRKSDVKDCQWIAQLLQHGLLRSSFVPQRPQRELRDLTRHRAQLQGERTRVTNRIHKLLEDANIKLGAVASDILGVSGREMLEMLVAGEHDPAKMAKSARGRMKRKIPQLELALEGEFRDHHRFMLRQLFEHLDHLDQQVAQFTARIEELLAPFLEEELEEKLKEIPGVDLTTIQNVVAEIGFDMRQFPSAGHLASWAGMCPGNEESAGKRKRTRTTKGNRWLRRALAEAAWAATHTKDTYLAAQYHRLAGRRGKKRALVAVGHTLLVIIYHVLKHRVHYQDLGADYFLRLEPERLKRYLVKRLQQLGYEVELAPKKAA

SEQ ID NO: 428774 - protein, 440 aa, unidentified
MAVRKRDEEVFSNAAGIDVGASSHWAAVPPHVTDTPVREFGPMTDDLNALADWLLGCGVDVVALESTGVYWIPVYEVLESRGLKVWLVDARQVKYVPGRKSDVQDCQWLQKLMSHGLLRGAFRPSAEVCTIRAVSRQREVLLVQQASWVQRMQKALVQMNLQLTEVISNVMGQTGQAIIRDIVAGERDARVLAQHRHWRIRASEDEIVRALTGNWREEHLFVLGQALGMYDDIARHLDECDRKLQALLAERASVEVDLGKQPREGTKARAGFDTRQALANWAGVDLTRINGLGLDSVMKILSEIGPDLSRFANVKHFCSWLGLCPSTRISGGKVLSSGTRRSANRARQAFRMAAMALSRSDSALGAFYRRLCSRMDKPRANTATAHKLARMVYFMLTRGEAFVDQGQQHYEEQQRQRSVAALKRRAAALGFQINPLAPAA

SEQ ID NO: 428775 - protein, 315 aa, unidentified
MIESMTVTVGLDVHAASVRLAAICGDELLDERTLPYDEEALEGVLRRWPGVRCCYEAGPTGFGLYRYLAERGIECAVVAPGLVPKRPGDRVKTDIRDARKLARLLAGGLLEPIYVPSPELEAARDLVRAREDARLDRMRDRHRLSKFCLRHGRKLPGMSWSLMRRKWLSEQRFEFAAQQQVFDAYVHTLDLVDRRIEALERAIRETAEQEPWRALVARLRCLRGIDTLSGLGLVTEIGDFGRFKTAAELMAFVGLVPSEHSSGERRRQGSITKVGNSHVRRLLVEAAWHARRRPTVGYELARRQRGQEPLVIDRA

SEQ ID NO: 428776 - protein, 389 aa, unidentified
MKIFVGIDIAKLNHFAAAISSDGEILLEPFKFTNDADGFQLLVSKLESFDKNSIIIGLESTAHYGDNLVRYLVAEFYQVCVLNPIKTCQMRKNNVRKTKTDKVDTFVIAKTLMMQDDLRFITFFDLDMMDLKALGRFRQKTIKQRTRLKIQLTTYVDQVFPEIQYFFKSGLHQNAVYALLKEAPSPKEISSMHMTHLANLLKVNSHGHFTKEQAKELRVLAQKSVGANDSTISIQITQTIQQIELLDSQLDKIEAEMTDIMKFNDSVIMTIPGIGYINGGMILGEIGDIHRFSNPNKLLAFAGLDPSVYQSGNFQAKTTRMSKRGSRVLRYALVNAAWNVVRNNATFKAYYDAKRAEGRSHHNALGHCAGKLVRVIWKMLTDELEFNLE

SEQ ID NO: 428777 - protein, 343 aa, unidentified
MSVTIGIDPHKSTHTAVAVDRDEHQIARLTLAADRHQTDRLLAWAEPLDAERVWAIESAAGLGRLLAQQLIAAGEHVVDVPPTLAARVRLLGSSKASKNDPNDALATAIAGLRHCGLRAVGRDGHTAILRLLADRHHDLVALRTQSACRLHVMLRELAAGGAPLRISAAHGTEFLERIDIGDDLVAAERKRLAHEHLTDIRRIDAELDAIRDRIRDAIVASGTTLCELHGVGPVVAAIVLGHVHDIARFRTRAQFASYNGTAPIEASSANRERHRLNPRGNRHLNHAIHMIAVTQVAHDTPGRAYYLRRQAEGKTRKEALRALKRRISDAVWRQLQVDARATS

SEQ ID NO: 428778 - protein, 411 aa, unidentified
MDGMFPHCAGLDVHKRFVVACTLVAVPEGGVKREIKRFGTPPSELRALAAWLAARGITPAAMDSTGIYWKPVYNRLSHSLEVWVVNAAHLAQVPGRKTDIKDAEWIAPLMQPGLVQKSFVPDVLQRDLRDLTRYRTRLTQERTAVVKRLQKLLEDANIKLASVVTDIQGVSARAMLEALIAGEQDETIVAALARGRLRPKIPALVEALAGQVRAHHRFLRHELRAHLDALNERLRAISDQLGQETQAYEGTIERLMQVPGVGRRTAEIILAEIGADVSQFATAGHLASWSCLCPGNRVRGGKRFSGKTRQGQPWLRAALVEAAHAAARTRDTSLASQFHRSAARRGRKRAAVAVAHSIIGIIYPLLADPHATFHDLGADHFIKRDQAHAPRRALKTLEQLGFSVTLSPLAA

SEQ ID NO: 428779 - protein, 349 aa, unidentified
MEYIALDVHKRYTWARVETVYGERVLEQRVLHQRGAIQDFVRQWAPGSPVAVETVGNWYWVVDEIEAGGGHPQLVNARLAKLMMGSVNKSDRLDVQGLNRLQRTGTLPTVWIPSGVVRDARELPRTRMVFSQQRTQLKNRVLATLAKYGLMVEGVSDAFGAGGRQRMAGLVPQLPPQTQQAVTCLLSQLDQVAGTLTLLERQMRAVFAPCPETAWLKTLPGVGDLLAIVIWTEIGTVARFRRAEALASYSGLVAREHSSGGKIRFGAIRRDVNQYLKWAFVEAANSAVLNRQRCGYTHIHSLYERLRARRGHGKAKVAVARHLAEASFWMLTKGEPYRAPMSSTPQEAR

SEQ ID NO: 428780 - protein, 354 aa, unidentified
MPRQSTDTVAVLGIDIGKNTFHLVGLNERGAIILRRKLSRGQLEAKLANLPPCLVGMEACVGAHHLSRRLKALGHDARLMPARYVRAYLKGNKNDFRDAEAIAEAVQRPTMRFVATKTAEQLDLQALHRVRSRLVGERTAIANEIRAFLLDRGIAVAKGLNRLRAALPGILGTRTEVLSPRLLHIIEDLVADWRHLDQRIDNVSLQIEALAKQDAGCERLMTVPGVGPIISSATVAAIGSGDVFAKGRDFSAWLGLVPKQISTGDRTILGKISKRGNKYLRTLFVQAARVVLLWPRSWERYGLKPWIEAAARRLHHYVLAIALANKLARIAWSVLHHGRNFEVRKMSEPVSRSA

SEQ ID NO: 428781 - protein, 410 aa, unidentified
MEILYPHCAGLDVHKDTVAACARHMAEGKVRTQVKTFKTTTEQLIALSDWLSSAGCTHIAMEATGVYWKPVWHILSDGEFELILANAAHVKNVPGRKTDANDAVWLADLMAHGLIRPSLVPDEPTQQMRDLLRTRKQMTRDRASHIQRLQKTLEDANIKLDSVVTDILGLSGRRILEALIDGQTVPQALASLAHRRIHASSDELEAALQGRVTRHHRFLLKLHLDQIDAIDAAIARIDQEVSANVEPFRAAIEQLIAIPGISPLAAQVLVAEIGIDMSRFKTAAHLISWAGLCPKNDESAGKRRSNRMKKGAPWLKTTLVQSAWAAARTKESYFQAQYHRLRSRRGSKKAVCAVAASLLTTAYHMLKNGSTYRDLGPHHFDQPDKQKQANRLLKRPQNLGYTVQIQPIAA

SEQ ID NO: 428782 - protein, 324 aa, unidentified
MNLPPLGLDVAKLKFNACLMRAVGKLRHKVFPNNPDGFTRLCDWLKKQGVTRVQACMEATGTYGDSLAAYLHEQDHLVSIVNPAAIKAYAQSHLSRTKTDRVDAALIAGFCVERKPPAWHPPAREVQELQALVRRLESLVEMRTAEENRLSSGISVGAVRESVEELIVHLSEQIKRTGARIREHIDNHPDVKRQRELLDSIPGIGETTAAALLAEVPDFSQYKSARQVAAYAGLVPRERQSGSSVRGRTRLSKIGNARLRRALYFPAITALRCSPFFQAWAEGLRQRGKCKMSVIAAAMRKLIHLAYGVLKTGKPFDPEWGKIA

SEQ ID NO: 428783 - protein, 325 aa, unidentified
MDKEEALGIDIAKEKFDVRMELNGKAKKRQFANNKSGYEMLSGWLQQMGVEHVHACMEATGTYGEGLAEYLYNVGHKVSVVNPARIKGHAQSQMKRHKTDELDAEVIRHFCETQVPEAWEPVKPEIKALRSLIRRRDDLITMHTQETNRLQSGELIESVRSSVLQMLKHLDEQIAELERQIEEHIDQHPDLKHQVELISSIPGIGERTAIKLVAELKNIGEYTNARSLAASVGVTPSQHKSGSSVNGASHISKVGNSTLRGAMWWPAVSAMQHNPIIRSFVKTLRKAKKHNFAIIIAVIRKLLHLVYGVIKNDSPFDPNWAMTKA

SEQ ID NO: 428784 - protein, 364 aa, unidentified
MSTTTTATTPAASTAAPGLILALDLGKYKTVACAYTGSPDTARFESLTTDRNRLGQLFAKYRPAVVVVEACALSGWVADLCQELGLPCKVANTASEAWKFKHTKRKTDKDDALRLAQLEALGQLPTVTVPPTQTRQWRALIACRQALVGRRGGCQNRIRALLVGQGLAAPRGAKAWTEVGLEGIGQHAKPLADCAADELWRGLLDLALAEYRHTLGLIDQTEAKLDVLAQADAGVRLLQTIPGVGPRTAETVVAYLGDAGRFTRGKQVSAYGGLVPRQYQSGETDRRGRITKRGPALLRKLLVECAWVMLRYNPWARAVYARLSRGKARKKQAIVALARKLLVRCWAMLRDGTPWRDDPAAAPA

SEQ ID NO: 428785 - protein, 399 aa, unidentified
MPFYGGLDWGGTAHAVCVVDGAGQVIARIEARHDDAGLVDMLARLRKIALPTELPIAIERPSGLLVDALIKAGHPVIPIHPNVVKACRPRYRAAGGKSDPGDAYMLADVLRTDGHRFRPLRPMADEIKALRALVRGRDDLVAQRVALANQLRSLLEGFWPGAAAIFAAIDSPISLAFVARYPTPNSASRLGEKRLASFTAQHAYCGRRSPAELLARLHGAPTGLAGAEADAKGELVRALAAVLGRLVHEIAKLSSRIEHAVAELPDGQIVMSFPRAGRICAAQILSELGNVRERFQTEEQLAAEAGVAPVTHASGKSRGVVFRWACNSNLRVAITCFADNSRHASGWAGGIYTRARDRGCKHAHAVRILARAWVRVLWRAWQDGEAYDPAKHKAAVQIG

SEQ ID NO: 428786 - protein, 420 aa, unidentified
MKDFSVDNFAALVGIDWADKKHDICELPTGTKNYQWSVISSKPEQLHAWAMALEKRYPGQHIAVACELKKGPLIYALSQYRNLVLFPINPTSLAKYRKAFFLSGAKDDPGDAFLQTEMLEKHMDRLKPIEAESVEVRALAQLLEYRRKLVQDRVDLTNGVSATLKNYYPQVLDWFNEKDTHIFCDFVIKWPSLTRVKRAHKNTLIEFFNAHNARYTQVNLKRIDAIKAAIALTDDKGIIEPNLMLIEILIPQLKQLLDGIKRLDDEIKRRYKLLDDRYLFDSLPGAGVQFAPRLLVAFGSNRARYQTASELQKYSGVAPVIESSGQKSWTHWRYSCPTFLRQTFVEWAGQTVRYSFWARAYYQQQEAKGKPHNTIIRSLAFKWIRIIFRCWQDHKPYDESRYLEALRKRRSPLLQFAVKS

SEQ ID NO: 428787 - protein, 422 aa, unidentified
MLGVGIDWAEEFHLVALGRPKEGVMHLRRVEHTPAAVDQLVGQIAALEPDPAEVRVVIETRHGLLVERLVDAGYTVLPVNPDLISRRRGPARKKDDAEDARIACLLALDRHAALRPLLPHGELAGELRAIARDDDRAARDQRRLLNRLRQDLIATFPAALQLAGDDLGAPTVLKLLERWPTRDQLAAAAHQELVAFARAARQGWPDRLADQVAQALAGDHFRPRDYLVRAKADTIRLTATQLLAISTQRRTWERRMGELLLGAPRHGRARRPREDQPGQAVPGGKIYLSFAGLGDRLAARVAGEIGDHIEQFTTPNALQCYAGKAPVTRRSGKSELVVSTRLACNRYLANAVQQWAFCSLSQSGWAREFYDAQRARGKGHHAALRALGNRWLEILWHCLIRGQLYDEATHLANRNRALGKAA

SEQ ID NO: 428788 - protein, 390 aa, unidentified
MYLIGIDISKFKHDCFIATETGLVIKDSFSFDNNQEGFKKFLNVLLSLDQTQEIRIGLEATGHYGTNLKLFLHENNFSFIEFNPVLSERYRQVSSLRKTKNDKIDAKLISKMLLSYDYKTNSSISYHILKLKSLTRFRKRLVKNRTVFKERLINILDIAFPEYSKHFTQVWGKVSFYILKNYPTAKDIANINVEEVMTTIHSLSKGHYSMIKLMKLIETAKTSIGFKNDYHVLELQLTINMIEQLDSSIDKIENEIIEIILIHNFKTATIPGIGIISAASIVSEYEDFSKFQNPNQLLSFAGLEPAIYQSGTQQTYGHMVKRGSSYLRETIMNIIPYVMAYNSVFYEYYRKKKSEGKHHRVALTHLAKKLIRIIYHLETNNISFDSSKIK

SEQ ID NO: 428789 - protein, 383 aa, unidentified
MKTPNVCTPTTGNTGTIFVALELSRRTWLVTIHSPDRDRISHYKVDGGDHVGLLKLIARVRARSAKKLGYEPAVVSCYEAGYDGFWLHRLLTAAGIKNHVFDAASIMVEQRARRAKTDRIDGDKLERTLRQYCGGDRHAVRIVRVPSPEQEDLRRDTREEERLKEEQTSHSNRIKGLLRLHGMPVGDPRRSDYLDWLGKQRDWAGKPVPPRLLAEIAREHARLRVVVEQLAAMEEQPSPARLNPAAAEMGRRRDLLFRLKSLGPAFSSRLVNEAFYKDFRNRREVGAYFGLDGSPWRSGDTNREQGISKAGNRRARHAAIELAWLWLQHQPESALSKWFRQRAANASKRIRRITIVALARKLMVALWRFLTTGLVPEGAVFKA

SEQ ID NO: 428790 - protein, 424 aa, unidentified
MTTKTLCVGIDVHLDELVVRAIDKADGHEVLDRFRVTNNLPGSHALITALADTATPLGYTRVEVGWEATGLLWLPFHQQLTHSANLHPFQLQPICFNPKLVAKFKDGLVLRHPKNDDRDAWDIASRVRIGELPVSYVPSDFWQGVRRLTRYRYHLTRDLTREELRFQANAFLKCSDWQRVRPFANLFGATSLALLTEFTVAELKAMTLPELADRIAHRGRGRFDDPIATARAVQDALRTSYPVDPALDALLTATLALSAEHLRIMQRLIKRLDQQIARAIAPFPNPLLTVKGLGPVITAGLLAEIVDITRFPDDPQLAQYIGLTWEKRASGRFVAQNARLTKVGNVYLRYYTILGADRLRQFNLEYQAYYWRKYHEVPKHQHKRALVLTARKLVRLIFALLTKNVPYTVRPQTPQHAEGGSTHA

SEQ ID NO: 428791 - protein, 423 aa, unidentified
MMKLKYSICCGLDVHKNVIVATIVITNKDGISEYKQKSFSTINSDIQRFHNWLIENNCFHVCMESTGKYWIPIFNYLENDIDVCLTHPKYVKAINGKKTDKKDSKWIADLYKFDLVRCSFIPPKDFRQLRELARYRFKLVCMKSSEKNRIQNCMTVSNVGIASVLSDPFGRTATEIMSYLLQHTADSMDEKAVRKLIKKGAKAKSDEIIEAIRGYNIETDQAKKLELARGHLEYLDDMITQTEVELYVRIKPYYEFVEFVSTMPGMTELSSTIVLAETGVDMNIFDDAKHLCSWCGLSPASNESAGKKKSVRIGKAGDYLKPMMIQCALAAVKNKKQPYFAIKYGRIKKRRGHKKAIIAIARMMMVCIYHMVSEKKSFNPTDYEELMDPRNHVERVVLNETNVFAYLESLGYDSSKLVKRNDS

SEQ ID NO: 428792 - protein, 364 aa, unidentified
MRDPTQQPERVTLGVDTHAEQHVAAALDERGRLLGTCTIPTTTSGFAELVRWASAYGELGQVGIEGTGSYGAGLARWLGARQIAVVEVDRPDRRTRRRRGKSDSVDAEAAARAVLAGIATAQPKAGTGAMEMMRTLRVARQSAVKARTQAANELHALVVTAPDALRAQLRQLRLPQLVIRAAAFRRSAELSTPTAATKLALRSIALRYQHLSVEIDQLDKHLDKLVAVAAPTLVAIKGIGTDIAATLLIVAGDNPERLASEGAFAHLIGVAPIEASSGKITRHRLNRGGNRQGNRALYLLAVGRMRWDPATRAYVARRTAEGRTKPEIIRCLKRYIARELYPVLLAATSTLVRLESSTASSAAA

SEQ ID NO: 428793 - protein, 392 aa, unidentified
MIYVGIDVSKEKHDCFITNSDREVLFKSFTISNNKEGFETLFQRIESVAENLNKVKVGLEATGHYSYNLLGFLLDKGLPTYVINPLHTNLYRKSLSLRKTKTDKVDYHTIATMMMSDMNLKSYSDTSYHNEELKSLTRYRFDKVKERAKLKSSVSRLVTILFPELETLIPTLHMASVYAMLSEFPGASHVASAHLTKLANLLSQSSKGHYGKDTATLFREAARNSIGSVMPAKSLELKHTIKLIQELTAEIDEIEAAIKQIMDDEIKSPILTIPGISYRMGAMILAEIGDFSRFDSADKILAYAGMSPSTYQSGKLDNCYSHMEKRGSRYLRYALYNATKYVCHWDESFGAYLKKKRSEGKHYNVALSHAAKKLVRLIFAMEKSEQTYIPVA

SEQ ID NO: 428794 - protein, 405 aa, unidentified
MWFAGIDWADDHHDAVVLTDQGQLLGALRVPHTAEGLDHLTRFLRGGASTSGAAEPVICLVETPHGLLITALLEAGFTVCPVNPLAVGRLRPPSGVKTDARDARLLARLGRNDWPALRVLQPAGPLLQELKTLTRDLEGLRREQTRLVNQLTACLKAYSPAALRCFDGLTRQVTLAFLQAFPTPEAAAAAALDQLTQVLAQGHYPHPRQKAEQLAALLQAPQLHALPGVARAKARLMAALRAQLAVLTTQVAAFDQAIQQLFAQHADSAVFASLPGAGRRLAPRLLAEWGADRTRYASAASVRALAGTAPVLFQSGAFRGVRRRRAGVNAWRQALSHFAWESVLCEPWAKAYYQRKRAQGKTYAMALRAVANQWVRIIYAMWQARQPYQRAIFLAAQHAHGGLVA

SEQ ID NO: 428795 - protein, 345 aa, unidentified
MEHFAGLDVSVNETSVCIVDDTGRIVSEAKVASEPEALLAALKNRAYHFKRIGLEAGPLSQWLFSALAEAGLPVICVETRHMKAVLKAQINKTDRNDARGIAQMMRAGLYRPVHVKTLRSQKLRMLLTHRKLLQSKAIAIENDLRGTLRNFGLKVGVVGTVKFEARVHALVENLPDLAVLVEPMLTVRRVLREQIVILHRRVLAIVRDDEVCRRLMTTPGVGPVVALTYRATVDVPARFRKSKSVGAVFGLTCAKYQSGELDWSGRISRCGDEMMRSMLYEAAQSMLVHSKKWSWLKAWAMQIARRRGMKKAIVALARRLAVIMHRIWVDGTEFRWTREQAAAAA

SEQ ID NO: 428796 - protein, 427 aa, unidentified
MQKVAMQETGRVVWEAVLERCCGLDVHKKTVTACLLVGALDHQPRESLRTFPTTTKGLLELRDWLEQDGCTHVAIESTGIYWRPVFHILEDMVTVLLVNAYHMKQIPGRKTDLKDAQWIARLLRWGLLKPSLIPPKPIRELRDLCRYRKKLTEQASAEKNRIQKVLEDANIKLASVASDIFGLSGRAMLDALLAGDMSPEEMAELARGKMRPKIPQLVDALEGRISEHHRFLIRMHLEHLGYLEQAIAQLHQRIDEKIKPYQHQIDLICSTPGFSVTSAQHVFVEIGGDIRLFPSEGHLASWAGLCPGNNESAGKRKSGRTTKGNRWLRGALVQTAHAASRAKGTYFKSFYHRVAARRGKNRAAIAVAHKQLASIYGELQYGRPYHELGENFFDRLNQKTLEQRLVQRLQGLGYRVQLQPQTAASVS

SEQ ID NO: 428797 - protein, 401 aa, unidentified
MVSDFKKGRYNLMKIFVGIDIAKLNHFAAAISSDGEILLEPFKFTNDADGFQLLVSKLESFDKNSIIIGLESTAHYGDNLVRYLVAEFYQVCVLNPIKTCQMRKNNVRKTKTDKVDTFVIAKTLMMQDDLRFITFFDLDMMDLKALGRFRQKTIKQRTRLKIQLTTYVDQVFPEIQYFFKSGLHQNAVYAFLKEAPSPKEIASMHMTHLANLLKVNSHGHFTKELAKELRVLAQKSVGANDSAISIQITQTIQQIELLDSQLEKIEAEMTDIMKFNDSVIMTIPGIGYINGGMILGEIGDIHRFSNPNKLLAFAGLDPSVYQSGNFQAKTTRMSKRGSRVLRYALVNAAWNVVRNNATFKAYYDAKRAEGRSHYNALGHCAGKLVRVIWKMLTDEVEFNLE

SEQ ID NO: 428798 - protein, 368 aa, unidentified
MKKSIIFVGLDVHKNSIDVAIANTGRDGEVRHYGTIGGNVEDLLRAVKKIKSSNVDLRFVYEAGPCGYDIYRSLTEKGFECAVASPAHIPKKPADRVKTDRRDAISLARLHRAGELTYVFVPRVDDEAMRDLTRSREDAKKAQAVARQQLGGMLLRLGFRYPGENWSKAHFGWLADQKMPTPVQQVVFQECINAIDETTARVERLTRQVEALASCWRMAPVVTALQALRGVSLIVAATTIAELGDLARFEHPKRLMAFLGLVPTEHTSGPKKRQGGITKTGNGHVRRVLVEAAHAYQHPARITRPLLKRQEGLSKEIRDIAWKCQVRLCARFRRLIAKGKSRNAVVTAVARELAAFLWAIAKQVPVPA

SEQ ID NO: 428799 - protein, 345 aa, unidentified
MDKIVRIGMDTSKHVFQLHGVNAGEKPVLRKKMRRKEMIDFFTTCPPTLVAIEACGGSHHWARLLASFGHEVKMIAPQLAKPYVKRNKNDAADAEGLCEAMARPTMRFVPVKTVDDQAALMLISVRTRLIANRTQLANAIRGYANEFGISAAKGLAHIPMLLERIKVEKTVPELAQELFISQAEEYAELEKKIADVEAKVKAWQRNDERSIRLNTIPGIGPIGSALLIMKTPAPELFKSGRQFAAWIGLTPKDHSTGGKLRLGGITRAGDEALRAILVNGATAVIHHARRSGRASRWLAELLKRKPPKLAAVALANKMARIAWKLMVSGETYSGQSGPASTGCAT

SEQ ID NO: 428800 - protein, 423 aa, unidentified
MNDSTLSVGADVHLKDIVLRAVDQRDGRQVIEPFSVTNNLPGAHSAAATMAQTATRLGYHCIQIGYEATGMLWIPFHHFLSTTPLLEPFELQLVCFNPKLVANFKDALVLRRPKNDDRDTLDVSARVRFGEWPDSYVPSPFWQGLRRLTRYRFKLAQNLSREKMRFQSYAFLKWSDWKRVKPFSNLFGATSAALLTEFTAAEVREMTHDQLTDLISRRGRGRFHDPHAKARAVQRSLRSSYPIDPQTDEMVTVTLAAQLDHIRFIQRSQKHLEQHIARTIDPVPNPIISVPGLGPVITAGLLAEIVDISRFPEHKHLAQYFGISWERRSTGNFVSQNTRLTKVGNPYGRYYFIQGADKARQHALEYKAFYWRKYNEVSKYRHKRALVLTASKLVRLVHALLTKNEPYVRPQTPVNPQEERARL

SEQ ID NO: 428801 - protein, 385 aa, unidentified
MKNTYKSVACGGMDVHYKFSNITFRNPSGDIVRRQRLKHPQRKELFEQFRLWPKGMPVVMEASFGWGWLSDLMEQAGLDVKLSNCYKIEQMRKARGWVKTNKKDADLTSLLPFESMEWWRVWRAPCEVRNRREQMRFRGGLVELQTMVKNRIHAIFHRHGIFHELSDLFGGNGRKLLAELCLNGSEYLPSEALLVLRGQVKLLEHIRKQLADVERILHRQLQTTPLIRRLKTISGIGLIISNILVAEIGTIERFRNHKALASYSLLAPRCKDSGEEDMEHSPLGRHLGDRGNRTLKWAFIEAAHGAVRSGGRWRAMFDRVTNGGTRDRNRGYIKVARELVKVVHAVWRKDVDYSEDYAVGSHRSRNKTRSGTGQLFHPMVHAQMA

SEQ ID NO: 428802 - protein, 413 aa, unidentified
MEVLNPRCGGVDVHKNSVVVCAKVNGKKETKTFKTYVGTLRQMGKWLVEKQITTVAMESTGVYWKPIWNLLEAEFSGIHLVLANAEHVKQVPGRKTDVCDAEWLADLHSCGLIRGSRVPNRENRELQELVRARRKLIDDRSRMICRIQKVLEGAGVKLSSVVTDITGKAGMAVLKALVGGEKDPEKLVKLTETGLKAKPDEIVAALEGSMGRHQSLLLEVELHILEGLSKAIVRLDKEVEKRMRPFWKTLVRLDDIPGIATRGAQEILAYAGPTLEGFPTAGHLAAWTGVCPGNSKSAGKSKSKRARKGNLWLKSTMVEAAWAAIRTKGSYYKDLYHRKKSTRGAQKAIVAVAHSMIETIYHMVTRGTDYVELGPNFHKMQQRATVLKRRLRELGSLGYEITVRDLEAEAVAA

SEQ ID NO: 428803 - protein, 357 aa, unidentified
MNTTQKISFIDSHFFIGIDAHLRNWRVTIRFNGLELKTFSMNPSPLELLTYLQKHYPDGIYHIVYEAGFCGFWALRIFRQHNIDCIVVNPADVPTSNKEKVNKNDPVDSRKLARELENKSLHGIYIPDLAHEELRALMRLRYRIVQSQTRIKNRIKGFLHAQGIAIPLQFSGNARWSHAFILWLEQLQPLTSAGKFTLLNMIAQLKQIREHNKNVLKQLRSEARHPDIAPVINVLQSIPGIAFITAMSFYTEIIDMKRFANDDQLANFVGLVPSIHASDENVYSNGISFRHNKFLRGLIIESAWTAVKEDPALSLKFKELSKRMKSQDAIIRIAKKLLKRIRHVWLKNEEYVYALVA

SEQ ID NO: 428804 - protein, 372 aa, unidentified
MNNTTVYVGMDVHKESFTLCAYLIETEKASYIRRTPADYKEVLKYLEFLRTIYGNDTIFICGYEAGCLGYTLYHQLTDRNVNCVILAPTTMLETRSGKRIKTDKRDAALIGKCLAQHNYSPVHVPTATDEETKEYLRMRDDHKLALKKVKQQILSFCLRHNYRYDGKTHWTIAHLNWLKSLKPEALYKEILDEYLLTYKTLSDKLERLDKRIEELASKNEYKDSVKKLCCFIGVQTHTALSILVEVGDFKRFATADKFASYLGLVPGEDSSGDEKTRLGITKAGNRHVRQLLTESSQTYSRGQIGHKSKTLKARQAGNSPQVIAYADRGNERLRRKYYKMVLGKSKKHNVAKTAIARELACFMWGMMTDKIA

SEQ ID NO: 428805 - protein, 470 aa, unidentified
MQLSSPVRLLGIDLGITSDHTAVVVDDAGRVRARRRARSTVASLTALEAAALAGADPGTHLVVVVEPTGPAWLPVAVFYGRRGHTVLRVTSAKAADLRRFLSRHAKSNGIDAETLARLPLVAPSGLVPVELGSAARASLDRRVRAVARLTADIGRRKNRIRALAQAMVPTIGAALSEGLNHTDLAVLERYADPRALLAAGPARLTRLIAKTSRGQLGVAKAEALRTAAAEALGLWDGDSAAAFADLAAEVASEVRLVRAAEAERACHERARNAALSRVDPAGLAASLPGFGPVGTSQLVATTGRPGRFPHASAFKAFTGLTPRANQTGQTDRKHQPMTKAGPRALRSQLLQSADTARKLDPQLAAVYHVQMTERGATHRKALCVVAARLAERAWLTLARGEPYIICDLAGQPVTPEQAKQLIAAQFTIPTEVRRRRRSSTKAGKVPHAALKAQVKSQHEAGHEATFPPQA

SEQ ID NO: 428806 - protein, 411 aa, unidentified
MEQIADRVAGLDVHRDEVAVCVRRPGPRGGVHTDKARFSTTAGGLAAMASWLAECEVTLAAMEATGVYWKPVYYALEGRFELWLCNAHHVKNDPCRKTDMSDAEWLADVAAHGMVRPSFVPPPAIRELRELTRYRKTQIDVRAAEIARLEKVLQDAGIKLTSVASKVLTQSGRAIIEALIAGQRDPRALADLARGKLRPKIPQLTAALAGHFGAHHAIVAACILGHLDFLDAAIGGLDEQVAARVADGYQPAARLLADVPGLERRSIEVIIAETGADMSRFPSPGHLASWAGLCPGNHESAGKRRRVATTPGNQWLRRTMIESARAAARTKGSYFGAQYRQIARRRGPNKAAVAVAHSLLDVIWHILTTGEVFTDLGEDYFTSRQDKEHQARRLIGQLEKLGFTVQLTEAG

SEQ ID NO: 428807 - protein, 418 aa, unidentified
MSEEENARTPRRYVALDIHKYYCVVAGVNRDGQVVLQPVRVEHADLEGWLKKNLQKTDDVVIESTTNAWHVYDLLEPLADRVVVANPIKVKQIATARVKTDIRDTLILARLLAANLVPDVWVPPVHVRQMRQLLSQRRQLVETHTQILNRMHSVAHRHHLKHERGKRFNEQNTGWQKDARLSQIEQFQLSLEMENREYIEKQIERIGVEVKKICHQKPWSDRMAYVMSLPGFGVITAMTVLAAIGEIERFETPKKLASYSGLTPGLEQSGTKNRGKGITKEGRRELRWALVEAALQAVKSDPLLKHRFNELQKRMHRNQAIVSIARHLLELIWYVLTRHQPYRGFTQERIAYKYLTWAWQMKDAERDGLTRQQFARYYLMRLGIGKDLTRIALDPKHPRRLASEAEVLALRPELRQIE

SEQ ID NO: 428808 - protein, 366 aa, unidentified
MGWMAPSRHRSAKMVVVKDHQQREPSMGNITTIGLDLAKNVFQIHAVDQAGSVVMRKRLRRGQVLAFFAGIPSCLVGLEACATAHHWARELISLGHEPRLMPPTYVKAYVKRNKHDVADAEAICEAVRRPSMRFVPIKTVEQQSALMMHRARDLLIRQRTMLVNALRGHLAEFGLIEAQGLHKVARLIAIVMDENDGRVPDIARQVLKEIVNQIEDTQTRIAGLERQVLAWHKNNPVSQRLATIPGIGPIIATAIAATIADPNIFRSGREFAAWLGLVPRQNSTGGKARLGGISKRGDSYLRRLLVNSAHTVLLCSKQAKTDPWLTSLLSRKPRLVAAVALANKTARVAWAVMCRQDTYRHAGVSA

SEQ ID NO: 428809 - protein, 338 aa, unidentified
MKIPKYTVGIDVSSEHFAVTIMDSSYAVIASYDDFLNTHDGFTEFSDWLFKQDVSPDNAVVCMEATGVYGEELCYFLASKDFPVAVEQSLKIKRSQKESGHKTDAIDSRNIAEYAHRYFDKLTFWQPNAKIVEHIKTLLTTREQLVKQCTAHKNALHALSRKHFRTPLAENTLTELIDDLKNRISIIDKEIKKLIDQDSSLKTMMALLVTIPGVGYILALNMLRITNGFTKQVTAKKLAAYAGICPYQCQSGTSLKKKPRSQGYGPSSFRKLLFLASLSIRTHNKQFNHYFHRKVCQGKPKRLVINNIANKLLKIMCAVMNNNTPFIVNFKSLNPLFF

SEQ ID NO: 428810 - protein, 441 aa, unidentified
MFEPNAAGIDIGAREIYVAVPVDRDEHPVRKCGTFTGDLHQMAEWLVSCRVTTAAMESTGVYWIPVYDVLEQHGIQVCLVNPRNMKNVPGKRTDFHECQWIQHLHALGLLHAAFRPDGEVCAVRSLMRHRNDLVVMAGEHIQQMQKALTQMNVQFQHVISDLTGLTGLAILDAILAGERDPAALAKLRDPRIKAPEETIRKSLEGNWQAEHLLALKQRLSLYRSHRELIHECDQEIEKLVAAFEPRVNPAERPLPEDRKQKQRRRRKKSGSPDFNMRTEAYKLFGVDLTQIPGLMLLVFMLFSEVGRDMSRWPTAAHFVSWLGLCPDNDISGGRVLWRGARRTKNRAGTLFRLAAHSLHRDQTPMGDYLRRMKAKLGPAAATTATAHKIAIIFYTMVKNQVEYDASLWAKRDAMREKRIEARLQKQAAQRGYKLVPIQPAP

SEQ ID NO: 428811 - protein, 305 aa, unidentified
MTIQPCFIGIDISKARLDVFDGRHRRLANRPDAIAGFLAGLDRERCFVVFEATGPYDGPLHAALAAADIRFARVNPARARAFARAAGLLAKTDAVDARMLALMGEALALSPDEPRDEARLALAALAARRDQLVAMRAAERVRLKAAADHIGSLARHLRFLDDEIAALDRALAEAVRADPGLAEADALLRSAPGVGPVTAATLAALMPELGRRGPKTIAALAGLAPVNRDSGRHRGKRSITGGRSRVRRALYMAAIAAVRSNPRFKAFYQAVLDRRAAAKIALVAVARKLLVVLNAMIKNKTAFQT

SEQ ID NO: 428812 - protein, 520 aa, unidentified
MAITRSRGRSSSRRTPTSVGKPRGVLHPRVQLIGPEHFGIVCFDCAKARSKFLLADFYGRLLIPPTVVAHTRPALDAAVAQIRHAFEQHQLRDGLVAIERTGRYHRVVQRTFAAAGFETRILHPFVTKQYRQPVDPGNKTDDTDLAAIHRATITGCALLEATRDEAWTTLQLLIRHRRDLVCKGAALNCQIRDHLEATLPGYAACFDKLWESPIPWHLLRHYPTAKQLHEAGVTALCHTLRQASIRFQRRTIETVVAWAEQAAPGDIAASQHLRIALALYDDRQRKSQEIQALERDIASRLVQTPYMLLLSFPGINVVSAADFAGEAGPIEHYATAKSITGRAGLRPSRYQSDTVDKANGPLVRHCNRALRAAILGIADNLIVCNHHFQVLATQWRAQGKDARHTRVKVGLRFCRIGFQMVAGRQVFRHPCLQGRHYILDKLTAFHREHDTGMVEVLRDLQAAIGQLPAREYAAEAKPLADEFEKIQGGRHRGPQVLGDILPIVLARLGVGVVQSPESGE

SEQ ID NO: 428813 - protein, 318 aa, unidentified
MKTQQATEFVGVDVASDHLDVAVHGQPTVRRFANTIQGIAQLLRMVPPSSVLGLESTGRYHTQLAMAAHAAGLCVHVLNPLDARRYAQSVGQRGKTDRMDALVLARYICHEHAHLQQWQPPTACQAALRELLAHRATLVRQRSALAQAGCHNKALARLDEPVLAAMQQAIAQIDEQLASTVQADPASQEAFEYITSVPGLGLVCGSLLVMLFGRMQTRSADAVIAFTGLDPRPNDSGKKTGQRRLSKRGWPEIRRLMYTAAMSAARTKTWNSFYRAQRDKGLSTTAALVVLARKLLRVAFSLFKKRVKFDATLVAASA

SEQ ID NO: 428814 - protein, 341 aa, unidentified
MNQVSTVGLDLAKHIFQLHGADSVGAVVFRKRLRRGQLLAFLATLPPCTVAMEACGSAHYWGREIAKLGHTVKLIAPAYVKPFVKRQKNDMADAEAICEAAQRPTMRFVALKSANQQAAAVVFRTRDLLVRQRTQAINALRGHLAEFGVIASKGLVHTSKLIAALEDPASDLPQAARGILAVLVEELRSLDERVAVLDREIARHAKENAIARRLMTVPGIGAVTAAALTALAPPADTFRRGRDFAAWLGLTPVQRSSGGKERLGKTSKMGERALRRLLIIGASAVARWAARKGVPAGSWLGRMLARKPPMLVRVALANKMARIVWALLAKGGVYRAPVAAV

SEQ ID NO: 428815 - protein, 340 aa, unidentified
MSSLQIGVDLAKSVFEVALSPVPGQVRARRRLSRAGVTPFFAQQPPAEVLLEACGSAHHWGRELQRLGHRVALLPPREVARYRAGTKTDRADAKALLEAARNADLHRVPVKSIEQQAVVALHRLRQGYLRTRTARINALRGHLREFGFVIPVGARHVRPRAHAALAADAVPAFLRPALQQVLEDIGTLEDQAEAVRTQLTALAEQMPDVQRLLTVPGVGILTATALVAFVGDIHRFRSGRHLAAWLGLTPREHSSGAVRRLGRITKHGNTYLRMLLIHGARSALRAGGGSRQPDDLRTWARAVAARRTHNVAAVALANKLARVCWRVWRDQRPFVRRDAR

SEQ ID NO: 428816 - protein, 488 aa, unidentified
MPVNERLVVRDLIEDYFVQRHRACFFSNPKTNSQMAKLAKKIKTKKGLKLDVVNPDAAGIDVSSTELQVCVPLGRDVTNNRVFGVYTKNLHEISEWLTRCRITTVAMESTGIYWLPLFRVLKEDGFDVLLVNAHDAKNYSGKKTDEADAEWLMLLHSYGLLKPCYQPDNISRQIRNLVRHRENLVRSCSREILHLQKEMEQMNLKLDNVFSDVLGKSGQAIINAILDGERDAEKLANLADWRCKKSKEEIILSLQATWDDDHLFVMRQSHDLYLYYQKMIKHCDEKIESILLQYTAQIDESGTEFVRSKKQKQAKSNVSMDIEKYAFELWGVNAMKVPGISQNSLMKLIAELGSDFTKKFPDVKHFVSWANLVPNNKISGGHLLSSKIPKKKNPVGFVFKQCANSLKSSKEPIGDYFRHIKSRGGHMQAIVATAKKIATIFYIMVERKQEYNLAVYTSHRKKQLSKNIARLRNKLEKLEMEQTLIAIQ

SEQ ID NO: 428817 - protein, 341 aa, unidentified
MDHFAGLDVSVKETSVCIVDDTGRIVREAKVASEPKALLAVLTNYHFKRIGLEAGPLSQWLYSALAEAGLPAICVETRHMRAVLKAQINKTDRNDARGMAQMMRAGLYRPVHVKTLRSQKLRMLLTHRKLLQSKAIAIDNDLRGTLRNFGLKVGVAGTVKFETRIKELVENMNDLAALVEPLLIVRRVLREQIGILHRRLLAIVREDDVCRRLMTVPGVGPVVALTYRATVDVPGRFRNSKAVGAAFGLTPSKYQSGEINRTGAISKCGDEMMRVMLYEAAQVMLLRTAKWSWLKAWAMKIARHRGMKKAIVALARRLAVIMHRIWVDGTEFCWTREAPAA

SEQ ID NO: 428818 - protein, 340 aa, unidentified
MTITTVGIDLAKNVFAVHCVDQHGKTVLVKPKVSRAALPELIASLPPCVIGMEACSGAHYWARLFRQYGHEPRLMAAKFVSPYRMAGKSGKNDAADAQSICEAVRRPHMRFVPVKDESQQAMQCLHRIRQGFIEEETATYNRLRGLISEFGVIAPQSTDALRHMVSEQKSSLPLQVQQCVNDLLEHIDRIEDNITEYDRILSRMAKTDHRSQRLMELKGIGPTTACALVASIGNAHDFKNGRQLAAWLGLTPSQYSSGGKSKLGRITKAGDSYLRTLLVQGARSVLIGAGKRTDSFSRWVCMLVERRGYWRAVVAIAAKNARLCWASLHYGDDFRLYSVN

SEQ ID NO: 428819 - protein, 387 aa, unidentified
MPQPNDLRRSLVALDQDSTLVAVIEMGQASWLVAAIVPGINRHPLKKIATDQEQLVQVLQRWAKEAETAGRVIKRIAVAYEAGRDGFWLARWLRADGVEAYVIHPSSVPVPREHRRAKTDRLDTELLKRAFLGWLRGEPDHCSMAAIPTLAAEDAKRPGRERENLVGERTRIVNRIKGALARLGLRNFKPMLCNAPQRLETLRTPEGAALPPNTLAELRRDMARLSFVKQQIKEVETARLERLQRAPGEPGNAMVHLLTRVVGVGVETADMLVQEVFSRNLRDRKAVARYAGLTGAPDESGKKRRERGLAKSGNARARRGMLQIAWGFLVHQKDSALAEWYRARTADARGATRKTMIVALARKLLIALWRLAATGEVPEGLALRAAA

SEQ ID NO: 428820 - protein, 393 aa, unidentified
MRFAGVDIASETHVVAVMDEHGEVLVEPTVFGEDAEGYAKLLSLLGPPTDILVAMEATGHYWKNLFAALAAGGFPVVLINPLRTHRFAQEDLERTKTDAIDALGIARFAAQKRPPATRLPDQATEELRELVRHRDRLVQHFGDRVRQLHRLVDLGFPEFTRYIRSLDSELASAVLHEFPTAQAFQGVSVRRLARLCYDGRHRVGEELARSLIEAAKVSVGHHHGFAYRVQVRHACEDLDVLRRRLRELEHDIERFLMDHEVGSLLTTIDGIGVQTSARLIAELGDPALFRNSAALAAYVGPVPALKQSGKKQHTRAGITSIGNASLRAALWMPTLTAVQKNPWLRAHYQRLIARGKPPKLALVACMRKLLTAVYSVAKNRRPFVPILAPELAP

SEQ ID NO: 428821 - protein, 373 aa, unidentified
MSEFNKFVGLDVHKSTIAISIASDDGAEVRYFGEIKNTKEALINFANKISQGSLKLSFCYEAGGCGYEVYRHLRNIGHDCMVVAPSLIPKKAGQRVKTDRRDSLNLARLHRAGELTGVWVPDAMNEALRDLTRAREDMKHLQRQAKQRLLAFLLRHGWTYSGKSNWTKDHFNWLETVKFQHAAQQIVFQEYVDTVKYCGKRVESVTQQIEICSRESAYWPVIESLMALKGIDLISAATIMAEIGDLTRFDSAPQLMSYLGLVPSEHSSGSSVRRGGITKTGNSHVRRVLVEAAWTYRFPARKTAHTQKRAKVTTEAVQEISWNAQKRLCQRYKELNANGKIKVQTCTAVARELAGFVWAIGQTVPLKPTANVQ

SEQ ID NO: 428822 - protein, 339 aa, unidentified
MEYCGIDLHVSYSQICVLDEEGEVMETSRVRTSRPALTKFFACRDQMRIVVEAGGSSPWVSRLLERLGHEVIVCSPRRVRLIAESTLKNDKVDAEVLARLLRIDPVFLTPVRHRSEKAQLMRSKLLVRRSLGEARSKWINTVRGLLRAFGYRVSGNASHTFTGRVDRMNLPDELLEVIEPLLEQLDLVSGEIARRDEEFAGMAREIPAVDRLQQIPGVGPITSLYFVLSIDDPHRFRRSRDVAAFLGLRPVMRETGDTSHYGRITKEGDSEMRRLLVQAAHAMMITRADCALKQWAKEIEGRRGKGKKSVALARKLAVLMHHLWVTGEDFEAFPKQKAA

SEQ ID NO: 428823 - protein, 346 aa, unidentified
MGVVCRIGLDIAKNFFQAHGVDKYSKEVFNKKMKRTDVLPFFANLPSCLIGLEACGGAHFWARELAKLDAKHVVRLISPRHIKPFVINNKTDAADARAICEVVGRPSTRFVNVKTVEQQDMAGWHRIRERKVKERTALVNQIRSLLSEQGIIIPQGITHVRKQLPCIVEDLENGLSLRARDYLSELYGELVDCDALVAKYEARIKEFALNNEDCKRLQKIPGVGPLTATAIVAHVGTAKHFKNGRAFAACMGLTPREYSSGGKQKLLGITKRGNSHIRQLLIQGARIVTRYCLIKLPEQSEQRIRWVRELAERRGKHIAAVALANKTARIIWALLARGEEYRPALV

SEQ ID NO: 428824 - protein, 405 aa, unidentified
MIFMGNDWASDHHDVCVMDEHGTILATRRLPETAAGVTTMHELIARYAQDPTEVAVGIETDHGMWVTALVGAGYLVFAINPLSVSRYRDRHHVGGTKSDKADAKTLADLVRTDRHNHRLVAADTVAAEAITVMARTHQNLVWARSAQQNVLRSQLGAYYPAAVDAFGGDLAHTDCLSVLRRAPTPRQGAALTVAAIRSALKKGGRQRNTDQRARDIQQALRGGGHLSAPETLTAAYAATVTATVEMLAALNTQITQLETTMAQSFKAHPDAAIYLSMPGVGDITGARMLGEFGDDPERYATAKSRRNYAGTSPRTIASGKGHVVLARHIRNTRLNDAALRMAQSALTGSPGARAYYDSLRDQKKSHSQASRAVANRLIGILHGCLKHRTPYNEHTAWNHRTNLAA

SEQ ID NO: 428825 - protein, 343 aa, unidentified
MNEIKVLGIDLGKDVCSVVGFDGAGKVLLRRPMRRDSILKLASGMPTCVMAMEACCGAHHLGRLLREQGHDVRLMSPEYVRPYVKAQKNDDRDAEAIAEAATRPTMRFVDLKSDEQLDMQSLHRARDRLVGERTTLINQLRAILLERGIVMAKGRRKLELRLDQLLAGEVAISRRIRLLVEDMRAQWRALDERIGAFDAEFVAIAREDAATKLLSTIPGVGPLNATAFVASVGRAETFGRGRDLAAWLGLVPRQMTTGGKPRLLGISKRGNGYLRRMLIHGARAALPSLAKGRTLLGEWLRGLLARTHMNTAVVALAAKMARIIWAVLRSGRPFQVEAMPPAG

SEQ ID NO: 428826 - protein, 428 aa, unidentified
MDELDRNRLEEFRQLRQEVRHSEEYLIVGIDIAKDQHHAFFGTATGKTLLRRLVFSNDHEGFRKLLDHAEALRVRHGLKKVVYGMEPTANYHKPLGEYLIILGRTVVLVSGVTVKQNRESLDGRWDKHDVKDSANVADLISQGKCLYYDHPAARLRGLRNLLSLKRRLKKQEHGYKVRIRNNLIAQYFPEMDRDYDRLGAEGLSIMRWCFPPSQMTVLDVDPFIERVTSRRIRIEKRRRLEGIWEKAGESIGCDGVPGVEHEARVMVEGLKQIREMIKETEDKIEELCKEFPEYKYLLTIPGYGPDVSAKVLGAIGDPDRFQNGKQVLKLAGLDLSADRSGKDSAKAIPQISKRGKADLRYALYQAALIASTRNQDFMRYYTRKLQGREREKGIHTKMWVKLSAKMLLIAWTLMKRKEVFDPAYLNVK

SEQ ID NO: 428827 - protein, 343 aa, unidentified
MQTVTTIGFDIAKSVFQVHGVDTVGQVVIRRQLKRRHVLAFFEKLPPCLVGIEACASSHHWSRELQALGHTVRLMPPAYVKPYVKRQKNDMADAEAICEAVARANMRFVPTKTPEQQSCLMLHRTRHLFIRQQTALINSIRAHLAEFGIVAPVGRKGVTELLRVVVDPNDKRVPEVARACLTALGTQLLALKEQILQFDRMILAWHRSNQTSKRLHYVPGVGPMLATALVASVADPRTFRSGRNFSAWIGLVPKQHSSGGKERLGSISKQGDRYLRGLFVAGALAVIRYAKIHGTGHRPWLTALLGRRPTKVAAIALANKIARMAWAMMAKGERYKNPVALAR

SEQ ID NO: 428828 - protein, 342 aa, unidentified
MKSTTIAVDVAKEVLEVAVSVRPGEVSEQRRLSRSAFIKFCTHQPPATVLLEACGSAHYWGQQLQALGHRVVLLPPHATRPYVFRNKTDRTDTRGLLEAYRNQDIHPVPVKSVSQQALTALHRLRSTWLAARTARLNTVRGLLREFGCTIPIGAHHVLPRAWDLLADPDSGLPDVLRPALAAACTEVRELEASIQLVERQLEALADQTPAVARLRSIPGVGLITATALVAFIGDVQRFPSGRHFASYLGLTPRERSSGLIRRLGAISKRGDVYLRMLLIHGARAVLWAAKKHRTSSHLRAWALQVERLRGHNKAAVALANKLARIVWAVWKHDVDFREVTAA

SEQ ID NO: 428829 - protein, 410 aa, unidentified
MSVLKVALDPATVIVAVDPGKAFHRVWISNGAGMLADPMSLAVSREGICQLELALNKHGPDAPVIAIEATGSLHRPWVSELERRHPGSVRLFAPSETKSARMQLGSGRFKTDDRDCAALTYMARQGGGRRYGQQTAVEALRAAVRHRRALVADRKVAQQRLHDQLNALCPGLSAPAGHGRSLGLDTPTGLAVLACAAAFSGRAPQLRSLMSRAPGRLTVNTAQYWLQRWRGCLPPPADADQRARRLDRDLDRYRRLRADIAAIDCEVVTLLADTDGQILTTLPGVASVRAAAFAAHSLPIERFPDAEHLYSATGLAPALYQSATLSRRGRISRQGLAEHRDALMGIAWGLAQNSPSFTERDAELRARGMAPIQARVALARHACRLIYRLLRTQQPFDEQRYRQGRLSGER

SEQ ID NO: 428830 - protein, 375 aa, unidentified
MKNKVRFLGLDVHAETIAVAIAEPDGEVRSLGTIANRAESIRKLVKKLGSAEQLKACYEAGPTGYVLYWQLAELGVACEVIAPTLVPMKAGDRVKTDRRDAERLARSYRSGDLTAVWVPDEGSESLRDLARAREAAKQDQLRARHRLSKFLLRMGQRPAVGMKAWTAPYMAWVRQVHFTQVAREATMLDYLHEVDHMSERVRRLEQAITEAVKLATPAVQEVVKGLQALRGIAEISAVTIIAELGSITRFDTPRQLMGYSGAVPSENSSGKRTQRGSITKTGNAHLRRIVVEAAWSYRLRPAIGPRLRKRQEGVSEPIKEIAWKAQVRLTKRYARLAAAGKDQRKIVTAVGRELLGCIWAIGIKAETASKLQMAA

SEQ ID NO: 428831 - protein, 348 aa, unidentified
MVSKHSDHQMMLHEQGEITKMREFTGIDVSKEKFDVGWLRDVNTGKKKTKVFKNTVAGHQQTVDWLLSNLKVPAQDIVITLEPTGVYHEALLYFLHDCGFQMLLVNPGKAKKFAESINQVHKTDKLDAITLAWYGHAQHHKLSLWQPEAPEIRELKVMIRRLDALEKDLQREHNRQEAARVSLSSDRVAQSLEDMIETLKAEIQRLQQDIDDHIDSFPELKRNRQLLESIKGIGTVMSRELVYLFASKRFKSAKQAAAYLGLIPRLRESGKLKGRTTLSKIGSARLRAKLYMAAVCASTHNPDIKAQKARLLKAGKVKMQALGAAMRKLIQICFGVIKHQCEYQPQLV

SEQ ID NO: 428832 - protein, 321 aa, unidentified
MKPVGVDVSKKSFHIAVLLGDKQLNKAFDNNPAGHRDVQSWLVKKGVAQTEAHICMEATSTYYEALALALCDAGWRVSVVNPIQIKAFAESRLIRQKTDRADAHTIALFCAQQQPPLWIPPAREVRELQSLLARMEAVQGMRVQELNRLQVAQGPARESVERLLETLDEELRVLRQQIDDHIDRHPGLKEQTELLKSIPGVGESLSAYMTAWLPMTRLEDARSAVAFVGLSPKARESGTSLRGKAVLCKMGHRRLRKMLYMPAMNAMRFNPAAKALAERLRDAGKPGKLIVGAIMRKLVHWIYGVLKSGERFNVNLALAKT

SEQ ID NO: 428833 - protein, 325 aa, unidentified
MTSKFTLGLDVSKLSIDVCLLPADGRPQKTVIDNSIAGFQKLLCWLDGVDLSQLHVCLEPTGKYSRAVAGFLHEAGLRISQVNSYTVLCHGRSKNYRSKTDSIDAFLLADYCLKENPSTWSPAPQSHTELNELQMRIYDLAETIRQENNRLEAGGISTLVRQNIEEHLAYLTVQKKRLELASRNLVKSDPLLGSNFSILHSIIGLGEQSAISLLAAVRFERFEKPRSVGCFAGLTPRLYRSGTSIYKRECISRVGSNELRRVLYFPAMSAMQHNPQMRAFAERLRAKGKPSKVIICAIMRKLLVLAATLIRKQVFYDSTKGMLPV

SEQ ID NO: 428834 - protein, 341 aa, unidentified
MVGVDTAKSVFQVYTVEQATGEVINKPIKRAQFLQWFANRPPCLIGMEACGGSQHWARKLQELGHEVKLMSGKMVKAFVSGNKNDAADARAIYMAAQQLEVKAVAIETEAQQAVLAMHRIRQQLVKMRTAQMNALRGLLAEYGEVFGTGRKSFDAGTKAALERLAERLPMPLIDTLRDQWNELARLDDRITRIEVSLLTWMRQDRAAKAIFAIPGVGLLTATAVVAAMGDAKAFRSGREFAAWLGLIPGQTGSGGKVRLLGMSKRGDTYRRTLLMHGARAVLRRPRTLSPWLQQLSQRRPLNVVIAALANKMARTIWAVLVHDRAYDKDHVSMRPTTATAA

SEQ ID NO: 428835 - protein, 419 aa, unidentified
MKIINAKKHEFVNGKTLLVTIDIGKTMNMGYCRCPDGTEVKPFEFFNHAEGFQKLWGCICKVKTANHVEKVVVGIESTGAYGEPLVHYLSQRGVRVVQVNPLHTKRLKELQGNSPGKTDRKDPKVIADIIELGHALTVVIPEGVAADLRRLTHARERTLQRRTVLYNQLQDLMFILFPEFLQVMKKIKSRTARYLLQHYPTPQDIVKCGLEVLVSIIRQISCRRLKRERAETLYEAACKSVGIEQGQRSIVFEIQEILSWIETCDCFIAKLEQQMSDLLKQIPYSRSILSIKGIREVTAAGLIGEVGDFRKFRTLSEILKLAGLDLFEISSGQHQGARHISKRGRSLLRKLLYFAAINTIRQGGVMYETYQRYLQRGMIRGKALVAIARKLLRILFALVRDHSEYAVNYYEIENLKLAA

SEQ ID NO: 428836 - protein, 441 aa, unidentified
MVAVMIGIDPHKASHTAVAIDQAEVPLGQLQVRACAAQAERLLGWAQAWPQRTWAVEGAGGLGHLLGQQLLAAGERVLDVPPKLAARVRLLATGNINKNDPNDARSVAVAALRSAGVREVCRDDHAAVLKVWSKRYRDLGRARTQVACRLHQVLCELIPGGVPGEITAGQAERILASITPAAAVEAARWELAAEFTEDLRGIDAQIRQTRNKLAAAVRAAGTSLTGLFGVGPVIAAAVIGDVRHVARFPDRDHFAAYDGTAPIEVSSGGRKIWRLSRRGNRRLNHAIHMAAVTQIRYRHSQGHAYYQKKLAEGKTSKEALRALKRQVSDAIYACLQADARRAAAHVKSPGGQPGNGSDSSAAGSHPGHRLFGQATPGPATYPTTTTASFPALPCQASGRPGQGPGAARPRQRRQQGVLDPAAREPIMPAAGRKATGPAAHR

SEQ ID NO: 428837 - protein, 391 aa, unidentified
MICVGIDVAKDKHDCFILSSEGVSLADVFTIPNNLEGFNTLLDKLHACSTPQDSIKVGLEATGHYSYNILGFLLDNGLATYVLNPLRTNLYRKSLSLRKTKTDRVDARTIAAMLLPDAGLKPYTDTAHHNEELKSLTRYRFDRVKERAKLKTSVSRLVCILFPELEKLVPTLHMASVYALLSEFPGAKQIAAAHLTRLKALLMDASRGRYGRDMAAEIRDAARCSVGSKMPAKSLELQHTIRLIRELDAEIEEIETAIQAIMDELHSPITTIPGIGCRMGAMILAEIGDLSRFASPDKLLAYAGMSPSTYQSGQLKNYYPHMEKRGSRYLRYALYNTAKYVCQWDPIFAAYLAKKRAEGKHYNVALSHAAKKLVRLIFALEISRQPYCPAI

SEQ ID NO: 428838 - protein, 424 aa, unidentified
MTRPQLTPPAGVLVAIDVAKARNEVLIEVPGLRRRRLSVLNTRAEHDRLIAILSDLGQPVTCGFEATGNYHRPIAWRLLQAGFAVRLISSVALARTREALHNGWDKNDPKDAQVMLHMIRIGATQVYHDPLAAGINDVQELSKTHDAVSKAKTEVLHRILTHYLPLYFPEVDRFRHNSRSDWFFAFLDRFPTPASITAMSKEAFIAAAWDVVGRKVAKAQLLGDIYETARSSIGLPVPPDAPAVSMFRLVIGEVRSLIRQRDAIEATADALLTDSSDYKLLRRIPGIGPINALTILAEAGDLRRFGHHRQFLKFCGLDLATQQSGTFRGQTKLSKYGNARLRRTLWLAGQVAIRQRENSFRDKFERYIARDRHNADLRRKALTAITAKMARVVHAVIKTGDDYRPFVEGPVPGGRTPLNGAVRA

SEQ ID NO: 428839 - protein, 369 aa, unidentified
MADRITYVGLDVHKDSIVVAVAAGGLRGEVREYGRIANTSTALDRLLRKLGGDGMRLRFCYEAGPCGYGIQRRLSTRGHECVVVAPSLIPKRAGDRVKTDRRDAAGLAKLHRAGELTAVWVPDVGHEAMRDLVRARLDAVHSLRRARQQLSGFLLRHGCHYGRPAWTRLHRRWLAGLKFEQAVHHIVLEDYIAAVEAAEARRNRLTAQIEAMLPDWTLAPVVAALQTMRGMALVNAATLIAELGDLSRFANPRQLMAYLGLVPSEHSSGSSVKRGGITKAGNAAARRLLIEAAWSYRFPARLSRELLLRQESQPRLIRDIAWKGQVRLCARYRRLARTGKPANIVTTAIARELAGFVWAIARQVTVTTD

SEQ ID NO: 428840 - protein, 374 aa, unidentified
MGHDSEAFIGIDTSKLRNAVAVAEAGRKGEVRYLGEFDTSTAATRKLVAKLAAQYGKLTFCYEAGPTGYGLHRLIESLGHTCLVVAPSLVPKKAGDRVKTNRRDAEGLAKLLRAGELTAVWVPDERHEAMRELARARDAARQDLTRKRQQVSSMLLRMGLHYPGIKTWGARHRTWLANLKLEHGEQRFVLEELLQAERQAGERIARLEQAIRAAVTDWSLATMVPALMAMRGIDLVSAVTILAEIGDLTRFKNPRQLMAYLGLVPSERSTGDSVKRGPITKAGNGRARRVLVEAAWAYRHPPRVGSEKQALVAAAPRAAREIAWRAQVRLCARFRTLSRNGKKSTVVATAIARELAAFIWAINREVGTTPASAA

SEQ ID NO: 428841 - protein, 420 aa, unidentified
MKEIQTKKGRIVNQKTLIVTVDIGKTMNMGYWRTPGGSSEAKPFVFFNNGLGFNKFWGQISKAMKIHNLKEAVVGFESTGAYGEPLVHFLRKKNVRLVQVNPMHTKRLKEFQGNSPNKTDKKDPKVIADIIELGHALTVIVPERAAADLRRVTQARERTIQRRTALYNQLQDLVFLVFPEFLQVIKDVKTKSALYLLREYPTPQKIIKCGVADLGVKLRKISRGKLGPERVLALKKAAWQSAGIQQGRESILFEIRESIGLIEACERFIAELEARMSNYLEQVPYSKFILSIKGVGEITTAGLIGEVGDFGKFHTISELEKLAGLDLFEISSGKHRGKRRISKRGRSLMRKLLYFAALNVVRKGGILHQWYQEALGRGMLKMKALIAVSRKLLGIIFALVRDHSEYIVGYSKTQGLKIAV

SEQ ID NO: 428842 - protein, 372 aa, unidentified
MDERIKFFVGLDAHKDTIAVAACEAGREPARFAGTLGPDVRALLKVLGKAGDPAAVSVVYEAGPTGYGLYRELSRRGYHCEIIAPTLIPRRAGERIKTDRRDCLRLAELSRSGELKPIWVPDEAHEAMRNLWRAREDAVGMRLKARQQLKAFLLRHGRRYPGKTSWTKSHERWISDQRFDHQGDRIALGEYQLAQQSAEQRVQRLTTALTEAAAGWRLEPVVAALRALRGIDTVSAIGLVAEIGDFRRFGTARQFMGYLGLVPSEHSSGNSIRRGSITKTGNAHARRLLTEAAWNYRFPARLSQALRERSNALPEAVCRHAWKAQLRLCGRFARLSSRGVQTNKVCVAVARELAGFVWAIAQQASLPTTPPH

SEQ ID NO: 428843 - protein, 343 aa, unidentified
MWYVGLDVHARRSSFCVLDGRGRKLFSRTVRGSYSKVVKEMESVKRPFSICFEATTGYGWLHERLSKLARRVVVAHPGQLRLIFRSKRKSDRIDAERLAKLLFLDEVPPAYVPDGRVRAWRSMIELRSKLVARRVAVKNRIRALLRSQAIEAPCPLWSKAGRRWLAQLSWPSDFEALARDLLLEELRSVSEAIARAERALKAEAARRPAVGLLMSIPGVGIRTAEAVVAYMDDPYRFRRNSAVGGYFGLVPCLDSSAGKDRFGHITRQGPATVRRLLTEAAWQAVRRSATMRAFFDQVTHGDPSRKKIAIVACAHKLVRSMHAMLRDNRSWQEALQQVALCAA

SEQ ID NO: 428844 - protein, 333 aa, unidentified
MSRFWVGIDVSKRKLDVALLNDAGKVKSKSLANDPAGFAALMTWLQERGADSSSTHVCMESTGTYSDGCATAFADAGWLVSVVNPAQPKSFGQSELNRNKTDVMDAALLARYCSKMEPPAWQPPPLEYRKLRSLVERLQALKDMHQQEANRLEAALEAAAQSSIQEHLNWLEARIAELDKDIDDHIDRNKETLGKDTQLLTSIPGIGRTTAAKVLGLLGDLRRFSSGKALAAFIGVTPKRHESGTSVRGPSSIGRAGHPRIRHALFMPTLVAARHNPMIKAFRDRLVAAGKPKKSAALASMHKLVHLMHAIVCKGVGFDPRFGRLALDVQDGI

SEQ ID NO: 428845 - protein, 343 aa, unidentified
MKHIGFDIDSTTTHISVFSDRGRELKHTKVATREADLVAFMMSVSGPKQVALEESQMADFVTRIIEPHATKVIRCLPQHNRLISQSEQKCDREDARNLAELLYLNKLKAVHHAPWAYRQLREGVRAYWTASRDLARAKSRLKAFYLFNGVHCTGEKAYSSRYRAGFIQQIENRSGNKQLLEQLYLHMDFCRTRKAAHIKILKELVPCVHQEVRYLKTHPGIGFIGSCTLIAYLENGWRFKNKRKLWRYCGVGVRRHESAGKGRRGASRKGNRYLKNVVMTAAAAIAARRKADNALTRMWRAGVEAGIPVDRLKRNLARKVAVLAQRSLRFKEGYHDDRVVTTQ

SEQ ID NO: 428846 - protein, 428 aa, unidentified
MSVFVGIDWGGGSHAVCVIDEKGHVLDRFAVGHDREGLAALIRRLLKHGEPGEIPIAIERPSGLLVDALVEAGFAVVPIHPNVVKACRPRYRAVSAKSDPGDAYIIADILRTDGHRLRPLKPQSDAIKALRGLVRGRDDLIGTRVVLANQLTALLDSFWPGAAVIFADVASPIALAFIERYPTPDAAVRLGPKRLAGFLAQHRYSGRKSPEALLARLQAAARGCAGEAESEAKGELVRALARTLQSLVGEIVKLTSRIEHAVAELPDGQIVMSFPRAGRICAAQILAELGDVRERFQSEDQLAAEAGLAPVTYQSGKSRGVGWRWACNKRLRVAFTCFADNSRHQSPWAADIYKRARARGCDHPHAIRILGRAWARIVWRAWTNREIYDLAKHKGAKPFLPPPQPIEPARGAPNTRSGPAPALSMTTG

SEQ ID NO: 428847 - protein, 284 aa, unidentified
MVVVGADVHKRTHTFVAVDEVGKKLGEKVVSATCSGHHQALRWARERFGAQVVWAIEDCRHLSARLERDLLTAGQKVVRVPSKLMAQTRASARTRGKSDPIDALAVARAFLREPDLPVASHDEVSRELKLLVDRREHLVGQRTSTINRLLWRVHELDPEHAPKPRSLHLLKHRTLLSQWLGTQRGLIAELARDELADITRLSEMIDALAKRIGERVRKAAPALLALPGGAELTAAKLVGEAAGVARFKTEAAFARHAGVAPIPVWSGNTAGRVLVEAPDAMRLG

SEQ ID NO: 428848 - protein, 340 aa, unidentified
MSEITTIGLDLAKHVFQVHGIDASGAPVVRKRLRRSEVLTFFARLPRCLIGLEACATAHYWARELQAVGHEVRLMPAQYVKAYVKRNKNDAADAEAICEAVRRPTMRFVPIKTAEQQAALLVHRGRERLVRQRTALVNALRAHLAEFGVIAPLGLRNVARLISIVRDESDARLPGLAREVLRVLAEQVEQLQTAVAAMEEQLTAWHKSNPVSQRLATIPGIGPIIATAIASTVVEASGFRSGREFAAWLGLVPRQHSTGGKARLGGISKRGNRYLRRLLINGASANLLRSKATNADPWVIELRRRRPSLVVAVALANKTARIAWAVMHRQENYRRMAAAA

SEQ ID NO: 428849 - protein, 442 aa, unidentified
MSDLAVLDPRAAFVDVGSEKMHVSIAGGSPAVFGTVTSQLHALRDYLAGHQVGSVAMEATGVYWLPLYGVLEAAGMEVVMVDGRQTRNLPGRKTDMKDCQWGATLHAHGLLRAGFVPPANIRRLQDYLRLRGEHIAAAAGHVQHMQKALERMNIKLHEVISSLTGASGLAVIRAILAGERDPQVLLGLCDIRIRNVKAERVVESLRGDWAQEHLFALAQAVQSWDHYQGLIAACDGQIAVVLRQMPDAKAPPSAASTKTGKPRTRPGVNAPDIADLREILAQICGAKDLTTLPAHSEYSVLQLIGEVGTDLTKWRTEKHFASWLGLAPGSAQSGKRKASVKRRRNRAGQLFCVMARALVRSKHVALGGFYRRMAARRGGLVANKALARKLATLFWRVMVKGLDFVETGVAQYEAKVLETKHRLLHRLARQLGQQIVPNPAAV

SEQ ID NO: 428850 - protein, 316 aa, unidentified
MSTETFVGIDVSKASLDVGVLPLGELAQLPNDAKGINRVVSRMKKLKPALVVLEATGGLEVPVAAALARAGLPVTVVNPRQVRDFARAIGRLAKTDKIDAHVLALFGERVRPEVRPLPDETTQAFDALLKRRTQLVAMLTREKNRLHIAAKGEVRAGIARHVKWLEREIDEVEKNLRESVRSSPVWKAKDDLLRSVPGVGRVLSHTLLAGLPELGRLSRKQIASLVGVAPHAADSGTIRGKRVVWGGRRHIRQALYMSTLCATRFNTTIRAFYRRLLGAGKPPKVALTACMRKLLIALNAMLRDEKPWSPDAAQFA

SEQ ID NO: 428851 - protein, 401 aa, unidentified
MISVGIDVSKEKSTVCILRPYGEVVASPYEIAHTEPEVKALADRICALDGEVRVVMEATGGYHLPLLAVLKQAGLFVSVINPLVMKKYASATLRKGKTDKLDSVRIANFGIDNWFKLIDYSAPKGIYSQLRMLGRQYSHYITIKIESKLALADLLDRTMPGIKKLLSGKRSELPTKDKLCDFVEEYWHYDNIMKKGEARFVSDYCRWAKKKGYHANETKAKKIYAMARDGIPTLPSSAASTKMLTLEAVRVLREINRTLETILTQMQELATTLPEYDVVRAMKGVGNVLAPRLIAEIGDVRRFHSGSALVAFAGIDSPPYQSGGFTGTRRRISKRGSALLRKTGYEVMKCIKSTKPSQDAAVYLFMLKKETEGKPKKVAKIAALNKFLRIYFARVMEVYRI

SEQ ID NO: 428852 - protein, 402 aa, unidentified
MFFLGIDIGKQHHEVGLIDQHGKSIGKTIRISNTKFGSEQLLAFFNKHALLPENTMVGMEATGHYWLSIYTFVHKLGFHTTVFNPIQSDVLRDFYIRKTKTDTIDALLIAQVIRLDLPDKTELPAEDIFRLKQLERFRYGLVDRCSDLKRKILACLDQVFPEYDQIFSDVFGCSSTQVLLNSPIPEDLLEIDAERLIETINTASEKRLGIARSEEKVLKLKEAAAHSFGISIASDVFKLEIQIMLEQIQLLDSQIKIIEAEIQEIVSKQENYLTTITGIGDITAAVLMAEVGDIKRFERPNQLLAFAGLDASVHQSGDFTGTKNRLSKRGSPYLRRAIWQAAFVAAFKDPALSLYYQKLRKRGKSHGTAIGAVARKLVNIIFAVWTQNKPYEVHFPEDISEK

SEQ ID NO: 428853 - protein, 411 aa, unidentified
MNPVVGLDISKGESQVQAFLDKGKPFRKSFKVTHTLQGLALLVEFLEVVQKETGLKPPVILEATGHYQTAVVQYLEERGYLLIIINPLISYKAKSSSLRKVKTDAVDAYHLCELFYKEELEPYKKRGVQLLNLRNLTRQHENITGVMIQTKLQFQAILDQVFPEYRGVFGDLYSVVSLLTLKEFPSSEDILEASDEALSNRIKELCKSRSIRWANEKALQLKEAAARNPFEKTVYQSHILSLGMYIDIILQYKEHLSTLESEIDALAKEVEEYNIIKSIPGIGEKIAATIISEIGEIDRFTDPKKLVAFAGVDPSVFESGKFTATKNRITKRGSSRLRHALYMAVRCAIRDCRKSKTSDEIIPRNKKLREFYDKKREEGKPFKVAVIACVNKLLHWIFALLRNKTTFQDIA

SEQ ID NO: 428854 - protein, 389 aa, unidentified
MLIEQIAPVAGNEFAPIFIALELSLSKWLVGVGTPQKWTVRRHQVEGGDLCGLLGLLVRISAEEEKRVGLAVKVHVCFEAGRDGHWLYRALKLAGYDVYEIEPASVAVDRRARRAKSDGVDVDKLVRTLARLLRGELDACRVVEVPSEAEEDAKRPHREYERLVREQTSHSNRVKALLFGQGVRDFDPMAADRLERLAALPILPRLKAELIRECRRLARIIDDIAEVEAAMKAEIVLSNKVSRAGAAASTPNHVQAKIAQLSKLKSIGVHFSTVLGGEVYYRTFQNRRGVAQYIGLAPSPFQSGDTARDQGIAKAGNKRARKAMIELSWLWLRHQPDSALSKWFRQRVGDQKGRVRRIAVVAMARKLSVALWRYLETGLIPEGAVLKRA

SEQ ID NO: 428855 - protein, 364 aa, unidentified
MHYVDNTTELSSLEETRCQFNGGKAIIKLGIDVHQHFCVVVEQVGGNNPKPPQRFRKEAFLPWAAKLKNQGKQVHAVYEACGFGFGLQRQLSALGIDCHVVCPQKLDERNRRVKTDGLDAKALCLKLDRFVQGNGDALARVRVPSEQEEQQRAIHRQREQLVKARKRLEAQGRSLMVNHGMEPIQQWWKGRAFAQLQVPAWMKELLATSQPILLALEQKIKTLTLQLQNAAQPNQPRGFGALTSVVIDREIGDWQRFSNRRRVGSYTGLCPGESSSGDTRLQSCVTKHGNPRLRAALVEAAWRLVRFQPNYRPIIKWRATLSKGTLATRAARKKAIVAVARQLAVDLWRIRTGRVRAQELGLIN

SEQ ID NO: 428856 - protein, 457 aa, unidentified
MSRMRKTKRSTPKGRPEAIPVLNPDAAGMDIGATEIYVAVPVDRDGQPVQCFGTFTNELGRLSEWLRKCRILTVAMEATGVYWIPVYQILETSGFEVCLVNARYFQNVPGRKTDVSDCQWLQRLHAAGLLRGSFRPAQEVCVLRSLTRHRDNLIRLASTHILHMQKALDQMNVQLHHVLSDITGLSGLAILDAILAGERDPRVLAQLRDGRVKASEETIVQALTGDYRPEHVFTLEQSLAAYRHYQKLVAGCDWKIEQQLKQFDAKVDTKAEPLAPPKVRRKKLFNNEPNFDLRSHLYRIFGVDLTAVPGISVLTAHTILAEIGPDLSKFRSASAFASWLGLCPHNDISGGKILSAKTRRVNHRAALAFRLAANALFRSQSPLGDFFRRMRAKLGAPAAITAAAHKLARIVFHMLSQREAYNEAIPRHNEQQFRARAEARLRAQAKALGYSVVAVTA

SEQ ID NO: 428857 - protein, 432 aa, unidentified
MNESIPAASLEGVAAYIGIDWADQKHDVVLRSAAEPNKVEHRVIEHQPGALMEWIGQLQRRFGGQGQILVCLEQSRGALIHHLMGYEFFELYPVNPLQLARYRETFSPGGAKDDQPDAGLLCELLYCHRDRLRAWKADSELTRKLAFFNEGRREGVDQRTRLSNAIKSQLKVYFPLALELLNQDTSTALAADLLLRWPSLETLQKQIPHQLRKFFYAHNCRGESRMLERLELVQQAQALTQDSAVIEPAAFRVQMLARQLKNLLPDIARYDQKIAELFAAHPDRFLFENLPGAGRVLAPRLLSALGSDLNRWESAQEIATLYGVAPVRRASGKKSGKKGEKKASVHFRQACPKFLRQSFHEFAGCSIRYCCWARALYEAQRAQGKGHHAALRAVAFKWIRILFACWKQRIPYDPQRYLQALQQRASPYANAC

SEQ ID NO: 428858 - protein, 390 aa, unidentified
MDNISRVVIGMDPHKRSATIEAMGPDEQVLGGGRFGTGPAGFEAMLAYTAAWQHRVWAVEGCEGIGKHLVLRLLDAGEQVIDVPAKLSARMRVYATGQGRKTDDTDAHSIALVGVRMTGLREVANDQALEVLRLLADRRRRIGEDHTRMVCQLHQLLLELVPGGAKKDLSAAQARRLLAGVRPKDVAGKTRKRVASELVADLERLYRRKKDANKELIDLVKATGTELLHLHGIGPSGAARLLVEVGDITRFPTKGHFASWTGTAPVDASSGDNVRHRLSRGGNRQVNKALHIMAVVQLRNPTQGRAYYDRKVAAGKTPNEAMRCLKRRLSDLVYKTMLDDLVGAGTGPGGHRGNVSDSSAAGSHPHTSSSDKSLPGPANRQPRTRLPAAS

SEQ ID NO: 428859 - protein, 442 aa, unidentified
MPKCVAAQPLPLSNDEGRVVMKLTYPICCGVDVHKTFLVATIIKTDGLVLKYHKKRFSTFSRDLLAFKQWLLDNNCKDVCMESTGKYWIPVWNILEDVVHVVVANPKWVSAVKGNKDDTKDSRWIGDLFRMGLVPGSFVPNKKIRVLREFTRYRYKLISMRSSERNRFQNAFTVCNSTLDAVLSDMFGKSATAIQNYLLDTDVVNPAYCASLLQRTAKKKSADVMAAVEGFKMSAEQKERVRIIQEHFSDINARVARLDAEINKMVSEYESQISLLCTIPGVDRNLAITIISEIGTDMSEFGSSKRLCRWAGLTPGNNESAGKKKSVRITRAGVYLKPALVQAAHAAVKSTKSVYFKSKYERISKRRGKKRAIIAIARMILTAVFAMLKTGEVFNPCDLQKYDMPEQLKRKQIVSSAKDAVKFLVSLGVLQEDTVSLAALTG

SEQ ID NO: 428860 - protein, 341 aa, unidentified
MQDVILIGIDLGKHSFHLHGQDARGKAVFRKKCTRKQLITFLATFHPCTVVMEACAGAHHMARHLMTFGHQVKLISPQFVRPFVKGNKNDFIDAEAICEAASRPNMRFVTPRTEVQQILSALHRVRESLVRDRVKASNQIHGFLLEFGISLPIGSAAIRRLPSVLAEHPLPVRLIAVLNRLHAHYKYLDEQIAEVEKELQLQLQEDDLGQRLMAVPGVGPITASLLSAELGDGKQYGCGRDFAASVGLVPRQYSTGGRATLFGISKRGDKNLRRLLVLCARSYMQRLDKQKGMLADWVRAMLSRRHSNVVACALANKLARTVWALAARHTEYRSAQASKAA

SEQ ID NO: 428861 - protein, 324 aa, unidentified
MGESVVYVGVDVSKHQLDYALSDREETFTVPNTDEGIRELVDALRETSPALVVMEATGGFEVPAAAALAAADVPVVVANPRQVRDFAKSTGQLAKTDRIDARILALFAERVRPAVRPLPDEDARALDAIMTRRRQIVDMISAEKNRLGFAVPAVQKGIKKHIRWLERQLADVDSDLDERIRSSPVWKAKSDLLREVPGVGPNLARTLIAELPELGRLSNKEIAALAGVAPFPRDNSGLMRGRRVVWGGRAPVRTALFLSTWSACRWNPVIRVFYQRLRAAGKRPKVAQVACMRKLLIILNAMVRDGQRWDPSIPLEQLRLQHSC

SEQ ID NO: 428862 - protein, 317 aa, unidentified
MSKRSIICASIDTGKYKLDVALHGRPERLQVANTAEGHEELFVWLRQHRVKRVGIEATGGYEQTVVRRLRQGRFVVVVFQPAQVRAYGRFHLRLAKNDKIDAALIAACTSDVRTIHAPPDRRLAELAELQTQIDQVVRAMARFKNHRESCRDAGLRQLWDDEIRRFRGLFRQRLKQLVAAIRQHPDLAERLDLILSVDGIALRTASALVVRMPEIGQLSRGQAGALAGLAPYDDDSGEHAGDRHIAGGRERLRNNLYAAAWIASLRWNPQLTALYKRLRAAGKEHKVAVVACARKLLIFANAVVARGTPWEVRTIAH

SEQ ID NO: 428863 - protein, 387 aa, unidentified
MIYYIGIDISKYKHDFCIISNTGEVIVENSSFENNKKGFQYFLDQLKSYNKSECQIAFEATGHYSLNLELFLIDQGYSFMKTNPLVIHQFLKARSLRRTKTDKADSLTIANYIMSVPYKPNSNLLYNIYTLKSLCRSREQLIKEKSKFEVLLTNELDKSFPEIKPFFNNIISNTLLYILEKYKNTSHISLMKDYESLRKLSHGKFTYAKFAQLKQLAKDSIGHHDDNSDLLISTYVSIINHFNEKIDPIDKQISTIIKELNPKMLSIPGLGEISAATILSEYGDIKNFSSPSKMLAFAGLEPSIIQSGTLENNGKMVKHGSGHLRYSIMNIAMSILRYSPIFYDYYLKKRSEGKCHRVALSHVCKKLIRVIYTLEKNNINFNPSLLK

SEQ ID NO: 428864 - protein, 426 aa, unidentified
MSEIGSQPEPEFAAFIGIDWADQKHIWCLQSAGSAKRETGDLEQTPEAVESWVAHLYQRFAQRPIAVAVEQSRGALVFMLSKYEPLHLFPVPPQMASSMRQALYPSGAKDDPRDADLLLDILLQHRNKLRRLSPDSEATRRVQNLVEERRKLVDEKTAQINRLTDHLKAYFPQMLEWFGRLDSDVVCALLERWPALEELQKAQPASLRAFLRKHRCRDREQIEHRMEAVRQAIPAIHDRAVIEAKSAAVRVIVRVVRILGEGIEDLDGEIEEAAAAHPDFFIFNSLPGAGPVMAPRLLAAFGSQRERYGSADELQSFSGIAPLTEASGKRKWVHFRWACPKFLRQSFHEWAGHSIAQSEWARAYYQQQRSKGNTHHQAVRALAFKWIRIVFRCWQDRVAYDENTYLVALVKRGSPLAAIVATGKTL

SEQ ID NO: 428865 - protein, 378 aa, unidentified
MSSPARPIITLGLDVHKESLTVAVLPAGAPAPTRLDRLPNDLVKIHRYCDRLAEQGTLRACYEASGAGYVLYRAMREWGYACDVIAPSLIPTKPGVQRKYDKYDAAQLARLHRAGELTAVRVPSETEERVRDVVRCRETFQHEILKSRHYILKFLARRGFIYRDGQHWKPNHLAWLRTLAAVRSPLATEDALVFREYLSLLDYKLGRRDELDREIATLATAPAYATAVGWLQCFRGFQLHSAMVLATEIVDWRRFARPPQLMAYLGLVSRESSTGPRERKGSITKVGNSHCRHVLVQAAWSYRHRPQVGTHLKARQQGQPVAVITHAWKAQHRLHKLYTHLAYRKQPQVAAVAVARELVGFLWAVMRDLPSGQAPVSS

SEQ ID NO: 428866 - protein, 363 aa, unidentified
MEEGKRRFVGIDLGKREYTMAIIGKNEKITIHNGKTNIQGRQGLYRLLQKSDKIALEAGNLAFIMAREIQKQAGSEVRVLNSAKLPFIWDAPTKTDKEDAMKLAHLVEERRDEKLPIVPLPSEQEMERREVIANYGREVRDRTKAINRLHALFVKQGHTTVVRKSLAAIEKAREAVQILKGQEREDAEYILLHLELYEKRIKELKGKVQKEAKADEGMKLLQSIAGVGPIVAYAYVAHVGDGSRFSKGAQVSNYLGFVPRLYYSGTIQRHGHITKSGNGYLRGLLVQAAWSMVRSRHGGSLKERFIYLTLLQGKSRKKTIVSIGRRLTELMYSVLRNKTKYEPRPWKGPSGDAASIAERALCA

SEQ ID NO: 428867 - protein, 429 aa, unidentified
MSGRETVQPAVKFVAFVGIDWADQKHVWCLQAAGSTERESGELEHRPETVEAWVGELCRRFGPGPIAVAVEQVKGALVCMLRKYECLHLFPVPSTMSAAMRKALYPSGAKDDPRDADLLLDLLVQHRERLRHLQPDNEETRRVQNLVEERRKLVEEKTAHVNRLIGYLKIYFPQMLEWFARLDTKLVCEFLERWPSLEELKKVPPAELRKFLRQRQGRHHELTEDRIQGIVQATPAIEDRAVIEAKGAVVQVIAQLLRSLLEGIANLDRKIAEAAGAHPDFFIFESLPGAGAALAPRLLAAFGSQRDRYDSADEMQTHSGIAPVTETSGKKKWVHFRWACSKFLRQSFHEWAGHSIAQSVWARAYYQQQRERGQDHHAAVRALAFKWIRILFRCWQDRVAYDENKYLTALAKRGSPLNSVLLAATATTV

SEQ ID NO: 428868 - protein, 353 aa, unidentified
MAIVVALDVHRKQITYKTLDRETGEVERGRIAPAARAEVRAWLARFAGCEAEFALEGTTGWRFVVEEIERAGHRPHLADPAETAAKRGRKRRAKTDSADCDLQLRLLCAGELSESWIPPAHLLELRTRVRMRKTLIDQRTAWQQRLQAQLFHQGVPAGLRPRTRAGREALARVELSPAGRELVSLALRMIDAIDRELAPLDRDLHAFARRQPGCRALIARLYGVGPVSATAILAELGDARRFARSDDAVRHSGLDVTVYQSDEKRAPGHLSHEGPELLRWALFEAALSAARAGSPDHADYLQVAERIDHNRACLSVARKLCRRAYHILRELGDEALAPVEGDPHAEEAIAAAA

SEQ ID NO: 428869 - protein, 461 aa, unidentified
MEISGQSVENRNYLAMRFRKGLVKHIREVFRRSNLSPIAASMCGKKLSGRSMPRCYGASGERGIFSAGHKPMERPRPKPNDCSRSVTAFEQNSTLIAVIEMSLSSWLVAGVVPGIERHPLKKLETDEDALLKLLLRWRDEAVKAGHKIERIAIAFEAGRDGFWLARWLRARGIEAYVIHPASVAVSREHRRAKTDRLDTELLKRVFLGWLRGEPDHCSMSAIPTLEQEDAKRPNRERENLVGQRTRIVNRMKACLIRFGIRNFKPTLRKAPEGLEALRTPEGAPLPPNTRAEMRRDMARLRFVQDQIKEIEATRLQQLEQAPAEGPHAMIRLLARVTGVGIETADMLVNEILARNLRDQKAVARYAGLTGSPDESGKRSREKGLSRAGNARVRRGMIQLAWRFLIFQKESALAQWYRVATKDARGAIRKTMIVALARKLLIALWRMVTIGEMPDGVAMRAT

SEQ ID NO: 428870 - protein, 346 aa, unidentified
MTYSTTVGVDLAKNVIQISVVSSRGKELSNRSLTRKRFAEFLGKQKPSLVAFESCATSHYWARAAKRHGHKARIIPAKAVAPFRQGHKTDSNDALAVAEAARRPKIKEAPMKTVEQQGLQAIHRSRELLIQECTALSNHVRSLLMEFGIVIKRGFASLLRAVPEILEDGENELPDLYRPTLHRMYTRLLELREDIEAMTAEVECLARSHPICSKLMALEGIGPIGALLLYATMGSGTAFSSGREFAAYLGLAPKQYSSGGKTTIVGLSKKIGNSRLRSVLILGARAYVYKLKEPKSSKDKWLKAIIERNGESRAAIALANKNVRTAWAMVTQGTEYQRRQQLEMAA

SEQ ID NO: 428871 - protein, 364 aa, unidentified
MDVHLRSTTVCALDAETGEAVARRFRGNPWGEVAEWMSGFPGPSLAAYESGYLGFAPQRELSALGVDCVVAAVSKVPRSAADLSSKNDRNDAARMAKAILSHDVTPVWVPSPEIEGLRDLAAAHDAATARLAAAKQRLLAFLARRGYVYGGTTPAGNPRKYWTYGFLRWLDGIRPADDGGIRALAALRNEVEAADETREAVLAEYRAAVAAGPLSAEVEALQSIKGCGFVLAAAFASEVGDFSRFRSGRQVTAYFGLAPKQRSSADSVRLGGISGAGNALVRRLAVEGSWRYAQAGHQPKLMPKGSGVPLEIRMHGRKGSERLLRRREEMLERGMPQAKANAATAAELVRWLWALGMMCREAGE

SEQ ID NO: 428872 - protein, 315 aa, unidentified
MAMAISVVKPIVGVDVAKNELVIYQAELDLLETITNDKAAIKKWLKALPTPVDLAIESTNIYHLEFADLAHEAGCTIYMVGGYELSHYRKGVKIRAKTDALDAKLLARYLKNEYEELHPWIPPSPLYRRLLSLFRRRAALVQARVGLVQSWANEPLLKTAFAEQLASMRRLEILVEKMINDHLNEAGLLAQLKRCMKVEGIGFLTGARLIAAFQRGDFRNADAFIAFLGMDLRVSKSGQKDGRRSLTKRGDPEARRLLHNAAMSASRTPAWKGFYEAQRARGFSTTQALVILARKLARVVFALLKGQSEYQAKTG

SEQ ID NO: 428873 - protein, 411 aa, unidentified
MDVIVERMGALDVHKAQVTACVRTPGRGGERVERIEQFQTTVAGLLVMRDWLAAHGVTQVVMEATGVYWKPVWHVLEDDFELTLVNARHVKQVPGRKTDVSDAAWLCRLAEAGLLRASFVPPKPIRELRQLSRYRKTQIEERKREANRLHKALEDTGIKLDCVATDILGKSGRAMLDALVSGTRDPELLAELAQGKLRKKIPALREALVGRFADHHALIIGHILAHIDYLDEAIERLSDAIEERLRPFAPAVELLRSIPGVQRRTAEVIVAEIGTDMSAFPSARHLASWAGQCPGNDQSAGKRRSGRTRKGSKWLNDALKEAAMAATRTNGSYLQALYRRKRSQLGHGRALGAVKHSMLCACWHMLTTGELYRDLGGDHLNRRDPERQTKRLVAQLERLGHTVSLQQATAA

SEQ ID NO: 428874 - protein, 329 aa, unidentified
MKQNFKDRKLYCGIDISGDTLDICYHQQDGTLCFYKCVNGAEGFKQIWKLTGKLYHFVMESTGVYQLPLCFFLESKKANYSVVNALQIKRYIQMKLERNKTDKKDAQHICMYGLENNPECYQMPDRLYFECRALNNAIETITRDITAFKNKMHAVNKLEIDTKVISATYRKLLRELQTELKKLETELYKKLEAWQPEMVRQVRSVVGIGKRATAILIVSTQGFKHTESYQQLISYAGLSPKEYSSGSSIRGRVRICKQGGALLRHTLYMCALNAKETNAGCKALFERLVAKGKNKKLAVIAVANKLLKQVFGVVKNECLFDRNYYGKIA

SEQ ID NO: 428875 - protein, 337 aa, unidentified
MSNSVVRCGLDIAKYIFVLHGVDAQGKTIVRKPLHRTKVLSFFAQLPACTIGIEACGGAHYWARELGKQGHVIRLINAGYVTPYRRKNKNDANDAEAICEAIDRPNMRFVAVKSEDQQSILMAHRIRQQSIATRTSLINQLHGHLHEFGIVIRKGKAFAQDVHAALDQDHLPNILIDLVHDLLVAIERENDRVAALDKRIGGWVKADPLASKLMKLDGIGALTASAVIATAGDAKAFKNGRHFSSWLGLVPKQHSSGGKNKLSGITKRGDRYLRMLLIHGARTVLLMSSRGRGKHHEWISSLRSRRPDNVVAVAFAAKQARMLWAIMAGKDEPSMAA

SEQ ID NO: 428876 - protein, 323 aa, unidentified
MTSVVGIDVAKHSLDIATLQANGKHRTKSKLANTPEGFKDVEKWLEKHAEPGAWVVLEATGIYHEAVAEHLHEQGYRVCVMNPARIASYAQSELQRGKTDRTDAKLLATYGQRHVDQLRVWAPTPPAQRRLQALVRRLQDLKEIEQMERNRLDVSDASVQPSIHELLAHVGQQIAETLRAIKQHIDDDPDLRGRRDLLVSIDGIADQTAALLLAELGDPLQFEGARAIVAYAGLNPRLQQSGQYQGHVRISKIGSPRLRAGLFMPALVAMTHNPAIKALSKRLKEKGKAGKQIVCAAMRKLLHIAYGVLKSGVPFDRQRALAH

SEQ ID NO: 428877 - protein, 424 aa, unidentified
MKVTYQTCCGVDVHKSFLVATIVKTTGGIEPSYQKKRFSTFNNSILEFKQWLLDNHCHDVCMESTGKYWVPVFNLLEDKINVVIANPKWVKAVKGNKDDTKDSKWIGDLFRLGLVKGSYIPCKKVRILREYTRYRYKLVSCRSSEKNRYQNALTVCNVALDSVVSDIFGKSSTSIIDYLLEQSGTSINHEEIASKLLRSLKSKEDAVIESVEGYQMTDSQKYRMHLVRAHMDYITAEINDVDKMIENMISSNPDFENAVQFLCTIPGVKRDSAITIISEIGTDMSQFGGSKRLCCWAGLTPGSNESAGKKKSVRITRAGVYLKPALVQCAHAAVKSDKSPYYKKKYESLVKRRGKKRAIIAIARMILTAIYQMLSTGEQWNPSDLYKVDMPEALLEKQKQKAIKQAQKLLIREGLLPPTEPIAS

SEQ ID NO: 428878 - protein, 341 aa, unidentified
MNEVTMIGVDLAKSVFQAHGATATGEPMFRKKLSRGQFLKFLGEQPSCVVAMEACASSHYWGREIMKLGHDVRLIPPIYVKPFVKRQKNDANDAEAIAEAAARPTMRFVPVKSAEQQSRSMVFKTRDLFVRQRNSIINALRGHLMEYGIIAPPGRNFVKKLAEQIESPDCDLPSIVIELSHIHLDQLSIITDKIVAIERRLKEESKSDPETIRLQTAPGVGPVSAMAIKAFSPPLEGFKRGRDFAAWLGLVPVQKSTGGRQVLGRTSKMGQRDIRRLLIIGAMTRIRWAIKNGPPKGSWLEQMLERKPRMLVAIALANKTARTIWAMMTKHEDYRDPIVAA

SEQ ID NO: 428879 - protein, 414 aa, unidentified
MPNTLIVGIDISSQSNSIFFIDDAGNHLIKKPFSLPNDQEGANELIKRVIDCLSQYNLSYVKFGMEATSHYGWHLHLYLASSSELLPYKPTFYVLNPSIVKGFKKIYTFLPKTDNIDAVVIAESVRFSKLNPTPLPDFKYAALQRLTRMRYHLVHNLTREKNRALNLIYLKFSTYSQDCPFSDIFGKASCAIIENFTPDDIASMHLEDLIKFVSDNGNNRLSDVNKIAEILKTAANRSYRLHPLLAEANDLALSMTLENIRFMQEQLKKLDKEISKLLKAFSQTLTTIPGIGDVLAAGIIAEIGDIKRFKNEAALAKYSGLVWTQYQSGNFNAQETSLAKCGNQYLRYYLVEAANCVRVHTVRYKAFYNKKFSEVTKHQHKRALVLTARRLIPLIFAMLSKGQIYQERGDVYNT

SEQ ID NO: 428880 - protein, 355 aa, unidentified
MYYTGIDLHKDNVTLTTVNNDGDILKQMKLPNEEHSILNYFFTIGKKHKAVVESTSNWYWLSDLLNDHGIDLTLAHAKYLKAISYAKVKTDKVDSRTLANLLRVDMVPTAHQISPSLRGLRDLMRARLSLVHKNTSCQNSIHRLLAKYNLAVPKGKKLHDLPTLDLLEDLPLQTQQRLQLEMLIEQIRLLRKQIAQLQKSIYPQLIPNDDIQRLLWVPGIGKILAFTIYTEIDGIERFPTVKHLWSYCRLVPGANNSNKSNKHKSANKDGNKYLKMTFTEAAVRAIQYNKEIKEFFNTKERKKHTSIARILIAQELAKICFYVLKNKTDFNNKFKGKTLSRRKAMQWPRLASPDA

SEQ ID NO: 428881 - protein, 468 aa, unidentified
MSKNTTKLPRQSKSKKLLKKVALPKHLQHINTMAAGIDIGSKSHFVAIPEGCADVCVREFQSFTADLHELADWLEASGIVTVAMESTGVYWIPLFELLESRGFEVLLVDARHVKNVSGRKTDVLDCQWLQQLHTYGLLSGAFRPSEQVCALRAYMRQRNMLIQQMSSHVQHMQKALSQMNIQLHNVISDLTGETGMMIIRSIVKGERDPKLLASYRNYRCKSPLTIIEKSLTGNYREEHVFALSQALELFDTYQNKIAACDEEIEKKLSIFEDIKPVREEKNTDDKQPTKKPAKKSKNAPSFDLNSHLIRMVGVDLTTIPGLEAYSVLKIISEIGLDLNRWKSSKQFASWLGLCPGNKVSGGKRLSGKSKRTGNYAASALRMAASTLHRSDSALGAFFRRLKARIGAPKAITATAHKLAIIMFNMIRNQIEFVETGADYYEKQYRDRLIKNLSNRAKMLGFELMEIAC

SEQ ID NO: 428882 - protein, 405 aa, unidentified
MSKDLRRGTISVSLKFKAMTTPLKYSVGFDCSKDDFSACISLIDFSQEVTIKSTRKFKNTTRGFDDCQYWITQHCKAPVPIAVVMEATCNYYENLAFYFFKKDYAVSVILPNKAKKYMESRGIKTKNDPVDAKGLSQMGAEQRLNKWEPFSDQIYQLRSLTRHCEHLSQERTRLINQLHSLEFGMFKNDLVKQQLQNMLELLENQIKQAKLTIETIVQADRNIKERLDKIVTIKGIGLFTLATIIAETNGFKLFENQRQLTSYAGYDVIENQSGKRVGRTKISKKGNSHIRKAMHMPSLNVVRYENPTFVSLYERIMKRTNIKMKAYVAIQRKLLCLIYTLWTKNESFNPQILITSGNDEPKPLFPLGFEKAEKKVVPTNNVRTTQDELPCNELPEALFPLLQIY

SEQ ID NO: 428883 - protein, 461 aa, unidentified
MNRRKPADKQKRSTHRKVDWKALEIVHQDAAGIDVGGSEHWVAISPDRDSEPVRRFGCFTRDLHEMAQWLVEKRVRSVAMQSTGVYWMPVFEVLEGHGLEVYLVNAQHTKNVPGRKSDVQECQWLLKLHAFGLLNNSFQPTDEVRIARTLWRQRGNLVAEASSAIQRIQKVLTEMNIQLSNVLTDISGVSGMTIIAAILEGERDPYELAAMVQSGVKASLEDIAKSLEGNWRKELLFVLKQHLELYQIYQQKIGDCDLESRQHLEVLNSTVDLTTQPIGPRPKGKKNSRNAPSFDLRTELYRITGIDWSQINGIDVLTAQTVITEAGADLSAFPNEKQFASWLGLCPTNEQSGGKILNRRTRKVVNRATVAFRNAASTLIRSQSYLGAQYRRLRTRLGAPKAITAMARKLACLFYRLIKHGQQYVDKGMEYYEARYREQQIRSLAKRAQKLGLQVIIPTTA

SEQ ID NO: 428884 - protein, 392 aa, unidentified
MVVSVGIDVAKDKHDCFIHSSEGEVLADVFAISNNMDGFHTLLEKIQACTAPQDKIRVGLEATGHYSYNLLGFLLDNGLATCVLNPLRTNLYRKSLSLRKTKTDRVDARTIAAMLLSDAGLKPYTDTAYHNEELKSLTRYRFDKVKERAKLKTSVSRLVCILFPELEKLVPTLHMASVYALLEEFPGAKQVAGAHLTSLKSLLEKASKGRYKRDMALSIRDAARMSIGSRMPAKSLELQHTIRLIRELDAEIHEIEAEIETMMDEIRSSIMTIPGIGCRMGAMILAEAGDLSGFDSPDKLLAYAGMSPSTYQSGQLNNCYPHMEKRGSRYLRYALFNATKYVCLWDPAFAAYLAKKRAEGKHYNVAISHAAKRLVRLIFAMEKSRQPYCSAA

SEQ ID NO: 428885 - protein, 320 aa, unidentified
MTSRGAEKMNNDTIGVDVSKDHLDAHRLADGAARRFANDRGGHKALIKWLAQTPRYRVVFEPTGPYHRAVERALGIAGVPFVKVNPRQARRFAEATGKLAKTDRLDAAILARMGALLELQARPARSEILLELKELYVAREALVKDRTAARNRGKVLTLSLLKRQNAQRLDQIDRQIATVEAAILKIIEADASLADRFAILTSIPGVSTITAFALLIAMPELGALEAGQAANLAGLAPIARQSGRWTGRSFIRGGRADVRQALYMPALVAARFNPDMKAKYAHLIETGKPAKVALTAIMRKLVVLANALLKANRPWTPKNA

SEQ ID NO: 428886 - protein, 344 aa, unidentified
MQTPDLFIGIDVSKARLDIATHPSGESWRVANDPEGVAALVTRLQDLAPRLVVLEATGAYERLATRSLGAAELPVALVNPRQVRYYARSVGRLAKTDRIDAAIIAQFAAAIRPVPRPLPDETQERLRDLLARRHQLVQMRTQEKNRLEMASPSVREGIVGHIAYLDAEIAQVERQLQEEIERSETHREARKVLESFKGVGPVASMTLLIELPELGQLNRKQIAALVGVAPLNNDSGRKRGKRSTWGGRGQVRSVLYMAALSAIRHNPAIRALYERLIQAGKPRKVAIMACMRKILTILNAMMKNGTPWEPNHEAQRKARKAAEREAAEAELEAAVEAEPVGVMP

SEQ ID NO: 428887 - protein, 339 aa, unidentified
MELYAGIDLHSTNSFVGIMDREERKVFKKKLANEPGVILKALDRFKGDIVGVVVESTYNWYWLVDVLMGEGYRVHLANPSAIKQYEGLKHKDDNDEALWLGNLLRLGILPEGYIYPKEERPIRDLLRKRGHLVRLRTSLILSLQGIIMRNYGYKVPANKIKQFREDHVAPMLAGQEDLALSGRVSKETIDFLTREIRAIEKVVEGKVKVKEPFSYLKTICGIGKILSVTIMLETGSIDRFPKVGNYVSYCRKVPTSWTSNGKHKGKGNKKNGNKYLAWAFSEAAELARRYDEHARAYYNRKAAKSNFMVAHSALAHKLARAAYYVMKDCVPFDPYKLFA

SEQ ID NO: 428888 - protein, 307 aa, unidentified
MTAAGIDVGKASLDLAVDGHAGVARFANDRAGIAKLIKRLRALATTRIVVEATGGYEEPLLEACCDAGLWVARVNPRQARAFASATGELAKTDDIDARMLALMARLFADRLRPYVAPPPWQRELRDWLRRRGQVVVLLQAQKQQAAMAPTSVRKLAARTIAALARELAAIEKTMKALINEHATPALRSSKGLGPVFQATVLALLPELGHLDRRQIAKLTGVAPMNRDSGQGQGKRRIRGGRAPVRVALYMATLSAVRWDPTMKAHYQQLRSRGKLGKVALVACMRKLLGIINARRRDELRSEGLALA

SEQ ID NO: 428889 - protein, 349 aa, unidentified
MTIVAELFDHVVGIDTHARTHTYCIICCRTGAVIDTATFPTTKPATNRAMTWITRRAPGKLLAAVEGTSSYGASVTAALVKRDIEITEVRPAARSTHAHTGKSDLIDAEAAARSVLGREEQHLARPRDPGTRTALRILLASRSLIDQQRTANRNALTALVRSIDLGIDARRPLTNTQVRAIAAWRPNRSIGPDTTIIARSEAQRLAETIMDQTSLLTDNHRQLGTVANELAPGLQDQPGLGPVTAAIIICAYSHHGRVRSEAAFAALGGIAPLPASSGNTDRHRLSRAGDRQLNRAMDIIVRSRMSFDPATRNYVQRRSTEGKTKREIRRCLKRYVCRSVFRQLQTCMT

SEQ ID NO: 428890 - protein, 355 aa, unidentified
MMQSQTITVPKLFIGMDIHKKSWSVHLRTDLFDHKGFSMPPDPSKLVDYVTNHFGDHEVSLTYEAGCCGFTAARYFLNMGWTVKVVNPNDVPRSDKQLYQKTDKLDCRNLCRQLQQDQLHGIYIPTEPEEQLKSLLRQRNQVVKQLRKAKSQIKGLLLFHGIRVPEEFDNPNWSKDFTQWLQDIKWTYATGSACMNSKLRILTMLKSEYLQTSNELRAWCRKQHKTDYYLLKSIPGIGGLLSAAILAELGDIRRFNNEREFSNCIGVVPGIHQSSESDSKMGLTPRCKALLRSYLIESAWVAIRIDPEIQAYYRKHAGRNPKNVIVKVAHKMCRRILSVIKSGTPYQMNYSKVKN

SEQ ID NO: 428891 - protein, 341 aa, unidentified
MKKFIRTAVDLSKNYFQFHGLASEDGVLVSRKLKRSKVLEFYAQIEPCRVGMEACGSAHHWARELIAMGHEVVLIPPAYIKPYVKRGKNDVVDAAAICEAMARPDMRFVPVKSADDQAVLMLHKSRELLIKQRTMSVNALRGHLAEFGLVVAKGIGRVDELLALAQADARLPQIAKAMVTELAQHLEGLDQSIDAIDDDIAKAHKKNQKSCLIDEVPGIGTLIASVVAASVPDPSVFKSGRDFAAWLGLTPKQHSSGGKEKLGAITKQGNRYIRKMLVVGATSVLRVVGKRKGALADWINALRARKPERLAAVALANKLARICWAIMTTGESFRTETYVKA

SEQ ID NO: 428892 - protein, 342 aa, unidentified
MAMVGGLDLHRKQITFDVLDTDTGEVRRGRISPADRQLFRGWLAGLAGKQVELAVEGCTGWRFVIEECRAAGVVAHLAEPAEVAGLRGRRRHAKTDRIDARHLRDLLLDGRLPECWIPPQLVLETRAKVRLYKDLADQRTGWQQRMHATLYHLGAPAQRDLLAGDRDRLARIEGLSPAARQAITVALSMIEALDAQIEPLRAELIGFARRQPGCRALAAEYGIGALTSVVIWSEIGDARRFTHSRDAVRHAGLDITVYSSDGKRSPGRLSRQGSPLLRWALYEAGRCAARAASPDHGYYRQVADRLGGQRAALSVARKLARRCHHRLRALGEHALAPPPTRS

SEQ ID NO: 428893 - protein, 390 aa, unidentified
MILVGIDVAKDKHDCCIINSDGEFPEEVFSILNNREGYETLYKRICSLAVDLAKVKVGLESTGHYSSNLLAFLLDKHLTAYVINPLRVNLFRKGQSLRRTKTDKIDSRNIAHLLMTDSSLKPSSLSSYHMEELKSLTRYRASMVRERTKLKTSIARLVTILFPELEQLVSSIHIHSIYAMLEKFPGAAYIAAAHLTRLAALLLKASRGRFGRETAIRIRDTARRSIGAVSPAKSMELQHTIAHLRVYDQEIGEIESEIEKIMDDVNSPITSVPGIGMQMGAVILAEIGSFRRFDSPDKILAYAGMSPSTYQSGKLTGSYSRMEKRGSRYLRYALFNVTRYVCHYDPGFTAYLSKKRKEGKHYYVAISHAVKRLVRVLYAMEISGNRYQTA

SEQ ID NO: 428894 - protein, 419 aa, unidentified
MAYRVAGIDVHKKMLAVVVADVEAEGEYRFERRRYGSNPEDLRRMSEWLVEQQVEEVVMESTAQYWQPVWGALERYWKPDAEAKSAALHLAQAQSNRGRRGRKKDFPDAERLVKRLAAQELILSFVPDAEQRLWRTVTRRKYQLIRNRVQLRNRLESLLEEAHLKLSSLVSDLLGVSARRMLAALAEGETDPVALAALADQRLRATPAQLSDALGACSELHLVYRRLVKMALEELQLIEQQIQKLEQEMASLLGQHEDAVRRLAEVPGLGVDSAQQIIAEVGATAATFEGAKNLASWVGACPGHEESAEVNKSHRSPKGSRHMRRILNQAANAAVRMKGCIFQIVYRRLAPRLGHKQAIGAIAHRLCRLIWLILHQGARYEERGPSVSQNAQRIRTRKMIRQLQQLGYHVEPPMVVAIT

SEQ ID NO: 428895 - protein, 376 aa, unidentified
MENDSTLYVGLDVHKDSITVAYALGPGEVEVLGKTGTTQADIDRLCKRLQSKARRIRVVYEAGPCGYGLYRQLVQKGFDCIVCAPSLIPRKPGERVKTDRRDAVKLVRSLRAGDLSAVYVPTVDDEAFRDLARAWVSAKDDLKRARQRLKAFLLSHGVRYAGRADWGPTHRRWVSTFSFDSLWQQLAFDELRRTIEDRLAQCGRLEAALREAVVNWRFYPVVLALQTMRGVQFTTAVGILAELGDLSRFAHPRQLMAWLGVTPCEHSSGDKRSQGSITKNGNSYARKLLIEAAWSYQHPARVSPEIQRRHEGIPKPIVDRAWDAQVRLCRRYRRLVARGKQKNIAVVAVARELSGFIWDISRLAMSLAIPREELTA

SEQ ID NO: 428896 - protein, 334 aa, unidentified
MQTITTIGFDIAKSVFQVHGVDASGEVVIRRQLKRRYVLAFFQKLPPCLIGIEACASSHYWSRELQALGHTVRLMPPAYVKPYVKRQKNDAADAEAICEAVTRATMRFVPTKTPEQQSCLMLHRTRHLFIRQQTAVINSIRGHLAEFGIVAPVGRKGVTELLHVVADPSDKRVPEVARACLAALGTQLFRLKQQIVEFDRMIMAWHRSNQTSKRLHYIPGVGPMLATALVASVADPRTFRSGRNFSAWIGLVPKQHSSGGRDRLGSISKQGDRYLRSLFVAGALAVIRYAKIHGTKHRPWLTALLGRRPTKVAAIALANKIARMAWAMMAKGER

SEQ ID NO: 428897 - protein, 346 aa, unidentified
MKVLIGIDPHKASVAVAVVDEAVGELVERASFPQNSAGLRSLERWAKRFPERRWAMENAGGLGRHLAGRLVAAGESVVDVPPKLSARVRVLSSGNARKNDGLDALATALAASRNERLATVDPEAGSEVLRLLSERREDLVAERTRALNRLHGLMRDLVPGGVAGTLSADRAARILRGIRPKDTSSRLRRRLASEVVRDIRTLDRKIADLSERVEAAVEASGTTLTEIFGIGPILAAKIIGTVGSVVRFPTKAHFASYSGTAPVEASSGEVVRHRLSLAGNRHLNNALHMVAVCQARSDVRGRTYYRKKIAEGKSRKEALRCLKRRISDAVFRSLVADSQAPSRSAA

SEQ ID NO: 428898 - protein, 366 aa, unidentified
MKKTSTVRVNGNMNFKGQKLTLGMDLGDHWSCYCVLDEAGKIILEQKVAMTPEAMKQTFAKIPQSLIAMETGTHSPWVSRLLTELGYKVIVAHAQKVQLITKSNRKDDRHDARTLARLARIDPELLGPVRHRSAQAQIHLTVIRARAELVRARTALVNAARGLVKSYGQRLPKCGTQRVNRELAAGLHAELREVLEPLLQEVESLNERIQEYEVRMEKIAKENYPHVELLKQVKGVGTQIALTYVLTLDDPHRFPKSREVGCFLGLCPGRRDSGESQPEMNISKEGDRYLRTMLVQGAHYILGPFGADSDLRRWGLKLAARGGKSAKKRAVVAVARKLAVLLHRLWVGGEVYEPLRNSDKATRAAA

SEQ ID NO: 428899 - protein, 386 aa, unidentified
MQASTVSTPITDRINTIFVAIELSQKTWLVTMHSPDKDKISRHKVQGGDHAGLLALIDRVRDRAARTLGAVPAVVSCYEAGYDGFWLHRLLMAAGITNYVFDPSSIAVDQRARRVKTDRIDGETMLRTLMAYLRGEPRVVRIVRVPMPEQEDARRNTRERHRLTKEQTAHTNRIKALLRLHGFAVGQPRRRDWLNWLAAQRDWQGQGVPPRVLSEIENEHARLMLVRKQLDALARTPGAADPAPAVAEMVRRSELLQRLKSLGPAFATTLTQEAFYKDFHNRRQVASYFGLAPSPWQSGGTDRDQGISKAGNPRARCAAIELAWLWLRHQPDSALTQWFRQRTLNAGKRIKRTAIVALARKLIVALWRYLTTGLVPEGAALKTATA

SEQ ID NO: 428900 - protein, 356 aa, unidentified
MSRDIKYIGMDVHKEATVIAVLNGSGKLVMESIVETKASSILQFIHGLRGELHVTWEEGTWAAWLYDLLQPQVARVLVCDPRRNALLKEGNKSDKVDARKLADLLRTGMLRPVYHGEHGLRTLRELGRSYHTLTQDLNRVMNRIKALYRGWSIPCAGTQVYAARYREQWLQKIEHAGVRRRAELLYQQLDGLQILRRTLRPELLAESRKHKASKLLRQIPCIGPIRAARLIALMQTPHRFRSKRQLWTYSGLGIETRDSAQYRYVHGQLQRSKKPQQIRGLNQNHNHEMKEIFKGAAIRASCGVGPLRDFYVALLAKGMRPEMARLTLARKIAAIALTLWKKEERFDAEQLKPQAA

SEQ ID NO: 428901 - protein, 424 aa, unidentified
MDAPPKELWVGFDWADEEHQVCVVDAEGGVVDAFAVPHQAKDLNDLAPRLRSLGHVAGVAIETPRHLVACKLLAEGFAVYPINTDVSHKWCQALSTSGATSDPSQAFALADGLRHHRSRLRVLAPDDLETRKLALLCQTEEDMINQRTAFVNELQACLKGFYPAVFEWFGDWTSPAAWDFVVAFPTPEALAKAPKKRLYGFLKAHHIGLSPRWQERIERRAEATSWPRDPIAEAAMPVRVKMLVAVLRTLKSQLDDLRRQIAAAFQHHPDGAVFASLPHGGEKLAVRLLVHFGSERDRYESARSVEQLAGCVPVTKQSGKTKHISFRRACQKPFRNTLHQYALASLQGSQWARACYDMLRARGQSNARALRAVGGRWIRIIYRMWMTGTAYNEGIYMASLVRHGSPIIDWMRSQEKLAESQKNP

SEQ ID NO: 428902 - protein, 391 aa, unidentified
MGQTVWSARRLARKLARVAVGIGPAVEPQLREAPVMDEGSWVGLDVHARSVAAGVIDRGSGEVRSLRVPPGCGATVEWLKTLPAPVRVVYEAGPTGYGLARACAGAGISCVVAAPSRIRAAADRVKTDRRDAERLARLLRLGEITPVRVPEPEEEAARDLVRAREDARGDLMRARHRLSKLLLRHGAVYDATAWTRAHDAWLRRQRFRSGPLAIVFDECYGRVLEAKTRRDALDEAIAELAASQPYVDVVGRLVCLRGVSTLTAFALTVELGDWSRFRPESLGPFLGLTPSENSSGERRRRGGITKTGNTHARRLLVEAAWHHRRPPRMSAVLARRRSGNPVAVQAQADRSARRLHGRWHALETRGKPRSIVVVAVARELAGHCWALATME

SEQ ID NO: 428903 - protein, 351 aa, unidentified
MSNTAARSKKRITIGLDLGDRRHTFCVLDETGKVAREGTLGNTREELATMARSYPGATAVMEAGMHSPWVSCFLQELGLRVIVANPRKTRAIYQNERKSDRRDAMMLARLARMDATLLYPVKHGGQQAQQDMLQLKLRDSLVRTRVALINAMRFSLKSLGYSVSNPSSESFHKFVLKEVPESIGEMIAHNVAAIAELTQRIRALDASISRLAAKRYPETIYLQQVSGVGPITSLYFVLKVGSPERFGRTRDIGAFLGLCPKRDQSGETDKELRISKCGDRYLRRLLVGAAQYILGPFGADSALREHGLRLAQEGTAKAKKRAVVAVARKLAVLLLTLWKSREPYESFPTMA

SEQ ID NO: 428904 - protein, 350 aa, unidentified
MPMVADVVDAVIGGDTHKDTHTLEMATPSGVPMASIVVGNDAAGGAAALAWITDHALGPRIVVGLEGTRSYGIGLARALRAAGLTVVEVERPKRETRRGRGKSDPIDAHLAVLAVLRMHTDRLPTPRADGDREALRILLTARAELTDTYTRQINQLRALLLTGDDTDRAISRGRVTHDWLDRLIRRRGPGTETREQATRRAETRRLAQAIRDAHRDLTHNRDQLAAIITDLAPGLLDRPGVGPVSAAQTIVSWSHPGRCRSEAAFAALAGVNPIPANSGKTIRHRLNRGGDRHLNHALHTIALTRMRSCPRTHAYLTRRRAEGKTDRDIRRILKRYIARELYRTLNTNAA

SEQ ID NO: 428905 - protein, 360 aa, unidentified
MKVQRTSVGLDVHARSVVACGLDGDTGEVFERRLSPDHAEILSWLGDLPGPVATTYEAGPTGFGLARCLNTAGIRCAVAAPSKLQRPVGDRVKTDVRDARHLARLLHLGEIVEVQIPSVEQETARDLFRAREDCRQDLMAARNRLSKLLLRQGIVYHGATTWSQVHQRWLRAQRFTNPALAMAYDTALDTVLATTDRRERLDAAITTLAADSEFTAVVLRLGCVRGVSTLTAFGLAVEIGDWHRLTGRTIGSYLGLVPTESSSGATRSQGGLTRTGNTHARRLLIEAAWHHRRPYRPGIVMRRRWQAASPAARARGQAANRRLHARWLHFDQRKKHAVVANAAIARELAGWCWSLAVLDD

SEQ ID NO: 428906 - protein, 340 aa, unidentified
MGEYIGLDVSLKETALSVRRDGKRVWRGRCDSDPAVIARVLRKHAPEAQRIVFETGPLSVWFYHALRAEGLPAICIDARHAKAALDMAANKTDANDADGLAHLAEVGFFREVRVKGYDSMLVRTLVAARSKLVQMTTELSNQIRGLMKTFGLIVPGAKGGSFEAEVLRLLSGDHGLARVILPLLEAWNAVRRRAAELGRQLLAGARQSQACQRLMAIPGIGAITATAFVTAIEDPANFRSSRSVAAWFGLTTRRYQSGEVDYDGHISRRGDAHMRGLLYEAATVLLTRSQVDSDLRAWGLKLRERLGFKRAAVAVARKLAVVMHSMLKSGQSYRAKAAMA

SEQ ID NO: 428907 - protein, 297 aa, unidentified
MTNEQSTQTFASIGIDIGKDVFHIVGFDASGKVVLRKKFKRLALEAELAKLQPSIVGLEACLSAHFVSRTLRRLGHTPRIIPAIYVKPFAKGQKNDYNDAEAIAEAALRPNLRVVREKTQDQLDLQALHRVRARLVSRRTATINQIRAFLIEHGIAVRTGANALRSSLFAILEKRADELSPRMIDVIVGLHEDWQRLDERIDTLTGEIEEISQTETNCRRLMSVPGIGPIISTAMVAAIGSGEAFERGRDFGAWLGLIPRQYSTGGRPILGRLSKRGSKYLRTLFIQGTPPAKTVLR

SEQ ID NO: 428908 - protein, 429 aa, unidentified
MNYTQNKKIMQVKVSTLVVGVDIAKNKHAARAFNFRGIEYDKAIFFENNEAGFKKLLHWIKKVSEKENKTNVIVGMEPTGHYWLPLEEYLRRKTDFLRVVVNPAHVKKSKSLDDNSPTKTDRKDAKVIAKLVIDGRYSVPHMPEKEYADLRVAMTHRERLVKDIVNLSNKIQQLIDKYFPEYSTVFKKWDGKASAAVLKELFLPELILEKTEEEIVEIFRKGANRAVGIKRARKLKKAALSSIGIKEGGEFARLELNNLIEQYELLTKQKELLEEKVEKLLENMEEAKYMESVMGVGLITVAGFIAEIGDINDYDHPKQIQKLAGLNLKEHSSGKHLGQTRITKRGRPKLRALLYRVMLPILANNQEFKQLHEYYTTRRDNPLKPKQSMIALACKLIRIFFALGQKHVMYDGEKLMNDIERNLNLQEAA

SEQ ID NO: 428909 - protein, 349 aa, unidentified
MAVTIVEEARAITGGVDTHADVHVAAALDPIGGLLGAGEFPATAVGYARLLGWLGGFGTVCLVGIEGTGSYGAGLARHVTAAGVRIAGVDRSDRQDRRRQGKSDPLDAVSAARAAQSGRARGASKGRDGSVEAIRALMVAKRSAAGERTRTIGQARALVLTGPDDLRARFAAHTPAALVAGLGSLRPRPGGDVAGHATRVALRELGRRAQFLDTQLERPGELIVPLVTAHAPGLLALYGVGPNTAALLLIAAGDHPGRLRSEAAWAHLCGAAPIPASSGKVTRHRLNPGGDRQANHALWRIVFTRLGSDPATRAYAERRTAEGKSKAEIIRCLKRYVAREVYRYLRPGG

SEQ ID NO: 428910 - protein, 423 aa, unidentified
MSCLAARPTSTHRNTSEGISMMTATPLQATLVIGGVDTHAETIHVAAIDDLGRDLGDQEFPTTPVGYREALAFLIGHGTLSMIGIEGTSSYGAGIARAARTAGIEVREVTRPDRATRRMQGKSDPIDAYAAARAVLSGRADAAPKDEQVDAIRALHIARNSAVKARTAAMNQIHHMLITAPAPIREKYRTLKEKPLVNALAACRPATQEPTHRAVLHALKTLAQRHQFLTAQADDLHAELDALATAANPHLRSIRGVGPTTAAQLLITAGGNPERLRAEASFAALCGTAPVPASSGKTTRYRLSRGGDRAANSALHRIALNRMSSDPRTRDYVARQRASNRSTPEILRMLKRAIAREIFKSLTQGLAAPLLADLRPARQAKNITITAAAKALGTYPSKLSRTEHGTYPDYDLAHRYREWLAAA

SEQ ID NO: 428911 - protein, 457 aa, unidentified
MRIVYQRCCGMDVHKDSVTTCVLLIDEYGEWRSEKRKFRTMTRDLREMATWLASLRVEAIAMEATGIYWKPVWNILEAEKKFHLLLVNAHHIKQVPGRKTDQKDSEWIADLLQHGLLKASFVPPQTIRRLRDLTRMRVKIRQMLATFANRIRKVLEDANIKLGSVASDVLGVSGRHMLHALVEGQQDPEQLAALAQGRLREKRAELQLALEGHITDHHRFQLKFLLEFVQFGEKQLSKLEAEIRCLLAQVDPASVPPEDTVTAELAAPGAKPEAPATAQKSPLQTVVELWDTIPGVDELTATTLVAEMGANMDQFPSAGHAAKWAGMCPGNKESAGKRLSGKTPKGSVWLRRALCQAAWAASRTKNTYLAAQYHHLIVRKGKKRTIVAVAHTMLVMAYYMAKRQCTYQELGGDYFDRRNADTMQHRLVKKLKNLGYEVTLTPINAPPTAQEPSAQCC

SEQ ID NO: 428912 - protein, 309 aa, unidentified
MKQAIVYIGIDVAKAHLDMAWAGTFRRLPNERSGHAALVRWIKQSATPVQLICEASGGYEQALLESLQKSEVKVTLVQTVRVRQYARAAGMLAKTDRIDAKVLAAFGSALQPQPTSPLSGEQKRLRQYEAQRRHLSRILVAEENRLAQLSCTELRTLSRSLISKIKTQIKTLDRGISDLIAQDQTLCVKAQKLTAISGVGVRTAALLLAQMPELGQLNRRQAAALAGLAPFNHDSGSVRGKRAIFGGRPALRSGLYMAALSAARFNPILSSFYQRLRAKGKPHKLALTAVMRKLLLALNQTLKPLPCST

SEQ ID NO: 428913 - protein, 353 aa, unidentified
MTADLPATQPQPQPQPQPQPQPQQPGTSPLALFVGIDVAKDKLDLARTDRPSAILTVPNDEVGIARLVAELRAAAAGIAAIVAEATGGLERPLVAALLEAGLPVAVVNPARVRRFAEGMNLLAKTDAIDARVLAEYGRCAAPRLAERRSAARAELDALVTCRRQLVSTRADQRNRRAATPACRPAQRAIDAVIRALDKQVESLDGRIRRLIESDPGDLGAGDRRLRTVPGVGPALSSTLLGELRELGGTDRQRVAALVGVAPFNRDSGRHRGRRAIRGGRTAVRCTLYMATVAAIRCNPVIRAFADRLKAAGKPAKVVIVAAMRKLLSLLNAMLRDKLDWDQLAVVKKLATNP

SEQ ID NO: 428914 - protein, 455 aa, unidentified
MARKRNSQTQATHSKRIQQNNAAGIDIGATSIYVAVPLDRDPQPVRCYQTFTEDLHSIAGWLRECGIETVAMESTGVFWIPLFQILEQHGFQVCLVNAHHVKNVPGRKTDVCDCQWLQYLHSVGLLQASFRPAQEVCALRSLLRHRDSLVQMASADAQRMQKSLDQMNLQVHHVLSDITGLSGVTILDAILRGERDPRKLAELRDGRVKASEETIAKSLVGDYRPEHLFTLRQSLEAWRFHRKLIAECDGELETYLACFTSKTDPKQHPLPPTKKAASKTVHGRPGFDLRTEHYRILGVDLTEIPGINTLTIHSVLAEVGPDLSKFRSAAAFASWLGLCPDNRISGGKVLKVRTRRVQNRAALALRLAAHTLHHDRSALGHFFRRMRTKLGAPKAITATAHKLARILYHLLTTGQPYQESIFAEWENQHRQRTLSRLHTQVQAFGFRLVPIELEA

SEQ ID NO: 428915 - protein, 307 aa, unidentified
MHYLYYVGLDVSKETFDASLVAFEDANEMAHRKFANSRKGICSCLHWVEKRHGIRLDDVIFCAEDMGSYISEMAVCASDRTLNFNFSLISPLVIKYSMGIARGKTDRVDARRIAEYAITHYRKIALYLPAEKELCQLRTWLILRAHLAKQRVAKLVLLEKLDYKEKFADVSIQRSMLQEEIAYAETHMKTIEREMKELIAADSNICRNYKLLTSIKGVGPITAIVMLCSTLNFTKITDHRKFACYCGLAPFEHSSGTSVRGGCHTSSMANRDIKVQLNRSALIAIRCDPQLKAYYCLLYTSPSPRDS

SEQ ID NO: 428916 - protein, 346 aa, unidentified
MHATTIAVDLAKSVFEVAVSQRAGQVSERHRLTRAQFRRFLGEREPARLLMEACGTAHYWGREARARGHEVVLLPPHTVRPYVLRNKTDGADTKGLLEAQRNEEIRPVPLKSVDQQVLTALHRMRSSWMATRTARLNTLRGLLRELGHFIPVGARQVVPQVQALVGESDSDLPAALRPVLCEVAREIAELERRIGALEQQLEQLASEDARIERLRTIPGVGLLTATALVAFLGDVARFPSGRHLASYLGLTPRERSSGLQRHLGRISKRGDPYLRMLLIHGARSVLCHAKRRKHEPDRLRVWALERQQARGHNKAAVALANKLARIAWAVWRSERGYTAMRLVPNE

SEQ ID NO: 428917 - protein, 418 aa, unidentified
MKNSAIRDGMRRPVPPAAGCFKIPIYALDQGCKKGDRLMKKNSIARLQVSKSQIRRMATKQRLTVGLDLGDLFSRYCVLNETGEKASEGALPTTKAGLDSMFANMAPCRIAIEVGTHSPWISRQLTALGHEVIVANPRKLKLITESLKKNDRMDAEQLARLARVDPQLLAPIRHRGPEAQGDLAIIRARAGLVDCRTELINMARGLAKPMGERLKKCDADYVKESLADGLSEAAQVVIRPLLKSVEGINQQIEAYDKQIEEIEKRYPETKVLKQVNGVGTLIALTFILTLEDAERFQHSRDVGPYLGLTRKLRDSGFSQPELGISKAGDQLLRRLLVQAAHCILREGAPDSDLRRWGLKLQDGGGKKVSQRKKKRAIVAVARKLAVLLHRLWVTGEVYDPQYNRKAEEAAKGKRKAAA

SEQ ID NO: 428918 - protein, 343 aa, unidentified
MSIVGGLDIHRKQITFDYVDTETGEVRRGQICPADRAHLAKWLARFAGQDAHFALEGCTGWRYVAEEIIAAGLTPHLADPAEAAHLRGPKRRAKTDRADARHQRVLLEQGRLPECWVPPSRVLECRALLETYLDLREQRTGWVQRIHAVLFHHGAPNIAGQQLGTAEGAAALRAAAAHCSPAGQLQLAIAAQMLLVYDERLHQVRRQLLDRARHTRGAAELTARLYGVGPVTGLALTCWLGGAGRFSSSRKAVRFAGLDITVYSSDGKRSPGHLSRQGPEVLRWCLYEAGKAHARASAPDHAYYAQVKERIDGKRAALSEARKIIRQAAHIRAALGDDALTAC

SEQ ID NO: 428919 - protein, 371 aa, unidentified
MQTSITYVAMDTHKKQHQVAWGHPETGAIQQFSVPNTPREIERMVKRLRKQTPGEIHVCYEAGICGFVLQRQLQRLGCVAKVIAPSLVLRKPGERIKTDRRDARKLLSQFAAGQLTAVVAPSVAQEADRELTRCRESAQMDLKRARQRLNSLLVRHGYIYTDGNLWTGKHQQWLRGLSFDQPQLRTVFEEYSSEVEHCLQRVQSLDQQVQQLAQSEPYRAAVAALRCFRGIDTLTAITLLTEIFEFGRFDSPRALMAYLGVTPSEDSSGERRRPGAITKTGNRRVRRILTETGWHYRHPPHVSKALQARRQGQPAWAVDLADRAAKRLSRRYRHLIERGKAAPVAVMAVVRELIGFLWALLRQLPGSNPAA

SEQ ID NO: 428920 - protein, 331 aa, unidentified
MEKLNYVGVDVSAKTITMIIDQQGKRTEPLDLPNDTRGHKKLIGMITKSRSHARVVLEATGVYSLDLSLALHRANRVEVMVANPRAINQFAEAYMRRSKTDFLDARILLEFAMRMDFKLWSPPERHIFDLRAISRRIEGMVKTATQEKNRLHAADHFDEMTDVVRADIEDNLEQLKNRIARLRSQALELIDEHPDLARSFGHITSVKGIAEAAGIQILAELSVLPSDMDVRQWVAHAGIDPRQFQSGTSVNRPARISRRGNAHLRKALFMPALVAVQSEPHVKAFYDKLVARGKTKMQANVAVMRKLLHAIYGMLKHDQDFDGEKFYMLGT

SEQ ID NO: 428921 - protein, 320 aa, unidentified
MSTKSPVRHVGIDVSKERLDVCSLPDGGTFSVANDRAGIDELIARLLEGVRPELVVLEATGKYERPAAVAVAAAGIAVAVVNPRQARDFAKAAGRLAKTDRIDAQVLARFAGAVGPRPSVLPDEEARVLQDILLRRRQLLEMMVAEKNRLQMASEAVARRIAAHVRWLEKELCRVDRELDEAVRESETWRANEELLRSVPGVEPVLARTLLAELPELGTLPRRRLCALVGVAPFNRDSGTFRGKRQVWGGRAPVRAALYMGALVATRHNPLIREFYERLLAAGKPKKVALVAACMRKLLSILNAVMSDRVPWHSAHLLTP

SEQ ID NO: 428922 - protein, 346 aa, unidentified
MTIVEATRTVVGGIDTHGEVHVAAALDDIGGLLGAESFAATPTGYETLLSWLESFGSVTKVGVEGTGSYGAGIARRLTRAGIVVVEIDRQNRQARRNAGKSDPLDAIEAARATLSGKASGRAKSRDGFVEALRVLVVAKRSARAARVKALTQMRQLTYSAPDQLQARLKGLSITEFLSVAQGLRPARSADVMTAATKASLSSLAHRVGDLEAEIAELDALIAPILEANAIELLAINGVGIDAASSLLVAAGDNPERLRSEAAWAHLCGVSPLEASSGKVTRHRLNRGGDRQANRALWHIVISRLASDPDTQAYMERRLKEGRSKREVIRILKRYVARAVYRQLPRH

SEQ ID NO: 428923 - protein, 366 aa, unidentified
MLRPAKKAPAQKAHRENPMNAPHYIGFDVHKKTISFCVKTASGEIVEEGSVPAQRRVLRQWASARPQPWQGALEATLFSGWIYDTLKPYGERLEMAHPAKMKAISAAKKKSDTIDARTIADLVRCNLLPACYVAAPRIRELRRLLRYRSLVVSEAVRMKNKMAGLLMETGALYVKEKLHRKKYFANLLEELEEVPESVIDLLRLSRGALEMFESTQKRLVRELLADPELAQRVERLMSIPAVGEITALTWALEVGDPQRFRSGSDAMSYCGLTAALQSSAGKQQRGPISKQRNRWLQTTLIEAAKLAPRWNPQLAALHARELERGHRNRATLAVARKLVAYLLAVDKSRQPFQVRESSQDLAQKTG

SEQ ID NO: 428924 - protein, 319 aa, unidentified
MQRTFIGIDVSKDHLDAYVRPSGQRQRFDNTSAGIAKLVTWAKPLAAERILFESTGPYQKPAVGAFLTEGLPAVVVNARQVRDFAKAMNYLAKTDAIDAAVIAHFGEVVATTVRPLQSQEIHDLRELFDRRAQLVHFLAMEKNQRHSASAARATPKVLKSIDQHIDYLERQIRNLEERMDGIIESSATFRARDEILQTITGIGPQVSRTLLAYLPELGQYNRQTISALVGLAPFNDDSGNHTGARHIRGGRSKVRVGLYQAAIAAIRHCPRMKAFYASLKARGKASRIAIVAVARKILVLANALIRDMRPYKKPANSVC

SEQ ID NO: 428925 - protein, 346 aa, unidentified
MHYIGMDCHISTLDFAVVNETGRLVKAKSVTTSVNGFMEFVKTVLPPRTIYMEEGTLAAWALETCVRFREKLVITDAKKNHWIGSSGQKDDSIDALKLAQLARGGYIKEIHHPVGQRRRFRELMIAYHDTVRSTTRIKNKIKARFRQNGIQCTGTTVYSETHRDEWKGKLPQEAIVLLILDGLWRQLEQSEQTEKELLRVARAQAKRYPEIRRFEALPGIGFISAATISAMLETPHRFADKRKVWMYAGLGLMKRSSGSKTYSEKLSTDYNRLLKYTLKQAAEAAIQAKDNPFRRKYLDMTLFHGIVPHRAKLTIARNMLATMWAMWRKGEKYSPEIRRKAACKQG

SEQ ID NO: 428926 - protein, 404 aa, unidentified
MSVHLAPVTLSTIVVAVDVGKTSAVLSATDSARHRVFGPVEFAMTRSGLVGVVHRVGAVIGPCAQVKVGIEAAGHYHRPVLDYRWPPGWEVLEFNPAHVAEQRRVAGRRRVKTDAIDLEAITELVLAGRGRLITDREVLIGELAAWATHRSRRVSTRTATKNQLLGQLDRAFPGLTRALPDVLGTKIGRLVAAEFADPARLSALGVSRLIRFAAVRDIQLRRPVAERLVTAARDALPTRDAVVARRVLATDVGLLADLDTQIAAAEDELATLVPLSPFATLTSVPGWGVVRVSNYAAALGDPYRWPGPRQIYRASGLSPMQYESAGKRRDGKISREGSVALRRALIDLGIGLWLTEPAAKAYAGELKSRGKHGGIIGCALAHRATRIAYALVRDQAGYDPSRWS

SEQ ID NO: 428927 - protein, 439 aa, unidentified
MHFSGEVEEREERLNKQKVVAWIGIDWADEGHEVWEYTVQTDSATCYAIKHTAESLQEWVNQLRIRHGGKPVAVVLEQARGGLIYALMNTGFMEIYPVNPESLAKFRKALYPSGAKSDPTDAELLGQMVRQNPGRFRAWVPGDEQTRSLQLLAEGRRKLVEDMTALTNQLTSVLKTYYPQALNWAGDLSSEQACSFLEKWPTLADLQKSRPFRIRNFYEKYGRPPREVLDERVTQMEKAQPLTADPAVVMAGKMMVNAVVAQIRPLRAAIEKYDVEIERIFRQHPDRAVFESFPGAGKVLAPRLLAAFGADRDRFEAALEVQQFSGIAPVTERSGKTIWVHRRLACPKFVLQTFHEFANQSRRFCVWSKLYYQQQRARGKQHNAAVRALAYKWIRILFRCWKDRRLYDDSRYEKSLIKRGASLAPLLNVLDCGNRMQEL

SEQ ID NO: 428928 - protein, 370 aa, unidentified
MWLERGESIIDPNQECPPRFTVNEKGIVMTMIGIDPHKATHTAVAVDDDENVVDEFTLRASKVQAERLTDWAEGLGKREWAVESANGLGYLISQQLVACGETVFDVPPVLASRVRLLGSGKSQKNDPNDARSIAIAALRSDRLRVVEPDDHVTVLRLLVKRHRDMARLRNKHCSRLHALLLEVEAGGIGVKISVANASGLLDAITVDDEATRYRVLIGREVVDDIARLDQSLKASKKRIAVAVTASGTSLTNIVGVGPIGAATIIGYTKDIARFPTRGHYATYNATAPIEVSSAGNTRHRLNLRGNRILNHAIHIAAVTQLRHDTIGRVYYQKKIAEGKTPKEAIRALKRRISDAVYKRLASDAATTATN

SEQ ID NO: 428929 - protein, 333 aa, unidentified
MLYVGVDAHKATAHITVVDESGAVLRRRQISSSGAAVHEALDDLDQPMKAVVEASYLWGPMYDWLAEIADEVVLAHPTKVRAIASARIKTDAIDSQVLAHLLRTNLIPAAHAPSREVRAVKRVLRRRMFLVRLQTMIKNRIQALLTQHVVERPKVTDLYGVAGLRWLRQVTLPQPDGNLLHDDLALLGVIRDHIAGTEHMIATLATHDKVVTWLASLPGIGAFLSVLIRHEVDDMDRFPTAKHFGSYTGLIPATYASGARVIHGPLTNHGNKWLRWAFIEAVTAAIRVSSELRRYYERIKARRGAQDARTATARKLAELAWTVWTQRRCYEAR

SEQ ID NO: 428930 - protein, 460 aa, unidentified
MTRRKQHLQGRRGQAFLQLVRGVPQEQIVVVSIDVHKYYHLVLIHNGYGEVLAPSFQIDIFRSGLDLLCAEIDRLLSETQAQVLFIGMEPTGHYFENLARHLRERYRDVRLVNSFAVARNREQKMMRRTKTDEIDVAAIGDLLLRNECFPFEPLSDDYLRLQHWVRFRKAKMKARTALKNQIIGHLDRIFPGLARPNKEGQGEHPPLFSDLWEGETARRLLELGPDPRELAQIEPAELIARFHTRGWRMGPVTAQRMIAFAQQVLLPDPDIIEARLPLLKLDLALLKTVDEVLAATEERIAYYLAKTRGQILTEIKGIGVLRAAAYVAGIGNPEHYENAGQTFRRSGLISGRDDSGMHQRRGLGKRVTKEGDSHLRSALVEMTHGMCQWQPYFGKYKARLEDRGKAPGVAAVATARKVNGVLFALMRDQAPFQPVDGRGRPVPPLEGLNKQKATADRDSS

SEQ ID NO: 428931 - protein, 340 aa, unidentified
MEEVSIIGVDLAKNVFQLHGAAADGSVLFRKKLTRLQFERFMATHPFCTVAMEACAGAHHWARTLAGMGHAPLLIAPRYVKPFVKRQKNDSADAEAIVEAALRPTMRFVEPKTAESQARAVLFRTRTQFIESRTVAVNALRAHLYEFGHIAPIGVHQIRRLAEVVEAEDSGLPGPVRLCCREILAQIAQIGERLAVLDREIARLSGEGETSRRLRTMPGVGPITALAVETFAPAMDSFRSGRDFAAWLGLVPMQHSTGGKQRLGRTSKMGQRDIRRLLIIGAMSTVQRTLRKGAPEGSWLARMLAKKPRMLVAIALANKMARGVWAMMIRNEDYRGPAMA

SEQ ID NO: 428932 - protein, 399 aa, unidentified
MVYVGVDIGKRNHEMGIVDAQGQRLGASFSFSNTSQGAKSMLDYLYRLVSKEEELQIGMEATGHYWLSLYSFLSKQGLKVAVINPLQSDSFRHLQLRKTKTDAVDAFLIADLLRFGQYKTTVLGEEKILSLRQLSRFRLSTVDLCSGLKKQVIALLDQLFPEYETLFSNLFGKSSMEILQEYTTPEALVNLDTETLTKVLLKASKGRLGKAKAHAKAQALQSVARDSFGLQYAQESLVFQLKLLLQQIQFTEQQITQVEEKIALLLAEVNTVVTTLPGVGPVIGAILMGEIGDIARFEDCHKLVAFAGLDASVRQSGDFMGTKNHISKRGSPYLRRAIWSAAVVAATHDPVLAAFYQKKRAEGKAYGTAIGAVARKLTFAIYAVLRDNKPYQVPAHPAS

SEQ ID NO: 428933 - protein, 343 aa, unidentified
MYYIGLDLHKKTISYCVKDAAGHVHREGKIGSTRRELDAWLQTLPQPRMMAMEATIFTGWIYDHLLPHAEKVKVAHPLMLRAIAASKKKNDRIDAGKIADCLRCDFLPECHMASTEIRDRRRTLRYRNLVMRQMVQMKNRISGLLMESGVSYDKQRLHKMGYFTELFSTNEEISDSIRPLLRLGREHILRGQRLDRALIGSLERDPLLSERLRRLRTIPGVGHITALTWVLEIGDYTRFPSVKQAISYCGLCSAEKSSADKVMRMPISKQRNKHIQHVLVEAAKLAPRYSHELALLREKEIQRGNKNRATLAVARKLVAYMLAVDRRKQDFVPTEELATKAVA

SEQ ID NO: 428934 - protein, 417 aa, unidentified
MEVLYPRCAGLDVHQASVVASMRIAAGAKATHEVHTFETTTKGLLALADWLGAAGCTHVAMESTGVYWKPVWHVLEGQFELVLANASHIRNVPGRKTDVNDAMWIADLLAHGLIRGSFVPPTAIQELRDLTRTRKQLVRELARHEQRIQKTLEDANIKIVGVISNILGASGRAFLNAIIVGESDPEKLADLANKRLRASRVQIVEALRGRVQEHHRFMLRLHLEQIGSLQAAIDQIERRLGERLEPFREDVKLLVTIPGVSDTVAQVMASEIGMDMQRFASAESLVSWAGMCPRSDESAGKRRSTRIRKGAPWLKTTLVQAAWGAVRVKNSYLRALFHRLKARRGAMKAIVAVAASMLRSAYYMLMRREPYRDLGPAHFDQRNRARTASRLIKRLKEMGIDVLQTRLSEPAALPVTL

SEQ ID NO: 428935 - protein, 340 aa, unidentified
MKKFLFIGIDFSKSKFDVTVLKSIDQQDFTQAIFLNEKKGFNDFLKWVTKQSNVPKQDWLFCGEHTGLYSRELTDFLIKKNLFIWLENPLQIKCSWGIKRAKTDKIDSLEIARYALRFEDKAVACKPANKDIESLRLLFAYRGRLVKNKVSLEVSAKETRRVITRDTTSRFIFENSQRDIDRIKKEIEVIETKMHDIIVSGQLKENYLLVVTIKGVAMITAIALIIHTNNFEAFKTARQLACYCGVVPFEKSSGTSINKGNHISQLANKEIKALLTQCARCAVQYDKELAAYYIRKIAQGKNGRIVINNVRNKLIHRIFAVVNNRIPYRENYLNPFLDCA

SEQ ID NO: 428936 - protein, 342 aa, unidentified
MKDTMIGVDLAKSVFQLHGASLAGHLKFRKKVTRVQLRHFMAKHEPAVVVMEACGSASYWAREMVKLGHEVRLIAPQYVRPFVKRQKNDAADAEAIVVAAQRPEMRFVEPKSEDQQACAVLFRARERLLHQRTELVNALRSVLYEYGHVFPKGIAHLRRIEAVLTDPASDLPALVRDECHDLLEQISEQTARIEAKTAKARGLAGTNDTARRLQTMPGVGPQTALAISGFAPPMDSFKRGRDFAAWLGLVPRQYSSGGKERLGRISKAGQTDIRYLLIIGAMSRLTVLARKSIQEGSWLARMLHRQPLMLVAIALANKMARAIWAMMTKKEDYRDPARAVST

SEQ ID NO: 428937 - protein, 351 aa, unidentified
MNATVQLLVIGMDIATNVFQLHLVDGETGEIERRKLRRAKVAEFFANRQPLLVAMEACGGAHHWARVPQRLGHQVKLLPPKHVRAFVLRDKTDALDAQAIWVAARQPHIREVPIKSEQQQACLSLHRILAQLMKVRIMQTNALRGLLYEFGIVLPEGHKKLLLTIHEALAKAQQLRQVPDILVVSIQEQLHRIDALQLDIDQLDKRLTALVKQNQQMRAVQEIPGIGPLSATALVATATDISEFKSGLQFAAWLGLTPRQVGTGGKTQQLGISKRGDSYVRSLLIHGARSIVSRCQAESWIGRLKQRRHFNIAVAALANKMARTAWAVLAKGSAFDGLKWAPNEIAPTAAT

SEQ ID NO: 428938 - protein, 378 aa, unidentified
MRFYNQQHRHYCGIDLHVKTMYVCILDAAGQVLVHRNVASTPAAFLEIVAPYRGDLVVSAECMFTWYWLADVCAAEGIRFVLGHALAMKAIHGSKSKNDKIDWHKIAHLLRAGLLPQSYVYPAAMRSTRDLLRRRLHLVRKRGQLLAHIQHTRAPYQVPEFARRLAYPANRDGVAERFLDASVRKSVEVDLALLERSDSLITDLEYTLVRTAKQHDADAFHRLRSVPGIGKILALTILYELHDVHRFDRVQEFASYARLVKGRKQSGGKTLGGSGAKMGNVHLKWAFSEAAVLFLRHATGGKRFLARIEKKHGKGKALSILAHKLGRAVYYVLARDNRVFPGEVHGRVASSDRAWVSHTPKSSRSGPSSWRSRRRQAP

SEQ ID NO: 428939 - protein, 372 aa, unidentified
MTSIIYVGMDVHTTNYTLCCYSMEDDRFFAEVQVEPDAKNILKYLARIEKQQSRDCRIVCGYEAGCLGYSLYHQLHAHGIDCVILAPTTMMTKPGKRIKTDRRDARLISKCLAFHTYSPVYIPTEVDDTVKEYIRMRDDANSALARVKQQIIAFCIRHGKIHDGKSYWTNKHLEWLSSLDLGNKILSEVLQEYLIRYYQLREQVDVYDMRINELAQAEPYRQKVEKLGCFRGIAAHTALSFCVEVGDFRRFATAQQFASYLGLVPGECSSGDKQQYTGITKAGNSHLRKLLVETAQVFGRSATKSGKSVALKERQAKCDSLTVAYADKANARLKKKYFKIAMRSKVNIAKTAVAREMACFIWGMMTDNISCA

SEQ ID NO: 428940 - protein, 449 aa, unidentified
MHGVHIGGQRAGAFLELVRGVDPKRVLLVGIDVAKATWFVVASNLLGEVVVDGVRLVADRAGLAELERMLGAASARVNAAMVVVGIEAAGHHHQTLTAHLLDRDELVVRVLNPAQVAAVRKQQGNRRRKTDWLDAAAVCELLARGEGALVHLDGSAASALRPLWSGRKDLVDTRSRLRQQAGALVDCLWPGCSAKDTAAGITPVLCDLFATKAGRVLLELLAQGWTPARVAATSVAALGGLFAVRGCRLTRPLATRLIGRAQAALPAHPAATAGKAATLAALLGTIDTLDREIAGLEAAMAPLLAGTQGAKLTQLRGVGVVAAAGFVAFVGSTDRWADWSKVWRAAGLDPARSQSGPTDARLGISREGSAWGRRAILDLAAAVCQQPGPWRDRLRTRTTQQHKPAKVALAATANAVGRTLFALMASGADFDPHFEAKRTAARKAGGQAA

SEQ ID NO: 428941 - protein, 346 aa, unidentified
MKKIFIGIDFSKEKFDATLIKAEGLKECAPSMHEVFDNKTSGFRRLVKWVKGLSEKLPVDTWLFCGENTGAYSIGLSNYLYASGYDMCLENAYKIKHSAGILRIKNDKADSKAIAEYAMRNYDKVRLHKPQSASLTCLREVFLYRHSLVRQKVALTVRRDEKRFTQEKSDARAFMSFTSKHLITEINKAIYKCDQKIKETIASDDELREIFDIITSMPGIGVQNATCLMVYTDNFQKFDMDSRKIACYYGIAPFGRQSGTSVNSRPKVSPFANRMIKALLSQAALAAIKSDINIHNYYQRLIERGKHPQLVHNNIKNKMLHALVAMVRNRIKYNPDYVYQTNKSAA

SEQ ID NO: 428942 - protein, 432 aa, unidentified
MQAFLCSVKSLTLEAEKDRVLGFEPVTKFLPAARPKSGINLVHDTQHYKTDDTWHIPAPNKGAAVMKSYYLGIDVSKGYADFVIVDKQKQPVVKNFQLDDTFDGHSHLYQILGLFFTEHRNSTVYCAVESTGGYENNWYNALTKFQASLNIKVARLNPAAVFNNSKAGLKRNTTDKISAQNVAEYLVSHPEKVVYQQHDQMASLRKQWGFIQMLTKQCTQLLNQINNLLYTANPELLLFCRDGMPIWVLKLLLKYPTSGQLKKARAKTLTKIPYVTMPRAQQLIANAKRSVASATDPITAQLIGATARQILHLKKTIATQDKLMAADCDLPEVDLLKTFIGIGDASAIGLILEIQSVARFPKAKNLASFWGLHPVYKISGDGSGGFKMSKKGRKQPRKILFTVSHGRNVGYPTPPAQIPASGTTALGSCLGY

SEQ ID NO: 428943 - protein, 318 aa, unidentified
MESILGIDVGKADFHCSLLVEGRSRSNSFPNSKKGFERLEVWLENRKVAKVHACLESTGGWSEELAFFLIERGHSVSIVNPSAIKHFGESELSRTKTDKADAALIARYCLAMNPRLWEPPSPSQLRLQRLGRRRAALIEMRVQEENRLQGPGVDEVRASIQTTIAFLTRHIGELDAEIAETIDQDPTLRANNALLESIPGIGERVATTLLGELPNLKEFRSGKAVAAFVGLCPRERRSGTSVSASWVSKAGNAHVRRVLYMPAIVAMRFNPILSAFAARLRANGKRPKQIIVAVMRRLLVLAYGVLKSGAAFKMPLPA

SEQ ID NO: 428944 - protein, 343 aa, unidentified
MGEVSTIGLDIAKSVFQVHGVDFDGAVVMRKRISRAKVLEFFASLQSCLIGVEACPTAHHWSRRLQALGHTVRLLPPSYVKAYLKRSKNDANDAAAICEAVTRPSMRFVSTKSEQQQSGLMLHRSRQLLVCQRTMLSNAIRGHMAELGIISAKGRNGTAELLAIIADEQDDRIPEAARFCLGVLARQYAAVRAEIVAIERRIHAWHRSSEESRRLEEIPGVGPIVATALVAEVGDWKTFSSGRSLAAWIGLVPRQHSTGGKERLGRISKQGNRHLRWLLVAGAMAVIRYARQHGTKRAWLARLMDRRPIKVAAVALANKIARMAWAMMVRGERFKEPMLLPAA

SEQ ID NO: 428945 - protein, 330 aa, unidentified
MPDVSSTAPVDVRQWVALDVHKLSIVGAALPPGGGEPELHRIETTERAVRRFIDRLGGPEGLAVCYEAGPGGFDLLRLLSSMGVACDVVAPSLVPVRAGDRVKTDRRDAKKLVRLFRAGELSFVSPPTPQTEGLRELMRCRDDLRCARTAARHRVAKQLLRHGRIYREGKRAWTKEHRAWVTRQRLDDELGQAALEQMLIHLDGLDRQLDALDRDLEHVAASEPWHAQVQRLTCFRGISTRTALGLIAEIGDFHRFAHPRELASYLGITPSEYSSGAQQHRGHITKAGNCHARRLLIEAGWHYRHRPRRPDHGPQPSDRAWQAQVRLHRR

SEQ ID NO: 428946 - protein, 344 aa, unidentified
MIYVGLDVHKRFSRMGCFDPATGELQDLGSVSNDASALEGALGELPSPKTVVVEAGRSSYYMAGLLETMAEQVWIVDPGEVRRLQHTISKTDRRDAAALAWWAGKGVLTPQWRPDVETLDLRELSRGKTVLTRLSTQVRTMMRMLLARHGHECPHRDLLSERAQLWLEEVELDGYAGKMLAALREILVVVQSKADEFERMVEQASAKHPSARRLRTIPGIGSFLGLALAVEIGDINRFPGPAQLRGYSGLVPSVYQTGDKDARGPLTKGGNKWLRYAAVLAAQRTAQLRHPDPRLKRTFLSVAFRHGRNPAKVAAARRLLDLIYCLLKKGQDYRAPKPRGTATV

SEQ ID NO: 428947 - protein, 309 aa, unidentified
MIATSIAGIDIAKHHLDVHLLPSGKRRRFPANKLPQLVAWLQQCAVELAVAEATGGFEVELIEACQDAGLALAVANPRHIRHFARGMGLLAKTDRLDARVLALYGERVQPQPTAPLSADRRRLVALLRRRRQLTAMRTAEQQRWHQEREADLKEELEQTIAQLTARVRTLEAHITRHIRQSPELAADAQRLSSIPGIGPVLTATLLAGMPELGQASRRQVATLAGLAPHAWDTGTLRGQRRIWGGRQIVRNALYMGAVAAVRGDNAMRRRYLRLKENGKSGKAALVAVMRHMVIVANAMLRDGTNYQPV

SEQ ID NO: 428948 - protein, 449 aa, unidentified
MSRPQVIDDEEHERVHDRVAAIDVAKDTGMVCTRTPHPSRPGAQRAAVWTVRARMGAIRILGRQLRKDGIEIVTVESTSDYWRIWFFVLEACGLAVQLVSAAQARNLPGRPKTDKLDAMWLARLTEMGLLRASFVPPKPIRDLRDYTRARTRLIHERSRCWQRLEKLLEGAQIKLSSVASKLTTLSAQDMIKAMIAGQRDPEILAGLARRTMKAKHDALVEALDGMFDDHHGELAQLLLDQIATLDAKIAQLGARAAELAAAIPDGWGIDQDGTTGPGAGTGPHAPVLNAVARLAEIPGLSPDLARTIIAETGLDMTRFPTAAHLVSWAGRCPSARQSGPRSRAGAKGRGDTWLRGALGQAAVNASRTATFLGERYGRIARRRGKAKAQVAVARSILVIIWHLLKNPAARFTDLGPGYYQARLDTDRKLRNHVRQIQALGFDIAITKTA

SEQ ID NO: 428949 - protein, 410 aa, unidentified
MELLHRRCCGLDVHKETVVACLRLVSDGKVTTEVRTFQTTTADLLRLSEWLATNECTHVAMEATGVYWKPVWHILDDGEFELVLANAAHVKNVPGRKTDVNDAMWLAELLAHGLIRASFVPDAQTQEMRNLLRTRKQLVREQSSHVQRVQKTLEDANIKLDSVLTDLMGKSGRAMIEALIAGEANPAKLAGLADRRVKASPEELREALRGRVTQHHRFLLRLHLNQIDALDAAMATIDAQVEVDLGPFRTAVELITSIPGIKNLGAHVIVSEIGIDMSRFPTAAHLISWACICPRNDESAGKRRSNRMRKGAIWLKATLVQCGWAAVKRKDSYLKAQFHRIKARRGPKKAIMAVVASMLTAIYHMLKDGTMYKDLGSNHFDRRSTDQQKNRLVKRFADLGYAVEIKPLTA

SEQ ID NO: 428950 - protein, 429 aa, unidentified
MTRISAGVDVSKNRSTVCIMDQDGKFIMRPFLVWHSTEELDFLADTLKRLNGEVRVIMESTSVYQYPIALQLKERGLFISIVNAYEMKQFANIDFRGGKTDKKDSRTIASYGISYWDKLVEWQIPKDTYFNLDLLNRTYMNAKKHRQIILQELQHYIDCAMPGMDKELHSLNLNTKKDFMLDFVEKFWHRDEIVNMTEAEFTEVFTAWAKEKGYRPGKGKAAKIYAIAKSCIPYYPANPTVKTILQCIVDKLSGVNRTLVTIVTQMIEEAKKLPEYQIVREMPGVGDPLAARFFGSAGDIRRFKNSKALVAYAGIDSPPDESGDFSSTHRHITKKGSKVFRDTGYEIMMALRAQKRTWEKVRKNPEVYDYMLKKEAEGKPRKVAKIAALNKFLRIVYARIKELYDNMALAERAKAKTKSKTKAKTKATA

SEQ ID NO: 428951 - protein, 423 aa, unidentified
MENTAARKRKQVPEGYLIIGVDPHKKRHAAVAITQDFTTRDKFKFDNTREGLEIMLRRARIEMVKSGCRGVMFAIETGGHYWRNLAYALDEQGIPFRFINQFTLKRRWEGKDLNRRKNDYRDSEVAAQLLCTGEFTETKVPQGVYAELRTAHNAYRRLVKERTRITNLVKGLLDGLFPEFTQVFKDPCALTALSVLSTCVIPKVIAGMTEDEFVATIEAKHKGRLMRKKLRVLHYSARTSIGINAGARSVSSEISFLVEKLELIRQHIRLIERPLVSLVDETEEGKYLLSIRGLNYIAVAGLLAELGCFKAYRSAKQMIKMAGSNPTESESAGKRSTHTPMSKQGRPVLRYCAWTSVIPMLRLNPDFRAWAKQRRERPAHANPLNGREVVGAALNRLLRLAFAMVKSQTYYQVSKPELALVAV

SEQ ID NO: 428952 - protein, 413 aa, unidentified
MTVFCGIDWAERHHDVAFVDEAGTLLAKARITDDAAGYHQLLALLTEHGDSPEDPIPVAIETSHGLLVASLRTGSRRVFAINPLAAARYRDRHGVSRKKSDPGDALVLANILRTDMHAHRPLPADSELAQAITVLARAQQDAVWTRQQVANQVRSLLREYYPAALLAFQGKQGGLTRADARVILTLAPTPAKAAKLTLAQLRAALKRSGRLRGCDAEAERLRDVFRAEYAHQLPGVEDAFGHQLLALLKQLDATCQAADDLAEAATAAFHQHADSEILLSFPGLGPMLGARVLAELGDDRARFVDARALKSYAGSAPITRASGKKRFVGRRFVKNNRLINAGFLWAFAALTASPGANAHYRRRREHGDWHAAAQRHLLNRFLGQLHYCLKTRQHFDEQAAFAPLLSPPTEQAA

SEQ ID NO: 428953 - protein, 423 aa, unidentified
MKSLRRQNFTAYVGLDWADSKHDICLLEAGSEQREFACVAHQVECIDEWAKSLQQRFGGPIAVALELAKGPIVYALQKYDFLVLFPINPLTLAKYREAFRPSRAKDDPSDAELALDLLVRHPERFAPLQPQSVGMRTLISLTERRRELINDKTRVTNRLTNTLKQYYPQALEWFDQHDTVMFCDFLSRWPTPLQAKRAHRASIKAFHHAHNAHRPKLIAERLAAIKAAVPLTQDPGVVVPCRLHAMVLVEQLRLALQAIEQFDRHIAELAPTLPDYRLFEGLPGAGPHLAPRLLVAFGEDRERFQRAEELQKYSGIAPVTERSGKKNWVHWRWQCPTFLRQTFVEWAGQTINKSFWAGAYYYQQRAKGSTYQAAVRALAFKWIRILYRCWKSRIPYDETKYLKALKKRRSSLLNNLVPDPLNA

SEQ ID NO: 428954 - protein, 409 aa, unidentified
MKLYVGIDVSSTDLYTRIMDQEGNTYAQVKVNNHLLGATFLRDQILLWVNKRQPSEIFIGMEATSVYSWHPAMFFHQQEELKSWNVKVFTINPKLIRKFKEAYTDLDKTDCIDAWIITDRLRFGRLKVTAVMQEQFIALQQLTRMRYHLVHQLTREKQYFLQHLFYKCSSFTQEVDSSVFGHAILELLLESFGLDEISQMDVQQFADFLRQKGRKRFADPECIAKSIQKAVRSSYRLSKCVEDSTDLLLGLSIQSIRSLQAQIKELDKAITRHLEGIPNTLQTIPDIGPVYAAGILAEIGQIERFDNQAALAKYAGLTWSKHQSGRFQAEDTSLIRSGNRYLRYYLVEAANSVQRHDATFRAYYRKKYEEVPKHQHKRALVLTARKLVRVIDALLRNGQIYTPRKGEDR

SEQ ID NO: 428955 - protein, 354 aa, unidentified
MTETFKTAVRTIGIDIGKNSFHVVGLDRRGAIVLRQKWSRGQVGSRFANMPPCLVGMEACVGAHYLSRRLKALGHDARLMPAKYVRPYSKGQKNDFRDAEAIAEAVQRPTMRFVATKTIEQLDLQALHRVRERLVSQRTGIINQIRAFLLERGIAVRQGRLSLRAELPRILAAPPDVVSPRMIRTIEDLAGDWRRLDERIEGLSDEIEAIARQDAGCERLMSVPGIGPIVSSATVAAIGAGDAFSKGRDFAAWLGLVPKQISTGDRTILGKISKRGNRYLRVLFVQAAWVVLVKRKSRERLGLDRWLEAAKKRLHRNVLAIALANKLARIAWSVLAHGRTFQVGRIADATAQTA

SEQ ID NO: 428956 - protein, 315 aa, unidentified
MSEKLVERFVGIDISKATLDVCIEPGGELFCVAYDEPGMAQIMGRLEALAPTLIVLEATGGLETRLATELAARALPVAVVNARQVRDFAKASGQLAKTDRIDAAVLCAFARAIRPPVRVLKDAVTSELDSSLTRRHQLVQMRVQETLRLHSSAKVQVKSLKAHLAWLDKRIAEIDADLGQRLRASDVWRVKDDLLRTIPGVGEVTSRSLLGKCPELGALNRREIAKLVGVAPLNADSGKHRGRRFIWGGRADVRCVLYMASLSAMRCNPTIKAFAKRLKAAGKAPKVVIVACMRKLLTIMNTMLKNNAPWNPKIA

SEQ ID NO: 428957 - protein, 418 aa, unidentified
MTELELVVERCAGIDVHQAQLRVCVRLPGEGRRRSRVEEFATFGTTTPDLLELSEWLSQHGVTHVAMEGTGVYWKPVYYVLEASFDIWLVNAQHVKNVPGRKTDTSDAAWLCRLLEHGLLRKSFVPPPEIRELRDLTRYRKAVIRERASEVNRLHKVLEDAGVKLATIATDIMGVSGRAMLAALVAGTTDPEVLAEMAKTRLRARLPELRKALNARFREHHGFLVSQILAHVDYLDEAIKQVDERIAGALKPSEAAMTVLLSIPGIQRRTAEVVTAEIGTDMTRFPTSRHLASWAGLCPGNNESAGKRKHGRTTKGSPWLRTALVEAALGATRKNGYLQAKYRRVRSRRGHQRAVIAVAHAQLEIIHTLLSRGELYTDLGSDFFERQQEEQITKRAIRQLEKLGHQVILKDATAPLPT

SEQ ID NO: 428958 - protein, 372 aa, unidentified
MKEDSVFFIGLDTSKSKISVAVADGARNGEVRFFGDISSEPASVTSMVNRLSKRGGKLHFCYEAGPTGYGLYRQIIELGHDCVVVAPSLVPRRAGDRVKTNRRDAVSLARLHRAGELTSVWVPDEAHEAIRDLVRAREAANDALKQARQQLQSFLLRHGRIYTGRKPWTRAHVRWLACQGFDHPAHQILLAEYCQAIEDAGVRLDRLGKLVVETAASWSMAPVVAAYQSMRGVAFMTAVTFVVEIGDVRRFDNPRQLMAYLGLVPSESSTGERVKRGGITKAGNLTARRVLIEGAWTYRFPARVSPQIQARLEGLPRTVREITWKGQVRFCARYRRLIAAGKPKVIAVTAIAREMAAVLWAIGQEVAPIAKG

SEQ ID NO: 428959 - protein, 426 aa, unidentified
MNCTQNQKINQVTEQTLVVGIDIAKRTHYACFVDDRGRVLRKSFPIFQSKEGFRQLYEAIQEAMQAFGKPQVIVAVEPTGHYWLNLAYFLEEHGIPLVMVNPAHVCRSKELDDNLPTKHDAKDALVIARLAKDGRFLVPRLLHEIEADLRVGSTLKEKLRKEQTAVKNAIVRWTDRYFPEFWTVFRDLGKTALSVLEWTPLPADMASRSAEELIEVYRQSEGLKCPQKAKIQALIDAAKDSIGVTEGTTMARFEIAALVRRYRQLEAEIAALDAELKALVQTTMEYQWLKTVDGLGDATIIDLLAEIGSFAHYRDPRQLVKLAGLTLKENSSGQRKGQKHISKRGRKRLRSVLFRAMIPLIRHNEAFRELHDYYTTRPVNPLTGKQSIVALCRKLLNVLFAICTKKQAFDAERMKQDVLSQVQRAA

SEQ ID NO: 428960 - protein, 341 aa, unidentified
MKQNITTVGIDLAKKIFHLVGTDITGKIVWRKRLTRHALGPFLAQLPPVTIGMEACGGAHYWARQFHQQGHTVKLMAPQFVKPYVKSNKNDMRDAEAIAEAVTRPTMRFVPIKDVDQQDIQALHRVRERLIGERTALINEVHGLMNEYGIVLPKGVAKFRQAVVEKLESEKDKLTTLSQELFWKLVKEFAALEDQIAFYQEKLETLATTHPESQRLMTIPGIGPITATALIAAVGDVGVFKNGRQFAAWLGLVPKQHSTGGQSHLLGISKRGDSYLRKLLIHGARATLRWVKLQTDRRSQWIRGLLARRGWNRTAVAVANKNARIVWALLRRGGVYGAPVS

SEQ ID NO: 428961 - protein, 463 aa, unidentified
MSKSQRTTKRGRRTKLQAGTERPLSVLRPNAAGIDIGSEEHYVSVREDRDLQAVRRFGCYTSDLRRMAEWLRSCGVDSVAMEATGVYWVPVFELLEEYGFEVYLVDTHQTKNASGRKTDVLDCQWIRQLHSYGLLTAAFRPEQQIAAVRAYWRQRQGLVESCSRQIHLMQKALEQMNVQLHKAVSDIAGLTGLSIIRRIVAGDRDPKELAKLRQKGVKRSEAEIAEALSGNYKAEHVFALTQALESYDFFQGQMQRCDGEIERCMSNIAGKAAPPEESKQKRRRWKNEPHFNLRAELHRICGVDLTRIESIDAVTAQAVVSECGTDMSRFPGEKNFASWLSVCPNNRKTGGRIRSTRTRRIRRNRAADALRRAAQSLHHSKSALGAEYRRKRARLGAPKAITAMAHKLARVIYRLLKHGDAYVSEGLEQYEARHRERALRGLRNHAQSMGFQLVSQATGELMA

SEQ ID NO: 428962 - protein, 415 aa, unidentified
MKGTEDTSQIERYIALDIHKEYVLAGGQNAKQEWVMPPRRISMAKFRGWAAANLHAGDALVIETTTNVWDIYDIVAPLTTRTVVAHAGAVRQIAEARVKTDKEDVKRLIRLLIADIVPEVWIPPTEVRELRGMISYRNRLVKMGTMVRNRLQSLLHRHNILLPKGRLLDATWWQEQKMSTLEKMQIQQELAMLEELDRHKREVDAELGRQCLREPWGKQAVRLLQLPGFGVVMTMIVLSAIGDIQRFESAKYLVGYAGLGAGIHESGKEHIEKRITKSGRKELRWALVEAAWQAIRISPYWKEQYETYLRRMRRPNQAIVVVARKLLVAVWHVLTKEETDLHASEEDLAYKMLVLSWDLDESVRMGLTYKQFAKYALMKLGVETDITRFVRRNVPRRIAPRAEVLARMEELGLSA

SEQ ID NO: 428963 - protein, 441 aa, unidentified
MAMRVTKVLNIQHPNAAGIDIGGSSHFAAIPADRSETPVREFGCYTEDLNTLAAWLLECGITIVALESTGVYWIPVYEVLETHGIEVMLVNARSIKNVSGRKSDVLDCQWLQQLMSFGLLSSAFRPPADVCALRAVSRQRDTLLQEQARSVQRMQKALTQMNLQLTNVITDITGQTGLNILRAIVAGERNPYVLAKHRNYRIKASEVEIAKSLEGTWKEEHLFCLSQALSLYDTYQALIAEADAKLEALVAPLRRLEVRAAKGKAKRGGKNAPGFDVQDALWEWAGVDLTQIGGIDVCTALKVLVELGTDLSKFKTAKHFCSWLGLCPGTRISGGKRLSGASKRIPNRVARALKLAAQGLHRSQCGLGAYYRRTAARLGKGKAITATAHKLARLVYAMLTKGTEYVQQSQAEYEAKFQDRTLRFLQQKAKTMGFDLVPHAV

SEQ ID NO: 428964 - protein, 358 aa, unidentified
MVQRKELNFEGQNIYIGIDVHLKTWHVSILTESGCLKKHSQQSSAQALFEHLKKHYPNGNYLSAYEAGFSGFSTYYSLLDFGIECLPVHAADIPTGQYESVMKTDAIDSTKIARALKSGLLRGIYIPKKEVLDDRNVMRLRITLKRQLSGYKSRVKHLLYNNGVIYPECFQNSKSHWSKRYLKWVHEDVQLLSESRNSLDLLLRQVELFRKSLLEITRLVRTLSRNGRYGEAYENIVSIPGIGMITGMCLLTEIGDIHRFRNERQFASYLGLVPTSHSSGEKTSHGEMTFRGNKRLGALLVESALVAIRQDRALAAAYGEYCKRMLPQEAIIRITRKLSNRILIILKSGKKYEHDRCY

SEQ ID NO: 428965 - protein, 387 aa, unidentified
MSKQNDLSRCRIAHQQDATLIAVIEMGQASWLVAGIVPGLDRYPLKKLGPDRDALLQLLHRWRNEAAKAGYAIDRIAVAYEAGRDGFWLARWLRSQSIEAYVIHPSSVPVSREHRRAKTDRLDTELLKRAFLGWLRGEPKHCSMAAIPTVEDEDARRPGRERQILVEERTRIINRLKANLARLGIRGFRPNLARAPGQLEALRTPEGVAIPMNTLAEMRRDLDRLRFVKQQIKEIEKTRAERLAKAPNERRHVAARALTRVVGVGVETADMLVQEVFSREIRDRRALARYAGLTGAPDESGQRRRERGLAKAGNARVRRGMIELAWGHLTHQKGSPLSVWYRTRTADARRGVRKTMIVALARKLLIVLWRLATTGEAPEGLQLRPAA

SEQ ID NO: 428966 - protein, 343 aa, unidentified
MESIYYIGLDVHKKSIAYCIKTVTGQIVCQGMVKAERRSLRKWLEDIPGSWVGAMEATMFTGWIYDFLKPYAVELKVAHPAMLKAITAAKKKNDRADAEKLADLLRVNLLPECTMMSEELRELRRILRYRNLIVRTASKMKNKISGLLMEVGAVYDKRKLHGKRYFGQLLERVEDVPESVKDLLKLSRSSMELFEAVQKKLLKTLREDSLISKRVELLRSISGVGEVMALTWVLEIGDPKRFSNSGQAISYCGLCSAQHESAGKEHRGPISKKRNKYLQSMLIEAANLAPYWNPQLGILYEKELTRGNRNRATLAVARKLVIYMLAVDRRGKPFMTEKESLVA

SEQ ID NO: 428967 - protein, 387 aa, unidentified
MGQDITWVGIDDDKKHLTVAVLRGTSAGDTPVSRIPNEDGALRRWVRRLERESSGGEIRMCYEAGPNGFALMRRLEGMGRVVVEVVAPSLTPRRTGRRVKTDPIDATHLAHLYRAGELRVIAVPDGDSESSRDLVRTYHRVGVEQTRKRHHILKFLVQRGRIYRDGVHWTGKHRKWLREQKFESWKDTMAFEEMQSGLSELEDRRSRLTLGLEKLGQEESRAAAVSVLRCFRGIDTTQAVTLVTELFDVDRFEHPRALMSYLGLTPSVSQSADREVRGRITKSGNRYARWTLGQVAKQSRYAPGVGPRVKRRREGQPAWAIEIANRAQRRLHRRYHALLVRGMPRAKVTTAVARELVAFVWEALSTVHRESRENLSTRAGEPGLAEV

SEQ ID NO: 428968 - protein, 381 aa, unidentified
MNKHSTVFIGMDTHKENTLVGTCKDKRSDKPELFGTIKTRTVAITKMVRQLQSKYPNSTLIFVYEAGPCGYWLYRLLAKLGQQCYIVAPSLVPKKPGERVKTDKRDALKLTQLLKNGDLDGIYVPEAIDEAIRDLSRARERTMNDLNDARHQLKALFLRNNIHYASTADWSLKHMRWLTEIVLPFPSQQFVLQEMIQTISERVARLERLDNELLYQVKSWQFYPVVKAIQAMRGVRLLVAVGVISELGDLTRFDHPRKLMSYVGLTPSEHSSGETQKKGSITKCGNKRARRLLVQGANAYRYPAKISREMQKRQEGLSKQIVDIAWATQLRLCRRYSRLMLRGKHRNVVVTAIAREMIACIWEISREVILSPVQPRLKRVS

SEQ ID NO: 428969 - protein, 405 aa, unidentified
MGRVFVGHDWAEAHHDVFVEDGTGRRLAAARLPEGVDGVRRFHELVADQVEDPGDVLVATETDRGLFVTALVAAGYEVIAVNPLSTSRYRERLSTSGAKSDPGDARVLADLARVDGHNHRRIAGDSDLAEAVKVLARAHQTMIWTRHRHTNQIRSTLREFYPAALQAFDDLASGDALAVLAIAPTPTLGRGLSLSKIASAVRRGGRQRRIDERAAEIQAALRAGHLEAPPVVADAMGASVAALVAVTAELVAQIDRLEHELTDRFEQHPDAKIIRSLPGLGTILGARALGEFGDDPNRFSDAKSRKNYAATSPITRASGKHRVVLARYARNRRLADVCYLWAFAAITASPGARAFYDARRADGDTHNRALRALANRLVGILHGCLRHGAPYDEHLAWGHRNATAA

SEQ ID NO: 428970 - protein, 456 aa, unidentified
MSRKRRSSRKTGTPVLHSLNPNAAGVDIGATEIYIAVPADRDPQPIRHFSTFTEDLHAAADWLKSCNIETVAMESTGVYWIPFFQILEARGLQVFLVNAHHVKNVPGRKSDVSDCQWLQYLHSVGLLRGSFRPEQEVCTVRSILRHRDGLVQMASSHVQHLQKALDQMNLQLHHVISDITGMTGLAIIEAILAGERNPQTLAKLRDRRIKATESTIAKSLVGDYRREHLFTLSQSLAAYRHYQELIGACDKEIEQYLETFESKATPPEDPKWKSQDGQKTRGGRPAFDLQSHLYRIFGVDLTEIPGVHTLTTQTLLGEIGPDLSRFANAAAFTSWLGLCPDNRISGGKILSVKTRKVKNRAATALRMAAQSLYRSQSYLGHYFRRMRAKLGAPKAITAAAHKLARVIYHMLTTRQPYDETICGQNELQNRQRLEARLRKQARDLGLEIVAARTGAV

SEQ ID NO: 428971 - protein, 355 aa, unidentified
MNSVRYVGLDVHRDTISVAVLDESGRLIMQSVLATKASAILDFIHGMRSIVHATFEEGTHAAWLYDLLASKVAKLVVCNPRKNALLKLGSKSDAIDALKLAELLRAGMLSPVYHGERSALEVQQLARSYTMLTEDTTRVMNRLKAVFRGQAVSCAGKKLYAKRHRDGYLAELGTGGLRRRAECLYQEFDALQQLRHVTKRELIVECRKHAATKWLQSVPFLGPVRAAVLIGRVQTPHRFRTKRQFWAYCGLALETRDSGEYRMVNGQVERRKKPVLIRGLNWNHNHAMKDVFKGAATSASICDGVFREFYLGLLNKGMLPEMARLTLARKIAAITLKIWKKGEAFDSEKMKIQAA

SEQ ID NO: 428972 - protein, 410 aa, unidentified
MKTPTSTINLLDIFVGVDIGKGSHCAAAINARGEVLLKPVKVLASAEGFAAFEERLRQLGDKSALLIGLEASGHYWMSLWRFLLERDWTVQVFNPVLSSKSARTHLRGRKTDADDALFIARTVRDGDFIPLQPGQEETQQLKLLCRQRRFITHELANAKRRLTGLIDLSFPEFSKHFDNIHSKAAHAVLKAAPSAAAIAVLSLRRLQSLLATASRGRFGAVKAKALKESATESLAALRPDPALELLIQSMIAQLEFFDQQLAQLDLHIQRLFCSMAHPIKSIPGIGSITGPLIVAELGDLRRFAGRRPLHALLAYAGMDPQVRQSGQWSGKTKMSKRGSVALRTALYQAASMARLHEPRLAEIYHHHRNELHKHHSVAISHVARKLLAIIYAVCARGQAFDPTKICPQPT

SEQ ID NO: 428973 - protein, 355 aa, unidentified
MLIIGCDYHPSFQQVAFVDTGTGELGERRLLHREEAEQFYRQLREQSIPAPVGMEASGHARWFERLLHELQFELWIGNAAEIRTKRVRKQKTDRQDAQLLLRLMMEDRFPRIWVPDAENRDLRQLLWHRHRLVQMRTRVMNQLHVVALNEGLRRKKALWRPAGRKELESFALAPWASRRRQDLLDALDQLTPKIQHLTRALEEEVDKRPVARCLETHPGVGPLTALAFELVIGTPERFPCGKQVASYVGLVPSEESSGDRRRLGHISKQGNVLLRFLLVEAAQVTVRSHPEWRTKFFHLAMRRGRKIAKVAMARKLAVHLYWMWRKGWDYEQLQKFGSQGRKPSSHAGEAMASTR

SEQ ID NO: 428974 - protein, 414 aa, unidentified
MTERYVVAGIDVHKKMLAVVTAEVKVGGMEFQRRRFGTTPSQLRELADWLRQQEVAEAVMESTAQYWRPVWLALEGTCELHLAQARSNGARRGRKSDFRDAERLVRRFVADELVLSFVPDEEQRGWRWLTRTRYTLVRDRNRVQNQIEGLLEDAQIKLSSKITDLFGVSGRRILQALADKKGGPLDPQKLASLGDEHLRASREELQDALDGRWLPRHRLLLGMHLDRLELLDQQIEELYVQMGEALKAHQGAVARLSEAPGFGPDSAMQMIAEVGPTAATFPSPEQMSSWVGSCPGQQESGGQSTSERSPKGNRAMRRLLDQAAHAAVKKKGSFFQHLYRRLMPKLGEQKAIWAVANRLCRLVWRILHEGVRYIQKGLLTGDPKTMKRRQRRLAAEFRKLGFHVTFTPITPAKA

SEQ ID NO: 428975 - protein, 385 aa, unidentified
MIFIGDDWAEDHHDVYLMDEAGKRLASRQLPEGLTGVRQLHGLIAEHAEDPDQVVIGIETDRGLWVGALTGAGYQVYGINPLAVARYRDRHHVSGAKSDASDAKLLADLVRTDRHNHRRIAGDSAEAEGIKVLARAHQSLIWSRTRHTNALRNALREYFPAALVAFDDLAHGDALGVLGRAPTPEQGARVDRPAIQSALKRVGRKRNIAARAREIQAALRSEQLAAPAPVATAFGATTRAAVGIIAELNRQIAELETALAEHFDQHPDAGIYRSLPGLGVTLGARVLGEFGDDPNRYTDAKSRRNYAGTSPLTVASGKKRAVLARHVRNRRLYDAIDQWAFCALSASPGARAFYDQHRTAGDTHHQASKFHGRRSSPLMAAEITS

SEQ ID NO: 428976 - protein, 320 aa, unidentified
MMAHNELVVVGIDVAKDKVDACIRALSQRQTFPSGVEGRRKLIAWLRKHQVGKAAMEASGGYERDWAKALREARIEARIVDPKRVRSFARSAGRLAKNDPIDAEMIAWFAETFTEAPGQAYDAAREKLLQIVNARHGLLEVQTKLQNRGEHSAPDVVQNMQARLLKRIAGEVAKLEAAIAALVKATPHFAELAGIIESVPGLAETTSAGLIAAMPELGQVRDKVAAALLGAAPYDDDSGRRQGQRHIKGGRRKVRNLFYMACLGAATQHNPVLKAFYGRLIAKGKEPKVALTACMRKLIVILNTMIARRQKWDATLHATS

SEQ ID NO: 428977 - protein, 389 aa, unidentified
MLEPFNPSRSLAALEQDSTVIAVIEMSQSRWLVAAVIPGIERQPLKKIDPDEELLLKLLHRWQNEAGRAGREIKRIVAAYEAGRDGFWLARWLRARGIEAYVIHPTSVAVSREHRRAKTDRLDTELLKRAFLGWLRGEKRHCSMAAIPTLEEEDTRRPNRERENLVTERTRLINQMKAILVRFGIRTFKPTLRKAEEKLEGLRTAEGTPLPQNTRAEMRRQLARLRVVHEQISAIERERLRKLAAAPAEERGPHAMVRLLARVLGVGVETADMLVNEILLRHLRDRKAVARYAGLTGSPDESGRRRRERGLARAGSARVRCGMIQLAWRFLRFQKDSALAQWFRARTTDGRSATRKIMIVALARKLLIALWRLVTMGEVPRGIILRAAS

SEQ ID NO: 428978 - protein, 340 aa, unidentified
MPLYVGLDLHSNNNVLAVMNQQGKRVDHKKLPNDPELILEALRSHRGKIGGVVVESTYNWYWLVDALMEAGYPVHLANPSAIQQYSGLKHADDQHDAFWLAEMLRLGILPEGFIYPKEERPIRDLLRKRGHLVKLRTSLIISLQNIISRNCGVQFKVSEVKRVKEDRVSPLLEGNEDLALAGRASKETIDYLTRQIRRIEAAIVERIELQDSYRYLLTLWGVGKILALTIMLETGPISRFAQVGNYVSYCRKVPGQWTSNEKAKGKGNKKNGNKYLAWAFSEAAEFARRHHAEARAYYNRKMQKTNFMVAHSALAHKLARAAYYIMKDQVPFMPEKLFGR

SEQ ID NO: 428979 - protein, 366 aa, unidentified
MTHSTVTADSSVIFGLDLGDRYTHVCGLDGLTGEIFEEGRIPTTPNGVARRFTDLPPAVIAIEAGTHSRWVSYQLQCLGHDVLVAHPRKVRLITDNDTKNDKLDAQRLALLARADPRLLHPIQHRSPEAQADLALIRARDQLVQTRTKLVNHVRCAVKGFGCRIPKSIGAKVLHRKAAPYIPSVLRPALEPMLEQLAALEEGIKRYDKLIKERANDAYPETELLRQVPGVGPLTALAFVLTLEDPYRFPNREAVASYLGLRPRQRASGKDPQLRITKAGNGYLRRLMVGSAQYVLGPFGPDTDLKRWGLKLANRGGRGAKKKAIVAVARKLGVLLHKLWLTGDEYEPLHNMRRRGTKEAAPAEVAQ

SEQ ID NO: 428980 - protein, 422 aa, unidentified
MYYVGIDIAKKFHIACVIDEENNLIKKNYRIESEISDFTLLGSMLCEIDQDKSNFIIGMEATGLLFENLYLSLKTQGFNVVLLNPYQTNKFREMDTMKFVKNDNIDSQMIAALLKSGRYSKAYVSQELYSSLKSLYRHKATLMDEMKKAKRQVQSTLAVVFPEFEQIVKDPFSVSGMALLEKYPTAKHYKHASGDRILKIFRNIKGNNFNLEKANTLLDLALTSVYQGNAKEERAYVILSNIRRIKFLNEEIKQCELQMKQLLDDTNKDIDKTISKDDEVYVSQLVDNLRTIDGVSDKTIFAILSECGDLTRFKDAKAFIGYLGLYPTLYQSGNSTKYGKLAKRGAKLAKMAIYQASVACVRHNDELRQLYLDKKSSGRASKECIVIVARKLAKILYAIYKYNTPYTPIRVFSSKTQTSLSH

SEQ ID NO: 428981 - protein, 361 aa, unidentified
MSESMALVGLDVHKSRTVAAVLDPATGELRMERLRGEPERVVPVFLEELDRPVAAVYEAGPTGFVLVREADRRGLDVRVVAPGSIPRAPGDRVKTDRRDAKRLVRLFAAGELRFAFVPSEPDERFRDLVRCLDDVRRDLMRARHRLSKFLLRRGVRFSGKTWTQQHERWLCTLAFEDPLSQAVFVDYLCAVQGLAQRRKTLIGVLEAAVPHSSHAETIGRLRCFRSIDTLTAAGLCAEVGDFTRFRTPALLSGFLGIVPSEYTSDEKRTQGQITKAGPANARRLLVEAAHNYRHRPRVGENLKARQSGQDPRVAQIAWRCQRRLHGRWMHLAAKRGKPTGTVAIAVARELAAFCWEAATLD

SEQ ID NO: 428982 - protein, 402 aa, unidentified
MPLLFAGWDWASASHAITIIDTTGRVVDRATLAHTEPELDAALARLAAHAPPAGLPVAIEATNGLVVDRLLAAGHPVIPVHATAFHAARPRWSAAGAKTDPGDSYKLADYLRTDGHRLRRLQPPDAATRELQALVRARADCLAAKTTASNQLWALLGAHWPGARAVWFRLASPIALDFLAAYQTPQAAADLTEQALAAFCRQHAYRGGKAAAELLARLHAAPTAPDGLHPIVLTQLVMAKVTLLRTILAGITELDRAIKTHVAKHPKARLLAALPYAGQISLAQLLAELGPILDRASSADQAAAEAGATPVTRTSGKTSSVRFRMAANRNARQALHVFADNARHGSPWAAKLYADARARGKRHPQAIRILGRAWLRVIWACWHTDTPYDPAKHRAEQRLAAA

SEQ ID NO: 428983 - protein, 356 aa, unidentified
MQTQVTKKIDFSGKELFIGLDVHKKSWSVTILVEGMEHRTFTQPPDPKVLFNYLQKMFPGGTYYSAYEAGFCGYGIHRELNALGIKNIVINAADIPSSQKDNLEKRDPTDSRKIARALGKGLLRAIHIFDRNMEELRSLNRTRFYLMRDLRRSKNRIKSFLQYYGVFIPFEYDNNQWTLKYIAWLKQIQMKTLSGQDAFSNLIRSYEYHREQILILSRQIRIRIREYDNELYSLLKTISGIGPLTSSALITELGDINRFPHIDHLSSFVGLIPRVKQSGESSYSGGITFRCNEYLRTLLIEASWQAIRQDPALMQYYHEHIVNNKGQKVIIKVARKLLNRIRYVMKNRQPYVTGVA

SEQ ID NO: 428984 - protein, 311 aa, unidentified
MANFAQSILCGIDVSKDTLDIATADEITTQIPNTPEGISQWLASLPKGSKIALESTGRYHEAVLDLALGAGFDVYVVNGQQLHHYRQAVGPRAKTDTQDAQLLRRYLCHEYGHLTAVNPLNNQQKRLWQLLKRRAMLIKMRTQLTLPMKGDAELQSISQGIVSELNLAIKKVERLMFALAKAQNWESAIAHCRSVPGIGPLNALALVTCFHRGTFQRVDQFIAYMGLDVRVRDSGRLRGKRKLTKRGEPEMRRLLYMAAWSFARNPKFRPLYEQMRSRGLSSTAAHIAMARKLARIAFALMKKGEDFMLEA

SEQ ID NO: 428985 - protein, 360 aa, unidentified
MRIIGCDLHARQQTLAMLDTETGEVVNRTLMHEGNQVREFYSELPGPVLVGIEAIGPMQWFLDLLAQLGIECRVGDAAKIRAAEPRKQKHDRRDAELILKLLVEKRFPAIWMPSKELLDVRALLLHRHQWVRLRTQVQNALQAIALANGLRRGPSLWSYDGLAKIAFLPLPPHTSLRRSALQALYRHMDEEVEKLTVQVAEQVEHHSGAQLLMTHPGVGPVTALATDVFLGDPQRFADGKALASYVGLIPEERSSGRRRRLGRISKQGNPLLRFLWNEGGAHAARRDPELRRFYRRKLVQKGLGKARVAVARKLGIRLWIMLRDQIDYQEFCRRGQKQSGAVCAGMPEVGFGANRHRPVD

SEQ ID NO: 428986 - protein, 386 aa, unidentified
MHQPKDDLSRSLVALDQNRTLIAVIELSQASWLVGGIVPGVDRHPEKKLPPDQDALLRLLHRWSSEAAKANCVITRIAVAFEAGRDGVWLARWLRARGIEAHVIHPTSIPISREHRRAKTDRLDIGLLKRAFIGWLRGERDHCNMVAIPSLEEEDAKRPNRERENLVVERTRIVNRMKGALARLGIRDFNPKLRNASEQLATLLTPEGQPVPPNALAELQRDLAHLRFIADQTKQIEAARVEQLRRRPHTATNAMVMELQRARGIGIETADMLVREVFVREFRDRRAVARYAGLTGSPDESGSRRREKGIAKAGSARVRRGMIQLAWRFLIHQKNSALSQWYRTRIAGGKKPKTMIVALARKLLISLWRFATTGEVPHGIILRPAA

SEQ ID NO: 428987 - protein, 291 aa, unidentified
MKKSVKYVGLDVHKDSITIAIADQGRNGEVRVYGKISNDLNQIDKVMRKLLSQNVHLSCVYEAGPCGYPIYHHLTSKGIDCVVVAPALIPQKSGERIKNDRRDAIKLATLHRAGELTAVYVPDQEDEAIRDLVRNRADIQKALRKVKQQINAFLLRHAISYPGRTKWSKAHLSWLTTIKMTHPAQQIALTEYLDAMENSAARVTRINKQLEAFCQTWRLSPVVQALQSMRGLCLISAMTVVAELGDLNRFDNPSQLMAYLGLVPSEHSSGNSVKKKKAASPKPATPTYAGL

SEQ ID NO: 428988 - protein, 354 aa, unidentified
MITIGVDVHKRTHTFVAVDQVGAMLGQKTVRAITTGHREAITWARSLADGKSVRWAIEDCRNMSSHLERDLLAAGEQAVRVTPHLMADTRRAGRERGKSDPIDALAVARAALREPDLPVAGHDKASREARLLTDHRDDLVVRRTAVTNRLRWKLHEIDPQRADQIGSLTTIKQQNGARTLLESITDGGVLVEIALDELKEIVSLTEKIKAVDKTIAAVTGEATVELRKLDGCGVLTAAKILGETANIDRFATVDKYARYAGIAPVPVWSGNTAGRVRLTRSGNRQLNRAVHTIALTQTRLKGSKGRAYYEKKLAEGKSRKEALRCLKRRLLRTIYNALNQDHQNCHNQQLPSAA

SEQ ID NO: 428989 - protein, 338 aa, unidentified
MTTNISMLAIDLAKGSFQVCAVGPEGTVLYNQSLSRTRLATLFAEQPACIVAMEACATSHHWGRMAQRQGHEVRLIPAAYVKPFVKRQKNDKADAEAIAEAALRPTMRFVAVKSAETQGRAVAFRTHQCLVRQRTQLINALRGHLAEFGLVAPKGPASLKVLENALDDEATDLPSPVREMGAIYLDQIARLTAVIEQLADELEAASKTDAQLRRLCTIPGIGPVTAGAVSAFAPDLDTFDSGRNFAAWLGLVPRQRSTGGKTRLGSVSKMGQTDIRRLLIVGAMSVIRWVVRKGGSANRWLAALVARKPRMVAAVALANKMARMIWALTTKKEDYRMA

SEQ ID NO: 428990 - protein, 337 aa, unidentified
MKYSGIDLHSNNSVVTVIDEKDRVVAEKRLPNDLSKVVGFLMPWRDELAGVVVESTYNWYWLVDGLQEAGFVVKLANTGAMRKYDGLKHTGDEADARQLAHLFRLGILPTGTILPPEQRAIRDLARKRMQLVRSRTSHILAIENIMARQRGVRISSNQIKRLVADAVNQMGLSADVALAVQSNLAVITTLSEQIDLLEKRLQESVGERPEYALLMSVPGIGRILATIILLETGPIDRFAAVGNFASYARCVDSQRISNGKKKGEGNTKNGNKYLAWAFVEAANFALRFCAEAKRFYERKKARTNTVVAIKALAHKLARACFHILKERKSFDVTRCFA

SEQ ID NO: 428991 - protein, 343 aa, unidentified
MDDYIGLDVSMKETAISIRRAGERVWRGKCSSDPSRIAQIVRKHAPNVVRVVFETGPLSVWFYHALKEEGLPAICIDARHAKAALDMAANKTDANDADGLAQLAEVGFYREVRVKGFDSMLARSLVAARTKLVRITVELSNQLRGLMKTFGLIVPSGKGRNFEANVRRLLIDQIELSNILLPMLDAWHDIRMRAADLTKLLLAAARKSHACRLLMTIPGVGAITATSFATAIEDPSNFKNSRAVGAWLGLTSRRYQSGEVDYSGRISRRGDRHLRGLLYEAALVILTRSSAESDLRSWGLKLRERLGFKRAAVAVARKLAVTMHAMLKTGTAFNQAIDAKVTQ

SEQ ID NO: 428992 - protein, 399 aa, unidentified
MSDRREIAVYLGLDVGKGEHHAVALAPNGKTLYDKALPNSEPRLRAVLAKLARHGRVLVVVDQPASIGALPVAVARDAGCLVAYLPALTMRRIADLYPGEAKTDARDARVIADAARTMPHTLRDLQPDDETIAALQLLLGFDDDLAAEATRASNRIRGLLTVIHPSLERVLGPRIAHPAILDLLAEVRSPTGIRAAGKDAVAELLRRQAPRMAERLAGEIFAALHEQTVTVPGIDAAAVILPGLAASLAGTLQQRAGLEAEIDTLLEAHPLSKVLTSMPGIGVRTAARILAEIGDACAFPSAAHLAAYAGLAPVTRRSGTSIRGESPSRRGNKALKRAFFLAAFAALKDPASRTYHDRKIAQGKRHNQALLCLARRRCDVIYAMLTNGTFYQPNPPRPA

SEQ ID NO: 428993 - protein, 367 aa, unidentified
MSNQTVNSLKTDTRLFIGMDLHKNTSTFCVKDNEGKLIASKKVNTDKNDVSRFLESIKKKSDNISLVLEPVSQWYYYADLIEKMGVDVKLAHPMRVKAIASARIKTDKIDASVLSDLLRGNLLPEAYFSPLEVRSWKERCRFRASMFNQRTQIKNKIHAILFKHSLRHKFSDLFGKRGRAWLESLPLSEPFRGNLDRYLLLLDDFNNMVAQAEEIIEREVKEHPQASLLVSIPGISYVSALTIMAEIGNIDRFPTCKQLQSYAGLIPSTYASGDRMIHGRITKQGSKWLRYIMIESAYHQPNCKRIPGFGHYYNDMKERKGTKTAAVATARKLLAVVWRLLKDGRPYEVIDPRCRKTGVVGQKLIAY

SEQ ID NO: 428994 - protein, 347 aa, unidentified
MKRIAVDLAKSVCQVAESVRSGQVVQRKRLNREAFRRYIQEQTEPVEWVMEACGTAHYWGRVAQALGHSIKLIHPRYVRPYRRRNKTDRNDCDAMLEAARCKDIYPVPVKTHEQQQVQQLHGLRETWKKSRTQRINLLRGILREAGIEAPVATAAFIRAAHELVERPEVAPLSHQLHIVLAEINLHEQCVAECEQQLKRWHADDEVVRKLDEVSGIGLLTASALKNAVGKPERFASGRQLSAWLGLTPREFSSGDRRKLGHISRQGNVYVRTLLIHGSRAALLAAQRCQARSPEKLTQLQRWAVETAARIGHNKAAVALANKLVRICWAVWCHERRFSGNWQSLKPA

SEQ ID NO: 428995 - protein, 421 aa, unidentified
MEQPTTIIAGVDTHTGIHTLALLDMNGRVLSTNTFGADPDGYGHLIAMLGDPARCAGIGVEGTNSFGAALARRLQAAGFPVYEVLRPKRGVRRKDGKSDPIDAIAAARSVLAGDGTSLPKSSDGWVEALRHLNAERSQPVTAMTTPANSTGGLPAAAPEPIREKYRGLRTETRMNRLASCRPSGGLVAHSVLTALKGAAKAWRALKEQADPLEERMRSILDTNARPLLDIYRAGTITAATIAIVAGDNPERIRDEAAFAKLCGACPIPASSGKTNRHRLNRGGNRQGNMALHRIAIVRLGYHQPTRDYVAKKTREGKSKLEIIRCLKRHIAREAYKALIAIRNGGAGRQTPQERGALLRRLRTSHGITQQQIGEALAVPSSRISEIERGTRDLPELEQRATQWIHSITTPTTRHSQPLDDE

SEQ ID NO: 428996 - protein, 344 aa, unidentified
MYFIGVDHHKQASVMTIVDKDGQELKNGRVLNLREGVKRFLEGYHPFTAVLEAGRSSYVMADLLRELGGEVKMANALQVKAIAHARIKTDKRDSRTLAHLLRADLIPEVYQRGERNRRAQRVMRLRAYWVAKQTEKKNKIRALLAQQKEEIQLEVGKREEGLFSGKGVEFLTKLPLEDPDKMVLDDLIQGYKEDQAHIQRTDGLVRGLYGEIEEASRIDTVPGFATTLSVLVAVEIADIKRFPTVGDLHSYAGVVPSTYASGERTHHGRITKQGSVWLRWAALEAAYPAIKKDLGLRVLYNRLAKRKGANVAKIAVARRLLTIIYRVLTEKREYVPDKMKISAA

SEQ ID NO: 428997 - protein, 385 aa, unidentified
MPTYAFVGLDVSQADAHVCFLLADGFEPQPRWSIPNTQPGAEALSATVARLCAHHQIDQLRIGVEATGLLWWHLACALREAPALAPYAPQIYALNPQLVHTFRANFGALPKSDHADAFLIAERVRYGRQLPAPYQLDARYAALQRLTRFRCHLVQNLAREKSYFLSFLFLTFSTYGQVAPFGDPFGATSCAVLEEFTTDELAAQSLSDLAAYLQTHGHGRFADPLALAVTLQRAARDSYRLDRVLAEPLRLVLGTTLASIRTLQQQLKALDKTIAQELAGLPQTLSSVPGLGPVWIAGLIAELGDIGRFDDDGAIAQYAGLTWETYQSGGFTADDTALTKRGNSYLRYYLVEAANSVRTHCEEYQSTMRRKPPRPPAMRINVRWC

SEQ ID NO: 428998 - protein, 341 aa, unidentified
MGVKKYWVGIDLHRNQFTYCVRYSDGKELVGKESMTNLERFARRLGKHSEVAVEATGNTWMFCQVLKKHAGRLVVVNPNQFKVISHSVKKTDKNDAKVLAEFLEKDLLPEVRMKDELQAKIASLTQTREKLVQLRTVLKNKINNLFASRFILLKREELSSEKGLLKVLSYHFDSVSDVELRVMVDQIRSLNKSIEELDKAIEDNGSKMDGFDNLKSVKGIGAKGAATLLSVIGDINDFRSAKQLAAYIGIVPRVSDSNETVHHGRITKLGSKIARTTLVQCALIAKRYNAYLFNFHEEVKARRGGAKANIALARKFLEIIYRILKNKWIFEDFTQFKLKTA

SEQ ID NO: 428999 - protein, 355 aa, unidentified
MNKYSVGIDISKNDFHACFSGIDNNQQVKVLRSGTFKNNRKGFVELAKWVKDTAREKIVPVVIIMEATGVYFENCALYLFKSGFSVSVILPNKAKKYIAALGIKTKNDKADAKALSRMGAEQALQLWQPMDDYFYELRALTRLYQTLQESITATKNQLEAAELSMYPSKTIIRSLKKLISETEKQLLIIRDKIYKHLASNGSVATKVNNIAEIKGIAALTIAVLAAETNGFLLFENASQLVSYAGYDVVESQSGMRVGKTKISKKGNARIRRALHMPALNVVRYKVKKFDIFFERNFQRHGIKMKSYVAVQKKLLTTIYALWKKGEKFDPEYDLKNTTRDGEAVQSSRPNFTEVG

SEQ ID NO: 429000 - protein, 391 aa, unidentified
MIFVGIDVAKDKHDCFITNTDGEVLFKSFTITNNLDGFDELYQKIESVMEDVSKVKVGLEATGHYSYNLLGYLLDKGLPTYVINPLHTNLYRKSLSLRQTKTDKVDARTIASMLMSDVNLKSYSDTSYHNEELKSLTRYRFDKVKERAQLKQSISRLVCILFPELEKLVPTLHQNSVYELLYEFPGAKHVANAHLTRLSNLVETSSKGHYTKDTALMFREAARTSIGSNMPAKSLELKHTIKLIRELDSEIEEIETEIKTIMDEINSPILSIPGISYRMGAMIVSEIGDFSQFDSPDKILAFAGMSPSTYQSGQLDNSHSRMEKRGSRYLRYALYNATAYVCLWDPTFKAYLAKKRSEGKHYYVAISHAAKKLVRLIYKLETSGQQYIKAV

SEQ ID NO: 429001 - protein, 429 aa, unidentified
MSNYFYNPVIGIDFSYAAILAPNGDIYKKSFKIKHDLNGFNHLVNEIKKVEEEFNMKTAIFMESTGVYHLSLFHYLNKNFDNTFVINPLITKSNKNGDIRKVKNDKKDALTIATIGKFQNIKLSQKLNLDIFLLKNLVREYYKLTDTCSTFKKKLSADLRIIFPGYSTIFSDSTSKSSIELLSQYSTPQSTLEAPKEDIIKIFLNNSKKGIVWSENIYSKLINVANEAKIIGLPLDGLAVKIASSITLIKTIQSEIDILLEQINTFIQSETFPESIRNNIELIDSIPGIGQLTAITLIAEIGDIDGFIKPKYLVAFFGIDSSVNESGKFKGDDNKISKRGTRIGRRALYAVALASIRNNRNGVPINKVLLDYYQINLKGKKPKIALVAIMHKIINYIFAVLRNQTPFEQRDPKIHKQMFLENNSLNKVA

SEQ ID NO: 429002 - protein, 348 aa, unidentified
MDHYAGIDVSLECSSVCVVDASGKIVREGKVLSEPAALIAWFGSLGFGLERIGLEAGPLSQWLYAAMKQAGLAVELLETRHVHKALETMPVKTDRNDARGIAQLMRLGWFKPVHCKSLAAQETRAVLTARKLMQAKLHDVEMSLRGILRGFGLKVGKTTARSFAARIEELAAGHPNLETIARALLAVRAVLLREFNGFEKSVRIMARSDARARLLMTTPAVGPIVALTYACAVDDPGRFKSSKAAGAHFGLTPRKYQSGETDITGRISKIGDAGVREALYQAAHVMLTKPVKGCAQLKSWAMRLGRRAGMRKAKVALARKLAVILHRMLADAKPFNDAAKAKTMAAAA

SEQ ID NO: 429003 - protein, 317 aa, unidentified
MSDNSIICAGIDIGKQKLDVAVCGFKAALQADNTSAGHEKLIRWLQRHKVERVGVEATGGYEQEVVRTLRREGFPVVVFQPIQVRAYARFRLKLAKNDKIDASLIAACVASVDDIRAAPDPRFEAFAAAQTLIDQLTDDIVLYKTRRETARDEHSRAFWEREIAGRKAQLRSARKTLRTEMRAHADIAAKLDLIASVEGIAEKSAIAILIRIPEIGTLSREQVAALAGLAPYDDDSGRRAGSRHIQGGRTRLRTSLYAAALPAAFFWNPQLITFYKRLRANRKTHKMALVACARKLLIFINTVVARATPWQPKSAVI

SEQ ID NO: 429004 - protein, 360 aa, unidentified
MTTVTVGLDVHARSIRLAAVRADELLEERTLAYDEEAVERALRRWPALRCCYEAGPTGFGLYRFLVERGIDCCVVAPGLVPQRPGDRVKTDSRDARKLARLLAGGLLEPIYVPTPQLEAARDLVRAREDARLDRMRDRHRLSKFCLRHGRRLPTSSWTVARRSWLSEQRFELAAQQQTFDSYLHAIDLVDARIEQLERAIRETAEQEPWRALVARLRCLRGVDTLTALALVSEIGDFDRFKTAEQFMAFVGLVPSEHSSGQQRRQGSITKVGNAHVRRLLVEAAWHARRRPTVGYQLARRQRGQAAADVERAWRCQQRLYQRWQRMAGRGKPQQKIVVACARELAGFVWAIATEQPLRSS

SEQ ID NO: 429005 - protein, 353 aa, unidentified
MIKKKTQKIKSELAKITVVDKEKGASYIIVGVDLSKSKLDVMTTKYKSYANDEKGCNLFCKAIKELGNNVVVVYEATGYISLNFAELLDERGIARCQVSPRHVRHHAKAGMSEAKTDKIDCAVIQSYAMKYWECLSINTPMGKNHSELMELQRLRNFYTESISRAKQILSTCKHESSRTHFENIIKELSEKRKEIEQKITELIEAEEDTKHRMQLYMQHPGVGKETAKTLILCLPELGTVNRREIAALVGVAPFNYDSGSRTGKRIARFGRRNVRNLLYMCVRAALNTTEENDYKKKFSRLSTVTNLKLGRHYRQVIMACMRMMIVRLNAITRDWIAAGRPAPQQSKRIKSKA

SEQ ID NO: 429006 - protein, 343 aa, unidentified
MKLHAVGIDLGKTVFHLVGLDSTGRVVIRKKCSRKQLLAFTANLEVGLIGMESCSGSHFLGRALREQGHAVRLMPAQYVKPYVQTNKSDFLDAEAIAEAVQRPRMRFVPIKTEEQLDLQALHRVRERWVMRPTAVVNQIRSLLLERGLTLPKGRRYVDQQLPRILEDGELRLSGSFRVLLAQLKLELDQLGARIEEIDRVIQKTAKENEDCQRLTEIPGVGPVTATALIAAVGNASTFRKGRNLAAWMGIVPGEYSTGGKQKLLGISKRGNKYLRTLFIQGARSVLQQRHKQAPGLSSWLAQLLARAHQNVVIVALANKLVRMAWAVLCKNQRYRAPVLAVAI

SEQ ID NO: 429007 - protein, 426 aa, unidentified
MKSRMNEKLEWITTGTLIVGVDVAKTIQWARFVDYRGVEIGKALSFKNNRSGFESIVSRIGEICKRQSLDNVIIGMEPTGHYWKGLANYLIEAGYRVVGVNPYHTKKAKELDDNSPTKCDRKDAITIARLVKDGRFFCPYLPQGEYGELRGLTNARVNMMKRNNAIKNTIIAILDEYFPEIWTVFKNPLRGKASRQVLRNCPFPSIILAMGETGVLMEIKKAVKKTVGIKKVRELIHVAENSIGVRYGLAAAKMRLNWLLDELELAEKQLSEVEQAMETALFKTGYAAQILSIKGVGVVTAASFLGEVGDPLRFSNARQIARYAGYNLVEDSSGKSKSGTCISKRGRKQLRNILYQMAFTMVGHNAEMKTLYRYLTTRKENQLKKKQALVVVSKKIITVIYSLLKKQDIYRPELVLGAVRKEMMAA

SEQ ID NO: 429008 - protein, 403 aa, unidentified
MNNVAGIDVSKGKSMVSVLRPFGEVVAKPFSIGHTGSELKELADYLKSLDGETRVVMEHTGRYYEPVARFLHEEGVFVSAVNPKLIKDYGNNTLRKVKTDKADARKIARYGLDNWAELRQHTPMDTIRMQLKTLNRQQSLYAKTKTMMKNNLIALLDQTYPGVNALFDSPVREDGSQKWVDFATAFWHVDCVRNMSLTAFAERYRKWCKRHGYNFSQSKAVEVHTGAQDLIAMLPKDALTKTMVRQAIDALNAVSASLERLKAEMQALAAQLPEYPVVMAMHGVGDSLGPQLMAELGDVTRFTHRNAITAFAGVDPGADQSGTHEAKSTRVSKSGPPELRRALFLVMDCLLKTQPQDDPVYRFMDKKRAEGKPYLVYMTAGANKFLRIYYGRVKEYLASLEEN

SEQ ID NO: 429009 - protein, 357 aa, unidentified
MKKRLNADTINVNGKTVNVGIDVHKLSWHVTALVEGVIVESATIKPSYRVLKKLLAQYKGARIRIAYEAGFSGFNLYDELTADGIECIVVPPSLIPVESGNRVKTDKRDSRKLAQYLENNLLKRVYVLSKQERAHRQFVRTRRQLSDHRTDVMRQIKSLLLFHGLPSFDGNRGFWTRPVLRALRSITPDEYVSRSLNKLIDLYEYLTQQVKHMTREVRRLARTEKYARRVELLTSIPGVGVLSAMEILTELQDVSRFATADQIAAFLGLTPSQYSSGQHVRMGKITHAGNHRLRTRMVECSWIAIKKDPGLNKTYQAIKMRRGGKRAIVAVSRKLIIRIRRILLDEVTYRKECAIAA

SEQ ID NO: 429010 - protein, 341 aa, unidentified
MKNLFIGVDFSKEKVDVAIIFADGLTETAPRVFNEFKTTVSGYKQLVKWVEQNSCGIDSSLWLFCGENTGDYSKGLCNFLYGKGYDMWLENAKSIKDASGLRRLKSDRADASMIAEYAMRNYDKAVMYEPLSESLAQLRELFLYRQMVVRHRCSFQVRRGEKRLTMEKSPVKTMISQSGRHIVSELNKEVEKIDKRIAELIKSDEELTEVFTIVTSVPGIGTQNAVCLMVYTDNFRRFNYDSRKISCYYGIAPFGKDSGTSVHSDPHVHYMANRQIKAMLTQAALAAVNFNPVMARYYMRLVERGKKKQVALNNVKNKLVHLVTAMVRNRQIFTPEYKISA

SEQ ID NO: 429011 - protein, 347 aa, unidentified
MRFYTRQHRHYCGIDLHARTMYVRIIDQDGTVLVEKNIPARPGPFLELVAPYRDDLVVAVECMFTWYWLADLCHEEGISFVLGHALYMKAIHGGKAKNDRIDAGKIAALLRGGMIPRAYVYPREMRATRDLLRRRLHLVRHRGRLLAHIQNTNHQCNHDAFGAKLTYKANREGVAERFEDPSTRKSVEVDLALIGHYDGIIRDLELFIIRMAKQHDADMFHRLRSITGVGKILALTILYEVQDISRFETVQQFASYSRLVKCSRESAGKRMGTGGAKIGNVHLKWAFSEAAVLYLRANPKGQKYLARLTGKHGKGKALSILAHKLGRATYYVMTRSRNFDGKKFLAA

SEQ ID NO: 429012 - protein, 314 aa, unidentified
MKKAAEIFVGIDVSKAWLDVAVHEQEEVVRVSNDAAGIASLVKRLKKLKPILIVLEPTGGFEMLVVAELSQAGLPVAVVNAKRVRDFAKATGQIAKTDKLDAKVLAHFASAVRPAVRSLQSEEEEQLTALLTRRRQVLDMLTVEKNRLVTVRAKMRTDIEAHIQWLSNSLKELDEEIEDFVKGSPIWKEKDSLLQSVPGVGPVTSATMLGMLPELGLLNRQEIAALVGVAPLNKDSGPKQGKRRIYGGRGEVRSVLYMAALAATKFNPFIRTFYERLLRHGKEKKVALTACMRKLLVILNAMLRTNQPWRTHPA

SEQ ID NO: 429013 - protein, 337 aa, unidentified
MKRQYVGIDLHRRTSTIYRMNAEGEMLGCVRIPSQPAELAEAMAEAGKAPEVVLESAYGWYWAADLLQDLGANVHLAHPLGNNWGNRRVKNDERDARDLAAMLRLGRLAEGWIAPPETRELRELVRYRFRLVGQRSSCKAQVHGVMAKNGILPALGDMWGKGGAAQLDSLELPRAYATRLDSLRDLIAFLDNEIDIFDRYIANQLKDDPGYNAILKIDGIGKVLGAVFVAEIGDITRFPSPKHLCSWAGLTPKHRESDEKVKRGPITKQGSPLVRWAAVEAISKYRGGEKLRADYHRIAEHAGKFKARVAVARKLLVLVYYGLRDGEIRSLEPAQAA

SEQ ID NO: 429014 - protein, 404 aa, unidentified
MMTAPARRVTGGVDTHGDVHVAAVLDSATGRCLGVESFPAERAGYAALPAWLAGHGEVDAVGVESTGSWGAGLSRHLTAAGVGVIEVDRPDRKTRRQEGKSDPIDAQAAARAVLSGRATGTPKSGDGPVEAIRALEIVCHGATRDRTRAINQFKALLVTAPADLREHLAGLSFSRQLELARRFRDHDDIVEAQVRFALKTLARKITFLDQQINDLEARMNTLTGQAAPALAGTFGVGPHVAAQLLAALGDNPERISSEAAFAKLCAACPIPASSGKTTRHRLNPGGDRRANNALYTIVLVRMRHHAPTRAYVARRTAEGKTRLEIMRCLKRYVAREIFNVVTRPPAVPTGHDIRQRRLQAGITLTALANTLDIAPIRLSRLERGLDFNNDLATRAATWLTQNAA

SEQ ID NO: 429015 - protein, 335 aa, unidentified
MEASYYIGIDISKGRLDWHLIDAGNTELATGQAANTPKGINKMIGQWKRGKTCLKELIVCFEHTGPYGLLLATLLEQSGICYVMVSAAQVQLSLGIRRGKSDPIDARRLAEYLWRFRDRLAPSRLPSKALLELRSWLIWREKLVKMRTALTNGIKANTLTSQVADLGEINDQMQMQHDQLTTLLKQVDRTINNLLRTYNTTEGQYDLLVSIPGIGPIIAGWLLVYTEGFTRFANGRQLACFAGSAPFPKQSGQKKSPDRVSQWRCQRLKSLLGNGVHSAIQYDPELRTYYKRKCEEGKHPQSVRNAVICKLLYRVFAVIDRGTPYVKIHQHEAVT

SEQ ID NO: 429016 - protein, 413 aa, unidentified
MLFVGIDWAEDHHDLVVMADNGGVLAGARIGDDLAGVGRLHALIADHQTGADEAVGVGIETDRGLLVTSLVAAGYEVFAVNPMVASRYRDRHSIAGAKSDAGDARMLADLVRTDRHLFRPIAGDSDEVEAIKVIARAHKRMIQDRQSQVNRLRSSLREYYPGAIACFGNDLADRDALAVLAAAPSPRLGRELSQARAIAALRRGGRKRNLERRATEIREALRAAQLNAPDPISAASGTATSALVAVIGVFNAQVAALEAELVDHFEEHPDAEIYRSLPGLGDVLGARVLAEFGDDPNRYKDAKSRKNYASTSPVTRASGKSMIVHARYARNSRLADGCRQWAFCSLTSSPGARTYYDALRARGKSHEQALRQLGNRWVGILHGCLDHGTSYDELTAWDHWLNPTTNEELRAAS

SEQ ID NO: 429017 - protein, 349 aa, unidentified
MEYNIIGIDLAKNIFHLHAVDKYGKNIFKKKLTREKFLDFMANQPKSLVGMEACGGSNHWAREITKFGHDVKLMAPQFVKPYVKSNKNDFKDAEAICEAVGRPTMRFVPIKSVEQQDVLSIHRVRERLVKNRTALANEIRGLLHEFGVTIPRGVNKIISHVNTAMDGNKLSNKSKETFCLLLEEFRDNNKRIIDLEKRLNQIAKNNENHAKLMAIPGLGLITATALTASIGNAANFENGRQLSAWLGLVPKQHSTGGKERLLGISKRGDVYLRNLLIHGARSVFTARVLRTKKLDKVTGDKSKFTDWMFRLQERRGYNTSVVAVANKLARVVFAVLRNDQPYSETKVCY

SEQ ID NO: 429018 - protein, 326 aa, unidentified
MQGKEASEQETKVQSNVGIDISKCWLDAHVVPGDERLHVANNCAGIRQLKRWLSHYRIALVAIEATGKWHRHLHRSLVASAIPVAIVDPYRVRMFAKAQGILAKTDQLDARVLALFAAMMVPPVRPVAPQTMAELAELVVARASAVEAQTALKNQFAAAESTFLKRQLDRRISRAGKDIAALDREILKRIKADTSLARRYAVLTSIPSFGFAVAATLIACLAEIGSTTAKQIGMLAGLAPIADQSGDREGIRVIWGGRPAVRRVLYLAALSASRFNADMKAFYKRLIDNGKPSKVALIAVARKLVVLANTLVSQDRTWQPSAPIQA

SEQ ID NO: 429019 - protein, 362 aa, unidentified
MQVRHIFVGIDLGDKNSVARIAVDRQKSERIGFVNSQRGRARLLEELQRRAKQVGATQIYMAYEASAAGFLLCDEAERAGLQCWVLAPTRMEKSVEQRKHKNDDRDGEDVLEKVRAHVLAGSRLPSVWVPDRQTRDDRELVRTRLELAEKQSRMKTQIQMLLKRHGLEKPSGLGAGWTIRYRQWLEALTAVESVGWGARQALGSLLRQLGWIEQEIEWIQKSVQQLAAAPRHEAVIEELRKENGVGLLTAMVYRTEIGQASRFRRGRQVGKFAGLTPTSHESGQQNDRKGHISRQGPPRLRKMLCQASWVHIAHDAQAAQLYHKLVSRNPKKKKIAIVAIMRRLAVRLWHRMRRVEMESAVA

SEQ ID NO: 429020 - protein, 342 aa, unidentified
MQITTIGLDIAKNVFQVHGIDAAEKVVVRKQLRRSKVIAFFEALPPCLVGMEACASAHYWARELRKLGHEVRLMPAKDVKAYVKRNKNDAVDAEASCEAVRRPTMRFVGVKSAEQQGRLMQHRTRDLLLRQRTQVINALRAHLAELGIVAAQGREGLKELLAIIADEKDDRLPVDARASLIVLAAQLQALQTLIGSIEKRLVVQHRANEASKRLETIPGIGVLGASAIAATVSDPNVFRSGRDFAAWIGLVPRQDSTGGKQKLGPISKQGDRYLRRILVVGAIAVLRYAKQNPEKYPWLTQLLARRPFKVVAVALANKMARMAWALLAKGGTYRAPALAAAA

SEQ ID NO: 429021 - protein, 463 aa, unidentified
MRTLGVDLALTGTHKAVVVDGQGNAIGSVMGFRTEPEELDAVWHRALEGADEGEPLRVVMEPTGLAWLPVASYFIQRGATVYLVNTQQVSDLRKFYSKHAGSDRISARVLARMPWVNPDGLHPLSLADADHLSGQRWCKQQEELAERMTAIKNRVQAWERAFWPGLEEVVGDLFAPWVRRWREVWYDPWQLQGVETEPLAAFLVEAGADAEEAEGLAAGLQAVARRAVALFGTSQGGPSPYVDYAALQDQVLRELRLLANYEAEHQAVRRQVQRLYRQVYPGRQLESIKGVGPDGAAIYVFFVGDVERFASQKKFRGWSGLVPGSSQSGSAEKKGLRITHAGPDLIKKYAYINTEVARQWDPQIAAIYYDQMVHKGKHHVQAVCCCATHLLDRVRAVLRDGRPYELRDVDGTPVTWQEARAIIAERYHVPEEVRKRNSQRARKARRDEQAERKRKRRRSRPGR

SEQ ID NO: 429022 - protein, 344 aa, unidentified
MDHSAGLDVSVKETSVCIVDDTGKIVREVKVASEPEALLAVLKNPAYHFKRVGLEAGPLSQWLFSALAEAGLPVICVETRHMRAVLKAQINKTDRNDARGMAQMMRVGIYRPVHVKTLRSQKLRMLLTHRKLLQSKAIAIDNDLRGTLRNFGLKVGMVGTVRFEARIRELVENLPDLAALIEPLLIVRRTLREQFCILHRRLLAIVRDDEVCRRLMTTPGVGPVVSLTYRATIDVPARFRKSKSVGAVVGLTCAKYQSGEVDWDGRISRCGDEMMRTMLYEAAKAMLRSKKWSWLKAWAMQIARRRGMKKAIVALARRLAVIMHRIWVDGTEFRWTREQATTAA

SEQ ID NO: 429023 - protein, 323 aa, unidentified
MSMNPTEPQFNHIVAFEVSKADLAVHTLPADRQQTINNTPAAVRRLLKAEQRANHKLGIGPLLVVCEATGGYERHVLEAAQALGMAVHRAHGSRTRLFARFNGKTAKTDAIDARLIARYGLTPDLPLYDPPSPEQAALRQLRRRRDEIQQMLRMEANRTEHANLKRLRTSLRRHRAWLKDELEAIEAEIEELIGNSPELDRKATLMRSLKGVGPHTAAAILAYLPEIGTLSKATAAAIAGLAPIANDSGQHSGRRRIAGGRATLRASLYMAALVARHRNPTIRAFAMNLKARGKPNKLILTAVMRKLIVILNAVVASGQPARA

SEQ ID NO: 429024 - protein, 431 aa, unidentified
MLKINPLSTLYVGIDVSSKSNYVCALDFYKNKYINSSFANNQPGAEELALKILECLKEHPDITTIVAALESTSVYSIHIANYLSSCEELMRFKPYVFVLNPKCTANYKKSYIGLGKSDPIDAFVIADYARAGNIESEPWRGSQFLALKRLTRHRLHLVKCMTREKTYLVSNLYLKFSELQMLEGDDQPFCDIYGATSSSVLMEYFSPEEILDSSEEDLIAFLAKKSRNRIKDISKTADLLKKAARDSYRLDKALYEPLNVSIASSFNCIETFKREIKVIDNAIEKEIKGLNPNAFIILQSIDGIGPVFAGGIIAEIGDITAFHSSDALAKYAGLTWKSNQSGDFDGEDTPMIKAGNRYLRYYLGEAANSMRKHNVEYGTYYRKKYNEVPKHQHKRALALTSRKFVRLVYGLLARNQLYSGVSLDTSIKDSN

SEQ ID NO: 429025 - protein, 444 aa, unidentified
MAFSGMILIREVADAPVIMGISKPAGLKSPRGEVKSVNPLFVGIDVSSKNNVAYLMKPDGSKHSSFSVQNNLGGAKLLSERIVSALSSMRLSDVVIGLEATSIYGDNLVYALREDGGLGRFRRKIHVLNPKQVKKFKEAYPDLPKNDWVDAFVIADHLRFGRIAKEVYMDDYRYQALRTLTRARFDVIQNLTREKQRFANYLFLKCSGMAQDKGIQNTSATTIALMERFETVDNLANADLDDLTAFVAETGRGRFADPESTAKAVQAAARGSYRLPKTVNDTVNQAMAVSIASMRALKEQVKVLDKAIEQQFEIIPNTLTSIPGVGKVYSAGIIAEIGDIHRFASQASVAKFAGLVWTQHQSGEFEAEHSRMIKSGNRYLRYYLLEAANSVRRCDSEFRRYYDLKFKEVNKYQHKRALALTARKLVRLVFRLLKDNRLYIPPEG

SEQ ID NO: 429026 - protein, 356 aa, unidentified
MYGLKHQKEKRSMEHFAGLDVSVNETSVCIVDETGKIVREVKVASEPGALLTVLNSGAHHFKRIGLEAGPLSQWLYSALGEANLPVICVETRHMRAVLQAQINKTDRNDARGIAQMMRAGLYRPVHVKTLRSQKLRMLLTHRKLLQSKAIAVENDLRGTLRNFGLKVGIVGKLRFETRIRELVENLPDLAILVEPLLLVRRVLREQIAVLHRRLLVIVRDDDVCRRLMTVPGVGPVVALTFRATLDVPARFRNSRAVGAALGLTPCKYQSGESDRTSGISRCGDEMMRVMLYEAAQVMLVRSTRWSWLKAWAMQIARRRGMKKAIVALARRLAVILHRIWVDGTEFRWSRQEAAAA

SEQ ID NO: 429027 - protein, 446 aa, unidentified
MNDRSDLSRGDRNRNEKLARMRGLLPLTNAIVGIDLADHQQAAVVTDHDSRVFARRKLSCRPWELGDLLEWARAKAQDAGFTSVTVACEPTGHRWRVLDQLATQRGLSLVCVQPLLVWRAREAEDLTWDKSDPKDAVIIARLAAGLRCYVPERTTATWARLRHLGARRVHLTTDATAGVQQLRDLLECVWPAALSSSGSPFRSRSWCASMTVVLDRADGDLSRVRRLGRARFVAVVRRELPRWGATRPCLRIVNAVFDALADPVGVVAHRPGGLERAQLVLADWAHTRRRLTEVEARMVAVLDELGLTELVTSIDGLTAVGAATLLAETGDLTRFRSPRAVVKHAGLCPRDNTSGTYQGKTSLSGRGRPELRLAAWRAVWAALPNNSVLAARFHHLTTREDNRLARQQARAACAAALLRWLHVVVTGGVRWDPVIATGRSTARAAA

SEQ ID NO: 429028 - protein, 360 aa, unidentified
MKKVSKQMRKMEASDKPEMTLGLDMGDRYSHYCLLNQQGDVVEEGRMQSTEGAIRRHLEGEPSMRIALECGTHSPWVSRLLKALGHQVIVANARKIPAITGSESKNDRNDAEKLARFAAYDPKLLSPLQHRSLGRQLDLNLIHTRATLVRARTMIVNALRGLVKSAGGRLPTCSTESLPARAADAIPPALAAVATPLLEQIALLNRQIDGMDKQVEKLAVKYPEIVLLRTAPGVGPIVAAAYVLTLDRPDAASNRSAGAFLGLRPGQSQSGDSDPQRRISKTGDSCLRSLLVQSAQYVLGPFGPDSELRRWGLKLATSGGKRGKKRAIVAVARKLAVILHSMWRSGQRFQPFPQSAAVAA

SEQ ID NO: 429029 - protein, 386 aa, unidentified
MVFVGIDVAKDKHDLYAVDSDGVVLCDNFTFANSAAGFASLLERISVWGKIKVGIEATGHYSSNLLSFLKAHDFEVVVFNPLSVSRLRSAASLRKTKTDKNDSRYIARLLLTGVANPYQSQSYNISVLKSMTRARFRLFQEIQPLKNRFRRLLHVLFPELQGFFSNLYGNTSLNLLSVLPSAKDIAECNILKLTKILSEFSRGMLKRGRAEQLKSLAQNSIATYNYGDAFELKQTVRRIQFLSSQMSEIESEIDSVMAVLNSPITSIPGIGNLLGATILSEIGDIKNFDNPDKLLAFAGCEPSTYQSGKYTATNTPMVKHGSRYLRRALYCAADMAYVNSPSFRSYIDRKRAQGKHYYVAMSHGMKKLVRIIFAVLSRNIPFSEPA

SEQ ID NO: 429030 - protein, 326 aa, unidentified
MQRKEAIEQESTTQSSIGIDVCKGWLDVHVVPGDHRLRVPNTRQGLSQLKRWLKRFDVAVAVVEATGKWHRAVQRSLFAAGLPVAVVDPYRVRAFAKAQGLFAKTDRLDARMLAQFALVMNPAVRAPAPQALEDLGELVTARDSAVAEQTMLKNQSAAARTAFLRRQLKRRMAQLAKHIAALDGEIARLIAADPGLARRYAILTSIPGIGPVVAATLIAGLAELGSLSAKQAAMLAGLAPVADDSGERQGMRIIRGGRAGVRRALYLAALTASHWNAELEAFYDRLVGKGKSAKLAVVAAARKLVVLANTLIRDNRMWEPVAPHHA

SEQ ID NO: 429031 - protein, 402 aa, unidentified
MIFINCLGIDIGKSESVVAHYKDEVLVKEMVIQNNQNGYRYLKNYIKHLDSLFILFESTGIYSRGMKRFCEIHKIDYLEMNPLEAKFKTSSLRSWKTDKSDAHKLALLAFRMKDSKVQRQSEEIYFELRERARFHLEMEINQNCLKVELVETLHQTFPGLEKLFTNRYSKIALSIAKAFPHPDFVSTLTHDELVEKVLHSTDKGISVNKAHKYVQKLIEIQINSFPNVDKSSFLLQKVQYLCDKLLIGIEEMKEFDQEMIDLAKNTTEFENIISIPGIGELTAALLIGELGNIREFKTNKQLNAFVGIDIKRYQSGTSKSRDTINKRGNKKARRLLYLIIMNIIRGRNHYQSHIVDYYYKLREQPHGKTHKTAVIASINRLLKTIHYLIVNNKLYDYQKAPH

SEQ ID NO: 429032 - protein, 359 aa, unidentified
MNEITTVGVDLAKEVIAVCAADRSGKSVFTRVLRREAFAAWAVQLPPCVFGLEACGAAHHWARWLASHGHTPRPMAAEFVKPFRKNRAAKNDRNDAEAVLTAVRQPNMRFVAVKSVEQQACLSWHRMRQGFSEERTALINRLRGLLGEFGIWRGRSAEVLTRALPELEQDEALPMMVRRLLTEVQPHLARLDEAIAACEVEIKNHVKGNAVAKRLTAITGVGPLTAAAIIATVTDARDFQNGRQFAAWQGLVPSQDSSGGKTRLGHITKRGDTYLRGLLTQGARSALQAALTKEPLRRTRLQSWTVQLHARVGYHKTLVAIANKHARMIWAILAKGEDYDRDAWRRWSRSSPATSSVTP

SEQ ID NO: 429033 - protein, 342 aa, unidentified
MEVSTIGLDLAKHVFQVHGVDVDGKVIVCKTLRRQHVIPFFRKLSPCLVGIEACGTSHYWARELSGMGHMVKLMPPAYVKPYVKRGKTDAGDAAAICEAVTRPNMRFVAVKSVDQQAALSLHRTRDLLVRQRTQSVNMIRGLLAEFGIVMAKGVWNALKLAERIVKGECLELPPAARQSLCHLAEQAHALHRRITEMDRELQAWSRRDETAKRLQTIPGVGVLSSSALVSSLADPHQFRSGRQFAAWLGLTPLARSSGGKERMGRISKMGDGYIRRLLVSGMMSQLRWAKTHPAEAPPWLVSLLERKPTKLVAVALANKTARIAWAVMTRGETYKAPRPAAA

SEQ ID NO: 429034 - protein, 411 aa, unidentified
MDKVYDKCCGIDLHKKLIVACFKQGNKQEIRDFGATTRELLEMADWLKEGGCEMVAMESTASYWKPLYNILETCELKAMVVNAQHMKAVPGRKTDVKDAEWIADLLQHGLLTASYIPDKDQRELRELVRYRKSLVGERARELNRLQKMLEGANIKISGTIRDINGKSARNILEHLLSGRQIDSAEYDILYEKKVIAHNLKATKEQIIDDLNGVMSALQKKMMRILLNHLDELNAHIRELDDDIDNFMKPEEKEAAKVIQDIPGIGNTSAQAIISVIGADMSRFPTDAHIASWAGLCPGNNKSANKRKSGKTRKGNGLLRDTLIVCAHSAVKNKSSYFHAQFARISAHRGSKRAYVAVAHSMLVAIYHILKDGVVFRDLGAEYYNQFNRERKINAYLKKLKALGWEVPVVAA

SEQ ID NO: 429035 - protein, 423 aa, unidentified
MDVSYGNVPEGAVWAGIDTHADTNWLSVVDARGRELRSEQLPATADGCRQAAEIILAMGAPVSVGVECTGSYGAGIARELSARGIRCYEVVTPGRPGRGRGCSKDDAADALRAALQALSGRDLAVPKARNGWVEGVRALCVVRESLVRACTSYANLGIAIVREAPDPVRSAFAGLGAAGIMRRCASSGMPAGCSGVAGAVMLALCRLSEAWLQAKKSADELERRIAEMVRAGNPALSSMYGCGPIAAAALAIAAGDNPERMHSEAAFAALCGVSPLRASSGKTRRHRLSRGGDRRANRALHVIAIHRMRTDPRTIAYAERRRREGLSDREIRRCLKRYIAREAYRCLMHPFDLGEASAGPELRYERIAAGVTQKAAASALGVTASTLCDLELGHHQFRELAQRYRRWIDDGFPMDPDKGPNGD

SEQ ID NO: 429036 - protein, 343 aa, unidentified
MEYYVGLDVSLKLTSICVVNQTGSIVQEGVVDSDPEAIASFVRSRAPGAARIGIETGPTTTWLWTELNRLGLPVICIDARHAKAVLKMQINKSDRNDAAGIARIMQTGWFKVVRVKDLDSHAVKALLASRALLVKIKRDLENQVRGLLKNLGLVIGRAKFNVFAVRAEELIDGRPELVAAVRPLLEARKSIEHQVDDLDCKVRKLARNDVQVRRFMTVPGVGPITALCFKATIDDPTRFKRSRSVGAYIGLTTRRHASGEIDWSGRISKCGDAMLRMYLFEAAGVLLTRVPKWSGLKAWGAKLTKRNGLRKAKVAVARKLAVILHRMWIDGTEFNWSTKKAAA

SEQ ID NO: 429037 - protein, 432 aa, unidentified
MDQVVERPGALDVHKAKVTACVRTPDRSGGRGQEVREFKTTVRELLALRDWLAGLGVTHVAMEATGVYWKPVWAVLEDEFELLLCNAAHVKNVPGRKTDVGDAQWLCQLLEFGLLRGSFVAPRPVRRLRELTRRRRTLVRERSQEANRLHKALEDTGIKLDCVASDILGVSGRAMLDALLAGQRDPAALADLARTQLRGKRELLIEAFEGVRFNADHALLIGGILRHIDFLELEIAALNDAIETHLKTATDPEGQTVAFDAAVTLLCSLPGIAARGAQMMLGEFGTDMTRFPTDKHFASWAAQCPGNHQSAGKRKSGRTRRGPTWLDSALHDAAMGAIRAKDQHFERKYRRIKARSGHKIAIGAVKHAILIALYHMLTNGELYRPPTPNPEAERKQQQRTTQRPIAQLERLGHTITLQTATPTPTAQTAVAP

SEQ ID NO: 429038 - protein, 410 aa, unidentified
MELQIQRGCGLDVHQATVVACLLTVLADGKVKKQIRAFGTTTRELLALSQWLQGEGCTHVAMESTGVYWKPVYAVLEGTFELIVANAQHIKNVPGRKTDVKDAEWIADLLLHGLLRPSFVPPKPIRELRDLTRYRRKLVESRSAERNRLLKVLETANIKLASVASDPFGVSGMQMLTALAEGKATPSEMAGLAKGRLREKIPQLEPALEGRMEEHHRYLLKLQLRRMRDLDQDLAELEERIQQRLEPYREQLQLLEEIPGVDWTLAAVIIAELGVDMKVFPTASQLASWAGVSPGNNESAGKRRNARVTKGNFYLKTALVEAAQAATRAKGTYLRDKYYRLKARRGSKRAVVAIGHKILVAVYHMLSDQVSYNDLGDLYLDRLNKEHLTRNLVRRLERIGWRVTLEKAAA

SEQ ID NO: 429039 - protein, 314 aa, unidentified
MSEQTRVAGIDCGKDFLDIDVFPGAAPLRVVNSSQGHQEVVAWFTERRVTVAGLEASGGYERPIRDALRMAGIEVRIFDPARVRFFAKAKGRRAKNDSLDAAVIAEFTASQTTVPSLLDDPVREELAGLVKARRLLVDKRADLNKSIAHAPVAAQEVLSRAVEYLAREVDALDAAICQAAKAQPVLSQTIQTLQTAPGVGPVTAATLAALLPELGRASGRKIAALVGVAPFDHDSGKMRGHRHIAGGRADVRRALYLAALSAATNTKGVIADFYNSLIERKKPSKLALTACARKLVVRLNAMLAKGATWEANPA

SEQ ID NO: 429040 - protein, 422 aa, unidentified
MKIVHKICCGLDVHKNLIVATIAITNQEGITNYLQKSFSSQNYDLFNLKSWLKDNNCFDAAMESTGKYWIPIFNALENDCNVFLANPKYVRGIRGNKTDKRDALWLCDLHKHGLVKNSFIPPKQIRQIRDLMRYRFKLTNNASSEKNRAQNCLTVSNNMLSSVVSDTFGKSSRSIIAKLLENPEDTGFDVVPMMHGRMKATPEDVSRAIQGNIDSAQATKLQVCLDHLDNITSHKTVVEEKAMELAAPYGRQIEQLLTLPGISDPLTAIAIIGEIGIDMSVFLSVRHFCSWAGVVPANNESAGKKKSVRCARAGVYIKPLMVQVAHAAVKSKKCPYFAARYNQIARRRGKKKAIIAIAHMLLVCVFHMIARNENFKPELYTLQENQKPKSKPELTIDKARKFLELHGATVTMPDIVTLDAAG

SEQ ID NO: 429041 - protein, 417 aa, unidentified
MAESNDTPEPISAFVGIDWADAKHDIYLHPADGSTASHEVIDAKPEALHDWILKMREHFSAAGKIYVCLEQSKGALIHQLMQYDFFVLYPINPKTLARFREAFRPSGAKDDRSDADLLCELVRLHTHRLRPWKPDDEQTRKLNAFCQNRRQAVGSAVRLLQQVREQLKLYYPLALELELNTVLACDFLQRWPTLEELRQAKPQTIRKFFYAHNYRRGDKIEQFVQKLQKQTPVTSDRAIIEPAAMQVRLLAAQLRVILNSIPEFDQTIAEIFHSHPDAAIFESFPGAGPQLAPRLLTAFGTDRDRLESAEQMSVISGVAPIKIASGKSFATHKRWACPKFIRQSFHEFAGCSIKFCAWAKAFYQAQRDKNKGHHTAVRALAFKWMRILFACWKNRKPYDDALYTGALQKKGSAFASP

SEQ ID NO: 429042 - protein, 438 aa, unidentified
MEERKTADHPSVFDYPEYCTPVGIAAGEESRKQHKGGTKRFVGVDLSKQNCHVCIIDRQGMVVLHEGYSLRSSKRDRLYEVLEEGDLVLMEASTGTFNIARTMNKLPGVVACVVNPHSTRINQTKKKTDKEDSLFLARLLLRTPVEELQLVSIPSDREMTNRDTISHYRSIDRSHSQIINRLHALFFDKGFPEVGKVHKLHTKGGRAAAIEACFGTDRSLAPSKRIAKELSMQLTLLEELQERGEKQLAKIVRSDDRTATLLGSIPGVGLKTIASFIAFVGDIGRFHSAKQLAAYCGLVPRVYQSGQRDAARKITKEGQAALRGYLIESVFAMMRTSFDFPLKRKYEEFRERMGARKAAVAIARKLVTMMYSMLKHGTIFTVGDIAERLEVAAYHARKDLKAIGRYNIIRQSCKAYPEMLDLTNSMITNELGVFKFPD

SEQ ID NO: 429043 - protein, 328 aa, unidentified
MGDIITIGLDLAKNVFQVHGVDEAGSVVVRKWLRRGQVLAFFAGIPPCLIGLEACATAHHWARELIALGHEARLMPPNYVKAYVKRNKHDVADAEAICEAVKRPSMRFVPLKTAEQQSVLMMHRARDLLIRQRTMLVNALRGHLAEFGLIEAQGLHKVARLITIVMDEMDGRVPDIARQVLKVIVSQIEDIRRGIAELETQVLAWHKNNPVSQRLATIPTVADPNTFRSGREFAAWLGLVPRQNSTGGKARLGGISKRGDSYLRRLLVNSAHTVLLCSKAAKTDPWLISLLRRKPRLVAAVALANKTARVAWAIMSRRETYRHVAAAA

SEQ ID NO: 429044 - protein, 444 aa, unidentified
MGKRGKNSVRYVGMDIHKEMAVSCIVDEKGKVVQRHRCRCTREELEQFGRRYLQAEDKVAVEATTNTWEVVGILKSFITEVVVSNPLKTKAIAEAKIKTDKVDAEVLAQLLRCDFLPRVWEPPVATQALRRLTARRAALVMDKTAIKNRIHAILHQRLIPCPFSDLFGIQGRQWLQTLSLDTDGRASVDSDLRLLVSLEAEIAQHDQELATVACAEPRVKLLMTLPGISLTVAQTLWAVLGEVDRFRDADHAASYLGLVPTTHQSGKHCYHGPITKQGHRQARALLVQAAQHVRTHPGPLGVFFQRVAKRRGYNVAVVATARKLVVIAWHMLKANEPYRYAQPHTVEAKLEQLRVTATGEKRKRGYAKGTPRPATYGSGQRVQRIRSLHQVCERTALPPPKGVAALPLAERRMLEQSGTLEFVQAIQHEKLKIRQVKKEGTRSE

SEQ ID NO: 429045 - protein, 336 aa, unidentified
MKNYVLFTGIDVSKDKLDICYVDKNGNVLGSKVIDYKPKNIKSIVKDLERLGYNLTQTLICFENTGVYSIKLGEVLSELNAYYSEVSALEINKSKGITRGKDDKTDAKMIALYALRNIDKIVLSKVTDKAIQELKLLFAERKKIQKSITSLKMTQENEGRVNSKAYESVHKINQQTRVALKNSLKAIENEIERVFKEHPELKKNRNLLKSIKGIGTIISAYLVMITHNFTKFKNSRKFACYSGIAPFEHSSGKSVRGKTQVNHFANKKVKALLSMAVQSAKKYNSQIKAYFEKKKEQGKHILLISNNIKFKLVNIAFAVIKRGTPYVDIYKYATVA

SEQ ID NO: 429046 - protein, 320 aa, unidentified
MTSNSVPQWVGIDVSKAYLDVYLRPQKQAVQFPNQASGIAALIQYLQAFDVQQVILEATGGLELAAAQALQASGYGCSILNPRQARDFARASGKLAKTDRIDAAVLAHFGAAMQPAVTVLTSSDQQALQALVTRRRQLVEMLSGEKNRLSSTQGKMAEDIETHIKWLEQRIRELDAAMAQLIAAQAQWQAECALLQSVPGIGKVIATTLVAELPELGHLSDKRLSALVGVAPLNHESGNYRGRRMIWGGRARVRAVLYMGALVAVRHNPVIQAFYTRLLAQGKAKKVALVACMHKLLRMLNAMVRDNQFWNPPPISCPAA

SEQ ID NO: 429047 - protein, 456 aa, unidentified
MRIAGIVNGSIGGKATSLVIRVPHVLARESDQSRQVSKESKLAIVFCGIDWAERHHDVALVDAEGKLVAKRRIAESADGFAELTAMLADAGDSREAPIPVAIETPSGLLVAALRETGRAIYAINPMAVARYRERHTVSREKSDHADAMVLVNILRTDAHIHRQLPVDTELARAVAVLARAAQDAVWRRTRALQELRSLLREYYPSFLAAFHRSGATNLAGPEARQLLALAPTPAAAAKLTPARIASALRRAGRQRGIDALAAEIHHAFQVSQLRQLPLIEEALGRQALALLATLNAECDNAEQLGRAAVEAFQQHPDHAVITSFPGMGELSGARLLAEIGDDRARFADARALNAYAGSAPVTRASGRSIAITRRLVKNDRLNAVGFLWAFAAIPRPGPAKDHYDRRRACGDRHAAALRHLFNRMIGQLYHCLHTGQTYDPIKAFGGPAHHTEPVAA

SEQ ID NO: 429048 - protein, 377 aa, unidentified
MAQLLVGIDPHKRSVTVGVIDPVGVAVATASFDNRSEGIAALLAWVARLPGQVLRVGVEGSAGHGRHAAVALVGAGYDVREVPARRTAQRRRARRRPKTDIEDAVAIARATAAEPSLGPVKPGRSHSAAHEELAVVRAHRTMLVGRRQVMLNHAEAVLAALPHEYTDTLPAAKKVWPRLTALTALAGPTASRLGRSASASASAAVAAQLALLVELHGDIGELDRRIRKLDKRMAELITACGSTLLDEHGIGVVGAAALLVEVDDPTRFRSESAFNRWWGGAPVAVSSGEGHQTPVRHRLDLLGNRTINQVIYTMSITQSRTHPDARDYLARKRGEGKTPKEARRAHKSLLGRRIIRRMWNDHHRQHKTPTTPQPDAA

SEQ ID NO: 429049 - protein, 336 aa, unidentified
MDRRYVGIDLHRRRSVIYAMDGEGDRLFCERIDNDALRLLEVVSAAGAGAEVVIEATYGWYWAVDLLRDAGFSVHLAHPSGNDWGKRRVKNDERDARDLADLLRLGRLAEAWIAPPAVREARELVRYRARLVQLRSGLKAQVHAVMAKEGVLPGVTDMFGPKGQQLLDAMELGDAYQVRVESLRDLIEVYDREVASLERRIHELLRDDRGYQAIQALDGVGRTLGAIFVTEIGDITRFRSPEALCSWAGLTPRHRESDTKVVRGKITKQGSKLVRWAALEAIVRYHGGPALRDGFHRIAERRGTNKARIATARRLMTLVYYGLRDGEIRCLQQAVA

SEQ ID NO: 429050 - protein, 407 aa, unidentified
MDQQTSTRVGGIDWATDEHAVCVVDETGDIIDEFVVGHTAAGLHQLCRSLRRHGVGRVAIERPDGPVVDALLSDGFEVVVLPSRSVKAFRERYALSGSKSDRGDAFVLADCLRSDGHRWRSLQPDTPATVTLRAHVRARRDLVDARIAVANQLRAHLLINFPAAVGLFSDLDGQTSRRFLRRFTTCDHLDWLTEKRLANWLRSAGYNTRRAPAVLYNHLTAAPDGTRGVEGEARACVTLAYLNVIESIIEQTTVLEKRMAELLDRHPDAHIFRSLPRCGTIRAATILAEIGDCRARFPDAESLACLAGVAPSTRASGKHRAVTFRWTSNTRLRNALCSFAGDSRNGNDWAAHRYRQLRADGKRHPHAERILARTWSHIIWRCWQDNRPYDPTRHRALQQLQTAPGLT

SEQ ID NO: 429051 - protein, 404 aa, unidentified
MNAVGIDVSKGKSMIAIMRPLGEVIATPFEVGHTAAELNELAKFILKISGETRVVMEYTGVYFEPLARALYDAGLCVCVVHAQLIHNYGNNTIRKVKTDKADAIKIANYALDNWNKLKPYAPIDEVRRQLKAYSRQYRKFNKLKTMLKNNFIALTDSTFPGVNELFSSPPRKSDGHEKWLDFAMKFWHAECVCSLSQKAFTERYRKWCHNAGYYFLESNAEDIYAAACGHIGLLPKDENTKQLVQQTIIQLTSICSSLSVIENKMTELAGLLPEYPIVMEFRGVGRILGPQIMAEVGDVLRFEKKESLVCFAGLEAPPYESGKFESHNRTISKKGSPHLRAALFQVMDCLVKTQPVNDPVFQFIDRKRSEGKHYYSYMCAGSAKFLRIYYARVKEYLTTLEQNT

SEQ ID NO: 429052 - protein, 353 aa, unidentified
MIVIGIDPHKSTHTATALDSATNTDLGSIRIDASVIEYKRLIVWAKAWPDRRWAIENADGLGHHLALWLLALGEVVHDIPTTATARVRELSRGGRRKNDRIDAAAAASVAALHGDARQVYPETVNDALALLDERRVNLSSSRTRTVNQLHALLRELMAGGAPTSLTPKKAAAAIRGFRARTAPDKIRLELAKELITDFARFDEQLAANSRKITALLDEHGTHLRNIDGVGPVLAARILGRSGRASRFPTAAAYASYTGTAPVQIASADSSHHRLSRFGDRQLNSALYTIAMIQIRMPSSTGRAFYDKKIAEGKTPRTAARALKRHLATHLWRVMLADEKRGIRAISRESLTAA

SEQ ID NO: 429053 - protein, 330 aa, unidentified
MHQVNLSGIDVSAASLSVELKNHGGQCRKATFDNDPVGHRKLIAWSTKRGAQARVCLEATGVYSFDLALALSRHPQTEVMVVNPRAIKAFAVALMQRAKTDIVDAGVILSFLERMPFQPWQPPGEEVLQLQALTRRIAQLKVIVTQEGNRLHADHHRQVLSRQISQDIQLHLRHLQRRIEHLEAQALQVVQGRPQLQEKFTRLISVTGIATTSALNLLAELLVLPEDLQPEQWVAQAGLDPRPRESGTSVHNPRFISKAGNKYLRAALYMPALVAAQYQPNVKAFYQKLVRAGKKKMQALVAVMRKLLRCLWGMLKDQQDFDGNKFYQLT

SEQ ID NO: 429054 - protein, 377 aa, unidentified
MTTTDAATEARETVYVAIELSKKTWVLGIAHPDRDRPSIHRVSGGNIAELVSRLRVAARNNRRILVCYEAGYDGFWLARALAKMGIECRVLDPASIQVNRRARRVKTDRIDVLALLRALIATDRGERHVCAIVRVPSVEEEDARRSHRERQRLVRERTGHINRIKGLLFAQGIRDIKPKLRRSRIDFAALETAEGHPLPDRLRRELEREYARLSLIATQLREVEKERDTADAQDPVVEQRRQLLVALHGVGATSAAILAREVFARSFASRRQLGSYLGLTPSAYDSGSTTRCQGISKAGNSWARRILIEVAWLWQKYQPASPLSIWYIQRTAGQSSRIRRIMLIALARKLAISLWRYVETGLVPEGVAIAKAKPRPA

SEQ ID NO: 429055 - protein, 429 aa, unidentified
MRTESTPGARGPVFCGVDTHADSHWLCVLDWRGRKVLSRQFPADAAGYEALAGAIAAAGEPACIAMEGTSSYGAGLTRHLASLGMPVREALSPARMQRRRPGQGKCDEADAERAARAAMSGSKLGTPKSQDGWVDGVRCMLAARSGAVKARTSAINTARSLLTTAPEGLRSRFRGMGGPRLMEELPSVRAEGALGAALGALADLWAAARDAALDMERAIEASLEENCPALLAMYGCGPVSAAKLAVAAGDNPGRLRSEASFAAICGACPIPASSGKTVRHRLNRGGDRQANSALHEIARQRVMRDPETAEYAERARERGKSDREVMRCLKRYVAREAYRALMHPHEIRRPEDASELVAARRAARVSQVRAASILGTSEKYISMLERGQRELKPIRRAYEAWVEAGLPLDWDRQAFEAERKMDSKKGLAI

SEQ ID NO: 429056 - protein, 352 aa, unidentified
MEIIALDAHKRYSQVCVQQKDGRLLCEKRIEHSKGRISDFLSDWTAGTPVAVETVGNWYWIVDEIEQAGMEPRLVHALKAKLMLGSINKTDKLDARGLNRLQQAGTLPTVWIPEGDLRDKRELPRTRMVFANLRTRLKNRIHSVFDKYGLSADFQGISDLFGSRGRAQMAVTMKHLPHETCYTLQGLLHELDEIGRQIERIEKRMKQVFSKTESVKRLMTLPGIGFILAVTIVNEIGDITRFSTPERLASYAGMVPSVHSSGGHTRYGKLRSDVNHYLKWAYAEAGNSTAVNHKRFPQRHTSRLYLRIRDKKGHAKAVGAVGRHLAEASFWVLTRSEDYQEPKSKSFSSTVV

SEQ ID NO: 429057 - protein, 338 aa, unidentified
MRAYAGIDLHSSNNYIGIMDQDYKRLFGRRQPNDLNNVLKVLEPFKADLEGVIVESTYNWYWLVDGLQEHGYTVHLANPSAIKQYEGIKHTDDKWDSFWLAHMKHLNILPEGYIYPKEQRSVRDLLRRRLFFVRHRTANILSLQSTITRNLGIKMSSNEIKKLNMDDACDLFDSSNLVFMAQNNISTIKHLGKIIKGIEKEVKSQGKLRKEFVMLTTIPGIGLILGLTIMLEIGDIGRFFKVGNYSSYCRCVGSKRLSNGKKKGENNKKNGNKYLAWAYVEAAHFAKRHIPKAQRFYQQKMAKANGAVATKALANKLARASYFIMRDQVPFDEDMLFK

SEQ ID NO: 429058 - protein, 344 aa, unidentified
MEHFAGLDVSVKETSVCIVDDMGRIVREAKVASEPEALLAVLNNPSYRFRRIGLEAGPLSQWLYSALGEANLPVICVETRHMRAVLKAQINKTDRNDARGIAQMMRAGLYRPVHVKTLRSQKLRMLLTHRKLLQSKAIAIENDLRGTLRNFGLKVGVVGAIQFEARIKQLVENLPDLALLVEPLLVVRRVLREQIAVLHRRLLDIVRDDEVCRRLMTIPGVGPVVALTFRATIDVPARFRNSRAVGAVLGLTPCRHQSGESDRTGAISKCGDEMMRVMLYEAAQILLVRSTRWSWLKVWAMQIARRCGLKKAIVALARRLAVIMHRIWVDGTEFRWARQAAAAA

SEQ ID NO: 429059 - protein, 334 aa, unidentified
MKKDHYIGVDISKKTIDVAIFVKDTHRSTSLPHESFQNSEEGFKDMKRWLRKQNVALSKSLVCMEATGTYTYELCLFLERQGVSYSVQSPLHLKRSFGLTHGKNDKVDAARIAYYAYLHRDDIKLSKLAAESIRRLKSLIAERKSLVVEIARCKTQLKEAGEHAPSLGTIKRTESLQKFLEEQVGAIEEEMDQTIETDESMNTNYHLLLSVDGIGTVNAINTIIATHNFEMFDNARQYASYIGVAPFEHTSGTSVRGRTHVEPGAKMLKADMSGAVRTCINHDKEIKHYYERKMAEGKAFGVVANAIKFKLLLRMFAVIKRQTPFVRKPDFIFN

SEQ ID NO: 429060 - protein, 288 aa, unidentified
MKIQRTSVGLDVHARSVVGCGLDGDTGEVFERRLTPDRGEIAAWLRDLPGPVAVTYEAGPTGFGLARALDAAGIACVVAAPSKLIRPTGDRVKTDARDAAHLARLLHLGQITEVTVPSIEQEAARDLVRAREDVRGDLMSARHRLSKLLLRQGIVYCGGRAWIREHQRWLRRQRFDSAALQLAYDTAFDAMLATLERRERLDTAIAEMAADSRFTPVVTRLGCLRGVSTLTAFGLAVEIGDWSRLTGRSIGAYLGLVPSEYSSGATRTQGAVTKTGNGACHEFCVSQR

SEQ ID NO: 429061 - protein, 402 aa, unidentified
MNAVGIDVSKSKSVVAIMRPFGEIVSTPFEIKHTASDIHSLIELINSVEGESRIVMEHTGRYYEVLAHQLLEANLFVSAINPKLIKDFDNDSLRKVKSDKADAVKIARYALDKWQNLKQYNVMDELRNQLKTMNRQFGFYIKHKTAMKNNLIGILDQTYPGVNTYFDSPARSDGSQKWVDFASTYWHVDCVRKMSLNAFIDHYQNWCKRKKYNFSQSKAEEIYGKAKELVPVLPKDAITKLIIKQAVDQLNSASTTVESLRTLMNETASKLPEYPVVMAMKGVGTSLGPQLMAEIGNVSRFTHKSAITAFAGVDPGVNESGTYEQKSVPTSKRGSADLRKTLFQVMDVLIKTHPQDDPVYQFLDKKRAQGKPYYVYMTAGANKFLRIYYGRVKEYLASLPES

SEQ ID NO: 429062 - protein, 443 aa, unidentified
MNSHHPFDLVIGLDRSDRKADLYLIDTRTSHSRKQIIDTAPERLHDWLAQLRQEYPCARVALCLEQPATNLILFLENYSWLTLYAINPITLQKFREAFVTSRCKDDGKDAYYLAELLLTHHSKLKPWQPDDSQTRQLQQLVLHRRAVVNERTGLSNRLKALLKQYFPQALELCGDDLWRPLATAFLLKWPTLQALQKVKPETIKEFYYLHGSRSQKAIEQRLELMAKAVPLTDELPLLETHTLRVHLLCRELLLLHKTIVQFEKKIAAVFALHPDKDIFASLPGAGPVFAPRLLASMGSERERFAKASNLQSMSGIAPVTKQSGGKCYIHRRYLCPKFMKQTFHEFANESILHSRWAAAHYWQQRQKGCGHHSAVRSLAYKWQRIIWKCWQTRTPYNEQHYEAALQRNGSPIVTLFDQIEVGKSPLKTAANKSKKSLVGLPQR

SEQ ID NO: 429063 - protein, 370 aa, unidentified
MREASTFVGLDVHKHTISVALLRPGQSPLEWSLTNETGAIVRLIRKLAREAEGALRSCYEAGPTGFVLQRQLVQAGIDCRVVAPSLIPVKPGARIKTDRRDARKLAELLRANLLTEVKPPTEEEEAVRDLTRSRDDAQRDLTRARNRLSKFLLRRGCVYVVGRKPTWSAKYRAWLRALTFPRRADQIVFEDYLLAVEQVEGRLLGLNQAIEGVAQEQPWHERVQALRCFHGIDTVTAVALVAEIHDPQRFPHPRQLMSYLGLVPRENSSGMRERRGGITGTGNRHVRRLLVEAAWHYRHKPVVGRSLRLRRREQSPKAIALADRALRRLTLRQRRMLYQGKHPNLVNIAIARELAGFVWNVLHPATPATA

SEQ ID NO: 429064 - protein, 466 aa, unidentified
MQPNRRRSLGKPRVSPTVFDRLNPHVAGIDCGSGEHYVAVPPDRDPHPVQSFPTFTSDLLRLADWLAACRVTSVAMEATGVYWIPIYEILDARGFEVLLVNARHFRNVPGRKSDVSDCEWIRELHSVGLLRGSFRPTDAIVALRAYMRHRQTLVESAGTDTQRMQKALVQMNLQLPLVVSDITGVTGLRILRDIVAGQRDPQHLAAHRDARVRASTADIVAALTGHYRPEHLFVLQQNLELFDACQAQLAACDRAIDAHVQTLTAQRPSPVTPLPDPRVTKKPHDNQPRFEIRAPLFQLTGGVDLTQIDGVAPYTALKLISEIGLDMTRWPTEKHFTSWLSLAPKNKISGGRLLSSRTPPSANRAAVVLRMAAMSLGRTQTALGAFYRRLAARIGKPQALTATARKLAVLVYRALKGEFVYRDPGADAYDIQQRARVLRRLRQRAATLGFSLVNRDTGEILAPAIP

SEQ ID NO: 429065 - protein, 351 aa, unidentified
MTRNKRSIIGGVDTHTATHHAAVIDVNGRLIADAEFPTTPAGYASMLTWMRSKGKLGLVGVEGTGAYGAGLARYLHDQGIDVLEVPRPDRRIRRQRGKIDPIDAEAAARTVLAGKASGAPKLADGPIEAIRMLRVTRNGAVQARTATLNTLRSLVITAPEPLRTQLRSLTSAQLVTACAHLRPDLTKLADPGQAAKHALRSMALRAQHLNTETRTLRMQLNDLTQAAAPATSAVFGLGPDTVSALLITIGDNPDRLRSEAAFAHLCGVAPIPASSGKTHRHRLHRGGDRAANSALHIATVVRLRYAPRSRAYADRRTTEGLSMPEIIRCQKRYLAREIFDALRADYAQLST

SEQ ID NO: 429066 - protein, 348 aa, unidentified
MKNQAVQYLAMDVHQATVVATVRNEQGAITMKATVATEARAILSLVRAVGARVMVAFEEGTQAQWLHDLIEPHAEGVVVCNVRGKSELTNKSDRSDADALSELLRLGALKAVYHGAPSMLTLKELVRNYNAVVQDATRAMLRIKALFRARAIPTPGTSIYRASDRAGWLDQLTNPGARVRAESLFKQLDLLRELRPKAKRAMITEARKQSGWRPIRSIPFLGDVRTAQLMAIMATPHRFRTKRNVWPYAGLAVVTRSSADQEFAGGKLRRRNRPPRTRGLNRNHNPMLKSIFKGAANSAAVKPGPLKGIYEACIARGTKPDLAKVTLARKIASIALRLWKKGELWDPN

SEQ ID NO: 429067 - protein, 312 aa, unidentified
MEAKFVGIDVSKLKLDFDCLPVSAPQQFANDAEGIAALVEMLKGSGAERIVIEATGGYETAVASALAVAKLPVVIVNPKQVRDFAKASGRLAKTDRLDAGLLALFGERIMPALRALPDEAQRALGDLLIRRSQLVVMRAQEKARLASVTPISRKSVQQHIVWLDKCIAKLDHDLRERLRKSPLWCQKVAILGSAPGVGQVTTFALLARLPELGQLNRQMIAALVGLAPFNDDSGKRRGARYIRGGRADVRCALYMATLSAIKHNPPIKAMYERLTAGGKPFKLAMTACMRKLLTILNAMLKKNQTWKIQTSS

SEQ ID NO: 429068 - protein, 412 aa, unidentified
MDVFCGIDWAEDHHDIALADREGKLLARRRISDDAAGLASLLALLAEHGDTADDPVPVAIETPRGLLVACLRATGRKVYPVNPMAVARYRDRHSIAGRKSDHGDSFVLANVLRTDLHAHRPLPADSELAQAIAVLARAQQDAVWDRTTAHNRLRSHLREYFPGFLAAFAGSRDGIRRPEARVILAAAPTPAQAAQLTTAQLRALLTKAGRSRGIDAEAARLREAFRTGQMRQLPLVEQAMGRQSLALLRQLDAACTSADDLEAAATESFNQHPDAGIITSFPGLGPLTGARVLAETGDDRSRFQDAKGLKAYAGAAPITRASGKSRSVTQRKVKNNRLASAGYNWAFTALTASPGARRHYDRRRDAGDGHPAAQRNLFGRLLGCLHHCLATGQHYDEATAFPDTPKKLPQAA

SEQ ID NO: 429069 - protein, 360 aa, unidentified
MAQVRSWAGLDVHAANVVAATVDGESGELRFARLSGSTSEVAAFCRALPGPTRVAYEAGPTGFGLARELTAMGVGCVVAAPGKIPRAPQDRVKTDRRDAEKLARLLMAGELHPVRVPATDEEALRDLVRAREDLRGDLMRARHRVGKLLLRHDVRYAGNNWTVAHRNWLASIALGEPVAQAVLEDGLGSIDALLVRRESLERQMTALVPGSPWAQEVARLRCLRGIDTLSALGLCAEIGDFDRFRRPGQLMSYLGMVASEHSTGDKRRLGSITKSGSQHARRLLVEAAWHYRRPPRIGRELARRQDGQPQDVTAISWQAQRRLHRTWQRLDGQRGKRRTIVAVAVGRELAGFCWAVTTAD

SEQ ID NO: 429070 - protein, 417 aa, unidentified
MVNQYPIHPRMTRTYVGCDSHKDSHTLVFLNCFHEKLGEITIGSAPSEFGKFIKRAKKYLLPDTTFVFGFEDVGAYGRAFVKYLIEKGYSVKHTDASKVATERGQVLHKTDSYDAECAGRVLINQFDKLPNANPQNKYWILSNLVTRRNAIVKINVMLKNSLHGALADNYPHYKKFFCRLTNGSSLAFYEAYPSPHHLENVTLEELTTFLQSVSRGRLRESKAEAILKHVKRDKVQKEQYQDTQDFTVRSLIRQIKSNLSELDAIDEQIEKILTHFDYPLTSLKGINSLTAAKLITEIGDIRRFKNAKALAKYAGVAPVTYASGMTNLQMANARGNRKLNEIFFQIAIASIRPMGSNNALINPIFYSYYLKKISEGKTKKQAMKCIQRRLVNIIYNIMKHKRPYINPDLGFLPVEST

SEQ ID NO: 429071 - protein, 343 aa, unidentified
MTKDTMIGVDLAKSVFQVHGASMTGQPKFRKKLSRHGFAEFMAKQPPAIVVMEACGSAHYWAREMSRRGHEVKLIAPRYVKPFVKRQKNDAADAEAIVIAAQRPEMRFVEPKSTEQQSRTILFRARERLVHQRTELVNALRACLYEFGHVVPQGLHQLGKIKGILDEPNSDLPELMRNECGDLMKQIAEKTVRINARTAKIKAVAAEADAARRLQTIPGVGPLTALAVEAFAPPMESFRCGRDFAAWLGLVPRQFSSGGKERLGRVSKAGQSDIRRLLIIGAMSRLNWLGRKSIPEGSWLARIAARKPRMLVAIALANKMARTIWALLTKNEDYRDSAQVAAA

SEQ ID NO: 429072 - protein, 338 aa, unidentified
MNIVFLGIDLAKNVFQLCGLNQAGKPVYTKRTGRKELLQTLANIPACLIGIEASTGAFYWQREFEKLGHKVKVISPQYVKPFVRGQKNDGNDAQAIAVALMQLTMQFVPPKSPEQQDIQALHRARQRIVNHRTATVCQIRGLLLDRGIPIGSAVSRARRAIPLIPEDAENGLSSRMRRTIAELYDLFNDLGRRIHFFDKEIETVFRQSEACQRIAKVKGIGPKTATAVVAAIGKGTEFKNGRHFAAWLGLVPRQHSSGDRQVLMNMTKKGDKHLRTLFIHGARAVVRVATNNNDGHMNQWVNQLKERRGFNKTTVAVANKNARIIWSMLRNDTEYQVV

SEQ ID NO: 429073 - protein, 312 aa, unidentified
MTSEIVLGIDVSKRSLEVKVHGEAKGWKVGNDVDGHRTLIEQMKALQPELIVFEATGGYESRAVKALSEAGFGVAVVNPTRVRRFAEGFGILAKTDKIDAQVIAHFASVVRPRVNSRQTPLEEQLAAYVERRRQLLVELTAEKNRLSTCPDCVREGIEEHITWLEERIESLETNIQVCISSKPEWQERSEVIDSVPGVGVVTASTMVADLPELGHLNRQKIAALVGVAPFNKDSGPKKGKRRIFGGRSGVRRTLFMAALSAIKFNSVIRAFYEKLLQRGKEKKVAITACMRKLLVIINSMVRKGEMWHFSPA

SEQ ID NO: 429074 - protein, 338 aa, unidentified
MTQHKIIGIDLAKNIFFLFEINHKGNNIGRKKLQRTKLLNYIAIQTPCIIAMEACSGAHYWAREFEKFGHDVLLYPPQHVKNQRRKQKNDYNDAEAIAELALYQRAHPVPHKSIEQQDIQSLIRMRRLCVTERTRLINQVRGLIAEYGIIIPKGKASFRQTVPEILEEVENQLSPILRELLSRQYERYLYIEEQIQWFEGKLNQTVKQFDNAKRLMSIPGFGPLTSQAVAVWLGSGQQFKTGRDASAAMGLVPKQDTTGGNVILLGITKRGNTYIRSLLVHGARAALRRAKFKSDKLSKWMLELQERRGSNRAAVALANKLMRIAWAIIAKNKEYQPA

SEQ ID NO: 429075 - protein, 368 aa, unidentified
MPFRIRRESPNSCLGHFVLRRGEPVSARTGLQQQGRRKLLDPTTTAAASPLFAGVDVSKDRLDVCLRWSEPESHEREEAFFVSYDDSGIDALLSRLLEEPTVLVILEATGGFERTVVGALAAAGLPVVVINPRQVRDFARATGRLAKTDRIDAAILARFAEAVRPAPKPLPDREIRALQAIVARRRQLLGMLAAENNRLSSAPKPVAKRIKAHIRWLEKELSRTERDLEAAIENSPALGENEALLRSVPGVGPVLARTLLAGVPELGTLTHKRVAALVGVAPLNRDSGTLRGHRSVWGGRADVRAVLYMGALVAARRNPVVKEFYERLLAAGKPKKVALVACMRKLLSILNAILKHRTPWRPPHYLSP

SEQ ID NO: 429076 - protein, 416 aa, unidentified
MRLEQLLFQIQEVGMISVGVDVSKGKSTVCILKPYGEIVCSPFEVKHVEKELEDLAGLLNKLDGEIRVVMEATGVYHLPILTFLQEKGYFVSVINPYSMKKYAKDNSLRRAKTDRLDSIMIANYGIDRWFKLQKYEGDENTYAELKLLGRRYRYYMELHVKSLQELTHILDYVMPGIKAMFNSWDEASNKDKLSDFVERYWHYDLITSMSREEFTEDYLAWAKEKKYHQSSAKAEAVYEMASDGIPTLSSDTPSTKMLVQEAIAVLRAVDSSLFRIISRMQELAKTLPEYSTVRSMGGVGDVLAPKLIAEIGDVRRLHNAKALIAWAGIDPPPYESGQFVGSQRRITKRGSSTLRKVGYEVMRVLKSHREPEDNVVYNYILKKEAEGKSKKAAKIAGLNKFLRIYYARVMAVYQQQ

SEQ ID NO: 429077 - protein, 355 aa, unidentified
MSQEKYIGMDVHQATISVAVMDAQGKLIMECLLETKATTILEFIQGLQGTLSLTFEEGTSAAWLHDLLKPHVDRLVVCDPRKAALLKDGNKSDRIDARKLAELLRTNQLKPVYHGEHGVRTLKELGRSYLTLTKDVTRVMNRIKALYRSWAIPCSGTTVYAPRHRAEWLAKIAEPGVRVRAERLHQQLDVLQPVRQAARHDLLSESHKHAAVKLLREIPSIGPIRAALLVALLQTPHRFRTKRQLWAYSGFAVETHDSGEYRCVRGKLQRNRERITVRGLNDNHNKDLKSLFKSAAISASTRPGPLHDFYAARIAQGMRPTMARLTLARKIAAITLTIWKKGVSFDPQQLHRQAA

SEQ ID NO: 429078 - protein, 419 aa, unidentified
MRRTHAASASAFRQKGEPSMILVGVDVASVKHDVAIMRDTGETIKANFTIPNNASGYKKLLAEIEKAEKLYPKDTIRIGLESTGVYSAALTEFLAGRFKESVILINPILTSMFELSIHVHYAKTDRTDAQGICKFLSKNQDIRPYAPVSYHTRQLRSLYRERTKINKRINQDSNRLKGMLHIVFPEFLSKKHNTLGLFELEFLSRYPTADSVKKETVKSMTKSLSSVSYIRAGREKIQKIIDTAKNSIGSTALGDGFIIAETARRILFYRRQIKEINEMIVGLVEKEYSYLLTIPGVGAVTIAGIVGEIGDVRNYHGSDSIVALAGLNPYVYESGNYQATHTRITKKGSSYLRNAIFMAVQSMYLHRAEPIYGYVNRKRKEGKKRICALDHAARKFCNIIFSMMKSKAEFRPETISTKS

SEQ ID NO: 429079 - protein, 347 aa, unidentified
MGKSITDLSSVTTVGLDLAKHVFQVHGVDASGRVIVAKALRRKDVLAFFAQLPKCLVGMEACGSAHHWARELIKLGHDARMMPPAYVKPYVRRQKNDAADAAGICEAVTRPSMRFTGVRTLENQAALMHHKAREMLVAQRTQLINALRGHLAEIGVIAAQGLKNARELARVILAEGDETIPACVRTALAPLVRQLHVLDQEIACSDRTIATMARDDEMARRLTTIPGLGPVTASAMAASVQDISAFSGPREFAAFLGLTPRQHSSGGKERLGRVSKMGNRYLRKLLVVGAHAVLYHRKPHEDALRSWAKKLMQTKPFKLVAVALANKMARIAFAIMRGKTSYSADPA

SEQ ID NO: 429080 - protein, 338 aa, unidentified
MGTYAGIDLHSSNSYIGIIDEQDRRQFGKRLPNSLTQILVALEPFKKNLEAVVVESTYNWYWLVDGLQEEGYKVHLANPSAIKQYEGLKHTDDKWDSFWLAHMKRLNILPEGYIYPKEERPVRDILRRRLLFVQQRTAQILSLQSAISRNLSLRMSGNAIKKLKEEDTEDLFDSPFLVLTAKSNIAVIQFLTKRITAIENAVKSHAKLREEFQLLKTIPGIGNILALTIMLEVGDIGRFPKVGNYSSYCRCVKSEKISNKKKKGENNRKNGNKYLSWAYVEAANFTIRFSPEAQKFYQRKMAKTDKIVAIKALGNKLARASYYIMRDRVAYDPNKLFG

SEQ ID NO: 429081 - protein, 367 aa, unidentified
MKKVSTAVAKQSRNISRQKLTIGLDLGDRNSWYCVLDEAGRIQLEQRVRTTGKALQEVFGAMPRGRVGLEIGTHSPWISRLLSALGHEVIVANARKVRLIGESRKKDDRLDAQTLARLARIDPELLYPVKHRSAPAQADLMMIRARAGLVRARTGLVNTARGLAQSYGERLRGCNVRNMDPEKAEGLSPELQRALEPLLAAMEEVSERISEYDDRIEALAQASYPQVELLKQIKGVGTLIALTFLLTLEDPHRFRKSRDVGSYLGLQPGRRNSGQSEPQMHISKEGDPYLRTLLVQGAQHILGPFGIDCDLRRWGLKLAEHSGRNGKKRAIVATARKLAVLLHHLWVSGEVYEPLHNSSSVRVAAAA

SEQ ID NO: 429082 - protein, 343 aa, unidentified
MMNILAIDLGKFNSMCCFYNTDTNEYRFQAAATTRHYLTSVFKNHKIDLVVMEACGPSGWISDLCQELGLKTLVCSTNDAAWLWKNVKRKTDKDDSLKLARMAMMGQLTPVHVPKHPVREHRSLVKYRKKLVGRINQIKNSIRGLFAGRGIEIDKGQKAWRTGRELIDSHRKPLAECSLEELWRGQLDLELTQLDSLVQQQADVERRLDLIAKDDERIQRVQTIPGVGRRTAEAIVTTLDDVDRFDNARQVSSYIGLVPRQYQSGETDRNGRITKRGSRLLRTLLLECAWISMRYNEWSRTTYDRIHGGQQTRKKKAAIALARKIAVVAWSMLKHKTDWDPVE

SEQ ID NO: 429083 - protein, 415 aa, unidentified
MDVQRKHAGGLDGHQATVVACLLSVLDSGKVKKQIRSFGTTTRELLSLRDWLLAQGCTRVAMESTGVYWKPVYTILEGPLELTVANAQQIKNVPGRKTDVKDAEWIADLLLHGLLKPSFVPPKPIRELRDLTRYRRKLADSQSAECNRLLKVLETANIKLASVASDVFGVSGMEMLNALAEGKATPAEMAEFARGRLRGKIPQLEPALDGRMEEHHRYMLKLQLRRLRDLDQDLAELDARIQEKLQPYQKQVELLREIPGVDWILAAVIVAELGVDMKVFGSAGRVALWAGVCPGNHESAGKRRNVRVSKGNVHLKTALVEAGHAAARTKGTYLRDKYFRLKARRGAKRAVVAVAHKILVAIYHMLSGDVSYHDLGDLYLDKLNKHHLTRNLVRRLERLGYCVTLQQQVVEQPAA

SEQ ID NO: 429084 - protein, 402 aa, unidentified
MRYAGIDVGAERHMVAMVGEESEVLCRSSPFGEDASGYAHLFELLGPPEGCLVALEATGHYWRNLFVALLAKGYVVAVLNPLRTRRFAEEELQRTKTDAIDALGIARFAAQKRPPATQLPDLATEELRELVRLRERLQEDFASRLRQLHRAVDLGFPEFTRHVRTLESQLAATILSRYPTAASFRGASVKKLARIVYDGSHMIGEELARALIEAAAKSVGSYHSEPYRLRIKYLCEDLDVLRRRLKDLARDIERKLDDHEVGKLLMTIDGVGPLTAACLIAELGDPARFRSAGAIASYVGVAPRLRQSGKKRFFSGSPTIPLGNARLRKALWMVVLNAVRCNPWLRQYYERLRAAGKPGKVAVIAAMRKLLAAVWSVATHRRPFVPHLSPTPARASAVTNNA

SEQ ID NO: 429085 - protein, 426 aa, unidentified
MGERQAGRARGVVRMVFIGDDWAEDHHDVEIEDESGRRLARARLPEGLEGIGRLHALIAAHAPQGWSELGGQEMAARVIVGIETDRGPWVAALRAAGYQVYAINPMSAARYRERHSTSGAKSDVGDAHVLAEVVRLDREHHRPIAGDSDLADAIKLVARAHQTAIWDRTRQVLRLRSLLREYFPAALEAFDDLAAKDALLLLGRAPSPARAAKLTRGQVVSALRAAHRHQVQAKTDALLAALRAPGLRQPQGVETAYAAVVASQVRLITTLNEQIGQLQEVVAEHFGRHPAADIYLSQPGIGTILAARVLGEFGDDAKRFGDARARKNYSGQSPITRASGRKSVVLARYATNRRLSDALHQQALSALTASPGARLYYDSLRARNIGHHAALRQLANRLVGILHGCLKTGTKYDEHTAWHHQITAAA

SEQ ID NO: 429086 - protein, 502 aa, unidentified
MIKRSGIVQMFLAFRLIGISIGRSGQSKDVRFFRHEKIIVSHKKRSASLLYSSPLHRNGHPEVSFRNAVYHPEKRSDTKRREVLPGIHAFIRKGGIRMDGPIITVDVSKGSCHYQPFLEKGKPLRKPKVLYDTIEGFEELQKAIDQTEEKSGSKVSVVFEATGVYHRCLQKYLDDHDIPYFIISPLLSATYRKTNLHANKTDALDCAHIAKAYYGDERLHVFEKQEDRFISLQRLNRMYEDELQHLRKRKVSFRSTLDIIYPRLDKCFNGKASLYDPVVMEILKKYPHPKLLLKRKEETITKAIERRTDHGFLFISKIVHKVYECAMKCYSGCDINDIEVKKLPDMIEELQDQMERCGSLLSELVNEASRIEYFNNVASIIGIGVNLASRIIAEIGDISRFRNHRTLSAYAGLNPFIKQSGDEDGLHLKISKKGNRHLRCLLYLGATCNYRLKKGDPLYEFNQKKRQQSQSPLKSKAANIAAAHKLLVIIYVLCKNGEQYRF

SEQ ID NO: 429087 - protein, 415 aa, unidentified
MAVFCGVDWAEGHHDIALVDQDGALVAKKRIADDPGGLAELIGLLAEAGDTAADPIPVAIETSRGLLVAGLRATGRPVYAINPMAVARYRERHTVSRSKSDHADAMTLANILRTDAHAHRTLPADSELAQAIAVLARAQQDATWRRTKASNELRSLLREYFPVFLAAFAAKTGSALATAEARAVLAVAPTPTAAAKLSKARIATALRRAGRKRRIEATATELHAALRQPQLHQPELVEQAMGRQALALLATLNAECTNVDELAEQTAAAFAQHPDYAIITSFPGLADATGARVLAEIGDDRARFADARALKAYAGSAPITRASGRSISITWRRVKNDRLAAAGWLWAFIAATHAAPAKAHYRRRREHGDRHAAALRNLFNRLLGQLYHCLQTGQTYDEAKAFPNPIDTPTLAAAA

SEQ ID NO: 429088 - protein, 369 aa, unidentified
MELLVTRCAGLDVAKDEVVACIRVPDGASGRRQEVRTFPTFTSGLEALADWLAAEAVTQVVMEATGQYWKPIWQVLEERGFQLLLVNARQVKIRPGRKTDVCDAAWLAELLEHGLLRGSFVPPAAIRQLRDLTRYRKRLIQTHSAECQRIQKTLEDAGIKLDSVATDVLGVSGRAMLAALIGGERDPEVLAELARGRLRTKLPQLRQALRGRFSDHHALLVGLALGHLEHLEGAIAALDTEVDQVISPFARARDQLDTITGVGKRAAETIIAEIGVDMAVFPTAGHLASWAGRCPGNNRTGGKRRSGRPTKGNRWLGEVLVECAWAAARSRDSSLAAQYWRLARRIGKQEGGHGRGSLHPGHRLAPTRQ

SEQ ID NO: 429089 - protein, 363 aa, unidentified
MGEDRTVSVGLDVHKSSIRLVAVRRDELVDERTLAYDPVAVERALARWPGVSCCYEAGPTGFGLYRYLVERGIDCRVVAPGLVPVRPGDRIKTDRRDARKLAVLLAGGLLESIWVPSREVEAARDLVRAREDARLDRMRDRHRLSKFCLRHGRPLPGTSWSVVRHNWLSQQRFEHPAQQHTFDTYLHTVDLVDHRVQQLEAAIRQTAEAGPWRELVARLRCLRGVDTLTALGITTEIGDFHRFASAEELMAFVGLVPTEHSSGDHRRQGSITKVGNSHVRRLLVEAAWHARRRPKVGYDVARRQRGQDAVTVERAWRCQQRLYTRWQRMAARGKPHQKIVVACARELAGFIWAIATDQPLRAA

SEQ ID NO: 429090 - protein, 423 aa, unidentified
MEVMHERVAGLDVHKAMIVACVRIMAGGKISRECRTFETSTAGLEALLGWLTQSGCTHVAMEATGVYWKPVWNILSDGEFELIVANAAHIKNVPDRKTDVNDAMRIADLVACGLIKASFVPEQEIQELRSLLRARKQLTREQTSHIQRIQKTLEEANIKLDSVISDILGVSGRRMIEAMIAGVRSPLRLAELADRRLKVSPKALYDALHGRLTDHHRFMLELYLGQHDALSGAIARLDQAVEALIARMDEEVAAGQATFLSLIMLLCTIPGVSILSATVILSEIGRDMSRFPTAGHLLAWAGLCPGQNESAGKRKSSRLRKGAPWLKTMLVQCAWAASRRKDSYYKAQFNRLRSKRGPKKAICAVAASMLTAIYHMLKDGTLHQDLGADHFDRRSTEVKAKRLVAQLTKLGFQVELQPLPKAA

SEQ ID NO: 429091 - protein, 317 aa, unidentified
MTDFLGIDVGKKHLHCVLLQGEKSARKTVENTAGGFEQLDGWLRNRKTTAVHACLEATGGYGVAVAEHLHDAGHTVSVVNPQQIKSFGRSAMVRTKTDAIDALLIAQFCRAQKPPAWTPLPREIRDFRALLRRRETLVEMISAEKNRLESAETNAVRKTIEDHVSFLEEQLRKVNQQMKDHIDSHPGLRDTIERLDEIPGFGEITAMKLVAETNAFSVCTTARELVAYAGLNPRHYQSGTIHRRGGISKVGNAALRKALYYAALSAKNHSAYFRTFVQRLQAAGKRPKVIITAIMRKLLVLALAVVKGRRFDAALAA

SEQ ID NO: 429092 - protein, 447 aa, unidentified
MSNGRRLSRGDNRRNARLDRLREVLPHQHAVLALDLADDKQVFVLTDHDSRVLARKTVRCRPWQLAEAIEWGRGEAVAAGFAGVTLACEPTGHRWKVVDELATAAGIDLVCVQPLLVHRAREAEDFTRDKSDDKDALLIARLASQLHVYLPERADPTWARLRHLGGRRVEWVTRLGAARQQLRDLLECAWPASLEAAAEPLDSLTWRAAMAVAGCDPARVRRLGLARFTRAVTRELPRWGGQRVRHCIVAAVHAAAADPRGVRSQRLGGLERAAFALADLHHAQTRREEVEDLMIALLDDLDLTRLVTTIPGLSAVGAAAILSETGDLTRFDSARAVVKHAGLCPRDNASGTYTGKTTISGRGRPLLRVAAWRAVWAALRHNEVLAARHAHLTGREHNKLTDAQARVAVAGSLLRQLYVVVTTRTAWDPRIAGGQLDPRNKVNAPAA

SEQ ID NO: 429093 - protein, 392 aa, unidentified
MRTSSIPTLSKKRERIDWIRAKAPTWTHVVFLGIEDQKTLGKKEPVMIIIGCDFHPSWQQIAWLDTETGEVTERKLVHATGEARAFYGQLSAPALIGMESMGNSHWFEDMLSAMGHEVWIGDAAKIRSKEVRKQKTDRRDAMHLLGLLIKNDFPRIWTPSVEQRDRRQLLIHRYKLVTLRARVKNELQHLALNQGVQKKARLWSTAGQKILRELPLQPWAGVRRADLLGLLAIFDEQIATLDRAANQAAQEDKMAQLLMTQPGVGPITSLAFVLTMGDVKRLAGSKQVASYLGLIPSEHSSAGRQRLGSISKQGNRFMRMLLVEAIHTVVRCDPQFRKEYLHRCHRKPKGVAKVAAARKLAIRLYWMLRTQTPYPEVVRIESSPRVALVSRS

SEQ ID NO: 429094 - protein, 403 aa, unidentified
MVFVGVDWAETHHDVCLLDEQGKVLGKRRIPEGLEGVSRLHELVAEHAEEPAQVVVGIETDRGLLVQALLAAGYQVYAVNPLAVSRYRDRHTTSRAKSDAGDAQLLADLVRTDRHNHRPIAGDSELAAAVQVLARAHQNLVWSRQRQVNQLRNTLREFYPGALEAFGTDLAGVDAIAILEQAPTPVQGRSVSQAKIVSALRKVGRARNLEVKAAEIQAHLRAPQLEVPPLLTQAYGRSVAASVRLLRQMNQELAGLERELAAHFEMHPDAEIYLSLPGLGFVLGARALAEFGDDRTRFVDPKARKNYAGNAPITKASGKSKVVLARVARNRRLADACHLWAFSALTSSPGARRYYDQLRARGKTHQQALRTLANRLVGILHGCLTNRELYREDVAWPTLEVAA

SEQ ID NO: 429095 - protein, 400 aa, unidentified
MLSIGIDVSKGKSTVCGMKPGGEIVYAPFEVQHTREGMSELVSLLRSSGEEVRAVLESTGSYHCPVVAALLENGIFVSVVNSLRMKRFCSQSIRKVKTDQIDAMQIALYGLAYWQELQPTKLPEDTYRELQLLARQYYQMTSMLIKAKVDFNALCDQVLPGMQELMNDHAGRHKLSDFVLRYRHTTHILEMGETRFRKDYCKWAEKKGYRNRERMAALIFATAQNGIPVLPNAPSTQIVITEAIRVLHTVEASRDAILTQMQALAKTLPEYSLVREMPCIGDTLAPRLIAEIGDVRRFHSKRALIAYAGIDAPPYQSGKFCANNRHISKRGNRYLRKTGYEVMQSYVMHKPANDPIFTFIEKKRGEGKSGKLAMVAGLNKFLRVYYGKVTELYRSLPAIE

SEQ ID NO: 429096 - protein, 340 aa, unidentified
MNATTYGLDVAKRVFQMYWVDAQTGEISNRRFGRDDLITFLAQRPAGRVALEACGSAHWWARKIQALGHEVVLLHAQFIRPFVQTNKTDAADAKAIWTAVQQPGMRTVAAKTEDQQAMLSLHRMRSLLVKFRTMQVNQLRGFLYEFGVTFRAGRLAGLTEIRERMAELEETLPQPIVRNLQDQLRRINTFEEDIDQLEKRIGAWQKQEAACRAISEVPGIGRLTATALVATIGDAKTFKSGREFAAFLGLVPRQNGTGGKVRLGSISKRGDPYLRTLLIHGARSVLCHAKMPTAWQKGMQERRPGNVVAVALANKIARTAWAILAHQSTYETSHVSVRPG

SEQ ID NO: 429097 - protein, 399 aa, unidentified
MECHDVPAERPRPAPGQALSRSLVALDQNSTIIAVIELSQSSWLVAGMLPGTERQPRKKLEPSPERLLALLHRWRDEAVRAGRTITRIALAFEAGRDGFWLARWLAARGIEAHVIHASSVAVSREHRRAKTDRLDTELLKRGFLGWLRGERGHCSMARVPTIAEEDAKRPNRERDCLVGERTRIVNRIKSTLARLGIRNFKPTLRKAAERLATVHTPEGTPLPPNTLAELQRDMARLGFVVSQIREIEDARQKRLEQQHATGPHAMVRLLARIVGVGVETADLLVHEVLSRPMRDRRAVARYAGLTGSPDESGARRREQGLARAGNARVRRGMIQLAWRFLMFQKESALALWYRARTADSRIGTRKTMIVALARKLIIALWRFVTAGEPLEGVVLRPAS

SEQ ID NO: 429098 - protein, 386 aa, unidentified
MQKLNDLSRSLIAFEPDGTLIAVIEMSLTSWLVAGILPGVERQPLKKLAVDETALLKLLHRWRDESEKAGRGIERIAVAFEAGRDGFWLARWLKARGIEAYVIHASSVAVSREHRRAKTDRLDTELLKRSFLGWLRGERDHCKMVEIPTMKDEDAKRPNREHNSLIGERSRIVNRMKAALVRLGIRGFNPKLKRANTRLDGLRTPEGEPIPPNALAELRRDMERRRLVNNQIRQIEEERLERIERAPCDGPHVMVRLLARVMGVGIETADMLVHEVLSRNMRDRRAVARYAGLTGSPDESGRKRREKGLARSGNVRVRRGMIQLAWRFLLHQKNSALTKWFRSRTENARGTRKPMIVALARKLLIALWRLVREGIVPDGVVLRPAQ

SEQ ID NO: 429099 - protein, 344 aa, unidentified
MAETIMIGLDLAKNVFQVHGVDGAGQVVMRRQVRRAQMEKFFASLPAAVIGMEACAGAHYWARLAQRHGHEVRLMPASYVKPYVKRNKTDGRDAEAVCEAMGRPTMRFVAVKSEQQQAVLVLHRTRTLLVRQRTMLANALRGHLAEFGIVAAQGVRGLRGLIEGVKAPCETGVPEVARGALLMLAGQWEALDAKVRALELEIVRSVRESEAARRLMAVPCVGPIIASAMVASVADARVFRSARGFAAWLGLTPRQMGTGGKQRSGPISKQGDRALRTLLIIGASAKLRQEVARGVSDPWLRDLLARRPRKVATVALAAKTARIIWAMLATGQEYRDRARGPAAA

SEQ ID NO: 429100 - protein, 342 aa, unidentified
MKQYVGLDVSQKETSVCVVNEAGRILFEGKAKSDPGALTALLRERAPHAERIGFETGAMASWLWHELRRVDLPVVCIDARHAHAALSVRMNKSDQNDARGLAELVRVGWYREVKVKSEDSQKIRAILVARSRLVAIRRDIENQVRSLIKEYGLLFPRAIGKQFRNQVSELLGEDHQLLGVIAPLLSIHEHICEQQSKFDDEVRRLAKSDETTRRLMTVPGVGVVTALTFRHTIDDPSRFRSASTVGAYLGLTPRRNQSGETDTSGKISRWGDRLLRSYLFEAATVLLYRTKKWSSLKAWGMKLAKRIGVKKAKVAIARKIAVILHCIWVDGTSFDWGQAKPA

SEQ ID NO: 429101 - protein, 272 aa, unidentified
MSNDTVSDTVSDSVIGIDVSGKWLDIHVLPEGMVERFGNDVEGIASVVRLSNELDASLVVMEATGGYEIALAAELGLNDVPTAVVNPRQVRDFARSLGILAKTDALDAKVIAQFADKMRPEPRPLPDHQAQALKAMVSRRDQVIQMMTMEKNRLKRALLPVHARVTDHITYLENELKDIDRDITQAIEDSPMWRAKDDLITDVPGIGPVSSMTLIAALPELGTLNRQKIATLVGVAPMNRDSGSYRGKTLYLGRSISGQTRSVYGSDGRCPT

SEQ ID NO: 429102 - protein, 344 aa, unidentified
MPTIDYIGFDIHKKTISFCVKARDGTILEEGTIPALRNKLLAWAKARPRPWMGAMEATLFTGWIYDLLKPLAQALKVAHPPMLKAIAAAKKKNDKVDARMIADLLRCNLLPECYMAPVAIRDLRRMLRYRNLVVQQTTRMKNRIAGLLMETGTAYNKERLHGKAYFSELLGSLQEVPRSVVELLQLSRGQVEFFAAIQRRLLKGLREHPELSQRVMRLESIPSVGEILALSWALEVGEVDRLPSIAQAVSYCGLTSAQHSSAGKEQRGPISKQRNPHLQTILIEAAKLAPRYNPQLAAVHDRELQRGNRNRATLAVARKLVAYLMAVDKSGQPFQMRASDKEAA

SEQ ID NO: 429103 - protein, 376 aa, unidentified
MEKDIRHVGLDVDSERIAVAVAEPGGEVRSLGMIPYTAESVRRLVKKLGPASRLRICYEAGPHGYGLYWQLVGLGVHCDVVAPTLVPVKAGDRVKTNRRDAEKLARCYRSGDLTPVWVPDAAHEALRDLVRAREAAKKDQLRARHRLGKFLLRRGLRAAAGVKNWTSKHLLWVRMLRFEMPAQEATFLDYLHEVEHAAERVSRLEKAIDQVVVDLPQEMKALVAGLQALRGVKQITAVTYVAELGPLSRFERPKQLMGYSGMVSSENSTGDRIRRGAITKTGNAHVRRVSGEAAWAYQFRPAMSPTLKKRQEGLSEEVKEIAWKAQHRLCKRYRHFLAKGKVKQQVVTAVGRELLGFIWAIGMQVEKEQQLRRRAA

SEQ ID NO: 429104 - protein, 357 aa, unidentified
MDGSSEQPQMTAGLDLGDKFSYLCFLDTVSGEIMEEGRLRTSPETFKRRFASERPMRIAIEAGTHSPWVSRVLEECGHEVLVANARKLRLIYANKRKSDEMDAQNLARLARLDPKLLYPLKHRGEESQAHMAIVRSRQALVGCRTQLVNHVRGTVKSFGGRLPKCPSVSFHKNAAGHIPEALMPALGPILEQIGSLTERIRRYDRKLEEISKESYPETELLRQVEGVGPLTALTFVLTIEDPYRFERSRAVGAYLGLVPATDRSGDRDPQKRISKEGDEMLRKLLVSGAHYIVGPFGSDSDLRRHGEKMASRGGKNAKKRAVVAVARKLAVLLHSLWVSGEIYEPLRNTHHSRGQAA

SEQ ID NO: 429105 - protein, 357 aa, unidentified
MHTAQQISFANIHFFVGLDAHLRNWKVTIRLDGLELKTFSMNPSPLELIAYLQKHYPDGIYHIVYEAGFCGFWALRIFRQHNIDCIIVNPADVPTTNKEKVNKSDPIDSRKLAREHENKSLHGIYIPDTFHEELRALMRLRYRIIQSQTRIKNRIKGLLYCQGIQIPLQFSGNARWSLNFILWLQQLQMKTSAGNFTLQSLILQLKEIREHNKNVLKQLRKEAQHPDIAPLIKALQGVPGVAFITAMYLYTEIMDMKRFANDNHLVSFVGLVPSTQTSDENVYSNGISFRQNSFLRTMMIEAAWTAVREDPAMTLKFKELTKRMNSQNAIIRIAKKLVKRIRHVWLKQEEYVYALVA

SEQ ID NO: 429106 - protein, 344 aa, unidentified
MDHFAGLDVSVKETSICIVDDTGKIVREVKVASEPEALLAVLKNLAYHFKRIGLEAGPLSQWLYSALAEADLPVICVETRHMRAVLKAQINKTDRNDARGIAQMMRVGLYRLVHVKTLRSQKLRMLLTHRKLLQSKAIAIDNDLRGTLRNFGLKVGMVGTVRFEARIRELVVNFPDLAALIEPLLIVRRTLREQFCILHRRLLAIVRDDEVCRRLMTTPGVGPVVSLTYRATVDVPARFRKSKSVGAVFGLTCSKYQSGEVDWTGRISRCGDEMMRTMLYEAAQSMMHSKKWCWLKAWAIQIARRSGMKKAIVALARRLAVIMHRIWVDGTEFRWTREQAAAAT

SEQ ID NO: 429107 - protein, 395 aa, unidentified
MKKPSYSCGIDISKDSFAVAVKNGTFIIKDKSFTMNRQGFDDFDRLIKDFKGNSLIGMESTGIYHNNLFAFLNDRGYNSVTVNPYMVHQFFKFTSNKPTKTDQKDAKTICEFVELKKDELTQAKQHEKDERDQLKYLVREKEEITYRIAQTKTEIKRILTLIFPEIEKEVGLFSQGLRTLLLEFSSAYIIRNLSKKDFIRKAARLTSRTQGRGITLTPLKIYELAVSSIAERQYPFYEEMLKMKIKRLESLLEEKEYITKLIDNEADKSFSKEIEILTSIPGVGRESAIYLMAELIDIKRFAEWKKLVGFCGLDPVIKQSGKFKAQCKISKRGNTHARRIIWIMGGCVKRSCPYFRDYYLKKRAEGKSYKEGVVATSTKLLRVIHALLSKERWFQ

SEQ ID NO: 429108 - protein, 427 aa, unidentified
MEVIHPRCAGIDVSKKDAKVCVRVQGRGRKATSSEVTTWTSMTSSILALREHLIAERVTCVVIESTAAYWKPFYFLLDDALNVMLVNARHVRNVPGRKTDVSDAAWLAELGAHGLVRASFVPPEPIRVLRDLTRARTTIAGARTKEIGRLETLLEDAGIKLSSVACEITGVSGRAMLEALIGGQRDPAVLADLAKRQLRKKIPALTEALQGRFNDHHAFMVRLYLDRIDAHEADIARLDARIEEEIQPFQPARDLLVSIPGWSHVVADVFISETGADMRVFPTAAHLASWAGVSPGSDESAGRIKSAKTLPGNRHLKAALGVAALSASRSTNTYFGARFRRIVGRRPARPATKKSRRQSAAGQTAVVALEHKMLTCAWHMLVNGTFYQDPGPDYYTRHHPAKNKARAIKQLQALGYNVTLQPRTQTA

SEQ ID NO: 429109 - protein, 427 aa, unidentified
MRFIGLDVHKDFCEVAISDGGKAHSAGRVKTTRAELELFAQSLGQDDKVALEATGNSLAIARLLEPHVGEVVIANSRRLRAIYEAKVKNDRVDARTLAELLAADLLPRVWMPDERTRLLRRLTSRRAQLVRHASRLKSHIYATLQRNLTTEVPATDLFGKCGRAWLDSLELPLDERQTVESDLRRLDFSLKERELLDCEIATIALDSAEIRRLMTIPGVDVVTAATMMAVIGDIARFPSARHLVGYVGLDARVRQSGAAAPRTGRISKEGAREARRVLVEAAWAAQRAPGPLRAFGQRIAARRGKQVAAVAVARKLSVLCFHLLSRGEDYAYLRPALLRRKLRRLELRAGAPSRRGKRSGGAIWETPSRGGREKELALQAERTYRRLVADWQASRPKGGAGAARGRASRGPSGGQAARQGPAPDPAL

SEQ ID NO: 429110 - protein, 461 aa, unidentified
MAFSPCRSHVLGGGVTNSGGIDRPLIRGMTTGFFAGREALRNVDVAIGAVGRPGEDDRRTHVIDVSDIGAFLGLDVGKGEHHATAVTSVGKKAFDKRLPNSEPKLREVFGKLQAKHGTVLVVVDQPASIGALPLAVARDMGCPVAYLPGLTMRRIADLYPGEAKTDARDAFVIADAARVMPHTLRSVDLQDETIAELEMIVGFDDDLAGEATRISNRLRGLLTQIHPSLERVLGPRVQHPAVLKLLDQFGSPAQIRKAGRRRLIALIRPKAPRMAERLIEDVFSALDEQTVVVPGTDAAALIVPSLAGSLRAALDQRKLLATRIEELLENHPLSKVLTSMPGIGVRTGARILIDVGDGSSFPTAAHLAAYAGLAPTTRSSGSSIRGEQPSRRGNKQLKRAFFLSAFAALADPVSRTYYDKKISQGKHHTQALLCLARRRADVLFAMLRDGTFYEPQPAPSA

SEQ ID NO: 429111 - protein, 413 aa, unidentified
MKLFVGDDWAEGHHDVELMDAGGRRLAKARLPDGVAGIARLHAMIGEQLGQDAEEDDAGQVAVGIETDRGPWVAALVAAGYTVFAVNPLQASRYRARHGVSGAKSDAADAHVLADMVRTDSHQFRPVAGDTAQAAAVKVVTRTHKTLIWERTRCTQRLRHALRDYFPAALEAFEDLDAPDVLELLARAPDPASAAALTTAQISAALKRAGRRHVAGKAAQIRAVLHAPHLGQPEVVTAAYAVSVRALIAVLSALDEQVKALQGQVEAYFGQHPDAEIILSQPGMGQVLGARVLAESGDDPARYASAKARKNYAGTSPITRASGKKKAVLARYVHNDRLVDALMAQAFSALRTSPGARACYDRQRARGAGHNAALRQLANRLTGILHGCLKARTRYDEATAWPQHAAHAGKTAA

SEQ ID NO: 429112 - protein, 348 aa, unidentified
MKNKSFVGIDISKNVIDVSIFREDTNIKMFPHEVFNNTRKGFGDMCSWLKKSRVVLSQALFGMEFTGCYSLDLEKFLTSKNYSFCMLSTRIVKHHPMGTIDKLDKNDSAKIADFLYRYDGTECAKPYKLPSKAMQQLKQLVNERKFLVEQRTNFMNRMQMFETKEDSAMYESYIKKLNHDIEKIDQEECELMSKEEDVFDTFQNLLTIPGIGFVNATNIIAITRNFTAFDTARQYARYVGVAPCSHTSGTSVKWRARPSAHCNGQVKADLSMAALRAVEYDVEMQMFYNRKLGGRKDSDTKRKALNAVKFKLICRMFAIGKQKRKWEVLNTSDDRKNLHIEKSKASEL

SEQ ID NO: 429113 - protein, 404 aa, unidentified
MNNVAGIDVSKGKSMVSVLRPFGEVVAKPFSVGHTGRELKKLADYLKSLDGETRVVMEHTGRYYEPVARFLHEEGIFVSAVNPKLIKDYGNNTLRKVKTDKADARKIARYGLDNWVELRQYTPMDTIRMQLKTLNRQQGLYSKTKTMMKNNLIALLDQTYPGANSLFDSPVREDGSQKWVDFAMTFWHVDCVRGMSLAAFTERYRKWCKRHGYNFSQSRAIEIHMDAQNLIAMLPRNPLTKTMIRQAVDALNAVSKSLEQLKAEMRTLAAQLPEYPVVMAMRGVGDSLGPQIMAELGDVTRFTHRNAITAFAGVDPGADQSGTYEAKSTRASKSGPPELRKALFLVMDCLLKTQPADDPVYRFMDKKRAEGKPYLVYMTAGANKFLRIYYGRVKEYLASLENSD

SEQ ID NO: 429114 - protein, 353 aa, unidentified
MSYIIGCDAHKHYSQFAVLEGDQTRCKQVRVEHERGAIRDFLSEFPEGTPVALESIGNWYWIVDEIEQAGCKALLTHPGKAKAMMGNVNKTDQLDARGLTMLLRNGTLPTVWIAPSEVRDERELPRTRMALCKIRVALKNRIHATLAKYNLSLPTESDIFAPKWSSQLNQVIEPLPPETQNCLQQELELLEGVQGQIQAMEERMKERISLTPEMQLLKTIPGVGDILAIVIGTEIGLIERFTRAEQLASYAGTTPAVKSSGGKVRYGHTPKESNHYLKWSFIEAANAPAQYGQKPHCQHRHVTHLYQRVKQRKGHSVAVGAVARHLAEATFWILKKQEPYREPSRQKVLPKQA

SEQ ID NO: 429115 - protein, 357 aa, unidentified
MREYIAFDSHKRYTIMERENQQTSVARQRRIEHAPGAICGALRECEPGTPVAIEATGNWYWIISEIEQAGLRPLLVHPRKAKLMMGLINKTDQLDVHGLNRLQRNATLPTVWIPPAELRDLRELTRVRMVLATQRTRLKNRISSTLAKYGLAVTDASDPYSQKGRRQLLGLLGQLPPQTQWAARTLLAQLDFIEGQIREQEQRLKQRIEATPEMRLLMSLPGVGVILAAVIWLEIGAMERFASAQRLASYAGTTPRVHASGGVVRYGRLRPDVNRYLRWAFVEAANSVAVNHARCPQRHVSELYRRLKIRKGHAKAIGAVARHLAEAAFYVLSGHEPYQDPTVCTGRSKGGVSAGLS

SEQ ID NO: 429116 - protein, 310 aa, unidentified
MDAIYVGIDVSKDRLDVHVRPAGETFAVARDGKGLNELLERLRSIAPRLIAIEATGGYETIAAAAIAGAHLPLAVVNPAQVRHFAQAVGKRAKTDPIDAGVIARFAEAVKPEPRELPDEAARLLAELVARRVQLIEMIVAERQREKRADAVRVRKSIARHIASLEKELPIIDGDIDTMVRGSPVWREKEDLMVTFPGVGRGIARTMLADVPELGRLTRREIASLVGYAPFTRQSGQWKGKSMIAGDRSAARSAIFMAAMCAIRCNPVLRVFYQRLIARGKAKMVALVGVARKIVVMLNAMLRDKKQWQPA

SEQ ID NO: 429117 - protein, 460 aa, unidentified
MNRKQSKSKMDRTMPTVYPNAAAIDVGATMHMAAVRADGAREPVRSFGTFTADLHRLVDWFTECGVETVVMESTSVYWIPIYELLDVRGFTVFLVNARDAKHVPGRKTDVSDAQWLQRLHSFGLLRASFRPKGQIAELRAYVRQRERLLQYAASHIQHMQKALTEMNLQLHHVVADITGATGLRIIRAILAGERDPEALAGFRHYSCHSSAETIAKALTGSYRAEHLFALEQALALFDAYHEKASACDIRIEAVLKELSTHRGRGHGAVPPASRRRNRADQANALAFDVRAALFALLGKDITTIDGLGPYLSLKLIAECGDDLTSWPSAKHFTSWLGLAPSNKISGGKVLSSRTRRSGGRAAALLRLAAVTVGRTDTALGAFYRRLSSRIGKAKAVTATARKVAVLFYNAVRHGMEYVDPGASSYETRYRTRVINNLHRRAKTFGFVLQPLEPKAGAAVS

SEQ ID NO: 429118 - protein, 344 aa, unidentified
MGEVSTIGLDIAKSVFQVHGVDVAGAVVIRKRISRAKMVEYFSELPPCLVGIEACPSAHHWGRELQALGHTVRLIPPSYVKAYLKRSKNDANDAAAICEAVTRPSMRFVPIKTTEQQTALMLHRTRQLLVRQRTMLSNALRGHLAELGIVSAKGRNGTAELLRIIADCEDSRVSPAVRGILEVLARQYGSIGAEIASIDKSIMALHRACEASRRLAEIPGIGPVVATALVAEIGDWKAFSSGRSLAAWIGLVPKQHTTGGKDRLGSITKQGNRYLRWLLVVGAMAVIRYARKHGTEKRPWLGRLMERRPTKVAAVALANKIARMAWAIMVRGERYKEPKLSLAA

SEQ ID NO: 429119 - protein, 362 aa, unidentified
MASAGVGIDVSKDWLDVATTESSSPWRVPNSLEGIATLVEELGSVHVHRVVLEASGGYESPALLGLHEAGHKVVLIQPIRARHFARAIGQRAKTDAIDAVVLAKMALLAVEETPVWAPVDDVVADLRALVERRQQLLVLRDGEKKRLRFAREIVRADLERSVTSLQTELASLERRISEVVAANQRIADEIEVLESVRGVGTLTAATLRVFVPELGTLTRQQVAALVGVAPINRDSGGKTGRRFIEGGREKARQSLYMAALAATRWNTIIKARYAHLVAKGKKPKVALVACMRKGCDDRKPASGSFGKPASRWLPSGLGEHGRLDVAPASALRVSAEVEHTLGMLLGPDDARPLEAEVDHSPN

SEQ ID NO: 429120 - protein, 321 aa, unidentified
MIAEELFIGIDVSKFRFDVHLQPSGETLSVPNEAAALGRFIRRLVHLQPRAIGLEASGGYERALINRLLRAGLPVYLLDPAQVRAFARAMKQRAKTDPIDAAMITRYLKTALDRLTPYQRDPLGERLGALVAYRRHLIQEATTLKGQLDTLTEPLVRRLIKTRLSDLRLNRATLQRAIRKLIHSDPAMTRRFAALLAQQGVGPVLAATLLAELPELGRIGAKRIASLVGVAPHARQSGTTSRPGKCGGGRRQIRNVLYMATLSAVKAKTPAIEPFYRRLRQNGKPFKVAITAAMRKFITILNALIARQNNAQPHPITSTVA

SEQ ID NO: 429121 - protein, 352 aa, unidentified
MAEKTRDVIVGADTHKGFHAIAVISMTGERLGWMYVEAKAKGYSQALEWARSFGTVVKAGIEATGSYGAGICACLRKHGIEVWDVYAPDRQKRYRRGKHDAEDAFQAAEAALGHTRCAQAKEGGGLLQAAQLLEMAYGQAKKQRTATVNALKAAVVALPDHMRERLGGLKTGELVERCAGFRMPEDDLGLEAGIKTALRSLARRIQEIDKETALLEKQIKRYAQRLAPETLSLLGVGPHSAIKLMCAAGENIGRMKGEASFAMLCGASPIECSSGTNIQHRLNRGGNRQANCALHTIAVTRLRCCEESREFYDRKIVDGKTEMGALRALKRYIAREVFYTLKADLARLHPAA

SEQ ID NO: 429122 - protein, 377 aa, unidentified
MAIVTGAPARCGLSGRHRALAGAAPRSDQAGEPEQLCGAPTDPGSCKDGRRGRFRKRQPTLVGIDVAKGALVLAVRPSGERWTVANDEAGVRELVERVRALDPELVVCEATGGYELLSVGALLGAGLPVVVVNPRQVRDFARATGALAKTDRLDAEVLALFAERVRPAVRSLPDGEAQELAGLLARRRQLLEMLQAERNRLGQVFTRGPAVTKSLRQHIAYLERELARTDAGLGKLIRRTPAWQERDDLLRSVPGIGPVVSYTLVADLPELGQLTRRQIAKLVGIAPVSRDSGTFRGRRFVQGGRAQVRAALYMAALVAIRHNPTIRAFYERLVGVGKPKKVALVACMRKLLTMVNTMVRTGEPWQPEYAARAVRTT

SEQ ID NO: 429123 - protein, 392 aa, unidentified
MEKTIKYAVGIDVSKDTIHTCLCEIDNKQQVKIKASHRFSNDVKDFPGFVQWIQKHQKQKEITVVTCMEATGIYYEKLAIHLHKKSYTVAVVLPSKAKKYMQSLGLKSKNDKIDAAGLARMAAEQNLDQWQPMGEFFYQLRQLTRHHEQLQESKTVFVSQLHALKHGAFEVKEVVRQQKKMIALIEKQIQETFNAIQKHINNNEEVRIKTEHICKIKGIGLLTVATVIAETNGFALFKNIRQLVSYAGYDVVENQSGYHTGKTKISKKGNRHIRRILHLPSFGVVRFNQKPFADLFNRVYDKTKIKMKGYVAVQKKILVYIYTLWKKNEEYQPQIKTSGNDELKSLFLLGSVGAITTEDMVVKKVVPIITGTTQDELPYNESPEALFLLMQK

SEQ ID NO: 429124 - protein, 339 aa, unidentified
MKYKTVSIDLAKNIFQVCALDNNHKVKMNKKVSRNKLLDTLRQLEPTTVVMEACYSANPWGRAIEKLGHTVKLIPPYMVKPFVIGNKNDCNDALGIAEASLRPKIRFVPVKTLAQQDVQSLQRIQSRMIRSRTATSNQLRGLLAEYWIVLPTGLAQLKKQVPDILEDAEQPLTPVARQFVDQLHREILKRDEQIQEITDTIAQLLNDNEDYKLLQSIPGIGPKIAATFVASVGNAHHFKNGRQLAAWIGLTPKQHSSGDKQTMGGMTKRGNQELRRLLIHGARAVMNWADKKTDTLSLWIQSLSKRAHPCKVIVALANKLARIAWAVLAYHSPYLARTD

SEQ ID NO: 429125 - protein, 384 aa, unidentified
MSADHRPEQTAIRTDLGAIFVSLELSRATWLITSLSPGREKMSKHQVRGGDTAGLLARLAELQAKAHARTGQHFPLIVIQEAGLDGFWIHRVLQSEGIESHVVDPASIATSRRRRRAKTDKIDGEALLRARLAYKRGEPRVCAMVKAPTSREEDDRRISRERKVLTTERVAHVNRIKGLLFAQGISGYEPMHRDRRARLHDLTTGDGRSLPQHLKAQVSRELDRLELLLEQLKAVEADRDALLTATEAPAKPGSAELLLDLKGIGPEFASVLWSEGLYRNFANRRQVAAYAGLAPTPWQSGTVDHEQGVSKAGNPRLRTTMIQLAWLWLRHQPDSALSRWFHERVERRGGLRKTMIVALARKLLVALWRYVTAGVVIQGATMKV

SEQ ID NO: 429126 - protein, 425 aa, unidentified
MNTPDPLASPVDPAGFAYVVGIDVGSERLVYTICQPDKRPLGKPTDVGNDRAGFGQLDHALAALGVEPARILVGLEATSRYSENLYQFLADQGYTLCLLHPRQTHQFAAQRGLRAKTDRLDATTIARVLLSGEARVGYVPDELIATYRELERLHSQLTAESARYQNEIQALLVVLFPEFTQVFADPCGATALGVLTRYPGAAAIAEASVEAVTATLRELAPRRYGRPTAVALVRLAQHSVASGVATPARALSLKVLCDQLEHTLANLAQLDRELDRVLDGDAGASTLSSVPEFGRQTIAVLRAELGDLTRFRRLDQAVAYVGLDLEVRQSGKWKGQVKLSKRGSGRLRRVLYLAALRSLARADSPFAVYYHRLVARGLKGRKALTAVMRKMLIVACHLLRSHQVYDPARVCAVPGPAPRTPSPGA

SEQ ID NO: 429127 - protein, 401 aa, unidentified
MDKFTHHDGFDVFIGVDVGKGEHHAVAVDRTGKRLFDKALPNDESRLKTLIAELKRHGALLLVVDQPATIGALPVTVARAQDVEVAYLPGLAMRRIADLHAGEAKTDARDAAIIAEAARSMPHALRALPRSDEALAQLMLLCGFDDDLAQQITQVSNRIRGLLTQIHPALERVLGPKLDHPAVLKLLQKYPSPQALSAVSEKRLVVSLARRAPRLAKTLAGEIHQALREQTVVVPGTMAAELVVPRLAEQLTTLRRQREELKREVEQRVNAHPLAPVLMSMPGVGVRTAARLLTEVTSRPFASAAHLAAYAGLAPVTRRSGSSIRGEHPSRRGNKVLKRALFLSAFAALRDPVSRAYYERKIAQGKRHNQALIALARRRCDVLFAMIRDGSFYHPVPMANA

SEQ ID NO: 429128 - protein, 373 aa, unidentified
MKKNSTGHRSRKRSAKIREESLTIGLDLGDKTSRCCVLDGGGEVVAERSVATTKKGMAQMFGAMRRCRIALEVGTHSPWVSRLLSGFGHEAIVANARQVKLISQSSRKDDRLDAQTLARLARVDPRLLRPIRHRSEPAQLHLMTIRARAALVEARTALVNSARGLAKSTGERLSACATSQWDVERIEAAEIPEALRETLRPLIRQVAALTAGIQEYDGKIEQIAREQYPETGLLKQVSGVGTLIALTFVLTVEDRERFAKSRDVGCYVGLRPKRSESGQSQPELRITKEGDIYLRKLLVQGAHHILGWRGPDTDLRRWGLKLAARGGKNQKKRAVVAVARKLAVLLHRLWVTAEVYEPLRNSQVAAGAKKAAA

SEQ ID NO: 429129 - protein, 338 aa, unidentified
MYYMGIDHHRQYSHITLLDEKGEKLKYGRVGNLRSELDNFLLGIKEVKAVVEAGRSSYTMVDILDDMGIDVTIAHPKEVKAIAKAKIKTDKRDSYILAHLLRTDFIPGVYKRSRENRSYQRVLRQRAFYVGSTTRVKNRIHAFLSQQSEDVQEEISRVKNLFGTKGMKVIRGLSLPVNQKELLEALVKTFSHLEERRKETNGLVEKLYFEIPEARLVHTVPGFGVFLSVLTAVEIADIGRFENVGKFHCYAGVIPSTHSSGERTYHGKIVKEGNRWLRWAAVEAVWPGIRADFGLRCYYERLKRRKGANSAKVATARRLLTIIYRMLKEGRPYIPYKR

SEQ ID NO: 429130 - protein, 344 aa, unidentified
MKYFTGIDVSLRFVSVCVVDEAGGVQYEGKIPAEVDLIVASLRRRNLDIKQVGLEAGTLTQYLTYGLQKAGFEVICLEARQTAATLAAMRNKTDRNDARGLAQILRSGWYRTVHVKSLESHQVRALLASRKAILVKCVDLENELRGLLKIFGVRLASRVGHGGFDAAVRGVIASEPLLARALVPLLDARTVLYKTYLKLDNAVKAVVRTDPVCQRLMTVPGVGPVTSLTFKAGVDDAVRFRSSRNVAAHFGLTPRRYQSGETDNPGRISKAGDRDVRMALYTAAHALMTRSDAWSTLKAWGLRLAKIRGHRRAVVAVARKLAVILHRMWVDGTDFRAARLQGAA

SEQ ID NO: 429131 - protein, 370 aa, unidentified
MLDTTTFVGLDVHARSIKAVSLDVMTGEVRCATFGYDAGAVAEWVRSVDPKARCVYESGVTGFDLQKRLSGLGVDCVVGAVSKMIKPSADRRRKNDRNDAEFLARMLSVGNVVEVWVPDDECEAARDLTRALEDARDDLSRSKQRLSKFLLRHGLVFDERTPTGRRKGNWTRAHWSWIESIRFAEGADNDVLAYYVDAVRRAAEEKARLEGLVEAEARKPRWRKRVDSLRCLKGVDTASAADLVFEAGEFSRFRNARSFAAWVGLTPSEHSSGESDRRGAITKAGNKHLRKTLVEAAWHYLTCSGRPKEPARGQAPDRGARRHAAKGVRRLVERREALLARGVHGNKANVATARELACWVWAVGLMAEEA

SEQ ID NO: 429132 - protein, 458 aa, unidentified
MKTKYFMGCDVSKGYADFVILDEAKQCVENNFQLDDTFFGHNCLNQRLTTFFSDYPDAELFAAVESTGGYENNWYATMRQFQGTFNIKTARLNPCGVHAGSRADLKRTITDAVSARSIAEYLIAYPDKVIYEQKDYWASLRKQWSFIQMLTKQKVQLLNQLESLVYNANPEILSYCRDGVPEWVLTVLKRYPTAIQLARARISTLAKIPYVSQQRAQQLKCQAKTSIASSLDMVTGQLITATVEQIAGLKQTIVLQNKMLAKHCLTPEIDLLKTFNGIGDFSAVGLMLEIQSVKRFASAKKLAAFFGLHPIFKVSGDGSAGFRMSKQGRKAPRSILFMVAMSAVKSNPLIRDLYQEKVSKGMVKKAAIGLCMHKILRILYGMLKNNTPFNPEIDLKNRKKSVSLKNKPAQDKDRRFQPYDDRAPVSGRNRRKRLERKSSQGAIDTECGIEISAPASTS

SEQ ID NO: 429133 - protein, 312 aa, unidentified
MMDAVYVGIDVSKDRLDVHALPQGAAFMVARNGEGVAQLVERLKGLSPALIALEATGGFETVVAAALAAASLPIVVVNPAQVRHFAQALGQRAKTDPIDAAVIARFAQATQPAARPLPDEMTQLLADLVARRRQIVEMMAAEGQRERRADKRLKKSIARLRKALEKELAELDGEIDDYMRGTPAWAEKQDLLASVPGVGPVIARTLIAELPELGALDRRRIAALAGLAPYTRQSGQWRGKSFIGGGRKTVRSMLFLGAMVAARHNPVLKAFRDKLVDSGKPKIVALIAVARKLLTILNAIIRDAKPWRTKNA

SEQ ID NO: 429134 - protein, 337 aa, unidentified
MITIGIDPHKGSHTAAAVDAAEAVVGELRVAADRHQRARLLEWAARFEPRRWAIEGATGMGALLAPQLVGAGEHVVDVPAKLSARVRLMDTGRIDKTDPNDARSAAIVALRNAALNTVGTDSEHRVVLRLLADRYHQLTAQRTRSVCRLHAVLCLLIEGGTGRSLSTPRAMKLLAGVAIGDPIIAERVATCRHFVTELEALDQALVDIRARTVTAVDASKTTVIDVYGVGPIGAAIILGHSGDIRRFPTAGHYARHNGTAPIEASSGPKARHRLNPRGDRQLNHAIHTAALTQIAHDHPGRVYYARKLAEGKTKKEALRALKRRLSDVIYRQLLADT

SEQ ID NO: 429135 - protein, 344 aa, unidentified
MTNIQLKETVNESKPPLFAGIDVGAEELVLVIRKNGKPFDPQKFANSPADRSRLVKKLVKLPGIIVCLEATGVYHFDLSIALHDAGVFLMVVNPKASHNFAKVLMKNGKTDAVDADTLAEYAARMDFVAWTRPSDETIALRSFARRINALTGQKADAKNYLHALIATHETPKSVLRDARLAIAQLEKRIDRLTAEALILIGKHPELERILTLLIGIKGIAETSAIALMGELLLLPPGLSHREWVKFAGLDPQAFDSGKSVHKKTRISKAGNRHIRSALYMPALCAKQHDPHVRAYFQHLVVNGKTPLQAVCAVMRKLLHAIHGMLKHDKPFDNSRFYAIPTTAG

SEQ ID NO: 429136 - protein, 310 aa, unidentified
MDAIYVGIDVSKDRLDVHVRPSAEAFAVTRDGKGLNELVERLRSLAPALVVVEATGGFETIAAAAIAGAHLPLAVINPAQVRHFAQAVGKRAKTDPIDAGVIAHFAEAVKPEPRELPDEAARLLAELVGRRAQVIEMLVAERQRDKRASAVRVRKSITRHIAALEKELPEIDRDISTMVRGSPVWREKEDLLVTAPGVGNTIARTCLAEIPELGRLTRRQIASLIGVAPFTRQSGQWRGKSMIAGGRTTARSAMFMAALSAIRCNPRMRAFYQCLLGRGKPKMVALIAVARKLLTILNAMLRDKKPWQYA

SEQ ID NO: 429137 - protein, 386 aa, unidentified
MRPTLFCNGGSVAYASSFNPRMAFGQSVAQPEPRTPCAPNSNRCQSVGYHRQLVYVRMSPNTIITMQTVPVTVYAGVDVAKASLQLHLQGRQAEFANQPAGLAQLCQQLKTIPHVHVVCEATGGYERLLVQAMHQAQIPVSVTNPAQVRASAQAQGKRAKTDRIDAALLTDYGQRYQPKPTPPTTSSQDQLVALTQWLTQLVQAQALAKTQAEHHEAAFVRARHTKLMAHFKSQIAAVEKQIRALLAQDAQLQQRVDCLDEIKSVGPRTAWLVLAHMPELGQLNRQEVAALAGLAPWTRESGTMKGMRCIGGGRPEVRLALYMAALCAARCNPVLQPFYQRLRAKDKPAKVALTAVMRRLLVYMNHQLKALHATQAATKTQHVEIS

SEQ ID NO: 429138 - protein, 320 aa, unidentified
MDQHATVVPVFVGIDVAKDRLDVHLLPAGEAFAVTRDHAGLEGLAARLGQAAPALVVLEATGGFEITVAAALSGAKLPLAIVNPRQIRDFARALGRLAKTDALDAQTIALFAERIRPEPRPLADAQAQRLAELVARRRQIVEMIGAESNRRRQARVPELQRELDTHLLWLQQALARIERDLDDTIRGSPVWRATEDLLASVPGVGAVTARTLIAELPELGRLDRRRIAALVGVAPINRDSGTFRGRRMVAGGRSSVRKVLFMATLTAIRFNPPVRALYQRLTQAGRPAKLALTACMRKLLVILNAMIRDGRRWADSGLSM

SEQ ID NO: 429139 - protein, 350 aa, unidentified
MNILALDLGKFNTVYCDYICETGEHKFGKVKTTPQAIHDLIVDKEPERVVMEVSEIAGWVVDIARALGKKTETANTSHEAWRWKNVKKKNDKEDARKLAKLSAMNQLPTVHIPAKPIREMRSLIKYRQRLVKHRRSIQLAIRAIFCAQGITGVPRGKSAWSQEGLGWLRKHARPLEEIKDLEQLWRGRLHVELETFDAINRALKTVEDKLNKLGSADARVRRLQTIPGVGPRLAEMVVAFLDDPQRFQSGKQVGNYVGLTPKQYQSGQMERQGRISGQGNKLLRNLLVEACWASLRYNPWAREMYSRLLRGSPSRKKIAITALARKLVVRCWAMLRDEEDWKYDIREDAA

SEQ ID NO: 429140 - protein, 394 aa, unidentified
MKLVGIDVGKNSHHFCVMDKETGEFNVAPTSFSNNKEGFDFLINSLKPYSKKSILIGMEDTGHYHVALLKFLLSNGYPVALINPKTTDLTRKMEGGITKNDKLDTITICDVLDTPERKKQYRITKVDRFDLYEQRQLTRHHHNLKEELNVYCNRLQKSIDLVFPEFNTLFSSKYSIVYMNLLKTFGSAEAIASTDIRTIRKCFEIKGRGNRISLTPEKLKECAKNSIGISSEVETIQIKHLVSQITLIKEQIAEIDKKIEEFSITNNSPILSIPGISHFSGTSILAELGDIGNYSKPSQIIKFAGVAPYHYESSQYNAQHTGITKKGSKYLRKTLYQIILTVINNNPVFKKYHRLKISQGKGHRCAQGHCIRKLLRIIYHLLETGQSFDPALLR

SEQ ID NO: 429141 - protein, 400 aa, unidentified
MNAVGIDVSKGKSTVAIMRPFGEVVADPFEVSHTDAELRKLACFLEKLPGETRIVMEYTGNYWQPIAKVLHDAGLFVSIVNALLIYKYGNNSIRKGKTDKWDAVKIANYCLDRWTGLERYTPVDQIRQALKTCRRQYDQYIRLKVNLKNNLIALLDGTFPGLNILFKSAPRDMDGHEKWVDFAEKFWHRECICGNSEKAFTNQYKKWCAKAGYRFSEEKASSIYAHAVSQVNTLPMTDSIKRLVTLAVSQLNTIIETISVIQHEMLTLATQLPEYPVVMRMFGVGPVLGPQLMAEIGDVRRFDRKQSLVAFAGVDAPPCQSGTFESKNRHISKRGSPRLRKTLFQVMSTIIQHAPADDPVFQFLDRKRREGKHYYVYMTAAANKFLRIYYGTVIAYLEKL

SEQ ID NO: 429142 - protein, 414 aa, unidentified
MVNPLIVGVDVHRKTNTFSFMDAGGVEVRPRLTLDNNRPGTQTFVKLVTELMEADGFTELQVAAEATGWYWFHFFQTLQQDPWLNSWPVELFALNPRLTANFKKSYVDMDKTDLIDAYVVADRLRWGRDIGPPFEYNETYLALRFLTRYRCHVVHNLAREKAYCMSILYLKASEYSRKDKKAFSNLFSASSRAVLQEFASVEEIAAMPFDELLEFIDICGKRRFPDPAENARLLKQIAQDSYHLPLALQQPINLILSLSLKQISASENQLKRIDTAIAEHMQSIPNTLLTIPGIGPVFAAGLIAEIGDLQRFNFDQAKVAKFAGFKWRKTGSADFTADDTRLTRTGNSYLRYYFCEAAFAVQRCDREYGAYFQRKLNEVRSHQHKRAMVLTARKLVRLVVRLLASNQPYRPRRP

SEQ ID NO: 429143 - protein, 341 aa, unidentified
MNIKRVGIDLAKDVFQIHGVDSQEKVIVRKQLRRSQMLAYFGKIQPCLIGMEACGGAHYWARELQKQGHTVKLMAPQFVKPYVKSNKNDANDAEAICEAVARPTMRFVAIKTLAQQDIQAIHRIRSELIRHRTAKVNQIRGLLAEYGLTVGRRVDVLRTALPLLLEDAINGLTLDFRMLLEDLRQDLVQLDQRVDDMDAKIKLLASSHSEAKRLLAIPGIGPITATALICAIGDGSQFKRGRDFAAWLGLTPKQHSSGGKERLLGISKRGDSYLRTLLIHGARSVLRVAGNKDDPRSRWLQSLCARRNKNIAAVALANKNARIVWALIARQTDFLPEAKPA

SEQ ID NO: 429144 - protein, 343 aa, unidentified
MKLSRVGVDLAKNVYQLHGVDRFGKTMLKRRLKRHQWLKVLLDKTEPGCVIGMEACSSAHHWGRELQCRGYTVKLIPPQFVKPYVKSNKNDARDAEAICEAMSRPNMRFVTVKTVDQQDIQATHRIREEFKGRRTAKANQIRGLVAEYGLVAPKRLSSLRAAMPCWLEDAENGLTHYFRSLLQCLWDDLLMLDDRMCEMDKTIKRLAKDNADCVRLEQLRGIGPMTSTAMIATVGDARQYHKSRQMAAGIGITPRQHSSGDKHRLLGISKRGDVYLRTLMIHGARSVVANAKHKDDPLSRWVTEIATRRHPNVAAVALANKNARMAWAILRNKTDYDPDFAIG

SEQ ID NO: 429145 - protein, 324 aa, unidentified
MSSANRSFVGVDVSKDSLEAHARPANRGQRFANDPAGIADLLAWIKPFAPDRVIFESTGPYQKAAVGALLTEGLPAVVVNARQVRDFAKAMGQLAKTDAIDAAILAHFGEVVPTTVRPLESKEILEFRDLQDRRGQLVRMRATEKKHRHAAQQGSAKVLKNIDRHLHYLQKQIGDLEKRLEQLVDACATFKAKDDILQSVVGIGPQVSRTLLAYLPELGHQTRQQIAALVGLAPYADDSGQQNGARHIRGGRSKVRMGLYQAAVAAVRHNPLMKAFYATLKGRGRASRSALIAVARKILVIANALLRTMTPYQPPTNSVCLKNT

SEQ ID NO: 429146 - protein, 351 aa, unidentified
MLLIGVDYHPSFQTIAFFVEETGEYGEQELNHGDGQAEKFYRDLQQRGICVRVGMEATGYSRWFERLLAELGFELWIGDPAEIKAKRVKKQKFDREDARLLLRLMRENNFPQIWVPSPENRDLRQLLWHRHRLVQMRTRIMNQLQALAMNEGYRWKKKLFSEHGRAQLEKLPLALWASRRRQELLELLDRLNPMIKELTAAAEREARKRPEAMRLMTHPGVGPLTALAYVLIIGTPARFQRGKQIGTYVGMIPSEDSSAGKQRLGHISKQGSSLLRFLLVEAAQAAARIHPDWRRRYMHLAMRRHKSIAKVAMGRRLALRLYWMWRNGCEYSSSFEFGSYAGQLGTGHGVK

SEQ ID NO: 429147 - protein, 344 aa, unidentified
MEITTIGLDLAKSVFQVHAVDAAGKPVVRKALRRAQVLPFFARLPRCLVGLEACGTSHHWVRELIKLGHDVRLMPPAYVKPYVKRGKTDANDAEAICEAVTRPTMRFVPVKSPEQQAALSMHRTRDLLVKQRTQLINMMRGLLAEFGIDVPCGLERALIMAREIAEGRLPNVPAEAGKILATLSQQALNLHLRVRQIDRDLLVWQRGNEVAKRLMTIPGIGPVGAAALAASVTDPQQFRSGREFAAWLGLTPRQNSSGGKERLGRITKMGDKYLRKLLVIGMTSLVRQVRYKPDAADPRLVDLLARKPVRVATVAMANKTARIVWAIMVRGESYRAGHVPVLAA

SEQ ID NO: 429148 - protein, 407 aa, unidentified
MDLLKTVFGIDVSSRKSNVCIMVNGQKVNDYAISNDMVGFNQLLGDLKQVTKPQIIFEATGVYSRRLQAFLDMHELRYVMMNPLEAKRKTKDDLHQNKTDKLDALYLAKLQSEHPQRLAYVQSEEYQELMANNRIYEQASHDLITNRNRLHKAIQLTFPEIEHLMVNPRGKNYWSIVLRFPHPDIVLETKEVDIIDFLKGLTGIGKKRANDIAQSLIRLAKVACPAVKKNSAHIRGLKMAINNILSAEEECQTALQEMAKLAPKRDLEILTSIPGIGENTALRIISELGDIRRFNNPSQLNAFVGVDPQVYESGNLTAHLSISKRGTAIGRKVLYLAINQIQSAKKVGNPCHIADYYEKRKRSSETASHKKAAIASIHKLLRTIFALIKNDQLYSYDVAKHNQRLLS

SEQ ID NO: 429149 - protein, 313 aa, unidentified
MSQNNPPIVYAGLDVAKLSLQLHLAGRFHSLTNDRSGHAKLLKLLRAHPGAHLVCEATGGYEQPVVRALQAADLPITIVEAGRVRYFARAQGQRAKTDPIDAAVLTHYGDTFKPAATPAISAQLQRLADLSQRRRQLIHTRTMETNRADHYTDPICVRQHRQLLKILEKQIDQCDQTILAIIAETPDLAQKAQRLQTISGVGPVVAATVLAEMPELGKLNPKTTAALAGLAPYNRDSGNLTGQRHISGGRRPVRCALYMATLSAVRHDQILKAFYTRLRATGKKPLVALTACMRKLAVLMNHLLKNDKFQLAN

SEQ ID NO: 429150 - protein, 343 aa, unidentified
MQTVTTIGLDIAKSIFQVHGVDAAGQVVVRRQLKRRYVLAFFEKLPPCLIGIEACASSHHWSRELQALGHKVRLMPPAYVRPYVKRQKNDAADAEAICEAVTRANMRFVATKTPEQQGCLMLHRTRHLFIRQQTAVINAIRAHLAEFGIVAPVGRNGVEELLGVVADASDKRLPEIARACLAALGAQLRMLKAQILEFDRMINAWHRSNETSKRLDEIPGVGPALATALVASVADPRVFRSGRDFSAWIGLVPKQHSSGGKDRLGGISKQGDRYLRSLFTAGALAVIRYAKIHGAKHRPWLTALLARRPTKVAAVALANKIARMAWAMMARGERYKEPVALAA

SEQ ID NO: 429151 - protein, 405 aa, unidentified
MLFVGDDWAEDHHDVEIQDESGHRLAKARLPEGVAGMGRLHALLGEHLDSDADSGQVAVGIESDRGPWVRALVAAGYQVYAVNPLQAARFRQRRSVSGAKSDAADAHTLADMVRTDRHQLRPVAGDTELAEAIKVVARAHKTLIWERTRHVQRLRNALREFFPAALEAFDDLSSGDALELLGKSADPAAAARLNRAQITAALRRAGRRHVAERAEQIQDALRGEHLTQPPTITAAYAATVRSQVAVLITLSAEITTMQGEVEAHFGQHPAAEVYLSQPGLGAILGARVLSEFGDDPARYADAKARKNYAGTSPITRQSGKHKFVLARYVHNDRLLDALGRQAFTALTASPAARAYYDQLRDRGKDHNAALRQLANRLVGILHGCLKTDTTYDEATAWPASRPAAA

SEQ ID NO: 429152 - protein, 344 aa, unidentified
MECYVGLDVSLKQTSICVVNEKGLVVREGVVDSVPEAIAGFVRSKAPGAVRVGLETGPTATWLWTELARLDLPVICIDARHAKAVLKMQVNKNDRNDAAGIARIMQTGWFKEVRVKDLDSHAVKALLASRALLVKIKRDLENQVRGLLKNLGLVVGHGTFNVFAVRAKELIADRPELTSAVSPLLTARTAIEQQIGELDRQVLKLSRQDAQARRFMTVPGIGPITALCFKATIDDPARFRRSRSVGAYIGLTTRRHASGELDWSGRISKCGDAMLRMYLFEAAGVLLTRVPKWSALKAWGTRLTKRNGLRKAKVAVARKLAVILHRMWVDGTEFNWSNNKEVAA

SEQ ID NO: 429153 - protein, 356 aa, unidentified
MKYVGIDVHKKMCQAAVLDEDGELLDQIRFLNEKEEIKDFAMKLLTFRDDVKAVVESTGNLWIQIHDILENFGIDVALSNPTKTRLIAEAKIKTDKVDAKILARLLRADMLFTCYVPGEEIRNRREFLRHRLDLVKMRTMVKNRIHSLLDKHGLRFPGTPYSKKSIVWLREQDLGFMDNAIIKGQLAILETFNEQIRVMENKIATIAVDDPQVKLLMTMPGIGYFTASLLVAEIGDINRFSNDKKISSWAGLAPRISQSGEKTRIGRVGKGNKRVAALMVQSAHNARLHDARFQKAYKRVSRRGGKGKAIVAVAHEMIRIVYFMLRDNAPYRGQNVELTLRKLKNMEGRASIGLRI

SEQ ID NO: 429154 - protein, 313 aa, unidentified
MKITFIGGDVAKSQILFAQHGKDRVEQVANSKTDLRRFFKRLPTGSALAMEATNTYHELAAQLAYDLGIDVYVLNPRDVSHYANSIGMRAKTDPCDARMIARYLAREHTDLHRWKPATQAQEALKALINRRSTLVSSRVAMQQSMGTESELKPVLNGLKKAFAKAVAAIDKAILRRLKEEPELARHADMLKDIPGIGPVVSAALATLLSRHPFASADAAVAFVGLDPRPRESGTWRGQRKLSKRGPTEIRRLLYVAAMTTARNVAMRGEIDRHKAKGLSATAIYNIIARKLLRTAWSMLKHQTPFAMDRFSAA

SEQ ID NO: 429155 - protein, 489 aa, unidentified
MLDGKGRVRESKEGHASPCHAYVIRAVRRIGSAARARRCALVKTHSQVPTRPSLTIRPAHDQSQRAPDQEWEGGRKVMSDRAALVGVDWGDKKHAFEARGADGSLRKGWIEQRPEAVHEWVAELRAQYPDGTIAVAVEQSRGAFVYSLLRYEFLELLVLHPSQTAAFRAVVKPSGAKSDQLDAGLMCDYVEKHGERVRAWRSVDALTRELLLVVEWRRKLIASKTRCCQQLRDTLKQYFPQALGWVGELDSPMALDFLERWPTLEELQRSRPATVRNFYTKHGSRSAGLLEKRLAEMAAATPLHSDAALVSALSLMVGTLVPLLRATLEQIHTVDGRIEQLWLTHPDRKIFESLPGAGPALAPRLAVALGTDREQWDARTLQTFSGIAPVTVSSGSSKWIHARWKCPKFLRQTFHEFAAASIQHCPWAAEFYRQQCARGRKHNAAVRALAFRWIRVIVRCWKDRAPYDDARYSKRLAASGSPVAAALFS

SEQ ID NO: 429156 - protein, 350 aa, unidentified
MNITRVGIDLAKTVFQVHGVDAKGKAVLRKQLKRAQVLEFFANLQRCLIGMEACASAHYWARKLTALGHEVKLIAPQFVKPYVKTNKNDRNDAEAICEALGRPNMRFVPIKNPEQQALLALHRVREALVAARTAQVNQIRGLLAEFGLIMPQGVAKMRERVPEILEDATNELPGLMRELLARCYEQFQGLDVQVHELEAHIVRWHRDNEASRRLAEVVGVGPITATAYVATLGDAKAFKSGRQAAAWLGIVPRQRGTGGKQQLLGISKRGDVYLRKLLIHGARAVLRHLKPEQANSWLGQLAKRRHRNVAAVALANKNARILWALLAHGRKYEKAHLPTRPCGGQQAQAS

SEQ ID NO: 429157 - protein, 345 aa, unidentified
MVHYADIDVSLESASLCVVDATGRIVRAAKVASEPEILIGWFRGPGLAVTRIGLEAGPLSQWLYAGMRDARLTVELLETRHVRDAFKAMPVKTDRNDARGIAHLMRLGWFRPVHCKSLPAQEVRALLTARKLLQTKNHDVEMSLRGVLRGFGLKVGPTTPRTFVSRIRELVAGHTTLSTVAEALLAARGMLFEQWQKLEKRLRSLAREDGRVRRLMTAPGVGTIVALTYASAIDDPARFRSSKSVGAHFGLTPKKYQSGETDVTGRISKIGDGGVRTALYEAANVILTRPVKGSTLKSWGMRLAARAGMRKAKVALARKLAVVLHRMLADGTSFLADKAAVAAAR

SEQ ID NO: 429158 - protein, 449 aa, unidentified
MGKGSGITRGDRRRNAKKARLRALVPEENAVAGLDLGEKRQALAVTGADGVVLARRSPQVSVHDLGPCLDRALAQARAAGYAGLSVACEPTGSRWMAVQDLCAARGLPFVCVQPLVSHLAREQEDLTGDKTDEGDSGLIARLARELHCYEPERLEGAWAELRDEGRRRAQLITGATAAKQLIRDKLGLAAPALLETACEPFDSATWLASLEVVLERCGGDAATVTAMGYEAFAAAVAAVLPGWGGKRVGGTCRQLFSALGDSRGVARMRRAAMRRVRGALADLKYARSRRGQAEADMIALLSELGADAGRICEIPGLSPVTLAAILAETGDLHKYESSSSVVKHAGLSPARNESGSFRGQAKISRRGRPVLRLAAWRATWAVLRHCAVLAAKHAALTSRDDDSRLTPEQARVACAASLLRWIWSLTVHGTRWDARIAAGDLGHHRAMAA

SEQ ID NO: 429159 - protein, 404 aa, unidentified
MNGPIVSVDVSKGKSDYQAFKDLNVKFTDVRSIKHTKEGFDKIVNLVKDMERKLETEVCVVYEATGVYHRVLKKVLEDNNIKQFIINPLLSAKTRKNDSLRSPKTDKLDPKSIAKTYYSHSLHNSHKPETIYHELRELSRYYEDILVHLRKDKVAFRAQLDVVFPGYDTLYDDLYGPVALAVIEKYPHPEMLQKKNINTVSKVIQSKTCHRQAMSDTMADKAIEYSKTIYSGCDKDDIEVLILQRFIKKLKEDMAEAERTIGEMIKLAQELPDFSIIKSIPGIGDNLASRIIAELGDMTRFKKKNELVAFAGLDPRISESGQNDGDHMHITKKGNKRLRCLLYLAVTCSIRLKRDDNSIKDFYIKKMQQSNPMCSKAAKTACASKLVRIIYSMCKTGELYQYNK

SEQ ID NO: 429160 - protein, 316 aa, unidentified
MYLGIDVSKLTIDCYLIADGQNHQKKFQNNKVGFEQLTKWLQSHKVSDKLHCVCEATGTYYEALAEYLYSRYTITVENPRKIKGYAIAELQRSKTDTQDAKLIAQYCQDRKQKLKAWQPPAKEQKQLQEIARYLDYLKQQRATEKAKQHEAPEYIKSHIQTTISNLTAQIKTVKKQLLQFYKDNPSYNDLRKRLKTITGIGEQATAILLSTYKRHEFKNAKQFTAYLGLDPRKYQSGTSVNGKSRISKIGSSEIRKSLYMPAVVAYRCNAFPEFVGRLKNKGKHIKLILIAIMRKLAVIAFTLLQNGQDFQVERYK

SEQ ID NO: 429161 - protein, 276 aa, unidentified
MHPDVFAAAALQNAPTATAKTLWVQDRLHTARLEDWARKHLRSGDVLVLEASGNSFEVASRFHAMGHTCLVLESAQAAKIKENFCNDDRHSAVKLARVYLSGLGKIVWQPDEQTRRMREVFFAHRAAVKDCTRLRNRIRTYLNEHCVHLPKGTRLTQKQGLQRALAAHPWSTLQIDLITDTFEQLWSTEARRKRLERLMVSQLLERPERARLWRLMGVRHIVAFGLMAVIGDIHRFPTAKKPVGYIGLSPRKDQSGTTPRAKRKALAKPAAATCAP

SEQ ID NO: 429162 - protein, 429 aa, unidentified
MPYRIAGIDVHKKILAVVVSNVEIESEYQFERRMFGSNPEQLRSLAAWLLEQEAEEVVMESTAQYWKPVWGALERYWKPICEKREGARRKSGTLHLAQALSNRGRHGRKRDFVDAERLVKRLVARELVLSFVPDPEQRLWRTVTRKKYQLRCDRVRLQNQLESLLEEAHIKLSSLVTDLLGVSARRMLKALADGETNPAALATLADERLRATPEQLCDALGACTELNPVYRRLLKMALEELRLIDEQIAQLDQEMANLLRPHQDAVERLAEVPGLGVDSAQQIIAEVGPTAETFPSAKCLSSWVGACPGDNESAGVNYSHRSPKGNRHMRRLLNQAANAAARTKGSIFEIVYRRSVPRLGHNQAIGAIAHRQCRLIWLILHQRVRYEERGPAVTKQSRQKRTARMIRQLRSLGYRIEAPNPQPSQAQAQ

SEQ ID NO: 429163 - protein, 390 aa, unidentified
MILVGIDVAKDKHDCYIINTDGEILNDVFTIPNNRDGYDYLYEQISSFTTDITKVKVGLEATGHYSYNILKYLLDKHLTAYVINPLHTNLYRKSQSLRKTKTDRIDSRTIALMLLTDSSLKPYSISSYHRENLKSLTRYRFTKVQERSKLKSSISRLVTILFPELTQIVSCIHIASIYAILEEFPGASYLATAHLTRLTNVLMNSSRGRFGKEYAIKIRNLAKESIGSALQAKSLELKHTINLLKILDDEIHEVEASISKIMQEIDSTITTVPGIGTQMAAMILAEVGDFSNFDNPDKILAYAGMSPSTYQSGKLTNSYSHMEKRGSRYLRYALFNVTKYVCHYSQDFSKYLSKKKSEGKHYNVAISHATKRLVRLLYSMETNGTIYRIA

SEQ ID NO: 429164 - protein, 430 aa, unidentified
MKSNTQNAKIEAITEKTLVLGIDVGSEMHYARAFDYRVIEYSKKPFKFSNTEAGFATFKEWVLDLKERHEKDKVVPGMEPTGHYWFNLGKFLQDNEMKPVLVNPHHVKKSKELDDNNPTKNDRKDPKVIAGLVREGRYMIPYLPDGVYADLRTASNIRFQLQAELTRIQNRISRWFNIYFPEYKTVYGKPDAKSGMLILKAAPLPEDILTLGIDGVNQIWRDAKLRAVGKARAKTLIEAAEHSVGSKEGAVSARMEIRMLLEDYESRNIRLQEVMTLIEGLVKQIPMAEKLLEIKGVGIRTVSGFLAEVGDISRFNNPKELQKLAGLALVENSSGKHKGETTISRRGRKRLRYLLFEVAMSLVSKNQEFRELHNYYTTRRLNPLKKMQSLMAIAAKLIRVFYAMLTKGVDYDPKKMVSDIKRPAVYLQAA

SEQ ID NO: 429165 - protein, 397 aa, unidentified
MYIVGIDIAKRKHEAAVIDGDGAVIIKPFSFSNNCSGYNRLLAMLTKAKLPLDEVSFAMEATGHYWLALFTRLQKEGFRVQVINPVQTNSIRSFYIRQAKTDPRDALLIAEVIRFGHFSESALHPENIYELRELCRGRHAIVSMQADVKRKVVALLDQVFPEYETAFTNLFGDTSMAILQTCPTPKELSEMPLEELCHLIEVSSHKRFRMAKAQELQALARDSFGFAMAGDVFSTMIRLYAKHLDFLKQQVREMDRKIAEIMDTLDTPITTITGIGPTLGAYILSEIGDINRFSSAAKLAAYAGIDPTMRQSGEYNGVRNRMSKRGSPYLRHAIWLAASSAVLHDPALKLYFQKKRDEGKPYMASVGHACRKMVSIIYAVMRDNKAYTPCIPNEISA

SEQ ID NO: 429166 - protein, 360 aa, unidentified
MAKARSLVGLDVHATKIVAAVLDAETGELQFFAMTAEIEKAAGFCAALPRPVRVAYEAGPTGYGLARELAKRGVECVVAAPSKIPRASGDRVKTDRRDAELLVRLLLAGKLHAVRVPGAEEEALRDLVRAREQVRVDLMRCRHRLSKLLLRHGIRFEDGDAWTDRHRAWLNEVVLEWPAAQATLLDVRGAIDALCHRRDGLEREIVSMLPSSPWTAQVGVLRCLRGVDTLTAVGLCAEVGDFTRFGRAEQLMSYLGLVPSENTTGQQRRLGSITKTGSAHARRLLIEAAWHYRPRPNLSKRLTERQADQPPEAIAVAWTAQKRLHRTWTRLEQRGKRRTIIAVAAARELTGFVWAITQIE

SEQ ID NO: 429167 - protein, 314 aa, unidentified
MNENTEIFVGIDISKDTLDIGFRPSGQSVSLAHDEGGSIEVMHRLSEAKPQLIVLEATGGLEVDLATRLMVAGLPVVVVNPRQVRDYAKATGQLAKTDRIDALVLADFGRAIRPEVRPIKDAATRELDDLVTRRRQLVEMRVQESLRLARASKAQQKSLKRHIAWLDKRIAELDTELTKRLRTSPAWRAKDDLLRSIPGVGPTTSATLLAQLPELGTLDRKSIAALAGVAPLANDSGQHRGKRRIWGGRAEVRSVLYMSTVTAIRWNAVIKAFSDRLKAAGKPAKVVIVACMRKLLGIMNAMLKTSSPWTAKIA

SEQ ID NO: 429168 - protein, 395 aa, unidentified
MRHILSFDIAKGKSVYCFIDELRNVIIDASLIEHKKDEFDLLFNKVKNYSNLIVIMESTSIYHLPVETYFRSKGIETIIINPKLVKQFKDTLNKSKTDKLDCFKIARCFLGTIDDFYQKQDEYFMYNPLARQYWSLIEGQTRLKNRYRQLIDIVFPEFALIFNDLYDDLALNFIHDFPHPVLFVNRRIDYLMNYLKEKNGTTQAYRFKNKVLKMKELASNSLCFVAFDSYQVQNLVQVIEMIQYHKSEINKIKNQLINEMKDKKLFKIINSIPGFGEFSTALFLAEVGDITRFDDKYQFISFIGIDSVTSQSGVSAYHGPISKTGCKFGRTILFNIVTAILQISAHSDKTNPIYLFFRKKQSEGKHHYKCIIACSTKLCKIIYKLCSSDCLYENK

SEQ ID NO: 429169 - protein, 387 aa, unidentified
MPQPNDLSRSLVALDHNSTIVAVVELSQSSWLVGGVLPGIERQPRKKLEPSPERLLAVLHRWRDEAVRAGDTITRIAVAFEAGHDGFWLARWLEAHGVEAHVIHPSSVAVSREHRRAKTDRLDTELLKRGFSGWLRGERGHCSMVRVPTIAEEDAKRPNRERECLVGERTRINNRIKATLARLGIRNFKPTLRQAAERLATIHTPEGMPLPPNVLAELQRDLARLGLVISQIREIENARQKRLEQQPETTPHAMVRLLARVVGIGIETGDLLVHEVLSRPMRERRAVARYAGLTGAPDESGARRREQGLARAGNARVRRGMIQLAWRFLRFQKQSALTLWYRARTADSRIGTRKTMIVALARKLVIALWRFVTTGEPLDGVVLRPAA

SEQ ID NO: 429170 - protein, 461 aa, unidentified
MKNVLLPFCIQVRFIEMVIQRFHIGMPYIIQKKGSDTKCREVLPGIYAFIMKGGIRMDGPIITVDVSKGNCHYQPFLEKGKPLRKPKILYDTIEGFEELQKSIDQTEEKSGSKVSVIFEATGVYHRCLQKYLDDHDIPYYIISPLLSAKYRQTNLHANKTDALDCGHIAKAYYGDERLYVFEKQEDRFIVLQRLNRMYEDELQHLRKRKVSFRSTLDIIYPRLDKCFNGKASLYDPVIMEILKKYPHPKLLLKHKEETIAKAIERRTDHNVLFISKIVHKVCECAMKCYSGCDVDDIEVRKLPDMIEELQDQMERCESLLSELVKEAGEIEYFNNVASIIGIGVNLASRIIAELGDISRFKNRKAISAYAGLNPKILQSGDKDGIHLKISKKGNRHLRCLLYLGATCNYRLKKGDPLYEFNQKKRQQAVSPLKPKAANIAAAHKLLVIIYALVRNGEKYRF

SEQ ID NO: 429171 - protein, 324 aa, unidentified
MQHEPLIDVALPVAGIDVAKKQLDLFIDVADQRLRVANDDAGVARLVATLVEHRVRLVVVEATGRYHRRVAAALLQAGVSVAVVNPQQVRAFAKAAGKLEKTDRIDAGVLARFGRAMDPRPAVETPESQTILSDLVCRRRGLVQMRVAEANRAHDRLPRLAAAQSRKLLRLIEQQVEDLDREIAKLVEADDGRGGKAKVVDSVPGIGPDTANQLVVDLPELGELNRQEIAKLAGLAPLNRDSGRYRGQRKIGGGRAEVRTCLYMAAFNARRHCDRFRDYFDGLIARGKLYQVAMAACMRKLLVTLNQMVKTNTHWNPNLHGAVA

SEQ ID NO: 429172 - protein, 400 aa, unidentified
MECVFGIDVSKENANVAVLVDNVVIKQFKIGLDQLGFSLLSDELNSFNAPLIIYEATAMYSRRLRAFLQRDGWKYTELNPLAAKKVMEEFRHTKTDALDAVGLARAMIKNHFRPTYQESPVYTELHDLERTYQQFNKDIVTNKNRLHRALQLTFPEIEHFMSSTDGVLYWHIVQRFPHPAIVLSHEENELTEIILTETSKKIGLKRAIKLANRLLALAQNSAPAKEPQSHAVRAVIALAKEVERINQLKAQIIVEMTTLGENLSEVPLLVSIPGIGIKTALCLIAELGDVRRFHSANAINAYIGIDLIRYESGQYEAKMHIRKRGNPYARKILYRAILNVISVSQYQPTLISANYKRKKQSAQSHGTKKIAIAAMSQFNRLMHHLILNNELYDSTTFMPE

SEQ ID NO: 429173 - protein, 380 aa, unidentified
MSPMVGGMQEVLRFELMIERGLFGAATKHQERKRSMKYYAGLDVSVKETSICIVDETGAICREIKVTSHPEDLVQVLRNPEWRLVRIGLEAGPLSQWLFSGLAEAGLPAICIETRHAKAFLKAQVNKTDRNDARGIAQMMRVNLFRSVHVKTLTSQKRRALLTARKLLQEKAIAIENDIRGLLRNFGLKVGIIGTVGFDGRIRALVDDMPDLGEIMEPLLAARQKLRETFMALHRKLLSIVRDDEACRRLMTIPGVGPVTSLAFTSTIDVPARFSNSRAVGPALGLTPVLNQSGESHRVGRVSLCGDGMMRALLYEAAQVMLSRVKKWSWLKAWAMNVARRRGRQKAIVALARRLAVIMHRMWSDGTEFRWTKESMPAAI

SEQ ID NO: 429174 - protein, 345 aa, unidentified
MKLSRVGIDLAKNVFQIHGVDEHGELVWKRSLKRSTWLGVFFKSVDPGCEVAMEACTGAHHWARELQARGYGVKLIPPQFVKPFVKSQKNDANDAEAISEAMSRPAMHYVAIKTIEQQDIQAVHRVRSELMSHRTAKANQIRGLVAEYGLVAPQQLGPLRAAIPGWLEDAQNGLTNRFRTLLHGLWEDLITLDQRIKVLDAEVAAIASTHPDAKRLQQLRGVGPLIATALVAKFGDAHHFKQGRQAAASVGLTPRHHGTGGKNRLFGITKHGDPYLRSILIHGARAVVSQAKQRDDRLSRWATELAQRSHMNVAAVALANKTVRMAWAMLRNGTDYDPELTVTQV

SEQ ID NO: 429175 - protein, 340 aa, unidentified
MEQIIRIGMDTSKHVFQLHGVNAAEMPVLRKKLRRKEMVTLFQKLAPTVIAIEACGASHHLARLLQSFGHAVKLIAPQLVKPYVKRGKNDAADAEALCEAMSRPTMRFVPVKSAEQQAALMLVGVRERLVRNRTQLANTIRGYAAEFGLTAAKGMAHLAPLLERIQADETLPALARELFASQAKEYEQLQAQIDDVEAKLTAWHRADECSRRLAKIPSVGPIGAVLLKMKTPDPAQFRSGRQFAAWIGLTPKDHSTAGKVKLGGITRAGDEALRSVLVVGATSVIQHALRSGKASPWLAALLKRKSPKLAAVALANKTARIAWKMMVTGEAYNAKSAVAA

SEQ ID NO: 429176 - protein, 317 aa, unidentified
MAQKGTIVGIDVAKGKIDAAIRFGAEASFANSAEGRRELLAWLKEHGVCKAVMEASGGYEKSWAALLRGAGVEVVIADPNRVRHFAKSAGQLAKNDPIDARMIAWFGEVFGHASGQPHDEERQELDQIVTARLGIVRLKEQIENWGEHEQPKAVQKAQQALLKAVAIQLAKLETIIAAKIDKTERFAQRAEIIQSVPGLAGTAAAGLIAFLPELGLVDRQAAAALLGVAPFDADSGQRRGERHIQGGRHKLRKLLFMPVLSAATQHNPVLKACYQRLIAKGKKAKVALIACMRKLIGILNTMLARGEKWNPARHAIA

SEQ ID NO: 429177 - protein, 343 aa, unidentified
MQIRSVGIDLGKTTFHLVALGDNGKVLLKKKFTQRQLIAFTANLQATLIGLEACAGAHFLGRALREQGHDVKLIPAQFVRPFVKSNKNDFLDAEAIAEAVDRQNMRFVPIKTDDQLDLQALHRVRDRLITRRTSVINQLRAFLLERGLVFAKSPAKLRERMPEILENAEEDLTPRMRNLLALLWNEWKDLEQQVVDLNHEVELIASSDAACLRLRQIPGIGPLVATAIVASIGNGAAFHKGREFAAWMGLVPKQYSTGGKAKLYGISKRGNRYLRKILIHGARAMVLRCKRDRVPMGAWMTALEARAPRNVLIVAAANKLARIAWAVLSSGQDYRAVQEPVAA

SEQ ID NO: 429178 - protein, 362 aa, unidentified
MNTLARETSAAQIEVAGGVDTHQDTHTAAVVDQAGRMLGHRTFSTTEAGYRQLLAWLGGFGTLVVVGVEGTGAYGAGLARYLMAQGQAVVEVDRPDRKARRAVGKSDPIDAESAARAALGRVRTGLPKQHDGMVEALRNLRVARRSAVSERANCMRRIKTLIITAPQELRERLRDLSKARLLRACAGLRPDLSLVGEPEQAAKVALRVLGRRHAALSVEIADLDALIAPLVEQINPALLVLKGVGPDTAGQLLVTAGQNTERLRSEGAFAMLCGVAPIPASSGKTHRHRLNRGGDRQANAALYRVVLSRMRWDPRTRDYVARRTTEGLSKKEIIRCLKRFIAREIYYVLRQPAVTLVDGHAR

SEQ ID NO: 429179 - protein, 373 aa, unidentified
MTKSDGVDAPSRRHRNVPCWRLLSSTTKKGASMGEVTIIGLDLAKRSFQVHGAYADGSVAFRKKLTRAQVLPFFADQPSCVVAMEACATAHDWGREIGALGHEIKLIPPMYVKPFVKRQKNDAADAEAIAEAASRPTMRTVPVKSRDQQSRAVLFRTRDLLVRQRTQLINALRGHLAEYGSVAPKKAVNVKRLADVLDDPENGLPPLVVDMGRIYLEHISSLTKRVDALEKQILTEANRDKTARQLQTMPGIGPVTAMAVTAFAPSMETFRRGRDFAAWLGLVPRQHSTGGRSILGKTSKMGQRDIRRLLIVGAMSVVNAALRTGKPAEAWLGRMLEKKPRLVVAIALANRMARRLWAMLTQHEDYRDPAMVA

SEQ ID NO: 429180 - protein, 425 aa, unidentified
MRFIGLDVHRDFCEVAIAESGQVRLAGRVQTEPEELALFAQSLAADDQVALEATGNALAIARVIEPHVGRVVLANPKAVKGITQTGAKTDKIDARTLAKLLAGGFLPEVWLPDEQTRILRRRVSHRAQLVRHRTRAKNQVHATLIRNLKGKPPVADLFGVRGRRWLGEQVLPADEQETIAACLRQIEFLDAEIALVERALAQQVLASAEMRRLLTLPGVNFVTAAALIAAIGDVTRFATSRHLVSYLGLDPRVRQSGIEPARHGRISKQGPGETRHVLVEAAWHAARTPGPLRAFHERVAARRGGNVATVAVARKLAVIAWHMLSRGEDYAFARPSLTREKIRKLELATGAERRKGKRNPVRVFATREQHRLDQQLAAQAELAYRRLVQDWQPAIKGTGAAPGRASRRPSSGQAARQETAPPPAL

SEQ ID NO: 429181 - protein, 326 aa, unidentified
MEHELHYIGIDTAKEKLDVDVLRPDGRHRPKKFANTTKGHNELVSWLKGHKIDHAHICIEATGTYMEPVAECLYDAGYIVSVINPALGKAFAQSEGLRNKTDTVDARMLAEFCRQKRPAAWEAPHPLERALRALVVRHQALTDMHTQELNRTETAREVQRPSIDAHLLWLEAELKRLEKQIKDLTDDDPDMKHRRKLLESIPGIGEKTSAVLLAYIGLKDRFAHARQFAAFAGLTPRRYESGSSVRGASRMSKAGHVSLRRTLYLPAMVATSKTEWRRAFRDRLAANGKKGKVILGAMMRKLAQVAYGVLKSGVPFDASRHNPVAA

SEQ ID NO: 429182 - protein, 421 aa, unidentified
MNQLTDTEYTAYVGIDWAAEKHDICVQAAGGERREFACISSQPEGIDAWAQALHRRFGGLIAVALELSKGPIVSALQKYDFFELYPINPSTLARYREAFTPSGAKDDPTDAELAVDLITRHPERFSPLKPQSVGMRKLIGLVEQRDKFVSDQGRLVNRLGHALRQYYPQVLEWFSEHNTVVFCDFLSQWATLTQVKRARKTSLERFFRSHHVHSAELIERRITAIKAAMPLTLDAAVIDPHRLQVEVLIEQLRITIKALKRFDAEIAVTAQKLPDYDLLFRPLPGAAKVLAPRLLAAFGEDRQRYPQADALQKYSGIAPVTKRSGKTTWVHWRWQCPTFVRQTFVDWSAQTINKSAWAGAYYRQQRAKGCSYQVAVRALAFKWIRILHRCWQDRTPYDESKYLNALRRKGSPLLKYLAETA

SEQ ID NO: 429183 - protein, 342 aa, unidentified
MKDMMIGVDLAKAVFQVHGSLRTGEVHFRKKLTRKQFSEFMARQAPSLVIFEACGSAHYWARAMEALGHEVKLIAPQYVRPFVKRQKNDAADAEAIVIAARQPEMRFVEPKTVEQQSRAAVFRGRERLVYQRTAEVNALRALLYEHGHVFPAGIRHLNRMTTLVVDEASDLPALIREECQDLLAQIAEKTARIIERTTKLKTLAAQSDRARRLQTMPGVGPLTAVAVEAFGPDMAQFKSGRDFAAWLGLVPRQHSSGGKERLGRMTKAGQADIRRLLIIGAMSRLGWLGQRAIPKGSWLSRMLLRKPKMLVAIALANKMARQMWAMMMKNEDYWDPALAPAA

SEQ ID NO: 429184 - protein, 356 aa, unidentified
MLNDKKYIGMDVHKESISIAVRNEAGKIVMECVIETKASMILQVIDGLRGDLQVTFEEGSWAAWLYDLLKPHVAKLVVCDPRKNASMREGNQSDKIDARRLAELLRLNHLNPVYHGEHGLRSLKELVRSYLTITKDLGRVMSRVKAIYRSWAIPCTGKQVYAPRHRAEWLAKITEPGVRRRAEFYYQQLDALRSLRQQVRRDLLAESKKHPAWKRLCQIPSIGPIRAAVLLGILQTPHRFRTKRQLWTYSGFGIETQSSADHQSVDGQLERVKKPNSIRGLNRNCNHDLKNLFKGAAIVASSKPGPFQEFYTALLTKGIRPEMARLTLARKIATIALIVWKRGASFDAQHLKPQTA

SEQ ID NO: 429185 - protein, 457 aa, unidentified
MRQKSKRTLGIEEAHPFSGMSRVNPNAAGVDIGAIEIVACVSGDENTQIVKAFGNYTVDLQALAQWMKGFHVKTVAMESTGVYWIPLFEELERQGFECLLISSRSLRRVAGRKSDISDAQWIQTLHSYGLLEGSFRPQGELVALRTLLRHRSQLVEHRSPHIQHMQKALLQMNVQLSQAVTDVIGMTGQAILRAILAGVRDPQTLAAMRGPGCKKSEEEIGRALTGTWREEHLFVLKQSVMMYDFYTQAIQDCDEEIERIYAMTRPDWEAGEVSPLTKRKRNSHSKNAPHNPGEIRKHLKRISGVDLSVVDGFGVSLAQTVIMEVGTDMSKFPDEKHFCSWLGLAPKHEISGGKVLKNKTLKTKNRAGQAFRMAAQSVKQAECIFGVLYRRLRARLGPAQATVATAHAIARVVYRMLKYKVEYEPLSLNEYQKQYEEQQIKYMRKKAAKFGFQLVPT

SEQ ID NO: 429186 - protein, 373 aa, unidentified
MNACLTPKSTVVGVDVHKYSHTAVAMDCFGQEKARLDFSNERLNDYVLWLRELGDKEDIIVALEDVNGYGFHIVERLSKEKISMRYVPAILTERERKKSIHREKSDYEDAKRVGKVILTKFDETLPAKESIADDQERELSANLDLLTAERRILVQEKTILKNQLHAMLHQIYGDHYGEGFPKVFHKKAIKSFRQKLTKTKFDNPIRVALAGSSIRRFDRLALVEKQLKEIDGSINNIGQKSEAVLALSDNIHGCGIITAASIIAEVTTISRFCDKSRFARYSGIAPIDKSSGRHQRLYTSPFGNRKMNRALHTIALCQIACKGDDRGKIYFKKKLAEGKTKLWALRCLKRQISNKVFQALKEQKRRERTIQNG

SEQ ID NO: 429187 - protein, 392 aa, unidentified
MGCPMPQRNDLSRSLVPFQQDGTLVAVIELSRSSWLVAGIVPGLERHPLKKLAPDEDALLRLLHRWRDEAAKAGCAITRLAVAFEAGRDGFWLARWLRAREVEAHVIHPTSIAVSREHRRAKTDRLDTGLLKRAFLGWLRGEPGHCSMAAVPTLEEEDARRPNREREGLVGERTRIVNRMRGCLARLGIRGFGPASRGAPDRLEALCTPEGVALPPNTLAELRRDMARLRFVSDQIAEIEAARRERLRQAPAEDRPHAMVRLLARVIGVGVETADMLVHEVLRRDLRDRRAVARYAGLTGSPEESGARRREKGLAKAGSARVRRGMVQLAWRFLRFQEGSGLAGWYRARTADARAGTRKTMIVALARKLLIALWRLVTTGEAPEGVVLRPAA

SEQ ID NO: 429188 - protein, 398 aa, unidentified
MDLPVYYELETNNGNRDYRIQIGGHYMNYNTVYVGMDVHKESFTLCSCKYEDEKASHYQRTPASYKNVLRYLAFLRTIYGEDTRFVCGYEAGCLGYSLYHQLENFNVECVILAPTTMLEQRSKRRIKTDKRDAEIIAKSLAQHNYSPVHIPTETDNQTKEFIRMRDDHKAELKKIKQQILAFCLRQGYQYDGSGNWTAKHVKWLRSLKTEGLYKEILDEYLLTYTILTDKLNRLDQRIEELASKEEYTESVSKLTCFLGIKTHTALSVIVEVGDFQRFVSARKFAGYLGLVPGQHSSGDDRNGLGITKAGNTHVRRLLVESAQSYTRGKIGYKSRVLRSRQAGNSPQIINYADRANERLRRRYYKMVLKDGKKYNIAKTAIARELACFIWGMMTDNIY

SEQ ID NO: 429189 - protein, 343 aa, unidentified
MQDVATVGLDIAKQVFQAHGADASGETLFNTKIKRENVLEFFSKLKPCLIGMESCATSYYWARQLLEFGHDVRLIHTSYVKPFVKRGKTDANDAEAINVALTQKTMRFVPVKTLNQQAAITIFRTRSLFVSQRTQLVNALRGHLAEAGLIAAKGIQNYSKLVNLMETAADTVLPTVMKQALTDICDQIHRLNDLVTKLDKEIERRVRHDENACRLLTIPGVGPKTAMCVIATIPDIHQFPSGRHFSSWLGLTPRTHSSGGRSVLRRITKMGNSELRTMLYLGGTVIMMRDKKTPIGRWASRLRARRPYKVAVIAVANRIARIIWALLTNGGVYDPTYGREASA

SEQ ID NO: 429190 - protein, 343 aa, unidentified
MERYVGLDVSLKLTSICVVNQTGAAVREGVVDSDPEAIASFVRSNAPRAVRIGLETGPTATWLWTELKRLGLPMICIDARHAKAVLKMQINKSDRNDAAGIARIMQTGWFKEVRVKDLESHSVRALLASRALLVKIKRDLENQIRGLLKNLGLVIGRAKFNVFAVRAEELIENRPELIAAVGPLLAARKAIERQVGDLDRKVHKLARHDLQVRRFMTVPGVGPITALCFKATIDDPTRFKRSRSVGAYIGLTTRRHASGEVDWSGRISKCGDRMLRMYLFEAAGVLLTRVPKWSALKSWGTRLAKRNGLRKAKVAVARKLAVIMHRMWIDETEFNWSTKKAAV

SEQ ID NO: 429191 - protein, 343 aa, unidentified
MKLSRVGVDLAKNVYQLHGVDRHGKAVWKRRLRRGQWLQALIDKVEPGCEIGMEACTGAHHWARELQSRGYTVKLIAPQFVKPYVKSNKNDANDAEAICEAMSRPHMRFVTVKSIEQQDIQATHRVRSELKAHRNAKANQIRGLVAEYGLVAPQTLLALRRAIPAWLEDAENGLTDYFRSLLHGLWDDLLTLEDRLKELDKEIEKIARSNEVAKRLQQLRGVGPIVATALVATVGDGAQYRKGRQMAAALGLTPRQYSSGDKHRLYGISKRGDAYLRTQMIHGARAVVSQAKHRDDPLSRWVTDIAKRRHPNVAAVALANKTARMAWAMLRNETDYDPTVSTC

SEQ ID NO: 429192 - protein, 436 aa, unidentified
MRGCRCSMIMGFTKPIEHFNLQRKKVIIMNTLYVGIDVSSKSNVVYLMLPNGDKHSNFSVANSHEGSTQLVKRILSALTSHSLDTVLIGLEATSVYGDNLVYFLREDATLAPFNRKIHVLNPKQVKKFHDAYNDLPKNDYVDSFVIADCLRFGRINKEVYLGDYRYKALQNLTRARFFAVQNLIKEKQRFMNVLFKKYSTMTQEKVFSDTFSTTALAVYDEFDSAEALANMDLHELTDFIIEKGKNRFPDPDAGAKAIQKAARSSYRLPKTVNDSVNQVLSISITSMKALESQIKEFDKAIKAQMELLPNVLISIPGIGPVYSAGIMAEIGDINRFDNQAALAKYAGLAWKQHQSGSFEAEVTRLIPSGNRFLKYYLYEAAFSLVRCDKEYSDFYHLKYKEVNRCQHKRALALTARKFVRLVFRLLKDNRLYVPAK

SEQ ID NO: 429193 - protein, 356 aa, unidentified
MGLQGKKEKSAVNHVAIDLGSKESQVCVRSADGAVLHEKKHPTRALEAWLKSCPPSRVILETSSEAFRVADAAKAAGHEVRVVPGTLAKQLGIGERGIKTDLRDARKLSEVSTRIDLPSVHIPTTEARELRSLVRSREALISTRTKLVNHARGWLRTMLLKIRGGATNTFPDRMRAAAIQHQQPIPPHIEQVLVVIDALNLQVLASDRQMRQRVQASELCRRLMSVPGVGPVTTLSFVAAVDDVSRFKHAFRLQSYLGLTPGEDSSSERERRTSITKAGSTSVRRTLIQAAWVALLRRPNDPMVQWATKIAARRGKFIAVVALARKMAGVLYALWRDQTTYRPNRAAQVLDEAPTM

SEQ ID NO: 429194 - protein, 330 aa, unidentified
MDRTSVGIDVSKETFVIAVAPTGDQWTSETTPAAVDILVARLVQLQPAIIVVEATGGYERAVVAHCAAASLPIAVVNPRQVRAFAQAVGRSAKTDGIDAAVLAEFGARIHPPTRGIADAETRALAALVVRRRQLIEMIVMERQRLAQAPPTGKITRDLRNHIRWLERRVEDVDEEIGTAIQASPVWRVHEDLLRSVPGIGPTTARTLLAELPELGRLERRTIAALVGVAPFNCDSGQHRGQRHIWGGRASVRATLYMAALSAIRCNPILAAFYQRLRAAGKPGKVALVATMRKLLTILNTMMKHQRPWNPKAASTPASPSRSARAAAVLA

SEQ ID NO: 429195 - protein, 405 aa, unidentified
MEIIVEKGCGLDVHKGTVVACIMGVGIKKEIRTYTTMTNDLLRLKEWLQNSGITHVAMESTGVYWKPVFNILEDHFEVILVNARHVKNVPGRKTDVQDSEWLCKLLRSGLVSGSFIPPRDIRELRDLTRHKRKLIQAIVAEKQRVEKVLEDANIKLSSIASDTFGASGKRIVEELIKGKLRAEEMAELSKGRLRQKREDLKQALVGEVREHHKFMIKASLKHIRAMEKILLDIERKIQEKIDRHYKEEYKLLQTIPGVKGEASTLIAEMGVDMERFPSEEHLSSWAGMSPGNNESGGKKKPGSTTYGNKCLKTMLTEFAWVASKTKDTYLRSKYHSLVGRRGKKKALVALGHKILIMCYHILKYRCAYKELGVDYLDKRRKDKIAKSYIKRLHHLGYEVTLKEAA

SEQ ID NO: 429196 - protein, 389 aa, unidentified
MKIFVGIDIAKLNHFAAAISSDGEIILEPFKFTNDADGFQLLVSKLESFDKNSLIIGLESTAHYGDNLVRYLVTELYQVCVLNPIKTCQMRKNNVRKTKTDKVDTYVIAKTLMMQDNLRFVSFFDLDMMDLKALGRFRQKTIKQRTRLKIQLTTYVDQVFPEIQYFFKSGLHQNAVYALLKEAPSPKEIASMHMTHLANLLKVNSHGHFTKEQAKELRVLAQKSVGANDSAISIQITQTIQQIELLDSQLEKIEAEMTDIMKFNDSVIMTIPGIGYINGGMILGEIGDIHRFSNPNKLLAFAGLDPSVYQSGNFQAKTTRMSKRGSRVLRYALVNAAWNVVRNNATFKAYYDAKRAEGRSHYNALGHCAGKLVRVIWKMLTDEVEFNLE

SEQ ID NO: 429197 - protein, 308 aa, unidentified
MTSNRQYIAIDIAKQTLQVQSDLKSLSLNYDEVGLKQLRAFIKQHERPMIIAEATGGYERPLMSMLFKYNISVALINPRLARAFAVSEGIKAKIDPIDADMLLRFAKEKNPRPTEYIGAEREELGALMDRRSQLTEHIAKEKNRLDKSPKSICGSIKKMIRLLDKELALIEARITKLIDSNEQMKAQSKLMQEVCGVGANTAWSILAYLSEITSLNRNQLVALAGLAPYNRDSGKYKGKRSIQGGRAKVRATLYMAATSASQHNAVIKDYYQGLKSRGKPSKMALVAVMRKLLIHLQSILKKQQLLLD

SEQ ID NO: 429198 - protein, 401 aa, unidentified
MNNTTMFYVGIDVSKDKSDICIKNENGNDLIHRFKITNKKADLEMFYEIIESIKSKTPGNSDVVIGMEATGIYSLPLYSALIRDGHKVKLYNPIQTNGFRKMNIRKTKTDPIDSAIIADMLRHSEPPQVSEIQDFHLFQLRELVRIRHRLIEKQSLCKVQLVRNIDAIWPDYESVMKRVFGATSLAILKKYSVPSKLRNESFEQFYELVQKKSRSKISRSKAEKLYTHAGNVLTIPELDSVISIEIKTLITQLELHDEQIRSVESNINQMMKQIDTKIMSIPGIANILGPTILGEIGNVNRFSNAKKLIAFAGLDPVVSQSGRFESKGGRISKRGSPLLRHALFLAANTAIQNDDNLKRFYVKKRSEGKHHFSALNAVAAKLLRIVYWVLKNKKEYQIQLS

SEQ ID NO: 429199 - protein, 391 aa, unidentified
MTKPKSKSVNDFSRCLDPLDMDATLTAVIEMSQSSWLVAGIVPGVERQPLKKLAIDEHALLSLLNRWRAEAEKQGHRITRVAVAFEAGHDGFWLARWLAAQGVEAHVIHASSVAVTREHRRAKTDRLDTELLKRGFLGWLRGERGHCKMVAVPTLAEEDAKRPSRERETLVGEASRIITRVKSAFVRLGIRGFNPKLKTAAARLETLRTPECEPIPPNTLAALQRDLERHQIVKKQIRELEQTRLENLAQAPAKGPNVMVLLLARVIGIGVETADMLVREVLSRTLRDRRAVARYAGLSGSPDESGAKRRDKGLARSGNARVRHGMIQLAWRFLLFQKDSALAQWYRQRTGNAPSMRKPLIVALARKLLIALWRFACDGVVPEGVRLRPAA

SEQ ID NO: 429200 - protein, 395 aa, unidentified
MFIVGIDVAKRSHEATIITSDGEIVQSAFSFRNNCSGYNTLLERVRKLTNQRNQIVFAMESTAHYWLALYARLTKDGYRVLVLNPIQPHALRDFYIRPLKTDARDSLIIADVVRFGRCKPSSIPQDKLLALRELCRSRSYLMGMASDLKRKLIALLDQVFPEYETLFDSLFCRSSVAVLHRYPTPEKLKYAHVEKLSELLRQHSGGHFGEWKARQLKDAAVSSFGIDDCCGVYSTLITTFLRQIEELTREVTVLEGKIDELFSEFDNVLLSIPGVGPTLGAVILSEIGDVTRFASAGKLLGYAGMDPSVRQSGEFTGTRNRMSKRGSPYLRRAIWMATNTAVHFDPMFRAYYEKKLSEGLHHMNAVGHATRKMTAVIFAVLRDGKPYQPMLPCAN

SEQ ID NO: 429201 - protein, 424 aa, unidentified
MKVTFQTCCGVDVHKSFLVATIIKTTGGIEPSYQKRRFSTFNNSILEFKKWLLENECLYVCMESTGKYWIPVFNLLEDEINVTIANPKWVKAVKGNKDDTKDSKWIGDLFRLGLVRGSYIPCKKIRILREFTRYRYKLVSCRSSEKNRYQNALTVCNVALDSVVSDVFGKSSTSIIDYLLEQSGTSIDHEVIASKLLKRLKAKEDAVIESIEGYQMTDAQKYRMHLVRAHMDYITAAINDVDSEIESLIASDPDYENAVELLCTIPGVKYDSAITIISEIGIDMSQFCSSKRLCCWAGLTPGSNESAGKKKSVRITRAGVYLKPALVQCAHAAVKSDKSPYYKKKYEALVKRRGKKRAIIAIARMILTAIYQMLSTGEEWNPSNLYKIDMPVALVEKQKAKAIRQAKKLLQREGTLPPDKPLAS

SEQ ID NO: 429202 - protein, 365 aa, unidentified
MAKSELLEAVADLQGTHEAVEGEVTIGIDLGDRYSYCCVLSEEANVLAQGRIRTNAATLKKFFEEIPPCRIAIEAGTHSRWVYELLSSWGHEVIVANTGAIQIISANNRKSDEVDAQMLARLARADPKLLSPIQHRSGSSYEDVVCLNARDLLVRTRVKLINAVRGMVKSSGGRLPTSTTEYFVGKAAPHIPEALRPALTPLIENIARLTEQIREFDKRIEQIARTRYPETARLRQVNGVGPLTALKFVLTIGDPRRFRQSRDVGPYLGLVPRRHQSGSVDKQMRISKAGNRQLRVLLVQCAQRMLSRFGQDSDLKRWGIRMASRGGKSSKKRAVTAVARKLAVLLHRLWVSADVYRPLFNASSS

SEQ ID NO: 429203 - protein, 388 aa, unidentified
MLQSNDLSRSFTTLNQDNTLIVVIEMSLSSWLVAGIVPGVERQPLKKLEPDEDQLLKLMNRWRHEALQAGHAIERVVVAYEAGRDGFWLARWLRERGVEAYVMHSSSIAVSREHRRAKTDRLDTELLMRAFLGWLRGERRHCSMAAIPTIEEEDAKRPNREHEKLVGDRTRIVNRMKSTLARFGIRGFKPTLRKADEKLSELRTAEGTLLPENTCAELRRDMTRLRIVREQLKEIEQQRLRKLEAAAPAKKGPHAMVGLIARVIGIGIETADMLVNEILSRHLRDSKAVARYAGLTGSPDESGKRRREKGLACAGNARVRRGMIQLAWRFLRFQKDSVLAQWFRARAADGRSGTRKTMIVALARKLLIALWRMTTTGEIPEGVILRVA

SEQ ID NO: 429204 - protein, 352 aa, unidentified
MESQTCFPKITIGLDLGDRKSCVCELDAGGCVLSRGTIPTTEAAIRAYFEGRDRSRVVLEAGTHSPWISRQLEALGHEVVVANPALVYGGRRRKKRNDQLDAEFLARQGRADVKLLHPVQHRTAESQRHLETIRARDQLVGARTKLISHVRGAVKSQGGRIGRCSAECFPRKATERIPQDILPALEPLLSTITELSRAIHKMDKQVEKLVVLYPVVSRLRQITGVGSLTALAFVLLVEDPKRFTRSRDVGAYFGLVPRLDESSDSSPQLRITKAGDALGRRLLVSAAQYVLGPFGPECDLRRYGEAIAARGGKNAKKRAVVAVARKIAVLMHRLWVTKAEYEPKRTSSKRAA

SEQ ID NO: 429205 - protein, 341 aa, unidentified
MEKHFYFIGLDIAKETFVASIYHTPDRPVLTKENFSNNPKGYRELIVWLQDNHINTANCHICLEATGVYSDGVAYYLSAQGYRVTVESPLRVKRAFHPAGHKTDPVDSRQIAEYAYRFSDRLIPWHPKEELLEKIRQLLSVREQFTKQKVALKNARDAYQRQKVHVELIQKAHQETLAQLEKQITQIDQELERLMKEHPDISRKFHHLKSIPGFGLLLSAHLLVMTENFTRINDYPRLAAFVGIVPYQHQSGTSILKRARIRHYGPHACRKLLRLAAQSVATHNMTFRKYYLRKLAEGKAKALILNNIANKLLRLACALIRDNSRYIKDYHSLHPMYVKGT

SEQ ID NO: 429206 - protein, 418 aa, unidentified
MNLFVGLDVSSEKLDVCFLSDDDNLTILEEITLGNDIDGATIVKEKVIDFQEAYGFHKIVMGMESTSMYSFHPAMFFNQDKELKGLNTVVTIENPFRINQFSRMFDEDKTDRNDAFRIADFLRIQRFNTSPIKEEKYMALQRLTRTRYQLIKQLVRTKQHFLENLTYKCNTLTRELKELDGTTSVFSATVMSLMTDDYSLDELAEMPLEDFATLLQEKGKGRFKNPKSLAKAIKRAIANSYRLGTIAQESIDVVLSILVREIRALEASIKDLDKAIEQLVVILPEYQCLTSIPGVGKVYAAGMIAEIGQIERFEDQTKLAKYAGLSWKVKQSGNYQSEYTPLTKQGNRYFRYYLVEAANSVRRYLPEFQKFYSKKFKETPKHQHKRALVLTARKFTRLVDMLLRNHQLYAPPRSVIDK

SEQ ID NO: 429207 - protein, 359 aa, unidentified
MQRQRNGLNFEGQNIYVGMDVHKKSWIVTIMSEHLEHKTFSQLPDTKSLHQYLVRNFPGASYHSVYESGYCGYWIHRELLSHQIHNIVVNAADVPTTGKERTNKTDKRDSRKLARSLSKSELESIHIPTRKTQEDRSLLRTRYAIRKNLSKEKVRIKSMLNFYGIEHPQIFEKSTTHWSKRYLEWLKSVPMEYETGKASFDLLIKQVEELRKLLLEINRKIRQLSRDDDYRENFELIDSIPGIGLIIGMTLLTEIEDIHRFNNIDQFASYVGLIPTCHSTSDKEQNGEITFRSNGLMREMLVESAWTVAAKDPAMHLAFIDLCKRMESNKAIIRIAKKLLNRIYFVLKNKQKYVSCIAK

SEQ ID NO: 429208 - protein, 354 aa, unidentified
MKQVSMIGLDLAKNVFAVHGIDAAGKVVIRRSFRRAQLEKFFAELPPTVVGMEACGGAHHWGRRLGSFGHQVRMMPAAYVTPYVKRNKNDGRDAEGVCEAAGRPTMRFVPVKSLESQAVLVLHRARSVLVRQRTMLGNSLRSMMAEFGVVAPKGVKGLCELMAQLAQPDEAIPELARSSLLEVVRHWQALDASVRKMEAQIVRSAKADATARRIMALPGLGPIGASATLAKVPNAKVFKRARDFVAWIGLTPRQFGTGGKQRSGGISKQGDRTLRTLFIAGASAHLRQEMRRGVTDPWLARLLAERPFKVVAVAYAAKMARIVWAMLTSGEFYRPRGQAGKTVACQTAAPAAAA

SEQ ID NO: 429209 - protein, 412 aa, unidentified
MEVVYERCAGLDVHKKSIAACVLWALPKGKKKQEKRRCATFTQDLLTMADWLRECGVTHVAMESTGVYGKPVWNILEGQFEILLVNAQHIKAVPGRKTDQKDSEWIADLLQHGLLRGSFVPPTPVRELRDLTRYRVSLAQECHRIANRVQKVLEDAHIKLASVATDALGASGRAMRDAMIEGKTDSGELAEMSKGLLRKKRAELRLALQGRVTEHHRFLLNPLMTHLRFTEDRMDDVEKEIARRMQPYLEDVDRLCSIPGVERVTAWGRWAEIGFTMDQFPSAAHLASWAGLCPGNFESAGKRLSGKTRKGSASLRRCLSQAGWAVSTKSDNYLTAFYRRVAARRGAKRAIIAVAHQLLVIAYYLLKRKEEYRELGANHFDNINADRVRRSLVKRLERLGHVVTLQPAVQSA

SEQ ID NO: 429210 - protein, 341 aa, unidentified
MVTTIGIDPHKATHTAVAINKTETVLGELTVAADRDQTRRLIDWAQNLDGGGRVWAVEAAGGLGYLLSQQLIADGEDVVDVPPVLASRVRVLGSGRSDKNDPNDALSVAIAALRQPGLAVVRREDDTQVLRMLAKRHLELTALRTQAVSRLHAVLMLLRPGGMGQRLSADKAARMLGGIRNLDVIGEQRRIMAKAHLADIRRLDREIKANKTLIRSAVAASGTTVTDVYGVGPVVAAFLIGYTGDIGRFASAGHYAAYNGTAPIEVSSGGKKRHRLSMRGNRVLNHAIHMAAVTQIRHDTPGRVYYDRKIAEGKTKKEALRALKRRISNTVYRQLITDHQG

SEQ ID NO: 429211 - protein, 417 aa, unidentified
MQYALPLVLPDVPAGGVCAGIDWATADHVACVVDMTGRVTDRFSAAHDKAGIAALITRLRRSKVTEVAIERGDGPLVDALLAAGLTVVVITSRQVKNLRSRFGAAGAKDDRFDAFVLADTLRTDRARLRPLVPDTPATISLRMTVRARRDLVRHRVAVCNQLRAHLAVAFPAGITLFHDLDSPISLAFLARFGSQDAAAGLDEQAIGAWLATIAVRGRPAPASVLHARLQAAPPGATGTDGAAQAGVTAALTATLTALSAQIKALATQIAGQLAAHPDGHIFTSLPRPGTVRAARLLAEIGDCRSRFPDPESLAGLAGVAPVTRRSGTRIAHGFRWAVNRQLRDALCDFAADSRHASPWAAAIYDDARARGKDHPLAVRITARAWTYVIWRCWHDGTAYDPAKHNALQAVLARQQDQ

SEQ ID NO: 429212 - protein, 418 aa, unidentified
MKEHSNSGRKSEPTSRRAKPRDPTRRDTKEVLAELVGKLKEKLDPKKPAAVSVGGKHKRGELRPNLDRLTVGVDLGDQWSNYCILDLEGETLAEGQLRTTQEDLTEFFQALNAARVVFEVGTHSPWVQEVIGSCGHEVLVANPRMMDGSKRRKRKNDRIDANKLARLGRMDPQSLHPIQHRSREVRQDLVILRAREALVAARTELINATRGLVKSMGTRLPKCSSPSFAKKAEGTVPAGLRDALLPMVRMTAALSDCIQEYDKKIEKLGHEKYRHTALLRQVKGVGPITALAYVLTLENPERFVKSRDVGPYLGLVPKQEDSGEIQPQLGISKTGDTMVRKLLVSSAQYILGSFGPDTDLRRYGQRLCERGGKNAKKRAAVAVARKLAVLLHCLWVSGEVYEPLRQGMSATTAPAVAA

SEQ ID NO: 429213 - protein, 297 aa, unidentified
MKVVVGIDVSKDWFDIAWKENDRIKTQRFDSTASGINQLMKATPADAIYVMEATGVYHARLAVTLFETERKVAVINPLVIKRYGQMRLSRVKTDTADASLILSYGENVEFMLWKPEPHHIQELKVAQGWLDDLTEDMTRLSNRGHAQSYLVVRSTMVDRQFLRRKEQLKQDITECEAHLEKQVKKHFAELYKLLNSIPSIGSKTATQLIISTGGFTKFISIKQLSAYVGVSPTTYESGSSVRGRGGIAKMGQGRLRQLLYLCSWTARKCNPSCVALYERLQAFAVATKKTAYSPEFA

SEQ ID NO: 429214 - protein, 350 aa, unidentified
MVLTVGIDVHKDTHTAVMVDELGREQAQRTVRATDAGHRALVAWARSQNSQLMWAVEDCRHVSTRLERALLAAGQRVVRVPPKLWDGGRRSARTRGKSDPIDALAIARAALRETDLPVAEHDQASRELKLLVDRREDLVAERTRMINRLRWHLHELDPELDVPARSLDQPRRLDRLAAHLTDAHTGLVAQLAGELVGDIAERSTRIRALEREITTRTRQVAPRLLELPGCGALTAAKIVGETARPGRFRSEACFAMHAGAAPVPASSGRTERHRLARGGNRQLNVALHRIALTQTRLPGSLGQAYYQRRRAGGDNTMEALRALKRRLARVVFNLLTTHHTAPAAPQPAAA

SEQ ID NO: 429215 - protein, 445 aa, unidentified
MLDSIPYLSVGLDVGADFTWMSIALPNGTFLGKPFKILHSDPQSRDLAVTKIKEAQELYSLKSRCFLESTGIYHIPLLCFLRDKGLDCSVINPIITKNSTNINIRKLHNDKFDSKKAALIGLNTSVKTSIIPEDAVVDLRNLVRDYYYFKDLQSAVVLKLNAELKVSFPAFLHVFSKVTTQSSLKLLSIYPLATDMLAAPKEEIVEIIRATARFGEKYALAKYDAILAAAKDSQLFGRALQSNAVRIKLYIVSYQEYQQHLDAILAELHKAVELLQGEPVYDQIALIQSLRGVGFLSAVGLIAEMGSFDLFSSPKKLYAYFGLDPAVKQSGKFNGDKIHMSKRGSSLARRILHMVALNNLKVDKGTKTPVNPVIHDYYIRECVGKKKNVAVGAIMHKICNIIFAMLRDNKPFEIITPQEHCQRQRYTEEHPTHLGEVAYKSSTIQ

SEQ ID NO: 429216 - protein, 462 aa, unidentified
MSRVKRRNIKAARGASELPVLRPNAAGIDIGATEIFVAVAPDRDPEPVRAFPTFTEDLQKLADWLKACKIETVAMESTGVYWIPLFQILEARGFEVCLVNARYFQNVPGRRTDVSDCQWLRYLHAVGLLRPSFRPTDQVCVLRSLARHRDSLIQTAATHVLRMHKALDQINLQIHHVISDITGVTGLRIVDAILAGERDPKKLAALRDGRIKATEATIIKSLVGDYRREHLFTLRQSLAAYRNYQKLIAQCDTEIEAQLKTFDARVDCKAKPLPAPKVRRHRLFGNEPQFDLRKHLYRIFGVDLTEVPGMSIRTAHTLLAEVGPDLSRFPNASAFASWLGLCPDNDITGGKKVAVGTRHVNNRAAWALRMAANALRNSRSGLGDYYRRMRAKLGAPKAITATAHKLARIIFHLLTTHQAYNETICARRDELARKRTETILRNQAHALGLQLVPASQTSQTQH

SEQ ID NO: 429217 - protein, 347 aa, unidentified
MRFYTRQHRHYCGVDLHARSMYVWVLDQGGNVLVSRDIASAPEPFLELIAPYREDLAVAAECMFTWYWLADRCAREGLVFVLGHALYMRAIHGGEAKNDRIDAHKIAALLRGGMLAQAYVYPQAMRATRDLMRRRNYLMRQRAELLAHLTNTNHQYNLPAFGVRPARPAERSGLLEHFAEVPVRKSIEVDLSVIERYDRELPRLERYLESNAQAHDPVALAIVRTVHGMGKVLGLSILYEIQDIGRFARVQQFLSYCRLVKPTKASGGKILGHSGRKIGNAHLKWAFSEAAVCFLRANKPAQALRARLAAKHGKGKSLAIIAAKLARAVYFMLKRGEAFDAERFFAH

SEQ ID NO: 429218 - protein, 367 aa, unidentified
MNKSSKAFVGMDVHKESIDWAIAERDGEVRSFGRTGGDLTAVARTVRKLVASGKTLVFVYEAGPCGFGIHRWLKVQGHECWVVSPSLTPKKPGERIKTDTRDAVKLARLARAGELTAIYVPEAPDEALRDLVRTREDAVAMQRQARHRLQALLLRNDIRYVGKTAWTPAHQRWIARLKLPYAPQQIAFEEYVQAVQEATTRIDRLTAAIQAAVSTWRWQPVVAALQAMRGVQLIHAVRIVAELGDLTRFGTPRALMGFLGLVPTEHSSGGKRAQGAITKAGNSSARRAMVEAAWAYQHPARITPIIARRQGGVPKSVLDIAWKAQLRLCARFRKLAVRGVNRNKLVVAVARELAGFVWAIGQQVRPV

SEQ ID NO: 429219 - protein, 305 aa, unidentified
MENIALIGIDLGKNSFHIHCQDRRGKAVYRKKFTRSKLIEFLATCPATTIAMEACGGSHFMARKLEELGHFPKLISPQFVRPFVKSNKNDFVDAEAICEAASRPSMRFVQPRTESQQAMRALHRVRESLVQDKVKTTNQMHAFLLEFGISVPRGSAVISRLSTILEDNNLPLYLSQLLLKLQQHYHYLVEQIKDLESQLKRKLDEDEVGQRLLSIPCVGTLTASTISTEIGDGKQYASSRDFAAATGLVPRQYSTGGGQHCWASASEATRRYEPCWFSAPEYLYKNWNTSQAGWPTGSGSSVPEK

SEQ ID NO: 429220 - protein, 337 aa, unidentified
MNNKVVGLDISKNVFHLYSQTADGKAVKKKLKRGELLAYIANMPVSLIGMEACGGAHYWAREFTKLGHEVVLLNARFVKGFVVGNKNDFNDAEAIFTAVTRPNKRVIAVKNEAQQDIQMLHRLRQQRIDQRTALVNQIRGLLSERGIVLSQGINQVRKQLPLILEDAENGLTPLSRELFAEQYEQLKALDDDIKTRDSRINRLCQQNALSRRFLEVPGIGPIIATIMASDIGNGKGYTKSRDYAASLGVVPRQHSSGDKQVLLGISKRGNAYLRTLLIHGARSVIKCCHGKSDPLSRWLQALVERRGFNKAAVALANKNARILWSMARQDQPYQAAA

SEQ ID NO: 429221 - protein, 468 aa, unidentified
MSKLSRRTKLATAPTHEDIHPLAGLERLQPHAVGADIGAHEIMVCVPGPDNTQVVRAFGTYTADLEALAAWLKSYAVESIAMESTGVYWIPLFELLEQHGFQCCLINPATTKRVPGRKSDVADCQWLQTLHSYGLLTDSFRPEADLIALRTLLRHRARLIQHRSPHILHMQKALLQMNLQLSQVLSDVTGETGLRIIRAIVAGERDPHTLAALRNSRCHKDEAEIALALTGTWRAEHLFVLQQSLALFDFYTQQITACDAEIERTYSIIRPDWGEPATALPEALHKPHSHSKNQPQGVQVRQHLYRITGVDLLALPGLSASGAQTLVAEVGTDLTAFPDVKHFCSWLGLAPHNDISGGKVLRSYQLKNHNRAGQVLIQAAAALIRSDSVFGACYRRLKSRLGPSQALIATAHKLARVVYKMLKDKVPYEHTTAQAEDERFREREIAYLRRKAAKLGLTLTEPEISLVS

SEQ ID NO: 429222 - protein, 391 aa, unidentified
MDGVKYIGMDVHKEATTVAVLNASGKLVMESILETRAATIVQFLQGLRGELHLTFEEGTWAAWLYDLVKPYVTKVVVCNPRKSALLQAGNQSDRIDARKLAELLRAGLLSPVYHGQTGLRTLKEWSRSYLTISKDLTRTMNRLKALYRSGSIPCAGPSVYAPRHRAEWLSKITEAGVRRRAEWFYQQLDGLQRLGQAARHDLLAESRQHDAAKLLCQIPCIAAIRAALWIALIQTPHRFRTQRPLWAYSGLALETHSSGEYRYVQGPLQRSHKPIELRGLHKNHNHDGKAIFKGAAVKASTAGPFPEFYTTLLRKGMKPTMARLTVARKIATITWMVWKKGVCFDAAPLKRPVSVGTSRPKSPLPLLGSCLVMRHRILETFGFEGEYPSEV

SEQ ID NO: 429223 - protein, 347 aa, unidentified
MDHVGMDLGKRESQLAILTEDGELINMRIRTERHRLVEMFGRRPKARILMEASTESEWVARCLEDLGHEVIVADPNYAPMYAQRTRRVKTDRRDAHALAHACRAGTYRPAHRTSTERCELRARLAVREAVVRTRAAWITRIQSLVRREGCRLRTGAPETFLTRVEELALPPALTTVIAPLLELLDPINKQIEALDEELERIVAADEVPRHLTTVPGVGPVTATAFVATVDDVTRFRGAHQVEAYLGLIPCEWSSSEVQRRGHITKAGNGRMRWLLVQAAWCILRRRKRPETAALRDWAERIAGRRGRCIAAVALARRLAGILFAIWRDGTVYDATKVRGPLPARRAA

SEQ ID NO: 429224 - protein, 312 aa, unidentified
MDAMVVGIDVSKDRLDVAVRPTGESFVFKRTAAGIEDLIARLKARSPTLVAIEATGGFEAVVAAGLAGAGLPVVVVNPAQVRAFARALGKRAKTDPIDAVVIAHFAEATKPQLRQIPDEMTRLLAELVARRRQIVDMIAAEGQRAGRMSDHRLTRSIGRLRKALEKELDELDRLIDDHMRGSAVWVETEKLLVSVPGVGKTIARTLIADLPELGSLDRRQIAALVGLAPWTRQSGQWRGKSFIGGGRKSVRSSLFVGAMVAARYNPQLKRFRDRLVAAGKPKLLALVAVARKLITILNAILRDRRPWQPLAA

SEQ ID NO: 429225 - protein, 385 aa, unidentified
MPKPNDLSRSFTAFEQDSTLIAVIEMSLTSWLIAGILPGIERHPLKKLDVDEEGLLQLLHRWRDEAINAGREISRIVLAFEAGRDGFWLARWLRARNIEAYVIHPNSVAVSREHRRAKTDRLDTELLKRAFLGWLRGESDHCSMAAIPTLEEEDARRPNRERENLLGERTRIVNRMKACLVRFGVRNFKPTLRKAPERLKTLRTPEGGPLPPNSFAELRRDMARLRFVMDQIREIEEARLQRLEHSPNEGSHPMVRLLARVIGVGIETADMLVHEILSRNLRDQRAVARYAGLTGSADESGKRRREKGLARAGNARVRRGMIQLAWRFLMFQKESALVQWYRSVTNEVRGARKIMIVALARKLLIALWRLVRTGEVPQGVALRTA

SEQ ID NO: 429226 - protein, 409 aa, unidentified
MEAIRERVAGLDVHRDVVVACALSLAGRKRRTDKASFATTTAGLGELASWLADHDVEAVAMEATGVYWKCVYYALEGLFDDVMLCNAQHVKNVPGRKTDLSDAEWLADVVAHGMVRASFVPPPPVRELRELTRYRKTQISIRGQEVQRLDKVLQDAGIKLSSVTSKVLGRSTRDMVEALIAGERDPERLAQFAWTRMRTKIPALEQALVGHFGAHHAVVARRALAHIDFLDATIEELTGEVLARLGPFQTAVELACTMPGIEQLTAQVFVAQTGGDMSQFPTPKQLAAWVGFAPANHQSAGKRRAAGTRKGGQWLRRAMIEAAWAATRSRGTYYAAQFRRLSARIGPNKAIIAVAHSMTVALWHMLSTGTPHNDLGADWFRRQDPDAQTRRLVNQLQALGHRVTLTPAA

SEQ ID NO: 429227 - protein, 362 aa, unidentified
MFVAGIDAHTRYVVLVVVDRVGERVLGPTRVPVTAPARLVELLAPYRPLDVVVETSSTWPWLAEVVRAPEVHFVLAHARRLRAIAEANYKRDEIDAELLARMRVARLIPEVYPTPIAQREWATLLRHRTTLVEQRTAWVNRIHAQLHSCGLSLERGRLLTRAGHQWLRTVAWPRLSLEQRRLLRTHVRLIASVRPLVRALDRRIAAVAAAIPEAQLLMSIPGIGTHRALVICAETLPITRFPSAGHLASYAGLVPRTSQSGVRPIRHGAIPAGANRWLRGALVRAVVTHVQHAPTSWLSAYYTAQKQRVGWPVARIATARKLARALHAMLRTQTPWHGDASPAISQDVAIRSEESSYGHMPH

SEQ ID NO: 429228 - protein, 376 aa, unidentified
MKRQGEAFVGIDTAKARNAVAVAEGDRNGEVRYLGEFDNTPDAVAKLVRRLAERYGVVHYCYEAGPTGYGLYRQIRALGQDCGVVAPSLIPRRPGDRVKTNRRDATSLARLLRAGELTTVWVPDETHEAVRDLVRTRAMAIEDYRRKRQHVSSFLLRHGRGYEGSPTWKGLHLRWLDRQAFAHPAQRLAFQELLNAVRAAVERIGRLEAALLEVVPAWTMAPVVAAFQAMRGVSFLTATTLVAEAGDIRRFDHPRQLMAFLGLVPSERSTGETKRQGALTKTGNIRARRALIEAAWTYRHSAGIGDKHQSRQRHLPERIRDIAWKAQVRLCARYRRLVARGKRVTVAVAAIAREIAAFLWAIARHIDPGSQGASEA

SEQ ID NO: 429229 - protein, 419 aa, unidentified
MKTIKSKKVKQINQKTMIVAIDIGKNVHYGYFRGPNACERKPFSFKNTKKSFSYLWNEISKFRCDHDLDEVVVGFESTGPYAEPLFHFLRKKPVKLVQVNPVHTKRIKDLTGNSPNKTDKKDPRVIADVIGLGHALTLIVPQGAAAHLRRLTQARERAIRDRTATINQIQNLVFVVFPEFLSVMKNINTKTAGYLIEHYPTPRDIIALGVDELTAVMKKISRGRLGQERAQELIHGAKNTVGISEGNQSIFLEIAHLNAKVEHENRFIDTLENQLADYLQQIPYSNSILSVKGFGIVTTAGLIGEVADFKKFDTISEIMKLAGFDLFEISSGKHKGMRRISKRGRPLIRKLLFFAAINTVKSKGIMHDPYKKMQGRGMPKIKALVAISRKLLRIIYALARDDTTYMEDYKGPHNYKLAA

SEQ ID NO: 429230 - protein, 469 aa, unidentified
MATTRTSGLNRKQRRELARRLQAADPGLEVMHPNAAGIDVGNSAHYVAVRPDRDPDPVRRFDCFTADLHRLADSLQQCGVTTVALQSTGVYWIPVYEILEARGLEVYLVNARHTKNLPGRKSDVQESQWLLKLHTYGLLRNSFHPAAEIRVARTYWRQRGDHVHAVSTCIQRMQKALTQMNIQLANVISDLSGWTGQRIVRAILAGERDPQALAALSHPGIHASRDTIAKSLEGTWQADLLFVLQQEVTLYDAYRQRIEECDQALQQHLKVFADKPADPTDTTGATSPQARPHVKRRRKAGSHTPQFDLGRELHRITGVDLTRIDGIDVGVAQTVISEVGLDMSRWADEHHFASWLGLCPDNRITGGKVIRRGTRHVINRAATALRIAATTLLRSQSYLGAQYRRFRSKLGAPKAITAMAHKLAVLVYRMLRWGHEYVDKGLQYYEERHREQQIRQLKKRAAKLGLLVV

SEQ ID NO: 429231 - protein, 361 aa, unidentified
MLTITIGVDLAKSVFAICELDEYGRVRMRRELRRDAFAAWLAQLPAGTVVAMEACSGAHHWGRRCLAFGLQPKLIAAQFVKPFRKSQKTKNDRNDAEAIATAARQGNMRFVPIKTIDQQTRLSWHRAREGYKTEALAIGNRMRGLLAEFGVVVAKSDAALRTLLADLSAHALPEPLVEMLGDLNTHWQMVRERVTAYGKRIEQHARTDVRCKRASAITGVGALTTDALVAMVGSAQEFRNGRQMAAWIGITPSQHSSGSRKLLGKISCRGDGYLRTLLIQGARSSLQRAKAVTREKATPEQIWIMSLAARLPFGKVLVAIANKHARQLWAILARGEDYDPNAWIKHPMVQRAASKRAASAI

SEQ ID NO: 429232 - protein, 331 aa, unidentified
MQSGVLTRALSLPDGGFMSKAIVGVDVSKGWLDIARADGSEVVRIANTQAAIAAWVLEARVDGLQLVAFEPTGGYERDLRDVLRAHGVVFVRVHPNQVVAFRKSRRIKAKTDRIDARLIAQFAAEELLRRGLPIAIAGDEALRELAARRRQLVDTLQAEKCRLAIARSAVVRASLTASISGLQASLEAIQVALLSHITANPELAQQHALLQTLKGIGPVSAMTLIAELPELGRLSGKQIAALIGLAPQTHESGKSTHRAATGKGRGDIRRVLFNAARCAIRHNHIMRDFYRRLVEQNKRAGKVALVGVMRKMLVTLNAIARDQQPWKHHAA

SEQ ID NO: 429233 - protein, 278 aa, unidentified
MYYIGLDVHKKTISYCVKDASGRVHQEGKLGATRRELDIWMRTLPQPWTVAMEATIFTGWIYDHLHPHATQIKVAHPLMLRAIAAAKKKNDRVDASKIADCLRCDFLPECYMAPTEIRDRRRTLRYRYLLVRQMVQTKNRISGLLMETGVTHNKQRLHKVGYFRELLASNEEVSESIRPLLRLSRDTIARLQKTERALVSSLQRDPLLTERIKHLRTVPGVGPITALTWALEMGEISRFRSIRQAISYCGLAVTKEAQPRSRFARRFPNSATRISNLC

SEQ ID NO: 429234 - protein, 355 aa, unidentified
MPLYSQKKRREAALRPTAVTTPDLFVPDTAPAVPALPALGIDIAKATFRACLLRPGAQRSVEADFANTPEGFAALTRWLEEHGAPSTRAALEATGHYSLELLRYLHDARHAVSLLNPRWIKDYARSEGRRNKTDAVDARIIARYVQTHATRAWQPRTPAQEALQALSRRREEALRALTSERLRLQSAAPQTAAFIKTSIAHYERQLLAITRAVEALLKKDDTLRHHCTLLESIPGIGRTTAILLLAELPALECFERVRDAAAWAGLTPALCESGTSLRGRSRMNKQGNGRLRKGLYMPALVLLRLNAPSVFGHLRDRLRRAGKAEMVIIGALMRKLFQTACGVLKHGQRFNPSLP

SEQ ID NO: 429235 - protein, 333 aa, unidentified
MEKLIHFIGIDVSKLTIDVAIIINNDIGRIIQLVFTNDSKGFKEFKNRLNKEKIPFPETIFCMEHTGYYSKQLSRFIIARHGNLWMEMSLKIIRSLGVQRGKNDKLDAKRIALFAQRNQQDFVPYNPPRLIVENLKTFLMLREKLINSKIALVVPVNELTCVDKAAGKIALKAISKALQGIKKNINTLDAKIDELIASDKELAEKFKLVSSVPGVARITFCYLVYFTNEFKNYTEAKQLACYCGVVPFEYTSGSSVKGKPKVHNMANKKMKKLLHTAALCAVTHYPEFKQYYERKIKEGKPKMLILNNVRNKIVLRIAAVIKNNQPYKTNIAA

SEQ ID NO: 429236 - protein, 418 aa, unidentified
MKPFNEITHYAGFDWARDHHDVVIVDRQGQIVADVRVPHSLEGWQQFRDQLKPYPALAVAIETSQGAAVDQLLQLDCTVYPVNPLSAKSYRERKAPSGTKTDHLDGWALAEALRTDGQQWKALQPLDPLTQQLQLLCRDEISLIEQRTALVNQLQQALVEYYPAALQAFEDWTQGYCWDFILEFPTPEKLAAAGRRRWEKFLHTQKLWRPQTADKRLEIFQNASRFCGSAPVTSAKSLLALSLARLLKALQLQLGLYRRQIEALFQQHPDHDLFGSLPGAAQTLAPRLLGEIGGPPQRFEDTQTLQCIAGTAPVSFQSGQIHRVHVRYQCNKVLRHTVHLWAQCCLRACPWAEVYYRQKRAEGKSHACALRCLGQRLLKIVWKMLQTRKPYDADLHARNQKQHGSWVLTLMKPEAKAR

SEQ ID NO: 429237 - protein, 412 aa, unidentified
MEETICNDPQVCRIVDLPVYYELETNNGNRDYRIQIGGHYMNYNTVYVGMDVHKESFTLCSCKYEDEKASHYQRTPASYKNVLRYLAFLRTIYGEDTRFVCGYEAGCLGYSLYHQLENFNVECVILAPTTMLEQRSKRRIKTDKRDAEIIARSLAQHNYSPVHIPTETDNQTKEFIRMRDDHKAELKKIKQQILSFCLRQGYQYDGSGNWTAKHVKWLRSLKPAGLYKEILDEYLLTYTILTDKLNRLDQRIEELASKEEYKESVSKLTCFLGIKTHTALSVIVEVGDFQRFVSARKFAGYLGLVPGQHSSGDDRNGLGITKAGNTHVRRLLVESAQSYTRGKIGYKSRVLRSRQAGNSPQVINYADRANERLRRRYYKMVLKDGKKYNIAKTAIARELACFIWGMMTDNIY

SEQ ID NO: 429238 - protein, 412 aa, unidentified
MLFVGDDWAEDHHDVEIVNEQGRRLARRRLPEGLDGITGLHALIAQFFPEEWADLEPAEAASRVKVGIETERGPWVQALIAAGYEVFAINPMSVARYRERHSTSGAKSDSGDAHVLAEIVRLDRAHHRPVAGDSELGEAIKLVARAHQSLIWDRTRHILRLRSVLREFFPAALEAFADLAAADTLELLAIAPDPDRAARLPKSKIVAVLRRANRRGVEEKAATIQSVLRAPALRQPTQVQAAFAVIVTSQVRVITALNLEIGQLGEVVAHHFGRHRDAEIYASQPGLGVILGARVLAEFGDERNRFADAKARKNYAGTSPITRASGTRKVVLARYARNERLGDAIQQWAFGALKGSPGARAYYDALRARKVDHQAALRQLGNRLVGILHGCLKTGTLYDENTAWAHHHTAAA

SEQ ID NO: 429239 - protein, 317 aa, unidentified
MAETVLGIDIGKQKFEVHLLVNGKAKSKSVRNSKEGFLVLSQWLDKHNAGLVHACMEATGSYGDELALYLYDAGHTVSIVNPARIKGFAQSELVRTKNDAVDAGIIARFCLAMNPAPWTPPAPAVRRLQAIARRLDALIAMRTQELNRLGVAHSLVEPSIKEHLLYLDSEIEKLKEQMRSEIGDDPDLKNKRDLLISIPGISDATISIILSELDFQKFESVREVVAFMGLAPKDKISGTSVKGKPRLCKTGNARLRKCFYMPAMVAMRFNPVVSAFQRRLKENGKNGKVIVCAAMRKLVHIIYGVLKTGKPFNPQFA

SEQ ID NO: 429240 - protein, 352 aa, unidentified
MEKKTFDQLMSIGIDIGKDTFHLVGFDRHGQLVLRKQIKRLALVATFEKLPRCIVGMEACLSAHFVSRTLRELGFEPRIIPAIYVKPFIKGQKNDYNDAEAIAEAALRPNLPIVPEKSQDQLDLQALHRVRSRLVSRRTATINQIRAFLIEQGITVRKGLRALENSFEVILEERKDEISPRMRTILIGLYGDWLWLDDRIETVSKEIEQISRTEENCVNVMTIPGIGPMISTAMVAAIGTGEAFGRGRDFAAWVGLVPRQYSTGGRTVLGRISKRGSRYLRMLFVQAAKVILMRANRWAGFSFGDWLSRASERMNRNKLAVALANKLAGMAWSILRHRTAFDAPRDEVAAGI

SEQ ID NO: 429241 - protein, 356 aa, unidentified
MTSSTKYIGMDVHKESISIAVRNAARKIVMEGVIETKASMILQFIDGLRGDVHVTFEEGTWAAWLYDLLKPHVTRVVVCDPRRNALLLDGNQNDRVDARELSELLCNNQLRSVYHGDHGLRTLKELVRSYLTITKDLGRVMTRVKAIYRSWAIPCSGKQVYASRHRAEWLAKINEPGVRRRAEFYYQQLDALRSLRQEVRRDLLAESKKHKVWRLLCQIPSIGPIRAAVLLGILQTAHRFRAKRQLWTYSGLGIEIHSSADHEVVNGQLRRKKRHVEIRGLNENCNHDLKNLFKGAAVVASSKPGPFQEFYAALLAKGMRPEMARLTLARKIATIVLIVWKKGVCFDAQHLKPQTA

SEQ ID NO: 429242 - protein, 342 aa, unidentified
MQHLYLGIDWGKKFSQVFGFDEDGVIVVEERVPTLSLSAWDALLGRLQCYRVQAGFEVGAHYDWMFDLLKAHGAEVFVIEPAQFAIISKSQRKTDKIDAQKIAEGVRRGDLPLVHVPDAQTRADRRLVAFTHWHSQQSTRLKGKLRSLLLGQRIELACSNITGVKARQWLERDVAPRLSEQEQMFMRHLLEQAELAQRQRKELDALVAARAQTYAQAPIVDSIPGIAELGVLALLSSIAGIARFERPEQLASYFGTCGSVHQSGQRLYLGSITRRGNVHVRWLLSQALQHLHRKDARARKRYLKLKRKKPRGVARAAQVRWLTQIIWHLLTKNQPYRSERAA

SEQ ID NO: 429243 - protein, 460 aa, unidentified
MANTTTKQRKSSGSQGLPIIHRHAAGIDIGSTFHVVCVPADSDDEPVRRFDSFTGDLYRLAQWLKEVGITTVAMESTGNYWVPVYEILEERGFEVVLVNARDAKNVPGRRTDVLDAQWIQRLHECGLLRASFRPHETIVALRSYLRHRERMVEFSASHIQHMQKTLMQMNLQLHHVVSDITGVTGMKIIRAIVDGNREAEALARFRDVRCKASEETLCKALTGNYRAEHVFALRQALELYDTYQDKLRDCDQEIEGVLTELNRERELPQAPIPKKRNRQRQKNEPGIEIQSALFTLAGGVDLTQIHGLGSYSALRIVAEVGTDMTRWPTVKHFTSWLTLSPGNRISGGKVLSSRTRRSSNRATSLLRLAAVTVGKSQTALGAFFRRLAARAGKAKAVTATVRKIAVLFYKTLRYGAPYKDPGADYYEERFRRRTLESLRRRADALGFKLVESEPAVEGVS

SEQ ID NO: 429244 - protein, 390 aa, unidentified
MEARTVNNLLPAAPHHDAVGCLVAIELSKKSWIVAVNTPLADKISRHTLKPGDGKELLDLCERIRTRVARETKRRVEIVSCYEAGYDGFWLHRLLEAHGIRNYVIDPASLQVDRRARRAKTDHVDAERLLRSLMAYLRGEPKVWSVVCVPSVAEEDDRRLNRERGRLINERIQHVNRIKGLLAIHGIYDYQPLRRDRMLRLERLRTAADGQTLPPRLKAEILRELQRLELILGMIKKIEAERDAIASPKTETEDTNAKKIQDLAKIKSIGPEFATTLIGEVLYRSFDNRKQLASYVGLTPAHFQSGAMCRDQGISKAGNGKARTVMIELAWLWLRHQPDSPLSVWFRERVGKLKGRIRRITIVAIARKLLIALWRYLETGLVPKGAILKA

SEQ ID NO: 429245 - protein, 387 aa, unidentified
MIAMEGRFAHDERGIAKLCRTLEDMGVERVAIERPEGVLVERVLECGITVLAIHPNQLKASRPRFRASGYRAKSDSFDAFCLAELARTDHHRLRALTPDSEETRALKVLTRAREDLVGTRVALANQLRAELEAFWPGAAILFSEIDSAISLAFLKRYPSPIDASRLAEKRLESFLSKNHYSGGKSAHQLLERLRKAPCGRAGKAEIEARREAVLALVGTLGALVERIKHLEERIARAVRAHPDGEIFLSLFLSPNSTLTAASLVAQIGDRRERYPTNESLAAAAGMSPVAVESGKRKVASFRRACDKHLRRAFATLAESTRHHNRWAKDVYRRARNRGCDHAHAIRILGRAWVRVIFRMWREGQPYDPARHGGLQRLRSAEGLPQGV

SEQ ID NO: 429246 - protein, 343 aa, unidentified
MTHFVGLDVSQKMTAICVVDNAGHRLWRGQCPTVPEQITVLVRLHAGDDARIGIETGAMTPWLVHELRNLGLEVVCLDARHARAALKMQINKTDQNDAEGLAQIVRTGWYRSVHVKSFESHRARALLGARTQLTGMTTRLSNHIRGVLKTFGLLPGAMRGLPFDRKVEALLLDRSDVALIVRPMLVAWRQLREQIVAFDKAIRALVKSNSACRLLMSVPGIGVLSALAYVSTVEDPARFGRSRSVGAHLGLTPRQYQSGEVDRSGRISRCGDTLARTLLYEAAVVILSRVKRASRLKDWARAIAKRSGNGKARVARARKLSVILHSVWRSGEPFRWSEHARAA

SEQ ID NO: 429247 - protein, 349 aa, unidentified
MSEFYEGQQFVGMDLHRRRSVLVRMTESGEHLETVRILNDPERLAEVLSRAGEAPEVVLEATYGWYWAADALAELGATVHLAHPLGVKAFSYRRVKNDQRDAADLADLLRMGRLPHAWISPPQTRELRELVRHRAKLVATRSRCKAEVHAVLAKAGIWVPMTDLFGVAGNQLLDDADLGGPYRARVASLRRLIEALDFEIELFTKIARGRLARDPDYRAVQQIPGIGPVLGAVFVAEIGDVHRFPGPEQLTSWAGLTPRHRESDTTVHRGRITKQGSRLVRWAAIESVKILPASTRIGAFRDDVAARRGSPNIGAVAAARRQLEFVYYALRDHQVRALQHHSHHQPRAA

SEQ ID NO: 429248 - protein, 371 aa, unidentified
MRNDSTVFVGLDLHQKSIVAAYAVDAGEVHDLGQVGVLQRDLDCLCKQMRSKGSRVHFVYEAGPCGYAVYRYLTANGFQCTVCAPSLIARKPGDRVKTDQRDARKLVQALRMHDLSAVHVPDAADEAFRDLVRVWSAARRDLAKAKQRLKSFLLVHDVRYSGTANWSEAHRRGLAKLVFKESLSQLAFQEHLHSIEDRIAQCERLERLLREAAVHWRFYPAIRALQALRGVQFKVAVGLLAEIGEISRFASAPQLMAWLGMTPSEHSTGERRRQGAITKCGNANARRLLIEAAWAYRYPPKVSPSIQQRHEHLPKDIIARAWEAQLRLCKRFRKLTARGKPHNVALVAVARELAGFIWDIARLSASNETTH

SEQ ID NO: 429249 - protein, 411 aa, unidentified
MQVLSTRCCGIDIHQKTAVACTLLTQPDGSVMRTVRTFSTMTQGLLALSDWLEEQHITHVVMESTGVLWRPVYNVLEDDRRSLLLVNPRHLKTVPGRKTDVKDSEWLADLLRHGLLTASFIPSRPIRVLRDLTRYRKNLVQQRAQTICRLQKVLETANLKLSAVASDITGASGRRMLEAIVREEGTPESLAELAKGRMRAKIPALRQALEGRVQPYHRLLIHESLEQIAYFEGTIDRVEVAIAEQMEAHSEAATLLATLPGARATSVATILAEIGTDMSRFPSSDHLCSWAGLCPGNKVSGGKHLSGKATHGNKYLRALLCELAWAIVHTNNTYLAAQFFRLARRRGKNRAILAVAHSLLVSIYYMLRDHRPYQDLGADYFTHLDADHIERRYVRQLEKLGYEVHLSKAAS

SEQ ID NO: 429250 - protein, 405 aa, unidentified
MNAVGIDVSKGKSTVTIRRPGDVVVMPPCDIPHTQSAVNCLIKQLQNLDGETKVCMEHTGRYYEPVATWLSDAGIFVSAVNPILIRDFGDDSLRTPKTDKADSKKIARYTLDRWAKLKQYGNMDKTRNQLKTMNRQFGFYMTQKTAMKNNLIALLDQTYPGANDFFDSPARSDGSQKWVDFVNTYWHVDCVRSKSLNAFIEHYQNWCKRKGYNFSADKATKIYQLSSDLIAVFPKNDITKMLIQQAVALLNTVSETVESLRLKMNELAATLPEYPIVMDMNGVGSTLGPQLIAEIGDVTRFTHREALTAFAGVDPGKNDSGKHTQNSVRTSKKGSPYLRKALFQVMDSLIKRSPVDDPVYTFMDKKRAQGKPYYVYMTAGANKFLRIYYGRVKEYLTTLSKNEEI

SEQ ID NO: 429251 - protein, 435 aa, unidentified
MIDKIQPGYAAIDIGQEKIFIACAGDNEVRSFNTFNVDLQEAAKYLQQHGAVKVAMEATGVYWIPIHDLLEAHGLEVTVFNGAHARNMPGRKSDASDCQWHAMLHSHGLLTPCFIARDEIRQLRCFYRLREDHLSIAASHVQHMQKALDLMNVRLHTVISQIHGVSGLRVVRAILAGERNPQALAALCDTRILKRKQKDVIKSLQGHWQEHHLFALQQAVEGYEFCHAQMEACDRKIDELLQRLNADKPPVDPTPGTKTKRVRHNAPEIDDLHGKLITMSDGRDATVLPGISPLGYLKLVAEIGTNLTAWRTVKHFVSWLGLAPGRNQSGKRRKKVPRKKTVAGQIFREAALSLTRSRYVALGAFYRRLRGLRNAPVAIVATARKLAEMYYHLMTKGAAYVEKGVEQYEAQYKEQKRKYLMKAAAKLGMSLVPIP

SEQ ID NO: 429252 - protein, 354 aa, unidentified
MSQKIDTSIAVVGIDIGKNSFHIVGLDARGAIVLRQKWSRGQIEARFANMPPCLIGMEACVGAHHLSRKLKALGHDARLMPAKYVRPYSKGQKNDFRDAEAIAEAVQRPTMKFVATKTADQLDLQALHRVRERLVSQRTGIINQIRAFLLERGVAVRQGLRFLRAGLAQILATRTDVLSPRMVHLIEDLAGDWRRLDERIEGLSADIETLVQHDPACQRLMTVPGVGPIISSAMVAAIGRGEVFSKGRDFGAWLGLVPKQTSTGDRTILGRISKRGNRYLRVLFVQAAWVVLIRPKNWERYGLKPWIEAAKKRLHRNVLAIALANKLARIAWSVLAHGRNFEARKIDEAAAQSA

SEQ ID NO: 429253 - protein, 414 aa, unidentified
MEIVHVRCAGMDVSKRDAKVCVRVAGRGRRKTVETVQTWASTTNAILRLREHLIAERVTLVVMEATGDYWKPFYYLLEDAEFEVMLVNARQVKNLPGRKSDVSDATWLAQLGAHGLVRGSFVPPAPIRELRDLTRARTMMTRERGREIQRLEKLLEDAGIKLSSVASDISGVSGRLMLQALVDGQRDPTALADLAKRRLRVKIPELTEALTGRFSEHHAFLASMYLDAIDQRTRQIVELNARIEVAMEPFRSFCGLIGTIPGIGQRCAEVIVAETGADMDIFPTAAHLASWAGTCPGSNESAGRVKSTSTRPGNAYLKAALGAAALSIAHSHGTYLSAKYRRIAARRGPKKALVAVEHAILTAVWTMAHTGALYGDPGADYLNRRDPERLKARALSQLQHLGYDVTLNPHAASA

SEQ ID NO: 429254 - protein, 402 aa, unidentified
MAEGPSRFFGLDIHKEYFVAVGVNPQREVVFGPQRVSNYQLDEWVARVLTTQDAVALEMTTNTYLFYDTLEPQVHSVIAVHPPNVTLVTGAQVKTDKKAALALAQLHAAGMLEGVWIPPHPVRDLRALIARREKMVHLSTMAKNRLHAALHRNHLIVPENPFAPEQRSWWEALSLSATEQFLVRSDLDTLAFAQKQVEQAEECLKKASAEDERIPLLVQLPGVAMLTAITILAAIGDVTRFPNAKKLVGYAGLGTRVHDSGKSHNSGRITKTGRRDLRRSMVNAANHAIEHHPHWKKEFERLEPHLGRSKAVVAIARKLLVAVWHVLSEKAADRFADPANVARSFFTYAYRVGVRNLPEGRSALSFTREQLDRLGIGQDLLEIPWGSKPHKLPASKLLPENK

SEQ ID NO: 429255 - protein, 430 aa, unidentified
MIAMKYYTSTTQFNCGIDLHAHQMYVCLMDQQGKKLVHTNIKNNDFDYFLKLVAPYRHDLTVCCECMFGWYWLADACQAAGLTFVLAHALYLKAIHGGKNKNDRIDSEKIAHLLRTNLIPPAYVYPADKRPLRALLRQRLFFVWRRSELLARIRSHQLAHNRIPPKQTRRNRDPWEQQLLAAEDHPLRQLALKNDLTLIRHFDHQIFQLEEELQRQAKQIAAREYALLQTVPGIGENLGMTILCEIGDITRFPSVKNFLSYCRLVKGTVASAGKIKGLRGAKLGNPYLRWAFGEAAVIAKRDHKVIGPLAQQLEARMNGNKFKANTVVAIKLARAVYFMLKNKTVFDPERLAVSMVKRFRPDRRQPARLTGCAKKAMPPPVADHPSCAPSTPVCVGQNQQSGDSIGTCGQRLIQLQNHTMNGLKTMDLSL

SEQ ID NO: 429256 - protein, 352 aa, unidentified
MTDTTTSTVIIGVDTHKATHVAVAIDTHGSRLAAFSAPATTKGYLALEDWARGVGAVTAFGIEGTGSYGAGLSRHLLAQGHKVVEVTRPNRQLRYQHGKTDSLDAEGAARSVLSGQAIAEPKTQSGSVEMIRHLKIARDTAVKSRSQAMVTLKTLMINAPASLRDAIDQISGKIALIRHIAAFRPGALTSTTASAKTAMRALAQRWLTLHDEIQAHDKALEQLVAVRAPTLIAAHGIATMTAAEMLILVGDDPTRIRSEAALAKLCGVCPIPASSGKTNRFRLNRGGSRQANAALYRVAIVRMRNHPPTLAYVSKRKKDGKSNREIIRCLKRYIVREIFAHLCRSQTPLAIA

SEQ ID NO: 429257 - protein, 583 aa, unidentified
MMRKLNVGIDLAIVGQHRASVYDPQTNQFLDNSFSFDISYEGYEYLLKRVYKWVAEEEETEIHFIMEPTGSAWMPLSCFLVTRGHRVYRVTTQKSSDFRKFLNKHTKTDKVDTRALAVLPEVDSSGIYELYLPTADLGTLSRKSKHMAKLTKETTMHKLRIQSIITMVNPNVLKAFGEEKFGLPGRTLYRHFANPFKIVALRQEGFFEGFRKLQGRDVSDEILAEIYQASVSAVMIYEPMVEKGTVPFDFMQVDEEIQTELRILEFLEVEIKQIQSTIDVYYKKIDNEGALKSIRGIGDKIAPAILGIIGDVSRFSNIDKFRRFFGFTPKKNQSSNHEKKGQKINKAAQKLLKKYLYLAAEVARQWDPEFAAFYDRLTKKGFHHYGATCALANKMAGRVYAVLKRMQRSETSNYKSSISVAPGEQLSSEEVAYQLRDLDGHVVTNKVAREIVREQFPSKAQRKKHDAQAKEQHKAKKESMQAGDNTEKQKESLPSHQLLAEQMRQFFGQMPENSTVRSGKTLQAKDVLDNMMHEWFLQDENIDSEKGALIDSLIKLKNQMEKREVKPVDNSWESGGKNMQKNT

SEQ ID NO: 429258 - protein, 312 aa, unidentified
MDISKDVFDVMNSKGAYMQYPNGSKGFGQLSKKLPKGSLVVMEATGYYHYRLAQYLYEHGHCVSVVNPLSVKRFIQMKLSKVKTDKSDARAICEYAQVNEVPLYTAKNKDQAECFQLLRLMDTYLKHSTAIKNKLHGERTLGIPSKTVYRSLSRSLKSLQKEIGLLEARLLSLVKEHQQGQLTLLKSIPGMGSKTAMVLLVLTDGFTKFENAAQLCCYAGITPTIRESGSSVRGRSRISKVGNRKLRNLLFLCSFSACKHNKACREIYERITSKGKSKKLALIAVSNKLLKQSFAIAKSGLPYDEKYVSRLT

SEQ ID NO: 429259 - protein, 421 aa, unidentified
MQVPYERCAAVDVGKDVIAVAVRLPGGGPDGRQAIKRTFKAFCGVLGEAARWLASLGVTHVAMGATGIYSMPVYHALIEHGQFAQVLVCNAGHVKNVPGRKTDLADAGWLAHLLECGLLRGSFIPPAEIKAARDVLRYRAKVVQSRASGVQRLGSVLQDAGIKIGSVASSVAAKSGRAVIEALIDGERRPRVLADLAKGRMRSKIPGLELALEGRFGDHHALMCRLHLDHIGHLDEMIAKLDAQIEAMMAPFHAERDLLAAAPGIGPLAAAAVISEIGASPARFFPGAARLASWAGICPGNHESAGKRHSGRRRHGNTHLQAILAEAAWAAVRHDGYLKALYHRHVMKWGGYRSPTAKKKAIIVVAHALLASIWHMLAGGTPYHELGSDFFTRRLDPERETRRLIARLEALGHQVSLQPAA

SEQ ID NO: 429260 - protein, 406 aa, unidentified
MDQLYVGIDVGSRGNVAYIMRPDGELFSTFAIGNTLGGYWDVSKRIVAAMDKLGLDTVQIGMEATSIYGDGLVHAIREDGSLGRFQRKIHVLNPKQVGKFKESYNDLPKTDWVDAFVIADALRFGRIKNEVYCDDYRYEALKTLTRARFYAVQNLAREKQRFGNLLFKKCSGLAQSSDVINTASSTFALMESFETVDDLANAELENISAFLHAASRGRFANPDETAKIIQAAAKGSYRLPKTVNDSVNQAMSVSIAGIRALQGQIKELEAAIQKQFEIIPNTIISVPGIGKVYSAGIIAEIGDIRRFQSHASVAKYAGLVWNKHQSGIFDAEDTRLIKSGNRFLRYYLLEAANSVRGCDSEFQRYYNLKYKEVRHHQHKRALALTARKLVRLLFRLMKDNRLYIPA

SEQ ID NO: 429261 - protein, 432 aa, unidentified
MAENACSPLLQDGTEARCRFTVSNNLPGAEQLASEMVKLMEGYHLDRLLVRLEATNLYWWHLACFLNSSPKLSPFQPRVYAFNPRLIKSFKKALSDTTKSDINDAYAAAERLRFGRLPAQFMPNQLYQPLQRLTSFRCHLMHQIAREKSYFLSFLFLKFSEYQNLDPFSDIFGATSQAVLTDYLTVDEIAAAPLEELAQLLVKEGKNRFPSPETIAAVVKRAARDSYRPLATLNESLNLILGITLENIRTPSRQTKKLDQAIEREVRKFPNPLISIPGLGPAFAAGIMAEIQDIHRFPDQSSLAKFAGLFRRTRESGSFQAEETSMGKSGNAYLRYYLIEAASSVRMHNAEYGSYYRTKYNESTKHKHKRALVLTARKLARLVDAMLRHNQPYVPPLMNLTEEVNKLATTKARPAKQHHYRQPGSHSLALCA

SEQ ID NO: 429262 - protein, 416 aa, unidentified
MKDLLEVCCGLDVHKEMIAACLLSGSLGTEPKEEVREFSTLLSGLEEMREWLKANNCRDIAMESTGVYWFPIYNVLEAGAEEDFKFNITVANPYHMKNVPGKKTDIKDSRWIAGLLRAGLLEPSYIPPREIRELRDWTRYRRTLVQEMTGHKNRIEKQLQACGFKLSTVLADIFGKTGMALIRKLCEAGSIEPEEILNLLHGTARKKLDVIRQAVNGRMDGHDRAFLSMLVRNYGQSLKEIEDVEREIYACAQKYEPSIALLETIPGISGMTAITMISELGTDLSMFPTSGHLCSWAGVVPGDNESAGKKKSNRLKKGNPYVKCVICQCAWAATRARKNYLREWFYRLSKRRGMKKAVIALGHKLLVIVYNILTTGEAYDESRSAEAQKRVDESKKMKLIAQARKYGLVLTDARGT

SEQ ID NO: 429263 - protein, 347 aa, unidentified
MLADELDYVIGVDPHRDAHAFAVVDVQSGGVVFEATAVADGEGYACVLRLADQHAPGRRVFAVEGTGSFGAGLTRFLVSQEERVLEVGRLRRERRSGKNDALDAIRAARSVLGQTRPAGPRAGGEREALRALSAAREGAVTARRAGLCQLRGLLVSAPEPLRAELRSLTRARLLRRLGAVRPERCQDPELRGTLLALRALARRVKALTAEERELAREIETLTRKLAPQLLDQPGVGPLAAAQVLISWSHRGRIRSEAAFARLAGCAPIPASSGQTVRYRLDRSGDRRLNRALHMILVTRRRAHAPTIAYINRRIQEGKSRREATRCLKRYLARNLYRLLENGAPLPT

SEQ ID NO: 429264 - protein, 431 aa, unidentified
MSKYLNSLVVGIDVASEFSFVSVLAPNGNQFRKPFKVFHSSAGFNYLIEQIKKAEEEFSTKPVFFMESTGVYHLTLFHFLKDMKFETFVINPLVTNCNKNKNIRKVKNDRNDALSIAQLGKFEDIKVSSDSDIKIFTLKLLVRDYYKLIDTRSGFKKKLSSSLCISFSGYKNVFANTCGLVSIKILKEYPTPQAVISAPKQDIIDILLNSRKGLKWAEKKYSNLVEASVNAQFVSLSSPWLSVSITTSIAIYEAIDAEIATLLNKIKCFIDSDEMSLAFRKNILLLMSIPGIGYNTAITILAEIGGIDKFITPKQLVAFFGVDPAVNESGKFKGDKVKMSKRGTRFGRRALYAVALASIRMKRNGEATNPVLLKYYQENLKGKKAKVALVAVMHKLIKYLFAVLRNQQEYQVRDPKLHQRMFLENNNIQAA

SEQ ID NO: 429265 - protein, 317 aa, unidentified
MTKTNTLTAGIDTAKRKLDVAVHESSARWQVDNTLLGWRSLAARLSQVGVTRVGIEASGGYEGGVVRHLRALGFTVLVLQPIQVRAYPKLRLRRAKNDALDAVLIAACAAAITQPRREADPRLADLAAHLTFVEQVEEDIARLKIRLEHVEDKRLRRIALADIVRLKARRTAELLRIANQLRSHEDLARRLDLVLSIPGIGERTALALVIRMPELGRVSREEAAALAGLAPFDHDSGQHKGQRHIAGGRGRLRRSLFAAALPTAFRWNKALIALYGRLIGRGKAHNAALIACARKLLIYANTVVQRGAPWTEKPVQT

SEQ ID NO: 429266 - protein, 341 aa, unidentified
MMKKQTGSFLGIDVSKLWFDISLMQVLNFQKQQMITERFNNTINGLALLKKWLKVQKVTFDNDTLLVIENTGIYHRLLWKFFSENNIPIHIGNAAHIKKSFGIARGKNDKIDSQRLCSYAYKNEDELKATPALNPVFISLKDLITSRTRLKTQLGANKVYLKELKNINDKATQKMMENIYKMAINGLQKSITEIEKQITFVIKSDSSINANYTFLLSVPAIGPVTATYILCCTNNFASKITGKQLSCYAGVVPFSDRSGTSLKGRNKVHKMANKELKSLLHMCALSSLKNHKEFKEYYDRKITEGKHPNSVLNAICNKILLRAVAVVNNQKYYVENYKKAA

SEQ ID NO: 429267 - protein, 321 aa, unidentified
MNSSNIIAGVDVSKSKLDIHIHPLEHYKIFENNVQSIDEILDFLRLHNVTKVGLEATGGYEKLCAYTLLSNDFEVYIIQPRWVRDYAKSLGITTKTDKIDCSIISRYINNTDMRAIPLKVDNGNIDYLKQKLSRRNQLVEIAKIQKNQIQQITDTSIIKQIEELLAILQNQIKTLEDEMITFIDQNQELKKKYISITSIPGISKITATTLICHLPELGTLQKKQISSLVGLAPFNRDSGSSRGKRCIQGGRSQIRKVLHMCILSAQKVNSYIKPFFTRLYNQYKKPYKIASTASMRKLLLLANSLVRDGRVFTEEYSPKSA

SEQ ID NO: 429268 - protein, 351 aa, unidentified
MKVTTIGIDLAKDVFGLHGVDGEGRVTFKRRLVRSRLLEFLSQLPRCLVGLEACSSAHYWAREIERLGHRVRLMSPRFVKPYRKSDKNDANDAEAICEAVTRASMRFVPIKSEAQHEVQALHRVREQLLKSRTALVNQVRGLLAEHGVVAPHGIARARRLLLGILADPERHGLSGLFRETLQEMAERLRFFDERVGAYDDRIERVFKEDERCRRLAKVEGVGPLVATAVVAAVGNASEFKSGRELSAWLGLVPRQHSSGNRSQLLGISKRGDRYLRTILIHGARAALRRADHKRDQRSRWAMRIKLARGYNKAAVALANKNARIIWALLTRGENYRPPAISVASPTADRIS

SEQ ID NO: 429269 - protein, 322 aa, unidentified
MSVVVLGIDIAKQKFDVSLLVEEKTKHKTCKNSAEGFEALTVWLEKQGVGKVHACLEATGNYGEDLGIYLHEAGHTVSIINPARIKGFAQSELLRTKTDKIDAALIARFCLAMKPEIWTPPAPEIRSLRALVRRVDSLIDMRSQEKNRISTAHESVVLLIKEHIVYLDKEIENIRRQIDDLIGKNPYLKQRKDLLASIPGLGKATIPHLLAELDDLNKFTHVREMVAFIGLAPKETLSGSSIKGKPRLCKIGHARLRKALFMPALVSIQCNSAMIAFHNRLKERGKNGKVIVCAIMRKLVHVIFGVLKSGKKYDPNYKPVFA

SEQ ID NO: 429270 - protein, 319 aa, unidentified
MAMNTQAIQIGIDVAKEELVIYRQDLDQLDSLPNTIPSIRRWLKTLPKQAALAVEATGTYHMPLTEQAHRAGHRVFVIDGYQLKHYRESVRARAKTDPCDARLLARYLAREGDDLRAWTPPPKAYRTLQSLLRRRSKLIQARVALQQSLGQEPSLKAPLKRLVAQINRIDQLIQKRMEQAVRQAGLTEQVARCEAVEGIGPLSACALVMAFLRGDFRNSDAFVAFLGLDVRVRDSGKQVQRRRLSKRGDPEIRRLLHNAAMAARRHPYWANVYQRYRDRGLQTTQALVILARKLARIAFALMKNQTTYQAKARQACGTT

SEQ ID NO: 429271 - protein, 341 aa, unidentified
MKNKSFIGIDISKNVIDASIFCEGTPIKDFPHAVFNNSRKGFGEMCTWLKKNHVVLSNCLFGMEFTGSYSMELEKFLNAKKFQFCMLSTHVVKHYPMGPKDKSDKIDSAKIADFLYRYDGTECVKPYKMPDKTMQRLKALMNERKFLVEQRTCFMNRRQLCTTKEDVQLYDGYIRKLGHDIENIELEEQKLLATDDSLLTTYKNLLTIPGIGFVNAINVIVITRNFTAFETARQYASYVGVAPHFHTSGTSVRWRPRPSARCDGQAKADLSMAATVAVQYDAELQSFYNRKLGGKQDSDTKRKALNAVKFKLVLRMFAIGKQNRKWEPLDSKSSNEKLAIS

SEQ ID NO: 429272 - protein, 370 aa, unidentified
MLDTTTFIGLDVHARSIKAVSLDVMTGEVRAATFGYDAGAVAEWVRSVDPKARCVYESGVTGFDLQKRLSGLGVDCVVGAVSKMIKPSADRRRKNDRNDAEFLARMLSVGNVVEVWVPDDECEAARDLTRALEDARDDLSRAKQRLSKFLLRHGLAFDERTPTGRRKGNWTRAHWSWIESIRFAEGADNDVLAYYVDAVRRAAEEKARLEGLVEAEARKPRWRRRVDSLRCLKGVDTATAADLVFEAGEFSRFRNARSFAAWVGLTPSEHSSGESDRRGAITKAGNKHLRKALVEAAWHYLTCSGRPKGLAKGQAPDRVARRHAAKGVRRLVERREALLARGVHGNKANVATARELACWVWAVGLMAEEA

SEQ ID NO: 429273 - protein, 349 aa, unidentified
MTSSMTIAVDLAKTVFEIAIADAEWRIVERHRLSRAQFQTFFFNRESATIVMEACGTAHFWGRWLTDLGFSVRLIPAHYARPYRRRNKNDAADAAALVEAARNAEIIDVPVKSADQQAIQGLHRIRSQWMATRTARINNLRGLLREQGINIPVGAATAVSAAPALIDSDAVPAALRAALQDIISEIHELEARMKTVERQLKQYAATSRDVQSIQQVPGVGLLTATALVAAVGSPDNFRDGRHLAAWMGLTPRHVGSGHRMHRGGISKRGDRYLRMLLIHGARSVLIRAQLNAKSGQPLNRLQQWALDLRQRSNHNKTTCALANKLARIAWAVWAHDRNFDGNHSLVQAA

SEQ ID NO: 429274 - protein, 415 aa, unidentified
MSQEEIGAWVGIDWADKEHRIVLEEAATGRRVWMAVGQSAEELHEWLTGLRSRYMGRRVAMALEQSRGALFYVLNRYEFIDLYPVNPKTLARYRDALRPSGAKDDPDDAALVLELLLRHRDRLRLWKADDARTRQLRLLVEYRRKLVDDRTALLNQLTQLLKESFPQALRWAGGLDTKQAFDFLLRWPTLAAVRQARTQQLRAFYRTHSHSAEHIEKQIDAIRTAIPLIDDPAIVAACSTMILAIAGQLRVLRESIAQFDRSIDELFAHHQDASIFQSFPNAGAVLAPRLAVASGTDRDRYSAAVEVAQWSGIAPVTRRSGGSMIVCSRWACPKFLKQTFHEYARVSIAASPWARAFYDQQRLRGATHHAAVRALAYRWIRIMFRCWKDRVPYHELTYQQSLRRRGSPLAGRLAA

SEQ ID NO: 429275 - protein, 368 aa, unidentified
MDAPTLTALMCQSGSALFNHSTDEGVHMKITTIGIDLAKSVFQVHGVDVRGKAVLRKQLKRSQFLLFFSNLPPCLIGMEACGSAHHWARKLQGLGHTVKLIAPQYVKPYVKTNKNDAADAEAICEAVARPSMRFVAIKTVEQQAVLSEHRVRQAFVQARTAQANQIRGLLAEFGLAIPKGIANLPKQVPLILENPAYELPAVFRELMGGLLAHFHELDCQVDALGARIMAWHRDSAASRKLAQIPGIGPLGASALVSAIGDAKTFKNGRQLAAWLGLVPRHQGTGGKQTLLGISKRGDVYLRTLLIHGARSAILAAQRRSETDSWLAKLVKRRNPNVAAVALANKNARTVWALLAHDREFQSGYAAAA

SEQ ID NO: 429276 - protein, 417 aa, unidentified
MEIIKNKVYGADIHKKFLVATILSRDGTQISERFGMMLDDILKFKECVLENNCEQVAVESTGVYWVPIYTALEDKIEVIVANPYQIKHTPGRKTDKVDSEWIAELCLKGMIEPSRIFPKEYRELRTLTRARENLVNNCTQLKNRIHQTLEYSCIKISSVLSDIFGKSGRYLLDGLLEGKTIDEILIGTKSKTIRKKEQQLREAIKNSLDPAQILVIRYYLEQMEETRKKIDNLDTEIMSRIERMKEDVEIAMSIPGIAFTSASSILAEIGNYRDFANGNKLAAWCGLVPSIYESANKRITDSITKQGSKHVRRMLVQVAHAISRTKNSRLKSFFMRIKAKKGTKVAVVALARKVLCILHHLLVNREMYEESGNLKPKPLKFDRTSSPIQITEQDMIDALLKAGYIIKKMDKEVNTGS

SEQ ID NO: 429277 - protein, 332 aa, unidentified
MKVFYLGVDVSKKKLDLCLRSNGKDILYDVIPNDLSSIKSWLTRTFEKFFLSEDSLVVCAEHTGQYTYPLVCATKSIGVYLCLEDAAKIKYCHGIPRGKNDKIDACRIAMYAERYNDCLQPYTASELIIQKLKNLSTERSMLVADRAKYQSQLKDQVDYMEHSIYSNRVEGIINTFTDYIAQIDLEIKELINQAPVIAHQMDLLMSVDGVGERVALKMIMETDAFTSFTDPRKFCCHAGVVPFVYVSGSSQRSKNRVSNRADKSIKHLLHMAALSVSQVKNSPLKKYYDRKVEEGKNKMSVLNAVRAKLVTIMFAVIRTDAFFSRNYQNSLA

SEQ ID NO: 429278 - protein, 456 aa, unidentified
MQHYYLGIDVSKGYADFVILNDKKKPIEENFQLDDTFEGHCCLYERLLRFFEDHPDSTIYAALESTGGYEDNWFSALIKFQGTLNLKTARLNPLGVNANSKADLKRNVTDKISAQNVAEYMIAHPEKISYQQQDHLASLRKQWGFIKMLTKQSTQLLNQLEVLIYNANPELLVYYKDGTPGWFLRLLIHYPTASSLSKAKIVKVARIPYISPDRAKKLVGNAKKSVASATDKVTGKLIIATVKQILHLKQVIKAQTKLMAQECPVPEVDLLKSFIGIKDFSAIGLMLEIQTVERFLSVKKLASFFGVHPVYKVSGDGIGGFRMSKRGRKEPRQILFMVTLTAIQSSPLIRGIYQEHIQKGMEKMAAIGLCMHKTLRIIYGMLKNNSAFDPEIDRRNREKMVIHNSKVNKDKNRRYQAFDSNAPISRRQHGKREERKQSHSDNNTNNGIIAPAPLST

SEQ ID NO: 429279 - protein, 350 aa, unidentified
MFIIGCDYHPGFQQIACVDTDTGELSEHRLAHREEAEAFYRVLKQRNLPARVGMESSGHSRWFERLLKELGFELWIGDPAEIRSKRVRKQKTDRQDAQLLLRLMLENRFPRIWVPDAENRDLRQLLWHRHRLVQMRTRVMNQLHVVPLNEGLRRKKALWRPAGRKELESIALAPWASRRRQDLLDLLDQLTPKIQDLTHALEEEVEKRPVTRLLMTHPGVGPLTALAYELVIGTPERFHCGKQLASYIGLVPTEESSGDPRRLGHISKQGNVLLRFLLVEAAQVTVRSQPEWRSRFFHLAMRRGRKIAKVAMARKLAVHLYWMWRQGRDYGQTQKLGSQAGEPGKRDGEQ

SEQ ID NO: 429280 - protein, 337 aa, unidentified
MYQHYLGVDLHRRRSYVVLMDAQGKISDQRRLPNDAMLDYVAQLPESTFAVLEATGNWSYMYDILEEGTDQVVLAHPKRVRAIAAAKVKTDKIDATILAHLARADLLPLAYAPPVEIRELRDLVRHRSKLVRERTRHKNRIHTILSKYNLHSPCTDLFGKKGRAFLDNILSQISSIHQMMLDDYLGLIDGLNERIKSVNQIIRAWAKDDPRAQLLISMPGIGIYSAAVIVADIGDIKRFDGPKQLCSYAGLVPSTRSSDTHVRHGRITKEGSPWLRWIMVSAAQRSSNASPRLASFHKRILEQHGKKTARVALARKMLSIVYYMLLRGTPYQEHQQG

SEQ ID NO: 429281 - protein, 359 aa, unidentified
MPTMPEAEVFVTLGIDTHKHTHLAVALDQLGRRLDQLQIPTTTAGFAQLYAWASELGTIDTVGIEGTGAYGAGLCRWLRDRGLAVVEVERPDRKLRRNAGKSDPIDAEAAARKVLSGEATVTPKSGAGNVEMIRVLRLTRRSAVVSRSQVTNQLHALTVTAPPALREQLEGRTTRKRVAIAAKFRPGDEPDTVLAATRYAMKKLAQRFRALDAEIKDLDRQLTRLVTTTAPKVVALRGVGIHTTATLLVTAGDNPERLRSEGAFARLTGTAPIPASSGQTDRFRLSRGGDRQANAALHLIAVNRLLCDPRSKAYVKKRTGGTKANLDILRRLKRYTARELYPLIVEALTEAEPDLVPAA

SEQ ID NO: 429282 - protein, 397 aa, unidentified
MIAVGIDVSKSKSTVAILNGDGSIRAKPFDVHHVADELQALVDYIKRTSEPPTILMEPTSHYHYPLLKAFQEAELPVCLINPYQMKKYGDTELRKAKTDKRDSLRIAQYALEKSYSLIPYTPQDQKYEDLRFLSRQYGQRISTLTAAKVQLLSLLDETMPGITTILPLKSRDPDNCVLLRFIKRFKSFDVIRKMGKTRFLDSYQVLVKKTKDRFAGAKGLAIYELVLNSVTTRGENPLSAMTQDQCVDLVSTSQKAADEINLQMRIIAETIPEYKVLRSMAGVGDRLGPIILGEIGDIRRFHSGKALNAYAGNDAPPYQSGQFESRNRHISKRGNPALRKACFEVMQALKLTKPQDDPVYLFLLKKEQEGKPYNVAKMAAVNKFLRIYYARAMELYR

SEQ ID NO: 429283 - protein, 452 aa, unidentified
MIAAVVERCVGIDIGKKSLSACVMTGPANGEARSETRTFGTTVAELKALREWIQKEQCKHAIMESTGSYWKPVYNILEDGVTVALANPQEVKGRKGHKTDAKDAWWLAHLLRHDMVTPSFIPPRKQRQLRDLTRRRKKMLSAASSEKNRIAKVLEDANVKLGSVLSDLFGVSGQRMLEALLEGKAEAQQVAALAHGTVQKKMPQLIAALEEHQMDDHHRRMIGYSVAHLCFLEDQIAELDEDIRTQIREAGYEQSWELLQTVPGVQETTAAVVLAEMGPDTKQFGSEKKVSSWAGLAPGNNVSAGKSKSSSTRPGNGWLKGALTETAWGVARKKDCHLRDKFWRIAAKSRAKAVVAIAHDVLKLAYCVLERGTPYVEEGPHAFSEPQRQRIIRHHVRRLGRLGIRVRTGPQSAKGCRKAKKATAATTAKRRGRPCKCVERGIICTHGWATTT

SEQ ID NO: 429284 - protein, 345 aa, unidentified
MSESYSGRQFVGIDLHRRRSVIVRMTTDGDPLECIRISNDVERLTTVMARAGEAPEVVLEATYGWYWAVDALQELGARVHLAHPLGVKAFEYRRVKNDERDARDLADLLRMGRLPEAWIAPPATRELRELVRHRAKLVGIRSNCKAQIHAVLAKCGIQVSMTDLFGLAGTELLDRLQLPKPYAARIASLRRIIGALDFEIDAFAGQVRGRLARDPGFVAVQAIPGIGPILGAVFVAEIGDVHRFTRAEELTCWAGLTPKHHESDKHVHRGRITKQGSRLVRWAAIESVQILPKHTLVGGIRDRVADRRGRNIGVVAAARRQLEFVFYALRDHRVRALQGTTPVAA

SEQ ID NO: 429285 - protein, 328 aa, unidentified
MTASSSNYQGTRGVNVGIDVAKDTLEIAVRPDNEQWATKNRVEDFPALIEKLRQMAPERIILEATGGWEVPLANHLAAAGLPVVVINPRQARDFAKATGKLTKTDPVDARVLAHFGDAIKPQIRPLPDEQTRTLADLLTRRRQLVDMLAAEKNRLVTVQHRQALKRDLEAHIKWLEKRIDQLDDDLRRQLEKTTAWRVNDQLLQSVPGVGDVTSRTLLLQLPEIGTLSEKQISALVGVAPHASESGKHKGQAHIRGGRANVRSVLYMATLTAIRCNPVIKAFYQRLLAKGKFKKVALTACMRKLLVILNSMIRKQKSWSPAQIPAAQD

SEQ ID NO: 429286 - protein, 391 aa, unidentified
MIYVGIDVAKDKHDCFITNSDGEVLFKAFTITNNLDGFNELHQKIASVMDDVTKVKVGLEATGHYSYNLLGYLIDKGLPTYVINPLHTNLYRKSLSLRQTKTDKVDARTIASMLMSDVNLKSYSDISYHNEELKSLTRYRFDKVKERAKLKTSVSRLVCILFPELEKLVPTLHITSVYALLSEFPGAKHIATAHLTRLTNLLSEASKGRYGKDTAITFRDAARASIGSNMPAKSLELKHTIKLIQELDSEIDEIENEIKIIMDEINSPILSIPGINYRMGAMIIAEIGDFNRFDSPDKILAYAGFSPSTYQSGQLDGAYAHMEKRGSRYLRYALYNATKYVCHWDPTFAAYLAKKRAEGKHYNVAISHAVKKLVRVIYHLEKTKQQYIKAA

SEQ ID NO: 429287 - protein, 328 aa, unidentified
MGSDTPQVATPVVIGIDVAKGRLDVHVWPTHEAFTLDNTPAGVTQLLERLGLLAVSLVVIEATGRYERRVAFELMNAGYEVAVVNPRQPRDFARASGQLAKTDTIDAKILAQFGAVIGPRRSEKPSQNQVLLDELVTRRRQLVEMITTENQRREQSFDRRVGRGIGKVVKVLQDQLTDIEDQIAALIDRDDNWRGKLSLLRSVPGVGPATAATLIAELPELGKLNRQQIAALVGVAPMNRDSGTLRGQRHITGGRQSVRNILYMATLTARTYNPLIRAMARRRTAGGKPFKVMMTACLRKLLTLLNTIVRNNEQWRNECPAEPATATV

SEQ ID NO: 429288 - protein, 409 aa, unidentified
MERLIERGAGLDVHRDTVSACVRGPGAPGQRPPHVRTFGATTVELLALRDWLQAYGVTHVAMESTGVYWKPVFSVLEDACTCRLVNAAHIKQVPGRKTDVLDCIGIAHLLEHGLLRGSFVPPAPIRELRDLTRHRKVLIQERSRAVNRLHTLLQDAGIKLASVATDILGVSGRAMLEALVHGPTDPEVLADLARGKRRAKLPALRQALAGRFRPHHAFLVSHLLGHVDYLDEAISTLSAEIEARLVPFASPLTRLDTVPGIGRQTAEVILAEIGADMSFFPSDRHLASWAGICPGNHESAGKHKSGKIRQGNRWLRMTLIEAATATIRSKDSALAARYRRVMRHRGHKKAIVAVAHAMRRAVYHILAEGTTYRDPGPTYYDQRHKQRITRRAIDLLEREGYRVVLEPAA

SEQ ID NO: 429289 - protein, 394 aa, unidentified
MKLIGIDIGKNKHFFCVMDQQTGEIISQPVSFSNDKEGFDFLVQKIKSYPKDSILIGMEDTGHYHFALLKYLLDLQYTVALINPKTTDFNRKMQGGITKNDKLDTINICDVLDTPERKKQYRITKVNSFDLYEQKQLTRHHHNLKEEENVYKNRLQKCIDIVFPEFNKLFNSKYGIVYMNILKMFGSAENIANTDIRTIRKCFEIEGRGNRISLTPERLKECAGSSIGISSSAEVIQIKHLTAQIELIEEQLTEIDKKIEEFSIQNNSPILSIPGISHFSGTSILAELGDISNYSKPSQIIKFAGVAPLHYESSQFNAQHTAITKKGSKYLRKTLYQIILPVIRHNPVFNKYYQLKISQGKGHRCAQGHCVRKLLRIIYHLLKTNQQFDPQLLR

SEQ ID NO: 429290 - protein, 411 aa, unidentified
MRRVVGIDVHRTFGEVVFWADGRLRHAGRIDMTRTALEGFGKTLLANDEVVVEATANSMAVSRVLAPFVARVIIANPLQVKAIAQAHVKTDKIDAGTLASLQAAGYLPQIWTPDAETERKRRLVARRYQVVRHRTRLKNEVHSILHAHLIPKCPHADLFNARGRAWLAAQQLPDDERAAIDRHVRELDRLAEDLALLDREIAQDAIDDSAVNRLMTITGVNLAVAAGIVAAIGDVSRFSSPQKLVSYFGLNPRVRQSGLVAAHHGRISKIGRSHARAILVEAAWAAAKAPGPLHAFFVRIRARRGHQIAAVAVARKLTVLCWHLLTKGEDYLWARPALVANKTRAMQLQAGHPQQKGNRRGPAYAYNIKALRDREMVIAAQAERNYEQFVSQWKPRRPKTGARAPQLGRTK

SEQ ID NO: 429291 - protein, 286 aa, unidentified
MQHYAGIDVSLESSAVCVVDAQGKIVREAKVLSEPEALIAWFASLDVTMERIGMEAGPLSQWLYAAMAKAGLAVELLETRHVRAAFKTMPVKTDKKDARGIAQLMRMGWFRPVHCKSLPAQEVRAVLTARKLLQGKLHDVEMSIRGILRGFGLKVGPTTPKTYAARVTALVEGHPTLEVIAKALLKARLVLADELGGLEHRVRAMAREDERARRLMTTPGVGVLVSLTFVSAIDESDRFRSSRMVGAHFGLTPKKYQSGETDYTGRISKIGDVGVRTALYEAAPSF

SEQ ID NO: 429292 - protein, 310 aa, unidentified
MDITAVGIDVSKDRLDVALRPSGETFAVERNAAGLDRLIDRLRPFSPSIVALEATGGFETVAAAAMAAAGMPVAVVNPAQIRAFAKAIGQRAKTDPIDAAIIAHFAEATGLKPRPLPDEATRLLADLVGRRRQIVEMMAAEGQRDRRVTDRRLKKSILRLRKALEKELAELDGEIDDSIRGSPAWREKEDLLVSVPGIGRTIARTMIAELPELGTLSRKQIAALAGLAPFTRQSGQWRGKSFIGGGRVSVRTALFMGALVAKQHNPVLKAFFDRLIAAGKPKMVALVAVARKLITILNAILRERRPWQTA

SEQ ID NO: 429293 - protein, 350 aa, unidentified
MVILGIDAHKQTHTVVVVDERGRKLGERTVKTTTTDHLDLLVWASRFGAERRWAVEDCRHLSRRLERDLLGAGQQVVRVPPKLMAHARTAARTYGKSDPIDALAVARAALREPELPVARLDGPAREIRLLVDHRDDLVAERTRVINRLRWHLHELDPSWHPPARSLSRAPATHLAATEAFLSRLDGMVAWLAGQLVARVQELNAQIDQLEADLVPRVGRYAPSLLALRGCGVLTAAKLVGETADIRRFHSKDAYARHNGTAPLPVWSGNKQRYRLSRTGNRQLNLALHRIALTQARHHPDAQRYLARRRANGNTPTEAIRALKRRLSDVVYRALLADAGVADEAGQTAAA

SEQ ID NO: 429294 - protein, 426 aa, unidentified
MSGEETGGQEPQFAAFVGIDWADQKHVWCLQARDSTKRETGELEHKPEAVEAWVGQLCQRFGNRPIAVAVEQSRGALVFMLTKYEPLHLFPVPSTTSARMRKALYPSGSKDDPRDADVVLDLLLQHRDKLRRLSPDTDATRRVQNLVEERRKLVDEKTEQSNRLTSHLKIYFPQMLDWFEHLDTELVCALLERWPTLQELQKVPPAKLRAFFSKHHCRDQELIEWRILAIRQSIPAIRDRAVIEAKSTVVKVIVQLIRTLREGLADLDEKIEEAAAAHPDFFIFESLPGAGPVLAPRLLVAFGSQRERYHNASEVQTYSGIAPVMEKSGKKQWIHFRWACPKFLRQSFHEWASHSIGYSVWARNYYQQQRNKGQDHHAAVRALAFKWIRITFRCWKDRVAYDESKYLTSLARRGSPLAAAATAKTL

SEQ ID NO: 429295 - protein, 317 aa, unidentified
MIAQDDKSYYVGIDVSKNALDIFILPINKHMQFVNNPKDLQKIVKKLLLFPNALIVMESTGGYERPIAQALAKASLSVAVLNPRQIRDFGKALGILAKTDKIDAQLIALFAEKIKPVGNIICNETNQKISAINARRRQLIEMIMAEKHRLDKVPSSMQKSIGRIIKALEKELDVINAMLRDIIATNAEYDRKNKLLQSIKGVGAIVAANFISDLPELGQLESKQIAALVGVAPYNCDSGSFRGKRAIWGGRAHVRGALYMAALVAIQHNTQIKIFYDRLVNNGKNKKVALIACMRKLLTIMNAMLKYKKQWKFIMSR

SEQ ID NO: 429296 - protein, 437 aa, unidentified
MRSLLAESNRGAKARMKKKDNAKRDEHYAAWVGFDWGDQEHVWALQWTDTGERERGRLEQTPEALDVWMGQLMSRLNGRRIGVAIEQKHGAVVWMLLKYECVEIYPVHPQAAGQFRQALYPSGSKSDPADGELLLELLVHHRDRLRPLEQDDEPTRRLLMLVEQRRHWVEEKKRHGNRLCARLKVYFPQVLDWFDDIGAAPVLDLLARWPKLEQLQKAQRKILETFLRQHRRTPEEAAAWAKQVSAAVPAVQDMVLLDSYVLEVTELVALLKQMQTSIKKFDAAIAETSRQHPCWTIAQSLPGAGPVMAPRLLAAMGNGKRYQNAHEMQCATGIAPVTVASGRTRIIQFRRACPKFLRQTFHEWAQHSMKSCRWARVYYDQLRAVGKRHHAALRALAFKWQRILFRCWKDRVAYDESKYIASLKKRNSPLSAWLPEQ

SEQ ID NO: 429297 - protein, 423 aa, unidentified
MKNSAARKLKQVPKGYLVMGVDPHKKRHAAVAVTQDFTTHSKFKFNNSREGFEMALERARAEMVRTGSRGVIFAIETGGHYWRNLAYFLDERGIPFHFINQFTLKRRREGKDLNRRKNDYRDSEVAAQLLCTGEFTDTKLQHGVYAELRAAYNAYRRLVKERTRITNLVKGLLDGIFPEFTRVFKDPCGQTALSVLSICSIPVVIRKMTEEEFVDATRARHQGRLMRKKLRALHYAARTSIGIDAGAQSVSSEISFLVEKLCLIRRQIRSIDETLARLVDGTEEGKYLLSIIGLNYISVAGLLAELGSFRSYRSAKQLIKMAGSNPTESESGGKRSAHTPMSKKGRPVLRYCAWTAVIPMLRFNADFRAWAKKLRERPVHANPLNGREIVGAALNKLLRLAFALVKKQTFYQVPQLEIVEVAV

SEQ ID NO: 429298 - protein, 344 aa, unidentified
MSEVSIIGLDIAKHVFHAHGADERGRAILSKRISRGKLLDFFAAQPRCTVALEACGGAHHWARQLTQLGHEVRLIPPAYVRPFVKRQKSDSIDAEAICEAAQRPSMRFVAVKSEQQQAAGLVFRTRDLLVRQRTQLINAIRGHLTEYGWIAPKGPSHVAMLADLIEEDEMANSLPEAAHVMFRLMLDLLAGLNSKIADLDKEIARRAREDEVSRRLMTIPGLGPISATAIAALAPPIETFARGRDFAAWLGLTPLQRSTGGKQKLGATSKMGERTLRRLLIIGSSAVVQQASKRGAPKGSWLEQMLARKPRMLVTVALANKMARIVWALLVKRENYRAPVAAKA

SEQ ID NO: 429299 - protein, 388 aa, unidentified
MPQSNDLSRSLAAFDQDRTLIAVIEMSQSNWLVAGLVPGLERRPLKKLSPDEDALLKLVQRWRNEAAQAGREITRIVIAYEAGRDGFWLARWLRRRGIEAYVIHPSSVAVSREHRRAKTDRLDTELLMRAVLGWLRGEKRHCSMAAIPTIEDEDAKRPSREHEKLVGHRTRLVNRMKAMLARFGIRTFKPTLRKAADRLDGLRTAEGTPLPENTRAELRRDMMRLRMVREQIKEIEQERLRKLTVAPAEKGPPMMVRFIARIIGIGIETADMLVSEILSRGLRDSKAVARYAGLTGAPDESGRRRREKGLAKAGNARVRRGMIQLAWRFLIFQKDSALAQWYRARTADAHGATRKRMIVALARKLLIALWRMATTGEIPEGISLRAAP

SEQ ID NO: 429300 - protein, 346 aa, unidentified
MTIVEDRPVITGGVDTHADVHVAAALDPIGGLLGVRQFPATAAGYSDLLEWLGEFGTAAVVGIEGTGSYGAGLARYMADAGVRVVEVDRADRQDRHRQGKSDPLDAVSAARAAQSGRASGTPKGRDGAVEAIRALMVAKRSARSERTQTINQARALILTGPDDLRARFARHTPAALAAGLAALRPRPGDVPGYATRIALRELGRRVQFLDAQLGRLDELIVPLVTARAPGLLSLHGVGPDTAALLLIAAGDHPERLRSEAAWAHLCAVAPIPASSGKTSRHRLNRGGNREANHALWRIVITRMSSHPATRAYVDRRSKEGLSKKEIIRCLKRYVAREVYRHLRGGD

SEQ ID NO: 429301 - protein, 344 aa, unidentified
MEVYGGIDLHSSNNYVGVIDGEDRRLYGKRLPNHMATILLSLEPYKGRLKGVVVESTFNWYWLVDGLQEVGYKVHLANPSAIKQYEGLKHTDDSWDSFWLAHMLRLNILPEGYIYPKEDRPVRDLLRRRLLFVRHRTAHILSLQSMIHRNLGMRMSGREIKKLKEVDVDSLFDSYHLVLTAKNNMAAIHFLKERIKLIEKELKFQFNLREEFKCLQTIPGVGDILSFTIMLEVGDISRFAQVGNYSSYCRCVKSERFSNNKKKGKGNRKNGNKYLAWAYTEAANFAIRFCPNAQRFYQRKMAKTNRVVALKALSNKLARASYYIIRDQAPFDPRKLFGPSARVQ

SEQ ID NO: 429302 - protein, 328 aa, unidentified
MTNHTTICAGIDTGKRKLDVAIEGRCEQLQVDNTPEGHELLLAWLRQHRVKRVGIEASGGYEQPVVIELRRKRFVVVVFQPTQVRAYAKFQLQRAKNDKIDAALIASCTAAVRKIHAAPDPRLLPFAERLTMIDQIGEDIARLKNRIESCRNAMIKRLWQEDIARLEKREKAEFTVLVALIRKHRDLARRLELIHSVDGIGLPTAVAILVRLPEIGEITREQAVALAGLAPYDDDSGERVGVRHIEGGRKRLRRALYTAALAASFRWNRQLIELYQRLTAAGKEHKRALVACARKMLIFANTVVARGTPWCDEPPAVNASIAGASSVS

SEQ ID NO: 429303 - protein, 339 aa, unidentified
MKEVTTIGLDLAKNVFQVHGVDRAGTVVVRRALRRSQVLAWFAKLPPCLVGMEACATAHYWGRELRRLGHEVRLIPPAYAKAYVRRNKNDAADAAAICEAVGRPAMRFVTIKTEQQQAAAAIHRVRDLLIKQRTMLRNQLRGLLAEFGVVAAQGRRGLNELLAILSDPEEQRIPSPLREGLTAVMETWRGIERKLEAIDRQMVAAGRADATYRHLVTAPGYGPILSSAMAALVIDPGAFKRGCDFAASLGLVPRQDGTGGKVRLGPISKRGNGYLRRLLVNGATSLIKCQHARQDPWVAKLLASKPRKVVAVALANKLARIGWALMTRQEDFRSRPAAA

SEQ ID NO: 429304 - protein, 345 aa, unidentified
MEPMYYIGLDVHKQKISYCVKDSGGKLFAEGWIPATRHDLDCWMKNLPQPWSAAMEATMFTGWIYDHLKPHATELKVAHPLMLRAIAAAKKKNDRIDASKICDCLRCDFLPESYMAPTAIRERRRTLRYRNLLVRQMVQMKIKTSTLLMEAGVSYNKQKLHKAGYFRELLASNPDIDEGLRSLLRQCREMVVRLGRMEAALIHSLQQDHLLAERVERLLSIPAIGPITALTWALEVGEVQRFSSIKKAVSYCGLCGDQRSSADRVQRTPLSKQRNKHLQTTLIEAAKMAPRYSPTLALLYDKEKQKGNANRATLAVARKLVAYLMAVDRGQTHFLVLDRETCAAA

SEQ ID NO: 429305 - protein, 318 aa, unidentified
MTQDLFVGIDVCKATLDVAVLPGDQAWSVPNSEDGIQELIANIKKLGSPKIVLMEATGGLERRALALLAAAGLPVTAINPRNARDFAKAIGLLAKTDKVDAKALALFALKIQPPCHPLPDEETRALQDLVVRRRQMVDMLSAEQHRLAAAQSPKVWRQITQHIAWLKKRIHIVDFDLDQTIKNSPAWRPKSDLLKSVPGIGSVTTSTIIGHLPEIGTLSNKQIAALVGIAPFNRDSGTVHGRRCIWGGRAAVRNVLYMATLAAIRFNPTIKAFYLRLRAVGKLPKVALVAAMRKLLTILNAMVRDKSSWRSPHAEIPS

SEQ ID NO: 429306 - protein, 347 aa, unidentified
MLADELDFVVGVDPHRDLHAIAVVEVRSGLVVFETRVTADSSGYVEALRVAKQHAPGRRAFAVEGTGSYGAGLTRFLADHGEQVFEVGRVRRARCSGGKTDALDAVRAARSVFEQKRPATPRSSGEREALRALLAAREGAVNAKRAALCQLRDLLVTTPEPLRSELRPLSRARLLSRLSATRPERRQDPELRGTLLALRAVARRVQQLSAEERELAREIEQLTSKLAPQLLSQPGIGPLLAAQIVLSWSHRGRLVSEAAFARLAGAAPIPASSGQTTRYRLDRSGDRQLNRALHQIVVTRRRTHRPTIDYIERRVREGKSRREATRCLKRYLARNLYRLLEHPPLTT

SEQ ID NO: 429307 - protein, 346 aa, unidentified
MLIVGCDFHPSWQQVAWLDSETGETGEQKLLHAADEAKQFYAQLGVPALIGMEATGNSQWFIELVEDLGHEIWIGDAAAIRASYVRKQKTDKRDAAHILKLVVEGRFPRLWTPDREQRDLRQLVLHRHKLVIIRSRVKNELQHLSLNKGMQKKRRLWSQAGLQLLRELPLKPWAACRRQDLLGLLAMLEQQIGKLDQAVQQAADQHPQAKLLMTQPGVGPNTALAFVLTIGDVSRFARGKQVASYLGLIPREESSGGRQKLGAISKQGNRLLRSLLVEAAQIAVRYDPQLRREYLHRCHQKPKGVAKVAAARKLAVRLYWMLRTQTGYPEIVRIESSPRVPLVGAS

SEQ ID NO: 429308 - protein, 334 aa, unidentified
MHKVDPKQTLALEAAPMTSSLGIDISKETFHASLLTDRGEVKKVFPNTRKGFEQLLSWLKNRHAGDLHVCMEATGAYWEALALYLHGLEQRVSVVNPARIKAFAQSELLRMKTDAVDASLIARFCKSQNPEPWVPPPPEIRILQALMRHYEHLKTTRVQQSVYEQSSEAAVVKSSIREVIATLDAQIVQVEREIRQHFDDHPDLKRKRDLLTSIPGIGETTAGTLLSEIPHLDQFESAKAVAAFAGLSPRQRRSGTSIHGKPRLCKTGNARLRKALYLPAIVALRFNPVLRIFAERLATIGKHKRLVIGAVMRKLLVLAYGVLRSGTRFDPNYA

SEQ ID NO: 429309 - protein, 402 aa, unidentified
MDVVITRGAGLDVHQATVVATVRVPDDQGGRRVVTDTFGTMTADLLALRDWLHAYGVTHVALESTGVYWKPVYYMLEDAFTLLLINMQELKRVPGRKTDVKDSEWLAQLLECGLLRPSFVPPPPIRELRDLTRYRVQQVRDRSQEVNRLCKVLEDAGLKLTTVITDVMGKSGRAMLQALVDGTTDPAVLAELARGKLRKKLPELRRALQGRFRPHHAFLIEQIFAKIDFLDEALERLTTEIDQRLVPFEPMLTALDTIPGVDRIGAISIVAETGGDMTLCSWGAMCPGQTERAGKRRSGKTRKGNRYLRATLIQAGLGAMRKNGSALQARYRRVARHRGHKKAVVAVGHQILEIAFYIMRDGVTYDELGADYFNRRHAEKAVRRHVRQLEALGLHVTIEKAA

SEQ ID NO: 429310 - protein, 429 aa, unidentified
MRTESTPGARGPVFCGVDTHADSHWLCVLDWRGRKVLSRQFPADAAGYEALAGAIAAAGEPACVAMEGTSSYGAGLTRHLASLGMPVREALSPARMQRRRPGQGKCDEADAERAARAAMSGSKLGTPKSQDGWVDGVRCMLAARSGAVKARTSAINTARSLLTTAPEGLRSRFRGMGGPRLMEELPSVRAEGALGAALGALADLWEAARDAALDMERAIEASLEENCPALLAMYGCGPVSAAKLAVAAGDNPGRLRSEASFAAICGACPIPASSGKTVRHRLNRGGDRQANSALHEIARQRVMRDPETAEYAERARGRGKSDREVMRCLKRYVAREAYRALMHPHEIRRPEDASELVAARRAAKVSQARAASILGTSEKYISMLERGQRELKPIRRAYEAWVEAGLPLDWDRQAFEAERKMDSKKHLAK

SEQ ID NO: 429311 - protein, 339 aa, unidentified
MQLYAGLDLHSRNTYIGIMDTDFKRVFAKRVANHLPLILKTLQPFRDQLKGLVVESTYNWYWLIDGLMDAGYRCVHLANPSAMKQYEGIKHTDDQHDAFFLAQMLILGILPQGYIYPKANRPVRDLARKRLFLVRHKTAHILSLQSLITRCCAKRVTANDIRSFTLDDLQQLLQEEYVVFAAQANLDTIVFLKQQIRQLEKAIQKKVRLNKAFKNLLTVPGIGNILAMTIMLEVGEINRFAKVGNFASYCRCVSSQRLSDGKSKGSGNRKNGNRYLSWAFTEAAHLSRRYNDYFRSYYNRKLAQANTSLATKALSNKLARICYYIIKDQVPFREKLLSH

SEQ ID NO: 429312 - protein, 339 aa, unidentified
MDKWEVCGLEVSARELVVAEGTKPVQRYANTEAGHRKLVETLTREGKRVRVVLEATGIYGLDVAMALSQAEGIEVMVANPRSVRDFAKALMQRSKNDPLDAVVLREYGERMPFRAWRRPSENRLALWAITRRIQALTEMCRGEKNRRHAAQISQTTPACVRRDVERNLRSQQRALKQLRLQARKCVAVEVELEREYRLLVSVPGIAESSALQILGELAMLPEDRDIRQWVAYAGLDPTEYRSGESVRKRTRLSRTGNRHLRTALYMPALTAIRWEPHLRGFYEHLVQRGKRKKQALLAVARKLLHAIYGMFRTNSPYQGNLVFRLPQPETILDSSLKLS

SEQ ID NO: 429313 - protein, 403 aa, unidentified
MNAVGIDVSKGKSMVAIMRPFGEIVSTPFEIKHTSNDINSLIELINSIEGESRIVMEHTGRYYEALAHELSAANLFVSAVNPKLIKDFDNDSLRKVKSDKADSVKIARYALDKWQNLKQYSVMDELRIQLKTMNRQFGFYMKHKTAMKNNLIGILDQTYPGVNSYFDSPARSDGSQKWVDFASTYWHVDCVRKMSLNAFIDHYQKWCKRKKYNFSQSKAEEIYGKAKELVPVLPKDEITKLIIKQAVDQLNSASTTVEELRTLMNETASKLPEYSIVMNMKGVGPSLGPQLMAEIGDVSRFTHKGAITAFAGVDPGVNESGTYEQRSVPTSKRGSADLRKTLFQVMDVLIKTMPQDDPVYQFLDKKRAQGKPYYVYMTAGANKFLRIYYGRVKEYLATLPESN

SEQ ID NO: 429314 - protein, 355 aa, unidentified
MNDEKYIGLDVHQATIVVAVMDSTGKLVMESILETEAATILQFFAGLRGTLSVTFEEGTWSVWLYDLLSPHVDKLVVCNPRKNALLKDGNKSDRIDARKLAELLRGNQLKPVYHGETGVRMLRELSRSYLTIVKDRSRVMNRLKAVYRSWAIPCAGRDVYYRRHRAQWLAKIREAGVRRRAERLYEQLDMLQHLRQQARRELLAESRKHAITAKLRQIPYLGPIRSALAVALIQTPHRFRSKRQLWAYSGLALETRISAEYRLVEGQVRRSKKLLSIRGLNKDHNHDLKGLFKGAATMASVRPGPFQDLYQAALAKGIKPTMARLTLARKIAAITLTLWKKGENFDAEKLKSQAA

SEQ ID NO: 429315 - protein, 357 aa, unidentified
MQRKEISFKGQSIFIGIDVHKHSWSVTTLTEAGLKRTHPQKASAKELFDFLNRYYPEGEYKAVYEAGFSGFSTYYALKEYGIDCIVINAADVPTSQYETVMKSDKVDSEKLAKFLRADALRGIYVREKNNLDDRSLVRIRTTIRNDLSAYKHRVKHLLLNHGVEMPETFERMNNCWCKAFIKWLKEDVKLMSETRRSLDILLDQVETTRKNLLKVTLEIRHLSQSDKYRRNYDLLLGIPGIGVITAMTVLTEVYDETRFHNEKQFASYLGLIPTSHSSGDKVIHGEKTFRGNKQLGPMLIEASWVAITKDPYLSVAYRTYLKRMTPQEAIVRVARKLSNIIFSVLKTGKAYVPFEGN

SEQ ID NO: 429316 - protein, 341 aa, unidentified
MKNKSFIGIDISKNVIDVSIFCEGTPIKDFPHDVFNNSRKGFGEMYTWLKKNHVVLSNCLFGMEFTGSYSMELAKFLNARNYQFCMLSTHVVKHYPMGPKDKSDKIDSAKIADFLYRYNGTECVKPYKMPDKTTQRLKTLMNERKFLVEQRTCFMNRRQLCITKEDAQLYDGYIKKFSRDIENIELEEQKLLATDDSLLSTYKNLLTIPGIGFVNAINVIVITRNFTAFETARQYASYVGVAPHFRTSGTSVKWRPRPSARCDGQAKADLSMAATVVVQYDAELQSFYNRKLGGKQDSDTKRKALNAVKFKLVLRMFAIGKQNRKWEPLDSKSSNEKLAIS

SEQ ID NO: 429317 - protein, 346 aa, unidentified
MRFYNRPHTYYCGIDLHVKTMYVCILDGAGQVLVHRNVPSTPAAFLEVTAPYREGLVVAVECMFTWYWVADLCAAEGIAFVLGHALAMKAIHGGKAKNDRIDSHKIAVLLRGGMLPQAYVYPAAMRSTRDLIRRRLHLVRKRGQLLAHIQNTRAQYNLPVFGRTLAYRTNRDGVVEHFPDPSVQKSIAVDLALIDQYDALVIDIELTIVREAKRHNADACHRLRSVPGIGKVLALTILYEIHDITRFDRVQEFASYARLVKCKKQSGGKTLGTGGAKMGNVHLKWAFSEAAVLFLRHTEGKKLIARIEKQHGKGKALSILAHKIGRAVFYMLSRGTVFSMEKFLAA

SEQ ID NO: 429318 - protein, 342 aa, unidentified
MEIITIGLDLAKSVFQVHCLDAMGDVVVGKSLRRRQVLPFFAKLSPCLIGMEACGTSHYWARELIRLGHEVRLMPPAYVKPYVKRGKTDAGDAEAICEAVTRPTMRFVPVKSAEQQAALALHRTRDLLVKQRTQLVNMVRGLLAEFGIEMARGLHHALALAARLAAGQAPEVPSLAQRIVVGLARQIGDLQDRLTAIEKELLAWYRSNELSQRLATIPGIGVISATALAASVIEPERFRSGRQFAASLGLTPLANCSGGKERLGKISRMGDRYLRRLLVVGMTSLVRRARTKPDSVDPRMVAMLKRRPARVVTVAAANRTARVAWAIMTRGGTYRAPTMVAA

SEQ ID NO: 429319 - protein, 319 aa, unidentified
MTTLTISSVSPPAVIGCDVGKAAIVVFDSRTGKTRTLRNDPDVLAAFAAELDPDCLVICEATGGYEAALLNALLQAGRHAHRADARKVKAFIRSFGILGKTDAIDARALATYGRERHAQLVRWKLRDGARDRLQTLVLTRQDLVIQRVAWNNRFKAPAADPVKDYLRNILDCLKTQIDAIEADIASLIQNQQSLAQAAKALTGIKGIGNTTAAALLALMPELGTLNRKTAAALAGVAPHPNQSGASDAYRRTKGGRPEIKRALFMAALVAARQNTNLKACYQRLIENGKKPLVALTAIMRKIIVIANAILKPIYSNQVS

SEQ ID NO: 429320 - protein, 314 aa, unidentified
MQATVVAGIDVSKRTLEVALSSGGGFSVTNDEDGIGELLARLRPSGVALVVLEASGGYESPAYLALWEAGVPTALINPRDAYHFAQANRQLAKTDQLDARGLCEFGLRMQPEPLPPPEAADEELKALAVRRRQVVKMLAAERTRVQQAPRSVRSSVKRIVRALERELGAVDHQIEQRLRDNPRLAHRCAQLEQVPGLGPVTGAILVSRLPELGLLGPKQIAALVGVAPYDHQSGEWRGRSSIFGGRAEVRSALYMATLSAIRCNPVLRTFYRRLRAAGKPAKVAIIAAMRKLLVILNAMLKTNLPWNPPCAVTV

SEQ ID NO: 429321 - protein, 398 aa, unidentified
MICVGIDIAKGKSTVCFLKPGGEVLKAPYDIEHTAEEVGKLIRDIRSYGEEVRVVLEATGHYHLPVVAQLLEADIFVCVVNALRMKKFCSQDIRKAKTDKIDAVKIAAFGLTYWQDLHRAKPTDEVYRELRLLSRQYFQLTSMLVKAKISLGNLLDNVMPGITDVLQDRDPHHKLTDFVLKYLHFDKITAMGEKKFVSGYCSWAKKQGYRMYERQAEEIFALVQNSIPALPMTPSTTIVVKEAIRVVREIETSRSSILSQMQAFAKSLPEYFLIREMACVGDTLTPLVIAEIGDVRNFHSKHALIAYAGIDAPPYQSGGFNGTERHISKRGNGYLRHVGFEIMQCKLRLKPEGDPVYEFIQKKRSEGKCGKGAMVAGINKFLRIYYGKVTELYRVLEA

SEQ ID NO: 429322 - protein, 344 aa, unidentified
MKNTTIAIDLAKSVFEVGVSDRPGHVAANHRLSRAEIALFMANQPATTVIMEACSSAHYWGRTFQGFGHDVKLLPPLYVRPYVQRGKTDRADVKGMLEAWRNSDIRPVPVKSESQQQLTSLHRIRAGWMTTRTMRINSARGLLREFGIIFPLGASALADRVGEVIADDNTHLTMPVRELLHQLVLEISELEERIEMVEKQLEALAAQTPVVALLRTIPGVGLLTATALVGFVGDVQRFRSGRHFASYLGLTPREYSSGLRHRLGRISKLGDVYLRTLLIHGARAVLIGAQTQSSPDRFRAWALQLQRRCGNNKTAVALANRLARIVWAVWKSGKPFDCRPQVTA

SEQ ID NO: 429323 - protein, 433 aa, unidentified
MKVMYERVAGIDVHKDMIKVAIRSPGDKPWTRKTEILEYRTFYGVLQEMARELRRRGVTHVVMEASGVYTEPVYYALCEQDFTEVAVINPVHAKALKGHKTDAKDCARLAELFECRLLRGSYIPPAEQKEVRDLTRYRIKTVQARTSEIQRLGKALESAGIKLGSVASEITGKASTAMIEALIDGERRGGVLADLAIGRMRSAGKLADLSMALTGRFTGHHATLCRLHLDRIKVLDDAVDGLDDRITAGAARWQREAGLLKSVPGFGDVVTCAWLAEIGPAPHIWFSRHEKLASWVSLCPGNNISARKRKHGRTGDAGTYIKPMLIQAAWSAIRVRGRLQARYSRLVRRFGGQKNPAAKKKAITAIAHTLLKIACQVLKSGTPYQDLGADFYTRRNSPEEQQKYLERQLQKLHPGCTITITISPPEAALPPGE

SEQ ID NO: 429324 - protein, 375 aa, unidentified
MSKIRFIGLDVHAGTIAVAIAEPNGEVRSLGVLPNSLAAIRKLVAKLGPVKDLKACYEAGPTGYVLYWQLTQLGVSCEVIAPSLVPVKAGDRVKTDRRDAEKLARCYRNGDLTAVWVPDAAHEALRDLVRAREDAKQDQHRARQRLGKFLLRHGAQPPPDIKKKWTAKYMTWLHDHVHFEQPALAATLTDYVQEIHHAGERMVRLEQAIDDAISQAPEQIRSVVAALQALRGVAQMTAVTIVAETGSLSRFQNPRQLMSYSGLVSSEYSSGNRTQRGAITKTGNAHLRRVMVEAAWAYQHKPWVGGFLLKRQQGLDQRVKDIAWKAQWRLCTRYKKLAAHGKNKPQIVTAIARELLGFAWAIAIETEPQPQRQAA

SEQ ID NO: 429325 - protein, 319 aa, unidentified
MNNRSSDIYVGIDVSKSTLDVAIGTMGEYWQASNDSVGIQRTIGCLLNIQPVLIVVESTGGLEKALITELYKAELPFALVQPRRVREFARSIGLLAKTDKIDARLLARFGEAVKPPITHLPSQAEQYLNALMVRRRQLLDMVVMEKNHLSTTDLAMRPRVEEHIDWLNKELEELDQHINELIHQIPQFKEKEKILRSAKGVGPVLCAKLLSGVPELGTINRKKIAALVGVAPFNDESGHRHGKRKTKGGREDVRNVLYMATLAAARSNPVIKPYYQHLLKEGKLTKVAMVACMRKFLTILNAMIRDMQPWIIKSSVIYP

SEQ ID NO: 429326 - protein, 320 aa, unidentified
MNETSTKTAGIDTSKKSLDVATFPTSERLRVANAREGHQELVAWLSARKIKRVGIEASGGYERAVVEYLREHGFEVALLQPRQVHAFAIYKLRRAKNDRIDAALIAECAANLGDLHEPPDTRLAAFAEHLLFIEQLEYDIAHLKTRREHFTTKRILKQLDRDVQRLQRRREAELLLLQVVVCKHDDLARRLELIVSVDGIGIRTALTLVILLPELGKVSREQISALVGVAPYDDDSGERTGERHIAGGRSRVRRALFNAALPASQRWNTALVALYGRLTNNGKAHRKAIIACVRKLLIFANAVVERGTPWSKSPPANHTA

SEQ ID NO: 429327 - protein, 357 aa, unidentified
MAYAVGMGDVELLGKTGTMKADIDRLCKRLQSKARHVHVVYEAGPSGYGLYRELIHKGFDCMVCAPSLIPKKPGERVKTDRRDALKLVRSLRAGDLSAVHVPDVDDEAFRDLARAWAAAKADHRQARQRLKSFLLAHGVRYTGNANWGPAHRRWVSTFAFPNHWQQLAFDECRRTIEDRLAQCDRLEAALREAVVHWRFYPAVLGLQTMRGVQFITAVGMLSELGDLSRFEHPRQLMAWLGVTPSEHSSGDRRRQGSITKNGNSYARKLLVEAAWSYRYPARVSPDIQRRHEGIPKPIIDRAWDAQVRLCRRYRKLAARGKNVNIAVVAVARELAGFIWDISRLAMSLAVPRHPQAS

SEQ ID NO: 429328 - protein, 423 aa, unidentified
MKNTAARKRKQVPEGYLIIGVDPHKKKHAAVAITQDFTIRDRFKFDNTREGLEFLLRRIRIEMVKSDCRGVMFAIETGGHYWRNVAYYLDEKGIPFRFINQFTLKRRREGKDLNRRKNDYRDSEVAAQLLCTGEFVESVIPQGVYAELRTAHNAYRRLVKERTRITNLVKGLLDGLFPEFTHVFKDPCGLTALSVLFTCSIPGVIAGMTEDEFVATIETRHRGRLMRKKLMALHYAARSSIGIAAGAKSVSSEISFLVEKLELIRGHICAIERTLVRLVDETEEGKYLLSIRGLNYIAVAGLLAELGCFKSYRSAKQMIKMAGSNPTESESAGKKKSRTPMSKQGRPVLRYCAWTSVIPMLRFNSDFRAWAKQRRERPAHANPLNGREVVGAALNRLLRLSFAMVKNQTYYQVPEPELALATV

SEQ ID NO: 429329 - protein, 357 aa, unidentified
MLVLGDSAPRKGADAMTFVGCDLHTRMQQVAVLDTETGEISERQLPHDGMAVEEFYAALPRPVTIGIESTGYATWFHTLIQRLGHTLLVGDAAKIRAMVVRKTKTDRRDALHLLDLLRHDRFPTVWVPDPATRDLRALLAHRMRLVRIRTMVKNGLHAIALNYRLARGSKLLRQAGLVQLHALALPPHTAQRRDQSLELLAGLTTQIRTLDDAITTAALAHPDGPRLITHPGVGALTALATIVVLGPVARFHDSKHVVSYVGLAPALNASADKHHLGHITKQGSPLLRFALGQAAAHAARMDADLKRTYFTLVHRRGRPKAKVAVARTLLVRLFIMLRDQIDYDEFCRRGRPAPVSA

SEQ ID NO: 429330 - protein, 341 aa, unidentified
MQSTQTNTLYAGADLHGNNVFLSVCDAQGTELFHRRVPADIAAVSAAMEPYLGRISALGVESTYNWYWLVDGLRDLGCRAVLGNPAKMKQYSGLKSSDDRSDARWLAEMLRLGIFPESYIYPRQTRAVRDLLRRRQFFVQRRVQAQLSLESLLCRYGTSLEGGIRTWTQKEIHALGMAPFVEMQIETMLEAFHGNDRLAKRIEEAVTGFVEPCGDFKRVQTVPGIGPVLGMVILLESGEFSRFKNAGNYASYCRTVKSERTSNSRKKGENNRRNGNPYLAWAFIEAAYYAARYYPPIQSWYERKKKNRLEVIAKKALASKLSKAVWHVMNGKEFEMKLMFG

SEQ ID NO: 429331 - protein, 423 aa, unidentified
MEVMHERCAGLDVHKKVIVACVRLAIGRKVERECRTFDTTTTGLLALRSWLSASGCTHVAMEATGVYWKPIWNILNDGPFELVVANAAHIKNVPGRKTDMNDAMWIADLVACGLIKASFVPDQPTQELRSLLRTRKQMTREQTSHVQRLQKTLEEANIKLDSVISDIVGVSGRCMIEALIAGETNPVRLADLADRRIRAPRQALREALHGRVTNHHRFLLQLHLGQYDALAAAIAEIDHQVGVLIERLDERVEGGQATFRALIRLLCSIPGVSTLAAVVILSEIGRDMSRFPTAGHLLAWAGLCPSQNESAGKRRSSRLRKGAPWLKTLLIQCAWAASRKQDSYYKAQLNRLKSRRGPKTAICAVAASMLTAIYHMLKDGTEHRDLGTNHFDRRSVDTKAKRLVNQLTKLGFQVRLEPLTQAA

SEQ ID NO: 429332 - protein, 314 aa, unidentified
MKKADEIFVGIDISKAWLDIAVHERAEVFRTSNDETGIASLVKRLKRLKASLIVLEPTGGFEMLLVAELTHAGLPAAVVNAKRVRDFARATGRLAKTDKLDAKVLAHFAAAVRPPVRALQTEDEEQLTALLTRRRQVLDMLTVEKNRLVTVRAKMRSDLEAHIHWLSESLKELDQEIEDFIEGTPVWKEKDALLQSVPGVGPVTSATMLGMLPELGLLNRQEIAALVGVAPLNKDSGKKHGKRRVFGGRADVRSILYMAALSAKKFNPVIRIFYERLIKQGKEKKVALTACMRKLLVILNAMMHSNQPWRALPA

SEQ ID NO: 429333 - protein, 353 aa, unidentified
MSTVPVFVGLDYSLTGVQVCVLDGEGKMLANQKVPDRVDAIVQAASRFGPVHSAAIEACCGASELAEEIVQQHGWLIHLGHPGYVSRIKQNPDKTDFADAHLLADLERVGYLPRVWMAPRSLRELRTLVRDRQALVRHCRSIRLRITALLREHRQVSPCPRWTQKWYAWLKHGAELGEHSRWVLDRQRDRSAWMSREIKQVEQRLREAMQGDRLVQYLLTIKGVGYVTAWTLRTEIGRFDRFRNGRQLARFCGLSPCNRSSGIKVADAGLIRAANPELRRVLIEAAWSLIRHQPRWQKLAASLRERGKKGSVTCAAVANRFVRWLWHQVMKNIETAPPVDNNPPGAGVSVPVG

SEQ ID NO: 429334 - protein, 430 aa, unidentified
MTDVLEPAAYAGVDWATEKNDACVVDPEGLVIAEKQFDADADGLAAMAAWLVEKGGAPPGRIDVAIEVPHGVVVETLLERGFAVHSINPRQLDRFRDRFSVAGAKDDRRDARVLADSLRTDRRAFRRIQNDTPETIELKEWSRIHTELKAEDNALCNRIRQQLLRYFPQALDLTGDVGEAWFLKLLESVPTPTEAHRRRVATIEAILRYHRIRRWKPDEVLAVLRKPAVTVAPGTVEAATAHIRLLTERLRVVRSQIVESEKTLASICDRLAPSSPSPHGGQGEGEGRNHELSDVAILLSLPGLGRILAPALLAEASRPLHERDYQAVRTLAGVAPVTRRSGKRTSGPWVVSMRYACNPRLRVTMHNWAQCAMQWDPYWKAHYAAARARGQSHGRAHRGIADRLLRIAIAMLKTRALYDPERRRPTRGAA

SEQ ID NO: 429335 - protein, 380 aa, unidentified
MKVNNNKPGAKKLVENIIHIARKNDIENIQIGMEATNVYWEHLFNFLQHHEDLTAENKLSLFTLNPKVVKNFKGAYNDLPKNDRVDAWVIADRLRFGRVESSSAPETVYKALRQLTRFRFKQGEQLSKEKSRALNLIFLKFSDFASNEPFGTFSKASMALMEEYSQEEIIQADMEELVEFAYNNSNNRLASGYSLEEVSKALKKAARDSYRLKPRVNQAITQTLSMTFDNIRFLQQQMKKAKKAIKRELKAIPQTLSTVDGIGPILASGIISEIQDVNRFDNEAKIASFAGLTWNKHQSGSFTAEESSLSKSGNHYLRYYLVEAANSLRVHNEEYRQYYYKKYNEVNKHRHKRALVLTARKFVRLVFALLSKGEIYQPRR

SEQ ID NO: 429336 - protein, 418 aa, unidentified
MTRRDDSRIIRIVHPICCGLDVHKESVSACVIFPDGNGEEQYEVKVFGTFTDDLTRLREWLMAHDCPVVAMESTGVYWRPVHNVLEETVQVVLVNARDMRNVSGRKTDIGDSRWIAGLLRHGLLKSSFIPPQTVRQWRDLTRLRKKYVQSAGDYRKRTHKLFESANIKIDSVVSDLFGVTGRNLMQLLVTDRKVTLSDIQTCVRGKLRGKEAELFRSIQGFFTDHHRFVLKTILETITMLEAQIEALDHEIRRVMKGHEPLLDRMKKAPGISDISSCDILAEIGPTLDSFPTDTALVSWSGLCPGNNESAGKRKSGKSPVRKHHLKTIMLEVAWAAVKKKGSYFKDKYYRLKARRGAKKAIVAIAHRILLGIYHVIKDGAEFRDLGEDYLMRRNKSQKVFHLRKQALAMGFDLVPQAV

SEQ ID NO: 429337 - protein, 342 aa, unidentified
MTIVVGLDVHREQITFDALDTETGEVRCGRVRPADRESFRRFLSRFDGAPVEVALEATTGWRFIVEELQAAGATAHLAEPAETRSLRGRKRRAKTDRLDARHLRNLLLEGRLPESWIPPEHIRELRSKVRLRKTLVDERSAWQQRIQAQLFHHGVPKASRLLTPARRAQLTRLELPDSARSVIATALALIDHINEQLAPLEAELRSFARRQPGCRALQGHFGIGELTSVAILAELGDARRFSSSRHAVRFAGLDVTVSQSDQSRAPGRLSHQGPPVLRWAAFEAAQCAWRKNSPDHHYYLETKARLGGKQAALTIARKLIRRAHHTLRELGDEALQAVPATT

SEQ ID NO: 429338 - protein, 347 aa, unidentified
MNFYTQQHKHSYGIDLPARAMYVCILDQAGMKLAYKNLPTTPEAFLRTVTPYREDLVVAVECIFTWWWLADLCAQEGIAFVLGHALSMKASHGGKVKNDKIDAHKIAVLLRGGMIPRAYVYPPEMRAPRDLLRRRWYLMRKRAELLAHIQNTNSQYNLPDFGKKLAYKANRAGVEEHFPDPSVRKTIELDGALIDHYDKLLSEVELYITRTAKDHAAQSFSRLHSVPGLGQILALVLLYEIQDITRFPRVQDFISYCRLVKCAKESAGKRHGFSGKKIGNPRLKGAFSEAAPLFLGQHHPGKEYFAKLERKHGKGKALTVLAHKLARAVYYMLTRAQAFDRQRFVTA

SEQ ID NO: 429339 - protein, 346 aa, unidentified
MKKIYVGIDISKEKCNLCYRDGLEIVMEEESANDVKALKKSLSAVLKTFSVAFDEVLVCAEYTGRYIYPLTVACQELDIFLWMDDPTRIKNSMGLTRGKNDVIDAARIAEYAYRYSDKAIRYRIPDAALVSMKSLLVDREFLLIDKKRYQSQITDQKRYMASGDFKHKCARWKKVIRAIDEQIKAIDAEIESLIAANPVLTRQKELLTSIDGVGDRIAINMIAITGGFTRFQNARQFCSFAGLTPYKYDSGTSVRSKAKISKRANQTMKALLHLAAVGAATHMKESEYRDYFDRKIKDGKHVMCILNVVRAKIVHRMFSVIRRDTEYTKTYKPSVQVNVNQSITTA

SEQ ID NO: 429340 - protein, 354 aa, unidentified
MNKIKQLSFEGKVIYCGLDAHKTNWKINARMEGIEMATFSQDPDSSLLKNYFDKNYPKAELKVVYEAGFCGFEIQRSLTTLGIDCIVVNAADVPSSDKDRKRKDDKRDARKLSIELAKGNLRGIYIPDKHMQDARTLVRQRHRLVQDQTRCANRIKHLLLSNGIKTGEKSERWSLRFINKLQQLDCRSALLKASLQFAIEQYLQTRRILKEVTLAIRDLSRRDPFAKIQAVLQSIDGVGLLSGMVIQTEIGDINRFKRLDSLCDYAGFVPDIYSSNDKMVVHGISKRGNAFLRETIIESSWVLIRKDPAMLMKYNEYRSRMNANKAIVRIAKHLLSRIRFLWKNEQTYVRGITR

SEQ ID NO: 429341 - protein, 352 aa, unidentified
MEHFIGNDLHTRYQVVAWIDEQTGEICKRRLEHTGEEVGKFYAQFPRGTVVGIEATLPAYWFERLLGKLGHELWVGDAARIRAYEVRDQKHDPRDAENILDLLQAGRFPRIWVPTLEERDLRQLLVHRLKQVRARTQVKNQLHYLAMSQGLCRKRKLWSAKGRAELEGLVLLPWAARRRKELLEELDRLDEQVRELDRAVEEAARERQEVALLRTHPGVGMVVALAFVLSAGPIERFPHSRELVSYWGLNPREHSSGGRQRLGAISKQGNTMMRWLLVEAAQTAARFDPELRRIYQRLKSRRNSGVAKVAVARRLAVRLYWMLRTRHNYAQLVHTSGSPSSAVVPPAAGSTV

SEQ ID NO: 429342 - protein, 341 aa, unidentified
MGAVADSSLLSAGGQVHVFIGIDVSKAKLDCTLLTAEADKRKTKVVVNTAAGVQALLAWCAKHGAQPAQLHAILEPTGLYHEQAATALPQVRVSLVNPAQARDFAKALALRSKNDALDSYVLARYGQTLSPALWHPAPLHARQLRALLTRREALSKDLLRELNRKEKSQFSPSAPLVDGSIDKAIAFLREQIKQIERAIDQHIDNHPDLKQDCELLNSIPAIGPQAGNAILAVMHNRHIDSAQSLAAYLGVVPVQRQSGSSLNSCARLSKAGPSQVRATLYMAALVGTRHNPHIRALYQRLLKAGKSKKAALGAAMRKLVHLCFGVLKNRIPYQPNYAMNG

SEQ ID NO: 429343 - protein, 433 aa, unidentified
MIKINYMSTLFVGIDVSSKSNVVCAMDFDENKYLSSSFKNNQPGAEELAEMILNCMNSHPNLNTIVVALESTSVYSIHIANYLSTCELLMPYKPYIFCLNPKMTANFRKSYVGMDKTDPLDAYLIADFARCGRTKKCEPWRGSQFLALKRLTRHRLHLAECISREKTYMVSNLYLKFSELQLLDGDAQPFSNIYGATSSAVLTEFMSLQEIIDSSEDELLQFLAQKSRKRITDISKTSELLKKAARDSYRLDKCMYEPLNVSLASSFNCIQTYQKEIKLIDQAIEKCINGMNPNAFIILKSIPGIGPVWASGILAEIGDITAFHSSDALAKYAGLTWLKNDSGDFISEDNRVSKAGNTYLRYYLGEGSNSVRRYIPEYGEYYSKKFAEVTKHQHKRALALTSRKFVRLVFGLLVKNQLYTGEKLDAELNIESN

SEQ ID NO: 429344 - protein, 345 aa, unidentified
MTEAYDGRQVVGMDLHRRRSVLVRMTMDGRKLETVRIENSPAALRAVMARAGERPLVVLEATYGWYWAADALEAAGAEVRLAHPLGVKAFSYRRVKNDERDASDLADLARMGKLPEAWIAPAEVRAVREIVRYRHKLVWQRSSCKDQVHAVLAKCGIPVTRTGIFGGWGPAWLDGVTLPAPYAGKVASLRALIGVLDAEIARLGQQATDMLAGNKGYAAIRELPGIGPVLGAVIVAEIGDVTRFGKPGQLCSWAGLTPRHYESGTKVIRGHVSKQGSKMLRWALVEAIQHQPAGTRPRQVKDGIISRRGKEARNIAKTAAARELLTLVFYAMRDGRARRAASPAA

SEQ ID NO: 429345 - protein, 428 aa, unidentified
MNSLNERITRITATTIIVGIDAAKEIHWARMTDYRGVDLSKPVKVHNSMDGFENLLEKIQKLRIKHGCDQVVIGMEPSGHYWRALGWYLKLHESEPVLVGVNPYHTKQAKELNDNSQTKSDPKDALVVAHLIREGRYFDTYLPEDEYAELRQLNTERQRIMKQISRANNILIALLDEFFPEYATVWSDVTCPTSLELLKIYAFPSDIASAPHDKLLKDIRMASSGTEGARLMEKMIRAASHSIGVKEGLRAVRLRMLSLIDELYYFEEKKEDIEAKLGAVMDTLQLGDVLQSMLGVGPIISAAFMGEVGDISRFTNWKQVRSLAGLNLVENSSGQHKGKTKVSKRGRPYLRHMLYMAGECGCRCNPEMHKYYRYLRDRKNNPLNPQQAFVATGLKIMRILFHMAKTGETYDPDKALGAVRLQQIASLA

SEQ ID NO: 429346 - protein, 455 aa, unidentified
MYLPDWKWIPIRKELLLMSNKVIFNLDELFISVGIDVGADFSWMSIALPNQQFVGKPYKILHNKMSSLTTAVSKIKEAEELYSLESRIFLESTGIYHYPLFCYLRDKGFNCSVINPIITKNSTNINIRKVHNDRFDSKKAALVGLKPDLKVSLMPSDLALNCRNLCREYYDLMDNRSAYVNKLQGELRMAFPQYLGIFSKVTTNTSLTLLETYTSPSAFIAADRQEIIDTIKSTARFGLAYAQNKYNAIIQAANEANDFGYIIDSNIRRIRLYIRFIRKYDEEIASILDALHELVDTNEGTDFVRQIHLIETFKGSGFLSAVSLMGEIGDFSAFSKPKQLFAYFGLDPAVKQSGKFEGTKIQMSKRGSAIARRVIHTLALQSISTSRTGEAKNPVLRNYYLKKCESKPKLVAMGAVSHKVCNIIFAILRDNKPFEIITPQEHIKQYNADKCNIAA

SEQ ID NO: 429347 - protein, 406 aa, unidentified
MSKCNTKSSVGTAASNKSIDLFETVAQGGQTVIKYNFDLYLGADVSDKLIELFGLSADGRGEKRWQIANSRKSILEFCDSIQDPSRTLIAMETGTHSAWQSELLEKRGFKVVVGNARKLAAVWMNKNKSDREDAEMLARLARSDIKLFCPIRHISTPVRADLAVIKMRHAVSKSRTLLMNAVKGTLRSFGVDTSGITADNFTREASKVIPAELRPAMTGMLAQIRALQLEIKDYDRKVTKLNKKYPDTAKVGQPGGVGELTALAYVLVIEDPKRFESGDRVGKYLGITPKRDQSGSVDKQLGITKEGNNLLRWLLIQSANYIMGRGPDCDLRRFGERIAARGGKIAKRKAKVAVARKLAKLLHKLWITGEVYDPDYKAHCKEARLKKEAEKRNTAAMSEQLIPQTV

SEQ ID NO: 429348 - protein, 339 aa, unidentified
MQVTTIGLDLAKNVFQVHGTTKDDEVAFNRPLRRAQLLSFFSKLEPCLIGMEACSSAHHWGRELTELGHDVRLIPPSYVKPYVKRGKSDAIDAEAICEAVTRPTMRFVAIKTVEQQSLLSVHRARNLLVRQRTQLINGLRGIAAEFGVCIARGLARVIGFAEDILAGEVLDLPDIANEVIRNLCEHLMALHARVRWYEDRLKQVAKEDARVRLLRTIPGVGAVTASAIIASIGDGHQFSNGREFAAWLGLTPANKSSGGKEKLGRITKMGDQYLRSMLVVGMTSLVRQTKSHPERASKWLTSLLERKPARLATVAMANKTARIVWAVLTRKEPYTPHTA

SEQ ID NO: 429349 - protein, 331 aa, unidentified
MYSFFIGCDISKPFFDVSYHDGNKPVYLDQFTNDAKGFKLLVKALKGITNCPKAKWFVCFENTGVYSKLLLEYLISHTIACKEENALQILKSLGLRRGKDDKIDSKRICLYAFEKRDSIKPTSMPNKLITKLKKLLSRRNLLIRNKVSFENSMSEQKAVLEPRLYKMLTGQNQELLNLIKKQIKELEKEICATINEDEQIKKNYELVQSVNGVGPIISAQMIATTENFTCFSSARKFACFAGIAPFPNRSGNFEGKTKVSHYADKKLKTLISNGVNAAVRWDKEMGAYYERKIKEGKAKGCVKNAIKNKIIYRIFAVVKRQTPYVKMMNYV

SEQ ID NO: 429350 - protein, 400 aa, unidentified
MQINDNSYSYYAGIDISKDTFDVSVVDQDGTHLVHKQFANNQKGFKDLVSLTKKQGWIPVLFAMEGTGGCEQMLLDYLYKHKQAVSRQEPCRIHYHRLSQGSRQKTDYVDSLIIADYALKNRLRLYIPKGESYRSLQEIGRTRRMLVRHRNSLQQRFSHAQNAHAAAVLQRSINHCTEDIELLNSAAAEIIASNDKLAQDDRLLKSIPGVGDITSSYFLGLIGDISCFATSAKVVRFVGVNPCPHQSGTSINSESRISKMGDPHMRALLYTSAMVVLQMMDRGSKAIHPSMYRFVARMRERFGPGSGNKVLCAVMRKLLILMWTVLTRRKAYDPCYGLEPQDAQANQTPPSDDTDLVQTRAEAATDIAGEGNETGQDSGDTGSGCMDGKPPCDPSLAMSG

SEQ ID NO: 429351 - protein, 336 aa, unidentified
MKYSGIDLHSNNSVVTVTDEEDRVMSEKRLPNDLATILGFLLPWRDELVGVVVESTYNWYWLVDGLQEAGYRVHLAHCSAIKKYEGLKHSGDEADARHLAHLLRLGILPTGTILPREQRALRDLGRKRMQLVRSRTQHILAVENITARERGARISSEQVKRLSVEVIDRMPIPEDVALAVKANVAVIHTLSVQIDLLEKRLQKAVPRTEYDLVTTIPGIGRILATTILLETGPIDRFASPGNFASYARCVDSQHTSNGKKKGEGNSKNGNKYLSWAFIEAAHFAMRYCVEAKRFYERKKARTNNVVAIKALAHKLARACFHMLKERKPFDVTRCFA

SEQ ID NO: 429352 - protein, 338 aa, unidentified
MNLSRIGLDLAKQVFQVHGVDRHEHVVCRRQLKRAQVRDFFRQLPPCLVAMEAYGSAHYWARELRELGHTVRLIAPQFVKPYVKGDKHDAHDAEAICEAASRPSMRYVPVKSAEQQAVQSMHRVRSRLVRARTALCNEVRGLLGEFGLIATRRGRAATMALLETVMATEPASLPAPMGELLRELKDELQTLEARIARLERQIQAHVRGDARIQRLLAVEGIGPISASAVAASAGDARQFRTGRQFAAWLGLVPRQHSTGGQQRLGNISKRGDTYLRTLLIHGARAVVRCCANKTDARSRWLQGLLQRRPANVVAVALANKNARILWALLSRETCYRPG

SEQ ID NO: 429353 - protein, 411 aa, unidentified
MQYFIRKEGMPMLSIGIDVSKGKSTVCGMKPGGEIVYTPFEVQHTREGMLELVSLLRSSGEEVRAVLESTGSYHCPVVAALLENGIFVSVVNSLRMKRFCSQSIRKVKTDRIDAMQIALYGLAYWQELQPTKLPEDTYRELQLLARQYYQMTSLLIKAKVDFNAICDQVLPGMQELMNDHAGRHKLSDFVLRYHHTTHILEMGETRFRKDYCKWAEKKGYRNCERMAALIFATAQNGIPVLPNAPSTQIVITEAIRVLHTVEASRDAILTQMQALAKTLPEYSLVREMPCIGDTLAPRLIAEIGDVRRFHSKRALIAYAGIDAPPYQSGKFCANNRHISKRGNRYLRKTGYEVMQSYVMHKPANDPIFTFIEKKRGEGKNGKLAMVAGLNKFLRVYYGKVTELYRSLPAIE

SEQ ID NO: 429354 - protein, 361 aa, unidentified
MSKTYQAAPVEELNAKVEEKLYVAFELSQKKWKLAFSDGKTARARTVTIAAQDWEALSRELGRARLRYGLEAEAKVISCYEVGRESFWLHRALVSRGIENIVVDAASIEVNRRHRRAKTDRMDAEKLVDQLIRHDSGRQRVWSVVRVPDEEAEDARQLHRDIEVLTEERKQHRTRIQSLLFAQGIDMQVDSRFLQQLERLRRWDGRAIPPGLEQRLRREYERLQLVEKDLRQRRKQQEEKLKSERSAAMKKVERLQQLRGVGMRSSWVFVMELFGWRHFNNRRELAGAIGVTPTPYQSGESEHEQGISRNGNGRVRALSVEIAWGWLRFQPESDLSRWYQRRFGSGSARMRKIGIGAMARR

SEQ ID NO: 429355 - protein, 353 aa, unidentified
MEQVKIQSEVILGVDTHLDVHVGVVIDAVGRVQGTLAIATNCSGYEQLLDWAQGFGVLRRAGVEGTGSYGSGLTRFLEERGITVIEVNRPDRSRRRSRGKSDPTDAESAARAVLADDATCIPKAQSGLAEALRTLSVARRSAVKAKTQAVNQLRALLVSAPSFIRDVVLKVKPEDCVAACAALPHDDVNPVLASLKTTLQLLAKRWTALHEELRELDKQLARLTKLAAPRLLARFGVGPQTAATLLVTAGDNPSRLRNEAALAALCGVSPLDASSGKMIRHRLNRGGQRQANNALWTIAMVRMRSDARTREYVARRTREGLSKKEIHRCLKRYIVRELYPLILADLKEPMRPA

SEQ ID NO: 429356 - protein, 372 aa, unidentified
MNYNTVYVGMDVHKESFTFCAYTIDAEKGSHFQRTEADYKNVLKYLEFLRTVYGNDANFICGYEAGCLGYTLYHQLIEHHVNCVILAPTTMLEQCSRRRIKTDRRDAEIIAKCLAQHNYSPVHIPTATDEETKEFLRMRDDHKLALKKVKQQILAFCLRHNYRYDGNSHWTAAHIKWLKSLKPEALYKEILDEYLLTYTTLSDKLERLDKRIEELASKDEYRESVKKLCCFIGIKTHTALSVLIEVGDFQRFASAQKFASYLGLVPGEDSSGDEQTRLGITKAGNRHVRMLLTEASQCYARGQIGFKSKELKSRQAGNSPQVIAYADKANERLRRRYYKMVLGKSKKHNVAKTAIARELACFMWGMMTDHVA

SEQ ID NO: 429357 - protein, 356 aa, unidentified
MSRDTKYIGMDVHKEAIVIAVLNDSGKLVMESIVETQASSILQFIHGLRGELHVTWEEGTWAAWLYDLLKPHVHEVLVCNPRRNALLKEGSKSDKVDARKLADLLRTGMLRPVYHGENGLRTLRELARSYQTISKDLNRVMNRLKALYRGWGIACSGTQVYAARYREEWLHKIPHAGVHRRAELLYQQLDGLQALRRTLRPELLAESRKHKAAKLLRQIPCIGPIRAARLLALMQTPHRFRSKRQLWTYSGLGIETHDSAQYRYVRGQLQRSKKPQQIRGLNQNHNHEMKEIFKGAATRASCGVGPLRDFYVALLDKGMRPEMARLTLARKIAAIALTLWKKEERFDAEQLKPQAA

SEQ ID NO: 429358 - protein, 351 aa, unidentified
MIIIGVDYHPSFQTIAFLMEETGEYGEQELNHSDGEAERFYRELKERGVSVRVGMEATGHARWFERLLAELGFELWIGDPAEIKTKRVRKQKTDREDARLMLKLLRENRFPKIWVPSPENRELRQLLWHRHRLVQMRTRIMNQLQAVAMNEGYRWKKKLFSEKGRALLEKLSLAPWASRRRKELLELLDQLDPKIVELTAAVEQEAKKRPEVLLLRSHPGVGPITGLAYVLIIGTPERFPCGKQIGSYTGLIPCEDSSAGRQRLGHISKQGNTLLRFLLVEASQAAARRNPDWRRRYAHLMMRREKRIAKVAMARKLAVRLYWMWRNNWQYSQLVEFGSNAGKLGIVHGVK

SEQ ID NO: 429359 - protein, 343 aa, unidentified
MQIRSVGIDLGKTTFHLVALGANGKVLLKKKFTQKQLIAFTANMQTCLIGMEACSGSHFLGRALREQGHDVKLIPAQFVKPFVKSNKNDFIDAEAIAEAVDRENMRFVPIKTDDQLDLQALHRVRDRLMARRTSLINQIRAFLLERGIVFAKSPIRLREALPEVLENVNENLTPRMRNLVAMLWSEWKDLELQIVQMNDEVERIASSDAACRRLRQIPGIGPLVATAIVASIGNGAAFRKGREFAAWLGLLPNQHSTGGKVRLYGISKRGNSYLRKILIHGARAVVLRSKRDRIAMGAWMTSLETRAPRNVLIVATAHKLARIAWAVLSTGQDYRAVPEALTV

SEQ ID NO: 429360 - protein, 343 aa, unidentified
MSVAIGVDSHKQTLAAAVVDQVGKELGSRVFPNDPKGHRRALKWIASLPSGRVVGIECAGTYGAAFAWFLMERGEDVREVPAHQTFRERHRRRSAGKSDPVDAIAIARVVAREDHLPAPKQLGLVSDIRLLNDHREQLVRTRTQLANRCHRDLVILRPGYQTQVRSLRSKHHVRGALDLLAEDNSIRSELARARLEQMLTLNDEIYAVGKRIEALLKKTHTTLTQIDGVGTFVAATILGAVGDVARIRSRAAFASFAGTAPLEASSGMRKRHRMNRGGNRQLNRALHVVAKSQSRRLPQARAFVGRKMEEGRSYKEALRCLQRHLTNVVYKTLVEDAQRQQAA

SEQ ID NO: 429361 - protein, 350 aa, unidentified
MQTIYIGVDFHARQQTICYLTTDSGELLFHQLKHEDKALVRAFYAQFRGHVIVGLEASGYSPWFERLLEELGCEVWLGHATEIRRRARWRHKNDRRDAELILDLMVHNEFPRLYLPPLQSREVLRMLRYRQKLIKMRTIGKNSLQALALQSGLAKGPHLFTKAGLQELRSATMSPAMQWQREQWLQLLEPLNERLLETMRWLQQQSQADQRISRLRTHPGVGLLTALCLVHSLEPVRRFANTRKVTAYAGLDPVERSSAERQRFLGISKGGSRVLRFLLVEAAHTALRKDADLKRFYQRLAQRHGRPKAKVAVSRKLLIRAYIMLRDEIDYAEFQRRAVAARPVLPAHGL

SEQ ID NO: 429362 - protein, 393 aa, unidentified
MYLVGIDIGKLKHSFCLLEKETGEILVEPVFFENNRDGFNVLLSSFKHLPQKDILIGMEDTGHYNLALLKFLLDRNYQVALINPVATNLTRKMQGGISKNDKLDTLTICDVLASNQRVKSYRISKYSSFDLYEQKQLTREHHNLKEEENQLSNRLQKCIDVVFPEFNSLFKSKYGIVYMNILKEFGSADAIAHADIRTLRKCFDTGRGKHISLTAEELKEAARNSIGFPSSSEATQIKHLVARIELIKEQIAEIDKKIEEFSLQNNSPILSIPGISHFSGTSILAELGDIHNYSKPSQIIKFAGVAPLTYESSQFTAQHTAITKKGCKYLRKTLYQIITPVIQYNPVFKKFYLLKIAQGKGHRCAQGHCVRKLMRVIYHLLSTGTQFDPALLR

SEQ ID NO: 429363 - protein, 337 aa, unidentified
MKQITKNEIYKHYIALDWSKANFALASIRDSGTKFKVVEHLPDLKILKQCLKELPGKKILTIEETTTAQWLYVELKDYVDKILICEPFQNKLLNSGAKNDKIDSVKLCTLLRNGSLKEVYHTTDELYKLRKLVSVYEDFVNASVRLKNQRSSMFLSEGKDHKKEKILTGNTINKFITQKQNLSIDHFALMRKEFELIFKKIGKENLTIQRLVRISGIAIKLAVTILAIVIDANRFENKYKYYSYTGLVKHFKKSGDRDYGKRNTRHSRRLKRCYKIAANAAISGKNDIREYYEHLLQSNYSFEDARNQIARYIAKASYAVMKNETDYRPYQWRENIK

SEQ ID NO: 429364 - protein, 342 aa, unidentified
MQITTIGLDIAKNVFQVHGIDAEEKVVVRKQLRRSQVIAFFKALPPCLIGMEACATAHYWARELTKLGHEVRLMPAKDVKAYVKRNKNDAADAEAICEAVRRPTMRFVRIKSAEQQGQLMQHRTRDVLIRQRTQIINALRAHLAELGIVAAQGDAGVNELRAIVADDRDERLPIDARASVIVLAAQLEALQTLIGSIEKRIKMQHRSNETSQRVETIPGIGVLGATAIVATAADPTVFRSGRDFAAWIGLVPRQDSTGGKQKLGPISKQGDRYLRRILVVGAIAVLRRAQENPGKYPWLTQLLARRPFKVVAVALANKMARTAWALMVHGGTYRAPELAEAA

SEQ ID NO: 429365 - protein, 365 aa, unidentified
MQKISTMRTSGKKIFKGQLTIGLDLGDRSSSYCVLNEAGEIVLEQKLPTTPEAMKQTFAKMPRSRIAMETGTHSPWVSRLLKALGHEVIVAHAQNVRLIVKSRRKDDRIDARTLARLARIDPELLSPVQHRSAQAQLHLTEIRARAGLVSARTALVNAARGLVKSHGERLRKCGTFQVSREITSGLSTELREALQPLLREVESLNERIQEYDRRIEKMAKEKYPETTLLKQVKGVGDLIATTYVLTLEDRHRFRKSRDAGCFVGLQPGRRNSGESEPQMHISKEGDEYLRTLLVQGAHYILGPFGEDSDLRRWGGKLAARGGKNAKKRAVVAVARKLAVLLHRLWVSGEVYEPLRNSQKAISAAA

SEQ ID NO: 429366 - protein, 411 aa, unidentified
MSLPPAQFFVGLDWAAATHAVCVLNTEGRTVDQFTVEHSADGIAGLIAKLARFADPLDVQVGIERPDGRLVDLLLEAGHPVVPVSPNAIKTWREGEVLSGAKSDTGDALVIAEYLRLRAHRLRVVPGYSAETKALRTVVRTRDDLVEMRVAATNQLAALLDAHWPGGKAIFADIESPIALAFLTRYPTATAARHLGEKRLAAFLVKHGYCGRRTPAQLLNRLRTAPPGTLDDTLTEAVRDAVVAMVAVLTALGGALKDLDRSVAAHLGEHPDGPIFTSLPRSGQINAAQVLAEWGDVREAYDHPDAVAALAGATPVTNQSGKHQAVHFRWACNKRFRRAITIYADNSRHASPWAAHIYNQARAGGKDHPHAVRILARAWIRIIWRCWQDRIPYDPTHHGGATKINNPSIAA

SEQ ID NO: 429367 - protein, 346 aa, unidentified
MQAVTTIGLDIAKSVFQVHGVDATGKVIIRRQLKRHYVLAFFQKLSPCLVGIEACATSHHWSRELKAIGHTVRLMPPAYVKPYVKRQKNDAADAEAICEAVTRANMRFVATKTPEQQSCLMLHRTRHLFIRQQTAVINAIRAHLGEFGIVARVGRTGVEELLDVVADSAGSDDRRLPEVARVCIAALGVQLRMLKAQILAFDRQIMAWHRSNETSKRLDEIPGVGPALATALVASVTDPKAFRSARHFSAWIGLVPKQHSSGGKDRLGSISKQGDRYLRSLFTAGALAVIRYAKIHGTKHRPWLTAMLARRPTKVAAIALANKIARMAWAMMARGERYKEPAALAA

SEQ ID NO: 429368 - protein, 343 aa, unidentified
MGEISMIGLDLAKHVFQVHGVGASGGVVLRRQLRRSAVEKFFAQLPPCTVGMEACGGAHHWARVIGRYGHQVRLMPPAYVKPYVKRNKNDGRDAEAICEAAGRPTMRFVAVKSVEQQAVLAVHATRALLVRQRTMIANSLRAALSELGIVAAQGIKGLRELMAKLETANEEIPEMMRGALLVLARQWQALDADERALERHIVQAARTDREARRLMEVPGVGPIIASTVLAKVPDAKVFRTGRDFAAWVGLTGRDHGTGGKHRPGRISKQGDRMLRALLISGASAYLRHQRRRGVSDPWLRDLLARRPYKVVMVALAAKTARILWAMLVKGEPYRDRASASAAA

SEQ ID NO: 429369 - protein, 374 aa, unidentified
MYIGIDVHKNSCYITAMDEAGNILEEKEIETEHMIEWINTIDTNCNIAMEASTASKALYHFMKEQKLNVLMAHPAGLRVIAESTQKTDKNDSFHLANLLRMKYLPCSYVPNETYERMRNLCRYRVSLGRKMTRIKNEIHALLTRNNIKMKQTDIFGKDGLDNLKSIQLNDINALLLHSQLEELNYLAEKAQNIEDIMAEQGKHIPEVTQLMTIPGIGYYSAMTILAEIGDIKRFPNPKKLCNYAGLTPRIRDSGELIIHGRISKKGSPTLRWILVSAAHAVIRCRKGNTKLRKFYKHLIKRGKAKQVAVVALAKKILLVIYAMLTRKTTYKDTDERLTKKKIIAMNVRATIIPKTNYQQELFKLKHKSKVLGVG

SEQ ID NO: 429370 - protein, 337 aa, unidentified
MEYFAGLDVSMEETHVCVVTRNGTVIHEAKVPSTPASIAATLARVPSCQRVLFETGRMAPMLYHGLSQLGLPVVCVESRQAYQALKSLATHKTDRNDARGLAHLARTGFFKPVHVKSLPAHAVRSLIIARKQLVGQRVTLENQIRGLAVVFGVRLPRALSPAFIRQALQASEGIPGLSAAMKGLVAARAAVLAAVVAIDGDIRKMARASAACRRLMDIPGVGQLTALAFTAAVDDPGRFQRSRDIGAYLGLVPRRYQSGEVDYTGGISKCGDRRVRTLLYEAANVMLTRYKGPLKLKAWALAIAKRSTMRKARIALARRLAIIMHAMLRHGTEFKSA

SEQ ID NO: 429371 - protein, 343 aa, unidentified
MKITTIGIDLAKNVMQIHGVDGRGKTVLKRQLKRAQMAAYFANLEPCLIGMEACGSAHHWARKLEKLGHTVRLMAPQFVKPYVKTNKNDAADAEAICEAVSRPNMRFVPIKNGEQQAVLSLHRARQGFVKARTAQANQIRGLLSEYGIVIPKGISHIAKRLPEILEDGEKELPGVFRLLLQRLGEHLKELDRQVGELEVQIQSWHRENDLSRKLAQIPGIGPITASALVATIGDAKNFENGRQLAAWLGLVPRQHSSGGKATLLGISKRGDTYLRTLLIHGARAVIRVAERKAGYAGSWLARLIGRRNPNVAAVALANKNARVVWALLAQERNYQADYESSVA

SEQ ID NO: 429372 - protein, 386 aa, unidentified
MSQSSNILLRAINYDHTLVLAIELSNKSWVLAAQVPGLPRTKAQRTIEPNKTALLAAIDGYRARAAALGYSVERVITTYEAGWSGFWLARWLVAQGIEVHVVQPSSVPVDRRMRRAKSDGIDAELLLRTLLAWLRGEPRVCSMVPIPDEADEDARRCVRERTELLSDRVGLTNRIGAVLATLGVGDYNPLLQSRRRRLTELRTGLGEPIPPNALTKIERLLARLELVLAQIAELERKRDEVAAADAPDRAGKMIQQLTSLRGIGVQSATVLVREAFVRNFSNGKALGSYAGLTSTPYSSGGIDREQGIGKAGNRRLRTVMVELAWLWQRYQPGAAQVAWFRDRVGSTGRRIRKVMVVALARKLLIALWRFVIDGVMPEGAVMKPSI

SEQ ID NO: 429373 - protein, 339 aa, unidentified
MDQVNTIGFDTAKHVFQVHGTDAQGRVFRRKLRRKEVISYFASLPPSVIGMEACGGAHYWARQLQALGHEVRLMPPAYVKPYVKRGKNDAIDAEACWEAVGRPTMRFVAIKSEEQQSVLMLHRARDLLIGQRTQTSNALRGHLAELGIIAKQGRGGTDELLALVEGHEEGQLPELARTALLVLADQLRELRVKINKIEREIHAWHRSNATSRRLETAPGVGPITASAIVATVRDPSRFKSGRQFAAWIGLTPNEDSTGGKQRLGHITRAGDPYLRRLLVVGAHAVLRHSGNAKSAPTKWAAELLGKKPYTVAAVALANKMARVIWAMMMKGEAFRDAAA

SEQ ID NO: 429374 - protein, 312 aa, unidentified
MNNIICGVDVSKDWLDAHIRPGAAFARFANDAAGLGELLVFCHGHRVELAVMEATGGYERLAFLWLWENGLPCGIVNPRSVRRFAEAMGTFEKTDRIDAAVIAHYASVKQIVPAAPPSPAQQRLKVLVSRLSQVTGDITVNKQRKSATTDAETLASLSTVLTCLKREEKRLAGEVASLIDDDPLWARLDMTFRVFKGLADRTVARLLAEVPEIGIVSNKAIAKLVGLSPFANDSGKREGPRNIRGGRTGPRGILFIVARHVARYDPHLQAFAERLQKAGKTKMVIRMALARKLLVILNAKARDARMEFANAT

SEQ ID NO: 429375 - protein, 528 aa, unidentified
MPYQVRRSRRANRNSKSNARDRRSLQKPNGVISPRVQKVGGERFAIVCVDPAKHRSEWMMADYFGNLLIQQQTLEHQATFFKLAVAQIREAQQQHDIQDMIVVVERTGNYHLPAKRAFAKAGFETRVVHPFATKQYRMPANPGNKTDGNDLDAQHRAAVAGFGLCELELESPYQELQLKARHRRNLVEKASALVCQIREHLHLAMPGFGTLFDHLLKHKSAIAIARRCDSPAKAIELGHAGLSQHLREKKIRHQPRTIDKVLAWAAQAVDDSAQDGPLHHAIWTDLEELYQHFQRQITALERELAGDLVQTPYVRLMAIPGINVVSAAELAGEMGPITRYANANAITGRCGLYPSRSQSDQTDNDRGPIIRQANRRLRCVLMRIADNLALHCAYYRGQADADEARGIDKRASRVKIAKKFSRLAFACVAGDEPMKHPCFRKPDSIMEKLREFHHQHQTPVDRLLSDLETAVGQLPYNTCSHEAEIVAHVLQQQTNRHRGAVAIGELLPAVLARLEIKITKQNKYRDRS

SEQ ID NO: 429376 - protein, 326 aa, unidentified
MHLKTFSMDPYPEGLKNYLEKNYPEGIYHLVYEVGFCGFWIFRRFKQLSVDCIVINPADVPTGHKEKERKSDPVDSHKLARELENGSLQGIYVPTEDEQHLRTLCRLYTTSVQSSTRVKNRIKGLLNFNGIEYPINSSSWPAKFISYLQSLPLDNGPAKKTLSIHLDELRLHRMHTLVILKELRKHVRTTHGGTIIKLLISVSGIGFKSSVILYTEIMDMKRFSNFNKLRTYIGLVPSTHDSGETQSSSGLTVRKNKFLRRIIIESAWVAIRKDPALLAYYNKQRSRMKSQRAIIRVAVKLLSRIRYVWLNERAYVTGIVEGTTVS

SEQ ID NO: 429377 - protein, 352 aa, unidentified
MSDKISRHTLKPSDGKELLDLCERIRTRVAKETTKRVEMVSCYEAGYDGFWLHRLLQAHDIRNHVIDPASLQVDRRARRAKTDRVDAERLLRSLMAYLRGEPKVWSVVRVPSVAEEDDRRLHRERGRLINERIQHVNRIKGLLAIHGIYDYQPLRRDRIQRLEQLHTADGQTLPPRLEAEILRELQRLEIVIGMIKTIEAERDAIASANTETERGSVKKIQHLAKIKSIGPEFATTLVGEVFYRSFDNRKQLASYVGLTPAHFQSGAMSRDQGISKAGNAKARTVMIELAWLWLRHQPDSDLSVWFRDRVGKLKGRIRRITIVAVARKLLIALWRYLETGLVPKGAALKVCD

SEQ ID NO: 429378 - protein, 315 aa, unidentified
MSQDTFIGVDVSNKWLDVYVQPQGTSYRFANDEEGIQELVSMAKELEPDNVVMEATGGLEKAVGASLSVAGVKASIVNPRQVRDFARATGKLAKTDAIDAQVIAHFAQVVNPQTRLVVDEQAEELSAILSRRSQLTGMLTAEKNRLKRAPRVVRMRLKAHIAFLEKELKRVDKDLDEAIKGSSLWKEKESILKSIPGIGPVVSTTLITSLPELGKVSDKEVAALVGVAPFNRDSGAYRGRRKVWGGRARVRSALYMATLAATRHNPVIKPHYHKLLAGGKARKVALVACMRRLLVIANAMLRKGTHWDQSLHRTA

SEQ ID NO: 429379 - protein, 312 aa, unidentified
MNSKSEVYIGIDVGKESLELSSGQEGKTRRYANTPQGVGQLVEEMAPFKPRKIVLEATGGYERHIVQALQQAKLPVCLVNPTRVRRFAAASGRLAKTDAIDAQVLAQFGQAMRPMVTKPKEGIVEELDQHLGRRRQLVSMITAEKNRLALAGPGVRDDIEYHLAILKERLERIEAKLLALVQSEPSCQRRMDQLCSVPGVGPVTALTLLAEMPELGQVNRQQIAMLAGVAPLNHDSGKRRGKRRTYGGRSGVRSTLYMAALSASRTNPVIRPFYQRLVANGKEKKVALTACMRKLLVILNAMARDQKSWNVA

SEQ ID NO: 429380 - protein, 418 aa, unidentified
MDVMVERCAGLDVHRDDVVATVRVPGSGRRGWDQQTRTFRATLAGLSELAAWLAGFGVTLVGMEATGVYWKTVFQALEDRFECWLLNAHHLRNVPGRKTDVKDSDWICQLVQHGLVRPSFVPPPEIRRLRDLTRLRKAQTNERGRAIQRLEKVLQDAGIKLSSVASHTYSKSARAMLEALLGGESDPEQLAQLAKARMRQKIPQLREALASRFTIEHHGVMVSQLLAHIDTLDAALENLTERIELALAPHANIVELLCTIPGVQAHAAQVLIAECGLDMTVFPTVGHFVSWAGACPGHHESAGHRRSGRTRHGPRWLTEQLTECARAAVRTKGTYLAAHFAQLRGRRGEPKAIGAIRHDLLVAYYHIVRDRVPFRELGPDWQRKRYSPEHRARRLQRQLEALGYTVTLEQVEPAEAAA

SEQ ID NO: 429381 - protein, 341 aa, unidentified
MQDVTLVGIDLGKHSFHLHGQDRHGKAVFRKKVSRKQLVEFFATFHACTVVMEACAGAHHMARKLAAFGHQVKLVSPQFVRPFVKSNKNDFVDAEAICEAASRPAMRFVTPKTESQQTLSALHRVRESLVRDRVKTSNQIHGFLLEFGISLPIGQAVIRRLPTVLAEHSLPPSLVSILERLHAHFKYLSEQINAIDKEMARQLAADDLGQRLLSIPGVGPITASVLAAEMDDGKQYGCSRDFAASIGLVPRQYSTGGKANLLGISKRGDKNLRRLLVQGARSYMPRLDKQSGRLADWVRAMLTRRHPNVVACALANKLARTAWALATRHSTFDAGSAAMPV

SEQ ID NO: 429382 - protein, 461 aa, unidentified
MRKARRSGRKPGKKIVDVTEGLEILRPHAAGIDVGNAVHYVAVPPGRSDPSVQTFGSFTADLHRMAQWLRACRIDTVVMQATGVYWMGLYQVLESYGFQVYVVNAKYTKTLPGRKTDVLECQWLQKLHSFGLLNNSFLPPEQIRVLRTYLRQRENLVAAAGTCIQQMQKVLTEMNVQLANVISDLSGTTGMVIVQAILDGQRDPQRLAALADPRVKATRKQIAQSLEGHWREDLLFVLQQVHDLYFTYLESITACDRRIETHLKTLEAKVDVVAQPLPETPRLPRRKHIPQTNLREELYRITGVDLTRIDGIQVQTAQIVLSEVGLDMTRWPDEHHFASWLGLCPNNRITGGKVIRRGTKKVLNRAATALRLAAQSLHHSQSYLGAKYRRFRARLGGPIAITAMAHLLARLLYRLLRYGTQYHDKGVEHYERKYRETQMKWLQKQAAQLNMQLIPAQGVAR

SEQ ID NO: 429383 - protein, 452 aa, unidentified
MNKSLSLESLTLVHPNAAGLDIGSREIWAAVRPDLDGETVRCFATFTPDLEALADWLLAGGVDTVALESTSVYWIPIFELLEARGIQCYLVNARHVKHVPGRKSDVQDCQWLQKLHSLGLLSASFRPDAEMRALRTLLRHRAQLVQHRAPHILHMQKALQQMNLQLHHVLSDVTGQTGLLILRAIVAGERDPLVLAHLRHPSCKSSEETIVKALTGSWQEEQLFVLRQSLELYDFYTAQIEVCNAEIEQQYAAIPPRWDAPDDLPTLPSVKPGSKSKNKPADATRQELFRITGVDLVAVEGISASLAQTIISEIGTDMSRFPTAKHFCSWLGLAPHNDISGGKVLRSRTLKTDNRAGQAFRQAAAAVTRSDSAFGAFYRRKRAQIGPMQALVATAHKIARTVYYMLKHRVAYHDIGAQGYETQQREQELTYLQRKAAKLGFELTPKQAAVPS

SEQ ID NO: 429384 - protein, 409 aa, unidentified
MLVVGDDWAEAHHDIEIEDESGRRLARGRLPEGLAGISRFHELVADHLDPDSEPSEVLVGIETDRGPWVQALVAAGYSVYPINPFQVSRYRDRHAASGAKSDPGDAHVLAEIVRLDRAHHRPLTGDSDIAEHVKAAARAHQSMIWSRQRQVNTLRSTLREFYPAALTAFGDLASADALAVLAAAPSPEQGRRLTQRRIETLLAQAGRQRNITAKATEIRAALNTDQLAARPGVVGAYAANVSALVAVITVMVTQTEVLAGQVEQGFGQHPDVEIYRSQPGLGTILGARVLAEFGDNPDRYADAKGRKNYSGMSPITKASGTKRVVLARHARNRRLADALYQQAFCALSSSPGARAFYDRQRDRGATHHQALRALGNRLVGILHGCLRHHTIYNEDTAWPTLTKNEQQAA

SEQ ID NO: 429385 - protein, 419 aa, unidentified
MELKPLYRCVAGLDVHQAKITVCILYEDGEGELQVELREFGGFKRDRRAMAAWVASFRPDEVVMESTGIYWKSPYAALERVGIRALVVNARHVKQVPGRKTDIGDAQWLAILARSGLLRGGFVPPGNVRELRLTARQMQKLTGMLAAEKNRLHKVLTDGGIRLPVVVSDIHGQSARAMVKALIAGESPEQVLRLASKRLKASEEELLDALDGELSDEHRFVLAELMAHIEDLERRIERFSRHLLDGLAPQPGLLRALQTIPGLDERGAAMLLVEIGDEMQAFGSAEKLASWAGVCPGNHESAGKRKAGKKRKGNPYVRRILCEAANAASRTRSALAEQFKSLLIRRGRKRAIFALAHKILKIVFVLISRGDYYRDATVDYEAMSVERNAPRWIRMLKKYGYLGAASGARPASGQQPAAA

SEQ ID NO: 429386 - protein, 315 aa, unidentified
MTTTTAQKFIGIDISKTSLDVAVWDSEIFWQFGNNARGIKKLVRRLKKLSPTLIVVEASGGLEQSVVRELYQTNLPIAIVNPTRVRRFAYSTGQLAKTDKLDAKIIAQFAQAVKPEVRPLRTEQQEHLNALVTRRRQIVNIITAEKNRRSTTHPALQDQLLKQIDWLEQEKEALEADIDQLIQQCAEWKEKAAVLESVPGVGSVTASTLLAELPELGTRNRQQIAALVGVAPVNKDSGKMRGKRRIFGGRADVRATLYMATLSATRSNPVIRSFYNRLLAAGKLKKVALTACMRKLLVILNSMISHNRSWSPYLV

SEQ ID NO: 429387 - protein, 363 aa, unidentified
MEQFIGCDAHKTYSVFVAVNERGEASPALRVGHDREQYRQFLEGLPAGSQIALEAGGHYYWIVDEMEAAGHQPRLVHPLEAKKRMGKTGKKTDKVDANGLGILLRNGTLPEVWIPPAGLRDQRESLRLRMFLVQQRTRLKNRIQGALARYNIQIAGVSDMFGVEGRLRLGKRLSELPEHTRESVELELVTLDFLELQIADIEKRLEELMKVTAEADLLKTLPYVGRILSMVMTLEIGRVERFPSAAHLASYAGLVPRVHSSGGHTRLGQICGDVNQYLKWAFIEAGNLVVIHQKHLGGQHVVRLYQRVKRKKNHQKAVVAIARHLAEAAYWILKKQEVYRDPQPKPKVPAKAQAANTLSSTHG

SEQ ID NO: 429388 - protein, 335 aa, unidentified
MNQKYFIGIDISKEKIDVAIVLGDFSILAERVVKNEPSKIESFLKAFCRKYKSDHSDLLVCCENTGIYNRPLEKICDRLGIALWVEHAVKIKRASIDMRGKTDRKDALRIAEYSVRYQDRKVLYKEPSGRIAAIKANQKVRETIITNRVAIENQMREAKSHDPELHKQLTKAYSPIIKALNKQLHRCKKEIESLIEEEPQLKKNVQLMKTIPGIGMQNATQMVIETDNFNRFQSAKHLACYAGVVPFANESGTMVRRQRISKMANQKMKSNLHLGAMAAVRADPELKEYFKRKVAEGKNKMSVINAVRRKLVDRIWAVIQRQTPYELETKTILSK

SEQ ID NO: 429389 - protein, 355 aa, unidentified
MSQEKYIGMDVHQATISVAVMDGQGKLLMECLLETKAATILEFIQGLRGTLSLTFEEGTSAAWLHDLLKPHVSRLVVCDPRKAALLNDGNKSDRIDARKLAESLRTNQLKPVYHGEHGMRTMKELGRSYLTVTKDVTRVLNRIKALYRSWAIPCTGTTVYAPRHRAEWLTKIVEPGVRVRAEHLDQQLDSLQPIRLAARRELLQESQKHAAVKRLRQIPSIGPIRAALLVALLQTPHRFRTKRQLWAYSGFAVETHDSGEYRWVRGKLQRNRERITVRGLNDNHNKDLKNLFKSAAIAASTNPGPLHDFYVARVAKGMRPTMARLTLAHKMAAITLTLWKKGVNFDPKQLHRQAA

SEQ ID NO: 429390 - protein, 426 aa, unidentified
MNCTQNYKIDQVTEQTLVVGIDIAKRTHYACFVDDRGRVLRKSFPIFQSKEGFQQLYKAIQGAMQAFGKSEVIVAVEPTGHYWLNLAYFLEEHGIPLVMVNPAHVCRSKELDDNLPTKHDAKDALVIARLAKDGRFLVPRLLHEIEADLRVGSTFKEKLRKEQTAVKNAIVRWTDRYFPEFWTVFRDLGKTALSVLEWTPLPADMAGRTVEELLEVYRQSEGMKCPQKAKIQALINTAKDSIGVTEGTAMARFEIAALVRRYRQLEAEIAALDAELKALVQTTMEYQWLKTVDGLGDATIIDLLAEIGSFAHYRDPRQLVKLAGLTLKENSSGQRKGQKHISKRGRKRLRSVLFRAMIPLIRHNEAFRELHEYYTTRSVNPLTGKQSIVALCRKLLNVLFAICTKKQAFDAERMKQDVLSQVQRAA

SEQ ID NO: 429391 - protein, 436 aa, unidentified
MNTSESKRTSLTEGIAAWVGLDWADQQHVICVYEVESGKSEMLRLEQKPEAFESWLTQLRQRFGGAKVAIVLEQARGAVIYALLGVDFVVLYPVNPQALANYRKVYTSSGAKSDPADAVLLIEMVRQRPECFRPWKPDDADTRSLQLLTENRRQLVNQKTAFTNQLTSVLKSYYPQALELAGDLDSDQACDFLTRWPRLGALQQARPSQIRKLYQDYGRPRPERLEQRLEQIRQARPLTQDPAAVLSGSMMVEALVPQVRSLLRAIEQFDRQISVLFQRHPDRFLFESFPGAGAALAPRLLAAFGTDRDRFQSAQEIQQLSGIAPVTEQSGRQHWVHWRWACSKFLRQSFHEFADHSRKWCRWAKAVYQQLRRRGQGHHAAVRRLAFKWIRILFHCWKTRSCYDESIYLKSLQKRNPVLWAEIEALPPRVRRQPAA

SEQ ID NO: 429392 - protein, 331 aa, unidentified
MAQNDLVVVGIDIAKHKVDACIRSLSLQGTFPSGAEGRRKLIAWLRKHKVGKAVMEASGGYERDWAKALHQAGIGIRIVDPKRVRSFARSAGQLAKNDAIDAVMIAWFAETFGEAKGQAYDAAREKLSKVMNARQGLLDLQINLQNRSEHAGPELVQRMQARLLKKIALEMTRLEAAIAAMIKATPHFAERAEIIESVPGLGEITSAGLIAAMPELGQVSNKVAAALLGTAPYDDDSGRRHGDRHIKGGRRKVRNLFYMACLGAATRHNPMLKSFYRRLIAKGKEPKVALVACMRKLIVILNTMIARRQKWDANLYVSDDERTALGLRPSV

SEQ ID NO: 429393 - protein, 411 aa, unidentified
MDVIHDRAAGIDISKRDAKVAVRVPGKRAGTFTTRVTTWGATTSQVLELIEFLEAQHVTIVVMEATSDYWKPFYYLMEDTLPVMLVNAKQARNIPGRKTDVSDAAWLAQLAAHGLLRRSLVPPQPVRELRDLTRARTIATRDRTRSQQRLEKFLESSGIKLSSVVSELTGVSGRLMLDALVAGEQDPVVLADLAKTSLRKKIPELQDALAGRFTDHHAFMVSQYLTQIDMHTAMIDQLTTRIEELIEPFRTARDVLVTIPGVSIVVADVIIAETGADMSAFETAAHLASWAGVCPGQNESAGKMKSSHTTHGDRYLKGALGIAALAAARSKGTFLAARHRRLVTRRGAMRAIVATQHSILVAVWHMLRNGEAYEEQGADYYTRHDPGRTRARAIRDLETLGYDVTITPAAA

SEQ ID NO: 429394 - protein, 354 aa, unidentified
MPSSAETAVARTIGIDTGKNTLHMIGLDEKGAIVLREKVSRTRIAARFVNLPPCLVGIEAGMASHYVARELAGLGHEVKQVPPAYCKPFRQSHKNDFRDAHAVAEAVERPSTRCVPIKTDGQLDLQALHRLRSRLIGNRTAAINQTRGFLLEHGIPVRQGHHFLRQQLPQILATRTDVLSPRMVRIIGDLMTDWKYLDERIEGVTDEIEALAHADEGCQQLITVPGIGPIISSAMVAAIGNGAAFCKGRDFAAWLGLVPKQRSTGDRTILGRITKRGNRYLRMLFIQGARAVLLRPASRSKHGFGSWLTAATRRLHRNVLAVALANKLARIAWTVLAQGRRYEARVEPRVEAAA

SEQ ID NO: 429395 - protein, 346 aa, unidentified
MKIIGCDFHPSYQQIAVFDTTTGEVMETKLMHGDGEAERFYRELEAPALVGMESVGNSLWFEQLVERLGHPLWIGDAAQIRASYVRKQKTDKRDAGHILKLLLENRFPQIWVPSHQQRDQRQLLIHRHKLVGMRTRIKTELQHVALNQGMQKKRTLWSKGGMSDLKKLSLEGWTSRRRADLLSLLSMLETQVSELDQAVEEAAKRDPQAQLLMTQPGVGPNTALAFVTTIGDVARFQRGKQVASYLGLIPSERSSGSKRRLGAISKQGNVFLRTLLVEAAQSAVRHDEDFKKEYRHHCHHKPKGVVKVAVARKLAVRLYWMLRTQTPYPQVVHNEGSPSHFVVSES

SEQ ID NO: 429396 - protein, 372 aa, unidentified
MNYNTVYVGMDVHKESFSLCAYTIEAEKASHYQRTEADYKKVLNYLEFLRTIYGGDANFICGYEAGCLGYTLYHQLMANNVKCIILAPTTMLEQRSKKRIKTDRRDAEIIAKCLAQHNYSPVHIPTAKDEETKEFLRMRDDHKLALKKVKQQILAFCLRHNYRYDGNSHWTAAHLKWLKALILEALYKEILDEYLLTYQTLSDKLERLDKRIEELATQDEYKEAVKKLCCFIGVKTHTALSVLVEVGDFKRFASAQHFAFYLGLVPGENSSGDDQNRLGITKAGNRHVRLLLTEASQCYARGQVGFKSKELKSRQSGNTPAVIAYADKANERLRRRYYKMVLNKYKKHNVAKTAIARELACFMWGMMTDNIV

SEQ ID NO: 429397 - protein, 353 aa, unidentified
MDRYVGLDAHASSCTLGVVTPGGKRVGSHVVETNARCLIEAVRQIPEPRHICLEEGTLSAWLYEVLSPHAQKVVVAAVSESRGAKDDRRDAFGLADDLRLGAIKRKVYKERGRFGALGYRARGYRWVRDDVVRVKNRLKSLYRSRGVPVAGRGVYTASKRGEFLGRLPSPARPLAELLYEEMDALAALKSEAQKAMLAEAKRHPEFRLVKSCPGLGPVRTAELLPIVVTPYRFQSKRGFWSYCGLGIVTRSSSDWVRTRTGEWVKAEVKRTRGLNRNFNHTLKAIFKGAATTVIGRSKDDPIYRHYLRLLDGGTKPNLAKLTLARQIASIVLAVWRAGEAYDPTRLESDSNRG

SEQ ID NO: 429398 - protein, 383 aa, unidentified
MRHGGILIEANDSEGEAMKKHTTNNQSLSADVSACSTVAVDLAKRVFQVAGEDALGQVIFEERIKSREAFQVFLRELPPSVTVLVETGPGAQAWARLLQMQGNPVRILPAQLVASHRSGPKNDRNDALAILRAGRDCKISAVPIKSAAAMAMQALHRARQGYVRRRTAVGNQMRGLLLEHGVAMAQGEIAISQLVPRILEDATQPLPDLLRELIAELLGEWSQLGDRVNVLTGRLEMAAKEDETAKRLMTVRGVGPIIATALIAKQTEPERFANARLFAAYFGLVPSQHSSGEKTRLGKMSKHGDAYLRSLTIQGAHAVLRQLRPDSQQPDDQRLQRWINRLGRKEAAVRLANRNLRILWVLLQNDQTYRRQPGNGQEATMSH

SEQ ID NO: 429399 - protein, 400 aa, unidentified
MSGLKGNGDSFVGIDVSKDKFDACGITGDEAKLFQFSATMDRQGFEKLKGHLAAVSISSVLIGMESTASYHVNLFSYLVSEGYKVILVNPLLISNYVKMQLRKTKTDKKDAVVIAQFLLTNGDTLIQRATPSLIADLRDLSRQRESLVDEMTSLKIEIKQLLNIIFPELEHMVGIFTKSILKLLQKYPSAFALRDADLGQLSQMLIANSYGHKREAFAAELIKAAHSSIGTKNPAKDMILKQKIALLRHLEDALQEITGMLIEMSRKLMEEDINIMTSIKGIGDKTAANFLIEMGGDINQYERSGKIIAMAGLDPAVYQSGKHEGKGRITKRGNRHLRRIIWLMTTKVIQYTDIFNVYYLKRRKEGLPYKMAVLATAHKLIRVIYAMLTQRTTFCPQVNS

SEQ ID NO: 429400 - protein, 447 aa, unidentified
MAVRNRRFSRSGLSVTHPDAAGIDVGSAAHFVAVPPDRDDEPVREFKSFTADLIALADWLQRCGVKIVAMESTGVYWIALYELLQRRGFEVLLVNARHVRNVSGRKSDVLDCQWLQQLLSFGLLRGAFRPGDAACALRSIVRQREMILRNQSRCVQHMQKALAQMNIQLANVISDVVGVTGQKILRAIIAGERDPRELASYRDVRIKADEEEIALSLQGNWRTEHLFALKQAMAAFDFCAQQLLECDAEMQRCLQGLHAHEGQPPSGKKRSTNRNAPKFDLRQHLYQVAGVDLTRIDGIDVSTALTVLSEIGADVGRFATVKHFTSWLGLCPGTKISGGKVLSAATKRSANRAAQALKIAAANLRASRSALGAYYRRMCARMDKPRAVTAAAHKLARLIYVMLTRGEEYVDLGQQYFEQRYRERVVRQLSKRARDLDMTLVPATVGA

SEQ ID NO: 429401 - protein, 413 aa, unidentified
MSVSCGIDWAEDHHDVGLVDADGRIVGKHRISDDVAGFALLLQLLTEAGDSAEDPIPVAIETSRGLLVACLRATGRPVYSINPKAVDRYRDRHSVARKKSDAGDALVLAHILRTDRAAHRPLPADSELAQAIAVLARAQQDAVWERTCAHNKLRSLLREYYPAILAAFADKRGGILRPEARAVLAAASTPAAAAKLTTAQLRKLLTAAGRQRGIAPEAQRLQTVLRGEYLRHPPLVEDALGAQALALLRQLNTACTNADELAAEAVAHFDKHPDAEIITSLPGLGSLTGARVLAEIGDDRSRFADARSLKAYAGAAPVTRASGKSRTVMHRRVKNQRLAGVGYVWAFAALTASPGARAHYDRRRTTGDRHTAAQRNLFNRLLGCLHHCLDAHQIYDENTAFPPTTITTREVAA

SEQ ID NO: 429402 - protein, 353 aa, unidentified
MSSDKYIALDVHQATTVTSAMNAAGRELDGSIIATKARPILNYLEGFSGPLHVTFEEGTYAAWLYDLLEGRVAERLVCDPRHNALLKEGSKTDRNDARKLADLLRTGMLRPVYHGGQSLRPLQELVHSYEALVEDTTRAMNRIKALYRRRGIDCAGRGVYTQKQRASWLEKLPAGATRLRGELLHQQLDHTRSLRRQARLALLQESRKHLISARLREVPGLGPLRVARLIASIQTPHRFRTRRQFWTYSGLGLVIFDSGEYRLVQGRVVRRSQPVKIRGLNRNHQPRLKEIFKSAALSAIRQPGPFKEYYDVRVAQGRDPALLRLSVARKLAALVLSLWKKGGRYRAESVKQA

SEQ ID NO: 429403 - protein, 455 aa, unidentified
MAKTKRRKHRKLDRTLPVMRPSAGGIDIGATEIFVAVPADRDSESVRSFPTFTQDLHALADWLQQCRVDTVAMESTGVYWIPLFQILEARHIEVHLVNAQHVHHVPGRKSDVLDCQWLQYLHSVGLLRASFRPEQAVCEIRSLMRHRENLVQMACVHVQHMHKSLDQMNLQIHHVISDITGVTGLAIVDAIVAGLTDPKELAKLRDHRIQASIETVKKSLVGDYRPEHIFTLKQSVTAYRQYQQLIADCDREIQQRVQTFQSKDDPPSAAADSSSATTSTASNFDLRSHLERIFGVDLTLIPGFDTLRVQTIFSELGADLSSKFPNDDSFDSWLNLCPKDGTSAGRRIRGPKTKTKNRVTQAFRMAAQCLHNNKSYLGDYYRSQRARFGPLKAIKNTAHKLARIFFHLATGSPMTRPCLLNLKLVTKNAASTTYKYVRGKWVTSLWRPMRNSPVP

SEQ ID NO: 429404 - protein, 462 aa, unidentified
MKIYLGGDVSKGYADWILLSEKKRTILENFQLDDTYAGHCKLYSMLETYIEQYPEAEIYAAVESTGGYENNWFKTLQSYQKVFNLKVSRINPAGVTFNRKAGMKRNVTDAISALSIAEFMIDHPENIVYDQDDKWKSLCRHWNFVEMQKQQRIQTINQLETILYSANPTLMRFKKGDFPNWLLELIIQCPTADKLARAKPEKLAKIPYLSLARAKELVAEANQNIASATDRNAEILVTQITMQIKLFDQNIKSQMELIERDLICPEIELLKSFKGISTISAIGLLLEIETIERFTTVKGFSCYFGLHPKFKQSGDKIIGVRMSKQGSKNMRKILFNITKGAITYNPLITEVYEKKISHGMAKMAAIGVCMHKILRIIYGILKNKQAYNPDIDKRNCERSKEKQANKQQQENANIEKNRRYQEFDVTAPISRKQTKKRREHDLSQCEITSQSTGSTCSSETKL

SEQ ID NO: 429405 - protein, 352 aa, unidentified
MTVTIVERPAHPRVITGGVDTHAEVHVAAALDPVGGLLGVQEFPATPAGYAQLLGWLGGFGAVCLVGVEGTGSYGAGLARHITAAGVRVVEVDRADRQDRRRQGKSDPLDAVSAARAAQSGRAAGAPKGRDGAVEAIRALMVAKRSARAGRTQTINQARALVLTGPDDLRIRFCAHTPAGLVAELAALRPRPGAPVGYPTRMALRELGRRAVFLDAQLQRLDELIVPLVTARAPGLLALYGVGADTAAMLLIAAGDHPERLRSEAAWAHLCATAPIPASSGKVTRHRLNPGGDRQANHALWRIVFTRMGSHPATRAYVARRTKEGLSKKEIIRCLKRYVAREVYPHLRPGAG

SEQ ID NO: 429406 - protein, 344 aa, unidentified
MTSMHFIGLDIHKKTISYCVKDVSGTVLSEGTVAATRAQLDDWVKTLPAPWTVAMEATMFTGWIYDHLLPHAAAVKVAHPLMLRAIAAAKKKNDRIDASKICDCLRCDFLPECHMVSAEVRERRRTLRYRKLLVRQNVQLRNKVSQMLMESGVVYNKQKLHKVGYFKELMETNPDISRELKPLLAICRETIVRIGKTESALIRSLRRDPLLHARVERLMTIPAVGPITALTWVLEVDEVARFHSVKQAVSYCGLCGAERSSAETIKRMPISKQRNKHLQSVLIEAAKLAPRLSPELALVYDTEKQKGHANRASIAVARKLVAYLLAVDRSGREFVVAGERRAAA

SEQ ID NO: 429407 - protein, 360 aa, unidentified
MLYLAIDQHRKQLTVNLRNEQGDVLLRRQVSTEWPRVRSFLKELQERSVPEGGFVAILEVCGFNDWLLKLLPEYGCRETILIQPEKRSRKKTDRRDANALGEILWVNRQRLLAGKKVQGIRRVQLASESDAEDRQITAWRKRLATLRTRTINRIKHLLRKHNLEQECPTKGLDTIRAKQWAAALALGLIDRLEMDQLLKQWTLCDAQIEQAEAVIRRRQSQNAVATLLATIPGGGAYCSLGLACRIGAIERFPRPGSLANYWGLTPCCRNSGEITDRLGSISKQGSALARFLLGQLVLHVLRRDPWMRAWYGRIKRRRGSKIARVAVMRRLATIIWHMVKHQEAYVLGGPPRRKLAAQAC

SEQ ID NO: 429408 - protein, 388 aa, unidentified
MQTVADRPEAPTAIRTDLGAIFVSLELSRSTWLITSLSPGGGEKMSKQVVRGGDVAGLLERFARLREKARARTGKVFPFVVIQEAGLDGFWIDRALQNEGIESHVVDPASIATSRRRRRAKTDGIDGEVLVRALLAYKRGEPRVCAMIKAPTPEEEDRRRLCRERKVLIVERVRHVNRVKGLLFSQGISGYEPLRRDRRRRLDTLQTGDGRLLPDHLKAQVCRELDRLELLLEQIKAVEAERDVLLAAQQVAAPAPAAMLLDIKGIGPEFAAILWSEGLFRHFDNRRQVASYAGLAPTPWQSGSVDREQGVSKAGNPRLRTTLIQLAWLWLRHQPQSALTLWFEERVRRNGGRLKKTTIVALARKLLVALWKYVTAGVVIEGAVMKRT

SEQ ID NO: 429409 - protein, 449 aa, unidentified
MGNVSGVSRGDRNRNEKLARLRELVPVTNAVVGIDLADNKQMVVVCDHDSKVLARRTFRCRAWELGAALDWAGERAAARGFAGATVACEPTGHRWRILGQLAGERGMPFVCVQPSMTAWARRSEDLTFDKTDEKDAVLIARLTAQLRCYIPEPVDETWGRLRHLGARREQLIVEMVAQVQQMRALLECVWPASLDTAKYPFRSRTWAAAMSVVCDRDGGDLARTQHLGAARFEQAVRREITKRGGQKPSLRIVRNLFTALADPAGVLAHRPGALERVTFLLADWQTAAAKLSDAETRMVTVLDELGLTALVTSISGISPVGAAAILAETGDPTRFATARALVKHAGLAPREKLSGTFVGRTKLTGQGRPGLRLAAWRAVWGALQTNTVYAARYRHLTGREDNKLTPTQAQTAIAAAILRHLHAVITTGRAWDPVVATHGSRQRQAPIAA

SEQ ID NO: 429410 - protein, 356 aa, unidentified
MIIVGADVHKRSHTFVAVDTAGRQLGTVTVPATTTGHQTALRWAHATLGTDLVWAIEDCRNMSALLERDLLTANQKVVRVAPHLMAEHRKTGRQPGKSDPIDALAVARAAAREPNLPIASHDEVSYTVKALTDYRESLVHERTSKINRVLWRVHAIDPEHEVKKGGLNRAKHQKLLAAWLQTCDRGAVDVLLAIKEVAAIAALTVEINEVYKQLSALVAVAVPSLVALPGCGILSAAKLLGESAGISRFGTEAQFARHAGIAPVPVWSGKSAGKHRLTRSGNRQLNAAVHRIALTQSRMPDSLGHAYYAKKRAEGKKSREAMRCLKRRLVRTILHRLVTDHAARSHTEILVPRAAA

SEQ ID NO: 429411 - protein, 341 aa, unidentified
MSIATLGIDLGKTSMHVVGLDASGKPVHRKKLTRTALIRFLSNLAPCRVAMESCAGSHDIARKADAMGHDAVLLPAQFVRPYTKGQKNDNADAEAIAEAATRPTMPTVSIKDATQQEIQFLHRTRQGWIKQRTETANRVRAMLLEFGITVPKRILNLRRALPGILEDAENDLPDGVRQLVADHWQQLQDLDDRIADITQRIERIPVRDARAARLMSIPGIGPMIATAMVAAVGDGTQFTQGRGLSAWLGLVPQQFTTGGRPRLLGISKRGNRYLRTLLIHGARAVLQQAHRGDDALRRWIQRVNGRVHRNKAAVALANKLARVAWAVLTRGETFRASAAAA

SEQ ID NO: 429412 - protein, 350 aa, unidentified
MARKSNATAVALGVDPGKNTFHLIGLDARGAIVLREKVARDRVVARLANVPPCLIGIEAGMGTHYVTRELLAVGHDVRQVPPVYAKPFRQAHKNDFRDAHAIAEAVQRPTTRCVPAKTDEQLDLQALHRVRYRLVGQRTAIINQIRSFLLEHGITVRQRLHWLRHALPDILAQRTDVLSPRMIRILADLAQDWRRLDERIDAVTGEIEALSKNTDACQHLMTIPGIGPIISSAVVAAIGNGTAFTRGRDFAAWLGLVPKQMSTGDRTILGRITKRGNRYLRMLFMQTARVVLVWPSKWMKHSFGPWLAAAAQRLHHNVLATALANKLARIAWSVLAQHRAYEPRVGAGAA

SEQ ID NO: 429413 - protein, 382 aa, unidentified
MPAYADPTPTPISADTIFLAFELSGTSWLVALHAPDADKVERHRLPAGVAAEVLGLIARTKARVTRRLGTTPRVACCYEAGRDGFWLHRVLEAEGIASHVMDPTSLQVDRRARRAKTDRLDAQALLRALMAWSRGERQVCSMVRPPSPEHEDERRLSRERGTLLKERLRLSNRIKGLCAAQGIYDYEPLGADRRERLARLVTGDGRALPGRLAAEIGRQLDCFELVLRHLAEVEAVRDARAAQAREEGGSKLATLLRLKGIGPELATVLELEVFHRHFANRRDVAAYAGLAPSPYASGGTSREQGISKAGNRRARKALIELAWLWLRHQPESALARWYRDRVGTATGRVKRIAIVALARKLLVAIWRYVETGLVPAEATVRT

SEQ ID NO: 429414 - protein, 352 aa, unidentified
MYYVGVDLHKQTSWFYTLDSSGNRVDSINLTNNHDILKNYFKKIPKPFTLAVEATYNWYFFVDLAREYTNSVFLANSFESKAFAKKHKKTDKIDARLIATVLYKGYLPTVAIADKHTRQIRELLRYRMKLVIDRSRNISRLKALLDKLGYMSSGNFTTFKALENIKMEDLPDIYKSLIERYRELIIYLSKKIYEIEKEINKLPNEDIDVYNLLSAPGIGPFSAALIKSEIIDIKRFNSFNRLCAYSGLAPRVSASANKIYHGSLNVNRRKNLQWILLENVKHFVEADPERAKKFCEIKCRKGYNTAKVILARDFLKVIYHILKEQRPYYSQKKLVKHKIKIQSVAATALIGV

SEQ ID NO: 429415 - protein, 421 aa, unidentified
MEGKKIRVVGFDTATEEHECVLLGLDGTESWSLSCRNRYKSIEEVFAKLILRIAPDETLVVALEAPRAHGRLVFEVALQFGFTVWQVEAIALNHYRRCEGQARKDDHWDAFLAARMVFRGMKGCRVVADPRPDERVLSRLTRLRAQMVKQRVQLGHRLRAVMLELAPIILDSQWKGPKLGSVAMRKILEKWPAFESLDRARTTSIRSIFRSCRYGQAKTDRCVALVRSLPEEIVIPPEERAVIALEIEMISKQLELLNQLISEIEKQLRVAVNQHPICCKLMEMPGIGLITASVLVGELLPVARNATEPSSATFSGITPLTRKSGTSLDSAHLGRASNKRVLNALFLSAVKALGESALDRAYYDKKRIDYQGHPKPHTAATLALARQRHKVIFRLMTTEARYDKEVLIASHLKRQREMAAA

SEQ ID NO: 429416 - protein, 398 aa, unidentified
MLSIGIDVSKGKSTVCGMKPGGEIVYTPFEVQHTREGMSELVSLLRGSGEEVRVVLESTGSYHCPVVAALLENGILVSVVNSLRMKRFCSQSIRRVKTDQIDAMQIALYGLAYWQELQPTRLPENTYRELQLLARQYYQMTSLLIKAKVDFNALCDQVLPGMQELMSDHAGRHKLSDFVLRYHHTAHILKMGETRFRKDYCKWAEKKGYRNHERMAALIFATAQNGIPVLPDAPSTQIVITEAIRVLHTVEASRDAILTQMQALAKTLPEYSLVREMPCIGDTLAPRLIAEIGDVRRFHSKRALIAYAGIDAPPYQSGKFSANNRHISKRGNRYLRKTGYEVMQSYVMHKPANDPIFTFIEKKRSEGKSGKLAMVAGLNKFLRVYYGKVTELYRSLPQ

SEQ ID NO: 429417 - protein, 402 aa, unidentified
MTYDYVIGMDVGKYFHHACVLDIDGTQVLSKRINQNEQSLRALFSAFSAYDHKVLVVVDQPNNIGRLTVAVAQDIGIDVRYLPGLAMRQLSRIHAGNAKTDIRDAYIIAHAAKNLPESLRSVDRVEEAFLQLKVLNGIDEDLARSYTRLINQIRSALVGCYPQFEQALRGQIIHRKWVLHLLARYGGPTKIKRLGKAKAAAFARRYKARNPEPVLDAIFAAISEQTVTIAGAHYAEMSVAMSAKDALLKLEHRQQIEKEVIELINDIPHTQFLLSMPGIGPKTAAQILMTAGDMSDFPSAGHLASYAGLSPRTNQSGTSIMSNSLNRAGNKKLKNALWQSSFASIRFHERSRQFYERKRREGKRHNAAVVALARRRLNVLYAMMRNHEHYHDPAPSQEDLAA

SEQ ID NO: 429418 - protein, 373 aa, unidentified
MSYINQKNSRMWGWGSLPRHYAYQKERSITSWKDQSLQWMYQRVPVITSPSSRMDIQCENQNSFQLRSMVSRSWDKLSKTLKLRQNEKIYQLSFEATGVYHRPLQKYLEDHKIRYYIISPLLSATYRKTDLHSNKTDALDCAHIAKAYYCEKELRQYQAQPQEYKRLYQLSRIYESELVHLRKRKVSLRSMLDIIYPRIDKTFKGNQNLYDPIPMEILKRYPHPSLLLSHREDTIVKNVGHRTGHLKDYTERIVHKIYEKAKECYSGCEINDIEVLKLPNLIENVQEQKKKCDSLLKEMIEIARTCPYFASVVSIVGIGENLAARIIAELGDVSRFDNRAAIVAYAGLNPKIQQSGDIDGLHLKISKKGNKHL

SEQ ID NO: 429419 - protein, 337 aa, unidentified
MDVHKKSWTAHFKTDLFDNKTVTMSAESEALINYVEKNFSGHAVSCCYEAGCCGYWIARSLQQRGWEVKVVNPADVPRSNKQDWQKTDRIDSRNLCKHLSDGNLKGIYVPGEEQEQLRALFRRRIYLARNLRSIKNHIKSQLLYFGIKLPAQYDNPNWSREMKTWIANIKWKYSSAAESMKSRLKQLEFMWYEQLHISNELRSYCRKHYKKDYYLYKSVPGIGGITAAAIIAELGDIRRFNRLDELAAIVGLVPGIYQSSENKINLGMTKRSNYQLRSLLVEASWVAVRDDLALQQYYRKHAHNEPNKAIIKVAHKLLNRLRAVIHSGIPYQKGLLK

SEQ ID NO: 429420 - protein, 346 aa, unidentified
MKITTIGIDLAKSTMSVHGVDAHGKTVMHKSLSRAKLLQFMSNLEPCLVGMEACGGAHDLARRLIAMGHDARLMAACFVQPYRKNQKNDSNDAEAICEAVARPNMRFVPVKTAEQQALLSVHRVRLELIAGRTALINQLRGLLTEFGIVMPKGRYQMRAHVSVALEHPDLPELARTVLKELYQRIGAMDQDILAQERRIEAFARDSVLIQRIMGITGIGPVTASAIVASVGDAKLFNNGRQFCAWLGLVPRQYSTGGKPRLGRITKRGDVYLRTLLVHGARAALTVLTKRTDRLSAWVQALVARRGYKKAIVALAAKNARLVWAVLATGQPYDPRRARSSDLTSVN

SEQ ID NO: 429421 - protein, 355 aa, unidentified
MERYSGMDVHAASCTLAVISEKGRKLRDFPVETNGQALVEAVRMIPGHKHLVIEEGLQSAWLYETLSPHVDELVVAGITQSRGHKSDKRDAYGLAEKLRVGNLDKPVFKSPRQFTRLREFSRIHMTLVGDVVRGQSRIKSLYRSRGIFVSGVNVYGVRHREQWQAKLSSSAQTRATRLYDHLDFLLEQKKQAEADLLREAKKHPIVGVLETAPGFGPIRAARLVPIVVTPHRFRTKRQFWSYCGLGIVTRSSSDWIQAADGGWIKARVPQTRGLSRQHNHFLKSIFKGAATTVITQVNKDPIHARYERLLDGGTKPTLAKLSLARMIAATVLRMWKDEKEYDSRRGDPLTATREG

SEQ ID NO: 429422 - protein, 343 aa, unidentified
MGEVSTIGLDIAKSVFQIHGVDVDGAVVMRKRISRAKLLEFFATLPACLVGVEACPTAHYWSRRLGALGHTVRLMPPSYVKAYLKRSKNDANDAAAICEAVTRPSMRFVATKSEQQQSGLMLHRSRQLLVCQRTMLSNAIRGHMAELGIISAKGRNGTAELLEIIADEHDDRIPSAARFSLDVLARQYAVVRAQVVAIEKRIHAWHRSSEESRRLEEIPGVGPIVATALVAEVGDWKEFTSGRSLAAWIGLVPRQHSTGGKERLGRISKQGNRHLRWLLVAGAMAVIRYARQHGTKRPWLARLMDRRPLKVAAVALANKIARMAWAMMVRGERFKEPKLLPAA

SEQ ID NO: 429423 - protein, 313 aa, unidentified
MVAFARTLGVDVSKRQLDGQLWPDGGGLSVGNNEAGFAALQRHLVAHPVDAVAVEASGGYERKLVEALRAAGHRVVVLAPREVRLFAEMRRKRAKNDRLDARVIAEFAALFGEERPARSPALERLAAYLTYYEQLSAAVAQAKTQLESVADDEVRALVGDQVRRLTADKRALLVRIRALVEADDDLNGQVRRLQSMPGIGFLNAVTLAVRLPELGRLSRHAIACLIGVAPFDDESGRHKGRRFCRGGRERVRTMLYMAATAAKRCNPAIKAFCERLKAAGKPHKLIIVAVMRKMIVTLNAMVRDGKEWEAQRP

SEQ ID NO: 429424 - protein, 350 aa, unidentified
MQTIYIGVDFHARQQTICYLTTDSGEILLQQLKHQDKAALRAFYAQFSGHVIVGLEASGYSPWFERLLEELGCEVWLGHATEIRRRARWRHKNDRRDAELILDLMLHDEFPRLYLPPLQSREVLRMLRYRQKLIKLRTMGKNSLQALALQSGLAKGPHLFTKAGLQELRTAAMSPAMQWQREQWLQLLAPLNQRLLETMLWLKQQSQADQRINRLRTHPGVGLLTALCLVHSLEPVSRFANTRKVTAYAGLDPLERSSAERQRFLGISKGGSRVLRFLLVEAAHTAIRKDAALRRFYQRLAARHGRPKAKVAVSRKLLIRAYIMLRDEIDYAEFQRRAVAARSAPPAHGL

SEQ ID NO: 429425 - protein, 304 aa, unidentified
MNGIGIDVSKRQLDVGTTDGETLQVSNNLAGFSELDVWLRKHPAAQIVLEATGGYEQPVLDFLHKAGHPVVRANALRARRLAQGMGHIAKTDRLDAYALAQMAALVKLPPYQPLQPWQQRMREFVRARRQAMEALTIARQQQEMVGDRELRRLLQANINRQQALVERLGKQIAEQVAQQPQLAVLKSMKGVGPALQAVLASYLPELGRITGKRIASLVGVAPMSHDSGTMRGKRSIHGGRAEIRQVLYMAAMSAMRHEPRLRDFYQSLRARGKEGKVAIVAVMRKMLVILNARVRDAESGPIPA

SEQ ID NO: 429426 - protein, 387 aa, unidentified
MSRNARVPVPATTLDQDSTLVVVLELSARSWLVGARVPGIGRMSRYALAPSAEALAAWLDTAKARAGTAGRMVVRVVLAYEAGRDGFWLARYLEARGVEVYVIQPSSVLVDRRARRAKTDALDVEMLMRTLLAWLRGEPGVCSMVPIPDVAEEDGRRPVRERQRLIGERLALLNEIDGLLATLGITGYRPLRQDRRARLAALRTPEGDPLATNAAARIGRILDRLELVMQQIAELEQARDAVIAKAAAASEAETMIRGLARLKGIGAELATVLVWEAYVRSFPNRKALGAYAGLTGTPFASGSTTREQGISKAGNRRLRSSLVELAWLWLRYQPDSKLAAWFRSRTGSVGSRMRKVMIVALARKLLVALWRFCRAGVLPEGAALKAA

SEQ ID NO: 429427 - protein, 403 aa, unidentified
MRSFAGLDWGSVQHAVCVVDDAGAVRLRLEVAHDAEGLTAMFKQLAKLAPAAELPIAIERPSGILVDTLVAAGHPVVPIHPNVVKACRPRYRAAGGKHDLGDAYLLADVLRTDGHRFKSLSPQSDDIKALRALVRTRDDLVAERVSLANQLRSLLEGFWPGAAAVFADIDSPIALAFVRRYPTPQSAAHLGEKRLASFLAQERYSGRRPIPDLLVRLHEAAAAVCSETEAEAKGELVKALARILGTLVAEIVKLTSRIEHEVEQLPDGKLVMSFPRAGKINAAQILAELGDVRERFQTEDQLAAEAGVCPVTYESGKSRSVCFRWACNHRLRAAITTWADNSRHGSPWAAAVYARARGRGCDHPHAVRILARAWVRVLWRAWTSRSTYDPKLHGGAKGLPPAA

SEQ ID NO: 429428 - protein, 492 aa, unidentified
MKKTKANQSVYRNQNSLIRTLFERAGDARKVLCVALDYAKRKHLALICDGNGDVLKSSFPVENNTAGIEHLLKEISATARHRKIPQNQIFLGGEDEAAYVANFTQALRLKGYLVVRVNAYEAKENRENLLASTDGLDLLGIAKTLLSRRARVTGEPADVNPAYRHLRDLTRCRRTLVRQQTAASNRIHALAEELFPGFLNGSKSALTPFTEASLELMGDRFSAPQIARRKPAALANLLRRHRVHHPDETAAEIILLARQALPPAAHRVASLQRTLAATVDLYACLRRNSLELRAEAALLLATTPYVMLTSIPGIGFVLAAGLAGELGEPSRLSKLDSLCAYAGIVPRTFQSGGPDSPAIQGHASPRCNRILKDWTVQSAQKIHLYGPSELKDRITRWNAEGRHGLFAAARHNLRLVSTLVKNEIPYLAPAGRGRQATPAQIEAAAHATWLILLKKWRTISGGQDLIVAESHPMGCWRKLMLELHGIDLPARP

SEQ ID NO: 429429 - protein, 412 aa, unidentified
MTCCAWRLIPHQSEESLPSILELTMNVGADKSEPLTAIHTDLGAIFVSLELSRSSWLITSLSPGGGEKMSKHSVRGGDFAGLMERFAQLQEKARLRTGQSFRIIVIQEAGLDGFWIHRALQNEGIESHVVDAASIATSRRRRRAKTDKIDGETLVRALLAYKRGEPRVCAMVKAPTPGEEDRRHLCRERKALTAERVRHVNRIKGLLFSQGISGYQPLRRDRRQRLEELQTGDGRAFPQHLKALVNRELDRLELLLKQIKTVEAARDALLAVGQTAKPAPAAMLLDIRGIGPEFAAILWSEGLFRHFENRRQIAAYAGLAPTPWQSGAVDREQGVSKAGNPRLRTTLIQLAWLWLRNQPRSALSVWFHERVSRNGGRLRKTTIVALARKLLVALWKYVTAGVVIEGVTMKVA

SEQ ID NO: 429430 - protein, 361 aa, unidentified
MQATMTCVGLDVHARSTHAAAIDVVSGELRRVRFGGDSEEVVDWLSGLSAPVRAVYEAGPTGFGLARRAIAAGVHVVVVAPSKTPRAKGDRVKTDRKDAELLARLLLAGQLRPVVIPPAWLEATRHLARTREQIRRDLARARHRVSKLLLVEGRVYPGVTTWNRAHHQWLASQRFEFEATELAFVDLLAAVDGLLARRQALDERLSRLATDERLWPTVSRLRAFRGVDTLTALALHLELGGNWQRFSSPRQLSSWLGLTPSLDQSGESKTQGSITKTGSSIARRLLVESAWHYSRNPRIGQALLGRQDGQPDHILQIAWKAQHRLHRVHKRLKARGKPANIATIAVARELAGFLWAAATAP

SEQ ID NO: 429431 - protein, 332 aa, unidentified
MSPRCYAGIDVSKGTLDVAMTLPDHAPWQTTNDPAGITALVDRIGRQTPTLVVLEATGGYETAVVAALALAGVPVAVVNPRRVRDFARACGLLAKTDALDARVLAQFAAQAGPTPRPLPDDVHADLRAFVTRRQQLVEIRTAEVNRLATARRALQPSVREHISWLNRRIKDTDREITTLIEASPLWRTRDQLLQSTPGVGPTTSARLLVSLPELGCLTARQIAALVGVAPFNRDSGRWHGPRTTWGGRAPVRGALYMATLVATRHNPVIRAFYQRLCAAGKPRKVALVAAMRKLLTILNAMLKQQQPWTLSPTRPSTALAPSLEGRAQGAWG

SEQ ID NO: 429432 - protein, 458 aa, unidentified
MSGRQVISDVLHERVHERVAAVDVAKGNGVVCLRQPDPSRAGQRQSVTWTVTATMPQVRALAAELAAAGVQKVTLESTSDYWRIWFYVLEEAGLDVQLVNASQARNLPGRPKTDKLDAIWLARLTELGMLRPSFVPPAEIRVLRGYARARTHLVQDRTRYFGRLEKLLEDALIKVSSVASKMTAISVQDMIQALIDGERDPLVLAGLARKRMKARHDQLAQALDGMFASHHAELARLLTDQIRFCDQRITRLDILIKEQLASIPAAWGIDPDGVTGPGAGQHADTSPRAGGTPQPPVLPAVVRLDEIPGVSAELAASIIAETGLDMTRFPTAAHLVSWAGLCPRAINSGPRTRHGKSHGNAYLRGCLGQAAIGASRTTTFPGERYNRIARRRGKAKAQVAVARSILVIIWHLLADPATRYTDLGPGHYHTRTDRTKKTRNHIRQLEALGYTVTLTPAA

SEQ ID NO: 429433 - protein, 401 aa, unidentified
MIKEGPSISVDVSKSGVTYQGWLSYGKPHGKARKADMTRTGLSAIKALADDLGAKDGVVVPVAYEDTGIYSKPLRMFLSESGMVEAVMSPLLSAKVRKADDKPIKTDMRDCASIAEAYYTKDKVRIAAPTVGQDALKQLSKSHQTRKAELRKTKERFRKNLDEVWPFWDSVFADPYRNGPWAMVSKYRHPYVLARKRKADVVALLEANGIHGKRADAMAEKAIAYAKDCVSGALESSPEVESLGRWMAGVESAAAEDAAVMGKMVAMLEGNRDFEHLKEIRGIGASLAAIIVAELGDAFRFGSAKAVVSYAGLNPMVCQSGKMTGRHLPITKKGNARLRWALVMAVRVMGLTDADNKVTRFRDHLINENRLSSEAAIVAASSKLLRIIYSMMKSGQPFEQD

SEQ ID NO: 429434 - protein, 334 aa, unidentified
MKNYKNYLGFDVSKNTLDYCLLIPERDTVKRGSVANEKKSLQTLFAAFSKEGLMMEDTLVVFEHTGIYSTILAVFLCGNGWNYAEVPAIEIKRSRGLSRGKSDTIDAQEIAKYAMRNEDKIQLSEVPEIIYQQLNLMNAEREKLIAAIKSFERTSEGEEFLGKEVYRSVKSTNRKTVTFLKSQLKTLELAISKLVRSDEDLNAKQELLRSIPGVGEIGTLYLLLTTKGFLRFRNARKYACYCGIAPFGRTSGTSIRGKSRVSPFADKKMKSILHLLSLTAIKYDHELKLYYERKQAEGKPKMLVLNNVKFKLVNRIFAVIERGTPYVKTQQFAA

SEQ ID NO: 429435 - protein, 334 aa, unidentified
MNYIAIDAHSSTCTMCVLDSKGCEKDSSQIETNGRLIKNYLRSFTGKKIVTFEESELSSWLFDIIRPEAEEVLVCNPVAIKDYTKKKTDKLDSRKLARLLRGGFLVPVYHDGSKREKFRHLISGYNALVEDAVRMKNRYKSIFRKSGNKQTGTKIYNDGSLLEDISDAGHKFVGHHLYTLLVEMEKSREAYVREIKTQLKGFEEIKYIKSIPGLGDIQTAKIIANVVDPRRFANKHKFYSYCGLVRHQRISDGTKYGSNKIFGNRTLKCVYKMAGYSAINGNNVLNQYHAYLIKNGVNERNAYNAVCRKIAAISLAVWKNKKYFNDEEILKLIK

SEQ ID NO: 429436 - protein, 312 aa, unidentified
MAMLSFCGIDVSKDRLDVVVLPEGWFFSVSNDTAGWAELVVRLRPLAVSAIGLEPSGGYERGIIRALLAARLSVRRINPNKLRQFARARGVLAKNDRLDARLIAEYVAIMPTRVVQRDAAVERLAEIVTMRRQLCDEHVAVENQAAHLEDAMLRRLSKRRQMRLEADIRLLDKRLAEMVAANVALAQRYELLTSMPGVGPVLAFTLIALLPELGKMSRKQIAALVGLAPYDFDSGKLKGHRSIYGGRMSVRNVLYMAALSASRYSPALKTFHKRLAAADKKSKVIIVAVMRKMITTLNAMLRDSAAWQPRSA

SEQ ID NO: 429437 - protein, 352 aa, unidentified
MQTPQLFIGIDVHKKSWSVSIRTDLFEHKTFNMPSEPDKLIGYVNQHFKDYPVECCYEASCCGFIPYRQLVKAGWQVKVLNPSDIPQSAKNKDQKNDKMDCRNLAKQLQSGHLTGIHVPDEQREQLRSLFRQKNNLTKVMRKLKSQIKAELLYYGIKFPSQFEKANWTREMTTWIQDLEWKYVTGHSSLQSKLRHLAFVRQEWLTINKDLRQYVTACFNDDYQLLMTIPGVGPVIAIGILSELGDIRRFSKFDQLSSYVGLIPSVYSTGETVQIRGLTYRTKSLVRSYLIESAWVSVRRDPTMQAYYRTHIGKQPNKIIIKVAHKLLRRMWHVIKTGDGYKTCLKDSTAEPG

SEQ ID NO: 429438 - protein, 368 aa, unidentified
MTKSLRFVGLDVHKDSITIAVAEQGREPAYVYAEIPNDWGALRRKLSRLAAKSQLRCCYEAGPCGYGLYRKMTDAKIACIVVAPSLIPVKSGNRVKTDRRDARRLAHFLRSGDLTEIFVPDEEAEAVRDLERAREDAKNAERVARHQLGKFLLRHGRRFEGNNWTQKHLDWVRRQKFDQQAQQRVLTDYLKTVEDAGQREKQLTEDLAELIQHTKLYPLIRALQAFRGIRLITAVTIAAELVDLKRFASPGQLMAFVGLVPSEHSSGETQHRGRITRTGNKHVRRLLVESSWSYHYQPNMSKAIRKRNEGIAPGVQRLAWKAQQRLHKRLYHLICKGKTPQKAITAVARELTGFVWAVAQEPALLAEE

SEQ ID NO: 429439 - protein, 441 aa, unidentified
MRTIGLDVHKHFAEVAVIADGQRQVRRGERVKATPTALREFAETLGPDDQVVLEATMNTWAIADLLRANAGRVVISNPMRTRAIADAKVKTDRVDAAVLAQLLAADFIPEVWTPDGLTRTLRRQVAHRRGLVQQQTRLRNRIQAVLHRNLLECPMTDTFGKGGRRWLEQVELPLDERGQVASTLRLLAAIEVELEKVDQALARAALDDERVRRLITIPGVGVTTAVAVAAVVGDARRFARPTQLVSYLGLDPRVRQSGDRPAYTGHISREGQAHARGLLVEAAHSAIRGPGPLRAFHQRVSARRGPQIAAVAVARKLAVLAWHLLTSGSDYRWAPPSLSAAKLRRVELKAGAPRRHRGPNEANSTGSREIRREQERRVLEQAEDAYRALVASRRVEKDAVAAKGERLVGLKPDARRRSHPRPPHFSEAIGPRPAVRLPQPS

SEQ ID NO: 429440 - protein, 424 aa, unidentified
MKVTYLTCCGVDVHKSFLVATIVKTTGGIEPSYQKKRFSTFNHSILEFKQWLLENDCHDVCMESTGKYWVPAFNLLEDEINVTIANPKWVKAVKGNKDDTKDSKWIGDLFRLGLVKGSYIPCKKIRILREYTRYRYKLVSCRSSEKNRYQNALTVCNVALDSVVSDIFGKSSTSIIDYLLEQADNSINHEEIASKLLRRLKSKEDAVIESIEGYQMTDSQKYRMRLVRAHMDYITAEINDVDSMIESMISSDPDYENAIQFLMTIPGVKRDSAITIISETGIDMSQFCSSKRLCCWAGLVPGSNESGGKKKSVRIARAGVYLKPALVQCAHAAVKSDKSPYYKKKYDSLVKRRGKKRAIIAIARMILTAIYQMMSTGEQWNPSDLYKIDMPVALVEKQKAKAIKQAKKLLQREGLLPPDEPLAS

SEQ ID NO: 429441 - protein, 428 aa, unidentified
MAVDIVHPRVAGIDVHKKVAWVAVRLPGEAPGERKVVIKRFKTFWRSLQKMAAWLAELGVTDAAMESTGVYWWPVYHALAGAGIEVCVCNAAHMRNVPGRKTDLKDCQWIAELHEHGLLRASFIPAAEVAALRQRTRYRKRLIEQRTAEGQRLAKVLEDAGIKIDSVASRLLGKSGREMIEALIAGERDPGRLADLARGVLRRKADDLQMACDGRFTGGHGQMCRLHLDAYDHLTAKIAELDALVAEAVAPFAAVIARLMTIPGIGQRTAEVIVAETGGDMTRFATSARLAAWAGLAPGDNESAGKRKYAAARPGNRYLRAAMTESAWATARTRTRPGARFRRLARRFGKGHEKKAAIAVAHTLICIAWAVMARGQDYADAGEDYYDQRDQRNREHLIRHHQQALARLGCQVTLVPPGDGSPPPGQAA

SEQ ID NO: 429442 - protein, 366 aa, unidentified
MQKSSTMRVTGKRIFNGRQLTIGLDLGDRWLFYCVVDEAGEIILEQKLQTTPEAMRRAFGKMPRSRIALETGAHSPWVSRLLTQLGHEVIVAHARNVRLIGESRRKDDRVDARTLARLARIDPQLLSPVQHRSAKAQIHLTVIRARAGLVSARTALVNTARGLAKSYGERLRKCGTQQVRRQMATGLSAELREALEPLLREVESLNGRIQEYDRRIAQLTKQDYPEVALLQQVKGVGELIALTYILTIEDPHRFRKSRDVGCFLGLRPGRRNSGQSEPQMHISKEGDRYLRTLLVQGAHYILGPFGEASDLRRWGLKLAERGGKNAKKRAIIAVARKLAVLLHRLWVSGEVYEPLRNSQKAVCAAA

SEQ ID NO: 429443 - protein, 377 aa, unidentified
MSEITRLMLLIVRVGVDLAKSVIQVHAVDAAGRRVVARTLKRDQFLAWCGQLPANTVLAMEACSSAHHWARKLRAMGVDARLIAANFVTPYRMEGKSGKNDANDAAAICEAASRPSMRFVPIKSCEQQGVMSLHRVREGFKEERTGCINRIRGVLAEHGLVFGKSPKALRAVLADVLEDADNELSGRARLVLQQAFEHWRELDEHIVWCDRQVGQHVRSSPQAQQAIKITGIGELGASALVGGVGEFKQFNSAKQFGAFVGLVPSQNSSGGKASLGRITKRGDDYLRTLLIQGAKSAVMSADKRDDPTSRWLVQLTARVGWQKACVAMANKNARILWAVMTRDAEFDPKHVSVKPQAKVAPAKRLAAPPPAPAQCPA

SEQ ID NO: 429444 - protein, 314 aa, unidentified
MNHKHENTDLIHYVAIDISKATLQIQDDKGSFAVTNDAIGLKKVLVHLNSHINPLVVFEATGGYERLLLESLRKAEMPMAMVNPARVRDFARSEGIRAKTDPIDAKMILAFAKSKKLKPMATPSQACIKLAALLDRRAHLTEQLAREKNRLQNSEAFIHRSIKRMVRVLEKELAAIEKEIDALVDSDPGLKARAQIIESVKGVGHVTAWTLLAYLGEMEELSRNGLVAMAGVAPFNRDSGKFSGKRCIQGGRAKVRKCLYMAAHTAARCNPVVAAYVKGLRDRGKPYKCAIVAAMRKILIHIQSLIKKAQLSPC

SEQ ID NO: 429445 - protein, 334 aa, unidentified
MEQITTVGIDLAKRVFALHGVDAGGRVVLRSIVRREQLLEAMAKLPPCVVGMEAGSGAHDWARQLQRLGHTPKLMAAKFVSPYRRKGKNDGNDAEAICEAVSRPGMRFVPIKSLEQQALLSLHRVRQGFIVERTATINRLRGLLAEFGVVLPVRAVVVRREACKAAESLPALGRRAIEDLLAHLRTLDERIAAYDRELEQQARQCEPARRLMKIRGIGALSALAIVATVGNARDFRSGRQFAAWLGLTPRQHSSGGKTRLGHITKRGDAYLRCLLVQGARSVLHTASRHADGMSRWAQTLEARRGYHRTLVAIASKNARIAWALLSRNEVLRPA

SEQ ID NO: 429446 - protein, 412 aa, unidentified
MKDLLEISCGLDVHKEKIVACILTGPLGKPTRSEIREFSTLIPDMIALRNWIVSKNCHHVAMESTGIYWMPIYEILEDAFSGDITLLVVNARHMKNVPGKKTDMRNSEWISTLLRAGLLNGSFIPEKRIREFRDLNRYRKSVIRDITSQKNRIEKFLQSSGFRLSSFISDIFGASGRNIILHLIEHGQIDKTALDSCLKTKTRNRIDEILMSVNGTLSEHQKAFLRILMTHYDSLKKHLAEIETSLEEDMAPFALQVEQLNSIYGISTTASCAIIAEIGIDMKPFKTAEHICSWAGLCPGNNESAGKRKSTSVTKGNPYIKSMLCEIAWVIAGKRNTYLSAWYWRIKQKKGAKKAIVALARKLLVIIYTMLKQGTVFDESCFETRRKHCEQKQLSRYIRELEKHGYHVEAQS

SEQ ID NO: 429447 - protein, 350 aa, unidentified
MRFYTGQHRYYCGIDLHAHTMAVCVLDATGGIVLERNLATTPEAFLEAIAPYREGLVVACECIFTWYWLADLCAKEGIAFVLGHALYMKAIHGGKAKNDRIDAHKIAVLLRGGMLPQAYVYPPGMRETRDLLRRRLHLVRKRGQLLAHLQNLTHTYNRGAFEKRIAYPSNREGVVAHFVGEPMVQANAALDLSLLDHYDKLLVDLELRLVRQAKKEAQNGFHLLLSIPGIGKVLAMTIVYELHDVKRFERVQQFASYARLVKCAKESAGKRKGTSGAKMGNVHLKWAFSEAAVLFVRHSAEAKALLARLTQRHGKGKALSILAHKIGRAAYYVLAREKPFDAAKFFAHAS

SEQ ID NO: 429448 - protein, 348 aa, unidentified
MRYYAGLDVSLAETSVCVVNEDGRIVREAKVASEPKALAIRLGGLGLPLARVGLETGALAGWLCEETSELGVPNVVCMDARHARAALVSMTHKTDRNDARGLAQMLRTGWFRQVHVKARRTMELRTLLTSRKTLVLKIGDVENQIGGSLHLFGIKLGTAKRRTFSQRVRELTADLPRVAAILDVLLQAHAAMLLSLDRLNRMVLEIACEHAVCRRLMTVPGVGAVVKLTFIAAIEDPARFAKSRSVGAILGMVPRKHRSGEVDRSGRITKTGDGEARAALFEAAHVMLHRDKKWSGLKAWATKVAQRQGNKRATVALARKMAVVMHRMWVDGTTFRFSAVEAPVATAA

SEQ ID NO: 429449 - protein, 411 aa, unidentified
MQTMIARVCGLDVHKAQLTACVRLLVNGVVSEVIQTFGTTTSDLLALRDWLAAHGVTHVAMESTGVYWKCVYYMLEDEFELLLVNATHIKHVPGRKTDTLDAQWIAQLLACGLLRGSLVPPKPIRELRDLTRYRKALIYERGRAVNRLHKVLEDAGVKLACVATDVMGVSGRAMMRELIEGHADANALAELAKGKLRKKLPELRKALVGRFRTHHAFMLERMLAHIDVLEDDIAALSARIEEQISPFAAKVQLLCTIPGVQQRTAEVIIAETGGDMSAFPSAKHLASWAGVCPGQRESAGKRKSSKTRKGSPWLRATLIESARAAARTNETYLSERYRQLARRRGDKKAIIAIAHEILTASYHMLSTGELYRETGPAPLREHAAERARNRAIKQLERLGHKVILEPLPEAA

SEQ ID NO: 429450 - protein, 390 aa, unidentified
MEVRLENTASATTNNDPAHCFVAIELSKSSWVLGFQTPLAKQTSRYQVKACDAKALLELIERVRSRMARELGRPVEVMSCYEAGYDGFWLHRVLEAHGIHNHVLDPASLQVNRRARRPKTDRIDADRMVRALIRHLRGEPEACSVIRVPSPEQEDARRLHRERDRLIAERVAHVNRVKGLCATQGIYDYEPLRSDRLKRLEKLRTGDGRALAPRLKAEIVREIKRLEIVLEMISTVEAERDAILTEKKSTHLNADKIKMLAKLKAIGAEFSTTLVGEVFYREFANRRQLGSYVGLASSPFCSGSLDRDQGISKAGNPKARVMMIELAWTWLRYQPESALSRWFRERVGNLKGCPRRIAIVAMARKLLVALWRYLQTGVVPTGAELKAQSN

SEQ ID NO: 429451 - protein, 408 aa, unidentified
MEVLHPKCAGLDVHKETVVACVRIALGGKVATEVRTFETTTKDLLRLSDWLQEHVVTHVAMEATGVYWKPVWHVLEPNFELVLANAAHVKNVPGRKTDVNDAMWIADLLAHGLVRASFVPEAETQELRGLMRTRKQLVREKSSHIQRVQKTLEEANVKLSSAISNVVGASGRAMLDALVAGETDPDRLAALAHPRLLVGKDKLREALRGRVTDHHRFLLRLHLQQIDVLDAAISSIDKEVGSRLEPFRDAVRHLKTIPGVSDLAAQIIVSEIGLDMSRFATAGHLISWAGLCPRNDESAGKRRSTRLRKGAPWLKTTLVQCAWAATRKTDSYLRTQFHRLRARRGAKKAIVAVAASILTAVFHMLRDRVDYRDLGPTHFDRINHAQQTRRLVQRLAQLGYEVDLRPAA

SEQ ID NO: 429452 - protein, 310 aa, unidentified
MTSPLVYLGLDVAKATLAGHLAGERFSLSNQPAGHAALCRRITAFDQPVQVICEATGGYEQPVVAALRCAGLTVSVLHPTRARHLARGLGYLAKNDPLDAEVLAKIGSLLAPAPTPAPAEGVSELAALVGRRDQLAELIRREKQHRETTSGKQLLRDILQSLTALQKRLAKCESLIAHHLQTHPALAQKAQRLQEAPGVGFVGAVTLLAELPELGTGSQARMTSLAGLAPRDHDSGVYRGPRRVYGGRPKVRRILYLCALSAVRHHPSLKTFYTRLRQAGKAPKLALIAAARKLLTYLHSALKNPQFKLA

SEQ ID NO: 429453 - protein, 354 aa, unidentified
MITIGVDYHKRTSSYKVIDAEGKSLKACKLENGRENIRQFIQSIPGPKRLGMEATRSWGLYYDCVSDLVDEFHLGHPKKMRMITESETKNDKKDAELIARLLHSGFLPEAHVALSDTRQLRSLLRFRYFLVKSRAALRNQIQTLIDRNIWVSDRPKNFKSPFCLRGLKWLKSIELPPRERFILDGCLKTQEEKTLEIMKFEAYIQSETIDLEGLRHLRTVPGFRLSKVNSLIVLLETDNIQRFKHARNFAHYAGLIPQEYSSGDKHRTGRLVQSANRHLRTALIESTLAAIRADKGLKMYYQQVKIRAGSGPAIIATARKLSLIIYHVLKEQRAYRPYEVPPAADCVPYAVTKN

SEQ ID NO: 429454 - protein, 389 aa, unidentified
MEARTVNNLPPAGTHDDAICCVLAIELSKKSWIVAVNTPLLDKISRHTLKPGDGKELLDLCERIRTRVARETKKRVEMVSCYEAGYDGFWLHRLLEAHDVRNHVIDPASLQVDRRARRAKTDRVDAERLLRSLMAYLRGEPKVWSVVRVPSVAEEDDRRLHRERGRLINERIQHVNRIKGLLAIHGIYDYQPLHRDWIRRLGQLHTADGRTLPPRLEAEILRELQRLELVIGMIKTIEAERDAIASANTETERRGAKKVQHLAKIKSIGPEFATTLVGEVFYRSFDNRKQLASYVGLTPAHFQSGAMCRDQGISKAGNAKARTVMIELAWLWLRHQPDSPLSVWFRDRVGKLKGRIRRITIVAVARKLLIALWRYLETGLVPEGAALKV

SEQ ID NO: 429455 - protein, 338 aa, unidentified
MKLYGGIDLHSNNHVVVLSDEEDRIVYRKRLPNELETVLRELSPYRDRIVGLVVESTYNWYWLVDGLMDAGYALHLANTAAIKQYEGLKYTDDDSDAAWLAKLLRLKLLPEGYIYPKQDRAVRDLLRKRTQLVHQKTSNILSIQNLVARNTGMGISANNIKKLTDEAVDGLLTDCDLALAVKANVSVLTCLRQQIKQIERVVQDRVKAKPPFTYLQTTDGIGLILSLTIMLETGDVHRFDGVGNFASYCRCVDSKKLSNGKRKGEGNRKCGNKYLAWAFVEAANFSIRRNDRIMRFYQRKLARTNRIVAIKAVAHKLARACYYIMRDEVAFDINKAFA

SEQ ID NO: 429456 - protein, 409 aa, unidentified
MRYYLGVDWADQTHAVWVVDESGAKITARAVAHTAEGLGEWGRALDEWRAQGIDLWAAIERPDGRVVDFLLDHGVVVYPVNPKALDRARDRFRQSSAKSDPFDARVLADFLRTDHAHLRALLPSSEAAQELKLLTEDCQRHIRQQTRLVNQLTATLKAYYPRALEVAEVTSALAREFLPAYPTPAAVTALTERQWQRWARAHGLSAARAGDLWAVLRQPHLPVPAHVVRAKARLMQTLMEQLMPVVSAVAQYRKAIDDLFASMPAARWARTLPIGKHGITAPTLWARLGDAPGRWESFRHLQAHAGAVPVTKRSGKQQVVHFRFACDKALRHVVDQVAFLSLLSSAWARAYYDQQRARGHSHRQALRALGAKWLKIIFVMWQRQVPYDEQYHLATMTRQQLQQGQKQFA

SEQ ID NO: 429457 - protein, 339 aa, unidentified
MKFKRISVDTSKSVFTLHGIDEQDERTLRRDLRRSQFEAFFAKLAPTEVAMEACGGSHHWARRLASFGHQIRLIPPQYVKPFVKRGKNDRNDAEAISEAASRPAMRTVPVKSAEQQSQMMVPRVRELLVRPRTQQVNALRGHAAEFGIVAPKGIARVDTLLAMVASNPQLPPEAREMLQFLGRQIARQDEELAAINAKLKKLHKANAVSQLLEAVPGIGALSAITLTLAVDPAQFKSGRHLAAWLGLTPKERSTGGKHQTGGISRAGNERLRQLLVVGAMAVVRHASQGSKSASPWLLKLLERRPSRKLVAVALANKMARIVWAMMTSGEEYRRQPINP

SEQ ID NO: 429458 - protein, 358 aa, unidentified
MDRELYIGVDVSKKTLDLAYYDGETIDWKNAHIKVSNDDAGFKKIGSWVAKVGKDFDTFLFCMEYTGLYNQNFRLWLESKEYIYGMVEPRKMHRFEPDLDDDQRSLDRIKTDELDAFRIAIYCEQNHKKILRNPSKLPSPVYFKLKRLLVERKQNTKQSTLYKQQLHDICAYDTDLSVERKKLLLKNMKENLKAIDKEIDSYMHEDASISKNYDLLTSIPGIGRIIALETIVLTENFTAISNPRKYACYIGIAPFKKESGTSVRKRTAVSKKGFSEAKSDLSIAALSAITYNPAIRGYWIRKKKEKCGGIVLNAIKFKLVLRMFAVIKRGTPYVETDAYKNREYSKSELKLFPDQNYH

SEQ ID NO: 429459 - protein, 363 aa, unidentified
MNATAALPVVGVDLAKSVFQLAVADGAWRVVEQQRLTRLQFERWFINRAVGLVVMEACGSAHHWARWLNGLGIEVRLLPAAYIRAYVKRNKTDAADACALLEAARCAEIVPVRIKSVEQQALQAMHRTRSLWMATRTSRINALRGFCREFGIAIAQGSRLGVEQIGRVLADPHSTVPLLLRRSMSLLVEEIRLLEVRIAQLERELTALARQSPACTTLLSIPGVGLLTATAMVAATSGEVGHFHDARHFASWFGLTPKEHSSGGTRHLGRISKRGDRYLRMLLTHGARSVLRAASTAVRAGKTVDGLRQWALAVQSRSNHNKATCALANKLARICYATLRDGEPYGVTRLNKKVARTAFALPA

SEQ ID NO: 429460 - protein, 402 aa, unidentified
MTSCSYFAGIDWASQSHSVCVLDAAGRIELRLDLPHDNEGIERLIRQLSSFAGLVIAIERPSGLLVDALVEAGLQVVPIHPNVLKASRARYRGAGKSDPGDAYMLADILRTDGHRFRTLEAQSDDIRALRALVRSRDDLVAERIALANQLRSLLESFWPGAAEIFADIDSPIALAFVARYPTPQSAAHLAEKRLASFLAQHSYSGRRPVGFLLERLRAAAVGRNGELEAEAKGELVRSLASILERLVAELAKLSARIEHTVANLADGQIIMSFPRSGRICAAQILAELGSVRERFPTEAQLAAEAGVAPVTYESGKHRSVVFRFACNHRLRRALTCLADQTRHAHPWAADVYHRARSRGCDHPHAIRILARAWVRVVWRAWFTRTPYQPHLHRSAAAFAATG

SEQ ID NO: 429461 - protein, 466 aa, unidentified
MPKDRQQRSKRRKTMGKVDATEGLPPLNVNAAGIDVGSAEHYVAVPTDRDAEPVQSFGSFTADLHRMARWLKNCRIQTVVMQATGVYWTALYDVLESYGLEVNVAHAQHTKTLPGRKTDVQECQWLQKLHTFGLLNKAFRPAEEIRVLRSYLRQRENLVAAAAMCVQHIQKALTEMNIQLTNVISDISGTTGMAILRDIVRGERDHEKLARHKQARIRASHQEIVRSLEGTWREELLFVVGQSLELYDTYQEKIQLCDQRIDEHLHRMEAKVDPASDPIPEPSRRGKGSSRPRQPHFDLRGHLYRITGVDLTQIDSIDVQIAQTVISEVGLDMSRWKTEKHFASWLGLCPDNRTSGGKVLKRGTRRVVNRAATALRLAAWSLIRSRSALGAKFRRLRSRLGAPKAITAMAHTLARLVYRMLKFGHHYVDQGIEYYEAKYRLQQLRWTAKQAAALNMRLVPLPDVGS

SEQ ID NO: 429462 - protein, 322 aa, unidentified
MAMLSFAGIDVSKDRLDVMVLPEEQCSSVSNDPTGWAKLVEQLRGSSIAAIGLEASGGYERGVMRSLLAAGMSVRQVNPFKLRQFAKASGVLAKNDPLDARMIASFVAIMPTRPAQPRAPALERLVEMLAVRRQLSAEKVAAENASRLLENAMLQRLSRRRIARLAADIDMLDERLVEIVVADAALAHRYRLLTSMPGVGPVLACTLIALLPELGRMSRKQVAALVGVAPYAFESGKLKGKRCVWGGRAPIRHVLFMAAMSASNWNPLLKRFHDRLAATGKLPKVVIVAVMRKMITTLNAMVRDDVVWADRHRGRHTVPTTR

SEQ ID NO: 429463 - protein, 336 aa, unidentified
MNYIGMDIHKQFTVAVVKDKEGNEIENGKFDNSKENFKKFLKVYRPEETKIVMESTSVWEPIYDMIEDMKYSIKLANPVKTRAIAEARIKTDKVDASTLADLNRANLVSESYIPTREVRMLRDIIRARKSLVQGKVKIKNKIQSILTKTGLRLPYKTLCKSSMDWIVEEIETKHFNMKSVTVSYINMLEHYNLEIKKIDEKLSEIAMKDNRVQLLKTIPGIGNTIALTIIAEVGDINRFNSSQKLCSYAGLVPSIKQSANTLKFGRLIKQSNKDLKTCFIEASWVLVKTKEANRFKWFYGNLSKKKGKQKAICAVARKLCSVVYAMLKKNQEFMLL

SEQ ID NO: 429464 - protein, 365 aa, unidentified
MKKGSTAAAKQSRNISQQTIGLDLGDRNSWYCMVNEAGQIQVEHRVRTTEKALREVFGEMPRSRIALETGTHSPWISRLLSQLGHEVIVANARNVRLIGESRKKDDRLDAQTLARLARIDPQLLCPVKHRSAQAQADLMMIRARAGLVRTRTALVNTARGLAKSYGERLHGCNVRNMNPEKAEGLSPELQRALEPLLSAIEALSERICEYNERIEALAQQCYPQVALLKQIKGVGTLIALTFLLTLEDPHRFRKSRDVGCYLGLQPGRRNSGEREPQLHISKEGDPYLRTLLVQGAQHILGPFGVDCDLRRWGLKLAERGGKNGKKRAIVATARKLAVLLHHLWVSGEVYEPLHNSSEMTVAAAA

SEQ ID NO: 429465 - protein, 413 aa, unidentified
MDVIAERCAGLDVHRDTVVATVRVPGEKGGRRQQTQTFSTSLGGLLELQDWLLGAGVTLVGMESTGVYWKSIFYVLEDSMQCWLLNAEHLRNVPGKKTDVADSAWIAQMVEHGLIRPSFVPPKPIRELRDLTRHRRALVEERTRVVERLEKVLQDAGVKLSSVSSTILNKSGRAILEALLDGVDDPHALAELARGRLRSKIPQLREALAGRFRVDHHGILVTQMLGHVDFVDTCIAEMDTRIAAVLAPHQELVERVKTIPGVKQRSAEALIAECGMDMASFPSAGHLASWAGICPGNHASAGKRKSGRTRKGSKWLRTALTESAQGAARARNTYLSAHFSQIMGRRGRPKAVGAIRHDILVAYYFIVRDGVAFRDLGADWAAKRFSPEHRQRRLVKQLEALGLKVTVEPMEAA

SEQ ID NO: 429466 - protein, 344 aa, unidentified
MKYFTGIDVSLRSVSICVVDEAGVVQYENKVAAEVEVIVAALRRYSTEIRQVGLESGTLAQYLTYGLQKAGYEVICLEARQTAATLAAMRNKTDRNDARGLAQILRTGWYRTVHVKSLASHQVRALLTSRKAILAKCVDLENELRGLLKIFGVRLASHVAHGRFDETVRAAVSTTPELGMSLLPLLDARTVLYKSYLKLDNAVKGVVRHDPVCRRLMTAPGVGPVTSLTFKAGVDDVNRFRSSRTVAAHFGLTPRRYQSGETDNPGRISKAGDVEVRQALYTAAHALLTRSYAWSTLKARGLRLAKVRGLRRAVIAVARKLAVILHRMWADGTDFRASRRQEAV

SEQ ID NO: 429467 - protein, 312 aa, unidentified
MPTNPPNYVAIDIAKDSLQIQTDHAAWSVPHTDTGHRQLLERLQPLGPVQVVCEASGGYEQPLLRFLHQQGVPVSLLNPARVRAFARSEGQRAKTDPLDAAMLLRFAHEKRPVPTPPPAPPQAALAAWLDRRAQLSEQLAREKNRLQKSPAILHPGIRAMIAFVEDQLAAVDGQLHRVVQADPTLRDRAAVLQSVTGIGAVTTWSLLAYLSEIAATDWHRNQLVALAGLAPWNRDSGKWKGKRSISGGRGKVRRSLYMAAQSAAQHNPVIREYVQRLLARGKPYKCAIVAAMRKLLIHLQSLLKHHQNALAS

SEQ ID NO: 429468 - protein, 452 aa, unidentified
MSNKTKVDWKALDIVHPHAAGIDIGGSEHWVAIAPERDEQPVRSFQCFTADLEQMADWLVDRGVRSVAMQSTGVYWIPVFEILPQHGLEVFLVNARHTKNLPGRKSDIAECQWLLKLHTFGLLNNRFQPSDQIRTARTLWRHRGGLVAQASSAIQRMQKAWTEMNIQLANVLSDLSGVSGRRILQAILKGERDPKVLATLADPNVKASRTVIAKSLQGNWRDELLFVLQQEVAMCRMYQERMAACDQKLQGQLQAIESKVDVAAQPLGPRPKGKRARGNAPQFDLRTELYRITGVDWTLVDGIDVPVAQSVIAEVGVDLSAFPSEKHFANWLGLCPTNQTSGGKVLNRRTPKVVNRAKIALRQAASTLIRSQSYLGAQYRRLRTRLGAPKAITAMARKLACLFYRLLTHGKPYTDKGAEFYEAKYREQQIRFVLHRARQLGLEVIQPTKKLA

SEQ ID NO: 429469 - protein, 340 aa, unidentified
MTVTTIGLDLAKSVFQVHGVDESGATVLVKRLHRKQMLPFFSKLPPCLIGVEACGTAHYWARTLATMGHEVRLIPPSYVKPYVKRGKSDALDAEAICEAVQRPTMRFVPVKTVDQQAILMAHRARSLLVRQRTMAANALRAHLAEFGYVTNPGIAHLAKLIDQVLADKNALPSYACTALEILIRQIMSLTNDVVALDQQIATWHAESEASRRLAAIPGIGVITATAIAATVSDPKQFSSGRQFAAWLGLTPQQHSTGGKTKLGGISKQGDRYLRRLLVIGATAVMRHTKDKTTPMANWIRKLLEKKPFRVVSVALANKLARIAWVVLTRKEAYRPYALTA

SEQ ID NO: 429470 - protein, 343 aa, unidentified
MTNITTIGLDLAKSVFQVHVADRDGRPVLRRKLRRSQVLGFFAKLPPCVIGIEACASAHYWARELQELGHSVRLIPPQYVKPFVKTNKNDASDAEAICEALSRPTMRYAAVKSAEQQSVLTLHRARELLVRQRTMLINAIRGHCAEFGIVVAQGASKVTALIGIIEDHQDDRLPALVRQALGSLIRQYEMVQEQILGLERQLTSWHRATEASRRLATIPGVGVITATALVATIGDASQFRSGRQLAAWLGLVPKQHSSAGKDRLGRISKRGDGYLRKLLVHGARTVLLWSRRKKEERSRWQEALLARRPTNVVLVAMANKTARIVWALLSRREVFCAKAHVTT

SEQ ID NO: 429471 - protein, 412 aa, unidentified
MKRIRERVAGLDVHRDTVVACCQVKQPDQSIEVIKQSFATTANGLGELATWLSDAGVDTVAMEATGVYWKPVYYCLEGLFDELWLCNAQHVKNVPGRKTDLSDAEWLADVAAHGMVRPSFVPPPEIRELREITRYRKTQVEARAKEIQRLEKTLQDAGIKLSSVASKVWSKSSREMIEAMINGERDPKVLAQMAKSRMRAKIPQLEEAFSGHFGAHHALVCRQVIEHIDFLDRSIATLTSDVTARLCPFESAVTILCSIPGVSRTTAEVMIAEMGVDMTRFPTSGHLCAWAGVAPASHESAGKRQPAGTRKGSTWLQRALVEAARGASRTKGTYLSAQYSRLARRRGSNKATIAVAHSILDVSWHLLTTGVFYDDPGARFFELRHDPAVEAKRLQRRIEELGFEVSIAPAAA

SEQ ID NO: 429472 - protein, 383 aa, unidentified
MLPTQEKDFTRGEEILAVSLELSKGSWKVALHEGRRDKPAIHAVSSEAAGARLGQVVGVIEATRKKWGLAAGCRVVVSYEAGQDGFWIHRALTKLGYEVLIVDPASIPVERRARRAKTDRLDVIKLVTSLRAWLRGERDRMHVIRVPEIAAEAQRHLVRDRGELQKEGQQHRDRIRKLLRTVGCWVEVERDFAERLAHGEVRGYDGAALPPELHQRLTRECQRLALAQQQFAELEAALVRQLPQPVRERITRLTRLKGVGEVGAMRLVLELFWRNFSNRRQLGACVGLVPQPYDSGESRVDQGISKQGNRRVRALLIEMAWLWLRHQPHSALSRWFAQRTQGTGANKRHRRISIVAVARRLVIALWRYLKDGVIPEGAQIKAA

SEQ ID NO: 429473 - protein, 377 aa, unidentified
MKAFPLHAKLEGSYPLKKSKKEKRMYPFYLGIDLHLKRSYVVLMDDSGKIIDERRLRNAEVEQYLIEVVPQNTHAVLEATRNWPFMYDLLSEHVARVDLAHPKQLKAIATAVVKDDPIDSRTLAHLARLDYLPIAYAAPKQVRDLRTYLRHRDWLVRQRTQCKNRVHAVLAGYNLVSPKSDLFGVEGRAFLAEAAVSLQPGARRMLSDHLELIDQLTSKIKALEAQRTLTPEQCRQVRLLKTIPGVGDLTASIIVAEIGAIERFNSPKALCNWAGLTPRVRKSDTRVRHGRISKQGSAYLRAAMTRAASVASKHSQRWRQVHDTLVPRCGKTAAKVAVARRLLTVVYYMLIRNQVYQEDYSPQPAGGTGEPVVDMVL

SEQ ID NO: 429474 - protein, 468 aa, unidentified
MSQRAISKRAKSAKRKPGKIRAQGVAALPVFRPNTAGIDIGAMEIFVAVSPDLDAEPVRSFGTFTRDLEAITEWLEACGVTSVAMESTGVYWIPLYQILVDHKIEVCLVNARHFHNVPGRKTDVLDCQWLQYLHSVGLLRASFRPEQVVCAVRTLLRHRQNLVQMAAEHTLHMQKSMEQMNVKLSHVISDITGVTGMRIIDAILAGERDPRELAKLRHSCIQADEETIIRSLEGDYRAEHLITLEQSVAGYRFYQKQITELDQKIEGFMEAIPAKIDLREHPLPASTKKHRRQHNAPAYDLRSHCYRALGVDLTQVPGFDGPTVQVMLTEVGPDLSKFPSASSFANWLTLCPNNVITGGKILSSKTRKGKSRAALALRQAAQTVERSDNYLGQFFRRMRARLGRAEAITAVAHKLARIFYAMVRKGQAYDESLLTKADTRQRERQEAKLRRQAREFGFQLVAMEVAKA

SEQ ID NO: 429475 - protein, 355 aa, unidentified
MNFTAIDYHKRYSFASALNKQGQRVGEARIVGNSPAGFAQFLDSLGGPTKVVLEACWNWGWLYDQLQGMPNVTEVVLAHPYKTRLIAEAQVKTDKLDARTLAQLLRADLIARAHVPSATARQRKNVLRQRLFWVKLRTAVRNRVHTLLARQRELTVPDRADLFGKKGQQWLAQVALPDPDGWLLRQDRELLALLDAHIREVERHTEAEIASDANLQHLRSIPGIGSVLAAVIGTEIDDLERFARPAKFTAYAGLMPTTHASGGHCYHGLLVAGCNQWLRWALVEAAWVAVGHDAYFGALYRHHRGRGKSASIAVTIVARRLAQIVWHVLHEARDYEARNWQISSDRSAVILAGRS

SEQ ID NO: 429476 - protein, 409 aa, unidentified
MEVVHERCCGLDVHKETVVACVVVPGTGKQPHKEIRTFNTMTADLLELADWLTAQGVTHVALESTGVYWKAPWNILESSFTLLLVNAQHIKQVPGRKTDVRDCEWIADLLRHGLLRASFVPDLPQRELRELTRYRTTLIRERAAERNRIQKTLEGAGIKLGSVASDVLGSSGRLMIEALVDGSTDAATMADLAKGNLRAKLPQLERALTGQVRAHQRFLIAHQLAHLDGLDELIEQLSQEIAERLRPFQEKIERLDAISGVGQRTVEVFLAEIGTDVARFPSAAHLASWVGICPGNNESAGKRKSGKTGKGDVWLRTALTEAAQAASHTKDTYLASQYQHLAARRGKKKAIVAVAHSILRIVWHLLDHDCEYVDLGSRFLEERDRQQIERRLVRRLEGFGYTVKLEPAA

SEQ ID NO: 429477 - protein, 413 aa, unidentified
MEILHARCAALDVSKKDAKVCVRTPGRRAGTYTNTVTTWGATTNQVLALRAYLVEQQVTLVVLEATGVYWKPFYFLLEDGLEVMLVNARQARNMPGRKTDVSDAQWLAELGAHGLVRASFVPPAPVRALRDLTRLRTTLTAERSREVQRLEKLLEDAGIKLSSVATDIMGVSGRAMLAALIAGVTDPVMMAELAKGRMRPKLPALTEALTGRFTDHHAFLARLHLTQIDQLTAAITEITDRIEVVIEPFRDQLTLLVTIPGVSRLVADVIIAETGGDMRTFATAGHLASWAGTTPGHNESAGRSKSTRTRPGNPYLKQALGIAAMSAARTNGSYLQAFFKRIAARRGYLKALVATEHSILVAVWHMLTNNAAYADLGGGYFTRLDPQKAIRQALRKLEQLGYTAVLSPIENPV

SEQ ID NO: 429478 - protein, 348 aa, unidentified
MEVTTVGIDLAKNVFGLHGCDASGKPVLRKQLSRRQLLSFVANLPRCVVAMEACASSHYWAREVEKLGHQVRLIAPRFVRPYVKANKNDASDAEAICEAASRRSMRFVAIKSAAQQDVQAVHRVRQQLVKARTGLANQVRGLLAEHGIVIGRGFAQLRRALPVILEDRDNGLSAVMRELLGEIGERLRFIDDRLRKYDSTIQRLFRHDERCQRVAAVEGVGPVTATALVAAVGNATDFKSGRELAAYLGLVPRHRASGGRTVLLGISKRGDRYLRTLLIHGARSVLHRIERHRGARAIWAARLKLRRGANVAAVALANKNARVLWALLSRGQNYQPTPFFARVPQAGG

SEQ ID NO: 429479 - protein, 438 aa, unidentified
MNSIVKKEQFCQVKQSIKKNRKHLIVGIDVGKKSSTACFYNIEKEILLKKYLVRHDIESFQRFVCKIEQIKEIDNFQDVIIGVEPTANYHKPISEYLRKKDYFMVYVSSVAAKSNRKTIDGGRWGKNDPRDAYNVVDLMCQGKILYYRDENTQSTDIRKYLLLRQRLTKTKSSLKTRIRNNIWACYFPELCSLFKNAECPDVLTLLEHGLSSQTIKNMDYSVFVNLFSDSIKSNNKQHSRLSQVWQNAKTSIGLPMPSASILEGKLIARDIKKTQKDIAEIDKILSHYCMQNDVYYNLFSIPGFGVFTTAVFKSVIADINTFSHDKQLVKLAGLDIETMTSGKFAGKEKISKKGSSLLRFAVCHATNVAISKNKVIGQMFQKKLKERGNSKEAKAKLKIKFAEKILRAAFVIMKHNVPFNINIFSVPVDDPVLNSVKA

SEQ ID NO: 429480 - protein, 365 aa, unidentified
MWEAPVKVQRTSVGLDVHARSVVACGLDGDTGEVFQRRLCPDHQEVLEWIKGLPAPVAVTYEAGPTGFGLARFLLAAGIMCLVAAPSKLQRPAGDRVKTDARDAAHLARLLHLGQIVEVTLPSVAQEAARDLVRAREDCRGDLMGARHRLSKLLLRQGIVYHGGQAWTGKHELWLRAQRFDNPALTLAYEAALDAMVACVHRRDRLDEAITTMAVDSEFTPVVARLGCLRGISTLTAFGLAVEIGDWHRLTGRSIGAYLGLVPCEYTSGTTRVQGGVTKTGNGHARRLLVEAAWHHRAPYRPSRDLRRRWDAATPSARARAHAANHRLHTRWAGFDQRKKRAVVANAAIARELAGWCWSLAVMPD

SEQ ID NO: 429481 - protein, 359 aa, unidentified
MTHTSTLFVGLDVHKETIAVAYVAEEREAEVIALGSMGTRQGDIDKLMRKLQSKGKPLHFVYEAGPCGYWLYRYLTTKNLKCWVVAPSQIPKQAGDRVKTDRRDAMQLARLLRSGDLTPIYVPGVEDEAIRDLVRARADALKDGKAAKVRLKAFLLRQDIRYERRATWGPAHLRWLAKVVCPTPAQQIVFQEYVRAVSEHTERLQRLEAELQTLVQSWRWLPVVEAIQALRGVQFIAAVTLIAELGDLTRFANPRQLMSYLGLTPSEHTTGERRRQGSLTKTGNSHARRALIEGAWAYRYPAKVSRHLQLRLEKVPQMIQDISWKAQVRLCKRYRRLSARGKNANQVVVAIAREVAAAH

SEQ ID NO: 429482 - protein, 346 aa, unidentified
MEYYVGLDVSLKLTAICIIDRTGKIEREGVVASDPEAIATFIKLHAPHVVRIGLETGATSTWLWTELNKMGLPVICIDARHAKAALKMQINKSDRNDAVGIARIMQCGWYKEVRVKDLDSHATKALLVSRALLVKIKRDIENQIRGLLKNLGLVIGRAKMNTFAARAAELAGDRPELAAAVDPLLKTREAVEQQILGLDRKVLRQARNNAQVRRFMTVPGVGPVTALCFLATIDDPTRFKRSRSVGAYVGLTTRRFASGEVDWTGRISKCGDAMLRSYLYEAANVLLTRVAKWSTLKAWGIRLAKRSGLRKAKVAVARKLAVILHRMWIEGTEFKWSSKEAANQPA

SEQ ID NO: 429483 - protein, 409 aa, unidentified
MRRIRKKRSASHIVGCAPKCAEPHAETPEGVLTAANQRRQTVEEFISSFVGLDVHKDSIAIAVAEDGREAPRFVGTVGHEIKQLLKALHSVGKPESQLVVYEAGPCGYGLVRQLRSRGYGCEVVAASKLSRRPGDRIKTDRRDALTLARLARSGDLVRVAVPDERDEAIRDLSRAREDALRARLKARQQLKALLLRHGRRYTGRSSWNPTHERFLSTISFSQPAQDIAFAEYRLAVREGHDRVERLTEALRTQTEQWRMKGLVAALSSLRGIDFIAAVTLVAEIGDFRRFSHPTELMGFLGLVPSEYSTGDTQRQGDITKTGNSHARRVLVEAAWNYRFQARLSRLMHIRQERQPKAIRDIAWRAQLRLCHRFRRLRSRKLHQNKICVAIARELAGFIWAIAQQVTVAA

SEQ ID NO: 429484 - protein, 451 aa, unidentified
MAKRAEKRERRSMVLQPDAAGIDIGAEEIFVAVPPDRDEESTRRFSSFTRDLHALADWLGRCRIQTVAMESTGVYWIPLFQILEERGFKVYLVNAHYLKSVPGRKSDVSDCQWIQYLHSVGLLRASFRPPDAICAIRTLWRHRGSLLEMAAEHILHMQKALSQMNLQLHHVLSDITGTSGQAILDAILSGKRDPVELAQLCHSRVKSPRDKVAQALVGDYRPEHLFTLKQSLAGYRYYQKLILELDQETARLMQALPSATEHPMPPRTKAAAYHPQGNDPQFDLRSELYRIAGVDLTDIPGVSAATAQVILTEIGTDVSRFRHASAFASWLGLCPEKRVSGGKVLSCKTRQVKHRAATALRMGANSLCRAKGYFGEFFRRMRARLGTAQAITATAHKIARILYHVLSTKEPYAETVFHRCDEHAQRRAEMRLRKQAARLGFQLLPIPVTGE

SEQ ID NO: 429485 - protein, 391 aa, unidentified
MIFVGIDVAKDTHYAAVSDDSGAVLVKPFAFQNNAEGFCLLLKKLSEFDRSKLLIGLESTGIYSENLICFLYESGFRLAVINPIQTATLRKTAIRKTKTDKVDTMLIIKSLMVNSYRLYSQRDADSLKLRTLCRFRQNLKKSKARLKIQLAGYVNLVFPEFGKFFKSGIHIAASYALLKKYSSPKEIAALRTSTLCILLSKASHGRFGKDTAEALKSLALSSVGVKNPYISIQIAQTIAQIELLEQQIKDLNSAIEEAMESLNSVLMTVPGIGAVNAACILGEIGDIKRFSKPCKLLAYAGLDPTVRQSGQFTAKSTRMSKRGSALLRFALINSAWQLTLNDTTFKAYYDLKRSQGLNHYGALGHVAHKLTRVIFKLLTSDTPFNPAKLVA

SEQ ID NO: 429486 - protein, 409 aa, unidentified
MYFVGIDIAKKTHQAAIICSDGKLIGKPFKFPNTVDGFNLFLEKLTAVNTDLSQFEIGMEATGHYWLNLYTWLSDKSFRLHVINPLQSDALRNLYIRKTKTDSVDAKIIADVIRIGQYSETQLADENIIALRDLNRQRFYLVDMAADLKRKIIAMMDRIFPEYQDFFSDMFSKTSVQIMKEYTSPEQILQIPTERLTQLLKKASRGRFTETKAKELKALAANSFAALLSSEMTTLLIRQMLEQLDLLEKQIADIEHIIAAQFTQFNTKLTTIPGIGTTLGATILSEIGDINRFDKPKQLIAYAGMDPSVKQSGNFVGTQSHMSKRGSPYLRRALWLAAVVAVNHNDLFKYLFQQKMNAGKTYAQAMGYICHKLLNTVFAILKTGEEYKPVYPPQIDVSKFADQPINSQL

SEQ ID NO: 429487 - protein, 379 aa, unidentified
MDVLMTRCAGLDVHAETIVACVMIGEQDDELFIETETFPTLTKDLFRLLKWLENHGITHIAMEGTGVYWKPVYNILEDYFDITLANAQRIKNVPGRKTDVSDAEWIAKLLRYGLIEKSFVPPEDIRNLRDLTRLRKKWIGHLTSEKNRILKVLECSNVKLNSVISDVFGVSGRKLLSKLIQNGYVDSIDVENSIHGRMKHKKQMITESLFGTLNDHQIFLIKQSWQHIVYLESLISQIEERIDEILKNYKEEVELLLTIPGIKKDSAAIIIAEIGVNMEQFPTSQHLASWAGVAPGNHESAGKRKSTKTTKGNPHIKTVLCEVAWAISRSRNRWLAAKYWSIAARRGKKKALVAISHRMLRIIYSMLINKEPYKEPLIN

SEQ ID NO: 429488 - protein, 337 aa, unidentified
MSKVTTVGIDLAKSVFQFHGIDASGEVMLRRQVRRAQMPQMLAQLAPCVVVMEACGGAHYWARLSRELGHTVKLLAPRYVKAFVRGAKNDRNDARAICEAGCQPGMPTVAVKSETQQGCLALHRVRALAKKQRTMVANQVRGLLAEQGIVLAKRIGTIRRELPGVLPRLEPHLRRALELQWQQLQALDRQIAVLDQELTELASGSATCQRLMRERGVGPVIATAITAEVPEPRVFRNGRHFAAFLGLVPGQDSTGGRAKLLGVTKRGDAYLRTQLVHGARSALRRAAHHDDELSRWAQTVAQRRGFNRAVVALANKLARRLWAILRYGEAFRATAAA

SEQ ID NO: 429489 - protein, 357 aa, unidentified
MKIVGCDLHARQQTIAMVDTETGEFTEKTLGHEGNAVREFYAALEGPVVVGIEATGAMQWFLELLEELGIQCRVGHPAKIRARETRKQKHDRRDARLILELLIEDRFPEIWMPSIEERDLRTLLRDRHQWVKMRARLQHTLQAIALNHALRQGHALWSQAGQSALQALSLPPYTSQRRTELLSLYEQLQKRIQELDKEVEAQARQRPQARRLLTHPGVGAVTALATEVFLGDPSRFDTANQVASYIGMIPCEHTSGMRQRLGKLTKQGNSLLRYLWTEAGMHAVRKDPELQRFYRRKLIQKGMGKARIAAARKLGIRLWIMMRDQIDYEQFCRRGRLRQKGNAHAGMPDFNSGPAMQ

SEQ ID NO: 429490 - protein, 414 aa, unidentified
MEVLHAHCAGLDVHKDSVVACARHMADGKITTAVKTFKTTTQDLMALSEWLSTEAATHIAMEATGVYWKPVWHILSDGEFALILANAAHVKNVPGRKTEVNDTTWLADLMAHGMIKASFVPDEPTQQMRDLLRTRKQIVRERSSHIQRIQKTLEDANIKLDSVVTNILGLSGRRILDALIEGKSTPEAMATLAHRRIHATSGELEASLRGRVTKHHRFLLKLHLDQIDAFDATIARIDEEVNANVEPFRVAMKMLSAIPGVGDLSAAVIVSEIGIDMSRFETAGHLISWAGLCPQNDQSAGKRRSTRMKKGAPWLKSTLIQCAWCASRSKDSYLQAQYLRLRSRCGAKKAVCAVAASILTAAYHMLKNGTLYQDLGANYFDNRAKDKQALRLVSRLKNLGFEVQLTPPGSLSGE

SEQ ID NO: 429491 - protein, 368 aa, unidentified
MFTERTSVGLDVHARSVAAAAIDGVTGELFQTKLTPSHEHIISWVQDLPGPVAVTYEAGPTGFDLCRALSAAGVRCEVAAPSKLQKPSGDRIKTDAKDAVHLAKLLRLDQITGVAIPRVDQEAARDLVRAREDCRGDLMRARHRLSKLLLRHGIVYYGGKAWTGKHDMWLCHDAAAQLTSRATRLAFDSDYETVLATKARRDRLDVAIGEMAADSEFTPLVHRLGCLRGISTLTGFALAVEIGDWHRFTGNTIGSFVGLVPSEHSSGSSRMQGSSTKTGNTHVRRLLVEAAWHHRTRYTAGKTMRDRWDLAPAAARVRGDEGNRRLHQRWVKFIARRKKSTIANVAIARELAGWCWSLAMLEEHPEHN

SEQ ID NO: 429492 - protein, 367 aa, unidentified
MLLLFSAPYMEELVMALDHRWCVGVDLHKDTLTACVFCGCCGEVSFQKIACRCRRQIAEYFAALPRPHTVALESVGFYRWLWEMLEPIVEELVLADATQARALAGRRLKTDREDALNIAQLLAAGRLPRSYAPPIEVQWLRDLTRHRNSFSRQHARILHRVKSIMNANNRPGPARMQSDGLIRYLKAQGEKLPARHVEMLWQCVDALTLTERQIAHTERTIGQVVRRESFREVYGILTSFPGVALVTAATVMAEVGDFKRFPDTKAIGRYAGLNPRVYASGGKQRMGHIAKTGSPDLRWVLQQAAWTAIRYDEHVKRIFLRIAKRAGRKAAAVAVARKLLTWMHIAAKKGEPYRTPGARHTVLPGAA

SEQ ID NO: 429493 - protein, 424 aa, unidentified
MRFFGLDVHLDFCEVAVAEGGGVSRVGRIASTPEAIREFAAGLKRSDQVVLEASCGAMMIARLLEEGPVGRVVVCNAAETRAISHARVKSDRFDAAMLAKLLSAGILKAVWVPDEATSALRRRVARRAGLVRARTRVKNEVHAVLARCLLGRPPVSDLFGKKGRVWLTEQQLPEEEAETVASCLRHIDFLGGEITGLDRGIARQALAFPGFGRLLTIPGVDVGTAAAVIAAVGDITRFPTAGQLVAYLGLDPKVRQSGSEPARYGHISKRGDPQARSMLVEAAWISIRSPGPLKAFGERVRARRGAQIAAVAVARKLVVLCWHLLTKDQGYAFARPSLTRQKTRRLELLAGAPPLARRHDGPPVSPTSSQRAAERELQQQAELAYRRLIDDWRTTTPKGGAGATPGRASNKPSKGKAARQATSP

SEQ ID NO: 429494 - protein, 422 aa, unidentified
MTSPQPSPTEFAAYVGIDWANQKHTCSLRAADSQRIENYELDNTPEAVEKWAAELEQRFQGRPIAVALEQQRGALVALLSKYAHLVLHPVHPSTLDHYRKGFHPSGAKSDPADSDLLRDLLERHRDRLKPLKPDTEATRKLQFLVEGRRKLVDEKTGLSNRLTDTLKQIFPQVLRWFDDVASPLVGDLLRRWPTLPDLQKAKPATVRDFLHQHNCRSEERTEQRLQAIQQAVPATRDGALLQAGSLAVESLVRLIAGLRDSIGRYDKVIAEITKAHPDFPIFDSLPGAGAALAPRLIAAFGTDRDRFGNAADLQCFTGIAPVVQSSGSQRWTHWRWACPKFIRQSVQEWAQHSIPRSVWAGEYYQQQRDGGSSHHAAVRALAFKWLRILYRCWKDRKPYDEQIYLRSREKRLLPLPPTPATT

SEQ ID NO: 429495 - protein, 472 aa, unidentified
MEETAMKHHPKRERMSKKERPSISLLERIQPDAAGIDCGQSSHFVAVPPDRDPQPVREFRTFTTELEQLSDWLAWCGIKTVAMESTGVYWIPLYEILEQRGFEVMLVNARDVHNVRGRKSDVMDCEWLRELHSVGLLRASFRPAAAMVPLRSFMRQRETLVEEASTRIHRMQKALIQMNVMLHVVVTDITGQTGLKIVRSILAGERDPQRLAAYRDRRCHASYAEIVAALTGNYRTEHLFALKQNFAAYEFLLHQIAECDSEIEALLSKLAEQKPLPTAPLPQARSKRSPKRAPAFDIRSPLHRLTGGADLSQIDSIGPHAALQIIAEVGTDMRRWPTEKHFASWLTLAPNNKISGGRLLSSRTPPSANRAAAILRRCAMSLTRTSTALGAFYRRLAARAGKAKAITATARKLAVLVYRVMSGNLVYNDPGATAYQRLHQTRELKSLRRRARLLGFQLVDQTTGEVLNAAVS

SEQ ID NO: 429496 - protein, 385 aa, unidentified
MQKLNDLSRSPSRLDPDGTLIAVIELSLSSWLVAGIVPGVERQPLKKLAVDESALLKLLHRWREEAAKAGHRIKRIAVAFEAGRDGFWLARWLRARDIEAHVIHASSVAVSREHRRAKTDRLDTELLKRSFLGWLRGERDHCKMVAIPTTQDEDAKRPNREHESLVGEQSRIVNRMKAALIRLGIRGFNPKLKKAAGRLEDLRTPEGEPIPPNTLAELHRDMERRRLVSDQIRQIEDARLERLKQAPNDGPHAMVRLLARVIGVGVETADMLVQEVLSRSMRDRRAVARYAGLTGSPDESGRKRREKGLTRSGNARVRRGMIQLAWRFLMFQKDSTLAQWFRARTESARGTRKTMIVALARKLLIALWRLVREGAVPDGVVLRPA

SEQ ID NO: 429497 - protein, 420 aa, unidentified
MKDITTKKLKKVSEKTLLVAVDIGKVKHTGYWRLPDGTDIKPFEFFNNGRGFQKFWECICEAKRVYLVEEVVVGFESTGSYAEPLLHFLRKRGVRLVQVNPFHTKRLKELQGNSPNKTDHKDPKVIADIMELGHSLTVVIPEGVAAELRRLTNARERAMERRNILLNQLQDLVFMIFPEFLEVMKDVKGKTSRYLLRNCPTPEDIIKKGLENLTQELKEVSRGKLCGDRAEALFRVAWESVGIKEGQKSIVLEIRECLLLLEASEGFIGKLEEEMANRLSEIPYSRCILSIKGIGKVTAAGLIGEVGDFRQFRTISEIIKYGGLDLFEISSGKRRGKRRISKRGRPLLRKLLFFASLNTVKKGGAMYDFYQRYLHRGMHRNKALIAIARKLLRVIFALVRDHSMFVRDYFGIPYQFQEVA

SEQ ID NO: 429498 - protein, 346 aa, unidentified
MRFYNDQHRHYCGVDLHTKRMYLCILDQEGNKLLHRNVRAKPHDFLSAVEEFRDDLVVGAECMFTWYWLADLCRNEKIRFILGHALYMKAIHGGKKKDDKLDSEKIARLMRGGTFPLSYVYPSEMRATRDLVRRRMFLVRRRSELLAHVQLMNQQYNHDPFEKNLKYASNRDVLDRFAESGARLSVDADLKMVGHYDQLLKQLETKLLREAKLHDPKACSLLRTIPGIGKILSLVLLYEIHTIDRFPSVGDFLSYARLVTPKQTSDGKVTGHGGAKIGNVHLKWAFSEAVLWMLRYSEDAKAFLKRKEKKYGKARAMTLLARKIGRAVYQMLKRKECFDAVKFFAS

SEQ ID NO: 429499 - protein, 534 aa, unidentified
MASKKRNTQKKHIRSEGTYSSEELKCLTLDDGTRVITSADGDIKRPVCAGIDVHKEILMAAVCRTDPETLKAVFYVRQFQSTNKDIRNMAQWFKAHGVRDVCMESTGKYWIPVFNILEQCGLKPVLTHPKYVKQAKGRKTDFRDAIHIASLFRMDLVVASFIPPADIRDLRELCRYRLKLTYMRTSEKNRFQNSMTVSKVRLDCVFSDPFGKSASAIMEYLIETDPDQVSDEEILNLVDRRVQASNEDILESIHGYEFIGVQRDKLNIIQLHLGQLNECIRLIDEKLEYYRQKYFRIIHHLVTMVGITDISALYILGEIGTDMSVWKDDAALSCWAGLSPANNASAGKKKSTRTGDGGHYLKPLLGQCALAAAKSTRKDPYFHCKYETLKKRRGHKKAIIAIARKMLVAIYHMIRDDADFLPVDYEDTIQNTKKTKGLNLNNVIAFLKEQGADESTIHLIETQCCGKETETTDTCSKSPVVQDAKEKQSTSGSADISQPIQESVNGSPVLISGSQQGHALNCHPKDPAVATATA

SEQ ID NO: 429500 - protein, 455 aa, unidentified
MKNEIAKLQIVNPNAAGIDVGAKSYFVAVDQQRSNVCEFGVYTRDHEKMIDHLKTNDIKTVAMESTGSYWQTIFNSLQAAGFDVILVNGSQTKNVKGRKTDVLDCMWIQKLHSLGLLSGSFLLSDMLQELRTYYFHRQHLIEQTVMYGNKMEKSLRLMNIRLDIVLRDVTGKSGLNIIEAILAGDRDPVNLAGLADIRVKKSQGEIANALQGSWRAELIFELKAALQFYKLYEEALKECDKIIEAKLKEYLPKEPLSSEIENKKKISIKKTGKHSPAFNVSKISYQYFGTDLFAIPGISHTTVLCLITNVGHDIHKFPTGKSFASWLRLAPNNKISGGKIISSRSPSGKNYLAVALRQAANSIGNQKSHPLTPFFKRIAFKKGRISAITATARKLAVIIWNMITKVEPYNRQDVQIHNERHKQTLLKNIERRICSLQLNQEELMKLFTRTSLLTI

SEQ ID NO: 429501 - protein, 387 aa, unidentified
MPQPNDLSRSLVSLDQNSTIIAVVELSQSSWLVGGIVPGIERQPRKKLEPSPERLLGLLHRWQDEVVRAGSTITRIALAFEAGRDGFWLARWLAARGVEAHVIHASSVAVSREHRRAKTDRLDTELLKRAFLGWLRGERGHCSMARVPTIAEEDAKRPNRERDGLVRERTRIVNQIKSTLARLGIRNFKPAVRKAVERLATVHTPEGMPLPPNTLAELQRDVARLGFVVSQIREIEEARQKQLEQQHETGSHAMVRRLARIVGVGVETADLLVHEVLSRPMRDRRAVARYAGLTGSPDESGARRREQGLTRAGNARVRRGMIQLAWRFLMFQKESALALWYRARTADSRRGTRKTMIVALARKLIIALWRFVTTGEPLDGVVLRPAS

SEQ ID NO: 429502 - protein, 333 aa, unidentified
MQKKTRTAKVGLDYSKDKFNVSVLFNGTRADREFKNDLEGARDLESWLKQSGAKRFDVTFEPTGRYSENVSTRLWSNPNYRVFQVNPEVSSKYRGSLDLRTKSDFKDAYALAKLAEERADDLPEWEPKNDAQYELRDVQMRLRSIVKRKTHLKNQLKCGLSSQFIKDDIEDELRNLAEREKVLLAYATKLIDSDPQMREDRLLLQSIPGIGLTTAILLICLIDFRKFKSSRQLTCFLGLTRRMNESGTSVRGPNGISKKGSKYIRSSLFCPTWSAIRSNPAIEMFNERLKGNGKLTMVAQTACLRKLLAIAWAVVHRRCPFEREYKNPHLATA

SEQ ID NO: 429503 - protein, 340 aa, unidentified
MELYAGMDLHSRNTLVGVIDSSLKRVFERRVPNDLSLIVATLEPFSSELEGIVIESTYNWYWLVDGLMDAGYSNVRLANPSAIKQYEGLKHRDDRHDAFWLAHLFALGILPEGYIYPKEDRPVRDLLRKRSFLVKHRTAHILSLQSMLEREKGYKLSGNEIKRLKAEDIARIFSQEHLVMSAQANRASIEFLRHHIKRIEKAVRNRVKLHRSFEYLMTVPGIGDILALTIMLEVGDIARFARVGNFASYARCVSSQKLSDGKKKGQGNRKNGNRYLAWAFVEASHHAKRYNERLRSYYQRKCAKRNQAVATKAVCNKLARACYYIIRDQVPFREEALFCS

SEQ ID NO: 429504 - protein, 346 aa, unidentified
MAISVVGVDLSKSVFQLSIADSKHHIVDRKRLSRAQFHRFLAQTEATRLVMEACGTSNHWGRTAQSLGHEVKLLHANYVKAYVRRTKTDAADADALILADSDKSLHPIPVKPEEQQALQGLHKIREQWKRGRVARICEARALLAEFGISTPAGVRGIGRKLTLATEQVPMIMQPTLLDLIQEIGELEQRLKRVDQALAAYANSNPDVQALLGIQGIGITIATAFVARVSNIYTFKRGRSFASWLGLTCREYSSGQNRRLGRITRQGDRYLRTMLIHGARAALMAARRKQANGKELTRLETWAVNTQARVGHNKATVALANKMARIIWAVWTRHEAFNGDDALRFAA

SEQ ID NO: 429505 - protein, 356 aa, unidentified
MIKIKTLSFEGETIYCGIDVHKKNWRVNIRNYERELEDFSQNADVDCFIAHVKKRYPGAIIKVAYEAGFCGFCACRKMVLAGIDCIVINAADVPSKDKDKKQKNDTVDARKIARELSKDNLEAIYIPTLKEQNDRSLVRVREQMVENQTRCKNRIRHLMHFNGLKVQDGVDKEKYWTNAFIKALQDLDCGDESLRMTLDMMLKELTEIRKRVLESTRMVRKLAETDAYSTKVELIRSIPGIGQVNAMVILTELGDINRFGNFDHLCSYAGLTPSTEDSGDNKKDRGITHRCNSRLRVALVESSWMLISKDPAMLMKYSAYCRKMNKNLAIIRIAKHLLSRIKYVLVKKEKYETCVV

SEQ ID NO: 429506 - protein, 387 aa, unidentified
MPASGPRPGQVAVQVSLAAIFVSLELSRSTWLITSLVPGGGDKMSKHSVRSGDIAELMAHFAKLRDKAHVRAGASFPIIVIQEAGLDGFWVHRVLERAGIESHVVDAASILTSRRRRRAKTDRIDGEALLRTLLAYKRGEPRVCAMVRAPSPEEEDRRRLCRERKTLVAERVAHVNRIKGLLFAQGIADYEPLRGDRRRRLEALSTGDGRPLPPHLKAQIGRELDRLELLLEQIKAVEAERNALLEPTNDAVSTAVQALAGLRGIGPEFTAMLWSECLFRSFRNRRQIAAYAGLAPTPWQSGSVQHEQGVSKSGNPRLRSTMIQLAWLWLRHQPTSELSLWFRERVKRNGGRGKKTAIVALARKLLVALWKFSSSGVVIEGAMMKAA

SEQ ID NO: 429507 - protein, 358 aa, unidentified
MKHNNTNTQKSSSTKTAAKAKIIKLGIDVHADSFSVVRQIDNDTPPPAQKFTPEGFVKWVAKQLPAAEKVHRCYEAGPFGYSLHRQLLRMGVQNVVVRPQNWDELGRKVKTDRIDALALVQRLDRYVQGNRHALAVIAVPTPEQEQARGLGRHRQQLVQERQTHEAQGRSFLLYHGRRVQGQWWQPFAWEVLQQELEPWQCRILENFRAQILLADQQLAQVEKQVVAEAVSPAKGFGALTCQLLGREVLDWKRFANRRQVASLTGMCPSVHASGGHSRQGSITKHGNPRIRRLLVELAWRVVRFQPNYPPVQKWRPQLDSKRARGGRKKAAVAIGRHLAIDLWRMETGRSTAAQLHLT

SEQ ID NO: 429508 - protein, 377 aa, unidentified
MKRIKFVGLDVHAETIAVAVAEQEGEVRSLGVIPNREESIRKLVKKLGPVEQLRFCYEAGPTGYVVYWQLTALGVKCEVVAPTLVPVKSGERVKTDRRDALKLARNYRAGELTPVWVPDAAHEALRDLVRAREAAKKDQLRAKHRLGKFLLRHGRRPPTGVKPWTRNYLSWVKNEVHFEQMAQEATLLDYLHEVEHAEARITRLDLAISEAVKLTPPKMRAVIEALQALRGVAQVAAVTIVAELGAVSRFTGARELMGYGGIVASERSSGESTRRGSITKTGNAHLRRVVVEAAWAYRHRPNIGETLRKRQEGVSEEIREIAWKAQHRLHGRYRKLMLRGKVKGKVVTAIGRELLGFIWAIGVQAEAAQTETEQRAA

SEQ ID NO: 429509 - protein, 343 aa, unidentified
MDHFAGLDVSVKETSVCIVDDTARIVREVKVASEPEALLLLLTNPAYHFKRIGLEAGPMSQWLFSALAEAELPVVCVETRHMRAVLKAQINKTDRNDARGIAQMMRAGLYRPVHVKTLRSQKIRMLLTHRKLLQSKAIAIDNDLRGTLRNFGLKVGVVGKVKFEMRIKELVENHPDLAVLVEPLLVVRRVLREQLGILHRRLLVIVRDDEVCRRLMTVPGVGPVVALTYRATVDVPARFRNSKAVGAALGLTPSKYQSGEINRTGAISRCGDEMMRVMLYEAAHTMLVHSAKWSWLKAWAMKIARHRGMKKAIVALARRLAVIMHRIWVDGTEFRWTRDIATA

SEQ ID NO: 429510 - protein, 379 aa, unidentified
MPQSNDLSRSLAALDQDSTLIAVIEMSQSTWLVAGIVPGINRQPLKKLAADEAALLQLLYRWRDEATKAGRRIDRIAVAYEAGRDGFWLARWLRGRGIEAQVIHPTSVAVSREHRRAKTDRLDTELLKRGFLGWLRGERGHCSMAKIPTPEEEDAKRPNRERENLVGERTRIVNRMKSTLARLGLRNLKPTLRKAAERLDSLRTAEGVPLPPNTLAELRRDMARLRFVMDQIREIEAARLTRLEQHPELASHAMVRLLARVIGIGIETADMLVHEILSRNLRDRKAVARYAGLTGSPDESGARRREKGLARAGNARVRRGMIQLAWRFLMFQKNSALAQWYRRQTADSRGTTRKTMIVAPCLRRGKLWRASCSSRFGNS

SEQ ID NO: 429511 - protein, 410 aa, unidentified
MRRCIGLDVHREFAEVAIWEQGVVRLAGRIETTPEALSLFAESLCDQDEVALEATCNTHAIARLLERHVGRVVVSNPMKTRAIAEAKVKTDKVDAQVLAQLLAAGFLPSVWLADEETQALRRQVARRAHIVRQRTRLKNRVQAILHRNLVPRCPAADLFGLKGRRWLAEQQLPADERQAVEALLRQLDFHAEELKLIDAALAQVALARAEVKRLMTIPGVDATVALSIVAAVGDFDRFRSPDKLVSYLGLNPRVRQSGSHPAVHGRITKQGRAHARGMLVEAAFAAARVPGPLRAFYERVRGRRGMQIAIVATARKLAVLCWQLISKGEDYAYQRPSLTAKKLRALELRAGTPSRRGHKGAAGAYSLREVRARENALAEQGELVYRHLVADWQAKRPAKAGAGAATGERL

SEQ ID NO: 429512 - protein, 408 aa, unidentified
METLHRRCAGLDVHQKEIVACRRIVSGRKVRSELARFATTTQGLLALSAWLAETKITHVAMEATGVYWKPVWHVLCHDFSLVLANASHIRNVPGRKSDANDATWIADLLAHGLIRASFVPPQPIQDLRDLTRTRRGLTREIVRHTQRIQATLEEANIKLASVISDILGWSGRRILKAIVSGQSDPRRLAELGHPQLACTREELAAALEGRLRDHHRFLIGQHLKTIEQIEATIAEFDARLEAALAPFCGAAERLNDLPGVSDNVAQTVIAEIGVDMKAFPTADHLLSWAGMCPRLDESAGRKRSRRLRKGAPWLKPVLVQAALAATKVKNSSLRARYFSLRPRLGHKKAIIAVAAAMLRIIYHMLKDGTFYQDLGPDYRRPRNPKRAAQSLANRIRSLGFDVEIKKAA

SEQ ID NO: 429513 - protein, 485 aa, unidentified
MNGGQLAGECRGVPAPDERLGRICTLASLAVSRTTGKFAPEERQYRAVRLTAKARFKIAPMYLKEEAMKTDRLETFCVGIDWATEAHAVCVVDGSGARLGQFPVPNTPEGLAGLVTRLVEQCEGNRERLSAAIEVPHGPVVDALLEAGFSVFSINPKQADRFRDRHSPAGAKDDRRDAWVLANALRTDREAFHRIDPDHPAVVELREWSRIDQELGRDLLAQANRLGAHLLRVAPHWLKLCPAANEPWFWALLELAPTPGAARRLRLTQVGRVLKAHRIRRLSAEDVLEVLRSSLPGTPAGALAAVAAHVGVLLPQLRLLHRERRKAEAELARCLEACKPVFPAEAEGPGDVDIVLSVPGIGVRVAACLFGEAGRYLLARDRRRFRAISGTAPITKSSGKSCLVMMRRACNFHVRDSCYHWARIAVQREPRSKDHYAILRAKGHGHARALRGITDRAVDRLFTMLEHGETYDPNRGRVLSGHKAA

SEQ ID NO: 429514 - protein, 312 aa, unidentified
MANQTFVGIDVGKSNLDVNLHGNQAVKRFSNSPTGIQKLEYFLREQIEPLVVMEASGGYESLVAKTLRQAGFPVCVVNPTLVRRFAQGMGTMAKTDAIDARIIARYASIKQPKPQAARGEDEERLVALMDRREQLNEMMIMEKNRLFTAPIMIRESIQMHIEMLKQQIKQIDQVVYELIAANQDWQKKIKILTSFKGVGTVVAVTLLAELPELGQESRERIGALAGLAPINQDSGTRSRKRKTLGGRAKIRRVLFMVALGGIRYNPVIKEYYERLLNRGKEKKVALVACMHKILTILNALLRKEQLWLPDYA

SEQ ID NO: 429515 - protein, 413 aa, unidentified
MDVFCGIDWAEDHHDIALIDRDGQLLARRRIGDDAAGLATLLDLLATHGDSGEYPVPVAIETPRGLLTACLRATGRKVYPINPMAVARYRDRHSIAGRKSDHGDAVVLANVLRTDAHAHRPLPADSELAQAIAVLARAQQDAVWDRTCAHNKLRSHLREYYPAFLSAFADARGGIARPDARTILAAAPTPAAATRLTLTQLRALLRKAGRSRGIDAEATRLREAFAAPQMRHPPLVEEAMGRQALALLRHLDAACASAEDLEQATVASFNQHPDAGIITSFPGLGPLTGARVLAETGDDRSRFTDAKGLKAYAGAAPVTRASGKTLAVLHRRVKNQRLAATGYIWAFAALTASPGARSHYDRRKTAGDRHAAAQRNLFGRLLGCLHHCLATRQHYDEATAFPPPVSATRNQAA

SEQ ID NO: 429516 - protein, 346 aa, unidentified
MEQEQFVGFDVSQAETSVCVVDGTGKVLWQGKCASTPEAMVATVQRRAPHAVRIALETGPMSAWHYRSLIAFGLPMVCIDARHAKAALAMQLNKTDANDAVGLAQIVRTGWYREVAVKSEHSHRTRGLLAARAKLVGMRKEVANQLRGLLKVFGHVIGAVGGEKFDARARELAAGDTTLTITAEALLAARAALGVQVARLDKLLLTQARQDPACQRLMTVPGVGAITATAFIATIDDPARFKHSTSVGAYLGLTPRRYQSGTMDVSGHISKAGDALLRCYLFEAATTLLSRVQKTSILKEWGTRLAKRIGHKKARVAIARKLAVILHRMWADKTKFRAMSDVAAAA

SEQ ID NO: 429517 - protein, 378 aa, unidentified
MPTNLRYVGLDVHAETIAVAVAEPDGEVPFLGMIPNRPEAVAKLIRKLGPREHLRACYEAGPCGYVLYWQLTRLGVPCDVVAPTLVPTKPGDRIKTDRRDAVKLARCYRSGDLTPVWVPDAAHEALRDLVRAREAAKQDQLRARHRLGKFLLRHGIRPPAGVKPWMQRHRRWLDSVGFELGAQQATVADYLHEVDHAVARLERLERALDEAVAAAPAAQRAVIAALQCLRGIRQVTAATIVSELGPLSRFPHPRQLMGYSGTVPSEHSSGDRVHRGAITKTGNAHLRRVVIESAWAYQHRPWIGGFLLRRQRDLRLDPEVKEIAWKAQWRLHTRYKKLAAAGKKKPQIVTAVGRELLGFLWAIAVQTEAKFRPDRKAA

SEQ ID NO: 429518 - protein, 332 aa, unidentified
MYLGIDVHKRYAQVAVMDEAGEIVEEVRVENVNLDDLAQRYAGAEAAIEATSNYHHIHDTLSEHLDVTVAHPKELNQIADTDKKTDRVDAKELARMVRLNSVPESYVPTDEVREARALVRGRQTLVENRTKYANKIHGLLSDHGIIEDVKPLTIEGREFLRELSIPSPWDSLLESYIELIETLTEEIQNLEETIEERAGSLKETQLLMTIPGVSYYTALSIYAELGEISRFDGDKSVVSYVGLNPVIRESGDSRIEGSISKRGSGRVRWLLVQAANTAVHTCNDEYLSRFYERLASRKNSQKAIVACARKMLVSIYHMLDRGEVYDPPDVSA

SEQ ID NO: 429519 - protein, 323 aa, unidentified
MSQPNLQCMGIDVAKLSLDIATTDTIEPFTVGNDEDGFAVITDKLKHTKINLILLEATGGLEAAIACKLQSEGYDVVVINPRQARDFARSMGYLAKTDKLDAAMLAQLALVIDRHPDRSRYIRHLPDEARAVLAAMVVRRRQLNHMLVAERNRLYPSHPQSRKSIDNIIDALQNELDRINEQMKQHMTAFFQEQARLIGSVKGVGDITVASLIAELPEQGKLNRREISALTGVAPLNRDSGKMRGKRTTFGGRAGVRATLNMAALVATQFNPAIKLFYQRFLAAGKPKKLALVACMRKLITILNTMLRKGEEWNASFQSQVIS

SEQ ID NO: 429520 - protein, 463 aa, unidentified
MAKKNTTIGKSKSKARKNVLERINPNAAGIDIGANFHLVAIPEDRAEENIRKFGPFTSDLHRLADWLSEHRIESVVMESTGVYWIPVFQILEQRGFEVKLVNAAHVKNLPGRKSDVSDCQWLQQLHTFGLLNGSFRPKDQVCILRTFMRLRDILVKDCSSHISRMQKALTEMNVQIHRVLSDITGYTGMAIIRAIVAGERDGLKLARMKHPQVKASTEQIVKALEGDYRPEHLYALQTAIELYDAYQLKITECENKIEQQLKHFETKLDLGQVLEQSGALKARSAKVRQELHRQAYLASVCGVDLTRLPGLSTLAVEVIISETGLDMNCWKSEKHFCSWLKVCPDNRISGGKLLSSRPRKTKNRAAGMFRLAAQGAMQSKTAVGAFIRRLRARLGAPTAINAGANKLARLFYRMLKFGAAYVGQGQTYYEQRYKERVLHNLSKRAKELGFQLTPFQPATVSVS

SEQ ID NO: 429521 - protein, 400 aa, unidentified
MISVGIDISKDKSTVCMLRPYGEVVEAPHSIDHTEQALNALIERIQSFDEDVKVVLEATGGYHQVVVTKLLSAGIFTVVVNPYIMKKYCAAALRKAKTDKIDSIRIASYGIDHWFSMTAYCPPDEIYAELKLLGRQYDRYVRLKVNCKIQLANLLDGVMPGIKTILQGTVPAYSTKDKLCDFVEKYWHYDNIKKMSEKRFIEDYGKWAKKKGYRCSESQAIAIYQLSKNNIPTLKSGTPSTKMLVLQAVKAVRDAEITLSLIISQMQEIASTLPEYSVVRNMKGVGDVLSVRLIAEIGDVRRFHNGSALVVFAGIDAPPYESGKFIGTKRNISKRGSSTLRKIGYEIMHSLKVVKPTEDSAVYDFIIKKETEGKPKRVAKIAGLNKFLRIYYARVMETYC

SEQ ID NO: 429522 - protein, 313 aa, unidentified
MIHQNGVVGIDVSKNHLDIHLHPSGQHWRCGTQPKEIADLARRLAALEPIAVGLEASGGYEQSLADSLHAAGLKVHILPPARIRSFAFGIGQWAKTDRIDAGVIARYLMAVHMGLAPYQPDPTRQRLHALAAHRRRLLAEKSGLVSQSDTINEPLVQTLIAERLNTIAQDIKRLDAAIAELLAQTPHLGQCQKRLRQVTGVGPVLATALLADMPELGKVSAKVAAALLGVAPYARQSGSTQRSGKCMGGRKHLRDIAYMAVLSAIKAKDPVLGGFYQRLRSRGKPFKIAMIATVRKLITILNAIAKTDPAFQT

SEQ ID NO: 429523 - protein, 339 aa, unidentified
MREFKLIAMDTSKYVFTLHGVNERDEVLLRQELRRGQVETFFRKLPPTDVVLEACGGSHHWGRLLGGLGHRVRLVPPQYAKPFVKRGKNDHIDAEAICEAALRPGMTFVPVKSTETQANAMILSVRELLVKQQTQAINALRGHAGEFGVVAAKGTGNVEALLARIAADPTIPQAAQDMFAELSSHVAELSARLAELDRKLIELHKADPLSRLLAEVPGIGPISALTLAMTVDARQFRSGRHFAAWLGLTPKQKSTGGKPRLGGISRQGNERLRQLLVLGATAVIRLVRPGSWQATAWLLALVQRRPRKVAAVALANKMARTAWAMMTSGEAYRPQRAAT

SEQ ID NO: 429524 - protein, 405 aa, unidentified
MKLLIGLDWSKDHHHVCFMAPNGSLQASFEIPHTVTGFARLDAERAKFGVSASECLVALETAHNLVVDFLWARQYRVYVIAPTVVKGSRGRYGVSGAYTDASSALLLADLLRTDLARFIPWRPDGALVRQMRAKLSLIEALRKDINRWSNRLLAVLLRVYPHPVGLFSKLTTQIGLQFLMVCPTPHAAQALNYHDFEDFGRQHGYPAAKLPGLYAHLQSPRPESDPTALLAYQDEIPFLARTLLPLVQHRLQLIREVKSLFEQHPDRFIFESLPGAGDLLAPGLLVKFGDHRERFPSAAIPQALAGTCPYTKWSGKKRLVLFRKACDRDFRRIAQQLAVESVKQSVWAATYWQEVYARCHRKSQAYRCLANRWLAILWKMWQTQKSYDEEYHLQQRRLRRQPRPK

SEQ ID NO: 429525 - protein, 424 aa, unidentified
MNLTQNDRLKQVTSDTLIVGVDVGSQTHFCRAFDWRGFELSRRVFKFSNTGMGFLTFLRWTEELMNKTEMKKVIVGCEPTGCYWLTFQKFLQDQDIQLVTVNPFTVNRSMELDDNSPEKSDLKDPKTIALLVKDGRFSTSYLPSGVYAEIREASVCRDQIMKQHVRLSNQIQGWIQKFFPEYLECYADWDSTSGLMLLREAPLPQDILKIGAGGINQIWRNAKVRAAGIKRAQTLVEAAQNSVGLEAGEAARLEIWVLVNDYILKAEQLKRLDEYLEEKVKEVPNVEKLLAIKGVGMSTVIGFIAEVGDIGRFTDPKQIQKLAGLEIVKKSSGKKKGQPRISKRGRRKLRRTMYESARALMTWNPAFQDVFLYYRNRTKNPLGGMQAKIAVACKAIRIFYAVLQTGCDFDEEKFRKDIIRPEAA

SEQ ID NO: 429526 - protein, 410 aa, unidentified
MESAYNVAGIDVHKKILAVVVTDVSEPGEYRFEERTFGTGSTELQQLANWLSEQGVREAVMESTAQYWRPVWQRLEGVCELHLAQAQSNRAPKGRKRDFEDAKRLVRRYVAGELILSFVPDEQQRLWRMMTRTMHQLTRDRVRLRNQLEGFLEESRIKLSSHVSDLFGLSGRRMLQLLAEGATDPAQIAESAVPGLRATHQELADALSVATTLIPMRRRMLKLFLERLQLIDSQRDELAKHVAQCLREHEAAVTRLAEVPGLGADSAQQIIAEVGPHAATFDSPGQLASWVGCCPGREESAEVSKSDRSPKGNRQMRRILNQSANAAIKAKGSVFQDLYRRLVPRLGHAKAVWAVAHKLCRIVWKILHDGVDYQERGHRPNPQTIQRRVSKLVRHLRSLGYQVELSAVTA

SEQ ID NO: 429527 - protein, 362 aa, unidentified
MLYLGCDVHKNYTTVSFVTEDGKVADTSSFYNDIEELKSLLGQFPEEEFSAVLEAGLNWGVIYDMLDSLSEVKNVSLAHPPKVKAIASAKIKTDKIDSKILGQLLRTDLIPEVWIPCKETRRLKDIVRFRAFTVRIKTMIKNRIHDILRKSHINPPEVKDIFGKYGRMWLEDIELTDKRADKLLRYHLKLKDTFEDMEKELKKWINKEMKANEDLKLVKTIPGIREVFGPIIVLEIDDINRFPDTSHLHSYSGLVPSTHVSGNTSYHDRLIKGNRWLRWAFIEGAHTSVRVSPYFRKYYDSVKRKAGSQAASVASGRKLATIVYKVLKEKRPYIEEYRIKQNIGRSPSVRPSGGITSRSFQE

SEQ ID NO: 429528 - protein, 377 aa, unidentified
METLHKRCAGLDVHSETIVACVILGESETDLIKETETFPTLTKDLFHLLKWLEEKEVTHIAMESTGVYWKPVYNILEDFFDITLANAQRIKNVPGRKTDVSDAEWIAKLLRHGLIEKSFVPPEDFRNLRDLTRLRKKWIGHMTSEKNRIQKVLESSNIKLSTVISDIFGVSGRKLLEQLMNEGYIDQEDVEQKIHGRMAHKKQLITDSLFGTLNDHQLFLIKQSWMHIVNLEELISDIEKRIDVILSNYQEEVQLLVTMPGIKKDTAAVIIAEIGVDMGQFPTSKHLASWAGLSPGNHESAGRKKNTKTVKGNPHIKSALCEAAWAVSRSRNQRLGIKYWSLAARRGKKKALVAIGHRMLTIVYHMLQNKEPYHEST

SEQ ID NO: 429529 - protein, 343 aa, unidentified
MSISMIGLATSKSVFQIHGVNESGKAELKRKLRRSDLIAFFEKQERCTVVMEACGAAHHWARILSGLGHTVKLIAAEAVKPFVRKGKKNDAADAAAICEAAARPDVKFVPVKTVGQQGILALHTARSLLVKQQTMLANAIRGLASEFGHVVPKGLHNLEPLVALVDADAAMPEQARQAIAELYERFGELANGIQSCEAEIVKHARTDPTARRLATIPGIGPITASLIAATVVDISRFKTARQFAAWLGLVPRQHSTAGKTRLGRITKAGNREIRKLLVLGATSMLGRAEGWHSAVGSWLRDILQRRPARLVTVALANKMARIAWSVMTRNEVYRPQGGVAAKA

SEQ ID NO: 429530 - protein, 342 aa, unidentified
MDYAGIDVSLKESSVCIVDAKGKIVREVKVASEPEALVRYFGELELPVCRIGLEAGPLSHWLHAGLVAAGRDVVLLETRHVKAALSAMTVKTDRKDARGIAQLLRMGWYRPVHAKSVASQDTRAVLVGRKLLQSKLLDVELSIRGILRGYGLKVGEVSRGRFEARIEELIIGHATLETVIGAMLAARASLWGEFTRLHREMLKIARADKICHRLMSTPGVGALVALTYRSAIDDPTRFGKSSTVGAYFGLTPKKYQSGETDRDGSVSKVGDGMVRTALFEAAHIMLTRATRFSSLKRWALEVAKRRGMKRAKVALARKLSVVLHRMWMDATDFRWAATAMAA

SEQ ID NO: 429531 - protein, 456 aa, unidentified
MKIPQSTIRLLTGRLVKILLNREVSTMKSNTQNKKIEAITEKTLVIGIDVGSETHYARAFDYRGIEYSKKPFKFSNTEAGFVTFKEWILDIKERHEKDKVVPGMEPTGHYWFNLGKYLQDNEMKPVLVNPHHVKKSKELDDNNPTKNDRKDPKVIAGLVREGRYMIPYLPDGVYADLRTASNIRFQLQSELTRIQNRISRWFNIYFPEYKTVYGKPDAKSGMLILKEAPLPEDILTLGIDGVDQIWRDAKMRAVGKARAKTLIEAAEHSVGSKEGAVSARMEIRMLLEDYESRNMRLQEVMVLIEELVKQIPMAEKLLEIKGVGIKTVSGFLAEVGDISRFNSPKELQKLAGLALVENSSGKHKGETTISRRGRKRLRYLLFEVAMSLVAKNPEFRELHNYYTTRRLNPLKKMQSLMAIAAKLIRVFFAMLTKGVDYDPKKMVSDIKRPAVYLQAA

SEQ ID NO: 429532 - protein, 333 aa, unidentified
MGRTASPHSQARVMQTTPSSPPVFVGIDVAKDRLDVHLRPSGEAFSLPHNADAFEELVTRLVGRVVGLAPELIVLEATGGFEAAVAAALASAGLRLAIVNPRQVRAFARAIGRLAKTDRLDAEVIALFAERVRPEARAIPSTQVRALADLVARRRQIIDMITAESNRQRPTHDPRLQKSLERHLAWLQHELREIDRDLDGTVRGTPAWRETEDLLASVPGIGPITARTLIAELPELGLLDRRRIAALAGVAPINRDSGAMRGRRMIMGGRTTVRNALFMATVSATRWNPIIRVFYQRLTQAGRPAKVARVACMRKLLTILNAILRDRRPWNVA

SEQ ID NO: 429533 - protein, 415 aa, unidentified
MLKIVYPICCGLDVHKSTVFACIAATDGNGVTTYQNRKFPTFTKDLKELAQWLSANNCKDVCMESSGKYWHPVWNILEPTCNLVIAHPKYVKSIRGKKTDKKDAKWIADVFKHDLVSGSFIPPDDIRQLRDLTRYYRKLVGFNSGERNRAQNCLTVSNIKLDEVFTDIFGKSSTAIIERLLENPGDPFDVAPFVDARCKTPISEIQAAVDGAICPEQVEKMKIIRSHIKNLELCKANLESAVLTIAEKYLPQIELVLSVPGFRDPFIAISIIAEIGVDMSVFPSAKHLCSWAGLTPQNNESAGKKKTTRISHAGTYIKPLLVQCAVAVSRSEKHPEIRNRYLVLRKRRGHKKAVVAIARMMLTAIYHILKKNEPYNAELYRKADKPPVNRQVSVDEAIFILQRQGYIITQPQTVK

SEQ ID NO: 429534 - protein, 326 aa, unidentified
MATIGIDVSKKKLDLCWLRDAQAGKVKTRVFPNAHDHYPALLSWLLKQIDASPGELQVYLEATGIYHEPLAYWLHQSGVTVYVLNPARVRYYARSLGDQGKSDKKDSKRIVHFAQANPELTPWQPEPEEVRTLKQLAKRLETVQKDIQREQNRLEKAQFNRDTQAEHSITHVLALLRREAKRLIKEVDDHIDRHDGLKRDRRLLESIPGIGEVLSVHLLVTLRSRRFKSGRQVAAFMGLVPVEWTSGSSVRHAPRLSKNGDPALRQKLYMGAVVAMRHNPSIRRQYQRLCAAGKRKMSALGAAMRKLVHIAYGVLAHQKEYEPQPT

SEQ ID NO: 429535 - protein, 326 aa, unidentified
MATIGIDVSKKKLDLCWLRDAQAGKVKTRVFPNAHDHYPALLAWLLKQTNEEAGDLQVYLEATGIYHEPLAYWLHQAGVTVYVLNPARVRYYARSLGDQGKSDKKDSKRIVHFAQANPELTPWQPEPEEVRTLKQLAKRLETVQKDIQREQNRLEKAQFNRDTQAEHSITHVLALLRREAKRLIKEVDDHIDRHDGLKRDRRLLESIPGIGEVLSVHLLVTLRSRRFKSGRQVAAFMGLVPVEWTSGSSVRHAPRLSKNGDPALRQKLYMGAVVAMRHNPSIRRQYQRLCAAGKRKMSALGAAMRKLVHIAYGVLAHQKEYEPQPM

SEQ ID NO: 429536 - protein, 453 aa, unidentified
MPRPTTGGHPDLKMVNPNAAAIDIGSTMHMAAVNPSSCDMSVRAFGTFTQDLHDLADWFRSCGVTSVAMESTGAYWIPAFEILEARGFEVILVNARYAKNVPGRKTDVSDAGWLRQLHSYGLLRGSFRPEAEIATLRAYMRQRERLTEYAAAHIQHMQKALMEMNLQLHHVVSDITGATGMKIIRAIVAGERDPEVLADYRDVRCKSSPATIRAALVGNDRAEHVFALAQSLDLYDFYKTKIEECDQRLEAAVAALSVKGGDDRPPLPKARIKGRQVNAPAFDVRAALYGVLGTDLTQIHGLGPSLALKLVAECGTDLRAWKTAKHFTSWLCLSPGNKISGGKILSSKTRRSSSRAGALLRLAATTIGRSDTALGAFYCRLSARIGKQKAVTATARKIAVLFYNAIRHGMTYQDQGAAAYDERHRRRVLANLQRRAKTLGYALAPVLPEPAVS

SEQ ID NO: 429537 - protein, 353 aa, unidentified
MEYANRVDFTGQPIYIGMDVHKKSWTVSIFLEHLEHKTFTQPPMVAPLVSYLHRHFPGACYRAVYEAGYCGFWIHDQLRENGIACMVTNPADVPTRDKERRRKGDRSDSRKLARTLRSGQLEGIHVPTRARVEDRGLVRTRQAMVRKQTRCKNQIKSLLFLYGLPVPDAGSSWSRNFLRSLEALRFERDSGNLALKAYLTELMQLRQIIAQLNRDLRALSRTDEYREGVQLLKSVPGISTLSAMVFLTELGELSRFASFDKLCGYVGLTPDTHGSGEKQGIGDITRRCNQMLRSLLIECSWTALRKDPALALAYHCYCQRTRKTKAVVKIARKLLNRIRFVLNHRHPYEMNVV

SEQ ID NO: 429538 - protein, 309 aa, unidentified
MESFIGIDVAKDKLDVHVRPSGEAFGVARDAKGLIDLVERLRMLTPTLIVLEATGGFERTVAAALAAAKLPLVVVNPRQIRDFARAVGRLAKTDAIDAAIIAHFAEAVRPEPRPILDSEAQALDDMVSRRRQLIDMIVAETNRKKAITHKRITREIDRHLLYLQKLLTELDGDIDDAIRSSPVWREKEELLISVPGVAQKIARVLIAELPELGTLDRRRIASLVGVAPINRDSGTMRGKRRVKGGRTNVRSALYMAAVTAARWNPPLREAYQRLRAAGKPPKLALIAILRKLLVVLNAIIRDRTPWKIA

SEQ ID NO: 429539 - protein, 343 aa, unidentified
MKATTVGIDLAKTTFQVCALNRAGKVISNRPVKRAALAETVAQLRPTHIAMESCSGAHHWGRTFQEFGHEVILVPPQHVKPFVRGGKSDPRDALAICEAARRPGLHPVPVKTTAQQDLQSLHRVRQQQVEHSTGIANQIRGIAHEYGVCFPSGIQRLLRELPYALEDAENGLTPITRELLARRFIDLLAVREEIKRTGQRIVAAAEQLHAWPHLMELPGFGVLVTSSYLASIGNGRQFQRGRQVSAWLGLVPRQHGTGGKVRLYGMTKSGDRYLRTMLLHGARAAIRWSRDKDTPLARWIAPLIERRGFNKAVVALANKNARIAWHIVARGARYDPGKAFGSA

SEQ ID NO: 429540 - protein, 349 aa, unidentified
MRIIGCDFHPSYQQIAVLDLATGETVEKALSHERKEEVRTFYAGLQGSVRVGIEASGQSQWFERMLAELGHEVWIGDAAKIRASCERKQKTDRRDADLLMKLLAEDRFPRIWVPTAAERDGRQLLLHRHKLVRMRSQVKNQLQALALNQGVQRKWKLWSETGRKQLESLPLLPWASRRRAELLQLLDQLGASIAALDRAVAEQAYAQPATRRLMTHPGVGPVTALAFTLTMGPAQRFQRGKQIASYLGLIPSEYSSGGRKQRLGHISKQGNPFLRGLLVEAAQSAVRYEPEMRRAYQRLAQRKCRALAKVAMARKLAVRLYWMLRLQVDYAQLIQGSHAGQPGTFRGRG

SEQ ID NO: 429541 - protein, 428 aa, unidentified
MNSTREKRLRQMNNETLIIGVDIAKEIHVARAFDYRGIELEDSIEFANDYLGFSRFKEWIKRIKKTEAKIKLLVGMEPTGPYWFNLARDLKRNDISIVTVNPKHVKDSKELDDNSQTKTDHKDAGVIAGLVKDARYSKPNLLEGSYEELRNSKKLLEMIDKDVSRTKNQVINWLDRYFPEYTYAYKDWESKSFVKFLKEYTFPSIIAKKTVEELYTFLPSKQRRGVGRRKINCLITAAKRSVGILEGLEVAKFEIEYLLKKYEIFEKQKEKLMKKIEEISKDLPEVKKLVKIKGFGLKTASIIIAELGDLNNYDDAKQVIKMAGLSLVEHSSGKYKGKVKISKRGRSTLRKTLYLVMVGMVGSNKVFKKLHQYYTGRRKNQLEKKASIIALCRKLIRIIYTIITKDLEYDEEKILRDIQWPEEFLISA

SEQ ID NO: 429542 - protein, 348 aa, unidentified
MKITTTGIDLAKTVLQVHGVDKHGKVGLRKQLKRKDVLSFFANLEPCLIGMEACGSAHYWARKLSELGHTVRLMAPQFVKPYVKTNKSDRNDAEAICEAVGRPNMRFVAVKTAPMQAVLALHRARQGFVKARTAQANQIRGLLAEFGIVIPKGIGHIAKRLPEILEDGENGLPGMMRELLQRLGENLKDMDRQVRELERQIVLWHRENEASRKLEAIAGIGALGASAMVATLGDAKSFKNARQVPAWLGMVPRHEGTGGNVKMGAISKRGDVYLRTLLIHGARAVIAHIERKPDHADEWLKKLIARRNKNVAAVALAAKNARIAWALLAHERSYQHDYHDYVATRKAA

SEQ ID NO: 429543 - protein, 349 aa, unidentified
MTEQRRSYAGECVYVGVDVHKETYTVTCVCHKQIVKPATVQAEPGGLAVSLPRGFPGATLYSVYEAGFSAFVLHRVLTKAGITTMIVNPASIAVAANDKVKTDRRDSKKLAIDLADGRLRGIYVPTEAAELARLLPRTRAQIVEHRATIARQINAKLHQFGLIAPSSRRMISNRYLREMATWTLPPELSVSLTLLAEQWRFATRQLIEMRRLLRDQAKAQEEIEKVYRSVPGIGEVVARTFATELGDMTRFANERALFSYTGLTPSEHSSGTAVRRGSIRRQGSSRVRHLLVETAWRAIPRDKALKEIFDRIAATRGKKRAIVAIARRLTGRIRAYFRQGTTYAVGTAA

SEQ ID NO: 429544 - protein, 405 aa, unidentified
MDIQPIFRCAVGIDIHLALICVCIIVAEPGLEPVVHRREFGGFQRDRRAMADWIASFTPDMVVMESTGIYWKSPYAALEHVGIHAQVVNARQVKKVPGRKTDTGDAEWLAMLARAGLLRGSFIPPERLRTLRQVSRHHQKITAMRAMEKNRLVKVLSDAGIRISAVVSDPHGVAASAIIDCLLEGGTPEQALTLAGRLQAPREVLLAALQGELSADHRFVAQTIRHHLRALEAQLADLEHYLVDALQPHEAALQLLMTIPGIDQLAAAKLLVEIGADMAAFGNAGRLCKWAGVCPGNDESAGKRRRGDTAPGNRYVRALLCQIAWAAVRTTSQFKSRFQNWVSRRGTKRAIVAIGHKVLKTVFVLLSRQVPYHDSTVDYEALVVKRNAPRWIKQLRKFGYLPKMA

SEQ ID NO: 429545 - protein, 354 aa, unidentified
MPDGIRWVGLDVHARESTIAVFDQATGELATKRVVGRPHELLPLLRAVERPARMVYEAGPTGYGLARRALAEGIELGVCAPSKTERPADRVKTDKRDAVRLARLLAAGELVLVTIPSLEREQLRDLVRCREDIRCDLVRARHRIGNFLLRREIYWEGPGEAWTRKHRSWLTSIRFSDHASQATLADYLHAHDVLIARRDQVETDLAKLATSAPCAHTVARLRCLRGIDTLSALGLCAEIGEWARFDHPDQLSAYLGIVPCEHTTGSQRRLGSITKAGSTHARRLLIEAAYHYRRGPGVGQALELRQRGHAPEIINISWKAQRRLNARWRQLKDTRRKPGGIVAVAVARELAAYC

SEQ ID NO: 429546 - protein, 355 aa, unidentified
MKSVKYIGLDVHQATISIAVLDASGKLVMQSVIATQVSTILDFIHGVRGELHLTLEEGVSAHWLYGLLKPHVHSVMVCDARKSARMNGGNKSDRIEARKLAELLRAGQLSAVFHDEVGVRTLRELARSYLALTQDVTRVMNRIKGIYRSQAIPCAGKRVYTQRHRSACLEQLEQPGQRRRADRLYAQLDLLQPLRQQARKELLAESQKYPIRHTLQQIPVVGPIRAALLIALIQTPHRFRTKRLLWTYSGLGVKTESSADYVFQHGELRQSKKNFATRGLKQNHNHQLKYVFKSMAQAASITAGPLQDYYRGLLAKGTRPEMARLTLARKLAAIVLILWKKGASFDPTKLTTQAA

SEQ ID NO: 429547 - protein, 414 aa, unidentified
MEVLHPRCAGLDVRKDGVVAAVRLAEPGGVRGEVRRFDTTTPGLLALGDWLAECGCTHVAMEATGVYWKPVWHVLSDGDLELVLADAAHVKAVPGRETDVADAVWLAELLAHGLVRPSFVPDAPTRAPRALPRTRERLVREQSGHVRRRRKTLEDADLELASVLTDVMGLSGRAILEALVAGETDPERLLALVRRRVRAEPAQLRAAPSGRVGKSHRFLLRLHLGRYDALARALEEIDAEVERGLDPFRDAVRPLRTVPGTGDLAAQAIVAETGIGMGRFPTAGHLLSRAGLCPRSDESAGKRRPTRLRQGAPWLKATLVQRAWAASRKKDGYLRAQFQRLRQRRGPKKAICAVAASMLAAVWHMPRDGTVYQDLGADRFHKRSPEQQAHHLARQIAGLGFACAITPQPEAVSA

SEQ ID NO: 429548 - protein, 357 aa, unidentified
MDDGSWVGLDVHARKVVAGVLDGDSGELHRREVPWRSEETVRWLAALPRPVRVAYEAGPTGFTLARACAAADIACTVAAPSKIPRAPGERVKTDRRDAERLARLLRLGELVAVRVPSPAEEAARDLVRAREDVRADLMRARHRLSKLLLRHGLLYEGKAWTRTHEAWLARQRFDERPLALAFADCYEAMAQVRARRDALDAAIAELAHKPAFAEVVGRLVCLRGVSTLTALALTVELGGWERFSPQSLGPYLGLVPSEDSSGERRRLGAITKTGNGHARRLLVEAAWQQRRPLRTSAVLEERRRGQPAAVRARADASARRLHRRWRALESRGKRRTVVAVAVARELAAHCWALATMA

SEQ ID NO: 429549 - protein, 528 aa, unidentified
MACPRRILASDTVSTVIHQTVRTAGSSSPELAVNNCAAKNLRSVHNGAGRIAPGGSRSLASGPMRTSLSSPARPGATAPMSERTIAPEAPCIRMTGAVARCARPKRKTVKTWTEITHYAGFDWARDHHDIVIVDPQGNITTEFRIAHTLAGWQQFREKIQGYGAVAVAIETSQGAAIDQLLQSNVTVYPVHPLSAKRYRERKAPSGNKTDHLDAWALADALRVDGQGWSMLQPLDPLTQTLRLFCRDEMALIEHRTALVNQLQQALSEYYPAALEAFDDWTRPSCWEFIIHFPTPHQLVKAGKRRREQFLHVHRLWRPETVNKRLEIFARAEQFCGSEPVTAAKSFLALSLAKLLCTLEHQLQEYRKQIQALFEQHPDHDLFGSLPGAADKLAPRLLGEIGGDPDRFESVAVLQMLAGTAPVSFQSGQIHKVRIRYQCQKVLRYVVHLWANSCRKSCSWARVYYRQKRAEGKSHACALRCLGQRLLKILHAMIRTRTRYNAELHARNQQAHGSWVLKLVTKQAPLGSE

SEQ ID NO: 429550 - protein, 354 aa, unidentified
MSVKTKALSFAGQTFYLGIDTHKSNWKVVIRSNQVELKTFSMNPAPEELVSYMRKNYPGGRYRSVYEAGFCGYWPDRALRRLGFENIIVNPADVPSTNKEKDRKSDGIDGRKLSRERENHSLTGIYVPTPQVESHRSVSRLWRQYSERGAQIKNRIKCFLNFTGIPIPEGHEGAYWSNNYLTMLSKLVFEESYNRTVLDMHLEELRHIRQQRKVLLREIRAIVKDVPIIPLLRTVPGVGQIVGFVLYAELIDIQRFKNLDDLLSFIGLVPSEASSDTTVVKRGITSRHCRHLRPMLIESAWMAIRNDPAMTAAFAHLVKRMSKQRAVLRIAKKLVNRIRYVWLHQKPYVTAVVA

SEQ ID NO: 429551 - protein, 339 aa, unidentified
MKYTTVGVDIAKNVFQLHWVDAGTGEIVNKQLKRAAFLEHFANREPCLIGMEACGGAQHWVRRLMEMGHQVKLMPAKFVKAFNIGNKNDPADARAIWMATQMPSKPVAVKTEAQQAVLALHRLRQQKIKFRTMQMNSLRGLLTEYGEVMAKSRAALDKAIPGVLARLSERLPAMLIDSLRELWNDLDRLDKQVADIERRLQTWMKEDKACKRIAAIPGVGLLTATATVATMGDAKAFRSGREFAAWLGLVPKQIGTGGKIQLLGISRRGDTYVRTLLIHGARSVLFHGKHTGSWAEQLQKRRPSNVVTVALANKMARTVWAVLAHGTPYNQRHVSARPA

SEQ ID NO: 429552 - protein, 411 aa, unidentified
MVRNDTVGRDTPVIAGVDTHKDTHYAAVITSTGQQLEAAPFPATPAGYRALTAFITAHGPLARVGVEGTNSYGAGLARHLIAAGIEVVEVLRPSRQVRRMRGKTDQIDAYAAARTALSGTGCSTPKNGDGLVEAIRVTVVARSSAIKAGTDTTLQIRDLLVSAPDTLRSQFRDLSGSALINMLARTRGHESDDRLTGLTRATLRTLARRIGMLDAEIAGHDRTLRRLVAEANPALLQAKGIGVICAAQLLIAAGDNPERIKGEGAFAMMCGAAPVPASSGKTIRHRLNRGGNRRANSALYHIAVVRLHSDSRTRAYAARRRAEGRTTKEIIRCLKRAIAREVYHLITNPPQPLDTTELRPLREAADLTLAQAADALKCSISTLSTIERGHSSNRQTITTYRDYLTHHQHAA

SEQ ID NO: 429553 - protein, 371 aa, unidentified
MEIHTVGIDLAKTVFHFVGLNARGEVVVQRKCSRSQLLRFTSNLRVCLIGMEACGGAHFLGRALRDQGHDVRLMPAQYVKPYVKTNKNDYIDAEAIAEAVGRPRMRFVPIKTDDQLDLQSLHRIRERWIVRRTAVINQIRGLLLERGITIRKGRLYIEASLPAILEDADNKLSGILRVLLAQLQLEMQYLGRQIDESDKLILGIAKGMDSCRRLITIPGIGPLTATATIAAIGNGAAFKKGRGFAAWLGVVPGEHSTGGKQKLTGTSKHGNKYLRKLFVQGAHTVLLQKNKQSAGLSTWLADLTARKRKQVATVALANKMARMVWAVLTKGEAYRPRYCSNPPKWLADDARRTTGLDIAPRFPHPQTIYCG

SEQ ID NO: 429554 - protein, 392 aa, unidentified
MIYVGIDVASQKRDCFLLKDTGEVFSKTSFTIKNDFEGYKKLHNSILQFVESTKDSNVRIGLESTWHYSKNILLYLIKQGYQTTLINPILTNMDRKASTVRKTKTDKIDAEAICKFLDKNRFDFKPYTLLSYHIDALKSLTRQRFSLVKQMTQQKLIFQRLVNVIFPELLSHFSNDYGESVLNILYSYPTPKKLAKAHKESITKLLHSRCKITSSEILELAKNSIGQSEEYLGFELKHTIDMILFYQSQIEIYNKQIEIELNETEYGKIITSIPGVGIITGAMIISEIGDINNFTTSDQLLAYAGLDPSVYESGKFESSHNKPSKRGSKYLRWAIHQASSVIWQHDNTFKDYYLKKIKESKHHYVAIGHIDKKLIRVIFSLLKNKSMFIPQK

SEQ ID NO: 429555 - protein, 482 aa, unidentified
MVLRVPIGSWMPDKRIKLPKTIRHGALLTLKIKTMSKSKTKSEKVKRISQLTVINPTAAGIDVSDTEMMVAYPINSEQLEIQVFGCFTRDLHLIANCLKAKGVTTIAMESTGVYWVALFLLLHEYGFEVYLVNAKHVKNVTGRKDDESDAEWIQKLHSCGLLSASFQPDNMIRTLRSMVRHRRNLVHTSSTYLNRIQKALELMNIKIHTIISDIDGKTGLLIIEAILAGERNPEVLADLRDKRIKANREDIIKSLEGHWTTEHLFELRQCYQLYCTHQQMINDCDREIQKQLAEQIASANEGVIPDIPKDKRKASGKHKVQFNLTGYLKNILDVDVTEVCGISELSALTIMSEVGTDMSKWKNEHHFTSWLGLAPNTKISGGKVISSRIKKKKHHAGQAFRMAANSLYHSKSPLGDHYRRIRAKAGAAKAVVATARKLAIIYYKMVSNKEAFNPKALEDYQQKYKEMKINQLKKKIAQLEAA

SEQ ID NO: 429556 - protein, 343 aa, unidentified
MQAIVVVGLDIAKSVFQVHGVNAHGDVIVRRQLKRRYVVAFFKKLPSCLVGIEACATSHHWSRELRALGHTVRLIPPAYVKPYVKRQKNDAADAEAICEAVQRPSMRFVPIKTPEQQSCLMLHRTRHLFIRQQTAVINTIRAHLAEFGIVAPVGRNGVEELLYAIADQRDERIPEVARACLEALGTLLGKLKAQILEFDRQINTWHRSNETSRRLDELPGVGPALATALVASVADPKAFRSGRDFSAWIGLVPKQNSSGGKEKLGNITKQGDRYLRSLFCAGALAVIRYAKIHGVKHRPWLAKLLERRPTKVAAIALANKIARMAWAMMAKGESYREPVALAR

SEQ ID NO: 429557 - protein, 428 aa, unidentified
MDELNRNRLEEFRQLRQEVRHSEEYLIVGIDIAKDQHHAFFGTATGKTLLRRLAFSNDHEGFRKLLDHAEALRVRHGLKKVVYGMEPTANYHKPLGEYLIHLGRSVVLVSGVTVARNRESLDGRWDKHDVKDSANVADLISQGKCLYYEYPSAQLRGLRGLLSLKRRLKKQEHGYRVRIRNNLIAQYFPEMDRDYERLGAEGLSIVRWCLPASKIAQLDVDPFIERVTSRRITMEKRGRLGAIWEKAAESIGCNGVPGVDHEAKVMVEGLKQIRAMIKETEGKIQDLCKQFPEYSFLLTIPGFGPDVSAKVLGAIGEPDRFDNRRQVLKLAGLDLSADRSGKDSDKAIPQISKRGKADLRYALYQAALIASTKNQKFMYYYTSKLRGREKEKGIHTKMYVKLSAKMLLIAWTLMKKKEAFDPAHLDAE

SEQ ID NO: 429558 - protein, 372 aa, unidentified
MSQSSTLYVGMDVHKETIAVAYVAKDHDAEVVSLGTFGTRQCDIDNLIRKLQSKAKHLVFVYEAGPCGYWLYRYLTKKDYVCWVVAPSLIPKRAGDRVKTDRRDALQLARLMRSGDLTPVYVPAVDDEAIRDLSRAREDTLRDLKAAKLRLKAFLLRHDIRYTGRANWSPAHLRWLSEVICPTPAQQIVFQEYVQTVTEQTERLGRLELELHEQVQTWRLHPVVEALQALRGVQFTVAVTTVAALGDLTRFDNPRQLMNYLGLTPSEYSSGARRQQGSITKTGNTHARRALVEGAWAYRYPAKVSRHLQLRLEKLPAAIQAISWKAQVRLCTRYRHLMAKGKNANQVVVAIARELSAFMWAIAKQVAGSPKA

SEQ ID NO: 429559 - protein, 350 aa, unidentified
MKKVAYLAIDVHAGHCVLGHMDFDGTFLGNRRFPTSERHIIEALKAVKAKEKYLALEESNLAYWAAQVARPYVTEVISSDPRENALIYRSANKRDKVDTHKLCRLLRLGELNRVYHAENDERAIFKAAVQHYIDLRDQQVVLKNKIKAMYRHWGVIEVTGQAVYGTARDDYLQRVKHLHIRNQLHRLYCLMDETEAMQKKALTAMKQLGRKYPEIKEFQKMPGIGEILSHIFNAFIQTPHRFANKRKLWRYCRLGVTDRSSDGKPLGYKRLDRSGVSELKALSYRAWLCALGGDNEVRRFYSRSLRQTSDHVHARLNTQRKILAVMYGMWKRGDAYRPQLFLDSPKMSVV

SEQ ID NO: 429560 - protein, 355 aa, unidentified
MLSTKYIGMDVHKETASIAVLNSSGKLVMESILETKANTIIQFVQGLRGHLRVTLEEGTWAAWLYDLLRPHVTEVVVCDPRKNALLKVGNKSDRIDARKLAELLYLNRLKPVYHGEHGVRTLKELSRSYLAISGDQARVMTRLKALYRSWAIPCAGKQVYTGRYRSEWLGKITEAGVRRRAEFYYQQLDALHALRQQVRRELLAESGKHQASKLLCEIPAIGPIRAAQLIAILQTPHRFRTKRQLWAYGGLGIETHSSADHRYVDGQLQPSKRQVSLRGLNRNHNHELKNIFKGAAIIAATKPGPLQQFYGALVAKGMRPEMARLTLARKIAAIILIVWKKGVCFDAQYLKPQTA

SEQ ID NO: 429561 - protein, 339 aa, unidentified
MPLQTPPIVQESKPSFAGIDVGAEELMLTVRKNGTSCKAQKFANTPADRARLVKKMVGMPGIVVCLEATGVYHFDLSIALHDAGVALMVVNPKSSHNFAKALMKNSKTDAVDAETLAQYAERMDFVAWTRPSDEKIALRSFARRVDALTRQKAAAKNQLHALTASQETPKGVLHDVKLSISQLEKRIARLSEEARVLIGEQADLERVFQLLTGIKGVAQTSAIALMGELLLLPTGLSHREWVKFAGLDPRAFESGKSVHQQARLAKAGNRHIRSALYMPALSATQHDPYVRAYSRHLVDNGKKPLQALCAVMRKLLHAIHGMLRHDKPFDNTRFYAIPA

SEQ ID NO: 429562 - protein, 465 aa, unidentified
MQYVLGIDLACRARHQASLADIDGRIVWHGWKFTSRPEELERLWAKIALGPGDDLLVVMEPTRNAWVLPKHWFASRGARVVLIPTTQSADLRAYLSKHTKNDKLDSQLLARLPSLHGEELREHHGAGPGDPLRRLVRRRDRKVAQHTQAKMRLDSLLELLGPGWHDALGSDFTKTGAKVLIRYSDPRALLRLGPARLTTFLARHSRGHWGRPHADALLAAARESVQMWGPEGIDYAELADSIAAEASDLLTLHDQIAALDARIAPHVQDADPGKVLTSVPGIGAATAAVIVAIIADPARFHSLDAVRAYSGLVPITSQSGNQASARGLTKAGDPLLRKMAFLAADTARQTDPQLARQYQRLRHSGRHHTSAICHLAGTLLVRAVACWRANSPYILKDTDGTPITTAQGRQIVNDRYQIDPGKTRGQTKNRKAQHHKKRTSRESQKSHSAPTSRPVPINPRSPALT

SEQ ID NO: 429563 - protein, 395 aa, unidentified
MRFAGIDIASETHVLAIVDGDGEVEVKATPFGEDAAGYEKALGLLGTPGEVLVAMEATGHYWKNVFAALAAVGHRVALLNPLRTRRFADEDLERTKTDAIDALGIARFAAQKRPIPTHLPDSAAEELRELVRLRERLLQDFGDRVRQLHRLVDLGFPEFTRYVRGLDSELASAILHDYPTAAAFHGASVKRLAALRYDGRHPVGLDLARTLIDAARRSVGHHHGAAYRVQVRYACQDLDILRRRLRELDHDIEGKLREHEVGRLLTTIDGIGTNTAAFVIAEVGDPAAHFRSASALAAYVGAIPGLKQSGRHTASRAALTPIGNARLRKALWMPTLTAVRYNAWLRSHYQRLRARGKLPKVALIACMHKLLLAIYSVAKHRKPFVPQLAAAETAR

SEQ ID NO: 429564 - protein, 384 aa, unidentified
MNKHNILFIGLDTHKEFIEVAYIEDQRGAKPVHFGRISSAKIAIKKLVRQFQSKYPNATLHFVYEAGPCGYWIYRLLTGLGHCCYVVAPSLIPKKPGEKVKTDKRDALKLAKLLKSEDLTPIYVPESEDEAVRDLSRARETAMKDLKDAKYQLKALLLRNNINYAGTANWSSKHLRWLTELILPHPAQHIVLQEYLQTINERLARLKRLDNELEHHVKNWRYYPVVKAIQAMRGVRLLVATGVIAELGDLTRFDHPRKLMSYLGLTSSEHSSGGKQRQGAITKCGNGRARRLLVEGAHSYRFAANISTELQKRQEGLPKEIVDIAWQAQLRLCRRYQRLLFKGKHYNVAVTAIAREMIAYVWAISREVVLTPVNPSLRIARVPA

SEQ ID NO: 429565 - protein, 385 aa, unidentified
MAEYILVGCDLHDENMVLRIAADNGPVEKRVLPNTRSGYNALLDELKRRSNAAGADKVMIVYEAGPHGFVLYDAMTKAGVDCRVLAPIHLPQSPKSRRRKSDGRDSRRALRVLRSHLFSGEELHDIWVPEPSLRDEREVVRLRADSSHELTRTKNRIGSLLKRYGVRKPAHVGESWTRRHLAWLQCMAGDASPLGPHTRRVLGYQLDHLTWVEARLGAMDQDVAALARTPRYAEPVRVAMEDKGVGVLTAMVYLSEMGDLRRFANRADVGEYLGLVPSRDQSGKCEDGFGHITHQGSPRVRRVLNQSVWMWVRTDPKAQAFVDRLADEHPKYGKRIAVVALMRRRAVRLWHRCLRAQLRAGSFGPPVDPASDPRAAEPAGRDTTR

SEQ ID NO: 429566 - protein, 401 aa, unidentified
MVSDFMKGRYNLMKIFVGIDIAKLNHFAAAISSDGEIILEPFKFTNDADGFQLLVSKLESFDKNSIIIGLESTAHYGDNLVRYLVAEFYQVCVLNPIKTCQMRKNNVRKTKTDKVDTFVIAKTLMMQDDLRFITFFDLDMMDLKALGRFRQKTIKQRTRLKIQLTTYVDQVFPEIQYFFKSGLHQHAVYALLKEAPSPKEIASMHMTHLANLLKVNSHGHFTKELAKELRVLAQKSVGANDSAISIQITQTIQQIELLDSQLEKIEAEMTDIMKFNDSVIMTIPGIGYINGGMILGEIGDIHRFSNPNKLLAFAGLDPSVYQSGNFQAKTTRMSKRGSRVLRYALVNAAWNVVRNNATFKAYYDAKRAEGRSHYNALGHCAGKLVRVIWKMLTDEVEFNLE

SEQ ID NO: 429567 - protein, 369 aa, unidentified
MDQGTTVVGLDVHKQRIVGAVLPWGSDRVTEKVVLENRPQEIERFVTRVAGKGPVEFVYEAGPCGYEVQRQIAGLGYRCVVVAPGMTPVRPGDRVKTDRRDAEKLARYYRAGELREIRVPSREEEAARDLPRVREDVLKDLLRAKNRLGKFLLRQGRVYAETKTWGVKHRSWLRTQRFEWTPLQQSFEAYLRAVEEAEFRLEILNHQLEELVQQDPYRVPVQYLRCFRGIDSLSALTLVVEAMEFKRFGTARKFMSYTGAVSSENSSANRVRRGSITKAGNAHIRRILVEAAWSYQHPHGESRVLAERRKECPREVVYLARKAQDRLSRKFRRMIHRNKRSQVAAVAVARELAGFVWAMAQHFPLPAAA

SEQ ID NO: 429568 - protein, 341 aa, unidentified
MNITTIGIDLAKNVMQVHGADDHGRAVLKKQLKRAQMLPFFVNLVPCKIGMEACGSAHYWARKLQALGHTVQLIPPQYVKPFVKRNKNDAADAEAICEALTRPNMPSVPVKNASQQAILSVHRARQGFVKARTAQANQIRGLLAEYGIAIPQGIGHIAKRIPEILEDGENDLPGSFRALLQRLADHLKALDRQVGELEVEIQFWHRENDASKKLAKIPGIGPITASALVATIGDARNFKNGRQLAAWLGIVPKQHSTGGKSTLLGISKRGDTYLRTLLIHGARAVVRIAENRPNADPWLKRLLARRNKNVAAVALANKNTRTLWTLLAHDREYLPDYRVAP

SEQ ID NO: 429569 - protein, 392 aa, unidentified
MNRIVYIGMDVHTSNYTLCSLDPGYGVEKDNYFAEVQFINNFVTNVVNYVSNLKKKLKDCEFVCGYEAGCLGYSTYKDLTKVGIKCVIMAPSTMAVQKGGKKVKNDRRDARVIAQCLAYQTYKEVYVLSEHDEAVRGYLRMRDSHNKALKRIKQQIIAFCTGHGLFSPTKSNWTVAHLKWLKDLKFNDPVEQEILNEYLSSLTFLSDKIKAMDVRIEELASEKQYCENVKKLRCIKGIETNVALTLLAEIGDFNRFSKPTDFAAYLGLIPGEQSSGDKVRGTGITKAGNSTLRRKLTESAKGYWRGRIGIKSATFKKLEKELPKEVTEYALKANTRLQRKFFNMTHVKGKNMNVAASACAREMACFVWGLITNHYEKAPAVPKTDEELLDLN

SEQ ID NO: 429570 - protein, 341 aa, unidentified
MKKFIRIGIDLAKNYFQIHALVSEGGPAVTRKVRRSKMHEFFSQIEPCLIGMEACGSAHYWARELKAMGHEVLLMPPAYTKPYVKRGKNDAVDADACCEAMSRPGMRFVPIKSAEQQATLMLHKTRELLVKQRTMSVNALRSHLSEFGIIAAKGIGRVDELLELAESDATLPNAARVGVKVLSQALEGLDKAIDDLEDEITSAHAQNEMTRLLYKVPGIGKIISSVIAASVPDPSVFKSGRDFAAWLGLTPRQNSSGGKQTLGAITKQGNRYIRKLLVLGATSLLNVMGKRKGALRDWIVGLLAKKPARLVTVALANKLARILWAMMKTGESFRTEMFAKA

SEQ ID NO: 429571 - protein, 357 aa, unidentified
MESQEVKYVGVDCGKKSIEVVRINSENSLERRQFSTTESGINNLLQWLTLNDIVGLEAGSQSFRIAKSILNKGVQVIVLNPGNLATIYQSLKKTDKEDSLKIARLIQRHPIEELPTVPIPNDEEEDNRRLCSEHENWTKQLTQGKNRLHSLFTQAGLTQITKKHLRTKVSREASVTLLSDRYKKEAERILKVLDLVELNLKLIEEEIQEALKKNKAYVQTIMSMPGIGMITSLAIMSYMGDCKRFSSAKQAAYYAGLVPRVDISGDTVRYGRIINRGCHSIRRVIVQAAWSLVRCQHGGKVKEFYQRLYLKKGAKKSIITTSRKMIEVLYVMIRTGKLFDSMPENILNRKLTQYGLM

SEQ ID NO: 429572 - protein, 302 aa, unidentified
MFVGIDVSKNSVDIASACETIKLQGVNPLCAAELLCKNSVQLVVVEATGGYERSVVETLQAKDIQVAIVNPRQARDFAKALGHLAKTDRIDAFVLAQFAEKVRPQAAQPAPLQMKQLQALVARRRQLQQLLTQEKNRRHQAVDAEIKSSLQAVIAALQKALKQITVSILQMLRQNPEWQKMQALLGQVKGVGLVTAATLIAELPELGRIGRKQIAALVGVAPFDRQSGKWRGKSFCQGGRKSVRTALYMAALTAVRHNAPLKAFYANLVKAGKPKKLALNAAMRRLLTILNAITRDHMQKTT

SEQ ID NO: 429573 - protein, 404 aa, unidentified
MYNAVGIDVSKGKSTVAVLQPGGVVIHKPFDVPHTSKDLNQLSEYLSSLDGDTKIVMECTGRYHEPMANALHKAGFFVSVVNPHLIKNFGSNSLRKVKSDPADARKIARYTLDNWTELRQYVDMDNTRTQLKTLNSQFSFLMKQKVAAKANLIALLDNTYPDVNKLFDSPVRDDGSEKWVDYAYFFWHVDCVRKIGLKTFTERYKAFCKKHHYNFQPSKPEELFHASKELVAVFPKEKNYKLLIQQSIKQLNLASEHVEQLRKEMDALASSLPEYTTVMNIYGVGKTYGPQLIAEIGDVSRFTHREALTAFAGVDPGVDESGQRKPKSNRASKVGSGRLRKTLFQIMTTLLQNAPADDPVYRFLDKKRSEGKPYYVYMTAGANKFLRIYYGKVKECLRNLEQNG

SEQ ID NO: 429574 - protein, 376 aa, unidentified
MINYQSNQRTIHKLTGGFMLYTGIDLHRRLIVMCTVNENGAIVARSKIKTEPDALTTYFRQWTDPHHAVVECTSNWYWLCDILRSLGVTVMLAHAKYLKAIAYAKVKTDAVDAHTLAQLLRMGFVPEAHQLPSEYRALRDLLRQRMVMEHQRTNLMVRMTSMLAKFNITKLPCVASQPRFADFLTTCAIPEEYRITLLLYHQQCLQVAQHKKHLEHYFKGELRPTPTLQLLVSIPGIGDITGAIITMETGEISRFANDKHYASYCRLAPGAKDSGGKHKHRSGSKDGNQYLKYAFTEAALKAMRFYPEIRQFAAHLERRSNPSIARTVVAKELSKIAYYVLSRQEEFKTFKGIKIRKTRDWPRTCKPVRITGVHSL

SEQ ID NO: 429575 - protein, 359 aa, unidentified
MQVSTSSPLPMTVGLDLGDRKSRYCLRDSAGILEEGTLAMSPGAMRRGLRRLVSRGAQRVVLEVGNQSAWVSRLAVELGLEALVANPRRLRLITHDLRKSDQRDARVLADIGQVRPELLSPVEHRGEQAQVDLMVLRTRSSLVEGRTALVNEVRHRLKSLGARVPHCTPEAFPRRAGPLVPEALRDTLEGTLTLITRFTSEIRRLDEKIEALSQESYPPTRLLRQVPGVGPITSLYFVLALERPERIDKTRNVAAYLGLVPRRRQSGKRDPQLCITKAGDSTLRSLLVNCAHYILGPFGQDSDLRRHGLRIAASGAASAKKRAVVAVARKLSVLLLSLWRSGEVYEPLRNTKRLQARTG

SEQ ID NO: 429576 - protein, 455 aa, unidentified
MPKQKRTRNARTLPVARVLEPNAAGIDIAATEVYVAVPTGRDPQPVRRFSTFTDDLHRLADWLQACRVQSVAMESTGVFWIPLFQILEDHGFRVCLVNARHVKNVPGRKTDVSDCQWLQYLHSVGLLRASHRPTQTICAVRSIWRHRESLVQMAAVHIQHMQKALDQMNLQLHHVISDITGTTGLAIISAVLGGERNPENLATLRDPRIVASRETIARALVGDYRAEHLFTLRQSLQAYRQYQQWIAACDSEIERQLQVLPGNLPDDPKALSKPRDHHKPRRNEPRFDLRSQLYRIFGVDLTAVPGVSSLTAHALLTEVGPDLRRFPNAAAFASWLGLCPDNRISGGRVLSVVTRKVKNRLTIALRMAAQSLHRSQSYLGQYFRRMRIRLGTPPAITAAAHKLARVLYHLITTRQPYEESTFAAMEERARQRQLLRLTKQAARFGFQLVPGRSVP

SEQ ID NO: 429577 - protein, 388 aa, unidentified
MIKYCLGVDVSKNDLHCCICVIDQIQRVTVKGSRKFANNKEGFKELDLWLRKQHKEPSVPLVVVMEATGIYYEQLAFYLFKSGYSVSVVLPNKAKKYLQATGIKSKNDKIDAQGLARMGAEQCLDLWQPMDTFFYELRTLTRQHQNLQELKTSLGNQQHALEFGMYESKQVAQQLKTLITTIEKQVAAMEASIDKHIRSNSDVSQSVDNICQIKGVGLLTVAVVLAETNGFTLFKNSRQLVSYAGYDVVENQSGNHRGRTRISKKGNSRIRRALHLPAFNVIRYEQTPFIGLFQRTLEKHGQKMKSYVAVQKKLLVLVYTIWKHNKPYQLNYKRSKYTGEKEQVLTSLHALGKADAEKESSAKDGATQGKHTVEISQFASSLQSQIYD

SEQ ID NO: 429578 - protein, 429 aa, unidentified
MMQQRKAKRMKSWQNLTHYAGFDWAKDHHAVLILDHQGAIVADFEFEHSLEGWKSFVQTTSSWPNLALAIETSQGAAVDQLLQKNCTVYPVHPVAAKSYRERKAPSGTKTDHLDAWALADALRVDGHGWKTLQPMDPITQQLRLLCRDEVVLIEQRTALVNQLQQALLEYYPAALQAFEDWTDSFTWEFVLAFPTPQALTQAGKRRWEKFLHSHKLWRPETAEKRLKIFAQADQFKASDPIVRAKSQLALSLAKLLCTLGQQLKLYRKEIEALFRDHPDHDLFGSLPGAKKRLAPRLLAFVGGDPGRYGNHEVLQCIAGTAPISYQSGKIDKARVRWACDKFLRHTIHLWADCFRKASLWGQTYYQQKRHEGKTHACALRCLGQRLLKILYRMLVTKQPYDAELPSRNQQKHGSWVLSLVHKPTPQTGQ

SEQ ID NO: 429579 - protein, 371 aa, unidentified
MISIGLDVHQHCTALCQLDAGGRPEVEEVIRGGLHAVAARLRTIEEPFKVCFEASCGYGTLHDLLTPIAEEVQVAHPGEMALIFRSKQKNDRFDAQRIAKLLHLDEVPRVHVPSVDVRAWRGMIEHRRRLVDKRTRVKNALRAQLRGLGIKAPARHTLWSKAGIAWLEAQDLPTALDRIKRGSLLAELRTLESQIKIVVRELNIVGKGDWRVLLLRTMPGVGPRTAEAVAAYIDAPERFGSIKSIGTYFGVVPSQDASAGKNRLGHITREGPATVRKMLTEAAWQAIRHSPRFKAFYERVMAGQKQRRATAIVATAHKMLRIMLAMLRSRQPWREDSAPAAVCPTDASANDIETRTARRCVRGADSSRAVA

SEQ ID NO: 429580 - protein, 345 aa, unidentified
MVMIGIDPHKGTHTAVAIDDREQVLTERLVRATHRQVPELVAWADQLGNRDRIWAVESAGGLGYLLAQQLLAAGETVVDIPATLASRVRLLGSGRSDKNDSNDARSVAIAALRAPRLVPVRVEDHATVLRLLSRRHTQLAWARNKTACRLHALVTDLVPGGISKEVVVSQALALLEGVAPAGAAAVERHRLALDLVDDLDRLETQRKASKARIRTAVAASGTTLTDIFGVGDVVAATLIGHTGDIDRFPTADRFAAYNGTAPIEWSSGNPKRPTHRLSRRGNRAMNHALHIAAVTQLRHSHSTGRAFYDRKLSEGHTPKEAIRALKRRLSTVVYRHLIADAARRH

SEQ ID NO: 429581 - protein, 341 aa, unidentified
MKEVTIIGVDLAKNVFQLHGAAADGSVVFRKKLARVQFHKFMSSHPACLVAMEACGSAHYWAREVTQMGHDPRLIAPRYVKPFVKRHKNDTADAEAIVEAASRPTMRFVDPKTPEQQAGAVLFRTRAQFIRQRTEAINALRAHLYEFGHIAPTGVQNVRQLALIVEADNSDLPALVRFTCRELMEQITRLTGRLAVLDKEIARLSGQGEIARRLRTMPGVGPITALAIETFAPVMESFRCGRDFAAWLGLVPLQRSTGGKQILGKTSKMGQRDIRRLLIVGAMAVVGWAGRRGTAEGSWLAKMLARKPRMLVAIALANKMARGLWAMLTKNEAYRGPVMVG

SEQ ID NO: 429582 - protein, 346 aa, unidentified
MLYAGLDLSRKRLDFHLLDAEGATVDVGASPPDVDGLGGLNERLARHGAPIRAAIESMNGARFVHDRLELAGWQVEIADAQKVKGLAPLACKSDRIDAWVLAELARRDLVPAIWLPDPRVRAERERARWRLHLVRHRSSLKQRVHAVLLTHGKPCPVSDLFGVRGRRLLAKLGLPDPWQATIEASLRLIDELDREIGECERELRRLGADHRYVPLLLTVPGISWLLAYTIAAEIGDITRFPTPRKLAGYSGLCPRVYQSGDRDLRGPLSKRGPKYLRWALVEAATHACTSATYRDRYQQTKARIGKQRGAKVAQIDLARRPSEAIWHTLSRHEPFAPKGATDPLAA

SEQ ID NO: 429583 - protein, 431 aa, unidentified
MNCNTQNAKIETINEKTLVVGIDVGSETHNARAFDWRGYEYSKKAFPFSNTEAGFVSFLEWMQDIAKDNGKEELMPGMEPTGHYGFDLGKFLQDKGIKPVLVNPYHVKQSKELDDNNPSKNDRKDPKVIAGLIKDGRFTYPYLPEGVYAELRSASNLRFQTQEELTRILNRIARWFSIYFPEYKDVYGKSDSKSGLMILEQAPLPADIRALGVDGVNKIWRDAKLRGVGMKRATKLVDAAGHSIGSREGLTTARMEIKNLLSDYERYSKRMEEVVELIDELVKEIPYVEKMLQIKGVGIKTISGLVAEIGDIRRFDNPKQIQKLAGYALVEDSSGKHQGETRISRRGRKKLRYLLFEASLSLVGKNEEFKELHYYYTHREENPLKKKQSLVAVACKFLRIAYKILTTGVDYDGAKMISDIRRPQKQMLQAA

SEQ ID NO: 429584 - protein, 341 aa, unidentified
MGEVITIGLDIAKSVFQVHGVDAAGAVVIRKRVSRSKMLEYFGELPPCLVGIEACPSAHHWGRELQGLGHTVRLIPPSYVKAYLKRGKNDANDAAAICEAVTRPSMRFVPIKTKEQQTALMLHRARQLLVRQRTMLSNALRGHLAELGIVSAKGRNGTAELLRIIADGRVSPAVCGILKVLARQYGAIGTEIASIDKSIMALHRGCEASRRLAEIPGIGPIGATALVAEIGDWKTFSSGRSVAAWIGLVPKQHTTGGKDRLGSITKQGNRYLRWLLVVGAMAVIRYARKHGTEKRPWLGRLMERRPTKVAAVALANKIARMAWAIMVRGERYKEPKLLLAA

SEQ ID NO: 429585 - protein, 374 aa, unidentified
MKEFSKYVGLDTHKETIAVAVADALGGKVRYYGEIANTPEAIQKLVKQLCPDGEVISFCYEAGPCGYEIYRQISQLGHYCSVVAPSLIPTKPGERVKTDRRDSEKLSRLDRAGELTPVWVPDQDQEAMRDLTRAREDMKGLERITKQRLNAFLLRYGRIYESGKSRWTQAHFRWMEGLKFDVTVQQIVTQEYVDAVKQAEARVAGLEKEMEKALEYWVLAPVVEALMALRGIKLITAMTVMAELGDITRFDSPRQLMSFLGLVPSEASSGLTRRRGGITKTGNGHVRRVLVESGWCYRFPARKTAHLQRRAEKCSSEVQAIAWKAQKRLCGRYTHLLERGKLKVQVCTAVARELVGFIWAIACEVMGKHVVSAR

SEQ ID NO: 429586 - protein, 340 aa, unidentified
MIEKLSSVIAVIGIDIGKNSFHVVGLDGRGAIVLRQKWSRGQVETRLSNMPACLIGMEACVGAHHLSRRLKLLGHDARLMPAKYVRPYSKGQKNDFRDAEAIAEAVQRPTMKFVATKTAVVSQRTGIINQIRAFLLERGIAVRQGIRFLRAGLPGILATPPDVLSPRMARVIEELADDWRRLDERIEGLSSEIEALARQDSGCERLMSVPGIGPTISSAMVAAIGTGEAFCKGRDFAAWLGLVPRQISTGDRTILGKISKRGNRYLRVLFVQAAWVVLIKPKSWERYGLKAWIEAARKRLHRNVLAIALANKLARIAWSVLAWGRNFEARKTDDAAAQSV

SEQ ID NO: 429587 - protein, 403 aa, unidentified
MNNVAGIDVSKGKSMVSVLRPFGEVVAKPFSIGHTGSELKELADYLKSLDGETRVVMEHTGRYYEPVARFLHEEGVFVSAVNPKLIKNFGNNSLRRVKSDPADARRIARYTLDNWAELRQHTPMDTIRMQLKTLNRQQSLYAKTKTMMKNNLIALLDQTYPGVNALFDSPVREDGSQKWVDFATAFWHVDCVRNMSLTAFAERYRKWCKRHGYNFSQSKAVEVHTGAQDLIAMLPKDALTKTMVRQAIDALNAVSASLERLKAEMQALAAQLPEYPVVMAMHGVGDSLGPQLMAELGDVTRFTHRNAITAFAGVDPGADQSGTHEAKSTRVSKSGAPELRRALFLVMDCLLKTQPQDDPVYRFMDKKRAEGKPYLVYMTAGANKFLRIYYGRVKEYLASLEEN

SEQ ID NO: 429588 - protein, 344 aa, unidentified
MSEVTTIGLDIAKNVFHAHGADERGHALFSKRITRGKLLDFFTSQPRCVVALEACGGAHHWARELIHLGHAVRLIPPKYVKPFVKRSKNDAIDAEAICEAAQRPSMRYVAVKSEQQQAAGLVFRTRDLLVRQRTQLINAIRGHLTEYGWVAPKGPSHVAMLADVLKEDEMASSLPEAARTMFRLMLDLLGELDGKVADLDKEIARRAREDEVSRRLMTIPGIGPITATAIAALAPPAETFTKGRDFAAWLGLTPLQKSTGGKQRLGATSKMGERTLRRLLIIGSSAVVLQASKRGAPEGSWLAKMLARKPRMLVTVALANKTARIVWALLTRQENYKAPVAATA

SEQ ID NO: 429589 - protein, 459 aa, unidentified
MSQRRKKPKRAGQGGAVPSLSCIEPNAAGIDIGATEIFVAVPQGRDPSPVRSFETFTEDLHRLKSWLQQCGITTVAMESTGVYWIPLFQILEKAGMEVCLVNAQHVKHVPGRKSDVIDCQWLQYLHSVGLLRASFRPEERICAIRSLLRHRDSLVQMAAAHVQHMQKALTQMNLQLHHVLSDITGQSGLAILDAILAGERNPAVLAQLRHARVQASEEVITKSLVGDYQREHLFTLRQSLQAYRYYQSLLTACAQEIEEQLQNLDSRTPPDASPLPPERYPPRPRKNEFRFTMRSELYRIYGTDLTAIPSINALTGYTVLAEVGTDWSKFRNGDAFASWICLCPQNKKSGGKILSAHTRRSANRVNRALRLAAQTLERSTSYLGAYYRKMRARHGAPVAITAAAHKLARIIFHLVTTGEAYDESLFAAEEQRQRKRMENKLKRSAQQLGYRLIPLEQIA

SEQ ID NO: 429590 - protein, 357 aa, unidentified
MHLLRKKTLIVGIDVGSETHYARAFNWRNYEYSKKPFAFSNDEAGFSSFKDWMDDIAEKHGMKVVIPGMEPTGHYWLNLGAYLQAQGMKPVHVNPHHVKKSKELDDNNPSKNDRKDPKTIAGLVNEGRFSYPYIPTGICADSRNLSNLRIQTQEEITRVKNRMARWFSIYFPEIKDVYRNPDAVSGLMVIKQAALPCDIRELGVEGVNKIWRDARLKGAGIKRATTLVTAAEHSIGNTEAPRSARKEIRNLLNDYEIYKNRMDELMEEIGKTLSEIPYIDKLMEINGIGIKTVSCVIAEVGDIGRFDNPKQVQKLAGYAIVADSSGKHNGESRISHRGRKRLRYTLYEAAISVIGKK

SEQ ID NO: 429591 - protein, 340 aa, unidentified
MPLYGGIDLHANNSVIVLLNEQDEVIYGKRLPNALSTVLDQLAPYHTEMKGLVVESTYNWYWLVDGLMEADYQVHLANPAAIQQYSGLKYSDDHSDARWLAHLLRLGVLPEGYIYPKAERAVRDLLRKRAHLVRQHTANVLSVQNILARNTGARFSVKRIHELTKQELKSLLAEEPQVLAVTSSLAVLDCLRQQIKTLEQTVHKRLHHTPAYEQLLTVDGIGTILAQTITLETGTISRFPTVGNYASYCRCVDSNKISNGKRKGTGNVKNGNPYLAWAYMEAAQFALRFQPAAQRFYQRKLAKSRNNTVLARKAVAHKLSRACYYIMRDLVPFEAAKAFG

SEQ ID NO: 429592 - protein, 339 aa, unidentified
MYCMGIDHHKQYSFITVLDEGGDIVKRGKVNNMSLDLEKFLIGMEEMKAVVEAGRSSYTMVDVLEGLGVDVVMAHPKDVKAIAKAKIKTDKRDSHMLAHLLRTGLIPEVYRRSRENRSYQRVLRQRVFYVGNQTRVKNRIRALLAQQGEEIRVEVLRAKNIFGREGLAVLKGLRLPEGDKELIGGLIKTFEHLEKRIRESHALVERLSRQMPEARLIQTVPGFGVFFSVLVAVEIADIGRFQDEGKLHSYAGVIPSTHSSGEKTYHGRIIREGNRWLRWAAVEAVWPAIRADLDLRLHYERRKKRKGANMAKVATARRLLTIIYRMLKENRAYTPYKRQ

SEQ ID NO: 429593 - protein, 370 aa, unidentified
MDTNTYVGLDVHKATISVALAECGRDGEVRQVGVFENRPEVLIKLAGRLSKGGRRLSFCYEAGPCGYGLHRLLTGCGHECVVVAPSLIPTKAGDRVKTDRRDARMLAKLHRAGELTSIWIPDAAHEAMRDLVRARATARKVLSKARQHLQGFLLRHERIYRGARTWTLAYRRWLTTVRFAHPAQQIVLQDYIHAVQDAEARLARLTRQIEELLPNWSMAPVVTALQAMRGVALVVAVTVVAEVGDFRRFANARQLMAYLGLVPSEHSSGSSVRRGGISKAGNVLARRVLIEGAWTYRMPARISRKLHDRNEELPPTIRDIAWKAQLRLCARYRRMTAAGKERVVVIAAIAREMVGFIWAIARIAQPALAG

SEQ ID NO: 429594 - protein, 333 aa, unidentified
MALYCGIDLHSRDSWLAILDDGLEVIGETKVGNDLETILRVLEPHQEALAGVAVESTFNWYWLVDGLMDAGHRVHLTNTWAVKQYEGLKYTDDRHDARWLAHLLALGILPEGYIYPKEERSARDLMRRRAFLVRKRTSFILAMRGAFECRTGMRVNSNDLKKWKAEDVKVYVKDPVEAFGITCLLEPMHALSAQIKKIEKAALSRGRLRPEFAPLETVWGVGKILALTIMYEVGDVARFRTSYCRLVNTARLSAGKRKGSGNRKNGNPYLSWAYSEAAHHAVRHHPEAQKYFQRKRAKTNGIIAIRALAHKLARASYHVMRDHVDFDPEKTFA

SEQ ID NO: 429595 - protein, 334 aa, unidentified
MKKFNVFTGIDVSKSTLDFCIIDAKANVLIQAKTENNSQGIKLLLNHFKKLKVSLNEVLFSFENTGVYSMPLNIFLSERKCDFAEIPALEIKKSKGITRGKSDKTDAKDIALYGLRNLDKITLSSAPQIEILQLKFLFAEREKVIEAIKTFDSTNEAEGFLPNSVFKIVNPINRKILAHLKKALKSIEEKINKIIEQNEKLKQQKALLKTIPGIGDVTALYFLLATKGFSVFKDWRKFACYSGIAPFEYSSGSSVRARTKVNHFADKKIKSLLHLVALNAIKYDAELKEYYQRKRDEGKHTLLVLNNIKCKIVSRAFAVISRESPFVNTYKFAS

SEQ ID NO: 429596 - protein, 332 aa, unidentified
MTTTSKSNATMENNENIFVGIDVAKDELVVHILPTNQQLTVPNSAEGIKELVKLFKKNNPKQIILEATGGLERELLTSLAAKGFAVTLVNPRQARDFAKGLGELAKTDAVDARILARFAQLQCLPVRPLPSLETQEMNDLVTRRQQLVTMKTQETNRLHTARQKSIKKSIEKIIKAFDEQIAAIDSRIAKMIEANPDWNEKDKILQSVPGMGPKTSQVLISALPELGTLNRQEIAALVGVAPFCHDTGKKSGARRIKGGRANVRSALYMATLSAIRYNQTFKEFHERLIANGKKFKVAMVAAMRKMITVLNVMVKTKTSWKETTIAESISLG

SEQ ID NO: 429597 - protein, 467 aa, unidentified
MKHNGRRQSPSRGRVSPTLLTQLNPNVAGIDCGSAEHYVAVPPDRDPHPVQSFKTFTTELNRLADWLAACGVTSVAMESTGVYWIPVFEILEARGFHVLLVNARHLKNVPGRKSDVTDCEWLRDLHSVGLLRGSFRPAEAIVTLRAYLRHRQTLVESASMYILRMQKALVQMNLQLPLVVSDITGLTGLRILRDITAGRRDPVQLAEHRDPRCHASKADIIAALTGNYRAEHLFVLEQNLQLYDTCQAQLATCDAAIEAHLKALTARRAAPPTSLPAARTKKKRSRNEPRLDIRSFLHHLTGGVDLTQIDGLGPHTSLKLIAEIGTDMTRWPTEKHFTSWLTLAPNNKISGGRLLGSRTQPSANRAAAALRLAAEAVGKTQTALGAFYRRLAFRIGKPQAITATARKLAILVYRALSGTLVYRDPGATAYDQQQQARAVRHLHRRAAALGFELVNRNTGEVPSPAGA

SEQ ID NO: 429598 - protein, 324 aa, unidentified
MAKRTTICAGIDTGKRKLDVALDGGSAQLQVDNTAEGHKALLDWLRCHRVKRIGIEASGGYEQVVVAELRRKRFVVVVFQPAQVRAYAKFQLQRAKNDKIDATLIAACTAAVKKIHAPPDARLLPFAEQLTMMDQIKEDIARFKNRLETCRNPRIQQAWKEDIARLEKREKIELKALVAAIREHRDLADRLELIYSVGGIGMPTAVAILIRMPEVGQFPREQASALAGLAPYDDDSGEHAGARHIDGGRKRLRRALYAAALPASFRWNPQLIALYKRLIAAGKGPKRALIACARKLLIFVNTVVARGTPWQNQPPPCAAMTMTG

SEQ ID NO: 429599 - protein, 409 aa, unidentified
MSTNACSNVFAGLDWAVHTHAVCVIDTTGAVLERFEIAHDREGLSELMRRLARLGARVRIAIERPSGLIVDALVEAAHHVFPIHPNAVKASRPRYRSHGAKSDASDAYLLADLLRTDGHRWRELSPQSDSIRALRALVRSRDDLVSTRVALGNQLRSQLEAFWPGAACIFCDITSPIGLAFLQRYPSPTSAARLSEAALRRFCRSQHYSGRRSPAELLARLNSATAGLAGPLATDAAGQLVRSMVAVLQPLVEQIAELTRRIERFVESPPDGQIIMSFPRAGRVCAAQILAELGDVRERFPTLDQLAAEAGAVPVTYQSGKTPSVAFRWACNHRLRQAITCLADNSRHANEWAHAIYAAARARGCDHPHAIRILARAWLRVIWRAWTDRTPYDPARHLGALKLVSDEQG

SEQ ID NO: 429600 - protein, 367 aa, unidentified
MKKVSTAATKPSRNFSQPNLIIGLDLGDRSSCYCVLDETGRIVMEQKVSTTPKALQVALGGMPRSRIAQETGTHSPWVSRLLSRLGHEVIVAHARNVRLIGESRRKDDRLDAQTLARLARIDPELLCPVKHRSAKAQADLTVIRARAGLVRARTALVNTARGLAKSYGERLRGCNVRNMNPEKAEGLSPELQAALQPLLAALESLSEQIREYNERIEKLAQESYPQAALLKQVKGVGTLIALTFLLTLEDPHRFRKSRDVGCYLGLQPGRRNSGQSEPQMHISKEGDPYLRTLLVQGAQHILGPFGVDCDLRRWGLKLAERGGKSGKRRAIIATARKLAVLLHHLWVSGEGYEPLHNSGRMAMPAAA

SEQ ID NO: 429601 - protein, 341 aa, unidentified
MSNCIGIDVSKATINVHISKSNQDLLLDNNLKSFRSLFSKLKKIYKKELEDIIFIFEPTGSYSEALRKYCSDKNIKCFIINPKQFSNYAKALGVEVKNDIEDARVLSKALALAKEGQVKVPVFKEDQVKVPVFKEDVEQIKELMSFYKFTKKQTTQQKNHLESLTSKSGNKFSIKELKKSIEESKKKELKIIEQVQTLIDSTDEYKVAYENITSIKGVGQIAGIVLLHLFLKYPEANQRQITSLTGLNPIYRQSGTSVQSRYKIAKTGASLYRSVLFMSVFTAVQHDENFKSFYERLKSKGKHTTSAQIAVMRKIILTAHSLYKNNRKYDKNFNSQAASKM

SEQ ID NO: 429602 - protein, 423 aa, unidentified
MDILYERVAGLDVHRDTVVACVRIMVDGKAQRECRTFAATTDPLVELRRWLEESRCTHVAMEATGVYWMPVFRILGEGAFELIVANAAHIKNVPGRKTDMNDAMWIADLLACGLIKGSFIPEEKVQELRALTRTRKQLVREQTRHVQRIDKTLAEANIKLGSVISDIMGASGRRIIQAMIDGVRQPNKLAELAGKQLKASPKELYDALHGRLTDHHRFLLALHLKQRDGLDETIRKLDVEIAQRIEGMEAEAGGSKTPFRHLIGLLTTIPGISAVAAPAILSEIGADMSRFETAGHLVAWTGLCPGQNESAGKRKSSRLRKGAPWLKTMLVQCAWAAKRSKNSYYRAQFFRLQARRGPQKAICAVAASILTAIYHILKNGTEHHDLGVAYFDRRPTEVKASRLVARLKKLGFTVQLQHIAEAA

SEQ ID NO: 429603 - protein, 389 aa, unidentified
MIFVGIDVAKNKHDCYIFDSSQELIETTFTFSNSLEGFTVFKDVLFSYSDDISNIKVGIESTGHYSDNIINFIEKNSLELKIFNPLAVNLYRKATTLRKTKTDKIDAKIIAQMLFSDDSDSYLPIDYHINELKSLTRHRHRLIGHRGKLKVSVTRILDIAFPELSNEICSVHQKSSYALLLEYPTVKDISKAHLTKLTNILSKSSKGHYTKEKAKRIKEIAANSIGTSEWSIGFELQQTIRLIQNLQNEIDLLEKKIKEIVIATKTPLLTIPGISYILASIILSEIGNIHNFSNPGKLLAFTGLEPSTHQSGTYTANMARMVKRGSKYLRWAILQAARTVSARVPVFKEYFSMKKSQGKHYLVALSHTAKKLLRVIFHLLKTEENFICS

SEQ ID NO: 429604 - protein, 349 aa, unidentified
MKIIGCDLHARQQTIAMVDTETGEITEKTLSHEGNAMREFYAALEPPVVVGIEATGAMQWFLELLEELGVECRVGHPAKIRAAETRKQKHDRRDARLLLDLLLMKDRFPEIWMPSTEQRDLRTLLRDRHQWVRMRARLQHTLQAMALNHALRRGPALWSVAGQNALQALPLPPYSSQRRTELLRLYVQLQKRIQALDKEVDVQARQRPQARRLLTHPGVGAVTALATEVFLGDPNRFDTGNQVASYIGMIPCEHSSGKRQRLGKLSKEGNSLLRYLWTEATMHAVGKDPELKRFYRRKLIHKGMGKARIAAARKLGIRLWIMMRDQIDYAEFCRRGRLRQEGESPCGDA

SEQ ID NO: 429605 - protein, 448 aa, unidentified
MAKCTSVAAITLTHPNAAGIDIGSASHFVAVPPDRDDEPVREFTSFTDDLHALADWLGACGIDMVAMESTGVYWIPLYELLERRGFTVYLVNARHVKNVSGRKSDVMDCQWLQQLMSYGLLSGAFRPADDICAIRAMVRTRDMLLQYQGQHIQHMQKALTQMNLQLGNVISDIAGASGMAILRAILAGERNPQVLAGLCDRRIRASRDDVVKSLVGNWREEHLFALRVAIELYDAYHVQMQACDIHLSSMLTALERNQDTPEPGRRRSASRNAPKFDVRTALFRLSGVDLTTINGTDVNTALKVLVEIGPDMTRFKSAKHFASWLGLCPGTKISGGKILDGKSKRTANRAARALRLAATALRSSQSALGAYYRRVCARMDRAKAITATAHKLARIIYALLTRGQAFVDQGEAYYEERYRQRVLRSLTAKATALGFALAPSPAVETQAI

SEQ ID NO: 429606 - protein, 332 aa, unidentified
METKLFIGIDISKLTLDIAVFDSENSIQHYCIKNAAKDFIRFFKKLNNKENVFIGMENTGRYNWPVYEGLEKINATVFVISPLHLKKSLGLVRGKNDKVDAIRITHFIKNHHLNLNKWRVPIKKIVQLEILLTERNNRVKKIKELKSRASGFNLLQEYNLVELFTEDVDQLIRLHKKQIKDYEKRIEEIIKSDVELNKKADLMRSVSGVGKVLCWTLLSKFNLADIFENPRKLACYAGVVPFDYQSGSSVRGKSRISVFADKKLKTVLHMAALRAIRIDGELKQYYLRKVDEGKNKMSVINAVRNKIIHRICAVLRNMEPYQQNYNNHLVLS

SEQ ID NO: 429607 - protein, 410 aa, unidentified
METLIKRCCGLDVHQATVVACLRIARPGKKVSREIRSFATTTAGLLELRDWLTAAGCTHVGMESTGVYWRPVHAILEDAFTVIVGNAQRIKNVPGRKTDVKDAEWLAELLALGLIPPSFVPDRGLRALHDLVRFRRSLVEARTDCRNRILGVLEGAGIKLASVATDVFGVSGTAMLQAIVAGHLTPAEIADLAKGRLRKKRAALELALHGSVTDDHRLMLDLLLGSLNDTEGRIAAIETHINVRLEPYRQDHLNLTTIPGVDWAGAASIVAELGTDMAVFGTAGRAAAWSGVAPGNNESGGRRRRAGARKGNVHLKTTLHTAAVAAGRTKHTYLADKYHRIRARGGPGIAGGAVAHKILIAAFHILARKVTYRELGADYLDRRAKQRVQRTIVRRLERLGYDVTLRPKAA

SEQ ID NO: 429608 - protein, 312 aa, unidentified
MQQRTYESYIGIDVSKAKLDVSSSGAGGEFRVDNSEEGIRDLINHCPEIKDSLIVLEASGGYEQLPLKALSKSGFAIVLANARRVRDYAKSQGILAKTDKIDARVIRRFGMHSELSVYQAKEEGSEIKHELLGRREQLVKLVVIEKQRLEKAPGRMKASVERVIKLLGEELARIEDELERQIEQDASAQEAIERLSSTPGIGKTIATQLHVYLPELGHLSHKKITALVGLAPFNQESGTYKGKRKISGGRFGVRKCLFLAVLSAMRYNKKIKLFYERLIANGKCKMVAIVACMRKLLVILNIMATKKVAWRD

SEQ ID NO: 429609 - protein, 326 aa, unidentified
METLNIQSCYGVGIDVGKEEMVASCRSSNGLGGFNPISFPNNSIGFKKFIGYFKKLSLPLETPVLLESTGPYHWQAAHFLTRQGLNAKVVNPLHTRQALRYSVRKRKTDKVDAGHLAMLAYQGYGYPFQETKELAQSKALVRHYWYLKQVKTNLLRHENYLRKYRQLNILRLSQVIGRQLKKLEKEIIACFQRGNDLRYLDSIPGITPLLAATILAELYPLERFRKIKQVIAISGLDPKVKQSGQGRTRFGKLSKRGSSVLRLTLYYATFGAFAKAPFNQYYQRYKDRGLHHTAILNILARKILKIAWALLKKRESFNEQYHRVGS

SEQ ID NO: 429610 - protein, 329 aa, unidentified
MRTVCGLDVHKDSVYLCILSSTGEIYEKKFGVLTTELIEMRDLMLSHHVLEVGMESTSVYWIPIWRVLEPHFRLKLINPYFIKQLPGHKSDVKDAQWIAECMLKELVNGSFVPPERIQQLRQYDRRIYDLDDEIIRKLAKLDAAVQWCNIRLSNYVSNTDSVSYKAVIDKICEGVTDPNVLVEEIHGRIINHHGKKTIIASLTGSITECDIDIMRQLKAEIDLAEQHKQQCMDKMLAICENEYSTQLHNLQTIPGVKMRAATSLIAEIGTDMSHFETANHLASWSGLKPRNDQSNKTIKSRRITYGNRYLRRTIIQCSWGCKSHQELFF

SEQ ID NO: 429611 - protein, 380 aa, unidentified
MNVAKCRLSEGELNLINMQVAQGLVPVGVDLAARVFQVCYYDLDKKVVKNFQLTREKFFDFLRNPPFEQKMLVGFEACGACNYCAREIKALGHRYKIMPTKAIKAFLQLAKTDKIDALGIFKGTFTPSINTISARDEQNQTLLNLLGIREQLSKQLVQTGNNQRAMLYELGVVCNEKKTGVDYVIKASEELLEKLKQENSPAYSSVQVGLEALRSNVRNIEAQIKNIEQYLLDYAKSNEDCKNLMSIPGIGALSAVILHAVMGDVNSYPSSRHFAAFAGFAPRVSGSGGKVTVGEIVKTGNRHLKKVLYMCAVARLSQNKKLDHNSSTRISELLGDETTPKKKIICSIANRLARVAWTVVKNKEPFNQDKCRLLSLPTDN

SEQ ID NO: 429612 - protein, 363 aa, unidentified
MKIVGCDLHARQQTLAMMDTETGEFTEKTLLHEGNAVREFYAGLGSPALVGIEATGAMQWFLELLEELGIECRVGHPAKIRAQETRKQKHDRRDAGLLLTLLREDRFPEIWMPSTEQRDLRTLLRDRDQWVRMRSRVQHTLQAIALNHGLRQGRSLWSREGQSALHALPLPPYTAQRRSELLGMYGQLQKQTQELDKEVESQARQRPHARRLMTHPGVGPVTALATEVFLGDPSRFTTGSEVASYIGMIPCERSSGKRQRLGKLTKEGNKLLRYLWTEATMRAVEKDAELKRFYRRKLVQKGMGKARIAVARKLGIRLWIMLRDQIDYAEFCRRGQLRQEGKAHAGMPELQHGPANAVTGSTE

SEQ ID NO: 429613 - protein, 366 aa, unidentified
MKKTNTVRENGNMIFKGHKLTIGLDLGDHWSCYCVLDEAGKIILEQKVAMTPEAMKQTFAKIPQSLIALETGTHSPWVSRLLTELGYKVIVAHAQKVQLITKSNRKDDRHDARTLARLARIDPELLGPVRHRSAQAQIHLTVIRARAELVRARTALVNAARGLVKSYGQRLPKCGTQQVNRELAAGLHAELREVLEPLLQEVESLNERIQEHEVRMEKIAKENYPHVELLKQVKGVGTQIALTYVLTLDDPHRFPKSREVGCFLGLRPGRRDSGESQPEMNISKEGDRYLRTMLVQGAHYILGPFGEDSDLRRWGLKLAARGGKNAKKRAVVAVARKLAVLLHRLWVGGEVYEPLRNSQKAMHAAA

SEQ ID NO: 429614 - protein, 349 aa, unidentified
MKIIGCDFHPSYQQIVMWDKATGEMLERALSHERKEEVRAFYAGLQGPVRVGIEASGQSQWFEQLLAELGHEVWIGDAAKIRASCERKQKTDRRDAELLVKLLDEERFPRIWVPTPAERDARQLLLHRHKLVRMRTQLKNQLQALALNQGVQRKWKLWSETGRKQLEALPLMPWASRRRTELLVLLDQLEASIGELDGAAIEQANTRAAVRRLMTHPGVGPITALAFVLTIGPAQRFRRGKQVASYLGLIPTEHSSGGRGQRLGHISKQGNPFLRGLLVEAAQSAVRHEPEMRREYQRLAQRKCRALAKVAMARKLAVRLYWMLRTEVDYAQLIQGSHAGQLESFRGRS

SEQ ID NO: 429615 - protein, 420 aa, unidentified
METSDTDPMQGAGTESGYLVGINLTTSALETLMEARTVNNLPPAAPHDDAVRCLLAIELSKKSWIVAVNTPLSDKISRYTLESCDWKGLLDLCERIRTRVAREMKKPVEIISCYEAGYDGFWLHRLLEAHGIRNYVIDPASLQVDRRARRAKTDGVDVERMLRSLLAYLRGEPKVWSVVRVPSVAEEDDRRLHRERDRLINERVQHVNRIKGLLAIHGIYDYQPLRGDRVQRLEQLHAADGQTLPPRIKAEMLRELQRLELAIRMIKAIEAERDAIASARTGHTSAKKIQHLAKIKSIGPEFATALVGEVFYRSFDNRKQLASYVGLTPAHFQSGAMSRDQGISKAGNAKARTVMIELAWLWLRHQPDSPLSVWFRERVGKLKGRIRRITIVAVARKLLIALWRYLENGMVPEGAILKVK

SEQ ID NO: 429616 - protein, 320 aa, unidentified
MAKKKSKFFIGIDVSKQHLEVAVHESDCQFRCANKVNAFGKLIVELIDWRPALVVLEATGGLEIPVVNALQAAGLPVVVVNPRQVRDFAKALGQLAKTDRLDARVLAHFAAAIKPPLRPIKSKEEQELAALTGRRDQLIEMLVDEKNRRTSAASDTVREQIKEHIDWLEECIAELDEQLKALLQSSASWQAKDDILQSVPGIGPVVSFSMIADLPELGTLNRQQISKLVGVAPLNRDSGQQRGTRHIYGGRAGLRRVLYMAALSAARHNLVIKKFYERLCANQKPFKVAITACMRKLLSIINVMVRDNTCWKSPQETVSA

SEQ ID NO: 429617 - protein, 310 aa, unidentified
MDAIYVGIDVSKDRLDVHVRPSREAFVVARDGKGLEELIERLQALSPQLIAIEATGGFETIAAAAIAGATLPLAIVNPAQVRHFAQAVGKRAKTDPIDAEVIARFAEAVKPEPRPLPDEQARLLAELVTRRRQIIEMIVAERQREKRAETIRVRKSLMRTIKTLEKELPEIDSDIDTLVRGSPAWREKEDLLVSFPGVSNTLARTFLAELPELGRLSRREIASLAGLAPYTRQSGRWKGKSMIGGGRTALRAALYMAALSASRCNRPLKVFYQRLLSAGKPKMVALIAVARKVLTILNAMVRDKKEWQIA

SEQ ID NO: 429618 - protein, 322 aa, unidentified
MLEAVVGVDIAKKKFDVALFMNGKFKHKTCLNTRQGFEELSQWLKRQGVECVRVCMEATGTYGDELATYMHDAGHTVSIVNPARIKGFAQSELLRTKNDKIDAALIARFCVAMNPEVWTPPSLKIRRLQSLVKRADALIVMRTQEQNRLDTAHETIGSSIKEHIVYLDQEIEKLKGQIAEHINSDPNLKTKRDLLSSIPGIGEATIAVILSALHIFEGVDRVQKTVAFIGLAPREMISGSSIKGKPRICKVGHARLRKALFMPALVAMRYNPVMIDFGNRLRRKGKNGKVIVCAIMRKLVHLIYGILKSGKPFDPNYKPNFA

SEQ ID NO: 429619 - protein, 388 aa, unidentified
MYRILKIGMDVHSTNYTLCAMEPTIGSEDRIFGEIQVAPDYKEVVCFIESLKMKLGLYDDYSIECGYEAGCLGYTLYHQLTNAGFKCVILAPTTMLTQQGQRVKTDKRDARLIAQCLCYGGYHPVYIPTGEDDAVKEYLRMRDDHKLALKKLKQQINAFVLRHGHQYVGTKWTIKHVTWLNKLELEPMYRETLNEYMASYEEQEAKIERYDKRIEEIASEARYQENTKKLGCFLGIRKHTALSLIVETGDFKRFAKGNTYAAFLGLTPGEHSSSTNVNRLGISKAGNTHLRCLLIEAAKGICKGAIGHKSKELRSRQSGQAADVIAYADKANTRLRSKYYKMIRHGKKKNVAVAAVARELACFIWGMMTGNIRVAGNIGTSVPAVSQG

SEQ ID NO: 429620 - protein, 312 aa, unidentified
MDAIVVGIDVSKDRLDVALRPTGETFAVTRDAEGLEALIARLTPLAPAAVALEATGGYETVVAASLAAAGLAVVVVNPAQVRSFAHALGKRAKTDAIDADVIARFVEATRPPMRPLPDDETRRLADLVTRRRQIVHMIVAERQRQKRLTDKRLQKSIARLLAALQRELSALETDIDDAVRGSPAWRARENLLASVPGVGKTIARTLLAELPELGRLDRRSIAALAGLAPWTRQSGRWKGKSFIGGGRTQVRAALFIGAMVAARYNPDLKAFRDRLVKAGKPKLVALVATARKLLTILNAIVRDQQPWRPQTA

SEQ ID NO: 429621 - protein, 394 aa, unidentified
MIYAGVDIAKTDHVIGAVDERGAEMCPPMPFKNTEAGLERAVAWLEGLAESPSDVVVGMEATGHYWMACYSFLVARGYSVAVINPMQVKAVRKLKGLDKVKNDRVDAGLIAEALRIGQYDETRLATDEMASLRSLSRYLQSLRGMVAELKTQCICLMDAHFPEYAGIFSDMFGAGSRAVLSKSPLPFELARRRADSLARDIAEASRRGGKSSGYAAKIKAAAKSSIGVRLGQEAASFQVKSLIRQIEFADSECAGVEARLRSLLDEVEPLVLTIPGVSYVTGAQIVSEIGDVSRFRNAPALVSYAGLNSSVSQSGQFDSGGGPITKHGSPYLRRALWLAANRARQYDPGLRAFYDRKRAEGKPHRVAVTAVARKLCHIVFAVMRDQVPYDPGRE

SEQ ID NO: 429622 - protein, 412 aa, unidentified
MKDLLEISCGLDIHKEKIVACILTGPLGKPTHSEIREFTTLIPDMLALRDWIISENCHHVAMESTGIYWIPIYEILEDAFSGDITLLVVNARHMKNVPGKKTDMRDSEWISTLLRAGLLNASFIPEKRIREFRDLNRYRKSIIRDITSQKNRVEKFLQSSGFRLSSFISDIFGASGRNIILHLMEHGQIDKISLDSYLKTKTRKRIDEILMSVNGTLSEHQKSFLKILMCHYDSMKEHLIEIETHLQEDMLPFALQIEQLNTIYGISTTASCAIIAEIGTDMKPFKTAEHICSWAGLCPGNNESAGKRKSTSITKGNPYIKSMLCEIAWVIAGKRNTYLSAWYWRIKQKKGARKAIVALARKLLVIIYTMLKQGTNFDENCFEVRRKNCEQKQLSRYIRELEKHGYTVEAQV

SEQ ID NO: 429623 - protein, 375 aa, unidentified
MDEITGARIARVGVDLAKQVIQVHAVDASGRRVVARAFKREQFFAWCTQLPAGTLVAMEACSSAHHWARKLIRQGLDARLIAAHFVTPYRMEGKGGKNDATDAAAICEAASRPSMRFVQVKTCEQQGVMSLHRVREGLKEERTACINQIRGVLTEFGLVFGKSPKVLRAVLADIIEDASNELSTTARLVVQRAFEHWRELDEHMRWCDRQIGQHVRASPAAKRAAKVIGIGELGASALTAGVGDFTQFKSGHQFGAWLGVVPRQASSGGTIRLGRITKRGDDYLRTLLIQGAKAAVMSADKRDDPISRWLVQLTARVGWQKACVAMANKNARILWAVMTREDGFDSKHVSVKPRANQPDRQPVVDPPSISAACVA

SEQ ID NO: 429624 - protein, 343 aa, unidentified
MYFIGIDVSTKESALCILDGNGKIVRETKLPSDPEIIARFITDTGLAIERIGLESGCTAAWLFAGLQRYGWPVICIDARHAAAALQAGFRNKNDRNDARGIADLMRVNKYRPVWVKSPEAQRQGRLLTARATLQSQLVALENTIRGLLRQEGIGLTDRRTAFEAAVREVIAEDRLLHAAVHPLLETRNAVLCQRAALDRQILLIVRADPVCRLLMTAPGVGALISLAFKVAVDDPRRFSRSRNVGAHFGLTPREHSSGELRYQGRISKMGDHEVRRLLYVAASRMLRRDAALWCPLKAWAVRLAQRVGIRRARVALARKLAVVLHAMWSDGQVFQWRRTEASA

SEQ ID NO: 429625 - protein, 336 aa, unidentified
MTNIIGCDYHPRFQMIAMLDKGTGEVKVMRLEHENGEAKKFYWSLPKGTRVGIEATGATQWFERLMAECGHELWVGDPAEIRARMVRKQKTDERDALHLLDLLMTERFPRVWVPSPEERDARQLLQHRQKLVRMRTSVKNQLHGLAMGQGLCRKQKLWSERGRKQLEALELGPWASRRRQELLKLLDELEPQITELNKAVEAEAARRPEVVLLMEVEGVGPVTGLAYVLTLGPVERFPRSRQVVGYLGLDPEEDTTGGHQRFGHISKQGNTMMRWLLVEAGQTAARLDPELRRVYKRLKVRRGANVAKVAIARRLAVRMYWILREAPPAPAGSHVR

SEQ ID NO: 429626 - protein, 372 aa, unidentified
MSAAFKPTKKNEGEEGMAVYVGIDVHKRFCQAALMNNDGRILREFRFDNTSEGTSGLLDLARSIDPHVKAVVEPSANYWIRIYDKLEDEGVEIKLSNPLRTKAIAEAKVKTDKLDAKTLAYLLRGDLVAESYVPTRKNRDRRALIRHRTSLIQMRVEVKNRIHALLDKHELSHEYTDLFGKQGLEWLRNLQLPTPDQQILHSSLQVLNTLSEQAQSMDIQIAKDAVTEDQAKLLMTMPGVDYYAAMILLSEIGDVKRFPSPEKLVSWIGLAPQVHQSGETHWTGHITRKGSKRARWILGQCAQSARQHDPRLREFYMRIERKHGSSKAIVAVARKMLSIMHVMLTRNEPYRGENRELTQQKHKRLENLANTT

SEQ ID NO: 429627 - protein, 346 aa, unidentified
MKILALDLGKFKSVSCCFDTEVQTTEYWTLQTDRPYLTAVLQKHQPDLVVIEACSISAWVHDLCGELGFGILVCNPNQEAWRWKNVKRKTDRDDALKLAKLAALGQLTPVHIPARATREHRWLVKYRKTIVGRTNRVQNIIRALFQQHGLALPVGARCWTHASLEAIAAQSKPLADCGPEELWRGQLAQELAAYHQLHGELAELEKKLTALAEQDERIALLETIPGVGRVTAEIIATHLDRPERFTNARQVSSYAGLVPRQYQSGLMDRQGGITRRGSRLLRSALVECAWAMLRYNPWAREHYLRLVRGQKNRKKKAIIAVARKLLVRCWAMLRDRQPWSAPAAAA

SEQ ID NO: 429628 - protein, 403 aa, unidentified
MAAVMIGVDPHKGSHTAVVISPAEEPLGELRVRASAGQAGKLIGWAAAWPERTWAVEGAAGLGRLLAQQLVAAGERVLDVQPKLASRVRLLQAGDTNKNDPSDALPVAVAALRSTVCREVIADDYRVGLKVRAERHRDLARTRNQVACRLHSVLCDLVPGGHQKEISAAHAARILAQATPSGAVALARAELAAEFLADLRHLDGQLRDTRKKLAAAVRASGTTLTQVFGVGPVIAGTVIGDVGDVARFPGRDHFASYNGTAPVEVSSGNRKIHRLSLRGNRRINHAIHMAAITQLRHKHSEGRAYYDKKVAEGKTHKEALRSLKRKVSDAIFARLQADARQARESGPGGQPGNGSDSSAASSHPERQLFGPATPGPDTTIRPGTTAGTPSPSKPALKKTRPAT

SEQ ID NO: 429629 - protein, 315 aa, unidentified
MTTKAEVHVGIDVSKDRLDLAVLEGRRIKQYSNRAGGIKKLVEEMIELMPALIVVEVTGGYERAVVYALFEAGLPVARVSGYRARQYAHAKGRLAKTDELDALNLADYGKHVQLRLFEAKREQGQLLSGKLARRRQLGEMLKAEKNRLRLAYGEIGPSIERVIEFLQGELKQLDEEIRAYVDNDPEWLEQEQLLRSVKAVGPVTAVTLLAELPELGKLDNKQIASLVGLAPINQDSGKRSRYRKTGKGRPSLRSVLYMAVLTGIRYNPVIKKQYDGLVSRGKVKKVALTACMRKLLTILNAMVRDQQPFRCVATS

SEQ ID NO: 429630 - protein, 343 aa, unidentified
MKITRVGVDLAKKVFQVHGVDAAGHQVWKRQLKRSSWLSVLTETVEPGCKIGMEACGGAHHWARELKSRGFKVKLISPQFVKPYLKSLKNDVNDAEAICEAMTRHHMRFVAVKTVAQQDIQAIHRVREGLMNHRKAKANQIRGLVAEYGLVAPRQMAPLRRAIPCWLEDAENGLRQPFRVLLHGLWEDLQRMDERLKVLDKEILMLSESHPDAKRLKQLRGIGPLTATAMVAQFGDGRHFKRGRQASASVGITPRHAGTGGKNWLFGITKKGNPYLRSILIHGARSVVSKAEHKDDRLSRWVTELAKRKHPNVAAVALANKTVRIAWAMLRNGTDYDPELAMA

SEQ ID NO: 429631 - protein, 347 aa, unidentified
MPMLADRVDYVIGIDCHKERHVAAIADGLGSLKASLSVTTDADGYRSLVKWADKNASGRRVWAIEGAGSYGAGLTDWLASKEEWMVEVDRPKRPKRKAGIKSDEVDALRAAKDALAAKRLAEPRRRGGLEAVRVLKISRKQAVQVSAVAVVQLKALVVSAPEGLRARLRALSAAQLVDTCAALRSQPSQSVEWVATLLALRTVARRAQAAAADAAELDRELTVAVKAQAPPRLLGEVGVGTVVAAELLSVWSHKGRLHSEAAFAMVAGAAPVEASSGQVIRHRLNRSGDRQLNSALHTVVLTRWRQDERTQAYIARRRAEGKSDREIRRCLKRHIARHLFRLMEAAA

SEQ ID NO: 429632 - protein, 339 aa, unidentified
MNITTVGLDLAKNVFHVVCLNEHNKEVKKRMLRRNQVRQFFAQLSPCKVGMEACATSHSWGRELIALGHDVKLIPPQQVKPMVQGNKNDYNDALAIAETVNRPKVTFVAVKTVEEHDIQAIHRMRSQCIRDRTALSNSTRGLLGEYGISFSKGLATLRRTIPELLEDAENGLSLRFRNLLARRYEQLAELDEHIAFYTKELELLSQQDEACQRLQTIPGFGPIVASAFRSTIGNGSAYTRGRHAAASLGLVPRQYSSGGNTLLLGISKRGDRYLRKLLVHGARTVVRHAIDREDPFSRWINRVSERRGKNRAAVAVANKLARVGWAVLRYNTQYDPTLT

SEQ ID NO: 429633 - protein, 379 aa, unidentified
MLPVSTLPESAVVSFASSAGVDLHKCTVSLDAVDPLGKSIARLTCSTKCVEKIDAFLGALPRPSHLAVEAVGFVEWFIDRFRGSVDRIEIADATRLSDLRGKRRKTDRNDAHDIAVRLARGDCPLGFVAPEEVMQLRKLGRHWRCLSRSLSRAKHSMSSILLAANLKGPTLDGAGAQRWLLAHGHLLKDAQRDAFGDFVDLIELLERKRGVLKRKIIQANGSERFDGLITILRSVPGIDHIWACIIASEIGDFARFPNADALEFWAGMTPDNLTSAGRTTSGHITKAGNATLRWALCKAGVTLCRSDAKQEAIRQRLIAKIGKPRANVAMGRRLLRILYAMVRDGSLYQGQVKTGHEAKANIVRLKKIQRVKEGQMQTV

SEQ ID NO: 429634 - protein, 321 aa, unidentified
MTYVGIDVSKATFVVAYSSAKSSKTKTFKNTTKGVHEFIQTLSASEHHCVLEATGNYSSLLVYLLSQVGITVSLENPLKIKNFARVMLSVTKTDETDARLIALYGEKMQPAPYRLRSDAILTLKQKRTVIRQLKKQLIATRNLKGSMEALPFFDPKCKKAIEKTIAFLEKQVKNLEEELAVLAQCEYKKQMDLLISIKGIGVTLAAALIMATGGFTYFDNAKQLTRYLGLSPTYQQSGTSVNVKGHINRNGDSSLRGQLYIAAMASLRCNAECKECFDRLRSNGKPGKVAVVAVANKLVRQAFAVVSQEKPYVDGFKSKKP

SEQ ID NO: 429635 - protein, 375 aa, unidentified
MSKIRFIGLDVHADTIAASVAEPDGEVRPLGIIPNRVESVRKMVAKLGPVNQVKACYEAGPTGYVLYWQLTGLGVPCEVVAPSLVPVKAGDRVKTDRRDATKLARSFRAGDLTPVWVPDAAHEALRDLVRAREDAKQDQHRARHRLSKFLLRHGRRPPEDVKKNWTQKYLTWIKEQVHFDQPALEATLLDYVREVDHMAERIERLEKSIDEAIQKAPPEMRTVIEALQALRGVAKITAVSIVAEVGSLSRFEKPRQLMGYSGLVPSEFSSGNRIQRGGITKTGNAHLRRVIVEAAWAYQHRPWVGGVLLKRQQGLDPEIKEIAWKAQWRLHTRYKKLSARGKNKNQIVTAVGRELLGFIWAIAARTEARGKARAA

SEQ ID NO: 429636 - protein, 371 aa, unidentified
MDESIKFFVGLDAHKDSISVAVCEAGREPSRFVGTLGPDVQGVLKTLRKYGPARQVSVVYEAGPTGYGLYRELSRRGYCCEIIAPSLIPRRAGERIKTDRRDCARLAELSRAGELKAVWVPEEAHEAMRNLWRAREDAVNMRLKVRQQLKAFLLRQDRRYAGKTSWTKMHQRWIADQRFGHSADQIALTEYQLAVQAAEQRVQRLTAALQQAIQGWRFEPVVAALRALRGIDIVSAIGLVCEIGDINRFATARQLMGYLGLVPSEHSSGNSVRRGSITKTGNAHARRLLTEAAWNYRFPARISNELRERSKALPPDIRTHAWKAQVRLCSRFAQLSGRGVQANKVCVAVARELAGFVWAIAHQAAPSTATR

SEQ ID NO: 429637 - protein, 428 aa, unidentified
MSSADKPKEEKPIAAFVGIDWADQKHDIALRATSSQGKLERCQIESHPEALNDWVLQMRERFGSQGKILICLEQSRGALIHFLMGFDCFELYPINPKQLDNYRKAFRPSGAKDDPLDAELLCQFLSLHHDQLRPWRADDEPTRKLALFCEKRRQAVDARTALSNQLKSELKQYFPLALAVLDNDLSTVLAADLLLQWPTFASLKKASAHKLRKFFYAHQCRSEQKILARIERIQNAQPLTQDSAIIEASSLTVEMLARQLKDLAPYIARYEKQIEQLFAQHPDRGLFNNLPGAGEQLAPRLLSAFGSDRGRFQSALEAVTFFGIAPITERSGKTTWIHFRWACPKFLRQSFHEFAGHSVRFCDWAATFYEQQRARGKGHHAAVRALAYKWIRILFRCWKTRKPYNPDLYLAALSQRSSPLATAVKKSP

SEQ ID NO: 429638 - protein, 313 aa, unidentified
MIIPLRCVGIDVSKQYLDIFDEGLGVPERIANATQAITQIAARWRCDVLVVFEATGVYDLELREALSEAGIRFARINPARARDFARASGQLAKTDPIDARMLAAFARAMQPATEPTANPARNALAGLAKRRDQLVRMRAQEKNRRSETDDRAMAERIGRLIEVLDGEIAEIEADIRGLIKAEREIADDARLMRSLPGVGPVACMQLIAKMPKLGHVGAKQIAALAGLAPFNVDSGAFRGKRKIAGGRKRVRDALYMAALNAVRRADPFKAFYARLRRAGKPAKLALIAVARKLLTVLNAMMRDRKPYLKANPT

SEQ ID NO: 429639 - protein, 424 aa, unidentified
MSQRTLTERVTMVKPGMLLVGIDLGRDDNVAVVLTDTAQRLTRFKFPHTRAGYDFFYRQLEQLRAQHPGQGLLIGMEPTNHYWKWLAADLEAHQPPLPYRLVNAYTVRKHREGEQLERAKDDVRDAFQIAELLRTGKFTETQLLQGAYAQLRQYATLHMRLQHDAAQLQNVLTTAVDLGFPELRQVFKDLSGETALALLRTASCASTIRELPLSEFLAQVREQLQGHRLSVSKLKQAHALAQTSVGLVDTGALHFTIQVYSEQLAHAHESLKRTETALVELFLTLPEAPYLLSLPAISPLFAALLLAELGDPQDFSCASQWVKLAGVQPVADSSGHRTRSPTPMSHKGRSRLRELLYWLVLRWVQHDPYFKAEYERLQTRPQHPLTKMEALGALMNKALHVIWAVLRDRTFYDPQYRQAGAGAL

SEQ ID NO: 429640 - protein, 310 aa, unidentified
MPTIKYVGVDLSKLELVADLAAELKPRAFANIPSGHAALLAALPAGAQVVCESTGGYQRALVEALQSAGIPVSVVMPRRVRAFAHARGLRAKTDPIDARLLSAFGQALQLVAAPPRDPVQGQLQDLMRARQVLLEQLNDEASQADHRRVPLLVAQAEERTQLLRRQLRDIQRAVAALVAGRPEWRARFERMCQVQGIGEVSAWTVLAELPELGTLARGQAGALIGVAPDPNDSGPRQGKRHIGGGRSHARKVLYMAALTASQRNPILAPFYRRLVEERHKPKRVALTAVMRKLAELLNRLLGDPDFVLAT

SEQ ID NO: 429641 - protein, 414 aa, unidentified
MPNAADHPEAPAAIQTNLSAIFVSLELSRKVWLITSLSPGSGEKMSKHSVPACDVAAVLLRFSELKRKAQARAGKSFPIVTIQEAGLDGFWLHRLLQSEGVESHVVDPASIATSRRRRRAKTDRLDGEALLRALMAFKRGEPRVCSMVRPPSPEEEDRRHISRGREVLVAERIEHTNRIKGLLFSQGISNYDPLKRDRRKRLDELKTGDGRPLPPHLKTRIVQELDRIELLLDQIKAVEAACDAMLAAPRAAKPKADAQQAASPSPAAPKVEAGQTVSPPTAVQMLLKVKSIGPQLASLLWCEALYRHFDNRRQVASYVGLAPTPWQSGSVDHEQGVSKSGNPRLRAAIVELGWLWLRHQPDSALSLWFKQRVAANDGRRKKPTIVALARKLLVALWKYVTFGVVIEGAVMKQA

SEQ ID NO: 429642 - protein, 420 aa, unidentified
MPFKILKNNCCGLDVHKTWIFACIGITDPFQRTVYKHARFSSFTKGLQELCDWLAKYNCDDVCMESTGKYWIPVYNVLEKNNIFVTLSHPKYTKPQKGNKTDRKDARWICDLYMCGMIKPSFIPPADIRELRDIVRYRFKLNCMIASEKNRALNCLTVSNLKLDDVFSNVFGKSSRSITEYILQHPGETFDVAPFVHGRCKTPIAEIQAAVDGAVSAGEAAKLRQCLDHMDELEKHKENIEWEILRLSEKYEQALNLIRTVPGFDKNPMTAIQVLSEIGGDMSVFPTAKNLVSWAGCCPRNDSSNYKIKSNRISHAGSYFKPVLVQIATSLSRSKKHPEITNRYRRLKARRGHKKAIIAICRMFLTAIWHILTDLKPYTPEGYLNPNPVKKEKKILTTSQALNLLKRRGYIIKDDAAPAF

SEQ ID NO: 429643 - protein, 449 aa, unidentified
MGKQNRRSVVLEPDAAGIDIGAEEIYVAVPPDRDEESTRKFNTFTRDLNALAEWLEQCHVRTVAMESTGIYWIPLFQILEERGFTVYLVNAHYLKSVPGRKSDVSDCQWIQYLHSVGLLRTSFRPPDHICAVRALWRHRASLLQMAAEHTMHMQKALSQMNLQIHHVLSDITGTSGLAILDAILAGQRDPIELAKLCHFRVRSARETVARALEGDYRREHLYTLRQSVDGYRFHQKLIADLDCEIARLMQTLPSATERSAPPATRTKLTAYRRQGNDPSFDLRGELYRIAGVDLTDIPGISTVTAQVILTEVGPDVSRFRHASAFASWLGLCPEKRVSGGKVLSCRTRRVAHRAATALRLGAHSLSRAKGYFGEFFRRMRSKLGTASAITATAHKIARVIYHVLLTKEPYTETVFHQCEEQSRQRAQLRLRKYAHQLGFQLTPIAASDQ

SEQ ID NO: 429644 - protein, 354 aa, unidentified
MIIIGVDFHPEFQQIALLNTTTGEVEEKRLAHPDEAEKFYRAHASAGETVRLGMEASGHARWFERLIAELQFELWIGDAAEIRAKRGRKQKTDRQDAQHILKLMLKDDFPKIWVPSWENRDLRQLLWHRHRMVQARTRVMNQLQAVALNEGLHCRKKLWRERGRQQLESFALAPWASRRRRDLLDLLDRLNPSIAELTQAIEREVENYPAAQRLRTHPGVGVLTSLAFVLILGDAERFRCGKQVASYLGLVPLEDSSGNRRRLGHITKQGSSIVRFLLVEAAQVTVRSLPEWRSKYFHLVLRRGRKIAKVAMARRLAVQLFWMMRKEWNYEQLKKFGSHAGQPGNRHGVQSNTE

SEQ ID NO: 429645 - protein, 344 aa, unidentified
MKITTVGIDLAKNVFQIHAVDERGKTALKKQLKRGQVVEFFANLPVCLIGMEACGSAHHWARKLAGFGHTVRLMAPQFVKPYVKTNKNDAADAEAICEAVSRPNMRFVPIKNIEQQSVLALHRVRQSFVKARTAQSNQIRGLLAEFGLVVPVGIANIAKRVPELIEDATNELTGSFRLLIARLMDHLKELDRQVDELEAQIKSWHRASDASCKLEKVPGIGPITASALVATIGDAKNFDGGRQMAAWLGLVPRQHSTGGKSNLLGMSKRGDTYLRTLLIHGARSVIFRAQQKVDKAGWLNELVQRRNKNVAAVALANKNARIIWALLANDREFQSNYKTASMAA

SEQ ID NO: 429646 - protein, 430 aa, unidentified
MKSNTQNAKIEAITEKTLVLGIDVGSETHYARAFDYRGIEYSKKPFKFSNTEAGFVTFKEWILDLKERHEKDKVVPGMEPTGHYWFNLGKFLQDNEMKPVLVNPHHVKKSKELDDNNPTKNDRKDPKVIAGLVREGRYMIPYLPDGVYADLRTASNIRFQLQAELTRIQNRISRWFNIYFPEYKTVYGNPDAKSGMLILKSAPLPEDILTLGIDGVNQIWREAKLRAVGKARAKTLIEAAEHSVGSKEGAVSARMEIRMLLEDYESRNIRLQEVMTLIEGLVKQIPMAEKLLKIKGVGIKTVSGFLAEVGDISRFNTPKELQKLAGLALVESSSGKHKGETTISRRGRKRLRYLLFEVAMSLVAKNPEFRELHNYYTTRRLNPLKKMQSLMAIAAKLIRVFYAMLTKGVDYDPKKMVSDIKRPAVYLQAA

SEQ ID NO: 429647 - protein, 482 aa, unidentified
MKPKQQEETRKATCRPTQGHWHQMNRKQRREMMRRIQSENLSLEVIHPDAAGIDIGNESHYVAVPPTRDSEPVRRFGCTTAELKSMADWLKQCRIRTVAMQSTGVYWIAVFDILEEAGFEVYLVNARETKNLPGRKSDVQESQWLMKLHTYGLLRNSFRPSQEIRTMRTYWRQRNDLVQGAARHVHRIQKALTQMNVQLANVLTDVSGITGQAIIKAILAGERDPRKLAAFRDPRVKATEEEIARSLEGNWQEDLVFVLQQEQDAYEFCQKQMAECDRRLQDYLQQRKDRSAGADLPEEKRKTRLKNKKGNKPQFDSRRELFRMTGADLTRIDGIDVMTAMTIISEAGWDMSKWKTDGHFVSWLRLCPDNKISGDKLIGKGRLPSNNRVTIALKMAASSLRTSHSYLGAQFRRLKTRLGAPVAIKAMAAKLARLVYRMLSHGMQFIDRGADFYEAQHRHRQINALKWKAARLGLQIIEAPAA

SEQ ID NO: 429648 - protein, 473 aa, unidentified
MEKRRKDKREEVTKLLTLQKIRDVKELESYKLSVCHPHSAGIDLGSKEIYVALDPRIAAEMSLPIVHVFNTFTSGLLSCRDLLCSCGITTVAMESTSVYWTTIYSILESSGIKVCLVNPRKFRMVPGRKTDVLDCQWLQTLHLYGLITGSFHPEEKISVLRSYMRERSRIIKDRSRYVCRMQKALTKMNLLLNNVLDDIMGKTGMSIIRAILEGERDPHKLASLRSGRCKYTEDEIAESLNGYYKEDQLFLLKTNYDAFSFFDNKLTEIDSQITDLLEEFPLKKEKVEETEEKKPKYRKKNKNDIRSEKDLQDMLYHILGTDMTAITGLQPNTVLQIIAEVGADMSKFPTCNHFASYLGFVPRNQITGGEIISTKTDRVKSSAAQAFKKVVPSISRGKSALAAFYRRVVPRIGTGKAIVAVSRKLAIIFYNTLVHGSEYVEFGQEKYLQQIEEREKRLVIKLAKKHNWEVKYS

SEQ ID NO: 429649 - protein, 453 aa, unidentified
MAKGNGLTRGDRNRNRKLEAVREVLRRDRAVLAIDLGEDKQVAVVMDHECRVLGRKVARAKAHRLSGLLEWAAVVAEGRGGLAGLTVVCEPTGHRWKAVMGLADEAGHGFACVQSLAVHRARESDDYTLGKTDHRDAYLIGKLAVRLECYLPERADAGWARLRHLGARRFRLVADVTSCMQQAGDLLGCCWPAPLDAAKRPLESVTWLAGMAVVTGRCCGDPRRLRKIGYGKFLAAVRRELPRWGGKGYVRHSVVRVLWDALADAGGVAAQRPGALERLGMLLEDWRETRFRLAAVEERMTAVLGELGLAALAASIDGVSALSAAVILAETGDMTRFASGRAVVKHAGLNPSEHSSATMTGRTRISRRGRPGLRAAAWRAVWGALRHNAVLRAKHAHLTGRDTARLADGQARTACAAALLRWLWAVTTTGQPWDARIAAGQAGVRTPALAAAA

SEQ ID NO: 429650 - protein, 463 aa, unidentified
MKHKKVSGKGTRRSRPLLERVNPNAAGLDCGSDMHYVAVPAGSDPEPVRCFKTFTVDLHRLADWVVSCGVKTVAMEATGVYWIPIYEILEACGLEVLLVNARHVKNVPGRKSDVSDCEWLQELHSVGLLRGSFRPVAEIAALRSYLRHRETLIDSAATMIHRMQKALVQMNVQLHVVISDITGATGLRILRDIANGLTDPRHLATHRDARCQASEAEIAAALTGNYRPEHLFVLKQNLALYDEFQRQIKTCDTQVEDHLKALVASAAPPQAPLPAARSRRKARSNEPQFDVRTPLHQLSGVDLSQIDGIGPYNALRLISEIGTDMSRWPTEDHFASWATLAPHNKITGGRLISSRTQPSANRAADILRVAAMSIGRTKTALGAFYRRLAYRIGKAKANTATARKLALLVYRVLKGEIVYKDPGAAVYDARHRETILRKLRRQAAVLGFGLVNGQTGEILEGVS

SEQ ID NO: 429651 - protein, 344 aa, unidentified
MPSNFYLGIDVSKASLSVVLMSSDSKVLWSSKKIANQPSGFKQMVEHASKIASKHADGDDYSIAAGMESTGVYGEQLSYYLADNNMSGRISLYVLNPFAVKSYRKATMQLNKNDAADARLIASYLLSMITTGQITPWQAPSLAERLLRELTRRRAELVTLREAEYNRLEKFRAGGSHPHPVIESVQELIAHLEQQIREIDEAIEKHIDDAGLRDTAELLRSIDGIGKVSSASFIGEAGDISRYRSVKQLVSRLGIAPCENQSGTSVHKKPVMSRMGSAVLRHALYMAALVATRKNKVISAFYNRLLARGKCKKLAVIASMRKLLHIIWGVLTHRVKFDPEYAPA

SEQ ID NO: 429652 - protein, 356 aa, unidentified
MYGLKHQKEKRSMEHFAGLDVSVNETSVCIVDDTGRIIREVKVASEPEALLAVLGNPACQFKRIGLESGPLSQWLYSALAETNLPVICVETRHMRAVLKAQINKTDRNDARGIAQMMRAGLYRPVHVKTLRSQKLRMLLTHRKLLQSKAIAIENDLRGTLRTFGLKVGVVGMVKFETRIRELVDKLPDLRTLVEPLLVVRRVLREQIAVLHRRVLAIVRNDEVCRRLMSIPGVGPVVALTYRATVDVPARFRNSRAVGAGLGLTPCKYQSGESDYTGGISKCGDAMLRVMLYEAAQILLIRSTRWSWLKAWAMRIARRRGMKKAIVALARRLAVIMHRIWVDGTEFCWTRQQAAAA

SEQ ID NO: 429653 - protein, 337 aa, unidentified
MIMIGCDFHPGLQQIALLETETGRREDLRLTHDGKGTQVRQFYAALPHPVRVGLESSGYSLWFEELLEELGHELWVGDPGRIRKAAPRKQKTDRNDARLLLQLLEEKRFPRIWVPDRATRDLRQLLMHRHKLVTMRTAIKNQLQAIALNRGLQRHRKLWSEDGRERFETLALPPWTERRRNHLLRLLDQWDAEIAELDQVVRREAEAHPDACYLMRRQAGIGPIAALATVLTLGPVERFPTSRKVASYAGLIPTENSSGPHQRLGHLSKQGSPFLRFLLVEAAHTAVRLDPNFKRAYWRLVERRGKPIAQVAMARKLLTHLYWMLRRRREEPCSQPA

SEQ ID NO: 429654 - protein, 339 aa, unidentified
MKLYAATDLHASNNYLAIIDENGERRFKQKLPNNPALILEALMPYKEEIAGIVVESTYNWYWLVDMLMAEGYKVHLANPVAIQKYSGLKHADDKHDAFWLAEMLRLGILPEGYIYPKEERPIRDLLRKRGHLVRLRTSLIISLQNIISRNCGKELDCNSMKRLKTNHVAPLLEDNEDLALAGSVSKESIDFLTRRIKEIESAVENKLKLQEPYNNLQTIPGIGKIIALTIMLETGHVERFADTGNYVSYCRKVHSKWTSNGKQKGKGNRKNGNKYLAWAFSEAAELARRFDAKAKAYYQRKKQNTNFMVAHNALAHKLARAAYHIMKDNVSFMPEKLFA

SEQ ID NO: 429655 - protein, 482 aa, unidentified
MKKKNIYVNQSQELLTLFEEAGNSAKIMCVPIDYAKKDHVVMFCNGYGDIVRKPFSVKNTPEGINYLTEQVTRSCHNRSIKLKHVFFGGEDVGSYAENFASTLRSGGWLVAGVNAHDAKKQRSNMQASTDRLDLMGIATMLLNRRCNCSPAQSGIYRNLRTLVRHRRRLVVMTTEVRSRIHAIVDRLFPGFLDEKKSGITPFSKGSLWLMENRFSTQQIRRRNRSALIEALRRLGTPKPDCAATTLQHYAVRVLNTPDEYVATLQLSLAQHVKHYWCLKENIEQLEREIAVWLSQTQGAFLTTVRGIGIVLAAGVTAEIGDPFQQKPLNNLASYAGIIPRVIQTGGPEGEIYTGKVAKRSNRILKDYVVQSASHLGLHGPEDLISDYKRRDAAGQHADFGIARRYLRMAMCLMRNSQMYLPPRLRKKDSKPEERTSYYLMRWPYLRDKWQKLNALEAAFAEDRPLGRWRTMVQGIYDIKLKL

SEQ ID NO: 429656 - protein, 418 aa, unidentified
MTTFTTEFTAHIGIDWADKKHDFCIQGVNQSTREFGILTLSAEKIDDWVQSLHQRFGGKLAISIELTKGPIVYALQKYNFITIFPINPLLLAKYREAFTPSKAKDDPTDAELALDLMINYPKKIKPLALQSTPIRKLMYLVEKRRRLVEDRRRFGNRLIYVLKQYFPQLLEMFSHRDSEVFCNFIRRWPNLQKLKRARADTIRKFFLAAGGRSVPLIEKRIEIINHAQYITEDPAIVDSHQLLAISISDQIITTVRAISRFDIEIEKLFHEQPDAEFFESLPSAGPCMAPRLLVAFGENRDRFSTASEVQMYAGVAPVTVRSGQKSWVHWRWQCSTFLRQSFIEWTAKTVRSSYWAGLYYPQQRKKGNSHQSAVRSLAFKWIRILFRCWKSRVNYSETKYLKSLRDKKSPLLLLKTVD

SEQ ID NO: 429657 - protein, 421 aa, unidentified
MVLIEDEEVFCPRVAGMDISKTDAKVCVRLVEQGRVKQVKVRTFTTTTPGLLRLRDWLEELDIALVAMESTGVYWKPLFLVLEERFTCWLLNPRDVKKVPGRKSDVTDAQWIAKLAQYGLVQPSFVPDLPVRLFRDLTRYRSNVVRDRVRAVQRLQDLLESAGMKLSSTVTDITGKSATAMIAAMIADPAGADPARLAELAKGRMRSKLPELAEALTGRFTDHHARMAATMLRQIADLDAVLADLQTQIEDELGPFARAAAHLQTIPGIGEHVAAIVIAEIGVDMTRFSGPDHLASWAGLCPGNNESAGRHLSTRTRKGNKALRGALYEAALAVSRTHGNYLSAKYADLAGRMKRPKALVAISRIILETCYHLISDDTDYRDLGPDYLAKLRTTTPDKTRIRRARRELERHGYTVTEPDAA

SEQ ID NO: 429658 - protein, 342 aa, unidentified
MTAIGVDTHKATLAACAIDGLGRALDEATFGNDPAGYLEFIAWARSIEPEATIGVEGSASFGAPLARAVQSAGLCVREVPPHLSRFERRRTRRPGKSDPGDALAIARVTAREKNLPPIRLPDHTTEIRLLLEAREDLIGEATRVRNRLHAHLRILLPGYGGTVANLVAARHRTMVRRLLRGDATVQGELARSLLDRLLRLERECAVLKHRIEALVDGHPLVALPGAGPITVARLIAEAGDMRRFRTPDAFAALAGVAPIPASSGQVQRMRLNRGGNRQLNRALHVIAVTQARFHPPAKAYVTRRMEVDGKTWREAIRALKRQLVRPVFRLLIEGSEVRLEAA

SEQ ID NO: 429659 - protein, 357 aa, unidentified
MEGSVTITNAHGKEPKMNETLYCGIDLHSNNAMYVITDEQDRPLFQKRLPNDLPQVLAKLAPYRDRLKVVAIESTYNWYWLVDSLRENGFEVALANPAKIEQYNGIKEANDLTDAAFLAHLARLNILPTGYIYPKEDRPVRDLLRRRMLLVRYRTGLKLSLQNMVMRQTGRSLGWRGVRELDAEGRAELLGENDCLPFVATHQVELIESLEQKVELFEAKVLERVQLRPAYTCLLTLPGVGVILGLTIMLETGAIGRFATVGDYTSYCRCVRAKHTSNGKKKGDNNKRNGNAYLSWAFVEAVHHAIRCCPAAKRFYDKKAAQRNGALATKALAAKWSKAAYYMLKRQEPFDLKRVFG

SEQ ID NO: 429660 - protein, 347 aa, unidentified
MYKANRRDGLCERSLTMFPVGIDVSKNTLDLCMLYDGIKGRIKTRNIQNNRHSVENILRWLRLQHCSPEDVHVVMEATGVYHEQLATELHDAGFRVSLANPHRSREFARGMGIMTKTDKVDAYMLACYAFLKKPHRWEPPAPEIRYLGALLRRRDVLLGDALREENRLEKYLSTDTPADIISSCRRMAQLLREEISNIERQIKAHIKASPALRRDYTLLTSIKSVGPQLGMHMLIVLRSHNFVSAEQAAAFLGVVPIEKRSGTSVRRRPRMSKIGPPQLRAKLYMSALCGKIYNKRMRNIYDEMCLRGKPKMVAIGALMRKLVHWCYGVLKTGTVFNDEDLKPVLST

SEQ ID NO: 429661 - protein, 342 aa, unidentified
MDYFAGLDVSLEEVSICVVEGAGSVVREARVSSEPEAIARWFATVGLPMARVGLEAGPLSPWLHSELVRRGLPAVCIETRRMRSATALMAVKTDRIDARAIAHAMRVGWYTPVHVKSAASQELRLLLRNRKTVQEQRVALDNEIRGSLKAFGIKLGRVSEARFSEAVARAIGAVRPELLKMVEPLLKLRLELRRAYAVLHRQMLSAARQSPICRHLMTTPGVASVVSLTYMTGVDDPVRFRRSSDVAPHFGLTPRKYASGTIDRNGPISKAGDEMVRQALYQAAHTLLTRVQRWSALKAWGMQVAKRRGLRRATVAVARKLAIILHRMWTHGETFRWAAKEA

SEQ ID NO: 429662 - protein, 341 aa, unidentified
MTVTIGIDPHKASHTAVAIDNAECVLDEFRVRVCSAQTERLRVWATPFPDRVWAIESARGLGCLLAQQLVAAGETVVDVPAVMSTRTRLLGSGRAQKNDPNDARSVAIAALGNNQLCFVGLDDHARVLKLLAKRHRDLGRLKNKASCRLRALLMELEPGGMAKEMTVNRANGILDRIEPGSQMVEHRLAVARETLVDIDHSETQMKASLKRLRTAVGASGTSLVEIRGVGVVVAAMILGHVGDVSRFASPAHFASYNGTAPIEASSGENKRHRLNQRGNRQLNWAIHIVAITQLRYPCPGREYYDRKRAEAKNTKEAIRAFKRQLSNVIYRTLVADARRRL

SEQ ID NO: 429663 - protein, 349 aa, unidentified
MKHYVGLDVSLRETSICVVDETRRVVREGCAASEAEAIAGWLRKQDLTFEIVGLEAGSLAPALYSGLSDLGLPVVCLDARHLKAATSVMPVKTDRIDARNIAMALQAGWYRVVHVKSQATHRLRTLLRTRAMLVRARVDLDNHLRGILKAFGLKIGKARADQFEARVRELVNDDAVLRQIVSAVLGVRTELMQRLEVLDRMVLTVVRADPVCRRLMTVPGVGPLTALAFRTAVEDPARFAKASLLGSYFGLTPRKYASGDIDRNGTISKCGDKLVRSLLCEAANALLTRVKRWNSLKHWAIQIARRRGFMRAKVALARRLAVIMHRIWIDGTTFQWTRETPAQAPVASL

SEQ ID NO: 429664 - protein, 455 aa, unidentified
MDLVYSHCAGLDVHKKTVVACVRIPGPNGKPQKITRTFSTMTADLLALADWLLAQGVTHVAMESTGEFWKPVFAILEASFTVLVVNAQHIKQVPGRKTDVKDAEWIAELLAHGLLRASFIPPAPQRDLRDLTRQRTHLVQERATVVNRMQKVLEWANIKLAAVATDVTGVSARAMLEALIAGQTDVTVLAELAKGRLRTKRAELEQALQGTLAPHHAFMLAQHLAHLDFLDEQIATFDAQIAQAMEPPQEPPSDEGTPSDGQKRDEQRGDEQRGDEQAARSASAPRDERWRAARIICDGVPGIGPRVAEIILAELGTDMSRFPTAAHAASWARLSPGQNESGGKRRNSRIGKGNRYLRAALIQAAWAAVKVKDSSLAAFYRKLVTKRGTKKAITAVAHKLLVIVYTLLKNGDTYQERGAASLDERQKDRVLTLMRRRIEQLGYHVTLEPMAVAAD

SEQ ID NO: 429665 - protein, 345 aa, unidentified
MHDKNMLLARAQGRGKAFNRSYRNTPSGRRAMIRSLKEETDGANIIFAYEASCQGFGLYDELTEAGIECYVLAPTKIARSLNQRRSKTDQKDALRLLELLRGHVLAGNELPSVWVPPVQIRDDREVVRARLDAAGKVIGVKNQIKTLLKRNGLKRPSGTGKGWTKGYRRWLKGLLCGGSVLREGGQVGLGSLVRQLDFLEEEIARLDVEVRRLSVRDRYSRPFEALCREKGVGLLTAMVFLTEMGDLSRFSNRRQVGSYLGLAPSSRESGEACDRKGHITHHGNSRVRAVLCQAVWSRVRTDCREKEVYERIVRRNPKNRKIAVVAIMRRLAVRLWRRGKRAGAV

SEQ ID NO: 429666 - protein, 400 aa, unidentified
MRAVFGIDVSKVSSEVAILVNGEKVHGYTMPNDAIGFARLLGDLKTVHKPEIIFEATGVYSRRLQAFLEDNGYAYTRLNPLEAKKQLDSLRVRKTDQIDAEKLAQSQFVLNRKPTYVQEEVYQELRDLSRFYQNLTEDIVRAKNRLHKVLQVTFSELETILSTPTGEQYWNLVIAFPCKDFVLDLSKNELSKSIRQSTSKRISDKRVAYLAEKLTVLANQSYCAVKKTSPMLEEVRYYAKELLRLSEQRQAVLDQMVELAQPLPEYDILLSIPGIAETTATSIIGELGDIRRFQSANQINAFIGIDLRHYESGNFLAKEHITKRGNPYARKILFKCIHNIASASHTNPCHIADFYEKRKRQSQTTSTKSHTIASIHRLIRTMYYLIMHNKLYDYASTQNR

SEQ ID NO: 429667 - protein, 315 aa, unidentified
MRMKAMGGVNATIEVGKHQLDVALGSNGELFSEPNQTRAITRLAKRLAELDCTRVLIEGGSYQNVLVAGLRAAELPVVIINPRRVREFAKSIGQLAKTDHIDARVLALYGERIEPPIRELPDEQNQALRGLWVRREQLIEMLVMEENRLEHAPKALHRSLRAHIDYLRKQIKQADNDLDRAVRNSALWDKYQLLSSVPGVGPVLSVALLSDLPELGRLNRREVAALAGVAPFNCDSGTLRGQRKIQGGRKRLRRVLYLATVASVRCNPVLRPFYLRLRATGKPAKVALVAAMHKLLLILNAMLKTKTPWRPPCPV

SEQ ID NO: 429668 - protein, 312 aa, unidentified
MTQDALVVGIDVSKDTLDVAILPTAESFSVPNQAKGWGQLVRRLAGRSVAVLAFEATGGYERGLLRALNAARLPAARVNPTRVRDFAKACGALAKNDRLDARMIARFAQTLAPRLTRPDPQVEALAELVSVRRQLSEEITRASNQAEHAVLRLVAKLARRRIRSLECELKLIEQQIAKAIAADPSFARKDALMKSAPGVGVVTSATLLALLPELGQIDARPIASLVGVAPFDHDSGKLKGQRCIWGGRRPVRDALYMAALGAIRTRNSCFRACYQRLIAKGKKPKVAIVAVMRKLTTTLNAMLRDNRPFNLA

SEQ ID NO: 429669 - protein, 320 aa, unidentified
METKVNVGIDISKKSFDVAIPRKEKEGYIHRRYSNNIEGFTKFIKDLDPTSNCIMEASGVYYLQLAIFLHNNKMRVCVVNPLTIKRFSQMRLIRAKTDKKDSAIIAEYGKIEFPEEWIPRAEHMLQMQQLQALHDNLIKQLSSLKNQQEAFVESGINNEFGAKMVSDEIVHVKLKIKEIENELVKITKKHHSDLFERLQTIKGIGKRAAMTLILITDGFTRFTNCKQLCAYVGLSPRIFESGTSVKGRAKICKMGMARMRKLLYMCSMSAISSNKSCKEMFNRLTERGKNGKLALIAVANKLLKQAFVIGKNKDMVYQEF

SEQ ID NO: 429670 - protein, 368 aa, unidentified
MIVIGVDAHKRTHTLVALDAVTGVALGETTVQASDDGALNALRFAGGVSQDRVWAVEDCRHVTARLERALLGAGERVIRVPPTLTGESRKATRTPGKSDPIDARAVALAAIREGIEHLPVAFLDEQAHEIRVLCDYRDQLMHERNRLINRLRWLLVRIAPEIEAEIGPAALKGPRIRARLARQLGQLPASTELRVAKAQLRRINQIEKEQKELFAELTALIQAHAPQLLEQRSIGTVTAAVIIGRTAGAQRFRSEACFARHCGTAPIPASSGKTVRHRLHRGGDRQLNRAIHIIALGRMVWDPETRAYIERRVSEGKTKLEAIRCLKRHIARQIWHLLYNTNPAPQPQPRPRPTRVTVGAPGLMPCAR

SEQ ID NO: 429671 - protein, 422 aa, unidentified
MLEETNDTEELIQRVAALDIGKAELVCCIRVPGEGKRGRRLQEVRTYATMTRSLLVLADRLAGLGVTRVVMEATSDYWKAPFYLLEAYGLEVWLVNARDVKHLPGRPKTDRLDAVWLCKVAERQMLRPSFVPPPAIRRLRDLTRYRADLVGVRTAEKQRVEKLLEDAQIKLSVVASDIFGVSGRAMLAALLAGERDPKALAQLARTRLRAKRSQLEEAFTGHFTDHHAFLLARMLGRIDQASADIAELDRKIGAEVAPFQAAVDRLDEITGIGPTAAQVIIAEVGTDMGRFPTAGHLASWAKFAPGVKQSAGKPKGKATTGHGNRYLAQVLGEAAVVAGRTDTFLGERYRRIARRRGTKRAIVAVGRSILIIIWHLLADPTARFQDLGAGFYDTRINPERIKRNHVRQLEALGYKVTLEPAA

SEQ ID NO: 429672 - protein, 356 aa, unidentified
MKFVGVDLHKQTITVVVVDAAKKMLSRKRFSNLMSAQIAQFLKSLGDFELTVEATASYEWFVQLVEPFAKRVVLAHPGKLRIIAESTRKSDKLDAKVLAEMLAQGQIPASYRPTPRQRAHRQLVRQRQFWQRKITGVRNKIRRILSDYNLDRSDLFAAVGQAWLKTATVSDVDRFCLDQLVDEWNDLVKRLEATEQKLREFAKLGSDQEQLDRALLRTVPGVGWVTSEVVLAELADWRRFSSLKKTVAYAGLAPGQRESAGKRKNLHIEKTGSPLLRWVLVQAAWQLARRSPKWRTIYENLKARIGTKKAIVAVSRRLLTICVTLLKRQEVYREITSSPSSESGSSSLTMTVRSRT

SEQ ID NO: 429673 - protein, 454 aa, unidentified
MTVSTPTRLRIDHLPTVFPNAAGLDIGSAEIVAALPPDRDVTAVRTFTTFTADLHQLVTWLLDHDIDTVAMESTGVYWIPIYEMLEVAAIRVYLVNARHFKIVPGRKSDYNDAQWLQKLHALGLLTGSFRPDDEMCVLRSFLRHRAQLIEHRSPHILHMQKALKLMNIQLPEVLSDMTGVTGMAILRAIVAGERRADVLARLRRPGCRRTEHDIIQALTGTWREEHVFGLAQSLDLYDFYTTKITECDHRLDQQFSSMKPRFDIEGEPPAPPTSRTKKNSNSKNQPTYNVRAHLVRLLGIDLVDIIGVSESVAQTVIAEIGTDMSRFPTSKHFCSWLGLAPHNDISGGKVLRSRVMKVHNRAGQALRQAAQSCSRSRSLFGAFYRARSARSSSEEAVVATAHTLARVIYHMLTCHEAFKPESIQAFDQKRQERDLKHLQKRAKALGFILQPLTP

SEQ ID NO: 429674 - protein, 346 aa, unidentified
MMIIGCDYHPSWQQICWVDTVTGETGEKKLEHASGEAEKFYRGLSGAALIGMESTGNCQWFVEMAAAAGHDLWIGDAAKIRACDVRAQKHDRRDAALILKLLLEGRFPRIWVPSSQEKDLRQLLIHRYKLVRIRAQVKNELQHLAMNQGVTKKRKLWSKAGEKVLRELALAPWASRRREDLFKVREMLSAQIDLLDQAVVEVAEKNEKARLLMTQPGVGPITSVAFVLTMGDVSRFQRGKQVASYLGLIPREYSSGGHQRFGSISKQGNWFMRMLLVEAAQNAVRYDPGFRNEYLHRCHNKAKGVAKVAAARKLAIRLYWMLRTNTGYPGVVRVESSSRVPLVSAS

SEQ ID NO: 429675 - protein, 451 aa, unidentified
MSKQRNKVVSLPVIEPNAAGIDVGATEIFVAVPADRDLEPIRCFPTFTVDLERLADWLQQCHIRTVAMESTGVYWIPLFQILDKRKIDVRLVNAHHVKNVPGRKTDVSDCQWIQHLHSVGLLRGSFRPNDEICAIRSLWRHRDSLIQLATLHLQHMQKALDQMNLQIHHVISDLDGTTGLAIMDAILAGERDPLKLAQLRHPRIRVSEETIMKSLVGDYREEHLFTLRQSLKAYRYYQEMIQEVDAQVKRMMQRLPSKVAEGEEPPQGSKRRARKTPWRNEPPQLREDIYRAFGVDLTEIPGVNSLTAQMLLTEIGPNLDRFPTAAAFCSWLRLCPDPKISGGQVLSSRTRPTKNRAALALRVATQSLHRSDCFLGDYFRRMKARMGTPKAMTATAHKLARIIFHMITTQQPYDATIFQKQEERRHHQKSARLHVQARELGFQLVPINFVP

SEQ ID NO: 429676 - protein, 387 aa, unidentified
MARKRTLSTLDTSIAYEAVGLDLAKEDTAISAFGPDHEGPYLIDRMPYDKLYELLADMAPTLVAMEPCSGAHQIAEQIQELGHEVMMISGRHVQAWVKDHCNGQKTDLNDAFAILNLAYDRWLTPIRGKTREECRLLALQASYRQLKGQRTKTMVHVKATLHAWGFPIRAGSFNQKVLHELIDANREAFGDEVAETLHLMINRVRDLDHDIATVLKLLTEATQRDPRASLLRSIPGFGVLPTSRWCAVVGDIARFDSPKQTMAFIGLVPNNRITGHHTETSSGREARGQGKMSKRGDKMLRSLCILGAASLCLMVRNDRLPDCPFVASIKERLASSRPWFKVLVYVAAKLVRIATALLKYGETFSYEKAGISKAVLKQWELEQAKAA

SEQ ID NO: 429677 - protein, 410 aa, unidentified
MEVHFSNCAGLDVHKDTVVACSRRVIDGKIVREVRTFKTTTSDLLKLSEWLAGLGCTHIVMEATGVYWKPVWNILSDGDFELMLANAAHVKNVPGRKTDVNDATWLADLLAHGLIRGSFVPDTQTQEQRGLLRTRKQLTRERTSHVQRLQKTLEEANIKLDTVISDIIGTSGRAMIEALIAGETNPARLAQLAGTRIKASPATLSEALRGRVTKHHRFLLRLHLEQIDTLERAIAEIDKEVEANLDPFRPLIPVLTSIPGIGELAARVLLAEIGTDMSRFPTAGHLISWAGLCPKNDESAGKRRSTRMRKGAPWLKTTLIQCAWAATRKKGSYLQAQFHRLRARRGAKKAVGAVAASILTAAYHMIANGTFYQDLGADHFERRSKPTQIKRLVAKLQSLGYEVEIKPLAA

SEQ ID NO: 429678 - protein, 340 aa, unidentified
MDITTLGIDVSKNIFHVVGTNRAGKPLFREKFTRQKLAEFIAQHPLCLIGMEACPGAQHLARKFEEYGHQVKLMPAQFVKPYVKSNKNDYNDAAAIAEAVRRPTMRFVTTKTSEQHDLQALHRVRERLVRTRTSIICQLRSFMLENGVAVRTGRAALAKALPDILEDAEQPLSDRMRALIQGLRDHWLFLDEQIKSVSADLERIAKSRDDCRRLLTVPGVGPLVATALVASVANGKQFKRGRELSAWLGLVPREHSTGGKQRLLGISKRGSSYLRKLVIHGARSCYLNMNRSQHRMGAWIDDMANRGTHRNVIVVAIANKLARICWAVMRDGDVYHCARA

SEQ ID NO: 429679 - protein, 484 aa, unidentified
MAKRKLSTFERLQRGERLNRKERREVQQRLNLDDPGLDIIHRDAAGIDVGNESHFVSVPPDRHPQPIREFGSWTAALEEMARWLKDCRIRTVVMQSTGVYWIALHDVLQRHGLKVNLVDARGSKNVPGRKSDVQECQWLRKLHTYGLLRPCFLPPAEIHAVRTLWRLRSQHVRDAGRCIQRMQKAMIQMNVQLHNALSDISGVSGQAIIRAVLKGERDAKVLAKLRDPRCQASEEEIVQSLQGNWKEDVLFELQQAVDAYDFYQRQMQQCDQQLRRYMAALPTCAPVPPPASAPSLPSAKEGKQGRARKSRRQGNQPAFDLAAELERILGVNPITIDGIDVLTIQTVLAEVGPDLSAWKTERHWTSWLNLAPKRDVSGGRVIRHVRQHHTNRAGHAFRMAAQSLIRSQSYLGARYRYLRAKLGGLKAVKAMARYLACLYYRLLTRGQIWVDRGTEEFDRRSQQRELAALQRKARKHGLQLVPAA

SEQ ID NO: 429680 - protein, 415 aa, unidentified
MHVQLPADRQVTVGVDTHADQHVGAALDPLGRLLGTQAVPSTAAGAAALLAWARRFGAVERVGIEGTGSYGAGLSRWLRARGVVVVEVARPKRPARRGRGKADPVDAEAAARAVQAGTATARPKAGTGPIESIRALQAARRSALKARTQAANQLRALVVTAPDDLRARLRRLGLARLVATAAAFRPGAPSTPSAATKLALKSIAARHRRLSAEVAALDAHLGRLVAAAAPDLVALKGVGTDTAATLLVTAGDNPDRLRSEASFAHLCGVAPIPASSGKTVRHRLNRGGDRQANRALHLLAVRRLRWDPATVAYAARRRAEGLSKPEILRCLKRYIARQLYPLLAGHAALGPATLGQGGPRSGPPATPLSGGAAVTRQGRSVAEDPAAGGVDGRRGRSHRVPTPPAPAPRPPIHHP

SEQ ID NO: 429681 - protein, 412 aa, unidentified
MQVVYDRCAGLDVHKDSVAACALWPDQEGKCQEEVKTFGTMTRELLALSDWLAKHGVTHVAMESTGVFWKPVFNILESRFHVWLINARHIKQVPGRKTDVKDSQWIAQLLQHGLLRPSFVPEQPQRDLRDLTRHRAQLISEQTRIANRIHKVLQDANIKLGSVATDILGVSGRRMIQAIVSGEEDPQALSQLAVGKLCKKKEALAEALHGHVREHHRFMLRTLWDHLTYLEESTAKLDARIEEMMRPFEKAIQDLTTIPGVKDRVAQALVAEIGVDMSQFPSEHHLSSWAGVCPGSNESAGKRKSGKTTKGSRWLRAVLSQAAWAAGRTKNTYLSAQYHQIARRRGKKRAIIAVAHSILVIAYHVIAEGTTYRELGADHFDRLRPDRLREYYLKRLKKLGYEVSVSQEKPAA

SEQ ID NO: 429682 - protein, 439 aa, unidentified
MTFAGGRSQADYMARVRGIPPEQCLVVPIDVGKHTAMSLVADHEGRVVHEPMTFPMTATGARSLISAAVAAGRAARAGSIRFGIEAAGHYHRVLASTLHANGLDVVELNPAAVKVARSQLGQARVKTDVRDCLAMVELLVRGQGWPLHRHDDQVALQTMWVAQRRRKLDAAQALTNQVHALADLAFPGITATFKTGFDSPTLRLLLSTITSPDELAAMDVEQLVAHAATHGRRMLRPKARQVIAAAQDSLRLPDAQQPTAQRLLAREIAVLEQLRDEITYCDEQLAVILPSTPAGVLASVPGVGVATASYYGAALGDPWRFANADAAYRYSGLSPSSYDSAGRRRAKVEISRQGAVELRRAMITLGTSMGLSHPDFVAYRRRLLAAGKKPMVVAVALAHRSHRLAFAMMRSQIPYDDHRWTTAVAKGRSAKATGATATT

SEQ ID NO: 429683 - protein, 373 aa, unidentified
MKTMITYVAMDVHKKQHEVAVMYGDSGELQRFSVANTEKELTKMVKRIRRQSSNEIHVCYEAGVCGFVLKRRMEKLGCVCQVIAPSLVLRKPGDRVKTDRRDANYLLDQLIAGQLTEVYAPDPAQEADRELTRCRQSAQEQLKRARQQLNSFLVRHGYLYCGVQLWTGKHQEWLHALVFDVPRLGAIFEEYSSEVQHCVQRLASLDKQLEQMARSQPYKAAVGVLRCLRGIDTLTAITVLTEIFEFGRFESPRALMAYLGVTPSEDSSGERRRPGGITKAGNHRVRRLLTETAWHYRHRHQVSKALAARRQDQPAWAIDLADRAAVRLHRRYRHLIERGKAAHVAIIAVVREMAGFLWAMLRQLHQQPHNPQG

SEQ ID NO: 429684 - protein, 343 aa, unidentified
MNEITTIGLDTAKSVFQVHGVDADNEVVLRRQLKRRQVLPFFRKLPPCLVGIEACSSSHHWSRELQALGHTVRLMPPKYVKAYVKNQKNDAADAEAICEAVTRPNMRFVPTKTKEQQSILMLHRTRQLFVRQRTALINAIRAHLAEFGIVAGVGRNGVDALLEIISDGKDDRVPDVARDCLGALGAQLQRTKAQILVFDRRILAWHRSNATSRRLEAIPSVGPQIASALVATITDPKAFRSGRDMAAWIGLVPKQNSSGGKEKLGGVTKAGNRYLRTMLMIGALSVIKRAKQLGYTNRPWLAALLARRPTKVAAIALANKVVRMAWAMMVRGEKYREPVALAA

SEQ ID NO: 429685 - protein, 403 aa, unidentified
MKTCGLDVHKDSVFCAIYNGKSFSVVKEFETLTNRIREMGTYLQSEGVSKVAIESTGIYWIPVWDILLEMGFELTLVNPLLIKQTAGRKSDVKDAQWIAELLFKGMIRPSIVPSPTINELRTYTRKYSKLQGQKTRSLTKMNNILVKCSIRLDCCISNLSNKSFMNIVGALIDGESDPSKLAKLVHGNTINKLSGKLRQSLTGVMKEHHRRNLQWEKEEYDLYQKQTEDCLLKMEQICEEHFSEEVSILRTIPGVSRISAIAIFAETGGDMSVFENSGKLSGWAGLRPRNDETSKKVKNTAITKGNKYLRAILVQVAWAAVRTKGSFFMKTFNRLAMRMHRNKALIVVARKILVITWHILTEKTPYNPSILPVYDPNSIVKKLRYHEKVMLELEKLLPKKKQK

SEQ ID NO: 429686 - protein, 476 aa, unidentified
MKNQNIYRNNNYALKETLSNYKPEQLLYVPIEVGKFNHKASIVNFFGDIVVKPFEFPNKKHGLAFFLKKLNFAFTSSDARKIFLGCESCGHYHLNLVHHLKQLNFPVEIINPRDTRKENPNKNSKTDIIDLNAIARVLISNKGGRQIVPEGVYYNLQRATRTRRKFVQRRTSSKNIITGLVDRIFPGLWDKDNSIFSDLWGKASMLLLEHYPHPHRLIRLGEERLARFLRKNNTKLGLETAHKIINAAKDSLTKPLAELHMDIFALKSHIRCLNLYNETIAQLEQEIACLLIQTPGIYLLSIDGISVVFAGEFTAEVGDINRFAYANQIISFAGTCSKVFESAEYQAQGLHISGRGSKFLRSTLNQIALALNAWCEPFRLYYTNKALQKPDKPGVARIATGNKFVKLAFALMKYEQLYKPKGLLLDEKYYYSNLWSKITRKLSSFNSSNLAPENNYLIKIKNYLEEKYAVTLSTKL

SEQ ID NO: 429687 - protein, 327 aa, unidentified
MEAAIGIDVSRDWLDAALVVSGGERPQWCLRVERTPAGVETLVQKTPPGVAWVMEPTGRYSQDVALWAREVGQPVLLATAKAARHALLAVRTATARTDRTDSVGLAMLAHLRRLRPYPLRTERMEEIDQLIKTRRALSATLSRLREQRQSLPRAARCFDAPLAAVAEQIAALDRELAQCAAQESELAVVPALLAIPGIGPVTALTVASCLEAKQFDHPDQFVAYCGLHLEYKDSGQKQAHRRLSKHGDAELRRLLYLAAMTNARCVGSPFREQYERERAKGLSAPGAFCAVARKLATVCWSMHRHRTSYDPERVYSQAAVQNPRSTP

SEQ ID NO: 429688 - protein, 366 aa, unidentified
MVMFFDQKNITPTQKGDTKMNYIGVDCHISTLDFAVVTQTGRVKNKARVKTSVKEFMEFIKTVPKPRKIFIEEGTLANWLLETSMRYGEKLIITDPKTNKWIGKSMNKDDAIDAEKLAHLARGGYIKAVYHPVNKKRRFKELVFAYHDTVKSLTRIKNKLKARFRTEGIKCSGVKVYSENYRNEWRDRLPSNPIARLIADELWKQLDQLHEAKKTLRKNIGTESRQYPEIKRFMKVPGIGLIHASTIFAIVDTPYRFSNKKKLWMYAGIGLAERSSGGTVYSKKLTREYNRQLKDAVKKAVEAAICAKDNQFKRQHLRLTLEQGLPTHKAKLTVARSILATLYGMWKNGEAYDPDIGKKRKEGNKK

SEQ ID NO: 429689 - protein, 453 aa, unidentified
MGAQAGKGRSLSLECIEANAAGIDVGATEIYVAVPPDRDAQPVRCFATFTGDLREMAAWLVRCSIRTVAMESTGVYWIPPYEVLEEAGLRVCLVNSQHVRHVPGRKSDVSDCQWLQYLHSVGLLKPSFRPEAAICALRSLSRHRASLVESAAVHIQHMHKSLTQMNLQIHHVLSDITGISGMAIVEGIVAGQRDPSQLASLCHAKVHADRQTVIKSLTGNYRPEHLFTLKQSLAAYRNYQHLLAECDQEIERLTGSISGKLPPGGPAPHSSRQKRRKNQFHFDMGAELHRLFGVDLTAVPGINALTAHAVLSEVGPDLSRFPSAAAFANWLALCPNNNKSGGRILSSKTRPTNSRLSHALRVAAQTLARSRSHLGNFYRSMRARLGAPQAITATAHKLARILYHLLTTRSAYDETVFAGQEQKHNLRLHKRLLKQAKLLGLQLVPITTAEACS

SEQ ID NO: 429690 - protein, 385 aa, unidentified
MQSISTIGLDIAKSVFQVHGVDAAGQVVVRRQLRRHHVLAFFQKLPPCLVGIEACASSHHWSRELQALGHTVRLMPPAYVKPYVKRQKNDATDAEAICEAVTRPNMRFVPTKTVEQQSCLVLHRARHLFIRQQTAVINSIRAYLAEFGIVAPVGRRGVEQLLEVVADPADCRLPEVARACLAALGSQLRALKAQILEFDRRIIAWHRSDATSQRLDAVPGVGPALATALVASVADAKAFRSGRDFSAWVGLVPKQSSSGGKDKLGSISKQGDRYLRSLFTAGALAVIRYAKIHGTGHRPWLTALLARRPTKVAAIALANKLARMAWAMMARKPGTNATRNPPLLRRERDHSRSSGCDVTVGRANSTNAAPGRSGDQDNPLGPQHL

SEQ ID NO: 429691 - protein, 354 aa, unidentified
MQNDRQSSETVILGVDTHLDIHVGAVISQAGKLLGTHIIQTNQAGYLELLDWARSFGSLERAGIEGTGTYGAALTRYLIKNSIYVVEVNRPDRSKRRLEGKSDPLDAENAARTVLSGSSKAIPKMQSGACEALRIISVARRSAVKACTQAINQLRALLVSAPQDVRDKLWKSKPHECVTACINSEVSEHSPLRIALCSTLRSLAKRWMALTEELNELDESLDKLTRKYASNLRSQFGVGPQTAATLLAVAGDNPERLKNEAALASLCGVNPLPASSGKTVRHRLNRGGSREANNDLWTIALVRMRSDPRTRIYVDRRTGEGLSTKEILRCLKRYIVRELYPLILSDLAYANRRS

SEQ ID NO: 429692 - protein, 375 aa, unidentified
MKEKVRFLGLDVHAETIAVAVAEQDGEVRSLGTIANREESIRKLVKKLGPVEQLRACYEAGPTGYVLYWQLTQLGVECAVVAPTLVPVKAGDRVKTDRRDAEKLARSHRSDDLTAVWVPDEGSEALRDLVRAREAAKQDQLRARHRLSKFLLRTGRRPAMGLKAWTERYLAWVQQIQFSQPAQEFTLLDYLHEVQHMDERVKRLEQAITEAVKLAPLQVQEVIRGLQALRGVAHLSAVTIAAELGNISRFESARKLMGYSGAVPSEDSSGKRQRRGNITKTGNAHLRRIAIESAWSYRFRPAIGPRLRQRQEGVPEEIKEIAWKAQIRLHKRYLKLMAAGKDKQKIITAVGRELLGFVWAIGIKAETAGKLQMAA

SEQ ID NO: 429693 - protein, 341 aa, unidentified
MTAIGIDTHKETLAACAVDGLGGALAERTFRNDPAGHRDLLAWAGAVAPGAVVGVEGSASFGAAAARFLLGAGLTVREVPPQLSSRERIRTRRAGKSDPGDALAIARVTAREADLPPVRVADRSLEISLLVEAREDLVTEMARVRNRLHADLRVLVPGYGERAANLVAVRHQRVAAGLLRRLTGVQAELARTRLARLRALADEERALAARIGAMVAGHPLLELPGAGALVAAKLLGEIGDIGRFRSADAFAALAGVAPIPASSGQTSRMRLNRGGNRQLNRAFHIIALAQARHHPPAKEYIERKRSEGKTHREALRALKRQLVRTVFRLLQEGAASARMAA

SEQ ID NO: 429694 - protein, 343 aa, unidentified
MSEITAVGLDLAKRVFQVHAADREGRAVLRKRLRRSQVLGFFAELPACLIGLEACAGSHYWARELQALGHEVRLIPPQYVKPYVKTNKNDATDAEAICEALIRPTMRFTAVKSIEQQSVLMLHRTRELLVRQRTMLINALRGHCAEFGIVAAQGRSRARELIELVEDPADERLPSIARQALQCLTSQVQSIQIQIASIEKKLLAWHYSCEASRRLAEIPGVGLITATAVVASVGNATQFRSARQFAAWLGLVPQQRSSGGKERLGRISKRGDGYIRRLLVHGARARLAWSRRKKEIRSAWLTGLLARRPTNVALLAMANKTARVAWAMLSRGERFENRIGAAA

SEQ ID NO: 429695 - protein, 364 aa, unidentified
MCDSTMTVAVGLDVHARSIRLAAVRADELLEERTLPYDEEQVERLLRRWPSVRCCYEAGPTGFGLYRHLVDRGVDCTVVAPGLVPQRPGDRVKTDPRDVRKLARLLAGGLLEPIHVPSPEHEAARDLVRAREDARLDRMRDRHRLSKFCLRHGRILPSSSWTVVRRKWLGEQRFEFVAEQLTFDTYVHALDLVEARIEQLERAIRETAEQEPWRQLVARLRCLRGIDTLTALALVAEIGDFNRFRSAAEFMAFVGLVPSEHSSGEKRRQGSITKVGNSHVRRLLVESAWHARRRPKVGYDLARRQRGQDAVVLERAWRCQQRLYQRWQRMAGRGKPQQQIVVACARELAGFVWAIATEQPLRTT

SEQ ID NO: 429696 - protein, 428 aa, unidentified
MATMRARHNRRERDVERIIERCAGLDVHKTSVTACVRIPHDESEGLHQEIREFATTTRGLLLLRDWLASFEVRLVGMEATGVYWKPVYYLLEDDFECWLLNARHLKNVPGRKTDFKDAEWICQLVEHGLVRPSFVPPKEIRELRNLTRYRKAQIEERTREVQRLEKVLQDARIKLSSVATRVLGALGRAMLDALVSGTTDPEVLAELARGRLRSKLPALRDALEGRFSSHHALMVGKILAHVDYLDESIGDLSTEIERVIAPFSDKVELLDTIPGIDRRTAETLIAEIGVDMSQFSTHRHLASWAGMCPGNEESAGKRRLGKTRKGSKWLRSALTKSAHAAARSKGTYLASQYARLRGRRGPKKAAVAIGHSILVICYHVLEREVPYEELGEDYFDRQRSGEAYAKRLVRQLERLGHKVALEPLPQSA

SEQ ID NO: 429697 - protein, 407 aa, unidentified
MRYYIGVDWADEEDVVWVANDAGDKVLSRSIPHTVAARGEWGRWLRERQAEGIEIWAAIERPHGRIVDFLLDHAVVVYPINPKSLDRARDRFRVGGAKSDPFDAQVLALFLRSDHAQLRPLYPSSEAAQELKGLTRDHRRQVKLQTRLLNQLTVTLKEYYPRALELCEDLTASWARNFLATYPTPAAAAALTKANWQAFARAHRLGATRAAALWEILQQPQLPLPAHVVRIKARLLQALLRELTPTLATVAEYRQAIDDFFAGMPGADIARSLPVGKSGTTVPSVWAELGDNLDRWTSFRDLQGYGGSVPETVRSGKHLVIHFRFACNTTLRAAIHQLAFLSLPHSTWARAYYDSYRERGHTHHEALRALGAKWLKIIFVLWKRQVPYSETHHLANIGRQHLRHKAA

SEQ ID NO: 429698 - protein, 333 aa, unidentified
MRHYIGIDAHCKYSEVAVMDERGVVVMNRSVKTSGPNLIEVIRSVKGERMVVVEDSTIAGWLMRTLSPYAEHFQVADPKRNALIARSEKKSDRSDAERLAWLFRGGLTHAVHHTTDERHFELKETVYHYHDCVNQVVRFKNKLKALYRRHGMLRLTVEVYDPEKGQEYVERLQFPSSQHRARMLLLQITEIEQASEKAHRRLRELSAHFPIIGMFERIPGVGLIVSATVVAIIETPHRFPSKRELWKYAALAVANPESGGKSYGRYASKEGNRLLKKMLMMAALNAERGENRFSRQYRALKIKSNSIAQRTVARTILAVMYSMWKTGELYREE

SEQ ID NO: 429699 - protein, 457 aa, unidentified
MTRRKHSRPARDIAPVHPHAAAVDIGATLHVAAVRPGSDPEPVRTFGTFTTDLHRLADWFEQCGVETVAMESTGVYWIPLYEILDQRGFEVVIVNARDAKNVPGRKTDVSDAAWLQRLHEYGLLRASFRPKGEIATLRSYLRQRERLLDQAAAHIQHMQKALTEMNLQLHHVVADVTGVTGLRILRALVAGERDPDTLAAYSDPRCKAPAETLRAALVGNYREEHVFALAQALELYDIYQAKVAACDQRIEAVLERLKAANPPPAAALPPARPRRRQANEPGFAVREALHAILGADPTQIDGIGPSLALTLVGECGTDLSAWPSAKHFTSWLSLAPHNKISGGKVLSARTRRSGSRAAALLRLAAVAVGRTATALGAFYRRLAARVGKAKAVTATARKIGVLFYNMLRHGMDYADPGASAYEARYRQRVLSNLRRRAKSLGYVLQKADPASAAIAVS

SEQ ID NO: 429700 - protein, 348 aa, unidentified
MSKGNQYVGLDVSLKQTSICVIDDADKIVWRGQVDTMPEAIVSAVTQHAPHAVRIGLESGQLSNWLFHGLKQAGLPVICVDARHAKAALSLKVNKTDANDALGLAQIMRVGWYREVTVKGLDCQAVRALLVARAQIVSQITTLKNCVRGILKTFGRVLPKGLRSQFPARVRAAIEGHPVLGAIIEPTLQVLEAARAQLLVYDRAVIQRARSDDTARQLMSAPGVGTVVALAYMTGVEDPARFKRSSSVAAYFGMTPRRYQSGEVDHAGRISKCGDGMVRGLLFEAAKVLLGRSSRPNALKTWGEALGKRIGLKKATMAVARKLAVILHRMWTTGATFQWNAGTTSSVA

SEQ ID NO: 429701 - protein, 386 aa, unidentified
MKRIYDKCCGIDVHKKLIVACLVLGKKQEVREFGTTTRELLALADWLLLAGCQMVAMESTGSYWKPLYNVLESSGLAAMVVNAQHMKAVPGRKTDVRDSEWIADLLQHGLLTASFIPDRAQRELRELVGYRKSLVQDKNRELNRLQKMLEGANIKLSGTITDTNGKSARNILGVLVQGGTIDSEKYDEMRKEKAISGRLKASKEEILDDLNGVMSQLQRKMMRVLLSHVDELNRHIKELDDQIDNHMKPDEKKAVEAIRKVTGLGTDSSRIVISVIGTDMSRFPTDGHLCSWAGLCPGDNESAKKRKSWKTRKGNKLLRTTRRAYVAASHSLLIAIYHILNDGVEFKDLGADYYNQFNKERKINAYLKKLKALGWEAPGAMAGQPA

SEQ ID NO: 429702 - protein, 342 aa, unidentified
MEGLSPLYRRVAGIDVHKMLHVVTAVIEHPDGTIEQQSREFGGFRRDCRALASWLLTLNVELVVMESTGIYWKSLYAHLERAGIQAWVVNAHFVKHVPGRKTDMNDSQWLAVLARFGLVRGSFIPPHDLRELRLVSRYRRKLTAMRASEINRLHKILDDGGIKLGGVVTDLNGLSAREMVAGLIAGKPVTALLEMARGRLKSRREDLQAALDGDLTARHRFILQHIHNHIEILEHGLAELDAYILAAMAPYQWAHRLLQTVPGIDQIASALILIEIGDDMTRFGNADRLAAWAALCPGNNESAGKRNQHASARPVRSSATSCVNAPTRPGRPKARWQPNIEA

SEQ ID NO: 429703 - protein, 420 aa, unidentified
MKVVYQTCCGVDVHKSFLVATIIKTTSGIEPSYQKKRFSTFNNSILQFKDWLIKNQCRDVCMESTGKYWVPVFNLLEDELNVTIANPKWVKAVKGNKDDTKDSKWIGDLFRLGLVPGSYIPCKPIRILREFTRYRYKLTSCRSSEKNRFQNALTVCNVALDSVVSDIFGKSATSVIDYLLEQSDNSINHEEISSRLLRSLKKKSESVIESIEGYQMTESQKYRMRLVHAHMDYITSTISDIDSMIDSLVEPYENAVQLLCTIPGVDRNSAITIISEIGTDMTQFSNSKRLCCWAGLTPGNNESAGKKKSVRITRAGVYLKPALVQVAHAAVKSNKSPYYKAKYERIMKRRGKKRAIIAVARMILTAIYHMLSTGEAWNPTDLYKIDMPKPLKNKQKEKAVKQAMKLLIAEGLIKESQLAS

SEQ ID NO: 429704 - protein, 351 aa, unidentified
MSEISIVGLDLAKQVFQVHAADEAGRCLLRKQLKRREVLSFFAGLAPCVVAMEACGSAHYFAREIAKLGHEARLVPPAYVKPYVKRGKSDRIDAEAICEAAGRPTMRFVPVKTVEQQSLATLHRCRDLLVKNRTMLVNALRAHLAEFGFVAAKGIGKLPELIEIVSEAPAEALPEMARAPLSGFLDAIALINGRLDDIEKRLRAWHKGNAQSKRLETIPGVGLIGATALCALVPDPKLFKNGRHFAAWIGITPRLDGTGGKTRLGPISKAGDGALRRLFVLGATALLRTLENKATPLALWLQGLLARRSKRAAAVALANKLARIAWAVMASGEAFKPLSAAQLASVAGARA

SEQ ID NO: 429705 - protein, 389 aa, unidentified
MGFGSDQAFTAFVGIDWADAKHDICVQAAGSSAREFACIAHEPSQIESWACSLRERFGGLVAVALELSKGPIVYALQKYDFIVLFPINPATLARYRQAFKPSGAKDDPTDAELALDLLVRHRDKFTPLQPQSAPMRTLIYLVEQRRQLVNDKIRFTNRLGNALKQYYPQALAWFDQRDTPLFCDFLARWPTFAQAKRAHRAGLERFFWNHNVRFPAVVEERIRAIKTATALTTDEAVINAYRLQVEVLVEPLRTTLQAIDRFDRQIAKLAPTLADYALFSELPGAGPHLAPRLLVAFGEQRERFKSADELQRYSGVAPVTERSGKKNWVHWRWQCPTFLRQTFVEWAAQTINKSFWAGAFYRQHRDQGSTHQAAVRALAYKWIRILYRC

SEQ ID NO: 429706 - protein, 332 aa, unidentified
MVIIGCDLHSRYQVIAMLDTETGEIGTRRLEHEGGEAERFYRGLEKPALIGIEATGYTQWFERLVGELGQELWVGDPAEIRARAVRRQKTDTRDAEHLLELLINKRFPRVWVPTPEERDIRQLLKHRDKLVKMQTSVRNQLHFLAMSQGVCRKRKLWSAAGRRELQGLRLGPWASRRRQELVDLLDGLGPRLEELDRAVKAEALRRAEAARLMEQQGVGPVTALAFVLTVGPVERFANSRKLVSYLGLNPREDSSGGHQRLGHISKQGNEMLRWLLVEAGHTAARLDPELRRVYQRLKFRRGGRVAKVAIARRLAVRLYWSLRRSAAGSHVQ

SEQ ID NO: 429707 - protein, 452 aa, unidentified
MEKQLGKSKGLSLECIELNAAGMDVGATEIYVAVPPDRDPQPVRCYQTFTADLRAMAAWLVQCGITTVAMESTGVYWIPPHEILEEAGIRVCLVNSKHVKHVPGRKSDVSDCQWLQYLHSVGLLKPSFRPESQICAIRSLSRHRASLVESAAVHVQHMHKALTQMNLQIHHVLSDITGLSGMAIIEAIVTGERSPVRLAALCNQRVRSDQQTVIKSLVGNYRSEHLFTLKQSLTAYRNYQQLMAECDREIERLMRLLNGKIDPPQENLAPPPDPRVQKRRKNQFHFHMSPELSRIFGVDLTAIPGISALTAHTLLAEIGPDLSRFPNAAAFASWLALCPGNKKSGGKVLSSKTRQTNSRASHALRIAAQTLARSRSHLGNFYRRMRARLGAPQAITATAHKLARIVYHLLTTSQSYDESVFLIEDQKQDQRHEKRLRKQAKILGYQLVPIAA

SEQ ID NO: 429708 - protein, 347 aa, unidentified
MLIIGCDFHPGFQQIAIFDNLTGEIQEKRLQHRAEAEEFYGSLAGQQVRVGMEACGHYPWFERWLEKLGFELWFGDAARVRAAVVRKQKTDRRDAEHLLDLLRQERFPRIWVPSLEVRDVRQLLVHRHKQVQARTRTRNQLQAMALSQGVQKKWKLWTKAGRAELEQLPLLPYAAERRKQLLQALDQLAAEIAELNGRVEEEVRKRPEAVRLRTHPGVGPVTALAMVLTLGPAERFASGKQVGSYFGLIPREESSGGKQRLGKISKQGSSFLRFLLVEAGQTAARYDPQLKRFYRRLAVRKNRSVAKVAVARKLATRLYLMLREDWTYAQLSQTVMQVSPSHSVAGE

SEQ ID NO: 429709 - protein, 349 aa, unidentified
MIWIGVDAHKQVHEAVVIGESGVLATRRIPNTTAAWAALLAWAQQWPERMWAVEGAWFLGRGLAQHLAEQGERVHEVNGRWTAARRRGMRRPGKSDRLDAHSVAQLLREEADTLPRVYPEQDEQASVQLWSRVQAEITKDMTRLVNRLHDLLLACDPEYKSTLPELTTKAGIAAALVYTAPGSGTLAREREAVIRATAAQLALLDEQDRELRRKLERASKARFSPLRQIEGVGPLIACAIVAEIGRPRPGFGEEQLAALGGLSPLEASSAGAVRHRLNRLGNRRLNMVFHQIVLTQARIYPPAQQYLARRKAEGRTSREARRALKRLIVRRVYRAWRGCFETNIERVAA

SEQ ID NO: 429710 - protein, 353 aa, unidentified
MKKIVVGIDISKEKIDAGAICVGNLQESPVRLDHQVFVNRPAGFRRMLAWARHLMPDITLNDVLFCCETTGGYDRILCDYIYAKGLQIWREGALQIKRSMGVRKGKDDRADSFMIAEYAMRNMDKAVVYVSPDSTIRELKALFLYRHRLVQEKAEKRVRATHLAETAPRSKSMSFILRDAQKGIRALEKSIKECEERIIELTKSDGELMRNYKHIVSIKGVSIVNTTALIAYSNNFQSITTANKMASYYGIAPFRERSGTSVDRKACVRYYSCSLLRATITQAAECTVKEGGIFRKYYLRLKATGKPYGVILNNIKNKLLHLVFSLVRNDADFDMNYETRRNEIHSTMQKVET

SEQ ID NO: 429711 - protein, 408 aa, unidentified
MEQVIERCCGLDVHKQTVVACVRVPGPDGTRVQQVRTFGTTAAELLTLRDWLEAQAVTQVAMESTGIYWKPIFYVLEEAFTCVLANAAHIAQVPGRKTDVKDCAWIAQLLEHGLIRASFIPPPPVRELRDLTRYRKAVIQDRSRAANRLHKVLEDAGIKLASVATDVLGVSGRAMLTALVEGTTDPGVLADLARGTLRRKLPALRQALAGRFRPHHGFLVGQLLAHLDYLDEAIATLSTQIEAAITPFAAMVTRLDSIPGVSQRTAEVLIAEIGVDMRVFPTAGHLASWAGVCPGNNESAGKHRSGRPRPGNRWLRMTLIEAALAASRTSTALGARYRRVLRHRGHHKAVIAVAHAMLVIAYHLLSRETTYHELGADYFDRHQTDRLRRRAVQTLQRQGYRVTLEPAA

SEQ ID NO: 429712 - protein, 390 aa, unidentified
MIVACLNQGGKQELRQFGTMTNDLKALCGWLTENACEMIAMESTASYWKPLYNLFELSGLNAMVVNAAHMKSLPGRKTDVKDAEWISDLLRHGLLKASFIPDREQRELREISRYRKSMVEERARELNRLQKMLEGANIKLDSVVKNINGKSSRRLLDQIIAGKSLSEEEVSALLHGNMRKKLDQIIPAIDGITTPLQRRLLAQVVDHIDDMTRRISDLDTLILDYMTQYEQAITAIDALPGIARRSAETILSEIGIDMSRFPSAAHLCSWAGICPGNNESAGKRYSGRITKGNQTLKTTLVECAKAARRTSDSFFSAQYQRISVRRGKNRATVAVAHSMLIAIYHVLRDGVPFVDLGSDFYAKFNKDKKIAACLKKLHDLGWQPPALASV

SEQ ID NO: 429713 - protein, 427 aa, unidentified
MSYRIAGIDVHKKMLAVVVCDVEVEGEYTFERRRVGSSPDQLRSLAAWLAEREVEEVVMESTAQYWRPVWETLERYWQPRRRMREEAGPVSGTLHLAQAQSNRGARGRKKDFPDAERLVKRLVAQELTLSFVPDTEQRLWRTVMRRKCQVTRNRVQLQNRLECLLEEAHIKLSSLVSDLLGASARRMLQALADGETNPATLAGLGSRRLHATPDEFCDALGACRDLHPVYRRLLTLVLEELRVIEDHLTQLDQEMAGLLSPYQPAVQRLAEVPGLGVDSAQQIIAEVGAAAATFPSPKHLASWVGVCPGDEESAGVNHSHRSPNGNRQMRRVLNQAANAAVKTKGSIFELVYRRLVPRLGHAQAIGAVAHRLCRLIWKILHQGIQYEERGPAVTKHRAQRRAAKMIRELRSLGYRVELVAAPSGSPA

SEQ ID NO: 429714 - protein, 329 aa, unidentified
MQTILHNCCGMDVHKDSVVACILKTREPISIERKREAVDKEIRVFGTFPDDLAQLRTWLESESCTHVAMESTGVYWQPIYEALETACNGEIELLVVNAQHMKNVPGKKTDMKDAEWIASLLRSGLLSGSFIPPQEVRELRQLTRYRKNVTQDISAQKNRIEKTLQQAGFKLSTFLSDVFGVSGRNLIRILIKNGRLSPLDVEVQTKRISKEKRAEIKRAITGQLTEKQRHFLQLQITLLDGLLAHLESIEASIEELSAKWNDDIDRLTTIPGIGLTSATAIIGEIGSDVSKFPTAEHFCSWAGLAPGDNMSAGKKKVQESLSAIHTSRA

SEQ ID NO: 429715 - protein, 338 aa, unidentified
MKLKRIGVDLAKQVFQVNGVDSHEQVKCRKQLKRHQMLDFFRQLEPCVVAMEACGSAHYWARELGKLGHEVRLIAPQFVKPYVKGGKNDANDAQAICEAASRPTMRYVEVKTVEQQASQSVHRIRGRLIKARTALVNEVRGLLAEFGLIESRKGVAATRELLCRAIDDSDSSMPGTMRELLRELSEELQGYDERLKKLEQLIQREAREDERVRRLMKIEGLGPISATAIVSAVGDARQFASGRQFAAWLGLVPSQYSTGGKERLGGISKRGDKYLRTLLIHGSRSVLKHCQSKTDKRSDWLSQLMCRRNKNIATVALANKNARIIWAILSKGEQYQPC

SEQ ID NO: 429716 - protein, 353 aa, unidentified
MARTTKFHSVITTIGIDMGKNTLHMVGLDSNGAIVLREKVSRRRISSRLANLPPCLIGIEAGMATHYVARELAALGHNVKQVPPTYAKPFRQGHKNDFRDAHAVAEAVQRPTTRFVPAKTNEQLDLQALHRVRSRLVSERTAVINQIRGFLLEHGIIVRQGQRFLRHLLPDILAKRTDVLSPRMVRIISDLVGDWRQLDERIETVTDEIETLAKNDDSCRRVMTVPGIGPLISSAMVAAISNGTAFAKGRDYSAWLGLVPRQMSTGDRTILGRITKRSNGYLRMLFMQAARVILLRPKNWSKHDFGAWLIRAAQRLHPNVLATALANKLARIAWTVLAQERNYEARVTKAAAR

SEQ ID NO: 429717 - protein, 375 aa, unidentified
MKEKLRFLGLDVHAETIAVAVAEPEGEVRSLGTIPNRAESIRKLIKKLGPAGKLRACYEAGPTGYVVYWQLAELGVECEVVAPTLVPVKAGDRVKTDRRDAEKLARCYRSGDLTAVWVPDEGSEALRDLVRAREAAKQDQTRARHRLSKFLLRSGQRAPTGVRPWTRPYLIWVAQLRFTQIAQESTRQDYLHEVEHMRERVARLEQAIMEAVKLASPALQQVINDLQALRGIADISAVTIASELGQVSRFGSARQLMGYCGVVPSEDSSGKRTRRGSITKTGNAHLRRIVVEAAWSYRRPPGIWYGLRRRQESISEEAKEIAWKAQHRLHKRYLKLGAAGKDQRKIVTAVARELLGFIWAIGTRAETVSSLQVAA

SEQ ID NO: 429718 - protein, 384 aa, unidentified
MEKSITLHVGMDVHKQSIDIASADLGRDGEVRHVGSIGGDLASLDKALRKLTSRGHVLHVVYEAGPCGFVIWRHLVAGGIACEVVAPSSIPKRSGERIKTDRRDAMMLARLDRSGELTAVRVPDAADEAVRDLVRAREDGVRECRNARHRLKALLLRNGIAYAGKSAWTAAHLRWLATLKMEHGAQQIGFQEYLHSITEATTRIGRLEQAMRDTLPQWTLRPLVQALMTLRGVQLVAAMTLVAELQDFMRFESPRKLMAYVGLVPGEHSSGPKRRQGSITKAGNSAARRMLVEIAWHYQHSPRVSPIIATRQDHLPKAITDIAWAAQLRLHSKFKRLLARRVMKNKAVVAVARELVGFVWAIGRAVHSSAWQGTTLEPATAAVH

SEQ ID NO: 429719 - protein, 381 aa, unidentified
MTTAVTHHEQRNTTEATLFVAFELSEKTWKLGFTTGHGQKPRERTVTARHHEHVLNEIAQAKRRLGLPATAPVVSCYEAGREGFWLHRFLQAQGITNHVVDSSSIEVNRRRRRAKSDGLDVRKLLSMLMRYAQGERQVWQVVKVPSVEAEDHRHLHRDLETLKQERASTTTRIQGLLSSQGIRLTSLSKLPEQLEALRLWDGSPIPPGLRRRVLRVYAHHTFLSEQIAEVEAERRAQLQTSTEAHIDKVRQLMQLKGIGINGAWLLVMEFFGWRAFKNRREVGGLAGFTPTPYQSGESAREQGITKAGNRHVRWMTTELAWSWLRFQPDSALSCWFRERFGSGGKRLRRIGIVAVARKLLIALWRFLETGVFPAGAVLKEG

SEQ ID NO: 429720 - protein, 361 aa, unidentified
MKIIGCDFHPSYQQIAMVDVETGEMVEQKLTHAQGSAERFYRGLEGAVRVGVEASGYTQWFERLLEELGHELWVGDAARIRASAVRQQKTDARDARLLLQLLLEDRFPKLWIGSLEERDLRQLLVHRLRLVQMRTRIKNQLHYLALNQGLQRKRRLWSEAGRKELEALPLLPWADRRRQDLLRWLGELDQNLHQLSLQVEQQAQARAEAVRLMTYPGVGPQTALAFVLVLGPWQRFPRGKQVASYLGLIPREHSSGGRQRLGHISKQGNTLLRWLLGEAAQTAARLDPELRRLYQRLQHRKSRSIAKVAVARQLAVRLYWMLRTGKTYAELYPAAGMPGSPSHSVVAVRTDRLSGRPASLP

SEQ ID NO: 429721 - protein, 403 aa, unidentified
MSQKTNAVAVRTIGIDTGKNTFHLIGLDEQGTIVLREKLARGRIARRLANASPCLIGIEAGMATHYVARELLALGHDVRQVPPAYAKPFRQGHKNDFRDAYAIAEAVLRPSTRCVPVKTDDQLDLQALHRVRSRLVGQRTAVINQIRSFLLERGIAVRQGPRFLRQRLPEILAKRIDVLSPRMIAIIEDLSGDWRRLDERVERVTEEIEQLAHGSESCRQLMTVPGIGPLIASAMVAAIANGAAFAKGRDFAAWLGLVPKQMSTGDRTILGHISKRGNRYLRTLFMQGARVILLRPANWARHSFGPCLTAAAKRLHHNVLATALANKMRADIHYGQEHQNSTHGPDTDVQDQSLHRSLVYQSRLLVWPARLATSHAFRGNPIDQDRQKALEPIRRMRRQSPRR

SEQ ID NO: 429722 - protein, 395 aa, unidentified
MYFLGIDIGKRTHVASLMSEEGKVILKGFSFPNTTEGADSLIERLSKYSETPADFIVGMEATGHYWLSIFSYLHESDFLIHVVNPLQTDGWRKGTEIRKRKNDIIDSVLIADLMRYGSFVETVLSDENVFSLKQLSRYRTYLVGTASDFKRKIIAVLDQVFPEYASIFSKQGIFGKASKELLLEFSSPIELEEISAETLAQYLAELSRNRIKPEKADQLKQAASNSFGVKFAQEAFTFQLRSMIEQLKFIESQVKETEKEIKRIMSNLDSVILTIPGIGPINGATILGGIGDIRKFSNPKKLVAYAGIDASVSQSGQYEATHNVMSKRGSPYLRKALFSAALVASRCDPVFRAFYQKKISEGKYHLTALGAVSRKLCYVIHAILTKNEPYKIVSD

SEQ ID NO: 429723 - protein, 374 aa, unidentified
MKKGTTYVGLDVHKETIAVAVAEGEGGEVRSLGLIPNRPEAVRRLVRRLGPAKDLVCAYEAGPCGYALYRYLTRLGVRCVVVAPSLIPTKPGDRVKTDRRDAAKLARLLRSGELTPIWVPDEEHEALRDLTRAREDARVDLLRARHRLSKFLLRLGIVPPAGVKPWGAKHRQWLQGLQLARASQQVVLREYLLAVEQAQERLRRLEAELGEAARTSRHAAVIGALQALRGVGLVTAVTLVAELGDLQRFRTPREVMAYAGLVPREASSGPRQYRGAITKTGNAHVRHVIVEAAWHYQHAPGVRGALRQRQVGQPEAVRAIAWRAQDRLHRRYRRLVRRGKARPQAVVAVARELLGFVWAVAHAVRSSGRDGGAA

SEQ ID NO: 429724 - protein, 341 aa, unidentified
MNITTIGFDVAKGVIQIHGVDGSGAVAVRKRLSRAGALTFFERLSPCLVGMEACGGAHHWARELVKFGHTVRLISPLYVKPYVKRSKTDAADAAAICEAVGRPHMRFVPVKSREAQALAQAYKTRGLLVAQRTALINALRAHLTEFGVVAPLGPAGAARLIGLVRGEDGPLPELARQTLVDLADMIETTHASVAAFDARLKRLAAQDEASRRLMKIPGVGPVAAGTIRALAGDLTRFSKGRDFAAWLGLTPRQNSSGDKVRIGAITKAGNRELRTLLVMGQLAVLRHALAAPAKASPWLAGMIKRRPRLVVAVAMAAKAARVIWAMLARNEDYRPRCAMAA

SEQ ID NO: 429725 - protein, 345 aa, unidentified
MSQYRRIGLDTSKAVFTLHGIDRQDRPVLRINLRRAQMVAFFKKLPPTEIAMEACGGAHHWARELTALGHEVRLIPPQYVKPYVKRGKNDRNDAEAICEAAGRPGMHFVPVKSVMQQAQGMILKVRETLVGQRTQLVNTVRGHAAEFGVIAGKGLAEIGPLLTAIEQEATIPAEAKDMASLLGRQIEDLDARIKGIDTKLMAVHKANAVSQRLATIPGVGPVTALTLAIEIDPLSFESGRHLAAWAGLTPRDHSTGGKQRLGGISRAGNERLRVLLVSGATSVINAATKPGSRQMTDWLRSLLQRKPRKLAAVALANKMARMAWAMMTSGEAYRRPPAAARAVPA

SEQ ID NO: 429726 - protein, 366 aa, unidentified
MDARTVNNLPPAATHDGAVRCLMTIELSKKSWIVAVNTPLSDKISKYTVKGWNGLLEVIGKIRARVGRELQRPVEVVSCYEAGYDGFWLHRLLEENGVRNFVIDPASLQVDRRARRVKTDNIDVTKLLRSLMAYLRGEPKVWSVVRVPTIAEEDDRRLHRERDRLINERVQHVNRIKGLCAVHGIYHYQPLRSDRMKRLEQLQTADGHKLPPRIKAEILRELQRLELLLQMIKAIEKERNLMALGTAPSTYGNATKVQRLVKIASIGPEIATVLVSEVFFRQFNNRREVGGYVGLTPSHYQSGASSRDQGISKAGNPKARTIMLELAWLWIRYQPDSPFTIWFRERVGPPRGVSGGLPSLRWPASC

SEQ ID NO: 429727 - protein, 342 aa, unidentified
MGEVTIIGVDLAKNVFQVHGAAADGSVVFRKKLTRPQFARFMAEQPPCLVVMEACASAHHWAREMSRHGHKVRLIAPHYVKPFIKRQKNDAADAEAIVEAALRPTMRFVEPKTQEQQARAVAFRTREQLVKQRTEAVNALRSHLYEFGHVAPVGIGYLPRLERVIADPDADIPDLAREICQMLLDQINQLTGRIDALKARIAALSNEAEMPRQLQTMPGVGPITALAVETFAPPMDQFRRGRDFAAWLGLVPRQHSTGGKQKLGKTSKMGQRDIRRLLVIGATAVIRWASRRGAPKGSWLARMLERKPVPVVAVALANKMARGIWAMLTRGESYRGPVLIGA

SEQ ID NO: 429728 - protein, 374 aa, unidentified
MAWAPTAIMGGADMAQAKTWAAFDVHVSGVVAATLDRDSGELRVQRLPGRSDHVAAFAASLQGPVRATYEAGPSGFVLARKLEAIGIDCVVCAPGLIPRGATDRVKTDRRDAERLVRLLAAGELHRVVVPSVEEEALRDLVRAREDLRGDLMRARHRLAKLLLRHEVRFDGPQANWTQAHLGWLAGVRLEQPASQRALEDYRGAVAALMIRREQLEAEIARALPDSPWAQTARRLMCLRGIDTLTAAGLCAEIGDFTRFGHPAQVMSYLGVVPSEHSSGERRRRGPITKSGSQHARRLLVEAAWHYRRPPRVAGSLARRQRDGEAHVLALSWKAQRRLHHVWQRMEQRGKRRTVIAVAAARELAGFCWAVATAD

SEQ ID NO: 429729 - protein, 370 aa, unidentified
MTRISVGVDVSKNRSTVCIMDQDGKFIMRPFLVWHSTEELDFLADTLKRLNGEVRVIMESTSVYQYPIALQLKERGLFISIVNAYEMKQFANIDFRGGKTDKKDSRTIASYGISYWDKLVEWQIPKDTYFNLDLLNRTYMNAKKHRQIILQELQHYIDCAMPGMDKELHSLNLSTKKDFMLDFVEKFWHRDEIVNMTEAEFTEVFTAWAKEKGYRPGKGKAAKIYAIAKSCIPYYPANPTVKTILQCIVDKLSGVNRTLVTIVTQMIEEAKKLPEYQIVREMPGVGDPLAARFFGSAGDIRRFKNSKALVAYAGIDSPPDESGDFSSTHRHITKKGSKVFRDTGYEIMMALRARKGPGEKGRDGLFRWTS

SEQ ID NO: 429730 - protein, 377 aa, unidentified
MHSENIAAYIGLDVHKETLAVAIAAPERLGEVRYYGTINNEAQAVRRLFQKLQGLYGNILSCYEAGPCGFGLYHQLTAMNIKCQVIAPSRIPKSPTDRIKNDHRDAISLARLLRAGELTPVWIPDLTHEAMRDLIRARAAAKRDSRVARQRILSMLLRTDKRYAGKHWTGKHRTWLANQSFSQPSQQIAFQHYCQSLEQIEDRILQLDQEISRLLPEWSLCNLVCQLQALKGVGQLIAITLVAELGDFSRFSNPKQLMAFLGLVPGEYSSGNSIRPRGITKVGNSELRRLLYEAAWSYRTPAKVGAWLIYYRLDSVTQYSKDIAWKAQQRLCSRYRTLTAKGKKSQVAITAVARELTGFMWDIALAAQSSFSQQKQN

SEQ ID NO: 429731 - protein, 343 aa, unidentified
MDQYVALDVSLKETSVCVLDAKGSVIFEGRVASEPTRLVHLIRNKAPRVVKIGLETGATSVWLWHALKQEGLPVVCMDARHAHAALSARPMKSDRSDARGFAEMVRMGWYREVQVKSPAAHERRALLAARHRLVLIRVELDAQIRGMLKPFGLVVGPGNSDAFIRRAEELAQGHPVLAPLLACLAEVRRHVAMQISNLDREIGRIVRTDPTLRRFLTVPGVGPVTALAFLTTIDDPSRFRRARDIGPYLGLTPKRYQSGETDRQGRISKCGDTFTRTCLYEAANVLLTKVRRWSPLKAWGARLAKRIGAQKARVALARKLAVILHCIWIDGTQFWWTKEAAMT

SEQ ID NO: 429732 - protein, 452 aa, unidentified
MGLEARKLIFVKTLLVFSASGQSLFASSTILEEANMALKIVYQICCGIDIHKSFVVACIATTNDKGVTTYKQRRFSTFTGDLRLLAAWLAEKNCRDVCMESTGKYWIPVYNMLESTCKIVLAHPKYVKAIRGKKTDARDAKWIADIFKHDLVSGSFIPPFEIRQLRDLMRYRVKLTNFTTGEKNRAQNCLTVSNIKLDDVFSDVFGKSASAITEQLLQHPDGSFDVAPLIDRRCKASPEMIQAAIDGLMCSEQIEKLKIIRSHMDSLEFCKSNLESAIFSLAEQFRPQVELIMTVPGIQLFSAISIISEIGVDMSVFPTAKHLCSWAGLVPQNNESAGKKKSTRITRAGAYIKPLLVQCALSICKSEKHPEIKNRYLALKKRRGHKKAIIAICRMLLTAIYAILQKSEVYNPELYRKVVAVPDNRSITVEQAVAFVRRHGFIVADADGVLAS

SEQ ID NO: 429733 - protein, 357 aa, unidentified
MPRTTTHPRIAVAGIDIGKNTFHVVGHDKSGAIVLRQKWSRGQVESRLANMPPCLIGMEACVGAHHLARKLNYLGHHARLMPARYVRPYGKGQKNDFNDAEAIAEAVQRPTMKFVAVKTVDQLDLQALHRVRERLVSQRTGIINQIRAFLLERGVAVRQGIRFLRAELPNVLATRSDVLSPRMLRIIESLAGDWRSLDARIDELTEEIKTIASTDVDCRRTMSVPGIGPIISSAMVAAIGKGDVFSKGRDFAAWLGIVPRQISTGDRTVLGRISKRGNRYLRVLFVQAAWVVLAKPQMWERYGLLAWIAAAKRRMHPNVLAVALANKLARITWAVLAKGRNFEMTKKSKSNAAPQPA

SEQ ID NO: 429734 - protein, 331 aa, unidentified
MNYSHFVGLDVGKKTFDASLMSAAEKELSHKSFDNTPEGIQSLLDWIAGYHLSLSKLLFCAENMGSYVTELSVSSVSMGFSLALVCPLTIKKSIGLQRGKNDRIDAKRIANYAVLHYRKLELYKLPNKDLVRLRGWIIIRDNLVKQKVSSIKLLETFSQMAKLADMTESISFLEEQLKSIKEKILEVEEDMEQLIAASTSLYTNYLLLRSIKGIGIINAIVLLCVTDNFQRFDNPRKFACYCGVAPFEHTSGISIRGKTQTSSLANKEVKVYLTRAAITAISWDPQMKAYYKRKIAEGKHKASVINAVRAKIIARSFAVIRRQTPFVTLAV

SEQ ID NO: 429735 - protein, 414 aa, unidentified
MNESYLVAGIDVHKSMLAVVITDAAAEGEFRFQRRKFGTLGSDLKALSEWLAERGVREAVMESTAQYWKPVWRQLEGECQLYLAQAHSNRAPRGRKRDFEDAERLVRRHVAGELILSFVPDPEQRMWRTITRTRHQLTRDRVRLHSQLESLLEDARIKLATRVSDLLGTSSRRMLHALAQGETDPAALAALAEPELRATPEQLADALSAAPSLGSLHRQILQLFLERLELIERQMATLKLSIASTLHAHQQAVLRLAAVPGYGIDSAHQVIAEVGPQAAVFPTAGQLASWVGVCPGREESAEVSRNNRTPKGNRVMRRVLNQVAHAAVKTKGSLFQSLYQRLRPRLGHNKAIWAIAHRLCRLTWKILHEGVEYTEYGQAPNPKLLRNRVAKFVRELRSLGYQVIPPVPTAGASV

SEQ ID NO: 429736 - protein, 359 aa, unidentified
MTSISPPGLSSKIIIGVDTHKHVHVAVAIDDDGQRLGDLRIPVDSLGYQELDRWAQTHGRVFAYGIEGTGSYGANLTSYLRRQGRKVVEVNRGDRRARRANGKSDTLDAELAARSVIAGTSTSVPKSADGMVEMIRKIKVARDIACKNRTSAIITLKTVIVNTPQELKEQLDALGDKALIQKCSGFRPGTVEDPISASKHTLRALARRWEFLNAEVKDHDAVIAKLTTSLSPTLCDGFGIGPDTAAEILIVFGDNPDRVHSEAAFAKLVGVAPIPASSGMTNRHRLAWNGHRQANAAIYRTAIVRMQHHQPTKDYVARRSADGLSKRDIIRCLKRFIAREIYGQVMADFRARTAPAATT

SEQ ID NO: 429737 - protein, 433 aa, unidentified
MNTPHPYDLVIGLDRSDRKADLHLIDTRTGQHRSATIDTAPEALWEWLLELRQQHPQARVALCLEQPAVHLIAFLEAYEWICLYPINPTSLQKFRETFVTSRAKDDAKDAFYLAELLLTHHDKLKPWAPEDSQTRAVQQLVFHRRAVVDERTGLTNRLQALLKQYFPQALRLCGEDLWRPLATRFLLKWPSLQAVQKAKPATLKQFYYLNGSRSAKLLEQRLALVAKAVPVTDETALIQSFVLRVQLICRQLQLVQLTLHQYEKQIAQTFTQHPDHLVFASFPGAGPVLGPRLLTSLGSQRERYEDAANLQHYTGIAPVTKQSGGKCHVHRRYLCPKFHRQSFHEYAKESILWSRWAAAYYLQQRTKGSHHHTAVRALAFKWQRIIWRCWQDRRPYEERIYEAALRKANSPLVGLLDKIQLGKSPFKTSAKKN

SEQ ID NO: 429738 - protein, 386 aa, unidentified
MPFHGGLDWGATAHAVCVIDAAGKIVGRMETRHDATGVADLLGRLRKLAPPTELPIAIERPSGLIVDALIEAGHPVIPIHPNVVKACRPRYRAAGGKSDPGDAYMLADILRTDGHRFRPLTPASDDVRALRALVRGRDDLVAQRVALANQLRSLLESFWPGTAAIFARIDSPIALAFIARYPTPESAARLGSKRLASFLTQHAYCGHRSPAELLARLRAAPIGLASEAEAEAKGEIARALVTVLERLVAEIAKLSSRIEHAIAELPDGKIVMSFPRAGRICAAQILAELGDVRERFSTEDQLAAEAGVCPVTHASGKSRGVVSPPGAWPCGPRSRRRPPPDGLGPARADRPPHNTRVARSWSARVRARAPAAWCRRRTPSAPTAPC

SEQ ID NO: 429739 - protein, 348 aa, unidentified
MEIIGLDLHKRESQLCIKADDGSITDLRIATTRERFTAVFGGRPPARILLEASTESEWVARHLESLDHAVIVADPNYAPMYANRSRRTKTDKRDARTLMDACETGAWRPAYRLSEARRHVRAELAVRDALVRTRTRYIALAKALVRRDGLRVPTSASAWVPTRIAELDLSPTLTTELAPLFAVFAPLNAQIAVADARIAAFVHEDPIAMRLTTAPGVGPVTASAFVATIDDITRFRTAHELEAYLGVVPSERSSGEKRQLGHITKAGNGRMRWLLVEAAWQILRSKSPQTLALRTWTVQIAHRRGKRIAVVALARRLAGILYAMWRDNVAYDAHRIRPLPPAAYQRAG

SEQ ID NO: 429740 - protein, 425 aa, unidentified
MQEKIMRITATTVIVGVDVAKEEHWARITDYRGIDLTKPVRVTNNIAGFSKLMASIGKARMTHGCDQVMIGMEPSGHYGRALQWYLKVHPSQPVLVGVNPYHTKQAKEMDDNSQTKSDPKDALVIAHLIREGRYFDAYLPEGEYAQLRVLNTERQRVMKEISRAGNTLIALMDEFFPEYGKLFKDLLCPTSQEILRATVFPSDVLAISRDDLVALVRRASGGTQGRRLADNLILAAAGSVGVREGKEAVRFRSRQLLDSLAFHQTQKDAVETQLEAVLKAMGLGDILQSMPGIGSIIAAAFLGEVGDVSRFETWKQVRKLAGLNLKENSSGKRKGKTSITKRGRPYLRHMLYMAGEACLLHNEEMRQLYHYFRKRSINPLTYNQAIVAVGLKVMRILFYMAKNNARYDPGKALGELRTAQLSQIA

SEQ ID NO: 429741 - protein, 320 aa, unidentified
MNSHYKIEKIQTEINHVGIDVSKQHLDVSIAGSKTQRLANTQAGLRLLHQKLGRLAHPRVTCEATGGYEKLLVDSMLDAEIEVCVAAPGRVRYLANAEGLLAKTDSIDAELIRRFAEKIPLPRQTKQDPAAQKLRQMSDYRRMLSEDIVKTRNRLELAQGYLREQLQSQLGHLEGLMKKVEVEIKAHIRNCEELAQKAARLQELKGVGPVLAATLLAHVPELGKVGDKTLACLVGVAPHPKQSGNFKGKASIRGGRAIVRHVLYMAAVTAVRSNPILAAFYQRLRTQSGKTAKVALVAVMRKMLCVLNKMIAQPNFSLAH

SEQ ID NO: 429742 - protein, 333 aa, unidentified
MSSYQCFVGIDISAQEASFAWASMDQVVSQARSLALNAEGLRLWIEAFSHLPAAPAETLVVMEATGTYWIRLALTLYRAGYIVSVINPTQAHHFAQAQLRRAKTDALDAQMLTELALALQPAAWKPPPDDYDTLEQCLAQRDAVLDMRTQERNRLHALSFRANVNPSVRERFQEHVRFLEQALKDIELQIAHLLQTIPEWHDAAQRLLSIPGIGQVSAAWLLVATVNFSSCPSPEDAAAYAGLVPHPRTSGTSRRGATGVGHGGHARLRSTLYMATLSAVRFNPHIRHFYERLCALGKPKKVAMCAAARKLIHLAWALVVKERFYDPSYGFAS

SEQ ID NO: 429743 - protein, 357 aa, unidentified
MKITKKKFVGKAYVGIDVHKTSWKICVLSSGGFKKEFSCNPQVEALVASLQNMLPDFEFQCAYEAGFSGFWLADGLNETEGFKCIVVNPADIPTSDKERAQKEDKRDARKIALQLKAESLEGIYIPSAEDIAFRELQRLRSTITKDLVRAKARIKSFLFRSGINITSQEFPDSKQHWSARFIKRLNELPIENSALRFTLTQLVQTLINLREQQKTVLLELRMQIRNSKKEKMHEALCKITGIGEITSATIISEVIDINRFSSYEKYHSFIGLVPSTNSSADIEVVRVITNRANKRLRKVFVESAWIAIRKDAELHHLYHSLKMRMKPNKAIIRVAKKLANRVRFTLLELENEMLITT

SEQ ID NO: 429744 - protein, 370 aa, unidentified
MGKSLLYVGLDVHKMSVDVAIAEAGPAGEVRFYGRIGGDLEALDKVTRKLQAQGAELRFAYEAGPCGYQVYRHLTARGLECLVAAPALIPRRPGDRLKNDRRDALALARLLRAGELTPIKVPDEDDEAMRDLTRAREDAICVERRARQRTVAFLLRHGRVYQGKTTWGRGHWAWLLQQVMDHPAQQIVLQEYLDAVREASARVLRLTGQIRDLVPQWRQAPFVAAYQALRGVSLIVAATIMAEVGDLDRFNNPKELMAYLGLVPSEHSSGASVRRGRITKTGNSHARRVLVEAAWAYRMQARVTRHLLKRQEGLPERVRQLAWKAQLRLCTRYRRLLARGKARQTIVIALARELAAFLWAISRAVAQATA

SEQ ID NO: 429745 - protein, 351 aa, unidentified
MVLLGVDPHKDTHTVVAVDQAGRQLDQRTVPARTLGHGELVGWARMHWPDRLWAVEDCRHVTGRLERDLLAAGERVVRVPPRLMAGARQAVRVQGKSDPIDALAVARAALREPTLPVARHDQASWELRLLVDHREHLVAERTRTINRLRWHLHQLDPDLERATRRLPGPGLRRITAWREHATADPGSMVQVMTCQAQVTAIQALTDQIGQLDRQLRQRVAQQAPSLLSLPGCGPLTAAKLIAETAGVARFRSEACFAMHAGVAPIPVSSGRTDRHRLSRGGNRQLNAALHRIAITQLRLSGPGQRYYQRRRAHGDGTGEAVRALKRRIARAVYQRLRAALPPADIVHTAAA

SEQ ID NO: 429746 - protein, 342 aa, unidentified
MQIPQNLIGVDIAAESFTLSAYDTASKTYGPSHFFQSDPEGLEKLQAFLDEHDMTSSNTAFCMEATGVYVEPLAYFLAAKGYRLAIEAPHKAKRAFYPLGGKSDPLDSHQLAEYAFRFFDQLPFWSPSEVIVEQIRVLLTAREQLSRQSTASKNALKAICHKMIRTPPAEEAFASVIAHLKQQIKQIDQEIKNRTSGHSKFGPTIALIVSIPGVGLLLAANLLTLSDGFTKPLEPRSIASHLGICPLPFQSGTSVKRRSRSRGIGHSVLRKLLYLAAMNLRTHQPAFKYYFLRKKEQGKSGALVLNNIENRLLKVICAVIRTKTPYIADYRSVNPMFLKTIA

SEQ ID NO: 429747 - protein, 320 aa, unidentified
MQYLGIDWGIRRAAWCALTAAGELTEGTISADEDGLTRLVARLGPDVRGCIEMMSGAAWVRDRLGACGWTIEIADARKVKAIAPLACKTDRVDARVLADLARRDLVPTVWVAPLDDRAIRERLRRRSHLIRLRTSATNRSFGLLTQWGLRRNLTALRKPGALEALAEHGVPEVWRDSIAMLLGVIEDLDRQLAPLERELRPLARRDPRAALLMTIPGVAELLGLTLAAEIGDIARFPSARKLVGYAGLAPRIKQSGQSSRVGRLSKAGPETLRWAAVEAAPTAATGAPPRHPAPVDIPASFKATSGWSAAATSAKSRWPL

SEQ ID NO: 429748 - protein, 387 aa, unidentified
MMSTIIGIDVSQKSSSFCILSDGETQVIHGSFSMDRNRFDSLLKTTSHFESPRFFMESTGRYHIPLAHHLLQNGHTTTIVNPVLVKQFSNANTLRKTKTDKIDAQLVARYGQQVPKERKVNQRAMDDQRLSIARRREQVAEDVAKVKTQLKADLTVAWPELLAYNVFTQTMLRLLTQFPCAQDAQEATDERLALALKSPKGRGRTIGLSVEKLRQLANESIGIASYGPLVANSAHNLLFLEQSLSQLTETLVALVRETQDEEMEIITSIPGIGEITAAHFLAEIGSIDRFERYQNLIAFCGTDPSIYESGNILKRGRITKRGNTSLRKYLYLMATGVIRCNAHLKAYYDKKREEGFPHRKAMVALMNKIIKTLFAMLKKKEMYIVPS

SEQ ID NO: 429749 - protein, 331 aa, unidentified
MKNYELAVGIDVSKKTLDVFIHNHSKHRVFDNNRSGYFSLVKWVSQFSETENDILYCFEHTGNYSLKLAIFMQANGLDYVQENPIVIKRSSGLVRTKTDRVDAQMIARYAWLHREELECSSIRDEALLELGRLLSLRDQLVRNRTGLMGTLEELTGLLSSPSTDVSCKSLKHTIAYLSKQILKLEKQIDQLLKREERLGMNYKLLTSLKGVGRILACQLIYHTCNFERFSSWRQFSSYCGTAPFEHSSGTSVFRRAKGHPMSDRKMKSLLSMASVSAIQHDGELREYYQRKVAEGKPKMVALNNVRNKLLSRVFAVIKRGTPYVDLCKYAA

SEQ ID NO: 429750 - protein, 291 aa, unidentified
MAEDRSGVSAVIGIDSGKNTFHVVGLDGSGAIVLRQKWSRGQVEARFANMPPCLVGMEACVGAHHLSRRLRALGHDARLMPAKYVRPYSKGQKNDFRDAEAIAEAVQRPTMKFVATKSAEQLDLQALHRVRARLVRQRTGISNQIRAFLLERGVAVRQGLRFLRAELPTILAKRCDVLSVRMIRLIEDLAGDWRRLDERIESLSGEIDALARQDAGCERLMSVPGIGPIISSATVAAIGTGDAFEKGRDFAAWLGLVPRQISTGIARSLARYPSAAIATCARCSFRPPGWS

SEQ ID NO: 429751 - protein, 408 aa, unidentified
METLHRRCAGLDVHQKEIVACRRIASGRKVQSELGRFSTTTQGLLALSAWLVEAKVTHVAMEATGVHWKPVWHVLCQDFSLVLANASHIRNVPGRKSDANDATWIADLLAHGLLRASFVPPQPIQELRDLTRTRRELPREIVRHTQRIQATLEEANIKLASVISDILGFSGRRILKAIVAGESDSRRLAELGHSRLACTREDLAAALDGRLRDHHRFLIGQHLKTIEQLEGTIAQFDARLEAALAPFLDAAERLKDIPGFADNVTQTLLAEAGADMTAFPTADHLISWAGMCPRLDESAGRKRSKRLRKGAPWLKPVLVQAALAAIKVKNSSLRARYYSLKPRLGHKKAIIAVAAAMLRIAYHMLKDGTFYQDLGPDYRVRKNPERAAQNLAKRIRALGYDVELKKAA

SEQ ID NO: 429752 - protein, 408 aa, unidentified
MNTLYVGIDVSSKSNVVYLMLPNGDKHSNFSVANSHEGSTQLVKRILSALTSHSLDTVLIGLEATSVYGDNLVYFLREDATLAPFNRKIHVLNPKQVKKFHDAYNDLPKNDYVDSFVIADCLRFGRINKEVYMGDYRYKALQNLTRARFFAVQNLVKEKQRFMNVLFKKYSTMTQEKVFSDTFSTTALAVYDEFESAEALANMDLHELTDFIIGKGKNRFPDPDAVAKAIQKAARSSYRLPKTVNDSVNQVLSISITSMKALESQIKEFDKAIKAQMELLPNVLISIPGIGPVYSAGIIAEIGDINRFNSQAALAKYAGLAWKQHQSGGFESEVTRLIPSGNRFLKYYLCEAAFSLVRCDKEYSDFYHLKYKEVNRCQHKRALALTARKFVRLVFRLLKGNRLYCPAK

SEQ ID NO: 429753 - protein, 409 aa, unidentified
MTPSKVRYVGLDVHKHYVMVGAVDRDQQLVLPPRKVSLVEFEGWSQKHLQASDEVALEATTNAWYVHDLLKPLVGRVVVTHPPHIKLIAATMVKTDKRDTKTLAKLLAVNLVPEVWVPPVEVRDLRALIAHRRRLISQQTQSKNRLQSVLHRHHIVPPEGKLYHPDNRAWWHQLALSPGDKLRVRQELVMLEQLDSLITETTDELHRFSLSEPWREQLPYLIQLPGIGVLTGMVILSAVGDITRFPSAKKLVGYAGLGAKVHASGLSYRTGGITKQGRKELRAALVEAAWVAVRFDLTWKEQFERLAQRIGRRKAIVAIARKLLVVIWHVLTHKRVDRQADPERVVRYFLAWGRQAKVLARTGLNAAQFARQQLDVLGIGQDLSRVTFGVTYCLPPSPLLAVQEAATPA

SEQ ID NO: 429754 - protein, 451 aa, unidentified
MDECRYRDDRSIAKLTKGERILDHQFRYFVGIDWATQTHRVALLDSEGHAVEQFNAAHSGEGLAALVEKLKRRTACDPAEVAIAIEVAWGALVETLMESGFSVFSINPKQVDRFRDRFTVAGAKDDSRDALVLASSLRTDRKSYKRVEVESPDILRLRELSRFEEELKSELRRMTNRLWQQLHRYYPQMLSLSPAADDPFIWDLLRTAPTPKQGAKLRRVQVQRILAGNRIRRISADEVLLALKGAPLVLAPGAGEAACEHVLLLLPHVSLLDRQLRDVGLRVKQLLERLADPGTEPGGLPCDAALMLSIPGIGPAIAAALLTEATRPIRERDYQAIRCYAGTAPVTKQSGKRKTVNMRYACSPRLRQAVYHWASTSINCDKRSRQQYDDLRASGHHHARALRGLADRLLRILISMLMQGKTFCPLRRQGSLPQPSSTDAAVGTLQLQPGV

SEQ ID NO: 429755 - protein, 401 aa, unidentified
MDSKKYIGMDVHQASISIAVMDSAGKLVMESVIETKAATILEFIQGIRGSLWVAFEEGTSAAWLYDLLKPYVAKVIVCDPRKNALLKTGNKNDRVDARKLSDLLRAGLLTPVYHGESGVRTLRELSRSYLTVTKDLTRVMNRLKALYRSWAIPCAGEKVYSPRHRNAWLEKLSEAGVRRRAEQLYQQLDMLLQIRKEARRELLTESRKHPAHELLQQIPRLGPIRVALLIALLQTPHRFRTKRQLWAYCGLALQTRSSGEYQFRRGQLQHSKKLPALRGLNTNHNHDLKNLFKSAATHASTSTDPLGDFYRNLLAKGMKPAMARLTLARKMAAIVLTIWKKAVPPAARIEQTVTVGVPIAAVCCERTRLQLRPFLHWCVCPKESMAPGGRLNIGEALGALP

SEQ ID NO: 429756 - protein, 335 aa, unidentified
MKEITTVGVDLAKSVFTIHGVDAAGRTVLRKTVRREKLLELIAALPPCLIGMEACGGAHEWARQFERHGHRVGIMMARFVAAYRKSSKNDGNDAEAICEAVARPNMRFVPVKSAEQQAILSLHRVRQGFIEQRTATINRIRGLLAEFGIVLPQRADQVRRAALVVAESLPVLAREAIADLRAHLRYLDERIGCYERQLVALAKQHEPARRIQDVCGVGPLTASAITASMASGHEFANGRQFAAWLGLVPRQYSTGGKMRLGRITKRGDGYLRTLLMLGARAVLQSAARRMDRLSRWALALRARRGYHRAIVAVAAKNARIIWALLAKDRAFVLPV

SEQ ID NO: 429757 - protein, 411 aa, unidentified
MDKVYDKCCGIDVHKKLIVACFRKGSKQELRNFGATTRELLELANWLQNGGCEMVAMESTASYWKPLYNILESSELKAMVVNASHMKAVPGRKTDTKDAEWIAELLQHGLLKASYIPDKQQRELRELVRYRKSLVSERTRELNRLQKMLEGANIKLSGTVSDINCMSARNILEYLLTGEFFDEAKYDEMYKQKIIAHNLKASKEQIIDDLNGVMTPLQRRMMKELLSHLDELNVHINNLEDEIDNFMKPEEKQATQAIQDVTGIGKNSSQAIISVIGTDMSRFPTAGHLAAWAGLCPGNNESAQKRKTGKMRKGNALLRSTLVVCAHSATRNKNSYFYAQFMRISSHRGKKRAYVAVAHSILIAIYHILKDGVVFKDLGADYYNQFNMERKINAYLKKLKALGWEVPVVAA

SEQ ID NO: 429758 - protein, 381 aa, unidentified
MKKATRFVGLDVHADTIAVAVAEAGRDGEVRSLGIIPNRPDAVRRLVQKLGGNKGVKACYEAGPTGYALYWELEKLGIECIVVAPTLVPTKSGERVKTDRRDATKLARCYRAGELTAVWVPDPAHEALRDLVRARESAKKDQLRARHRLSKFLLRNGRRPPKDVGAWTQDHMTWLRAQKFEQPAQEVTMIDYLAEVDHAAARIDRLEQAIHEAAAAAPPTLSKVIAGLQALRGIGKIVATTLAVEVGNFSRFPHPKQLMAYSGATPSEYSSGKRRVQGAITKTGNSHVRRVLFEAAWSYRHRPSNGKALSQRQRGVAEPIKELAWKAQHRLHRRYAALAAKGKPLQKVITAIGRELLGFVWAIATRIEQEQTTTKTKALAA

SEQ ID NO: 429759 - protein, 415 aa, unidentified
MEVIHGRCAGMDVSKKDAKVCVRVAGAGRRKTVETVRTWGATTNQVLALRDHLIAEQVSLVVMEATSDYWKPFYYLLEDLTGVEVMLVNARQVKNMPGRKTDVTDAVWLAQLGAHGLVRASFVPPAPIRELRDLTRTRTMVTRERGREIQRLEKLLEDAGIKLSSVASDITGVSGRLMLQALIDGHRDPAELADLAKRRLRHKIPELTEALTGRFNGHHAFLARIHLESIDQRTRQIAELDHRIDQAMAPFRSFADLICSIPGIGRQTAEVVVAETGADMTVFPSPKHLASWAGVCPGSNESAGRVKSTRTRPGNPYLKAALGTAALSIAATRGSFLAAKYKRLAARRGGKKALVAIEHTILNAIWTMGNTGAYYDDPGSDYYLRHDPERVRRNATKQLERLGYTVTLTSTTASA

SEQ ID NO: 429760 - protein, 382 aa, unidentified
MGLDSHPDSFTGAVLLGDQAAEASVETLGDKLSLEALEDWVLKNTEADDVLVMEATGNCWTLVERLERIGRRALVLDSVKVGKVAKSYCITDKTSAVKIARVYLSGLGGEVWIPDPVTRARREVYSAYEQASENLTRANNRIKGYLNEHCIRLPKAMKIASPKARRLIDSARDWTETQQLLIEQAYRDLDQALSNLKELKTLMAREILGSPELLRMVRIFGLRHITVYAIAAYVGNIRRFRTPKKLVAYIGVNPRVDTSGEYKGRESLYGNGRKELRRVLVEAAHCIFRHKSAANPIFQWAHALSYRKGRKLAVIGVARKIVTSIWYLLMGKFTPLQEASATIRYKIRVLARFIGIAELRERGYKKYDDFIDEKINILKLTS

SEQ ID NO: 429761 - protein, 401 aa, unidentified
MNEVGIDVSKGKSMVCVMRPFGEVVLEPFEVLHTAQSLNDLAGKLKALDGETRVVMEATGNYHKPVAFVLHDAGLFVSVVNPVLIHDYDNNSLRRVKTDRKDAVKIANYTLDKWTRLRQYLPEDDTRLALKNCYRQYQQAVAVRTMLKNNLISSLDLTFPDANKLFSSPAKSNGCEKWVDFIGDFWHSECVSSLSSDAFAKKYLKWCQKHGYNFTRSKSDTIYACAVNAASLPKSPTSKLLIQQQVAQLKAVSQSVAAFQQEMLRLSQQLPEFDTVMEMYGVGPSLGPQLMAEIGDIRRFSSKKLLIAFAGIEPQPNDSGKIVGNDSGISKVGSAVLRRTLFLIMTVILKTQPQDEPVFQFMNKKRSEGKPYKVYMMASANKFLRIYYARVKAVMDSKHSK

SEQ ID NO: 429762 - protein, 368 aa, unidentified
MNSISNKKINQVTDQTLVVGMDIAKKKHYACFVDERGRVLKKSFPVPQSREGLEWLYQCIVKAMEEFEKTEVIVGIEPTGHYWLNLAYFLDEKGIPLVMTNPMHVKRSKELDDNLPTKHDAKDALVIARLVKDGRFSYPRILKGMEAELRVGATFRSKLVEEQGAIRNQMIRWLDRYFPEFSQVFPSFGKMALAVLEYTPFPSDLAGKELEEVLALYRQSEGLQSPQKPKAKKLMELAQHSIGVTEGQQMARIEIATLVRRYRQLEEEIEALTEQLIELVQTSVEYEWLKTVPGLGDATIVELLSEIGSFSHYQDPRQLIKLAGLTLREHSSGQHKGQKRISKRGRRRLRALLFRVMMPMIRHNEAFR

SEQ ID NO: 429763 - protein, 425 aa, unidentified
MKKIDYLSTLFVGIDIASRTNVVSAIDFDQNYLIKWKPFPNTQTGTEDLANTIASVLSKHHELKAVIIAMESTSFYGVHTANYLSTCDLLLPFSVRVYCLNPKTVKNYKKSFTDLPKNDSIDSFVIADFARVGKIKIQPWRGSQYLALQRLTRHRMHITECIAREKTYALNNIFLKFSEFALLRNDEHPFSDKYGATAEGILTEFMTNDDLINTPLEELVDFIYSKSRGRIAEPAQVADIIQTAARNSYRLDKCLYEPLTVSIASSFNCISAFERELKAIDKAIEKTVKGLNPTEYQILCSVPGIGPVYAAGILAEIGTIKCFPNHSKLAKYAGIVWNENDSGDFHSEDNRMSKAGNRYLRYYIIEAAGSVVRHEPSFASFYRKKFEEVRSHQHKRALALTSRKLIRLLFGLLDKGTLYSPDKSR

SEQ ID NO: 429764 - protein, 463 aa, unidentified
MSKGGKRRRRKSGSLPAGFEQVNLNAAGIDIGSESHWVAVPADRDATPVQEFSSFSTGLHALAEWLVACGITTVAMEATGVYWVPLYELLEARGLQVVLVNAKHFRNVPGRKSDVLDCQWLQQLHTFGLLRGSFRPEAAIVTLRTYLRHREMLVQASAQHIQHMQKALTLMNLQLHHVLSDITGETGMRIIRAIVGGLHDPAELAKFRDRRCHASQDKIAAALTGTYQPDHLFVLQQALELHDVYTAKIQACDRAIERVLGELPPKVDVEQSPPPAARPLQKPRGHQMRISVRDPLYAATGVDLTQINGIASHTALAVVSEIGTDMTRWPTEKHFTSWMCVAPGTKITGGKVISSRTRTAANRVATVLRTAAASLLRSDTALGAFGRRLAVHIGEAKALTALTRKLAIQIYHSLKHGRVYKDPGAAAYDLQHRNRVLRSLTKRARILGYELVHVEPAPQSAVS

SEQ ID NO: 429765 - protein, 411 aa, unidentified
MQDKAMPVVEFEQVVLRGCGLDVHEKTVVATIDGEGISRETQTFDTYTSSLNELRDWLQKNRVTHVAMESTGVYWKPVFNILEEPFKVILVNARHLKSVPGRKTDKKDSQWICKLLLAGLLKASFIPEEKIRQLRDVNRYCRKMVEQVAAEKNRIQKILEDANIKLSSVVSDISGRVSTKLIQGLMEGRTDIAALVAESYHGKMKASKEELVKAMTGRMTGHHRFMLQQIQDHIAYLETQIARLEIEMDRLLEEDKESVELLTTIPGVDKAIAVNILAETGTNVEETFGSAKRLAKWCGICPGNNESGGKKQSGRTPHGNKYLKSILAEAAWAATRTKGTYLRAKYDSMVGRKGKKKALLIVGHKILCAAYHILTTRLSYQGFSVAEFENRRNQKRISYLQSELKELGVTV

SEQ ID NO: 429766 - protein, 372 aa, unidentified
MNQSMVSVGLDVHKETIAVALAHHEPPGAVEALGEILHRPEAVRRLMQKLQSRHRLHVCYEAGPCGYALYRQLHALGIDCAVVAPSLVPTRPGDRVKTDRRDAAKLARLLRSGELTPVWVPDTAHEALRNLTRLRAAVRQDLMRARHRLSKFLLRSGQVPAPEIGPWTRRHLAWARALPFAQPLDVRVRDDYFNEVTHLSDRVLALDQAIEDAAMLSPMAPRIAALRTMRGVSTITATTLVAEGGEISRFTGARQLMGYTGLVPSESSSGASVQRGRITKTGSGYVRRVLIQSAFAYRHRPLLGGTLRRRQQGQPEAVCRIAWKAQQRLHRLYCRLLARDKRHQKIVVAVAREMVGFLWAIERETLRSLAPA

SEQ ID NO: 429767 - protein, 415 aa, unidentified
MLKIIYPVCSGIDVHKTFVVATIASTDRKNITTYQTKRFSTFTRDLRSLAQWLSDNQCVDVCMESTGKYWIPVYNILEPSCRINLAHPKYVKAIRGKKTDKKDSIWIADLHKHGLVPGSFIPPADIREIRDLLRYRSKLVSFASSEKNRVQNSLTVSNIMLSSVVSNTFGKSASAILQHLLKHPGDQDFDFRPLLHGSMLKKQDEIALAIDGAINEIQAGKITLCLRHMNGIEGYIAQIEATALHLAAPYSGALRIIESTPGISWLAALVILSEIGADMSMFHSAKHLCSWAGLAPSNDQSAGKKKSVRISRAGAYIKPILVQCANAAVKDKSFPHYRVRYEAIKLRRGHKRALIAIARMMLTAIYCMLSTGELFNPAIYEQAKCKPGFVASSEEHAVKLLQRLGYSVAKLPESA

SEQ ID NO: 429768 - protein, 344 aa, unidentified
MKIKLLGIDLAKNVFQLCALNQANKVLFNRTVRRAQLQSTIAKLEPTTIAMEACSSAHYWGRTFEVMGHKVLLVPAQHVTPFVRGGKSDARDALAICEAAQRPGLHPVPIKSIEQQDIQLLHRLRQRQVQHSTALANQIRSLGREYGVIFPAGIKSLIKRLPEALEDGSNELSPVARYALADQLRCLIEVRQAMKAFLLQIEQLAGQHPAYVNLLPLPGIGPMVASAYIAAIGNGNQFRCGRQVSAWLGLVPRQFGTGGQIQLMGISKSGDRYLSTLMIQGDRAAITNGLKNNPELAQWVQPIIDRQGFNKAVVAMANKMTRISWVIVTTGDAFDVKQAFKPVA

SEQ ID NO: 429769 - protein, 447 aa, unidentified
MGKPQVVVDEPHERAFERVAAVDVAKASGVVCTRLPDPSGRRVAEWGTVKATVRAVRKEAARLVSLGIEKVTLESTSDYWRIWFYLFAAAGLDVQLVSASQARQLSGRPKTDIKDAMWLARLTEWGMLRPSFVPPPAVRALRHYARARTRMVQDRTRCWQRIEKQLEDALIKVSSVASKLTTLSVRAMLDALVAGERDPQVLAGLARGRMRARLDALAEALDGQFENHHGEIIGMLLAEIDSLGRQIGRLDLLIGEQLDSIPEAWGADADGVTGPGAGTGDGAAALPAIARLDEIPGITPGLAASIVSEIGLDMSRFPTADHLVSWAGLCPRTLQSGTRSKNGKKPGNTYLRGYLGQAAAGAAGTATFLGERHARIARRRGPAKAQVAVARTILVIIWHLLSDRDARYAELGPDHYQRRIDKHKKARQHVRQLQALGYEVTITQTAA

SEQ ID NO: 429770 - protein, 318 aa, unidentified
MSTEIFVGLDVAKDHLDVALRPSGEGWRVANDETGTSQLLARLRTLHPTLVVAEATGGFERAAIAALAAAGIPVVVANPRQVRDFARATGELAKTDQLDAAILALFAERVRPAPRPLPDATTQLLDALLTRRRQLLEMLVAEKNRLGFAPKPLHRSIGQHIRWLERQLDDVTTELTHQVEQSPVWRAKDDLLQSVPGIGPVVSCTLLGELPELGTLSHKQIAKLVGVAPLARDSGTLRGKRMIWGGRASVRTALFQAALSARRWNPAVRVFYERLRAAGKPAKVALIACARKLLVILNAMVRNNTRWQALTPSAQHSC

SEQ ID NO: 429771 - protein, 429 aa, unidentified
MQNESTPGARGPVFCGVDTHADSHWLCVLDWRGRKVLSRQFPADAAGYEALAGAIAAAGEPACIAMEGTSSYGAGLTRHLASLGMPVREALSPARAQRRRPGQGKCDEADAERAARAAMSGSKLGTPKSQDGWVDGVRCMLAARSGAVKARTSAINTARSLLTTAPEGLRSRFRGMAGPRLMEELPSVRAEGALGAALGALADLWAAARDAAPDMERAIEASLEENCPALLAMYGCGPVSAAKLAVAAGDNPGRLRSEASFAAICGACPIPASSGKTVRHRLNRGGDRQANSALHEIARQRVMRDPETAEYAERARARGKSDREVMRCLKRYVAREAYRALMRPHEVRRPEDASGLVAARRAARVSQVRAASILGTSEKYISMLERGQRELKPIRRAYEAWVEAGLPLDWDRQAFEAERKMDSKKHLAK

SEQ ID NO: 429772 - protein, 342 aa, unidentified
MDYYAGIDVSLGLSSVCVVDATGQIIREAKVASEPEALTTFFAGLSLPLTRIGLEAGPLSQWLHAGLQRAGFEVVLLETRHVKAALSAMIVKTDRRDARGIAQLLRMGWFRPVHCKSPPAQEVRALLMARKQLQAKMRDVELSLRGLLRGFGLKVGEVSKGQFAARVRTLTAGHATLERIADAMLRAREALQREFARLHRAMLAIVRGDEVCRRLMTVPGVGALIAVTFTSAVDQPERFSRSRAVGVHFGLTPKKYQSGETDITGAVSRVGDPMVRTALYEGAHIMLTRSVRFSALKRWALEVAKRRGMKRAKVALARKLAVILHRMWVDGTTFRWGQEGTA

SEQ ID NO: 429773 - protein, 415 aa, unidentified
MQSCLFVGVDTHKRTHTAAVFSGYFSLLATITFDNSFLGFSKFLTELENISGSNTLIFGLEDSQGLGNFLAEFLLKKGFDVMDIDPVLTDRGRRRTTHKDKSDDRDACLIAKTLISKKDSLHKVTISKNSLAIRELVKYRELLVGESTRIKNRLHVLIFNQYMEISSVFPDLFSKCALAFFARYPDPFKLKGESLDSLTVLLKSNSKGRHGKKMATEILSLASTDNMPDILTDARSSIIKKHIDRLSAIQEELKDILGILSELVLQSSYDSLTSIPGVNIVTAAKIISQVVDIGRFSSPSKLAKFIGVAPVEKSSGRKIRYRKSKHGKRYLYSAIFFIALNHISRTRDGRDNNPISRAYYLKKISEGKTKKEAITCLARRLTDVIYAIMRDGSMYSFSKVESVCNNCEILETIAS

SEQ ID NO: 429774 - protein, 339 aa, unidentified
MCKQSMVLPGRLFCGIDVSAVSLAVAVQREEQLIEEREFPNNASGHKLLITWLRKRKTAVRVTLEATGIYSFDLSVALHATDGIELAVLNPKVANRFAQTLRRSKTDSADAQVLAEYSRRMPFTAWCSPNHNELQLRTICRHVESLTVQHTRDQNRLYAAQVSISTPRCVIQDLKHALAAGERRIHKLRREAMTLVRSDENLRQRYDLLISIPGVAQISAMQLLGELATLSPDMTVRQWVAHSGLDPAHEISGTSVRKASRISRAGNRHLRRALYMPALVASRCDPHGKAFFESLLARNKARLQALIAVARKLLHAIYGMFRSGLKYEGTKLFPRISLS

SEQ ID NO: 429775 - protein, 422 aa, unidentified
MLEETQDEQEIIQRVAALDIGKAELVCCVRVPDPKGGSRRVQEVKTYSTMTRSLQVMADRLLDLGVTRVVMEATSDYWKPPFYLLEAHGFEAWVVNAKDVKNLPGRPKTDRLDAVWLCKVAERQMLRPSFIPPSPIRRLRDLTRYRVGLVSDQTREKNRVEKLLEDAQIKLSVVATDIFGVSGRDMMAAMIAGERNPQVLAQMARARMRTKIPQLEEAFVGYFTDHHRFLLAKMLARIDALNADIADVETQIEAQIAPFASAVARLDEIPGVGATTAAVIIAEVGVDMTRFPTPAHLSSWARFAPGVRESAGRKKGTGSTGHGDRYLARALGEAAVGASKTNTFLGERYRRIARRRGKKKAIVAVGRSILVIIWHLLGDDTARFNDLGPGYYDSRINPEHKKRNHIRELEALGYKVTLQPAA

SEQ ID NO: 429776 - protein, 372 aa, unidentified
MNYNTVYVGMDVHKESFSLCAYTIEAEKASHYQRTEADYKKVLNYLEFLRTIYGDDANFICGYEAGCFGYTLYHQLTANNVKCIILAPTTMLEQRSKKRIKTDRRDAEIIAKCLAQHNYSPVHIPTAKDEETKEFLRMRDDHKLALKKVKQQILAFCLRHNYRYDGKSHWTAAHLKWLKALTPEALYKEILDEYLLTYQTLSDKIERLDKRIEELATQDEYKEAVKKLCCFIGVKTHTALSVLVEVGDFKRFASAQHFASYLGLVPGEDSSGDDQNRLGITKAGNRHVRLLLTEASQCYARGQVGFKSKELKSRQSGNTPAVIAYADKANERLRRRYYKMVLNKYKKHNVAKTAIARELACFMWGMMTDNIV

SEQ ID NO: 429777 - protein, 390 aa, unidentified
MIYVGIDVAKDTHDCCILGPDGEVLFSPFTIRNSLQGFDELYEKIWSLASDTTEIKVGLEATGHYHLNLLRSLLDNGLASYVINPLHTNLFRKGQSLRKTKTDKVDAASIAMMLLTDRTLKPYSDTSYHNEELKSLTRYRFDKVQERAKLKTSLSRLVSILFPELEKLVPTLHMASVYALLSEFPGASHVAAAHLTRLKNLLYTVSKGHYDRDTAIMIRDAAISSIGAVMPAKSLELKHTIHLINVLTEEIDEIEERINAIMDELDSPITSIPGIKNRMGAMILAEIGDFSRFDNADQILAYAGLSPTTYQSGQLTSSYAHMEKRGSHYLRYALFNATQYVCMWDPTFKAYLAKKRSEGKHYFVAVSHACKKLVRTIYRMQLSGTSYRAA

SEQ ID NO: 429778 - protein, 360 aa, unidentified
MRNYRTSVGLDVHARSVVACGLDGDTGEVFERRSTPDHGEIRQWIESLPGPVAVVYEAGPTGFGLARFLLGAGIECVVAAPSKLQRPSGDRVKTDARDARHLARLLHLNEIAGVMVPSVEQEAARDLVRAREDCRGDLMAVRHRLSKLLLRHGIVYYGGEAWSKKHELWLPTHRFDTPGLQLAYDAAFDAMLAAVDRRDRLDRAITAMAANSTFAPVVTRLGCVRGVSTLTAFGLATEIGDWGRLSGRSIGAYLGLVPTEYSSGATRSQGGVTKTGNSHARRLLIEAAWHHRPPYRPGRHLRRRWETASPAARARGQAANRRLHARWASFDERKKRSVVANAAIARELAGWCWSLAVLDD

SEQ ID NO: 429779 - protein, 368 aa, unidentified
MTKTVYIGMDVHSTNYTLSSYTCEADNCFSTVKLGPNVKNILNYISRIKKDHGDDIEIVTGYEAGCLGYTLYKSLEKEGIKCIIIAPTTLPKQKAGEIKTDKRDAQKISRALGTGTYKSVYVPDQEDDDVKQYIRMRDDHKLTLKKTRQQINAFCLRNGYTFTDGKSKWTKKHLKWLRSIETTAMQREILDEYLITFDYYTLRIKQMDEKIEEISRQERYKENVDKLCCFAGMSTHKALCHIVETGDFSRFAKAPSYSAYLGTVPGEDSSSTSVNRLPITKAGNSHLRLLDIEAAHAIGRTSKQKSRVLLERQRGCSPEVVAYADKANARMRKMYREISERKNKNVAAAAVARELACFIWGMMTDHIS

SEQ ID NO: 429780 - protein, 397 aa, unidentified
MSMFFVGIDVSKDYSSAQGLDREGKKVFYLEFAMNGEGFSQFLKVLKTVCEDLSGVTVGMESTGCYHINLFAFLCSEGIICVVINPLLISNFARLSLRKTKTDKKDALSIAQFLLVHRGELSQVSYCQSSQDLKDLARERESLAGMIAGLKNDVRRLLQMTFPELEHRCKLFTETMMRFLIKFPSARIIRTAKPKEISKALIHAEGKRKRVFLSAEEIIKLAKASVASEGVAKELILSEKIETLLYLEEKKARMTEALVEACRSTRVDELDIITSVDGISTITGSTFLAELGDIGMFRSYKHVIAFAGLDPSIHQSGQYEGVSRLSKRGNRHLRRVIFLMTLCAVRSQNIFREYFLKRKGEGLPAKKAILATAHKLLRVLFAMLKTKSYFRKEVVEV

SEQ ID NO: 429781 - protein, 425 aa, unidentified
MRVTQNDKIMQMKIDTMIVGIDVGKETHYAKAIDIRGVELGRLLRFSNDAEGYASLDKWMNEIMKRTEKTEAIVGFEPTGHYWFTLADHLKGRGHKLAIVNPYHVKCTKELDDNSPTKNDLKDPKTIAMLVKDGRYRDVYIPEELYQELREAVWEYERLKRRKKDIKNQVTRWLDIRFPEFEKVFSAWDGKAARIILKKCPTPAIVVEAGTEGIMNIWLEQGVKGASRKKANGIVEAAQKSIGRTIGLVAAEKSLRNMLTEYEMIEKQLEEQEKQMGELLRQVPNTEYLLGMKGMGMVSTAIIVSEIGDIRRFQAARQIIKMSGLNLSENSSGKHKGQTKISKRGRKRLRTALFRIVIPLIANNEEFRMLHHRYVSREKNPLKKMQSIIALCCKLIRIIYAILTKGIEYDRNEVLRGIKPRVKAA

SEQ ID NO: 429782 - protein, 322 aa, unidentified
MTSSKEDKYVGIDVAKRQLDLAVWGMDEFKQYGNSESGILEVVKHLQAMGPTLIVVEASGGWEMLLVAELAFAGLPVAVVNPTRVRNFARAAGQWAKTDKLDAGMLARFAEAIRPEVRPLRNEQEVYLAGLVSRRRQVIEIMTAEKNRRSTTHGPILERLDEHIAWLLEELRYLDAELSRFIQASPVWKEKEILLRSVPGVGPVTSFTLLAELPELGTLNRQKIAALVGVAPFNKDSGPRRRKRRIFGGRAGVRSALYMAALVGSRSNPVIRDFYERLLERGKEKKVALTACMRKLLVILNAIIRDRKPWNPRIPRKETIPV

SEQ ID NO: 429783 - protein, 335 aa, unidentified
MTPIAHTRQVTVTRIVCGVDVSSRTLAVRIGRDGAQSVFPNTPEGVARLAAFCRAHGAERVAMEATGGYEQQPFALLAEAGLPVAILNPRQVRRFAEGMGVIEKTDAIDAGLIAWFAEVKCARSSPPPAPDQQHRRALVTRLRQLTQVRTAQSNQRRLIADPVVLASIDELLALVERQIRALEQQIAALIAEDPLWRELDQEFRSLKGVAARTVARLMAEMPEIGTLSNKAISKLAGLAPLARDSGQHQGKRQTRGGRAPVREILFVVASVAGRFDPDFIAFRQRLSAAGKPPKVVRIALAHKLLVRLNAKARDVRQRMAAPPAAIDSHAAPQPV

SEQ ID NO: 429784 - protein, 354 aa, unidentified
MEEQFIGCDGHKQYSVFVTVKRGENQGVVERVMNERSAIREYLGGLPAGSGIALEAGGTYYWLVQEIERAGHQPHLAHPLDCRRRMGSKKKTDVIDATELGKMLRDGTLPEVWIPPAELRDVRELLRLRMFLTHSARTRIKNRIQGVLAQHNVRPQQVQDVFTVRGRAELERRYGELPTETGASVKQQLAILDFIEGQIETAERRLQEQMQLTAEALLLDTMPCVGSILSMVMALEIGDVKRFPDAEHLASYAGSVPTVKSSGGRTRLGGVSKEVNQTLKWAYVEAANLIAMSQRRLAGSHAVRLYQRISRTKKHSIAVVAVARHLAEASYWILTKREGYREPKVPAKVSSTHG

SEQ ID NO: 429785 - protein, 457 aa, unidentified
MPQRKRKGRKSKLNVNNLPQHLRHINLNAAGIDIGSDRHLVAVPEGSDEVSVRQFGTFTSDLHDIADWLKKCGVTTVAMESTGVYWIPLFELLEQLGFEVKLVDARHVKNVSGRKSDVLDCQWLQQLHTYGLLQGAFRPPDEICVLRSYARQKEMLTQASSMHIQHMQKALQQMNLLLHNVVSDITGVTGMKIIKAILAGERDPNVLSLNRQEGCRNSKETIAKSLVGNFRDEHMFALKQAVQLYETYQNMIAECEQALIKHLGTRPDITDDPPPESGKSVRARERIRAGVDVREKLFKMTGVDLFAIPGLAADTLLTLASEVGFDMSPWKSDKHFSSWLGLCPGTKRSGGKTLDRKTKRNANRGAQAFRMAAASLAKSQTALGAFYRRIRSRTDGRRAITATAHKIARVFYSMLTKGTAYVEAGQQAYEQMFKERRIRSLRKQAQSLGFQLHPCAT

SEQ ID NO: 429786 - protein, 342 aa, unidentified
MNIVTLGIDLAKSSFALHGVDSSGKVLLRKNVSRKKLPEMLINMPPCLVGMEACSSAHYWARLFKQFGHDVKLMPPQFVKPYVKSNKNDTADAEAICEAVTRPNMRFVPIKSIEQQSILSIHKARERLVSMKTGQTNQLRGLLAEFGIVIPKGSASLNKQIPLILENAGNNLTSSVRRLVAQLKELIDDLVIQICVLTKEIEHWHSTNVDSKRIAEIPGIGPITATALVASIGDPASFNNGRQVSAWIGLVPKQFSTGGKQVLLGISKRGDSYLRRLLVHGARAVLGHLKQQPNTYTHRWLNDLLKRKHKNVAIVVLANRNARIAWALLANQQQYNPELLSA

SEQ ID NO: 429787 - protein, 356 aa, unidentified
MSGLKHQKEKRSMDHFAGLDVSVKETSVCVVDDTGKIVREVKVASEPEALLAVLKNPAYHFKRIGLEAGPLSQWLFSALAEAELPVVCVETRHMQALLKAQINKTDRNDARGIAQMMRVGLYRPVHVKTLRSQKLRMLLTHRKLLQSKAIAIENDLRGTLRNFGLKVGKVGTVKFEARIKELVENLPDLAELVEPLLVVRRVLREQFVILHRRLLAIVRDDEVCRRLITTPGVGPVVALTYRATVDVPARFRKSKAVGAVLGLTPAKYQSGEIDWSGRISRCGDEMMRVMLYEAAQSMLRSKKWSWLKAWAMQIARRRGIKKAIVALARRLAVIMHRIWVDGTEFRWTREQSPAAA

SEQ ID NO: 429788 - protein, 415 aa, unidentified
MVAPASTPAPTRFVALDIHRHYLVVGAVDRQQQLVITPRRFGFTAFADWARDHLTKSDAVVLEASANAWQIHDLIQPLVGAVTVAHPLAVKLIASAQVKTDARDTLKLARLLAANLVPAVWVPPPHVRELRGLVTHRKRLVQQRAQARNRLHGVLHRHNLTPPEGKIFGPEQRAWWKQLDLSPIEKLRVQQDLTLLDSLDSLIAEAETELRRLSTTDVWVEQLPFLVQLPGVGVLTAMFVLAAIGDISRFPSAKHLVGYAGLGARVHDSGQTHRGGGITKEGRRDLRGAIVEAAWVAVEAHPHWKGQFERLAARIGKQKAIVAIARKLLVAVWYVLTNQVADMHADEDAVARKLMHWITQAGAAKGRKGARVRLLRQMLDQLAIGAGVESVRHGGHTYAVPTSIQPATPELLGKT

SEQ ID NO: 429789 - protein, 397 aa, unidentified
MNYIGIDIGKEKHAVSGIDDTGRSVGGAQFFAADAGGYASLTGLLRKLGPSTEVLIGMEATGHYGKLLAHRLREDNWTVRVFNPAVIAAAAKGDLRGRKTDKLDAQVIAQALRDGRRSATQIASADEEQLKMLGRQRAFLVRQRTECKNHLTALLDVLFPELAGFFKPNFSPSFLALVARFPSAVAVTAADLRTLTSLLRTASRGQLGRDDARALQQTARTSLARTRTNAGEAFAAQQTAQMIQTFNEQIERLEEQMQTCNSMIATYLASIKGFGKVLPFVIAGEIGNLERFQGPNMTNRVLAFAGCEPRIRESGKWKGHTKMSRRGSTTLRCALYLAANTVRLNTPAFAEIYQRHIARGKPHAVALSHVMRAIINTLCGMHKTSTLYRAPEYRKAG

SEQ ID NO: 429790 - protein, 355 aa, unidentified
MTSTKYIGLDVHKESISIAVLNFAGKVVMECVIETKASTLLQFIHGLRGDLHVTFEEGTWAGWLYDLLKPHVTELVVCNPRKIALLKDGSKSDRIDAHKLADLLYMNKIKPVYHGEHGLRMLKELSRSYLTITKDLGRVMNRLKALYRSWAIPCAGTQVYAPRFRSEWLSKITEAGVRRRAELYYQQLDALRLVRQQARKELLAEARKHRATKLLRQIPGIGPLRAAHLVALMQTPHRFRTKRQLWTYSGLGLETHDSAQYRVVEQQLQRSKKPVALRGLNTNHNHDLKDIFKGAAMRASTAAGPLHDFYEALLAKGRKPTMARLTLARKIAAITLIVWKKEVRFDANYLKQQAA

SEQ ID NO: 429791 - protein, 340 aa, unidentified
MNEVITIGVDLAKSVFQIHGIDAEGAVIFRRQLRRGQMVPFFKKQPPCLVGMEACATSHHWARQLIGLGHKVKLMPPRYVKPYVKRNKNDMADAEAICEAVTRPTMRFVEVKTPEQQSVLMLHRTRQLFVRQRTTLINALRAHLAEFGIVAGVGRNGLEKLLQVIEEGDNDRVPPTARDCLLALRDQLEMVKHQILGADRRILDWHRGSEVSRRLDDIPGVGHLIATALVASVPDPHIFKSGRDLSAWIGLVPKQNSTGGKERLGHISKAGNSYLRTMLVVGALSVIRRAKQVGYTKRPWLTKLLERRSTKIAAVALANKNARTAWAMMAHGTYYQEPVS

SEQ ID NO: 429792 - protein, 386 aa, unidentified
MQKLNDLSRSLSPLQPDGTLIAVIEMSLSRWLVAGIVPGVERQPLKKLDVDENALLKLLNRWREEAEKAGHRIERIAVAFEAGRDGFWLARWLRAHDIEAHVIHTSSVAVSREHRRAKTDRLDTELLKRSFLGWLRGERNHCKMVAIPTIKDEDAKRPNREHEGLIGEQTRIVNRMKAALIRLGIRGFNPKLKKAAERLDGLRTPEGEPIPPNTLAELRRDMARRRLVSDQIRQIEDARLERLKQAPSDEPHAMVRQLARVIGVGVETADMLVQEVLSRSMRDRRAVARYAGLTGSPDESGTKRREKGLARSGNARVRRGMIQLAWRFLMFQKESALAQWFRARTETARGTRKTMIVALARKLLIALWRLVREGVVPDGVVLRPAQ

SEQ ID NO: 429793 - protein, 339 aa, unidentified
MEVYAAIDLHASNSFLAVVDREGKRVFKRRLANDSAILLNALEPYRKGMQGIAVESTFNWYWVVDAMMEAGYTVHLANPAAIQKYKGMKHSDDKSDAVWLAEMLRLAILPEGYIYPREVRPVRDLLRKRTHLVKLRTSLINSLQNIVVRSTGVKIGAKKIKQLTNDLVSPLLEQDEDLAVTGRVSKQTIDFLTRQIKKVEKQVQGKIELKKEYTSLTTIPGVGTILSLTIILETGPITRFPAAGNYASYCRKVPTRWTSNAKSKGSGNKKNGNKYLAWAFSEASELARRFDPEIRAWFNRKVSRTSRMCAHGALGHKLARAAYYIMRDQVPFESKRLIG

SEQ ID NO: 429794 - protein, 362 aa, unidentified
MMIIGCDFHPSGQQVFGIDSSSGEVFADGWIAHGGQEVDQFYSSLPAGAVVGVEASGNLLWFERKLAGYGHGLRIGDAAKIRAQETRKQKHDRRDAELIARLLAEGHFPDLRWVPSLAERDLRQLLLHRDKLVRMRTQVKNQLQHIALNQGQQKKRQLWTKAGRGWLEQLLLEPWTARRRDDLLRWLDHLQAECARLDEAVRQAAEANAEARLLMTHPGVGPVISLGFVLTIGPRERFQRSRELVSYLGLNPAEDSSGERRRWGRISKQGNGFLRRLLIQGAQTAARGDAELQRQYRRLAARKHRAIAKVMVARKLAVRLFWMRKTQQTYPELVRRRGSSSHFGVSTTDRLSERPASPQVQP

SEQ ID NO: 429795 - protein, 356 aa, unidentified
MSEGSWVGLDVHARSVVAGVIDVGSGEVRSLRLPPGCDATVAWLTTLPAPVRVVYEAGPTGYRLARACAEAGINCVVAAPSRIRSAADRVKNDRRDAERLARLLRLGEITPVRIPTLEEEAARDLVRAREDARGDLMRARHRLSKLLLRHGLVYDATAWTRTHDAWLRRQRFQGGPLAIVFDECYGRMIDAKSRRDALDKAITELAATPPYVDVVSRLVCLRGVSTLTAFALTVELGDWHRFRPESLGPFLGLTPSEHSSGERHRQGAITKTGNSHVRRLLIEAAWHQRSPSRRSITLERRRDGKPLAVQAQAERSARRLHARWHALEARGKPRTIVVVAVARELAGHCWALATME

SEQ ID NO: 429796 - protein, 340 aa, unidentified
MFTNFVGIDVSKSKFDLALIKGQDKDHVIQGVFNNTHKGINAMSKFLEKEHHVQLSETIFCMEFTGVYCRPLTSFFVDQDCHVWIEMPVNIIRSLGLQRGKNDRVDAHRIALYAYKNRDDIKLWKPQRDVILQLRDLLALRERLITSQKALTNPIEELIAMGGKSAAARVRKNCQKTLSSIEKEIEQIDKELDGTIKGDPHLKELFQLATSVPGVGKLTALFMICFTNEFSMYTNPKQLACYCGVAPFEHSSGTSVRGRTRVSHMANKVLKRMLHMGAMSVIKRDPELSDYYQRKVGQGKNKMLVINAVRNKIIHRLCAVIKRGYGYQSEIIFKERLVLS

SEQ ID NO: 429797 - protein, 388 aa, unidentified
MSKPFDLSKSLTALDQDSTLIVVIEMSQSSWLVAARAPGLARDPLKKLPPDPEQLFKLMDRWREESRRAGRVVRRVCVAFEAGRDGFWLARLLRQHDIEAYVIHPTSIPVKRDHRRAKTDRLDTELLMRAFLGWLRGEADHCSMAAIPTLAEEDAKRPTRERESRVNARSRLVNRMKGALARLGIRGFNPKLRKAAEKLEELRTGAGEPLPPNTLAELRRDMAQLRFVADQIKQIEKAREARLEKAPREGAHPMVLMLASIKGVGLETAEMLVAEVLSRKLRDRRAVARYGGLTGSPDESGSRSREKGLARSGNARVRRGMIQLAWRFLMFQKESALAKWFEARTANGPRGVRKTMIVALARKLLIDLWRFVEDGTVPVGVELFDSRA

SEQ ID NO: 429798 - protein, 430 aa, unidentified
MEQVNGIRLREFRQVKKEIRGSTEHLIVGLDIAKEKHNAFFGTAAGRTLHKGMFFDNTYEGFQKLLIQTDALKVQHGLQKVVFGLEPTANYHKPLGEYLIKGGHLVVLVPAAATSKNRELLDGRWDKHDTKDSANVADLIAQGKCLYYDCPGEELRSLRGLLSLKKRLKKEEHGLRVRIRNQLLAQYFPEMDQHFGSVASLNVVQRCLDPSLISIMEYDEFCRTVAPGKVNLAQQRRLTQIWRAAKQSIGCSVGEAVSIEAQIMVTGLNRVRETIKTVDDKIENICLGFPEYSFLLTIPGFGPDVSSKVLAAIGDPHRFTSGKQVLKMAGFDLCASRSGKTSQSATPVISKHGKGDLRYALYQAAIISSLKYKEFIVYHTNKIRGREREKGIGTKMRVKLAAKLLIIAWTLMKKKEPFDPKYLNQGDGKV

SEQ ID NO: 429799 - protein, 399 aa, unidentified
MPANLRPHSNRCFGVSEQPVLYLALELGWDSWKLAFTACPGPAPRRREMAARDVTALTREIAEAKRRLGLPADCPVVSCYEAGRDGFWLHRWLLAQGVENVVVDSSSIEVNRRQRRAKSDRLDAAKLLSMLVRYAGGETKLWSVVQVPTVEQEDARQLHRELMTFQQEATEHTNRIKSFLATCGLALEIDRHFPQKLKELRQWDGTPLPEALHQRLLREFERLQVVNRQARQLEQQRAKEVREREGSPAIDKVRKLLGLKAIGIGSSWLYVQEFFGWRKFKNRREVGSLSGLAPTPYASGQTDRDQGISKAGNKRMRWMAVEIAWGWLHFQPDSELSRWFQARFGCGSSRQRRIGIVALARKLLVQLWKYLETGVPPAGATLTDWRPKARLTTRSIKAA

SEQ ID NO: 429800 - protein, 370 aa, unidentified
MEKRSMFVGMDVHKESIDISLAEEGRDGEVRHYGGITGDLEALAKVVKALRAPTRRLRFVYEAGPCGFGIHRYLTAQGEACVVVNPSSMPKRSGDRIKTDRRDGDALARLHRAGELTAIYIPTADDEALRDLVRAREDAVGLSTQAKHRLKAFLLRQGRRYPGRAGWTQAYRRWLADLSFPLAPQHIALQEYRDTIDETERRVERLTDQLRQLTPAWRWAPVVDALQALRGVSFVTAVGLVAEVGDIRRFDHPRQLMAFLGLVPSEYSSGPSVRRGGITKAGNPHARRLLAEAAWAYQGIPRIGRQMLSRQEGLPKAICDIAWKAQLRLTSRFRKLVARGKAKPKVATAVARELTGFIWAIARDVPAPPA

SEQ ID NO: 429801 - protein, 344 aa, unidentified
MTIVAYGTGEVKQMNGFVGLDIAAKTFEMVVREGGKNARPVTFEQTAEGHAKAVKELKALKPRHIIMEATGIYYLDLAVALAQAGLPVSVINPKSFRHFSELKLVGSKTDGVDSALLAEFGERMTPPLWTAPDPTRLALRDIARQINRLTASRTQAKNRLHALRAKSMTLPLLIEDEQEGIALLDRRIERLQQAALALLAESAELTAQLKALCAAKGIAIASAIAILGELCVLPTHLKAPQVSRYAGLDVRLCQSGTSVNRPARLSKAGNAYLRAALYMPAMSAVQYDPRAKAFYEALVARGKKKIQALCAVMRKYLTGLWACFKHNTPFDSTKLFSDCHLNHA

SEQ ID NO: 429802 - protein, 355 aa, unidentified
MCAKKRGSIEDLAVVGIDIGKDTFHLVGFDQSGQLVIRKQIKRLALNATFEQLPRCIVGMEACLSAHFVSRTLRGMGFEPRIIPAIYVKPFNKGQKNDYNDAEAIAEAALRPNLRTVSEKDQDQLDLQALHRVRARLVSRRTATINQIRAFLIEQGITVRSGLRALKNSFETILEQRRDEISPRMRGILIGLYGDWLWLDKRIEDVSGEIEEISRTEENCANIMTIPGIGPMISTAMVAAVGKGEAFDRGRDFAAWVGLVPRQFSTGGRTILGRITKRGSRYLRMLFVQAAKVIMMRPHRWSDFSFGLWLTEAVARMPRNKAAIALANKLARTAWSLLRHGTRFDAPKDAAMEAI

SEQ ID NO: 429803 - protein, 373 aa, unidentified
MKYSTVYVGMDVHKESFSLCCYTNEKEKSEYPQKVDGHYSKVINYIEAMRFHYGDDALFICGYEAGCLGFTLYHQLTDHGVKCVILAPTTMLQQKGKRKVKTDKRDAALIARCLAHHDYSPVHIPTEQDEQTKEYIRMRDDHKQALKKVKQQILSFCLRHNYRFNETSHHWTQAHLKWLRSLKPEGVYEETLKEYLLTFDNFTDKIERMDKRIEELASGEAYKENVHKLSCFIGVKTVTALAVLTEVGDFKRFASAQHFASYIGLTPGEHTSSDDRNQLGITKAGNRHIRMLLVEAAQGYGHGQIGYKSKALKDRQYGNTPEVIAYADKANERLRRRYYRMVLKNNKKSNVAKTAVARELACFMWGMITGRVA

SEQ ID NO: 429804 - protein, 368 aa, unidentified
MAKLAKVEAFFKSVNFTSGDEVFVGVDVHKKSYHVALLLNDMPAIDFRMNAVPKKLNEKLQPMAQSIKKIVYETGPTGYGLARNLIKNNLPASVVATSRIPRLVSGDDKTDRLDSIKLAQYAAKGLLSPITIPTPRQEADRQLYRMRHRQSLQFAKVKVQIKSFLLMHGIIEPQGLASWTIASVQGLRSMKLINTLSLSLDELLGDYDYFKNRIKVLNKALADNLDKGVLGQRMDLLKTHPGVGSVVACQFATELFHYKDFSSTRQLYKYLGLSPRVSQSGERSSSGSINKAANGRLRNNLIQAAWIWVRTDIEAKKCFYRICDNCGNIKQKAIVAMARKMSGHLWAMLMNDQPYDKNKAKCRHNNER

SEQ ID NO: 429805 - protein, 356 aa, unidentified
MKVTTVGLDLAKNVFQLHGVNEWGKPALKKQLKRQQMAEFFAKLPACLIGMEACASAHYWARKLQSFGHTVKLMAPQFVKPYVKTNKNDAADAEAICEALTRPNMRFVPIKNVEQQSVLALHTVRQGFVKARTAQANQIRGLLGEYGLVIPQGIGHITKRVPALIEDGANELPGAFRLLVDRLLEHLKALDRQVSELEAQILQWHRQSQASSQLAGIPGIGPITASALVATMGDAKNFDNGRQVAAWLGLVPRQHSSGGKQTLLGISKRGDCYLRTLLIHGARSVIHWEGKRAEANRSEPCSWLAGVLKRRNKNVAAVALANKNARIVWALLAHDRAYRADYVSVRVPLAAQALPG

SEQ ID NO: 429806 - protein, 323 aa, unidentified
MDVVYSHVCGLDVHKKNVVACILTPNEKEIRTFSTMTDDLLQMVDWIKSKGCTHAAMESTGSYWKPVYNLLETEEIQTLVVNAQHIKHVPGRKTDVKDAEWIASLLRHGLLRGSFIPPRDQRELRELIRYRRSLIDERAREVSRIQKVLEGANIKLSSVASDILGKSSRSMLEALIAGNVDPEALSELALRRLKNKKQDLQRALKGLIGPHQRLMLKTQLKHVDELDALIEQLDAEIKRRMLPFEEDLERLDTIPGVARRTAEQIVAETGTDMSRYPSAAHLCSWAGLAPGNNKSAGKQKSGRTTKGNPKLRRALVEAARAAA

SEQ ID NO: 429807 - protein, 360 aa, unidentified
MSTATAPTPEASTGPDVVVGVDTHKHTHMAVALSGNGGLLGSLKLDAQRSGYQELMRWAAEFGSNPVFAVEGTGCYGAGLCRALQTAGLEVVEVNRPDRSTRRRLGKDDTIDAESAARSYISGKATVIPKAGDDLVEMIRMLKVVKDSATDNRTAALNQLHAIVVTAPAVLRERLQRLKGKELVECCSGLRSGEISTPLAAAKMALRTLARRIQQLDLELKETVAQLDRLTMQHCPELRNTYGIGVDISATLVVAVGDNQERLKSEASFAALCGVNPLPASSGKVVRHRLNRSGNRQANCALHRIVICRLQRHQQTRDYVERRTAEGRTMKEIIRCLKRFVAREVFGILRGGPAVRTAAA

SEQ ID NO: 429808 - protein, 467 aa, unidentified
MSPRSRKSKDRKTRAGRAPKSFETLEPRAAGIDLGAREHFVAGPPHPDGAPNVKSFGTTTPELRDLADWLAGQGVVSVAMESTGVYWIPLFEILDARGVEVLLVNARQVRSVPGRKTDILDCQWLQMLHRCGLLRGSFRPADGICALRAVVRERNGLVAERSDWVRRMQKCLDQMNVCVHHAVSDITGFTGMAIIRAIVGGERDPAALARLRDPRCRKSPEQIARELTGNWRDEHLFNLTQALRMYDHICAVIDEYDARILSIVESLQPDGNRDLAVPDHASQSKARSIRKRGGEPLREALYRIGGVDLTSIDGISVDTSIVVLSEIGWDLSAFPDEQSFVAYLRLAPNLAVSAGKKVKAKCPSTTCTRISAALRMAALTLRHSDTALGAYYRRIARRKGASVAVFSTARKLAQIIFRMLRYGQQYVDVGTAEYEARFRDRQIKHYTQSLNEMGFKVIPMPEAECAS

SEQ ID NO: 429809 - protein, 396 aa, unidentified
MTLFVGIDVAKHKHDFSVIDSFGTIHMNHKQIKNSREGFTELQIILESLRKETNEPSIQIAMEDTGHYCFNIIRFLRSCGYPTFSYNPILIKEFAKVDSLRKTKTDKKDALTIAKKLLSDLDPSFHEIDPSHQELKFLTRHRSRTTEKRSQLKVQFVRLLDILFPELATIVGKPNLHSQYIYDMFKTYPSPKKISRSREKTFFQVLTSHRGPQLTPETIDKIKNTAKQTIGFSSASLELELLQIIETIEFYTTQLIKIDEEIDHLMAKINSPITSITGIGNRLGSVILAEIRNIHNFKSPGQLLAFAGLEPSVFQSGQYNREGYMVKRGSTFLRWALIQAAKLAARFSPTFKTYLHKKLAEGKHYSVAITHVAKKLVRVIFHLLKHQLVFEEIKLL

SEQ ID NO: 429810 - protein, 328 aa, unidentified
MNLAGIDIANESFEICLRCGDTIAHRGFNNTPAGHRQAIRWLRRRRQVARVCLEATGIYHLQLSLALAEADGIELMVVNPRASRRFAEAQMRRAKTDKVDAATLLSYLERMPFTPWQAPAATVLELQSLAHRLAQLQKEITRERSRLHAAERAGPHTRLVQQDIRAHIRQLKARLERLEAHALDWIRQQQALSENLDLIDTVPGFAEHSAFKVLAEVSPLADDMTAPQWVAQAGLDPRPNESGTSVHSPRRISKQGNAKLRAALFFPAMVAIQHDANVRAFYQARLERGATPRQAQVAVMRKLLHAIWGILKRQQPWDGERFYRLSTA

SEQ ID NO: 429811 - protein, 366 aa, unidentified
MSTSLLDRGFVHLGLDVSKDWISVGVLRPDEQVPDTEKVFHDEESVRRLIRRVGRPAQLRACYEAGPTGYELHRLLTSLGVACDVIAPSMIPRKPGDKVKTDKRDCRRLARLHRAGELTAVRVPTPAEEGVRDVCRARQVAVEDLRRARHRLGSFLLRHSVVWRGGSNWSLRHRQWVANRTFTDPAVRSAFSFYLAEVTTREASLDAMDAELAGWCSNDLFADAVARLGAYRGIDALGALTIAVEVCDFRRFPSAPSFMGFCGLVPREYSSGATTWRGEITKAGNVHVRTQLVESAWAYRFQPNVSANLRRRQQGVDPAVAARAWAAQLRLCRRFRHLAARKQSQSTVTAAVARELAGFVWAELTT

SEQ ID NO: 429812 - protein, 438 aa, unidentified
MSNKVIFNLDELFISVGIDVGADFSWMSIALPNQQFVGKPYKILHNSIDSLTTAVSKIKEAEELYSLESRIFLESTGIYHYPLFCYLRDKGFNCSVINPIITKNSTNINIRKVHNDRFDSKKAALVGLKPDLKVSLMPSDLALNCRNLCREYYDLMDNRSAYVNKLQGELRMAFPQYLGIFSKVTINTSLTLLETYTSPSAFLKADKQEIIDIIKSTARFGLTYAQNKYNAIIQAATDANQFGYIIDSNIKRIRLYISFIRKYDEEINNILESLHELVDANEDADFVKQIHLIETFKGAGFLSAVSIMGEIGDFSAFSKPKQLFAYFGLDPAVKQSGKFEGTKVQMSKRGSAIARRVIHTLTLQSISISRNGEAKNPVLREYYLKKCDSKPKLVAMGAVSHKVCNMIFAILRDNKSFEIITPQEHIKQYNASKCDMAA

SEQ ID NO: 429813 - protein, 456 aa, unidentified
MPRDRTRSKPAGLPIIHPFAAGIDIGSRFHVVAVSPDLSDEPVQTFQAFTGDLQRMADWLIATGTKTVVMESTGVYWVAAYEVLESRGLEVVLANAREARAVPGRKSDVNDAQWLQRLHACGLLRASFRPGRDIAELRSYLRARERHTDYAAAHIQHMQKALTFMNLQLHHVISTVTGITGMRIIRAIVAGERDPDKLAAMRDVRCKETVETIRNALIGNYQPEHVFALKQSLALYDFYQRCIDECDAEIERAVALLNTERPMPEVPLPKAKHRTKQPSEPNFDVRSAMFQLAGTDLTQIHGIGPFLALRLIAECGTDLSRWPTAKHFTSWLTLSPGCKISGGKVLSAHTRKTSSRVTVALRLAAVTVGRSNTALGAFYRRLAARIGNAKAVTATARKIAVLFYNAMRFGMNYRDPGADHYEQQYRDRVIKQLHRRAAQFGFILQSQDLPESECVS

SEQ ID NO: 429814 - protein, 338 aa, unidentified
MAIIAIGIDLAKNVFAVHGVDAAGKAVLVRPAVRRDALLELMAKLPPCLIGMEACSGAHHWARQFQQFGHQVRIMAAKFVAPYRLSGRRGKNDAADAQAICEAVQRPQMRFVPIKSEDAQGRLSIHRVRQGFIEQRTATINRIRGLLSEYGHVLPQRAEVVRREAGQCLEDLPGWANTAIGDLLSEVHRLDQRIAEYDRHIETMAKADDRCRRLMSIPGVGDKTATALMASIGSAHDFKCGKQLAAWLGLVPSQYSSGGKQRLGRITKAGDGYLRMLLILGARAVVANAKKKDDRLSRWVADLAERRGYWKAVVAVAAKNARMAWAMLSKGEAFRPLT

SEQ ID NO: 429815 - protein, 371 aa, unidentified
MGKAIFLIKRRVTFVKERRDYILRNEKVFVGLEDSKKTWCLCVRSGGVIVHETSMPAQYEVLRNYFHNKFPECQIQVMYEAGFRGFELHDQLVADGWECVVTPPHTVTEEKVQRKKNDRTDCRRLAKNLENGDYRKCFVPDKELREDRQISRTYGQVQADIKRVRNRIRRMLEFHGLDNGLPAGRWSGAAYTRLRQHLAEIEMSDSLRLSFETMFKELEYLRQLKKGLLLQLRRLARSDRYKRSVELLKSAPGIGMLTAIRLTLEWGEVNRFGRKEEFASFLGMVPSDYSSGEQERRGHITRQGNRSVRGWLVESSWVAIRYDPVLLEKFRRVLRNCGSKKKAIVAVARKLALRLRWALLSGQPYTVGVVE

SEQ ID NO: 429816 - protein, 392 aa, unidentified
MYIVGIDIGKNHHEASIVSPEGKQIGRSLRFATTHKGADSLMSFIFKNIGNSPCVFGMEATGHYWYPIYSFLKAKGYTICVINPIQSDSLRKMYIRQTKNDSIDSFFIAEVIRFGQFGTTSMADENILAMRQLCRYRDSVISSRTEIKLRIGTIMEQIFPEYEKQFSSLWVSTSMGILEKYLTPENIENAPIDELFEIIKDKSHNRLTKAKAISIKEAAADTFGIKIAQDAFSFQLKQLIDRMNFLDKQIEALDIEIMKYYEQFDCYLHTIPGIGMIATATILAEIGDIHRFKSSSALVAFAGIDPTVRQSGEFNSTHNHMSKRGSPYLRHAIFLAATTCSFHNSPLNAYYKKKRDQGKHHLTATGAVARKLTTVIYAVLRDSKPYEPKKFC

SEQ ID NO: 429817 - protein, 349 aa, unidentified
MTIVEPHRAVIGGVDTHLDLHVAAALDAVGGLRGVEEFATTKAGYEELVAWLTSFGSVLRVGVEGTGSYGAGLARFLLDHDIDVVEVDRPNRQERARKGKSDPVDAIEAARAAQSGRASGIAKTTDGAVEAMRALLVVKRSARNQCTSARVQMRHLVFTAPDELRSRFFGLTKVELVKQASALRPREGGDAVAYATRIALRALARRVQHLTAEITQCRSLLRPLVEATAPELLGLYGVGVEVAAILLVAAGDNPGRIKSEAAFAHMCGAAPLEASSGKVTRHRLNRGGNRQANHALFCVVVTRMGSDPRTIAYVERRTKEGKSTSEIVRVLKRYVAREVFKHLPRPQAG

SEQ ID NO: 429818 - protein, 330 aa, unidentified
MTYVGIDVSKDTFTVAYSSDKNSKTKTFKNTVKGIHEFIQTISKEDTHCVLEATGNYSALLVYLFSEAGITTSLENPLKIKNFARVMLSVTKTDDVDARLIAMYGEKMNPSPYKLKDESILVLKQKRTVLRQLKKQLVATRNLKESMEILPLVDSTCKRTIEKTIIFLEKQIRNMEENITSLATQEYKKQMELLTSIKGIGVTLAAALIIATGGFTYFDNAKQFTRYLGLSPTYQQSGTSVNVKGHINRNGDSTLRSQLYVAAFASLRCNSECKECYDRLRSNGKPGKVAVIAVANKLVRQAFAVVTKEKEYVDGFVSEKPQKLQKHISA

SEQ ID NO: 429819 - protein, 396 aa, unidentified
MATSIARQAGRDNEIVLMRGERIEVGVDVHKRSYSVTFWSERRQAVVSRWTQPADAAGLIGRLGRYEKQIGRVVYEAGPTGYTLARALREAGFRAEVVAPSRTPTSSGKEAKSDRLDSRKLAMWSAKGLLQPVRVPTLREEGDRQVFRMRSDLVAKRRRIKQQIKSFLLQHGIEEPEGLTYWANYGVQALRQMKLSAPLRLSLDLLLDDLAHYDGQIKKVEAALRKTARAIRHRASVQALRSVPSVGDVTSMAMRTELFAPERFSNGRQVTAMVGLAPFVSRTGETVREGSLMKCGNSRLRTILIEAAWRWRAQDPWAAQTYARLLGNTGQKKKAIVGLARRLLIILWRISVTGEPYRPPPVEPPQAKKGKPHRLRQPNNTTPSTRRRRPPASAPQ

SEQ ID NO: 429820 - protein, 341 aa, unidentified
MQIAVLGIDLGKNSCSIVGLDVRGAVVLRRRMRREGIIKLAAKLKPCVAAIEACCGAHHLGRVLRAQGHEVRLMSPEYVRPYVKSQKNDDRDAEAIAEAATRPTMRFVELKSEEQLDMQTLHRARDRLVGERTALINQLRAVLLERGIIVAKGRRKLERQLTEMGTQVEALSQRMRMLIRDMRAQWYELDRRIAEFDKELTEWARNDEAAHRLRTIPGIGVLNATALVAAIGHGESFARGRDLAAWLGLVPRQVTTGGKPRLVGISKRGNKYLRRLLIHGARAALPTLLESPTPLGGWLRGLIARMHKNAAVVALANKLARIAWAVLRHGESFSIALSTTA

SEQ ID NO: 429821 - protein, 356 aa, unidentified
MDGLKHQKEKRSMDHFAGLDVSVKDTSVCIVDDTGKIVRELKVASEPDALLAVLTDPAYHFKRIGLEAGPLSQWLFSALAEADLPVICVETRHMRAVLKAQINKTDRNDARGIAQMIRVGLYRPVHVKTLRSQKLRMLLTHRQLLQSKAIAVDNDLRGTLRNFGLKVGIVGAARFEARIRELVQGLPDLAVLIEPLLVVRRVLREQIAVLHRRLLAVVRDDEVCRRLMTAPGVGPVVALTYRATVDVPARFRKSKSVGAVFGLTCSRDQSGERDRAGAISRCGDKMMRAMLYEAAQSMLVRSTRWSWLKAWAMQIARRRGKKKAVVALARRLAVILHRIWVDGTEFKWTRETVPAA

SEQ ID NO: 429822 - protein, 361 aa, unidentified
MKKHSRELPTMEAVSTKPEMTVGLDLGDRYSHYCLLNADGLVIEEGRIQSSESALRRHFEGEACLRIALEVGTHSPWVSRLLTGLGHQVIVANARKIPAITGSESKNDRNDAEKLARFAAYDPKLLSPLEHRSEQRQLDLNLIHARATLVRARTMIVNALRGLVKSAGGRLPASSTEALPNRAPAAIPPALTAVATPLVEQIAQLNAQIDGMDKQIEKLGAKYPEIPLLRTVPGVGPIVAAAYVLTLDRPDVANNRSAGAFIGLRPAQSQSGDADPQRRIAKTGDSCLRSLLVQSAQYILGRFGPDSELRRWGLKLAATGGKRGKKRAIVAVARKLAVILHAMWRNNQRFEPFPQQAAKAA

SEQ ID NO: 429823 - protein, 368 aa, unidentified
MNDLIRIGIDTSKSVFVLHGVNAAEQPVLRRKLRRRQMGEFFAKLPPVQIGIEACGAAHYWARELAALGHEVRLLPAQYVKPYVQRGKNDAADASAICEAMSRPRMRFVPVKTAEQQAALMLVGVRDQLVARRTQLSNMIRGYAAEFGVTAAKGLDKIEPLLVRIAREPGVPEKAKALFALLGEEFVALKPKLRKLEAELQSWHRHNELSRRLVEIPAIGPIGSALLTMKVTNPHAFRCGRDFAAWVGLTPKDHSTAGKQRLGVITRAGDETLRRVLVVGATALIQQARKGRGNPSPWLIGLMRRKPPKLVAVALANKTARIAWKLMVSGERYDRARSGFVPPAGSLAPGARRQGRGAPPAAVACGQP

SEQ ID NO: 429824 - protein, 342 aa, unidentified
MDHFAGLDVSVKETSICIVDDTGRIVREVKVASEPQALLQVLKNPIYGFRRIGLEAGPLSQWLFSALAEAELPVVCVETRHMQAVLKAQINKTDRNDARGIAQMMRAGLYRPVHVKTLRSQKLRMLLTHRKLLQSKAIAIENDLRGTLRNFGLKVGMVGTVKFETRIQELVENFPDLAVLVEPLLIVRRALREQIVILHRRLLAIVRDDEVCRRLMTTPGVGPVVALTYRATVDVPARFRNSKAVGAVFGLTPTTYQSGEIDWSGRISRCGDEMMRVMLYEAAQSMLRSKKWSWLKAWAMQIARRRGMKKAIVALARRLAVIMHRIWVDGTEFRWTRETAAA

SEQ ID NO: 429825 - protein, 364 aa, unidentified
MKRKVYVGMDVHKETIQIAYFTSNSKEILKEQQIKHNEVQIKKFIKKLKLEWNEIHCCDEAGVTGYPLYRYLKSLGVNCILVAPGKIPRQNTDKIKTDKRDAIKLARLMRSGELESIHVPSEEDEAVRDYLRSRDSLRLDLGRNRQRLMKFLLRKDIKYSTTKYWTVSHYKWLNNLHFNNEILQETFNDYYSRVRVQEENLKSMDKKIQEIAESEPYREKVGILRCFRGVDYLTAMFLLCEVNDFKRFKTAGSFMSFLGLVPGEYSSGSKRKQTGITKTGSPRLRRILTEAAWQHRFPGTGSKIITARRSGQPALVVALAEKASLRLHKKFRNLQLRGKTPQVMITAVSRELSGFLWAAMNLVA

SEQ ID NO: 429826 - protein, 347 aa, unidentified
MDTIGLDLHQRESQLCILGEDGGVSERRIATSRERFSAVLGGRPPAQVLLEASTESEWVARHLEALGHAVVVADPNYAPMYATRSRRVKTDKRDARTLAEACRLGAYRPAHRLSDARRHVRAELAVRDALVRTRTRYVALVKALARRDGLRLAQGEPERTAAKLAALDAQGAVSPTLRAEVAPLLAVLAPLNAEIAAADQRIGAVAQHDPVVQRLATAPGIGPITAAAFVATVDDVARFPSAHQLEAYLGLVPGEKSSGEKQRRGRITKAGNARVRWLLVEAAWRVLRSRSPEAEGLRTWGQRAAVRRGKGVAVVALARRLAGILYAMWRDAAPYRPARRPAAARAG

SEQ ID NO: 429827 - protein, 379 aa, unidentified
MRRVCGLDVHKDSVFMCILSENGEKVQEKYGVLTKELDTLRDVLVANNVGEVAMESTSIYWMPIWRVLESDFDLKLVNPYFIKQLPGKKSDVKDAEWIATCLQKELIKGSFVPDAAIQRLRQYNRRIFDLNKDISYKLTKLDMALQRCNIRISNYVSRTDSKSYKKVVDKLAGGITDPQELEKCIHGRTVNRFSKDIITASLTGVINETDIDIMSQLKSEIDLAERHKSECLMKMREICMENYPKQLENIKSMPGVKEQSATAIIAEIGVDMKMFLTAAAIVSWCGLRPRNEESAGKIKSRKIVHGNKYLRRTLIECAWAASKTQGCFYNKFSYTQVSIRKKNVLKVRVAVARKMLVTIWNILSKGEAYREILDCTLPQ

SEQ ID NO: 429828 - protein, 412 aa, unidentified
MSHGHVMWVSREAAFRSTDDWKDTTMPSAISPPKAVLGIDVGKSSHWACLVTREGEVALNRRVRNSEGDLDGLFSQVACDTIVVVDQCRNIGLLAISRARLAGLGVAYLPGLAAHQAARLFAGDAKTDERDALVIAKTALGIPDALLPVPEPDEALEAARSLAAQRSHMVTCATRDKNRLRSILLESCPAFEALADLGDRHWLNMLEKLGGPWGCIDAGKPAFGAVTKGANRARMDAAWNAAMASTRPSKRRVDAENPQVRMLARRIREALEEADRIDREITALLAGDGTYECLVTIPGIGPRTASELVIGINIEDFPDHDHLASYCGIAPRNRRSGTSISSVSASRQGNRRLKNLLIFSCNSLVRSENRFGEYYRACRGRGMCHGEALKAVARKRLKVIYAIMRDKVPYSA

SEQ ID NO: 429829 - protein, 354 aa, unidentified
MPRHRSDLEAVATIGVDIGKNTFHLVGLGRNGAIVLHQKLSRRQVEARLANMPPCLIGMEACVGAHHLSRQLKALGHDARLMPARYVRPYSKGQKNDFRDAEAIAEAVLRPTMKFVAIKTIEQLDLQALHRVRERLVCQRTSVINQIRAFLLERGIAVRPGLRALRTEIPIILAMTDKLSPRMIHVIEALCADWRHLDARIETVSEEIKTLSEQDDGAKRLMTVPGIGPIISTATVAAIGKGDMFSKGRDFGAWLGLVPRQMSTGGRTILGPISKRGNRYLRMLFVQAARAVLLRPQSWVKHGLKSWIEAAARRLNRFKLAIALANKIARIVWGVLHGGRNFEVRTLRPALQAA

SEQ ID NO: 429830 - protein, 367 aa, unidentified
MEAVTSQPHTPAAIRTDLAAIFVSSELSRSTWLITSLSPGNGEKMSKHSVGGGDVAALLHRFAQLQEKVRSRTGNQVPIVSIQEAGLDGFWIDRVLKANGIESYVVDPASIAISRRRRRAKTDKLDGEALVRALLAFKRGEPRVCAMVNPPSPEEEDRRRICRERKVLIAERVKHVNRIKGLLFGQGISGYEPLRKNRRKQLDELHTGDGRPLPTHLKTQISRELDRLELLLEQITAVENERDTLLAAQKDSVAATATLIPAGAMLCDVKGIGLELAAVLWTEGLFRHFDNRRQVAAYAGLAPTPWQSGTIDHEQGVSKAGNPRLRTTMIQLSWLWLRHQPQSALSLCLRLACNPAVGARRRARSWR

SEQ ID NO: 429831 - protein, 374 aa, unidentified
MDVHSTNFTLCAFEPVLDGEDRIFANIEVDPDYKYVLQFIEMLKKKLGSSDNYSIECGYEAGCLGYSLYRQLTKAGVKCTILAPTTMLSQQGKRVKTDARDAVMIAQCLAYNGYRAVHVPTEKDNSVKEYLRMRDDHKIALKKLKQQINAFCLRNGQQYSGNKWTISHLTWLRKLELPELYRETLNEYLATYDEETAKIERFDKRIEELASDTDYNDHVRDLGALLGIKTHTALSLIVETGDFNRFAKGNTYAAFLGLAPGESSSGEHICRTGISKAGNAHLRTLLVEASRSICKGTVGYKSKALRARQAECSAEIIAYADRANTRLRSKYYRMTRNGKKKNVAVSAIARELACYIWGIMTGRTEMKNNGQKTA

SEQ ID NO: 429832 - protein, 342 aa, unidentified
MYYIGLDVHKKTISYCIKDVSGQIQREGTIPATRSDLDSWMKTLPKPWTVAMEASIFTGWVYDHLLPHAAQVKVAHPVMLRAIAAAKKKNDRIDAGKIADCLRCDFLPECHMVSTEIRDRRRTLRYRHLLVRQMVQMKNRVSGLLLETGVSHNKQRLHKVKYFRELLATNQEVDESIRPLLKLSRESIERLQKTDYALVSSLQRDPLLAERIKNLRTVPGVGPITALTWALEIGDVSRFRSVKQAISYCGLCGDEKSSADKVLRTPLSKQRNKHIQRVLVEAAKLAPKNSHELSLVYERAKQKGNANRATIAVARKMVTYLLAVDRGQRPFVALEDFSTAVA

SEQ ID NO: 429833 - protein, 338 aa, unidentified
MALYCGIDLHSRDCWLAILDEKRKVVHETKVGNDLEALLQVLEPYREDLEGIAVESTYNWYWLVDGLEEAGYQMHLVNTWAVKQWEGLKYTDDRHDARWLAHLLSLKILPVGYICPKQERSVRDLLRRRAFLMRKRTSFLLAMRGAFECRTGKRTTSSDVKQWTAEEIESYLDDAIEALGITCLLEPMKAVDDQIRILEKEALTRARLRDEFAPLLTVWGIGKVLGLTVMYEVGEIERFKKVGNFASYCRLVKTARLSAGKRKGSGNARNGNPYLSWAFSEAAHFAVRYHPEAKKYFQRKRSKTNGIIAIRTVAHKLARAAYYVMKDQVAFDPEKAFG

SEQ ID NO: 429834 - protein, 355 aa, unidentified
MSRIKYIGMDVHTATISVAVLDVAGKLIMESVIETKASTILQLIQGLRGDLHVTFEEGTWAAWLYDLVKLYVTKIVVCDPRRNALLKEGNKSDRIDARKLAELLRANLLRSVYHGEKSLRTVKELVRSYLTFGKDLTRVMNRVKAIFRSWGIPCGGKSVYNPRHRDEWLSKIAEVGVRRRAELYYEQLDALVSLRQQARRKLLAESQKHSAWKWLRSIPALGPIRVALLMGIVQTPHRFRSKRPLWKYSGFGVVTHTSADHRYVEGQLERSKKPVSVRGLDPNHNHHLKDLFKGAAIQAATREGPFREFYEALVAKGMRPEMARLTLARKIAAITLTVWRKGVAFDAKYLKPQTA

SEQ ID NO: 429835 - protein, 414 aa, unidentified
MEVIHPRCAGLDVSKRDAKVCVRIASAGRTKAKSTVTTWGAVTNQVLALRDHLIAEQVTLVVMEATSDYWKPFYYLLEDGPFEVMLVNARHVKNLPGRKTDVSDAAWLAQLGAHGLVRGSFVPPEPIRQLRDLTRTRTTLVRARAKEIQRLEKLLEDAGIKLSSVASDISGVSGRAMLEALIEGQRDPVVLADLAKRRLRSKIPELTEALTGRFSEHHGFLARVHLDLIDNHTRAIEELTGRIEVVIEPFRHVRDLLVTMPGFSTLVADVIIAETGADMSRFPTPGHLASWAGTCPGSNESAGRIKSTHTRPGNPYLKGALGVAALSAARSHDTYLAAKYRRIASRRGPVKAIVALEHAMLIAIWNMINTGTIYRDPGGDFYARLNPDKARHRALDQLHKMGYSVMLTPLAEAG

SEQ ID NO: 429836 - protein, 319 aa, unidentified
MAQNDLVVAGIDVAKDKVDVCIRSQSLRRTFASTAEGRRELASWLRRHKVGKAVMEASGGYEREWAKALRDARIEVRIVDPKRVRSFAQSAGRLAKNDTIDAEMIAWFGETFDEARGQAYDATREQLHQMVNARQALKEMQAKLESQGEHAVPAAVQRMHARILKTIGVELVKIEAAISAMILATPRFVELAEIIESVPGIGRTTSAALIAAMPELGQANNKIVAALLGAAPYDDDSGRRRGERHIKGGRRRTRNVFYMACLGAATQHNPVLKAFYGRLVAKGKEKKVALIACMRKLICILNVMITRRQKWDASRYALS

SEQ ID NO: 429837 - protein, 400 aa, unidentified
MISVGIDVSKGKSTVCVLKPYGEIVCRPFEMQHVEKDLEAFHNLLQKLDGEIRIVMEATGIYHLPILIFFHNKGYFVSVINPFAMKKYAKDNSIRGAKTDKLDSIMIANYGIEKWFKLQRYEGDEEIYAELKLLGRRYRYYMELHVKALQELTHILDYVMPGIKKLFSSWNEANGKDKLSDFVERFWHFDLITSMSLETFTDEYLVWAKEKKYHRSRSKAETVYELASSGIPTLPSSTPSTKMLVQEAISVLRTVDSSLSLIVTRMQVLAKSLPEYSTVREMGGVGDVLAVKLIAEIGDVRRRQNEKALIAWAGIDPPPYESGQFIGSKRKITKRGSSTLRKIGYEVMRVLKSHPAPKDDAVYNYILKKEGEGKSKKHAKIAGLNKFLRIYYARVIAVYQ

SEQ ID NO: 429838 - protein, 348 aa, unidentified
MQAITIGLDIAKNVMQVHGVDASGAVVARKRLSRAKTLDFFRSLSPCLVGMEACGGAHHWARQIAALGHEVRIIPPIYVKPYVKRSKTDAADAAAICEAVSRPHMRFVPVKSEQTQALALIYTTRSLLVAHHTALSNALRSHLSEFGVIAAKGEAGLAALLAIVSCGDPRLPELAREGLNALVDTMSATHKQIGKLDGRIAKIIKGDAACRRLQAVPGIGPVSAGALVALSGDLGRFASGRDFAAWLGLTPRQDSSGDKVRLGRITKAGDKGLRTLLVMGALAIVRYVRGNAAKKIKPRDSAGRASQWLRGLLARRPPLVAAVALAAKTARIVWAMITRGEKYRPAAA

SEQ ID NO: 429839 - protein, 352 aa, unidentified
MRTSQKTAGIITTIGIDLGKNTFHLIDFEQRGAIILQQKVSRGQLERRLAIIPRCLIGMEACSGSHHIGGQLQAAGHDVRLIPAQYVKPFLKGHKNNYRDAEAIAEAVQRPTMHFVAIKTPEQMDLLALHRVRSRLVSQRTGVINQIRGFLIERGIIVRQGVVPLRKALPEILSSQTGRLSPRMIGLIADLTQDWRRLDERIAGVSAEIEALAEQNESCQRLMTVPGVGPIISSAVVAAIGDGAGFKQGRDFGAWLGLVPKQESTGDRTILGKISKRGNKYLRTLFVQAAHVVLARRSSAAMRGLWPWIEQASKRLHRNMLAIALANKLARIAWAVLARGRAYQPRITADAA

SEQ ID NO: 429840 - protein, 365 aa, unidentified
MTQATTTPSTLTIGVDLGDRKSHICVLDVAGEIVEESRIATTPKALRARFEGLAPTRIALEVGGHSAWVSELLKEVGHEVIVANARKLRMIFQSDSKNDQLDAAQLARVARLDPRILYPIEQPVRPARLDVAVMRWWYALVTTRTRLVNHIHGVLKSFGHRVTKYSAASFHRKVTGQIPEELQPALSPLLDILAAIAERILHFDQEIRLLSTKSYPETALLSQVDRVGPITALRYVLTIGDPKRIERSRNVGAYLGLRPRQRQSGQRDPEMRITKAGDRILRSLLVQCAQQILGPLGKDSDLRRWGLQLASRGRVTAKKKAVIAVARKLAVLLHRLWLTGEVYEPLRNTNRAAGVRANEPATMAI

SEQ ID NO: 429841 - protein, 438 aa, unidentified
MRAKCNDDLSTVNFSTIGLDVHKNRLVACAVHVQHDAKGREVHEKEYFESTGTYSGRQRLTGWCSSQNADLILMESTGIFWKAPFRDLEKADLHPVLINPRIFNRGSDKRKTDKSDATWLANLARLGLYRASFIPAEPYRSLRLVQSQIKSLVAERQRLKNRLVKVLDDSGFRFTVAFTDIGGASSQSLIAGILEDAPREELALMIDPLCKKSIEEILDAVSGELSQINKDIVQSILRLIETHTKEIETLEQTVIRELKKCEKVKQNIRLMTTIPGVSEKSAQLLMSMIGPDFVENFSSPHAFARWLGVCPGNNESAGQIKSGRTPHGQRLIKKVLTECAQAACHTKGSHLAVLFGGWKHKGFCKAVMAVAHKLALLIHWVVVNQKPYIDKEFDYTGVFKQDGQRRPRWIRALRRYGLMTLADVEKEKAARGWIIAKA

SEQ ID NO: 429842 - protein, 342 aa, unidentified
MQITTIGLDIAKNVFQVHGIDATEKVVVRKQLRRSKVIAFFEALPPCLVGMEACASAHYWARELRKLGHEVRLMPAKDVKAYVKRNKNDAVDAEAGCEAVRRPTMRFVEVKSAEQQGQLMQHRTRDLLLRQRTQVINALRAHLAELGIVAAQGREGLKELLAVIADEKDDRLPIDARASLMVLAAQLQALQTMIGSIEKRIIAQHRASEESKRVATVPGIGTLGASAITATVTDPSAFRSGRDFAAWIGLVPRQDSTGGKQKLGPISKQGDRYLRRILVVGAIAVLRYAKQNPEKYPWLTQLLARRPFKVVAVALANKMARMAWALLAKGGTYRAPALAAAA

SEQ ID NO: 429843 - protein, 381 aa, unidentified
MPDVIASIAPDEVRLWVALDVHKFSIVAAVLPPEGGGPELQRIETTERAIRRFIAKLGGPEGLAVSYEAGPGGFALWRLLTGMGVACDVIAPSLIPVRAGDRVKTDRRDAKKLVGLQRAGLLRYVMAPTAELEGLRDLLRCRDDLRRAQTAARNRVLKQLLRHGRIYRDGKTAWTKQHRLWVNVQRLDDPLAQRALEQMLIHLDGIERQLQTFDVELGQIACSERWSPQVLTLTRFRGIGTLTALGLIAEIGDFARFSHPSELASWLGITPSEYSSGDQQHRGHITLAGNHHARRLLIEAAWHYRHAPRQPKTGPQPDERAWQAQVRLHHRHRHLTEHGKRATVANVAVARELTGFLWAAMTGQQLRATNPVNTVQEATAV

SEQ ID NO: 429844 - protein, 420 aa, unidentified
MVDVLIERCAGIDIGKDEVVACVRTPAPSGRGRRKQTRTFSSFTGSLEAMADWFTAEGVTDIAMEATGSYWKPVWYVLEERSFALKLVNAHHVKILPGRKSDVLDAEWLAELLEHGLLRGSFVPPPAVRELRDLTRYRKRLIQAHTSECQRIQKALEDAGIKLDSVASDVLGVSGRAMLAALVAGERDPKVLAELAKGVLRRKIPALRQALRGRFTDHHALLIGLSLDHTAHLEAAIARLDERIDTVFTTHTSEASVPFARARDRLDTITGVGKRAAETIIAEIGVDMSRFPTAAHLASWAGVAPGNNITGGKRGSGKTTKGDVWLLDILVQCAWAAARTRDTYLSAQFWKLARRIGKKKAAVAVAHSILVICWHLLTHDCDYDDLGGDYFTRRNTDRQRDRLIQQLHGLGYRVTLDKTA

SEQ ID NO: 429845 - protein, 364 aa, unidentified
MKKNTSALRKRTAKAKRIRAQFPALPEFCYGVDLGDRRSCYVLLNQDGEEIEEGEFDNTIDGLKSVFEDRPRSRVVLETGGQSAWISRAIEGFGHEMLIANARDVGGKGGRKNDRRDAEQLARAGRFDPVTLNPTCVRGEQAQAGLTRLRVREALVRARTQLINAVRSTAKAYGERVRKCSTNVFAERARKDLSVETAAATEPLLSQIESLSEKIREADRALRQAAEAHPAARLLMTANGVGALTALTFVHTIDEPRRFRKSRETGPYLGLIPRQKQSGESDPELGISKAGDERLRRLLVQCAHYILGPFGTDSALRRWGLKYSERGGKNARKRAIVAVARKLAVVLHRMWTTGEKWKAFPAVG

SEQ ID NO: 429846 - protein, 344 aa, unidentified
MDHFAGLDVSVKETSVCIVDDTGRIVREVKVASEPEDLLAVLANPDYHLKRIGLEAGPLSQWLYSALAEAGLPVICVETRHMRAVLQAQINKTDRNDARGIAQMMRAGLYRPVHVKTLRSQKLRMLLTHRKLLQSKAIAIDNDLRGTLRNFGLKVGVVGTMKFEARIKELVENHSDLGLLVEPLLVVRRVLREQIAILHRRLLDIVRDDEVCRRLMTVPGVGPGVALTYRATVDVPARFRKSKAVGAVFGLTPSKYQSGEINRTGGISRCGDDMMRMMLYEAAQVLLLRTAKWSWLKAWAMKIARHRGVKKAIVALARRLAVIMHRIWVDGTEFRWTREEAAAA

SEQ ID NO: 429847 - protein, 410 aa, unidentified
MEVIYKRCCGLDVHKEIVVACLMIREGGKVLKEIRTFLTMTVDLVVLHDWLKAHQVTHVAMESTGIYWKPVFNLLEDFTVLLVNAAHIKTVPGRKTDVKDCEWIADLLSHGLLRGSFIPPEPVRDLRDLTRYRKTLTDERVREVNRLQKFLETANIKLSSVATDVMGVSGRAMLEALTAGSTDPQVLSELAKGRLRKKLPELKKALEGRFRSHHRFMVAEILTHLDFLDEAMERVSQEVSSRIAPFSKIVESMDLIPGINERVAEGVLSEMGVDMSCFPTDGHAASWAGLCPGNNESAGKRKSGKTRKGDQWLRRYLTEAAWAAIRKKGSYLSALYHRLVVRRGKKKAIVAVAHRLLVIIYHMIKDQASYRELGSDHFNKLNAVYVQRHHVKRLESLGFKVILEPLSQAA

SEQ ID NO: 429848 - protein, 404 aa, unidentified
MYYVGIDVAKEKHYVCILDDTKEIACKPFWIYSDILGLRDLIKRLADLSLNNDEFIIGVESTGAFSENLYEYITDADYKVILLNSYQTAKYRDFSTMKKIKNDAIDALVIAELLASDKYKESYISNDDYQSLKVLGRLKSSLMDKIKTIKREISTVMATVNPEITKVFPNIFSKTALETIKAYPTSMDIQAATPKKLTKIFRHIKGNNFNEEKAKFLIELSKSSIYAGRAQESRVLMIRTNIRILELLCQERDEIELQINSLLYSKIETIDSSIENIKTIPGVSDKTISAVLGECGDIKRFTSAKAFIGYLGLYPTQYQSGNSLSVGRLAKRGIPIAKHALYMAAVASVRHNSELNKLFHDKVSLGKSKKEALIIISKKLATIIYSLFKYNKPYQSKRVFIPHR

SEQ ID NO: 429849 - protein, 374 aa, unidentified
MDTIYIGVDFHARQQTICYLKTETGELVTCELKHQDKAAVRAFYAQFRGQVIVGLEASGYSPWFERLLEELGCEVWLGHATEIRRRARWRQKNDRRDAELILELMLHNEFPRLHRPAGQSREVLRMLRYRQKLIKIRTMSKNSLQAIALQSGLAKGSRLFTKDGRQQLGTAEMSPVMQWQREHWLQLMEPLNQQLLETMVWFKAQSKDDVCIKRLRTHPGIGLLTSLCLVHTLQPVSRFRNTRKVAAYAGFDPVERSSAERKCFLGISKAGSRVLRFLLVEAAHTAVRKDEDLKRFYKRLAERRGRPKAKVAAARKLLIRAYIMLRDEIDYAEFRRRAVAARLARRGQGPNVPEVLIGQPASADHRDELTSESQ

SEQ ID NO: 429850 - protein, 353 aa, unidentified
MMLIGVDPHKSTHTATALDPATNSDRGSIRIDASHVGYRKLLDWARQWPEHTWAVENAEGLGHHLAQWLVSAGETVVDVAPAATARVRQLSRGGRRKNDRIDAAAAASVAAMQGDARPVHPETHADSLALLDERRKTLSESRTRSVNQLHALLRELLPGGVPTDLTATKASAVLRGLRAVSGTDRVRKSLAKDLIANVKRYDLQLAENAAAMSDLLDEHGTTLREVPGVGPVLAARIIGRTGRVGRFPTAAAFANYTGTAPVEIASADSTRHRLSRYGDRELNSALHTVAMIQIRMRGTAGRAYYDKKIAEGKTPKEAKRCLKRRLADLCWRTMARDERRTGPTEFNRDASAA

SEQ ID NO: 429851 - protein, 339 aa, unidentified
MTKITTVGLDLAKSVFQVHAADQDGRPVVRKKLRRGQVLEFFAGLSPCLIGLEACASAHYWARELQALGHEVRLIPPQYVKPFVKTNKNDAADAEAICEALLRPTMRFAEVKSAEQQSVLMLHRARELLVRQRTMLINALRGHCGEFGIVVAQGASKVTALIEMIEDPEDERLPALAREALGSLVDQFRMVHAQILGLEKKLKAWHRTNEASRRLETIPGVGVITATALVATIGDASQFRSGRQLAAWLGLVPRQYSSGGKERLGRISKRGDGYIRRLLVHGARADLRWSKHRKERRSIWQESLLARRPTNVVLVAMANKTARVIWAMLSRGEAFQTAA

SEQ ID NO: 429852 - protein, 388 aa, unidentified
MYYVGIDIAKYKHDCFIFTSEGEIVLESFTFENTREGFSKLKLILDALDHSQKIKTGLEATGIYGKNLKLFLSSIGYDFDELNPLQVKRFTNALSNRKTKTDKIDASQIARFVSTGASRTYVYSSYHTEALKQLTRARNSLIDERSKHQTVLTGILDVEFPEFKGFFNNKFTDTALYLLNKYKTVKRISKLSHNDCVLLHNKSRVISTSRFEELRESAKNTCVHHFDYNDSLISANLQIIKCLNNEIDKIEKEINSIMSTINSPVVSIPGISAISATSIIGEFGDFSRFDNAKQLCAFCGVEPSIYQSGTSYHEGKMVKHGSSNLRRTLFNVVPYIIMHNETFKTFYDKKSSEGKAYRVAQSHVVKKLLRVIFTLEMTGSTFTPSKLY

SEQ ID NO: 429853 - protein, 320 aa, unidentified
MHTTTPSQWVGIDISKATLDVFVQPTGARWQVANRQAQIDALVERLVAVGAERIVLEASGGYEAVLVAALASQQLPIVVVNPRQVRDFARATGQLAKTDAIDAQVLARFGEAIRPELRPLPDATTRAVRALVSRRRQLQEMLTAEQNRLVSAAVQDAPEPLRDQLGEHIDWLRRQLAQVDDDLHRQLQDSPVWREREDLLRTIPGIGPVTSATLLSHLPELGQLDRKAIAKLVGVAPLNHDSGTLRGRRHVWGGRAAVRAVLYMAALVATRHNERIRSFYARLRAAGKPAKVALVACMHKLLLVCNSVLRSATPWRAITP

SEQ ID NO: 429854 - protein, 398 aa, unidentified
MLSIGIDVSKGKSTVCGMKPGGEIVYTPFEVQHTREGMSELVSLLRGSGEEVRVVLESTGSYHCPVVAALLENGIFVSVVNSLRMKRFCSQSIRRVKTDQIDAMQIALYGLAYWQELQPTRLPENTYRELQLLARQYYQMTSILIKAKVDFNALCDQVLPGMQELMNDHAGRHKLSDFVLRYHHTAHILKMGETRFRKDYCKWAEKKGYRNHERMAALIFATAQNGIPVLPDAPSTQIVITEAIRVLHTVEASRDAILTQMQALAKTLPEYSLVREMPCIGDTLAPRLIAEIGDVRRFHSKRALIAYAGIDAPPYQSGKFSANNRHISKRGNRYLRKTGYEVMQSYVMHKPANDPIFTFIEKKRSEGKSGKLAMVAGLNKFLRVYYGKVTELYRSLPQ

SEQ ID NO: 429855 - protein, 423 aa, unidentified
MKIVYPICCGVDVHKKFLVATIITSEGITPRYQKKRFSTFNNSILQFKQWLLDNNCFDVCMESTGKYWVPVFNLLEDSINVTIANPKWVKAVKGNKDDTKDSKWIGDLFRLGLVPGSYIPSKPIRILREYTRYRFKLVSCKSSEKNRFQNVFTVCNVALDAVVSDMFGKSAASITDYLVKSDSFDPQHCISLLKGSVKKKADAVIQSIEGYHMTPEQKYRAVMIRNHLEFVENSIKELDRMLNVLAAPYESAILLLCTIPGVDRASAITIISEIGTDMSHFSSSKRLCCWGGLTSGSNESAGKKKSVRITRAGVYLKPALVQIAHAAVKSKDNPYYRIKYERIAKRRGKKRAIIAIARMILTAIYHMLSTGEIFNPCDLYKVDMPQELRDKQKEKALKRAAKLLIAQGIIQASDISAISLQPA

SEQ ID NO: 429856 - protein, 413 aa, unidentified
MSLAASGVGEAQTRFAGLDVHRKYATVAAVDSKQQVVLTARRIDFNDFDEWVRKHLRKTDIVTLEATSNAWHLYDMLVPLVASVTVANPMQVALIAKTRVKTDPRDALTLARLLAAGMLPSVWVPPVSVRELRALGNHRSRLIKQRTQARNRLRAVLFTHNLFPPAGEAFGPANRGWWEGLDLPASEKLRVRQDLSILDSLEPLVNEVEAELVRQSSLEPWAEQAAFLVQLPGIGVHNAMLLLAAIGDIGRFEAPHKLVGYAGLGARVHSSGEEHYGGRITKQGRRDIRSTMVEAAWVAVAGHAYWKESFERLAFRVGKPKAIVAIARKLLVVVWHVLTKQVADREAVAEKVASKLLEWSWKLGRANRAGLTSGAFIRRELRRLQLGENITAISRGKRKFPIPVSEEANQAVG

SEQ ID NO: 429857 - protein, 316 aa, unidentified
MLYVGIDVSKNKHDVTALNVQGKTVLKPLTFSNNKAGFELLDLSLRQLNQDCLIALKLLSDPNRDLLNFLHEQGYKVYTYNPLLIKEFAKSLSLRKTKTDKKDAHGIALKLLSDPNREQFQHDNRQVELKILARHIHRLKRKQSDWKVQYTRCLDIIFPELDKIVGKHSEYTYQLLTRYPNPQKRLEARFDKLIEIKRLTASKIQDILSVAPRSIGTTSPAREFEIIEIIKHYKRLIDKAETCVNDLMAEFNSVITTVTGIGGRLGAVILAEIRNIHAFDNPAQLQAFAGLDSSIYQSGQIDLAGRMVKRGSPHLR

SEQ ID NO: 429858 - protein, 415 aa, unidentified
MALKIVYKICCGIDVHKTFVVACIASTNDKGVTSYESHRFSTYTSGLKTLLQWLLDRNCKDVCMESTGKYWIPVYNILESDCSIVLAHPKYVKAIRGKKTDKKDAKWIADLFKHDLVAGSFMPPADIRQLRDLMRYRFKLTCFKSSEKNRLQNCLTVSNIQLGNVVSDTFGKSAQAILDKLLENPADTSFDLEPLVYKSLKKKLPELRDAIDGYITPEQAGKLKVIKAHYENLESRKAELEELILALAAPYQQELAILQTAPGISSPFTAIGIISEIGTNMEAFPSAKHLCSWAGLTPTNNESAGKKKSVRVSKAGCYIKPLLVQCANAVVTSKKHPEIRNRYLRLKKRRGHKKAIIAIARMLLTALYHMLKNGENYNAELYRKSDLPPVNREITVEQALMIARNQGYKIKSATA

SEQ ID NO: 429859 - protein, 483 aa, unidentified
MSENNNHDDHSSSVIPEDNGIIVMPARAYGVGLDVHRSMAQISVMVRNEDSVLEFQKQFDTDILSLMEAREWVIEIITSKSSPKINVSSEELTYNIESTAMYHMPVIAVWGGKPSVINPAIARTGLRKTDKLDARNLCLQSMLGTWPPSYVAPERIQVLRMLVAERDSYSRLATRASNRINSNLLRFGDTSGREGSVTKNQTVRMHVESLLHGDEDLTGIHTLGIPEQAREMFLDEYEEYDRYMEKVRACDKQIITAVKDMEWETGSGKLKGNEMLHLLTTVPGIGEYTASIWLCRIVTPTRFPNAKAVTAYAGLDPSLKVSAGKVTSAVKRKGDKLLHAKLSLAASALLNRRSEPFGEWGYRIQLTSGRRAKAVTGIARRLAVSLYWVQKTGKPFTYEGYQIAREPEVVDMTIEELTNVNTAFRRYMKVLEKAGIHTTKEMVHEYYICRLHTVKGLGSKFFILVKEFINNQKPYRKHVKGKD

SEQ ID NO: 429860 - protein, 341 aa, unidentified
MTAIGIDTHKATLAACAVDGLGLALDERTFRNDPAGHRALAVWATAVAAGALIGIEGSSTYGAALARFLVAAGFTVREVPPQLTRRSRTESRRPGKSDPGDALTIARVTAREPALPPVRLADRTRELGLLLDTREALVHEATRRRNRLHAHLQVLVPGYGERVHRLVSGAALDRARRLLRGLTGLEPELARALVGDLRRLDRQIDGLTDRIATVVGDDPLLRLPGIGVVTAARLIAETGDVTRFRSPDAFAALAGVAPIPASSGQVQRVRLSRGGNRQLNRALYVIALTQVWHHPPAKAYVARKRAEGKTWREAIRCLKRQLVRPVFRLLQEGQLGLKAAA

SEQ ID NO: 429861 - protein, 350 aa, unidentified
MGKHNKAEASQKGQVVFLGIDLSKKSFQLHGVDARGHVVLKKKLNRKALLPFIANLPECVIGIEACGGSHYWCRKFTELGHDVRIIAPQFVKPYVKSNKNDAADAEAICEAMQRPSMRFVPTKTIEQQDIQSLHRIRSQAVARRTALGNQIRGLLMEYGIIIPKGISFIRKQIPLVLEDAENGLTVLFRELLSELYDEMKHLDERVEKLEQKLEIIAASSEACRLLLTIPGIVLLSATALFASIGDISAFKNGREMAAWLGLVPKQQTTGGVPTLLGISKRGDTYLRTLLIHGGRTVVRIADKHDDRRNNWIKELDQRRGKNISAVAVANKNARIAWAVLTKREPYKAVA

SEQ ID NO: 429862 - protein, 338 aa, unidentified
MNISRVGLDLAKQVFQVHGVDRHERVVCRRQLKRAQMLDFFRQLPPCLVAMEACGSAHYWARELGELGHEVRLIAPQFVKPYVKGDKHDAHDAEAICEAASRPSMRFVPVKNAEQQAAQSVHRIRSRLVRARTALCNEIRGLLGEFGLIASRRGRAATVELLETVIATEPAPLTAPMGALLNDLNDELQALDTRIERLERMIKQSAREDARIQRLLAVEGIGPLTASAVVAAVGDARQFRTARQFAAWLGLVPRQHSTGGQQHLGGITKRGDTYLRTLFTHGARSVVRCCANKTDARSRWLQGLLQRCNANVVAVALANKNARIVWALLSRETRYQPA

SEQ ID NO: 429863 - protein, 439 aa, unidentified
MVAVMIGVDPHKGLAYGGGDQRGGRAAGRVAGARLGNPQVEQLLAWAAPWPGRTWAIEGADGTGHLLAQQLLTAGERVLDIQPKLSARVRLLAAGNVNKNDPNDARSVAVAALRSGSARAAAADDHAAVLGVWAKRHRDLGRLRTQLVCRLHAVLCELLPGGVGKQLTAGHAARLLASITPADAVAAARRELAAQFVADLRGIDAQMRDTKKKLAVAVAAAGTSLTVLFRVGPVIAAAVISDVRDVSRFPDRDHFAAWNGTAPVEVSSGRRKIYRLSRRGNRRLNHAIHITGVTQIRYAHSPGRAYYDKKRAEGKTGKEALRCLKRQISDAIFACLRAGAQRTAAPAVKGPGGQPGHRSASRAAGSHPARRLFGQATPGPATHPTTPASGFPAPLPSRANGRPGPGPGAARPRSGARRASSTRPGREPIMPATGKQRPS

SEQ ID NO: 429864 - protein, 337 aa, unidentified
MEYFAGLDVSMEETHICILNREGELIREGKASSTPKAITAFLAEGPLCTKVVFETGRMAPMLFHGLTQLGIPVVCIESRQAYQALESLAGHKTDRNDARGLAHLARTGFYKPTHVKSLSAHAIRSLIAARQKLVGQRVTTDNQIRGLVVVFGVRLPRALSPAFKDAALSVSDGVPGLHAALRGLFAAREAILAAVAAIDSDIKVMTHKSEVCTRLMTVPGVGPITALAFAAAIDDPTRFKRSRDIGPYLGLVPKRHQSGEVDYTGSISKRGDVRVRTLLYEAANVMLTRYAAPLKLKSWALAIGARSTMRKARVALARRLAIILHAMMRDQTDFQIA

SEQ ID NO: 429865 - protein, 455 aa, unidentified
MSKAKAVKHPAKPSSALPEEPEWAAFVALDWADRKHVWKLAVAGSRERQAGELEQSPEAVDVWACQLQRRFGGRPVAVAVEQSRGALVYLLMKYPHLVIYPIHPTTAARFREALYPSGAKDDPGDADVLLALLCHHREHLRPLQPDTPETRLLQTLVEDRRRLVDEKTRQKNRLTDRLKMYYPQALQWFDLNTAMAREALRRWPTLQELSRNNPAKLAKFFREHNCRNEERIQQRIQQIYAAAPATRDLAITQSGAAAVQAYVSLIDALERHISELDRQIGEVAREHPDYAIFAGLPGAGPVLIPRLIGAFGTDRARYRDAAELQRYSGIAPITERSGQSQWTHFRFRCCKFLRQTFHEFATHSLAKSEWARAYYELQRERGKSHHAAVRALAYKWIRILFRCWRDRVPYDERIYLESLRRRKSPCIPALAPMVAVTRVEWKQVGGFSRLSVKNS

SEQ ID NO: 429866 - protein, 374 aa, unidentified
MSITTKYVGLDVSKSKIAVAIADEGRGEARYWGTITHTKEAVGKLMQQLSKSEDITLEVCYEAGPTGYVLYRWLLEMNISCTIVAPSLIPKRAGDRVKTDKRDALRLAQLFRAGELTSVYIPTPADEALRDLVRAREDAKEDLARQKQRLGKFLLRNQLASPKGSTPWTHAYEAWLDSLKFADHCQQVTFQEYRQSIWETKERIRRYEQEIERQAESCAQAPLIQALQALRGVAVLTATTLASEMIEAARFPLASAFMSYCGLVPSENSTGDSRRQGKITKAGNAHLRRVLVEAAWSYRYSPAVKKKMRQRILGLPPEVQRIAWEAQHRLHQKYKSLLRMGKHKGAIAVAIARELAGFVWAIAKEVEMTKAKAS

SEQ ID NO: 429867 - protein, 344 aa, unidentified
MNKYAGLDVSLEETAIALVDETGRIVREAKVASEIEAIDAWLRDSALKIARLGLEAGPLSSWLYAGLKERGWPVICIETRRLRAVTRAMPVKSDRKDAEAIAQVMRTGWYRAVHVKSLASQQLRLLLRHRKILQAKRQDLENELRGTLKGFGLKLGKVGQAKFATRVSQLVAGEPWLERLALPVLAARAALLKSFGELHAMVLRIVKADDICRQFMTIPGIGAINALAYKTGVDDPTRFRHSADVGPHFGLTPRRYESGETEYLGPISKCGDAMVRNLLFEAAMTLLHRVKAASSLKRWARALAKKVGSRKAAVALARRLAVIMHRMWLDGTDFNPNLVRVATR

SEQ ID NO: 429868 - protein, 402 aa, unidentified
MNSVGIDVSKGRSTVAAMRPFGEVVISPFEVCHTDSELSELARRLKSLDGETRVVMEATGNYHLPVAQALHDVGLYVSVVNAKLVHGYGNNELRRVKTDRKDAVKLANYGLDRWLSLPRYIPEENTRLLLKNCYRQYQQGCKVQTMQKNNLISLLDTTFPNANRLFHSPVRADGSEKWVDFVAQFWHCKCICERSEKVFMTKYQRWCKKHSYNFCEEKARSIYNEACGCVGVMPKSSTAKLLVEQAVSQLKATSSALAALKQEMQTLAAQLPEYPVVMEMFGVGPTLGPQLMAEIGDVRRFYSKKALVAYAGIDAPPNDSGDVTGRHKSMSKIGASSLRRTLFLVMSVYLQNSPPDEPIYQFMDRKRSEGKPYRVYMMASANKFLRIYYATVKAYLDKLEQV

SEQ ID NO: 429869 - protein, 360 aa, unidentified
MFGNHSQDRGSDMQVTRYGVDLAKRVFQVHWVEPDTGEVKRKMLTRGEFAAFFARRAAGLVAMEACGSAHHWGRTLRGLGHQVRLIPTQFVRPFVKSNTTDAADAQAIWEAVQRPEMRFVALKSELQQAVLGLHRVRAQLVKMRTMQANQVRGLLYEFGVVVPRSWRALLLQAGPILADSSRREVQELLRGELQQQLQGLRELTRRLEQLEHSIGTYRQQDEQCRRIEAIPGVGPLSSTAVLASIGDARTLRCGRQFAAFLGLVPRQSGTGRRVKLLGISKRGDPYLRTLLIHGARAVLNHSSRPGKTPSQWLAGLLSRRPKNVATVALANKIARTIWALLAHGRVFDPRWRRALPVSVA

SEQ ID NO: 429870 - protein, 458 aa, unidentified
MSDFFFGIDASKGYSNFVMLDSLKRCVEDDLQLDDTFEGHQKLYSILSEFCVRNPKANIFAAIESTGGYENNWFDALVRFQTHLPIRTARLNPCGVYNNSRAELNRNITDKISAENVAKYMIEHPEKVQYRQQDPLAPLRKQWGFVKMLKKQKTQMLNQLESNLYTANPEILAYCKDHTPAWVLSLLQRYPTASKLAKAKKSSVSLIPYVTPQKAKKLVETAKQSVASATDETTSQIIKATVQQIRQLSKTIDDQTKAMANKCSIPEVELLKTFIGIGNDSAVGLILEIGSIERFKRAKHLASFFGLHPVYKKSGDGSWGFHMSKKGRIVPRQILYMVAMVAIQSNPLIREIYEKHTEKGMKKKAALGVCMHKIIRIIYGMLKHNQPFDPEIDRANRKKQNTQDEKKVGLDKSRRYQAYDVKAPISRRQAKKREERKQSQSDNNAKCGINAPVPVLET

SEQ ID NO: 429871 - protein, 399 aa, unidentified
MLAVGIDISKSKSVAAILNQDGSMHTSPFEFHHTQPELDAFIKYILNSKQSATILMENTGYYHYPVLKALQEAGLPVCMVNAYQIKKFGDMDLRKAKTDKKDAVRIARYALEKSYSLVPYTSMEQKYEDLRFLARQYNQRMLTLKTNKVFLLNLLDETMPGITNILPLTTRTPETSLSVLFINRFKSYDRIKKMGKSRFLDAFEKIARKSRNRQTKTYGLAIYEAALRNITTRGENEYTLAAQDQCLELVCESQKAADSIILKMQTLAETLPEYAVLRSMAGVGDRLGPLILAEIGDIRRFHSGKALNAYAGNDPPPYQSGTFESHNRHISKRGNAALRKYCFEVMQALKLTRPQDDPVYLFLLKKEQEGKPYNVAKMAGVDKFLRIYYARAMETLKQQ

SEQ ID NO: 429872 - protein, 351 aa, unidentified
MDRYIGLDVHSQSCTLVVLGPSGRRLKNQVLETNGRVLVDAIKGIAGDLHLCFEEGTQSAWLHELLSPHVKELVVTVPAERKGAKDDLRDATELAEKLRAGTLETRVYKAPKPLAGLQNAVRAYGMVTRDLVRAKNRLKAVFRARGIASDRTVYDVERRASWLKKLPAAHRRLAEWMGREVDALVPLRDEAEAWIHEEAKAHPIVKILSTAPGMATKRSAQVVAIVGTPDRFRTRRQFWSYCGLGIVTRSSSDWIHQGGGDWVRKEVNQTRGLNRNRRPQLKAVFKGAATTVIQQLHDHPLYEDYQRALRAGIKPNLAKLTLARRIAAAVLSMWKHKEDYDEKRVSVKKRP

SEQ ID NO: 429873 - protein, 352 aa, unidentified
MKKIMQPRRLRYLGLDVHRATIAVAIAEEEGAPTSYGTIANDPTAVRKLLRQLGGEEVELRVAYEAGPTGYALHRHLTKLGIDCTVVAPSLIPVRPGDKVKTDRRDALKLARLLRSGDLTPVWVPDREHEALRNLVRARADAKVDELRAKHRLSKFLLRLGIEPPVGMRNWSQRYFQWLRQVKFEHLADRVVFADYLAEVTAAGERIKRLEAALHQCAESSDHLALIRALQAFRGIGFLSAVSIVAEAGDLHRFATAPQFMAYIGAVPSERSSGSKQHRGPITRTGNSVLRHVFGEAAHHARHAPRIGATLKQRQLEVPPAIVELAWRAQLRLHYVTEHPKAATGGQVKGGH

SEQ ID NO: 429874 - protein, 342 aa, unidentified
MKITTIGIDLAKNVFQVHGVDQRGKVVVRKRLRRHQVLTYFTQLTPCLVGMEACGGAHYWARNLQAQGHTVKLMAPQFVKPYVKSNKTDAADAEAICEAVTRPNMRFVPIKNADQQAILSLHRARQGFVRARTAQANQIRGLLAEYGITLPQGISHVANRLPGIVEDAENELPGLFRALLQRLVVHLRELNHQVQELEEQINAWHRNNAASQKLARVPGIGPLTASALSASIGDARSFRNGRELAAWLGLVPRQHSSGGKPMLLGISKRGDAYLRTLMIHGARSVVRVAKSKSTPTDRWSTELLERRHTNVVAVARANKNARIVWALLAHDRDYRVDYELAA

SEQ ID NO: 429875 - protein, 441 aa, unidentified
MDVVFTHCAGLDVHKKSITAYRIVPDPTGHVVEGLTELQKVGTLTIELLALADWLTEAGVTHVAIESTGEYWKPVYNLLEGTFEVVLVNAAHVKNVPGRKTDKADARWLAKLMRYGLLQASFIPPAGQRDLRDLTRYRTKLVQERSREVNRIQGVLERANIKLASVASDIMGVSARAMLHAVIAGRAAPATIAALAQGRLRKKLPVLEQALTGVVRAHHQRLLAIQLAHIDFLDEQIEVLSTEITRCVADLDGSVGGASPGEVASIPAPSATPELTLTRATTLLDTIPGVNQRGAEMLIAEWGIDMARFESAGRLAAWSGVAPGNDESAGKQRAGTTRKGNRVLRAGLTQLAHAAVRTKDTYLSAFYHRIAARRGKKRAIMAVAHAIVVSAFYMLTRNEPYRALGATYFDKRQREHTVDRLARRLEHLGYEVHLELRSATA

SEQ ID NO: 429876 - protein, 426 aa, unidentified
MSITQNEKISQVKDTTLVVGIDVSSETHYARAFDWRGLELAKVFKFESASYGFENFSEWLSELCKTNQKDNIIIGAEPTGHYWFTLAEYLKENGIKFVFVNPMHVKRTKELDDNHPSKNDRKDPKVIAKLVIEGRYLIPYIPEDIYAELRVMNESRMRINKELVAIKNRIQRWFAIYFPEYKNVFGNWECDSSIEVLLNIPLPADAVNMGADAINQLWRAKKIRAVGIKRAKLLVEVAANSIGVKQGVNAARCEISMLIEDFLKKKEQEQRVIEILETLCIQVPNADKLLNIKGVGILTVASFLGEVGDIRRFDSPKQIQKLAGLAITENSSGKYKGQSCISKRGRKLLRYTLFQAVMSMIMHLPEFKELHRYYTTRAKNPLKGKQSKVALCCKVIRIFYVLLNKGVEYDGQKLMKDIVRPEVIAA

SEQ ID NO: 429877 - protein, 343 aa, unidentified
MDHYAGIDVSLEQSSVCVVDAAGGIVREAKVASEPEALIGFLGGLPRPVARVGLEAGPLSQWLQAALVKAGYDAVLLETRHVKAALSAMIVKTDRKDARGIAQLLRMGWFRPVHGKSAPAQEVRALLVARKQLQAKMRDVELSLRGLLRGFGLKVGEISKGQFATRVRFLVAGHSMLERIAEAMLQAREALRTEFTKLHRAMLAIVREDAVCRRLMTVPGVGALIAVTFTSGVDDPGRFTRSKGVGAHFGLTPRKYQSGETDVTGAVSRVGDAMVRTALYEGAHILLTRAVRFSALKRWALEVARRRGMKRAKVALARKLAVILHRMWVNGTTFRWGREAAAA

SEQ ID NO: 429878 - protein, 351 aa, unidentified
MPRKSSVCTVTAIGIDMGKTTLHMVGLDSYGAIVLREKVSRGRIASRFANLPPCLIGIEAGMATHYVARELAALGHDVKQVPPAYAKPFRQGHKNDFRDALAVAEAVQRPTTRFVPPKSNEQLDLQALHRVRSRLVSQRTAVINQIRGFLLERGIIVRQGLRFLRQLLPDILAKRTDVLSPRMVRIVSDLAGDWRQLDDRIETVTDEIETLAKADDSCRRVMTVPGIGPIISSAMVAAIGNGSAFSKGRDYSAWLGLVPKQMSTGDRTILGRISKRGNSYLRMLFIQAARVILLRPANWPKHGFGAWLVRAIQRLHPNVLAAALANKLARIAWTVLAQERSYEARVTKAEA

SEQ ID NO: 429879 - protein, 311 aa, unidentified
MSAAEKELSHKSFDNTPTGIQSLLDWIAGYHLSLSKLLFCAENMGSYVTELSVSSVSMGFSLALVCPLTIKKSIGLQRGKNDRIDAKRIANYAVLHYRKLELYKLPDKDLVRLRGWIIIRDNLVKQKVSSIKLLETFSQMAKLADVTESISFLEEQLKSIKEKILEVEEDMEQLIAASTSLYTNYLLLRSIKGIGIINAIVLLCVTDNFQRFDNPRKFACYCGVAPFEHTSGISIRGKTQTSSLANKEVKVYLTRAAITAISWDPQMKAYYKRKIAEGKHKASVINAVRAKIIARSFAVIRRQTPFVTLAV

SEQ ID NO: 429880 - protein, 351 aa, unidentified
MERYLGADVHAASVTFSVLDASGKQIRRDVVETNGKALVGSLQQLAGNLHLCLEEGEWSQWLYEILSPHVAELVVYRGEWKPGLKSDAIDAHGLAEKLRTGRIDRPVFKDASLFTALRDRARTYAMLTRDAARVKSRLKSFFRARGLPCTGEALFKPAERVHRAQALPVATREAVDLVGRELEQLLALKAEAEASMLCESHRHRIARGLETAPGLGPVRVAQLLPIVVTPHRFRTKRQFWSYCGFAVVTRSSSDWVLEQGRWVKTRVAQTRGLNFNHNRMLKAIFKGAATTVIAHCGPNPLRQSYDRQLENGTRPNLAKLTVARQIAAIVLAMWKRQEAYDPGRGCELARR

SEQ ID NO: 429881 - protein, 350 aa, unidentified
MKVNTIGVDLAKNVLQVHGVDEQGKVVLRKQLRRNQVMNFFAQRTPCLVGMEACGSAHDWARRLIKLGYTVKLMAPQFVKPYVKTNKNDAADAEAICEAVRRPNMRFVPVKTEEHQAVLSLHRARQGFVRQRTAQANQIRGLLAEYGVVIPQGIRHIGQCLPEILEDADNALPGLFRQLLRQLGEHLKTLTRLVEEMEEQMQQWHGGNEASQKLAAMPGIGAITATALVASVGDARNFSNGRQFAAWLGLVPRQHSSGGKTTLLGISKRGDRYLRTLLSHGGRSVIAAAERRKTSPVEESLTQQRSWLQGLVSRRNKNVAAVALANKNARVIWALLAHDRSYQAGYAVAA

SEQ ID NO: 429882 - protein, 290 aa, unidentified
MSEIITVGLDLAKNVFQVHGADAAGRAVLRKKLRRDQVLAFFGQLPACVVAMEACGGAHFWGREIGKIGHEVRLIPPAYVKPFVKRQKNDMADAEAICEAAQRPTMRFVPVKSEETQGAAMVFRIRELLIRQRTQAINALRGHLGEFGKIVPQGAANVSKLIAIVEDPEGGLPADAIPTLKVLVATLAHLEAEISKLDTEIARCAQDNEVARRLMTVPGIGPLIATAIAVLAPPPETFRKARDFAAWLGLTPRQHSTGGKQRLGATDLPLFSGPLVNRACSPFVCHHSAA

SEQ ID NO: 429883 - protein, 364 aa, unidentified
MNYIGIDLHSDRFTCTFLSKGDNTETTTFILNEKGLDGFLAKCTKEDYVALEASSPTFSFYDLIKHSVKKVLVLDPFQLQLIYKSGKKNDKIDSKKIAKLLKYHIEADKDFLPIVYVPDKEIRKLRALFTTYKLYIKELVAIKNRIYSILRENLHGIKKKSVKGKKYRSIIVKFDICEEYKYQIKSLYKTMDHLYERIDEIKKEIYYLGKHYREEIVILTSILGVSPFIALALKADYADVNRFKNAKHFSSYLRAVPKLDASNDKIKNGSTKKRGRPLGISLLLQSLNHIKRVSPKISEFYARLKTGKSAGKVRMAIMRKMFVTIYYMLREKKYFGYYIKETHEAKMAEYDQIVTNYEENKKAA

SEQ ID NO: 429884 - protein, 317 aa, unidentified
MSTSGSFIGIDVSKTQLDLAVHMTGKPWQVAYDAAGVKRVVKHLRTLAPTLIVLEATGGLEMRVVSALAAAQLPVAVVNPRQVRAFAHATGTLAKTDRLDAQVLAHCAAAVQPTPRPLPDAATQQLSAVVTRRKQLVDMMTAESNRLGAQPNAALRKRVRAHITWLTKELGRTEKELAQLIQQSPLWRVQDDLLQNAQGVGTVLSQTLLSEVPELGHLNHKQMAALIGVAPFNRESGGYRGKRRIWGGRARVRVVLYMGALVATRHNPVIKAFYERLLAAGKEKKVALTACMRKLLTILNAMMRDQRKWQDIRSITH

SEQ ID NO: 429885 - protein, 423 aa, unidentified
MSYRIAGIDVHKKKLAVVVGDLELEGEHQFEGRWFGSNPEQLRALAEWLLEQQVEEVVMESTAQYWKPVWGALERYWKPICQRREGTGPKSGTLHLAQALSNRGRRGRKKDFRDAERLIKRLVSEELVLSFVPDAEQRLWRTVTRARYQLTCDRVRLQNQLEALLEEAHIKLSSLVSDLLGLSARRMLQALAEGETDPASIAALAHQRLRATPEQLCDALGACKELNAVYRRLVKMALEDLQLVEQQIGQLDQEIASLLRHHQAAVQRLAEVPGLGVDSSHQIIAEVGAKAENFDSAKKLSSWVGACPGDEESAGVNYSARSPKGNRHMRRILNQCANAAVKHKGSIFEILYRRLVLRLGHNKTIGAIAHRLCQLIWMILHKGVRYEERGPAVSEKSRRVRTARMIRTLQTLGYRIEPLGTPA

SEQ ID NO: 429886 - protein, 343 aa, unidentified
MYYIGLDVHKRTISYCVKDAAGHVHREGKIGSTRRELDGWIKTLPEPRMMAMEATIFSGWIYDHLLPHAEKVKVAHPLMLRAIAAAKKKNDRIDAAKIADCLRCDFLPECHMASTEIRDRRRTLRYRNLVIKQMVQMKNRVSGLLMETGVDYNKRRLHKVGYFEDLMSTNKEVNQSIRPLLKLSRETIERGQKLDYALVSSLERDPLLAERLQRLRTVPGVGPITALTWALEIGDFTRFESVKEAVSYCGLCGDERSSADKVLRMPLSKQRNKYIQRTLIEAAKLATRYCHELAVVYEKERQRGNANRATLAVARKLVAYLLAVERRKQDFVPAEEFRSTAVA

SEQ ID NO: 429887 - protein, 403 aa, unidentified
MNNVAGIDVSKGKSMVSVLRPFGEVVAKPFSIGHTGSELKELADYLKSLDGETRVVMEHTGRYYEPVARFLHDEGVFVSAVNPKLIKDYGNNTLRKVKTDKADSRKIARYGIDNWAELRQHTPMDTIRMQLKTLNRQQSLYTKTKTMMKNNLIALLDQTYPGVNALFDSPVREDGSQKWVDFATTFWHVDCVRNMSLTAFAERYRKWCKRHGYNFSQSKAVEVHAGAQDLIAMLPRDALTKTMVRQAIDALNAISASMERLKAEMQALAAQLPEYPVVMAMHGVGDSLGPQLMAELGDVTRFTHRNAITAFAGVDPGADQSGTHEAKSTRVSKSGAPELRRALFLVMVCLLISQPQDDPVYRFMDKKRAEGKPYLVYMTAGANKFLRIYYGRVKEYLASLEGN

SEQ ID NO: 429888 - protein, 404 aa, unidentified
MNHSTNHKINQVTEKTLVIGIDIAKKKHYACGIDERGRVLQKSFPFLQNIEGFMEFLQKVLKVQSDHEKKDILVGFEPTGHYWMNLAAFLTKHDIRFVLVNPLHVKRAKELDDNLQTKNDAKDALVIARLMKDGRFSFPRILEGVEAELRNGASFRIKLQEDIAALKNRIIRWTDRYFPEFQYIFKDLGKNALAALEKTPLPIDIQGKDIDELRTLYREVEGLKCVSTPKVRQLQYYAAISIGLTEGMMMARLEIASLLEQYKVLRNHYEAVTEELNKLAKEMTDYEFLHSIPGIGENTVAELLSEVGPFTKYVHPRQLIKLAGLTLRENSSGAQKGQKKISKRGRKKLRGILFRAILPMIRYNSAFQSLYEYYISRPLNPLRKKRGDGCFMWEITQDCACAVP

SEQ ID NO: 429889 - protein, 355 aa, unidentified
MNSEKYIGLDVHQATISVAVMDSRGKVVMESILETKDTTILDFFAGLRATVAVTFEEGTWAAWLYDLLKPHVAKLVVCNPRKNALLKHGNKSDKIDARKLAELLRLNDLEPVYHGETGVRMLRELARSYLTIVKDLSRVMNRLKALYRSWAIPCAGRDVYYTRHRSEWLGKIPEAGTRRRAEQLYQQLDMLQHLRQQARRELLTESRKHAITAKLRNIPSLGPIRSALAVALIQTPHRFRTKRQLWAYSGLALETRTSGEHCYVHGQLRRSKKQISIRGLNKDHNHDLKGLFKAAGTRASVQPGPFQDFYQRSLTKGIKPTMARLTLARKIAAITLSMWKKGENFDAEKLKSQAP

SEQ ID NO: 429890 - protein, 316 aa, unidentified
MVVVGFDVGKDSLFAARIDRSGVVKEHWELANTVAALLPLLRSLRRKYKHLLVASEATAEYHRPLAQLCLTLNIPFSLINPITTKQFTRATVRKKKTDKTDAEVIARVAMQGQGTLVTKDTFNDIKPMLRTSVKLIQMSRMLTLMQYHVADVLSNEPALLQQLATCQEALDVAAATFRATARQRVNPSLSKLLQTVPGIGPQTAALLIAELGDITRFKNANSVVAYMGLDPRVKQSGTSLKRNTHLTKRGSPYLRRALYLAAAAAQRHDEELKTTYDKKRAEGKRYREATIVVARRVITRVYAVWKRGTVYQKKIA

SEQ ID NO: 429891 - protein, 362 aa, unidentified
MSMKGMSLVGLDVHARQTHAAVLVPETGELRVSVLRMPPVEVAEFLVGLAPVRAVYEAGPTGFGLARAAGARGLDVRVAAPGSIPRGPGDRVKTDRRDAVRLARLLAAGELRFAFVPSPTDEHFRDLVRAIEDIRGDLMRSRHRLGKLLLRRGERYPGPGRAWTLKHLAWLRALRLDDPCSQATLADYLAAVELLMARRKSLLGALGDAIPTCTHADTIARLRCFRGIDTLSAAGLSAEVGDFQRFPRPTMLSGFLGIVPSERTSDTKRRQGSITKAGPTHARRLLVEAAHHYRAPANIGATLATRQDGQDPRIIAIAWRAQRRLHQRWTHLRARRGKPSGVVAIAVARELAGFLWEAATLD

SEQ ID NO: 429892 - protein, 349 aa, unidentified
MVSTTTKEVFMNVMIGIDPHKASHTAVAIDGDEDQLSSVKVRATRRQVDQLMSWAEPFEKRTWAIESAGGLGYLLAQQLVARGEEVLDVPATLASRVRTLATTRSNKNDPNDAHSIAIAALRAPMLRGVERTDHGEVLRLLAKRNMDIGNHRTRVVCRLHALLAELAPGGMAKEMYVSEADVFMAKLRPETPAQQMRYDLALELLDDVRRLDAQLKESHRRIRVAIKASGTSLTELYGVGPIIAATLIGYSGDVARFANRDAYASYNGTAPIEFSSGGRIVHRVSTRGSRKLNHAIHMAAVTQLRNPGTPGRIYFERKVTEGKTKKEALRSLKRHISNAVYRQLLLDAQ

SEQ ID NO: 429893 - protein, 387 aa, unidentified
MTTYANDMSRSLAAFDEHSTLVIVVEMGQKSWLVAGLIPGVERHPKKKMDPDPEKLLSLLERWRGEAVKAGRPITRIAVAYEAGRDGFWLARWLESRSIETHVIHSTSVAVSREKRRAKTDRVDAEMLLRVFLGWLRGERDHCSMVAVPTIEAEDDRRPGREREALVAERTRITHRMKADMARLGVRGFKPYLRSAPKKLAAVQTPEGVAVPPNTKAELERDMARLAVLREQIAAIEKTRLKRIEAAPDKGPHAMIRLLARVVGIGIETADMLVNEVMTRRLRDRRAVARYAGITGSPEESGKRRREKGLSKSGNARVRRGMIQLAWRWLTLQKESSLTVWFNARTEGAPGLRKKMAVALARKLLIALWRMTTTGEIPQGILLRPAA

SEQ ID NO: 429894 - protein, 428 aa, unidentified
MEPSISTGPSAAVTAYIGIDWADQKHAIALRSAAEPSKVQHQVVEQKPEALMQWIGQLEQRFGAQGKILICLEQSRGALIYHLMGYEFLELYPVNPLQLARYRETFSPGGAKDDRPDSELLCELLYCHRDRLRAWKADSALTRKLAFFNEGRREAVEQRTGLSNAIKSQLKVYFPLALELLNEESSTALAADLLLRWPSLEVLQKQSVDTVRKFFYGHNCRGETKMLQRLELIQQARPLTQDSALIEPAAFRVQLLARQLKSLLVDIARYDQKIAQLFEAHPDRFLFENLPGAGTALAPRLVTAFGSDPTRWDSAQEVATLLGIAPVRRASGKNTGKKASVHFRLACPKFLRQSLHEFAGCSIRYCSWARACYEAQRARGKAHHASVRAVAFKWIRILFACWKQRTPYDPQRYQSALQHRGSPFASAC

SEQ ID NO: 429895 - protein, 344 aa, unidentified
MNVSIVGVDLAKNIFQVHAIDDGGEVIVRRALRRRQMIPFFTKLKPCLVGMEACGTSHYWARELSGLGHRVKLMPPAYVKPYVKRGKTDAGDAEAIVEAVTRPTMRFVAIKSPEQQSILALHRTRDLLTRQRTQLVNMIRAQLAEFGIVLPKGIQHALKLVDRLLVGEVPDIPTLACKVVIALAEQIRDLEFRLGELEKELTASSRGNEMVKRLRTIPGIGPITASALAATVTDPHQFKSGRQFAAWLGLTPRANSSGGKERKGRISKMGDQYLRRLLVIGMTSQLQAARRKPDAHPWITSLLRSKPSKLVAVAMANKAARIAWVIMTREEIYRAAMPATEDAV

SEQ ID NO: 429896 - protein, 387 aa, unidentified
MDVLYQSCAGIDVHQANIVVCILHGPLTSTRPKREMATFDTTTKGLRACHDFLSQFHVEAVGMESTGVYWRPVWHALCDDFELILAQPAHMKAIPGQKTDKKDAHWIAKLTRIGLLPRSFVPDETIQELRELTRQRKHYVESRNRETNRIHKFLQSGGIKLTTYIEDIMGLSGRNLLQLLVDGTPITPRIVHQSVYTSLKKKVPQLLEALDGYFSDHHRFMLKQSLEIYDFYQKQIELLEERITVYLSQYENHVETLDSIPGIDVITASVIISEVGVDMSQFPTSGHLASWAGLCPGNNESAGKKRSTKIRHGNSYLKKCLCQAAFAARNQKGSTLADRFYQIQSRRGSQKATIALAHQLLKIAYILLKEQMTYPEFLAQKRLLGTS

SEQ ID NO: 429897 - protein, 323 aa, unidentified
MSTKATKKRRSFIGIDVSKKLLEVGVHQSDYHFRCPNDPKNFPALITELISLRPARILLEATGGLERALLQALHAAGLPVVVVNPRQVRDFAKALGLLAKTDRLDARVLAHFAAAIQPAIRPVKAQQETELDALMGRRTQLSDMLAQEKNRRGSAATEDTRDDIEAHIEWLEERIQELDEKLKEQLKCSAVWQQKDKILQSVKGIGFVTSMSLLADCPELGQLNRHQIAKLVGVAPLNRDSGQQRGARHIWGGRAQIRCKLYMATLAAIRSNPVLKAFYQRLIDRNKLKKVAIVACMRKLLTIINVMVRENKFWDVKAQPVSA

SEQ ID NO: 429898 - protein, 430 aa, unidentified
MLKVVHHTCCGVDVHKTFIMATIVTTATHKGGAVYKTKRFSTFNDDLNRFKTWLIDHECFELCMKSTGKYWIPVYNLLEAEIKITLANPKYVKGIKGKKTDKKDSIWMADLHRHGLVPGSYIPPKRIRMLRDICRYRTKLVSNRSSEKNRVQNSLTMCNIALPRVLSDTFGKTAQRIIEYVLTCETFDPEHCKTLIDGRVKADPDEIIRSILGYHLTFDQVAKIRIANQHLNQVNECIEEVDNEITQLSKPFLNSIKLLATIPGITEASAIYIISEIGDNMDAFHSSKHLCSWSGLVPQNNESAGKKKSSKISRAGVYLKPLLVQCANAAIKTKKNPYFRDKYLAIKKRRGHKKALIAVCKMMLTCIYNMLKKNQEFSPSDWVTSNQSEEMKAKQEKRKIDSAITYLQRKGFAITQTETYQLLFSKSSGC

SEQ ID NO: 429899 - protein, 359 aa, unidentified
MYVAGLDAHLKYVAIAVVDRMGQVALETTVSTKEPERLLGALAPYRPLEAVVETCPFWPWLYDLLVPAGIGFHLAHAKQLRAIAVAPQKSDAVDARLLARMLLSGLIPEAYPRPADQRDLLRLLRHRTAVVRFRTRLVCRIHSQLHQQRLSLPREQLRRRATRAWLQETAWPRLTVEQRAIVTTHLELIDHCTPLIRALERRIAAAATGHATAPLLATIPGIGPYRSLLLAAELAPITRFRRAEHLVSYAGLAPVTRSSGGHTYHGSIPQGANRWVRGALVSAIPSHVRYAPTSPLTVAYAQLKARLGWRVARVATARKLARVGFVMLTRRTPWRGAPGARDVRDEVQNSHVAPTTSFC

SEQ ID NO: 429900 - protein, 411 aa, unidentified
MNPVVGLDVAKGESQVQMFLDKKIPYKNSVKVEHTVDGLKELYSYLLDLEHQTGMKPPVVLESTGHYHAPVVQFLEAREYIVIIVNPLVSYRAKSSSLRKTKTDAIDAYHLGELYYKEDLEPQKKRGVQLLNLRYLTRQHENMTGIMVQTKLQFQSVLDQVFPEYKGVFGDLYAEVSLRTLQTFPTSETVLKACVEEIAQFIDRHCKARSFNWALEKAEGLIAAAERNPYQSTLYQSLLVSLNMYIDLLQVYHQQLSTLEREIDQLAVQLEEYELLQTIPGVGEKIAATIISEIGEIDRFSHPKKLVAFAGLDPSVFESGRFKGTKNHITKRGSARLRHMLFTAVRCSIRDSRKKKTTEETIARNKRLRAFYDLKREEGKPYKVAIIACANKLLHWFYAMLKTKTPFQETI

SEQ ID NO: 429901 - protein, 341 aa, unidentified
MKQYVGLDISMEETSICVLDQTGRVTFEGCVPTNPEAIAKLLRRHAGNAERIVFETGSLSNWLWHQLRALGLPVICLDARHANAALSMRINKSDPNDAKGLAEMARMGWYREAAVKGAESWKTRSMLAARTKLVNLRRDIDNQMRGLCKGVGIVLGKAGSTNLARKVDAVLVEAPDLQDIFAPLLLAQSCLTEQIEKFDRQLLAVAKGDQTVRRMMTVPGVGPLIALSFVVTIDDPTRFRHSADVGAYLGLTPRRYQSGVIDRTGRISKRGNHQARTYLFEAANVLLAIVRRGSALKRWGSKLAKRIGAKKAKVAVARKMAVILHAIWTDGTEFQAEARTA

SEQ ID NO: 429902 - protein, 341 aa, unidentified
MDKITTIAIDLAKHVFQVAAENARGEEVWQKRLRSRAALHAFIEGLSPPLKVGLEAGLGAQAWARVLAARGLEVHVLPAQRVAEHRSGAKNDCNDARAILRALHDRSIHPVPVKSTVQLMMQALLRVRAGWQRRHTAVANQMRGLLLEHGVAIAQGDAALTRALERVLPDAQVPIPDRVRALLAELAGEWEGLSQRVQAMDPELAELARADPVARRLCTIPGIGPVTATALVCKGLDPVRFRNARQFAAYLGLIPDQHSSGTKLRLGRMSRRGDRYLRGLLVSGAHAVLRHTRRDALDAGHRRILHWQQRHGSKAIAVRLANHNLRVVYALLRDHADYHAA

SEQ ID NO: 429903 - protein, 400 aa, unidentified
MYVGWDWAGKAHDVTVLDEQGRVVEHFEVGHHEAGFEHALKRLCHHGRPEALPVAIERPSGLVVERLVEAGHPVIPIHPNAFNAARSRWGASHAKSDPGDSYRLADYLRTDGRRLRRLRPMDAVTRQLQALVRMRDDHIKARIAAANQLEALLNAHWPGALSIFADLASDIALNFLERYPTPHATAGLGATRLAAFLKRHSYCGRRSPAQLLERLRRAPTAPDRLDSEVLAELVRHQVCLLRTLLHTGKELEHAITAVLPDHAKARLLAGLPRIGDGVNLAQVLSEVGPILDASLDVDHAAAQCGASPVTKASGQSRGVQFRWAANPHARQALQIFADNSRHASPWAARLSARHVAAGKRHPHAVRILMRAWLRVIWSCWHSNIPYDPARHRSELRLAGA

SEQ ID NO: 429904 - protein, 341 aa, unidentified
MKTVSHVGVDLHQRFCYLTAVDASGKTLKQSQVVNQGAALRAWLRQVPSPRQVVVEASGFWPAFARAVGPETEKLVMVHPQRVKAIASARLKNDRVDSETLAHLSRADLLPEAWMANERTQQTRLLTRLRITLGRQRAKAKNQLQAVLHQEGFLKPVADVFGKKGRAWLAGLALSPAGRAVVEVWLKIVDQMDEAIAGQTRTLERMAKEDARARWLQTVPGIGPYSAMVILGEVGEIERFGTKRALASYAGLTPSVRESAGKRKRGSIGHHGSGTLRWIMLQVAQVAARHSPAARAWYLRLKQRKPAQVALIALARKLLTAVWALLRHGVCFDENSFAAQG

SEQ ID NO: 429905 - protein, 342 aa, unidentified
MEITTVGIDLAKSIFQVHAVDAAGHVVVRKALRRAQVVPFFAKLPRCLIGMEACGTAHHWARELMKLGHDVRLMPPAYVKPYVKRGKTDANDAAAICEAVTRPSMRFVPVKSTEQQAALALHRTRDLLVKQRTQLVNMIRGLLAEFGIEMARGLRHALELAARLSAGDAAEVPPLAQRVVTGLADQIGALQIQLTRLEKELLAWHRDSDLSQRLATIPGVGIVSATALAASVSEPERFRSGRQFAASLGLTPLQNCSGGKERLGRISRMGDRYLRRLLVVGMTSLIRRAKATPASVDPRLPALLQRKPVRVVTVAAANRTARVAWAIMTRGGTYRAPTFAAA

SEQ ID NO: 429906 - protein, 470 aa, unidentified
MSKGSGMTRGDRRRNARRERLRAVLPRDGAVIGIDLAEDKQAIAVIDHDVRVLARKTVRVKAFRLGEALDWAVGQARAKGFSLVTVACEPTGPRWLQVQRLCAERGLPLVCIQPLVSHIAREQQDYTTRKTGEADCVLIARLAVELHCYLPGELDETWAHLRHLGRRRAQLITAATASAQRIRDFLSVAWPTVTETCARPLESVTWLAALQVVTSRCGADPGRLAAMGDEAFTALVRGAVPGWGGKKGWGTICRRIFAALTETEGVVVSSRRGLLRRCADELGDLQRTRAQRRAVEADMVAVLEELGLSRLADIPALTAVGAAAILAETGDPRRYDSSSSVVKHAGLSPSDNASGAFYGEAHISRRGRPGLRLTVWRAVWPMLRFNPVMAAKYQAMTSAADDAAQAAASQADAGSRQVSAAAAASRARRARARVACAASLLRWIYSMVAHDTSWDPDVASGAASCPAEAA

SEQ ID NO: 429907 - protein, 408 aa, unidentified
MERYYLGVDWADEFHQVWVSDPEGKKVSEKKVEQSVGGLTEFGRFLDESRRKGVELWAAIEKPQGRIVDFLLDHGVVVYAVNPKALDRARDRFRMSQSKSDSFDAYVLAEFVRTDHGHLRALKPNSDVAQELKLLTRDQQRLVRQKTRLLNQLTTTLKEYYSRPLEVFSDLESNLALDFLKQYPTPQALSRLTRRQWNRFSKREHSLGEQRSKELWDKLQQPQLEVPEHVVRAKARLLEVLVAQLITLRDAVESYNERVRSFFASMAAAELVRLLPGAKTGTIVATLWAELGDAKDRWQSFRHLQAEAGVVPVTQASGKSRVVKFRFCCNKILRHAAYWLAFVSLNRSEWANHYYRDQRAKGHSHHRSLRALGAKWLKIIFVMWRDHKPYDENYHLANITRQKICQAT

SEQ ID NO: 429908 - protein, 355 aa, unidentified
MDCKKYIGMDVHQASISIAVRDATGKVVAESVIETKAATILAFIRGIQGSLWISFEEGTSAAWLYDLLKPHVTKVIVCDPRKNALLNAGNKNDRVDARKLSDLLRAGLVTPVYHGESGVRTLRELCRGYLTINKDLTRVMNRLKALYRSWAIPCAGDKVYSPRHRNTWLEKLSEAGVRRRAERLYQQLDALVQIRREARRELLAESGKHPATQLLRQIPRLGPIRVALLIALIQTPHRFRTKRQLWAYCGLALQTRASGEYRFTGGELQHSKRLPALRGLNVNHNHDLKNVFKSAATQVSTSTDPLGDFYRSLLAKGMKPTMARLTLARKMAAIVLSIWKKGARFDPGELKQQAA

SEQ ID NO: 429909 - protein, 403 aa, unidentified
MNSVGIDISKGRSTIVVMRPFGEVVISPFEVRHTGSELSELARQLKSLDGETRVVMEATGNYHASVAKLLHDAGLYVSVVNAKLVHDYGNNELRCVKTDRKDAVKLANYGLDRWLTLPRYIPEEDTRLLLKNYYRQYRQYSKVQTVLKNNLISLLDTVFPNANRLFLSPIRGDGSEKWVDFVAEFWHCRCVSEKSERAFTSKYLRWCRKHGYNFSEAKAHTIYAEASGHIGVMPKSETTKLLVEQAVSQLRATSTALAALKHEMQSLASQLPEYPVVMGMFGVGPTLGPQLIAEIGDVRRFYSKKALVAYAGLDALPNDSGDVTGRHKSMSKIGASSLRRTLFLVMSVYLQTAPLDEPIYQFMDRKRAEGKPYRVYMMASANKFLRIYYATVKAYLESLEHTA

SEQ ID NO: 429910 - protein, 322 aa, unidentified
MTRIICGVDVSSHSLQARIGKEGAAASFPNQVEGIAQLAAFCREHRATLVAMEATGGYEQQAFAQLCELGLPAAIVNPRAVRQFAQAMGLLEKTDRIDAGVIAWYAETRKSQPLCLAPQTQLELRARVTRLRQLTEVRTAQLNQQRLVTNGAVREGFRKMLAFLADQIAELEQAIATLIQTDPLWRELNQAFRTIKGVADRTVARIMAEMPEIGTLSNKTISKLAGVAPLANDSGKHQGKLVIRGGRATVRDLLFIVASVVGRHEPDFILFQDRLRAAGKPPKVVRIAVAHKLLVRLNAKAREVRQRMTTASTCNQAEAVMP

SEQ ID NO: 429911 - protein, 419 aa, unidentified
MTQTSHDTFAAFVGIDGADAKHDGCLQTAGSTKRECFQLAHTPEAIDAWVTTLRTRFNGQPEAICLELTKGPIVSALRTYDFLVLFPLNPLTLARYREAFTPSRAKDDPTDAALQLELLRTHRDKLQPLNPQSPTMRALAQLVEHRRRVVGDQVRITNRLTRTLKNSFPHVLHWFQEKDTAIFCDFLRRWPTLKAVQLARRSTLETFFREHHVRYADVIAQRIQAIKSATPLTTDDGVIAPNALLVQALVAQLRVTLQAIADFDTAIAQRAQSHPDFPLFQALPGAGPVFAPRLLVAFGEQRDRYASAADLQKYAGIAPVTERSGKKSWVHWRLQCPKFLRQTFVAWAAESTRHSFWAQVYYQQQRDKGKAHQAAVRALAFTWIRILSRCWQDRTPYDASVYLQALKRRSAPLLHNVAH

SEQ ID NO: 429912 - protein, 338 aa, unidentified
MKAYAGIDLHSSNNYVGIIDENDKRLYGKRMPNKLNHVLTALEPFRDRLEGVVVESTYNWYWLVDGLQEHRYKVHLANPSAVKQYEGLKHTDDKWDSFWLAHMRRLGILPEGYIYPKEHRAVRDLLRRRLLFVKHRTANILSLQSMITRNLGFKMSGNAIKKLNEFDAKELFGCPNLVFMAKNNIAAIAFLGKIIKGIEKQVKPQIKLRKEFKMLLTIIGVGDILGPTIMLEVGDINRFAKVGDYSSYCRCVKSERISNGKKKGENNKKNGNKYLSWAYVEAANFAIRHSVAAQSFYQHKKDTRNSIVAIKALSNKICRASYYIMRDQVPFDEGMLFK

SEQ ID NO: 429913 - protein, 452 aa, unidentified
MKKTLSSINDAKAESQQQPYAAWIGLDWADQKHFWSMRTADGRLQRGQLDNTPEAIKLWAAELNQRFAGRPVAVAVEQARGAVINMLSMYAHLVLFPVHSTTVANYRKSFSPSGAKSDPQDGDLILDLLTKHPERFKCLRPDTVETRTLQLLTEERRKQVNLHTSQLQYLTNWLKQIFPQILLWFDDPSSKVVEDLLLCWPTLPQLQKASPKKLLKFLQQHNCRSEARNQQRLAEIRQAVPATTDPALLSGGTLCIQNAVRLLAQLRDSIAAFDRHIQEVFQSHPDRFIVESFPGAGAALEPRLIAAVGTFRDRFESAANLASFAGIAPVTESSGKSRWIHWRWACPKFIRQTFHEWAGCSIQQCEWARAYYDKKRASGKGHHAAIRALAFKWIRIFFRCWRDRVPYDEKRYLQAIQARLPKRAQDVPHTPVKPTIVLKTCGDFKKLVEVSY

SEQ ID NO: 429914 - protein, 372 aa, unidentified
MKEETAGHPGVVGGVDTHKDLHMAAVVDEHDRVLGSECFATTRHGYRQMLIWMRSFGELLRVGVECTGTYGAGLLRYLQHAEVTVLEVTAPDRSDRRKRGKDDTLDAENAAHAAFAGVRTVTPRTRDGMIESLRVLKVCRKTAVAARRGALQLIHNTVVCAPDELRESLRTMTRMQLIRTLAAWRPDLSDYRNLTSAYRITLKSLGRRYLELHDEIADLDVMIAALVNELAPDLVSRNSIGYESAAQLLLTAGDNSERLQSEAGFAALCGVSPVPASSGKVTRHRLNRGGDRAANSALHIIAIGRLRTDPRTKAYVDRRVSEGHSKLEAIRCLKRYIAREVYYVIRKRNRQIGQVQVASKGSVPDDRQAFAI

SEQ ID NO: 429915 - protein, 391 aa, unidentified
MSMYFIGIDISKYKHDCCIISAANQKVVSKVTIKNNKAGFNELLTIIHSLANPADIRIGFESTAHYALNLELFLENSLLTFMEVNPALISEYKKSKTLRRTKTDSVDCESIARWLMTVEYKPHSKGFYHAYSLKSLTRLRDKLIRQRSFYLVKITNVLDHTFPEFKPFFNERLSKTALYLLENYGSAEKMARMNSASYEKLRSVSRGKFSPQQFLRLKELAANTVGVNNSIFDVELNSLLSLYKSLVKEIDTIEKEINKLIEEVHPHYMSVPGIGPLSAAVIYSEYGDISNFTNPGQMLAFAGIEPGINESGTESHGGKMVKRGSSQLRYTLINCCLPLIRFDMTFATYYAKKREEGKPHRVAITHVAKKLIRVIYTLESQDIDFNAQKLR

SEQ ID NO: 429916 - protein, 414 aa, unidentified
MDMIYETVAGLDVHQKTIVACVRRRQPKGGLSEQVQTFGTMTGDLLELSAWLSQEGVTHIAMESTGVLWKPVWNILDGSFQLLLVNPVELKRVPGRKSDVSDSQWIAHLLQCGLLRSSFVPSRPQQELRDLTRQRTQLTREQTRVVNRIHKTLEDTNIKLGAVASDILGKSGRAMLNALVAGERNPAKLADLALGQLRGKIPQLKRALEGHLTDHHVFMLKSLLNHLQFLEDQIASLSERIDACLRPFVDPIQIEHLDAIPGVNRRTIENVIAEIGSDMSRFPDEHHLSSWAGMCPGNEVSAGKRLRRRTTNGNSWLRSALTEAAWAAGRTKDTYLGALYRRLSPRRGKKRALIAVGHTLLVIIYHVLKNDVTYQDLGADFFDKLNPEQYRRYLVKRLENLGFNVDLTPKDSAA

SEQ ID NO: 429917 - protein, 316 aa, unidentified
MQTPLVFVEIDVSKVRLDVAVRPSSDPLSVAYDTTGITTVLTQLSQWHPTLIVVEATGGLARLLVRALVDAALPVIVVNPRQVRDFAKATGQLAKTDTLDAQVLARFAEVIRPTLRVIPDAQTQELAALLARRRQVLAMQGAEQHRLDRAPDRVRKRIEAHLRWLHEELAWLDADLDDLIPQSPVWRAREELLQSVPGIGPVMSRTVWAELPELGLLNRKQLAALVGVAPFHRDRGRLRGHRTIWGGRASVRRVLYMAALVATRWNPVIRVCSPRLRAAGKAPKVALVTAMRKLLTILNAMVHAGTPWQPVVAQDT

SEQ ID NO: 429918 - protein, 351 aa, unidentified
MSKCITIGMDLGNEKHAVCALDESGQILFRKDIDNKPEVLEPFFREHAGATVAMETGLCCRWISALAKACGCEAVVCNARKLSAIWQNQHKNDENDALLLAQLTRADRRLVHPVALRDDEHHEIVQIIELRAVAVAQRTQAVNAVRGLCKACGVFIPGCDASCFHKVAADAIPRETAWKFRPMLRHLKETESLIRRYDKMLIKYAGAHFGEEVELLQTIPGVGTVTACAFVAFVDDVRRFRKARDVGVYFGLTPAQDKSRTQDKPKRITKAGNGIMRGLLVNAANYILRKSSPDTALKRHGMAICARGGKVAKRKAKVAVARKLAVVMFAMLRSGRPYEDAALSSSNGLVA

SEQ ID NO: 429919 - protein, 396 aa, unidentified
MAKLWIGVDIGKTHHHVAAVDGDGRLVYSRRVANDETALLTVMAEVSTHGRPVCWAVDVTTGLSALLLTLLWRRQVQVRYVSGTVAFHMAAAFAGENKTDARDAVVIAQTIRMRPDIPILDPSDRLLAELTVLTGYRADLVGQRVATLFRLQELLTGISPALERAVDLNRKAPMMVLACWQTPAAIRHAGVDRITALLRRGHVKNAVQVAEAMVGAARQQTVTLPGQRAAAVVVGQMATEILAIEQRIAAVDDLIAEQLDQHPLAPIIGSLPGMGPLLTAELLVHTAGMTEYDSPAKLAAHAGLAPVSRDSGTVAGNHRPPRRYHRRLRHILWMAAFAAARECPTSRAYYERKRAEGKNHRQAILALARRRVDVLWALIRDRKTFTRPTPAIRVAA

SEQ ID NO: 429920 - protein, 411 aa, unidentified
MKQQKSTDMTILPQLDKACGIDIHKDKIVCFIANKDGSGQELKEFGTFTCELQKAKAWLKANEVEHCLMESTGIYWMSLYSILTDCGISVIVANPTHIKQIPKRKTDRKDARWLCMLLMHGLVRPSFMPTSEQRVLRDYCRSRLFYSRQQNKIQNRLWKILESNNIKLRSVISSICTKTAMSIIRLLSLGITDKEQLANCSLGRARNKRDNMLLALEGTLAEHHQTQLQMLLQDFDHIQQQIKTLNTLIDENIAKHYSVAFECLDTITGIAQRSAEIILSEAGSDMSRFPTADHFTAWCGLAPGNNESAGRQGSTSIKKGNSYLKTAVVSAAWAAVRVKNSYWHALFERMRKRMKSQKAIIAIARRMLKVVYNTIQTLTHYKEKGVAYYHDMQEKAAAFRQAGKLWPSTQQ

SEQ ID NO: 429921 - protein, 315 aa, unidentified
MDEARRVTNCVGIDVSKDRLDAHIRPSGEAFAVARDGEGLEKLVERLAALDISLVVVEAAGGFETTAAAALAGAGLPLAVVNPRQIRDFARALGRLAKTDAIDAEVIALFAEKIRPEARPLASPEAQALGELVARRRQIVEMIGMEANRRRQAAAKRLVKKIDRHLAFLEKELAEVDADIDAGVRASPAWREKEELLASVPGVGPVTARTLIAELPELGQLNRRKLAALVGVAPFNRDSGLWRGHRMIGGGRASVRNALYMAALAATRWNPVIRAAYRRLVARGRPKKVALVACLRRLLTILNAILRDKKPWQIA

SEQ ID NO: 429922 - protein, 410 aa, unidentified
MDQDGKVIMRPFLVWHSTEELDFLADTLKRLNGEVRVIMESTSIYQYPIALHLKEKGIFISIVNAYKVKKFANTDFRGGKTDKKDSRTIASYGISYWDKLVEWQIPKDTYFNLDLLNRTYMNAKKHRQIILQELQHYIDCAMPGMDKELHSLNLNTKKDFMLDFVEKFWHRDEIVNMTETEFTEVFTAWAKEKGYRPGKGKAAKIYAIAKSCIPYYPANPTVKTILQCIVDKLSGVNRTLVTIVTQMIEEAKKLPEYQIVREMPGVGDPLAARFFGYAGDIRRFKNLKALVAYAGIDSPPDESGDFSSTHRHITKKGSKVFRDTGYEIMMALRAQKRTWEKVRKNPEVYDHMLKKKAEGKPRKVAKIAALNKFLRIVYARIKELYDNMALAERAKTKTRSKTRAKTKVTA

SEQ ID NO: 429923 - protein, 472 aa, unidentified
MAATTRKWGARGRAKAKKVDDTIFESLEPMYPDSAGIDIGSEEHYVSVPEGRDEEPVRHFGCLTPDLEAMAKWLKECRIRTVVMESTGVYWVPVYRVLQDAGFEVLLVDAHHAKSVPGRKTDVWDSRWLRKLHTFGLLRGCFIPPRDIQTIRAYWRHRASLVEECAEQIQLMQKSLEQMNVQLAKVITDISGVTGMAIIRAIIAGERDPLVLAGLKNSRIRSSEETIAKALTGHYSEEHVFTLEQAVQAYDFFQQQMAACDVKAQACMAQFEDRKPGSGSNAAAKPSGSKSRRKNQPHFDLAGELTRIMGVDLTKVPGIQASVAQTIFSELGFDLARYFPNEKRFCSWLTACPNNRITGGRVRSSRTRKSRNRVMDALRIAAQALHHSSSALGAYYRRMRARLGAPEAITATAHKLARLVYRMLVHGEAYVEQGQAAYEAQYQEQSVRRLQKQAARMGYVLVAQTTGELLPA

SEQ ID NO: 429924 - protein, 469 aa, unidentified
MGQRTVGIDLAIRGDHVARILDDGRPHGKPIRFRLTSESLTNLVARLRDGAAPDSIITAVMEPTGMSWFPVALWLKQAGIKVIRVKGQRVRALRRYLSEHTKTDAADAYVLGAIPMFGGVPSDPVYVPNAERHALQRLTRQRERLEDEVTAIKRRLLDLIRWACPAIEAVLPDLRTNLSLAVLHDLFDPAVVAKARRTALLRFVAKHASGNHPHSGPFAEALVDGLKLAAVETQRLHGVAVDFRLVQLEVALEVDRLRLLEAQLGRLGREVEALYAKLHPSDALRSIPGIGATLGPLVLGVLHEAQRFAGLHQLRGFCGMFPRVNSSGGADKPGQAITQAGNNRIKRALYLAADAARRIDPGLAEVYWRLMVRKGHHHKQALCAVATRLVNRIGKVLRTGEEYELRDTDGTPITVAEGKAIVADRFSIPTEIRNARRRQRPEATHAPAGTASSTGWPAAELSNPLCSVT

SEQ ID NO: 429925 - protein, 353 aa, unidentified
MRTNQTKTPAAISTIGIDIGKTTFHLVGLDKRGAIVLRQKVSRSQLERRLANVPRCLIGMEACSGAHHIGRQLEALGHDVRLIPAQYVKPFLKGHKNDYRDAEAIAEAVQRPTMHFVRIKTPEQMDLLALHKVRSRLVRQRTGTINQIRGFLIERGITVRQRPVPLRKALLDILASDAAETSPRILRLLEDLAADWRRLDERIEAVSAEIEGLAEQDESCQRLMTVPGIGPIISSAVVAAIGNGSGFKQGRDFGAWLGLVPRQISTGDRTILGRISKRGNSYLRMLFVQAARVILLRPANWPKHSFGRWLEAAARRMHHNVVATALANKLTRIAWSVLYHGRSYQPRIGAELA

SEQ ID NO: 429926 - protein, 350 aa, unidentified
MLIIGCDYHPGFQQIAYVDTETGEWQERKLAHPKEAEEFYRALHEQWDGIRVGMEASGHARWFERLLAELKIELWTGDAAKIRAKRVRKKKTDREDARHILNLMLKDDFPKIWVPSWDNRDLRQLLWHRHRMVQMRTRIMNQLQAVALNEGLRCKKRLWRKHGRPQLESIRLAPWASRRRRDLLELLDRLNPTIAELTQLIEQEVAKNPIAQRLMTHPRVGALTALAFVLIIGEAERFECGKQIAAYLGLVPEEDSSGESRRLGHISRQGSGLMRFFLVEAAQVTVRSDAEWRNKFFHLAMRRGRKIAKVAMARRLAVRLYWMWRKQWDYEQLKKFGPHAGQPGTGVGVQ

SEQ ID NO: 429927 - protein, 375 aa, unidentified
MMIVIGTDTHKSSHTVAAVAEATGRVLAERTVKAKRRSFEDLLRWGRGLGEQRVWAIEDCRHVSGALERFLLARGERVVRLAPRLMAGARRSAREPGKSDAIDAVAIARAAIREGLHTLPVAQLAGPELDVRLLVDHRERLIRQRTALINDLRWSLHDLWPELEIPPRALIGSGWQDRVGGRLARAEQTTRVRIARDELRRIRELTRAIDALERELAPLVAELAPRLLAEQGCGVLTAAKLIGEVAGVERFATDAKLARTAGSAPIPASSGRTDRHRLDRGGNRQLNCALHRLAVSKARLDPDTAAYLARKQAEGKSRRDALRCLKRHLARRVFKLLQPPTPAPPPTPLGDRPPVIATAGRMIHCNRPAGMPVLT

SEQ ID NO: 429928 - protein, 356 aa, unidentified
MQTQVTKKIDFTGTDLFIGLDVHKKSWSVTIVVDGMEHRTFTQPPDPEALHKYLQRSFPGGNYTSAYEAGYCGYGIHRRLNELGIKNIVINAADIPTTQKDKLQKRDPVDSRKLARGLEKNSLRGIHVFDRDHEELRSLNRTRFYLMRDLRRSKNRIKSFLLYYDIPLPGEFDNNQWSLKFIAWLKQVKLQTIAGQEAFSHLITSYEHHRQQLLILSRIVRLRISQHDKELFNLLKTISGIGPLTASALITEIGDINRFSHIDDLASYVGLVPRVRESGETTHTGGITFRCNNFLRVLLIEASWQAIRQDPAMMQYYHKHVINSKGHKVIIKIARKLLNRIRYVMKNRQPYVTGVV

SEQ ID NO: 429929 - protein, 347 aa, unidentified
MNLYNNTHPYYCGIDLHARLLYVCILDQEGNTLVHKEISADPNKLKFLLEPYLGNVVVGVECMHCWYWVSDFCDDLGIDFILGHALYMKAIHGGKAKNDKIDSFKIAKLIRGGNFPLAYVYPKEMRATRDLLRRRTKIVRHGADLKAHVVNTTSQYNLPPNKLNLKNTAAREQLRSTFLDRSVQQNIDLDMIILDCYAEQLAKVEWFIEKQARQHKPMHLPILRSINGVGRILSLTIIYEIGNIERFESVQQFASYSRLVKCKAMSAGKSYGTQGNKIGNAHLKWAFSEVAVLYLRGNDGAKKYLLKLQKRMSKAKALSALAHKMGRCIYFMLKNETVFDEERFLKR

SEQ ID NO: 429930 - protein, 345 aa, unidentified
MEKPIRIGIDTSKHVFQLHGVDAAEKPVLRRQLRRADMLMFFERLPPTSIALEACGASHNLARLLTSYGHEVKLIAPQLVKPYVKRGKNDAADAEAICEAMSRPTMRFVPIKTPQQQAALMLIGVRDRLIQMRTQVANSIRGYAAEFGLIAAKGICRVEQLLDRIALDRSVPALARTLFATQGKIYRQLEEEIAETEAQLAQWHRADERARRLAGIPGVGPIGASLLTMKSPAPELFASARQFAAWIGLTPKDHSTGGKTRTGKITRAGDEALRSVLVAGATALLRHVRAGRSKHASPWLLDMLKRKPPKLVAVAVANKIARIAWKLMVSGERYHSRSTNQPVTA

SEQ ID NO: 429931 - protein, 301 aa, unidentified
MHKNTISAAVLEPGSMVPVVDKISADDESVRRLVARFEEPGRVWACYEAGPTGYELARVLRGAGMRCEVIAPSLIPARPGDRVKTDKRDARRLALLFRGNQLSSVRVPTPAEEAVRDLCRARADMIIDLTRARHRLGKFLLRHGRVWRAGDNWTQKHRAWVRAQRFGERALNETLAHYQATLTAREAAVDAIGADLAPWCDRAPFTDAVGRLAAYRGITRLGGLTLAAEVCDWRRFPTAPMFMGFTGLVPSESSSGDRTRRGGITHAGNTHLRTQLVEAAWAYKTGEIRRFIRSTWPRTPR

SEQ ID NO: 429932 - protein, 353 aa, unidentified
MRKPVTKRALPKGQKVFIGIDVHKKTLSVTCVCEGEVIERLTMVNDAAALSRFLKRRFAGAQLYSAYEAGFSGFGLHRHLCRAGIHNIVVHAAAVEVSARDRVKTDKRDSLKLAVQLAAGRLQGIRIPSEAEEGQRLVTRTRAQLVQERSRLKNQIRSKFHQFGSIAPTDERELSLPMVRALLTQGASAELELVVRALVAVWESINLQLKHLLAELKQQAERDPYEPTYRSVGGFGALTARELSNELGDMRQFRNERRLFSFTGLTPQEFSSGEHQRQGPISRQGRSRLRALLVEAAWRALKKDKALATFFARLSARVGKKRAIVAVARKLMGRVRAALRKGELYQCGYGYAA

SEQ ID NO: 429933 - protein, 321 aa, unidentified
MKPWNQIEHYAALDWARDHHDIVVVDRTGTIVADFRIAHTREGWDQLQRRLAAFPHLAIAIETNQGPAVEQLLAAGLPIYPINPLSAERYRERKRPSGVKTDRLDAWAMADALRVDGHGWRRLVPADPLVAELRQPCRDEVALIEQRTALIAQLRTALHSYYPAALEAFDKWTSPSSWEFAPRLLSELGDDRARFPTAESLQCYAGTAPITYQSGQMHRTLMRRACNTRLRHAVQQWANLSVVRCSWAGAYYRKHRADGQSHACAVRCLGQRWVKILWRMWQSGTCYDPELHQRNQLKHGSWVLSFQSPTTPSAAPALKTA

SEQ ID NO: 429934 - protein, 404 aa, unidentified
MYYVGIDVAKEKHYVCILDDTGEYAVKPFWIYTDVIGLRKLIRCFGDLSLDNDDFLVGLESTGAFSENLYAYITDSDYKVILLNAYQTAKFRDFRTVKKVKNDTIDAYVIAELLPTGKYKESHISNDAYHSLKVLGRTKKSLMDKIKTIKREISTVMATVNPEIGKIFPNIFTKTALEVIKAYPTATDMVQATPKKLTRLFRHIKGNNFSEEKARSLIGLAKTSVYAGRACKARASLLRSYIRILELYCQEKKEIEAHIKQLMTEEIDALDNTVENLQSIPGVSDKTISAILGECGDLRRFDSARAFIGYLGLYPTQYQSGNSLSVGRLAKRGVPIAKHALYMAAVGSVLHNAQMNKLFHDKISSGKSKKEALIILSKKIATIMYSIAKYNKPYEPHRVFIPNR

SEQ ID NO: 429935 - protein, 397 aa, unidentified
MYIVGIDIAKRKHEAAVIDGEGAVIIKPFSFTNNCSGYNRLLAMLAKAKLPLDEVSFAMEATGHYWLALFTRLQKEGFRVQVINPVQTNSIRSFYIRQAKTDPRDALLIAEVIRFGHFSESTLHPENIYELRELCRGRHAIVSMQADVKRKVVALLDQVFPEYETAFTNLFGDTSMAILQTCPTPKELSEMRLEELCHLIEVSSHKRFRMAKAQELQELARNSFGFAMAGDVFSTMIRLYAKHLDFLKQQVREMDRKIAEIMETLDTPITTITGIGPTLGAYILSEIGDISRFSSAAKLAAYAGIDPTMRQSGECNGVRNRMSKRGSPYLRHAIWLAASSAVLHDPALKLYFQKKRDEGKPYMASVGHACRKMVSIIYAVMRDNKAYTPYIPNEISA

SEQ ID NO: 429936 - protein, 343 aa, unidentified
MNHIGMDLHSTTTDACVRNEKGEIILRRHLQTTPAELKKFLDGIPGAKRVAIEECQMADWVTRCLEPHVDEIIRSQPQFNTLISESEDKEDRKDAKSLSELLYLNRLKAVYHPDLDHRNLREAVRAYWIASWELTRAKNRLKDFFLFHGVHEKGDKIYSARHRERSIKKLKGSPGTNLRLLELLYARMDQCRQLKAQHIRLVRESAKPMMHLVRLLQTMPAIGPIYAYTLVAYLEEGQRIRNKRKLWRYGGLSLRQHESRGIGKKKASRLGNRLIKHVALSVATTIASHPDGNALGARWEKDIRGKVKPNLAIRNLARKILVIAQCLLRSKKEYNDELNQLGV

SEQ ID NO: 429937 - protein, 382 aa, unidentified
MRSTLWVCKSHTGSNAQEGGSALEMDGSSEQPQMTAGLDLSDKYSYLCLIDQQSGEVIEEGRLRTTPEAFRRRFASEQPLRIAIEAGTHSPWVSRVLEECGHEVLVANARKLRLIYANKRKTDEIDAENLARLARVDPKLLYPLRHRGEGSQAHLALIRSREALVSSRTQLVNHVRGTVKSFGARLPKCPARSFHKRASEHIPEVLRPALGPILETIGSLTERIKDYDRKLEAISKEHYPETDLLRQVEGIGPLTALTFVLTLEDPYRFEKSRSVGAYLGLVPATDQSGDRDPQKRISKEGDEMLRKLLVGSAHYVLGPFGSDSDLRRHGEKIASRGGKNAKKRAVVATARKLSVLLHRLWVSGEIYDPLYNAHRRQSKEAA

SEQ ID NO: 429938 - protein, 346 aa, unidentified
MATRIAVLGIDLGKNSCSLVGLDQVGAVVRRRRMRPENIPGFTSTLPACVIAMEACCGAHYLGRVVAAQGHTVRLMSPEYVRPYIKSHKNDDRDAEAIAEAATRPTMRFVDLKSETQLDIQTLHRARDRLVGERTALINQLRAILLERGSTVPRGRHKLEQYLAALPDPENDTTLSPRIRWLVEDMRAEWRELDRRIAAFDNEFAALARSDPAARRLATIPGIGVLNATALVAAIGDGQSFARGRDLAAWLGLVPRQVTTGGRPRLVGITKRGNKYLRKLLIHGARSALPRLANSGTPLGEWLRALMGRAHKNAAVVALANKLARIAWAVLRQGEDFKAAAARAAV

SEQ ID NO: 429939 - protein, 412 aa, unidentified
MDQIHDRVAGLDVHRDSVAACVRVPGPRGGTVTHKQRFSTTTTGLGQLGAWLAEHRVEVVGMEATGVYWKPPFYALEGRGFELWLCNAHHVKNVPGRKTDMSDAEWLADVVAHGMVRPSFVPPPPIRELRDLTRYRRTEIDVRAAETQRLEKVLQDAGIKLSSVASRVLSMSGRNMIEALIAGERDTAVLSEMAIGRMRNKLTDLTEALNGHFGPHHAVAARQILDHVDFIDASVAALSEQIAVRTEPFASVFELLGAVPGLSRLSIEVVIAETGADMSRFPSAGHLASWAGVCPGNHESAGKRRRVGTTSGDPWLRRTLIESAHAAARTKNSYFAVQYRQLAHRRGPNKAAVAVAHSLLVVIWHVLTTGERYEDLGHDWLKRRRDPERETRRLLRQLEALGHSVTLAPSAA

SEQ ID NO: 429940 - protein, 348 aa, unidentified
MLADQLDYVVGVDPHRDSHALAVVQVLTGAVVFETTVAASSQGYVQALEVVDEHASGRRVFAVEGTGSFGAGLTRFLSGRGERVLEVSRLRRERCSGGKTDALDAVRAARSVLGQERPATPRAGGERQALQALVAAREGAVNAKCAGLAQLRDLLVTTPEPLRSELRPLTQAPLLRRLAATRPEGRRDPELRGSMLALRSVARRVLQLQAEQRELGRQIEALTRKLAPQLLDQPGVGPHAAAQLVLSWSHPGRIRSEAAFARLAGAAPIPASSGQTVRHRLDRSGDRKLNRALHLILVTRKRTHPPTRTYIERRIQEGKTRREANRCLKRYLARNLYRLLEHEPPIAT

SEQ ID NO: 429941 - protein, 354 aa, unidentified
MQRSLRRIIDMQIRSVGIDLGKTTFHLVALGTSGKVLVKKKLSQKQLLALRANMQISLIGLEACSGAHFLGRALRQQGHDVRLIAAQFVKPFVKSNKNEFVDAEAIAEAVERKNMRFVPIKTDDQLDLQAIHRVRDRLLSRRTAVINQIRAFLLERGMVFAQKPAKLKAAMADVLENAENALTPMMRNLIGMLWDEWKTVEQQIDELTDRLEQIAASDAGCCRIRQIPGIGPIVATAIVAAIGNGAAFRKGRDFAAWLGLVPRQYSTGGKAKLLGISKRGNIYLRKVLIHGARAAAMRIKRDRFTIGTWMNALEARAPRNVLVVAMANKLARIAWAVLSTGEEYRPGVIAAVAA

SEQ ID NO: 429942 - protein, 398 aa, unidentified
MTESSDYESVQVFIGVDVGKDTHHAVAVNRSGKRLFDKALPNDENKLRSLISDLKQHGQILLVVDQPATIGALPVAVARSEGVLVGYLPGLAMRRIADLHAGEAKTDARDAVIIAEAARTLPHALRTLKLADEQIAELSMLCGFDDDLAAQTTQASNRIRGLLTQIHPALERVLGPRLDHPAVLDLLQRYPSPDKLASLGEKKLATQLCKLAPRLGKRLAADITRALTEQTVVVPGTNAAVVVLPRLALQLITLRKQRDEVALEVEQRVLAHPLYPVLTSMPGVGVRTAARLLTEVACRAFASAAHLAAYAGLAPVTRRSGSSIRGEHPSRRGNKTLKRALFLSAFAALRDPISRAYYTRKMSQGKRHNQALIALARRRCDVLFAMMRDGTFYTPAAS

SEQ ID NO: 429943 - protein, 338 aa, unidentified
MNLYVALDVSLEFTAVCVMDEEGELVLERKVASDPAAIAGLLFELPERPCCVGLEAGPLSEWLARGLAQAGLDAVLMETRHVRAALSAMVAKTDRNDARGMAQLLRMGWFRPVHRKTMNAREQRALLAARSTLGRRLRDVENSVRGILRGFGIRVPRLPRGRWSDGVRGALQGNTVLRGVVEPLLAATQALRDQLAVVDKRARDAARQDAVCRRLMTMPGVGAIVALTYRAGVDQPERFKSSRQLGPCFGLTPRRYQSGETDRSGAISRAGDASVRVALFEAAHVMLTRSTHWSKLKAWAVAVAKRRGAKRAKVALARKIAVILHRMWIDGTEFRFVA

SEQ ID NO: 429944 - protein, 411 aa, unidentified
MDVRTDEEFITVGIDPHKNMVVAFFFNVTTNEKWIYRFPATPPAITAFAQNCLKRNMLVGIEEGPNAYAIASILKEYVDRLLIICREKRSGKVKTDEIDAEEIAVALATSTYKSRWIPPLALERLRRLIHSRDSIARKVAGQKNRIRSFLAQELIRLEANDPFSKKGIEEMKQLAYKSLPMDKGLDLLIEVLIYEFLSHILRVFDDFLRSLGKDNPVVQTLISMPGIDVIAALYLVAEMGDPSRFPSPKKLAKYAGLVPSLYQSGERSRNGRITKAGRKLLRWIMVQIANNAVRFPGHIQEFFLRLKAKKGYAVAIVATARKLLCAIWHMLTKNELYRDYVARLYKKKLRALERRKKAELPKAPNLEMLFKEIEKFLKERGIVWKAEEGLMSGLYEHIIDWEMLVPKNLYP

SEQ ID NO: 429945 - protein, 451 aa, unidentified
MSEHPIDSSVSLIYPHAAGIDVGANTHWVSVPPERDPQPVREFGCFTGELYALADWLTQCGITTVAMESTGVYWIPLFQVLETRGIEVYLVNAHLVKTVPGRKSDVLDCQWLRQLHSYGLLSASFRPDDQVCVLRSYIRQRERLSQSASVHIQRMQKALTEMNLQLTQVLSDITGVTGMAIIRAIVAGERNPQQLAAMRDPRVKRSASEIADALTGDYRVEHLFILQQELQLYDTYRQQIERCDEQISLCLSEFETRSDPDTPLPPRAKGRKPSRNAPTFDLRSDLYRITGIDFTQIDGLEALTVQTIISEVGLDPTRFPSVKHFTSWLGLCPGSRISGGKILSSKTRKVVNRAAAAFRMAAQSLTNSHTALGAFYRRIRNRLGAPKAITATAHKLARIFYRLWTTKNAYVDVGADAYEQQYQQRVLKHLKRRAQQMGFELVPTQPLPEVS

SEQ ID NO: 429946 - protein, 358 aa, unidentified
MQHKPTTPQNEALDAFIGLDLGDRFTAICVLNHHGEVENRFRCHTTRDSFEKHFARRPRARLALEASGQSAWIAQQLRGYGHEVIVANPRQLHLITQNTGKSDPADAETLARLARADQHLLKPVHHRSPETQAHLAIVRARDTVVRARTQLANCARGLAKLTGHRLPATLSTTYSERASAQLPTELTDALEPLLKQIDQLSETIKDYDARLERTARLHYDAPVRRLRSTPGVGTLTALAFVLTLGNDPHRFPKSRDVGPFLGLNPKRRQSGDADPQLGITKAGNTLLRRLLVQCAHHILGRFGDDSTLRQWGLKIAERGGARARKRAVVAVARKLAVLLHHLWISGEDFERFPAAPRI

SEQ ID NO: 429947 - protein, 350 aa, unidentified
MLHAGMDMHKLFSVVTVVDDSGNEVVKGKKLLNRDLEIVEFFKSLQDKLRVVIEAGSNWMWMTDLLDDYGIENVLCHPLKTKAIASARIKTDKLDSLTLSQLLRANFIPEAYKPDQKARSLRELLRYRASLVGKRTGIRNAIHALLARGNISLPSSDIFGKKGMEYLLKLELPPLRRFTLDGYLEILKALTHEVKKAEEKIKEEYKSSPEAQLLSTVPGVGLILSLTILSEIGEISRFKRARQLSSYCGLCPSTAQSGNTLRHGRITRQGSKWLRWAFVEAAIQASGKPGPLRDFYLKLKKRKGGKIARVAVARKISIYVFHMLKEKKTFAEVISLNRALWGELEVDTGC

SEQ ID NO: 429948 - protein, 364 aa, unidentified
MERIYIGVDFHARQQTICYLTTEGEILFHELKHQDKEAVRQFYARFSGQVMVGLEASGYSLWFERLLAELGCEVWLGNATQIRRRARSRHKNDRRDAELILDLMLHNEFPRLHIPTFESREIVRMLRYRQKLIKLRTISKNSLQALALQAGLAKGSHLFSKAGRQELLTADMTPAMQWQREQWLQLLEPLNQQLLQTMLWLKQQSQADQRVRRLRTHPGIGLLTALCLVHSLEPVRRFRNTRKVAAYAGFDPLERSSAERQRSLGISKAGSRVLRYLLVEAAHTSVKKDDDLKRFYKRLAERRGRAKAKAAVGRKLLIRAYIMLRDEIDYAEFQRRAVAARLARRSPGPTMPGSVIGQSASPGA

SEQ ID NO: 429949 - protein, 375 aa, unidentified
MDQIPQPIVKAEPEPEFAAWVAIDWADQKHYWSLRAAGQEGLQRGTLDHTPEAVEVWIMALHVRFGGRPLAVALEQRRGALAVMLSQYAHVHLYPVHPTTLAKFREAGYPSRSKSDPSDADLLLEILTAHRSRLRRLDPDTVEMRLLQNLVENGRKLVDERTALSNRLTDLLKLYFPQILGWFTDVASAVVGDLLEQWPSLQDLQPVQPVKLEKFLHDHPCSEIPERLTQIRQAMAATHDRALLDSAPYLVAAWVRQMVVLRKSIRQLEKRIAERAAQQQDWPIFQSLPGAGAALAPRLMVALGTQRDRYSSAGDLQSFSGIAPVKQASGNTKWVHFRWACPKFLRQTFPEWAACSIAQCEWAKDYYEQQKARGK

SEQ ID NO: 429950 - protein, 347 aa, unidentified
MVMIGIDPHKRNHTAVAVNRCEDVLSKRLVHAGNAQIAELIGWADGLDDKQRTWAIESAGGLGYLLAQQLLAAGERVVDIPAVLSARVRVLSSGTSNKNDPNDAFSVAVAALHAKQLIEVRVEDHATILRLLTRRHTQLAQAHNKAACRLHALMCDLIPGGIRKEIVARQAAELLDSITPSTRVAAQRLLLARDLLADVELLVEQRRESKRRITAAVAASGTTLTEIFGVGVVVAGTLIGHAGDPNRFTTADRFAAYNGTAPVERSSGDPNSKIWRLSRRGNRTMNHAIHMAAVTQIRHRHSIGRAFYDRKLAEGKSPKKALRALKRRISDTVYRHLTADAARAARH

SEQ ID NO: 429951 - protein, 321 aa, unidentified
MNKDNEIYGIDISKKVFDVYSLNSGHKQFNNDEKGFKLLLRELPKQALVIMEATGYYHYRLAQYLHKRGVKVSVVNPLSVKRFIQMRLAKVKTDKSDAKAICEYGIQNAVPLYNALTDVQAECLQLFRLLDIYIKQRTATKNKIKGEESLGKPSRAVYSSLKRNLRHLDKEIGCIEDRLLELVKQDQQQQLTLLKSIPGMGVKTALFLIVVTDGFKKFETASQLCSYVGITPTIRESGSSVRGRSRISKVGNKKLRNLLFLCAFSACKHNKGCRELYERIVAKGKSKKLALIAVSNKLLKQAFAIAKSGLPYDENFVSKLV

SEQ ID NO: 429952 - protein, 294 aa, unidentified
MEYFAGLDVSMAETHVCVMTGSGTVIHNAKVPSTPADIAAELAQVPTCRRVVFETGRMAPMLYHGLSQLGLPVVCIESRQAYQALKLLTTHKTDRNDARGLAHLARTGFFKPVHVKSLPAHAVRSLIIARKKLVGQRVTLENQIRGLAVVFGVRLPRALSPSFIDQALRASDGIPGLSAAMQGLAAARAAVLAAVVAIDGDIRRMVRASDACRRLMSIPGIGQLTALAFTAAVDDPKRFRRSRDIGAYLGLVPRRHQSGEIDYTGSISKCGDRRVRTLLYEAANVMLTRYKGAA

SEQ ID NO: 429953 - protein, 393 aa, unidentified
MQRDTKEVLAELVGKLKAKLDPTKVAATSAGEKHQRGELRPNLDRLTVGVDLGDQWSHYCILGLEGETLAEGQLRTTQEDLATFFQGLNEARVVVEVGTHSAWVQEVIRGCGHEVLVANPRLMEGSKRRKRKNDRIDANKLARLGRVDPESLYPIQHRSREVRQDLVMLRARDALVAARTEIINTTRGLVKSMGTRLPKCSSRSFAQKGEEAVAVEMREALLPLVRLAATLSADIKEYDKKIEELGREKYGHTALLRQVKGVGPITALAHVLTLENPQRFAKSRDVGPYLGLVPKQEDSGESQPQLGISKAGDTMVRKLLVGSAQYILGPFGPDTDLRRYGLRLCERGGKNAKKRAAVAVARKLAVLLHRLWVSGEVYAPLHHAMSAPIVAAA

SEQ ID NO: 429954 - protein, 456 aa, unidentified
MPEKEKRTRARSSGRLSTINEHAAGLDVGSTFHVVAVRGDQDDKPVRTFRSFSGDLHQMADWLTSVGIKTVAMESTGVYWIPVFEILEARGFEVLLVNARDVKNVPGRKTDVNDAQWLQQLHQHGLLRGSFHPRADVAQLRTYLRLRERMVEYAAAHVQHMQKALMQMNVQLHHVVSDITGATGLRIVRAIVAGTHAPEQLATYRDVRCGASEETIREALTGNYRAEHVFGLKQALELWDFHQVKVAECDVEIEAVLKSLNETHVEPENPIPAVRHAKARNEPKFDVRSALYTLLGADLSQIHGFGPYTVLRLVAECGDDMKKWPTAKHFTSWLTLAPGNKISGGRVLSSKTRRSSNRAAALLRIAAVNIGKTQTALGAFYRRLSARAGKAKAVTATARKLAVLFYRALRFGLAYADPGAGYYEERYKRRAIENLQRRARGLGFTLVEVPESGGVS

SEQ ID NO: 429955 - protein, 316 aa, unidentified
MMTVVVPDFNTKWGDYLISRDGIKMTKRFGMTLEDLLEFKSWVVENQCEQVAVESTGVYWIPIHAVLEDAVDLIVANAYKIKHIPGRKSDLIDSEWIAELCLNGMIEPSRIFPKEDRELRRLTRAREGYVTDMTREKNRIHHALESCGIKLSSVLADVFGKSGRYLLNSLLDGVELEEMIKGIPVKSIRKKADQIREAVRGSLETTQIILIRGGLEQIESIQRRIDELEGEIKNRIASRREDLKIAMSIPGIGFTSAVTILAEIGDFKDFAKAEQLAAWAGLVPAVYQSDDKLVTGSITKHGSKHIRWYWSRLLRL

SEQ ID NO: 429956 - protein, 343 aa, unidentified
MEKISTIGLDLAKSVFQVHAITEDGHIAVRRALRRSQLLEFFRNIDPCLVGIEACGSVHYWANAIGEFGHTVRVMPPAYVKPYVKRNKTDAADAEAICEAVTRPTMRFVPIKSSEEQAASMVLKTRELFVRQRSQTANAMRAHMAELGIIAATGMTSIAKLIAVLRDDRDQRLPNSARTALLEMAEQIEKLTARVEALDTKIVAAVKADEAARRLTTIPGVGPIIAATVRAAVPDPAAFRTGRDLAAWIGITPRANSSGGKERLGKISKQGNKQLQTLLIVGATSILKQVRRGVKLPAWVVSLIARRPYKVAAVALANKMARTIWALLVKGGIYQPPSPSVTA

SEQ ID NO: 429957 - protein, 423 aa, unidentified
MGKTIPICCGVDVHKKFLVATILTGDYLIPQCKQKHFGTSFRNLLAFKQWLLDNNCKDVCMESTGKYWVPVWNVLEGVVNVVIANPKWVSAVQGNKDDKKDSKWIGNLFRMGLVPSSYIPGKDIRILREFTRYRSKLVSMRASEKNRYQNAFTVCNLTLDAVVSDMFGKSAMAIENYLLDTDVVDPEICVSFLQRSLKKKSAEIIEAVDGFNMTQEEKERVRIIQGHFADINKRISQIDEIIGRLTAEYEGTISLLCTIPGIDRRLAITIISEIGTDMSEFGSSRRLCSWAGLTPGNNQSAGKKKSVKITRAGVYLKPALVEAAHAAVKSSEKSPYFRIKYEKIMKRRGKKRAIIAIARMILTSIYAMVSTGETFNPSDLLKYDMPEELQKKRTLAEAKDAVKLLVSLGLVAEGSISLEALAS

SEQ ID NO: 429958 - protein, 346 aa, unidentified
MTYSTTVGVDLAKNVIQISVVSGRGKELSNRSLTRTKFAEFLGKQKPSLVAFESCASAHYWARAAKRHGHEARIIPAKAVMPFRQGHKTDSNDALAVAEAARRPNIKEAPMKTAEQQGLQAIQRSRQLLIGECTALSNHLRGILLEFGVAIPQGFASLLRALPEILEDGDNELPDLYRPTLHRMHQRLLELREDIESMTKEVDILVKQHPVCKRLTAIEGIGPIGALSLYAVLGSGKAFTKSREFSAYLGLTPRQYSSGGKTNIVGISKKVGNRRLRSILIQGARAYVYRMKEPRSLKDRWLKDLIERAGPNRAAVALANKNVRTAWAMVTQGTEYQRRLQLEMAA

SEQ ID NO: 429959 - protein, 395 aa, unidentified
MSEQGRVVIGMDPHKRSVTIEVMTADEGVVGGGRFATDVEGYRQLLSYVASWSERVWAIEGCRGIGRHIAHRLIADDQEVVDVPPKLSARARVFSTGQGRKTDATDAHSVALVGVRMAGLRPVVADADLDVLRLLVDRRRQMGEEHTRKVSQLHALLLELIPGGAKKSLTAAQARKLLTAIRPRDVTGKTRKRVAAELVGDLERIYARKRAADKELRELVAATGTGLLDLHGIGPQGAARLLVEVGDITRFPDRNHFASWTGTAPIDASSGDHVRHRLSRGGNRQINRALHMMATVQLRNATDGRHYYDHKKATGKSSMEAMRCLKRRLSDTVYRTMLSDVAHHAAHRAGTGPGGQRGNDSDSSAAGSQPQHRLFGQATPGPVNDQPKPALPKVS

SEQ ID NO: 429960 - protein, 415 aa, unidentified
MALTVLYERCAGLDVHKATVVACTLLTAPTGKASRQVRTFPTTTAGLLALADWLSSQAVTHVAMESTGIYWRPVFTILEDSFEVILVNAQHMKAVPGHKTDVKDSEWIADLLRHGLLKASFIPPKPIRDLRDLVRSRKSLVQDRTQPINRLQKVLETANIKLACVASDVLGKSGRDMIEALVAGISDPEALANLARGRLRTKLPALRQALEGRIDPTHQVLLRHLLDVIDFLQAQIDQLSTDIEQRLHPYELQLSRLMQLPGVGRLAAASILAEIGTDMACFPSAKHLASWAGVAPGNRQSGGKRLRAATNKGNTHLRAVLAEVVWVISHTSDNSLSAQYHHLARRIGKKRAIVAVSHSLLVIIYHLLLDNQDYHDLGPHFFETLDTTRQRDTAVRRLQALGYKVTLEEREEVSA

SEQ ID NO: 429961 - protein, 424 aa, unidentified
MTTLHNSATNTNHPAILAFDVSKDLLNLTANIAGRMVDMEFANRTRIIDEQLTILSRRARMAGHERVLVVSEPTGCYHQPLMNSARRLGLETAWVSGEAVCKMRVIETNDSGKTDLKDPHVIHTLARLGKTLIQRHLQETYALLREWNNLYERAERGVVENKGLLHRQLKVLFPDYGFQKDFLYGNSGIALVERYGVNPYRIVRAGKTRFCRTMRKQVPYIRQGTLDRLYQQAESSTRHILSTRQHELLEFRLHQLWEDYCLHQRRKEDARAQMEMLYAEARQNDPKLPAAEKGVINTFYLARILAETGPISDFTSLRKFMRYAGLNLRERQSGTFRGKTRLSKKGRRNLRKILSQIVLPLVRKGELFGAYYHAKRDRDGMPGTKAMTVVMRKFLKLFYGWYQSGGAFQRERVFICQSQYHRAA

SEQ ID NO: 429962 - protein, 345 aa, unidentified
MYRTRVGVDLAKKVIQVCIYKNKKVQSNIEMTPEEFLSWLITNKPVTIIFEACSSSNYWKQKAIEAGHDARLISAKLVSVVRQNQKTDKNDALAIVQTTFMPDVTFIGGKTVEQQQLQSIKRLRELTVKQRDASQKQLIALLFELNIKISSRRGGIISAIEDVLEDATNGLSTECRRAIFLAKENLKGLLEAVRHYNDCIERSVNTHSVCKKLMKLEGVGAMNAINLYIALGCAEIGTFSKGKDASACIGLTPIQHSSGGVVKLGSIGKFTKNSILRSQLICGATAAVQHAVKRKAKTQKDAWIQGLVERRGKKCAAVALANKTVRTAFAMLTQNTEYKAELLTA

SEQ ID NO: 429963 - protein, 351 aa, unidentified
MGVDIGKRNCVVCIMHSDGSIIEETEYDNTLDQAESFASYIKRKHGGSGKSSITAVCESTGNLWLKTYQAFEKYNIDVKLANPLKTKAIAEARIKTDKIDAKTLAHLLRSDLVAECYIANKKTREERSLLRLRTNLVQDRTRVVNRTHSLLDKYDMNFGYSKIFGIKGLQWLRDLRVTGNDQILLQEYVSQIDFLTTEIKNIESKIKIEASNNESVKILMSMTGIDYFSAMMIASEIGDINRFGSPQKLVSWAGLCPSVHQSGNSLYMGRMKEGNKKVRWILIEAANTASRTDDRLRKFYIRMVKRHGRHIAITHVANKMCTIIWHMLKYKKLYNERKPNLYKTKLKRIQN

SEQ ID NO: 429964 - protein, 394 aa, unidentified
MGIFVGIDIGMKFHHCFFIDQDGKKIMDFRFNNNDEGFKLLFENLLKYKKTDIDTISLEATGHYWYALYEKLLKEYSQIKVFNPILTSATKNINIRGIKSDPSEAKRIANLPRLSDVLASRIPEGMLAELRDLSRFRRKITKQLNSVILYLQSILDVIFPEWREISKNGINTTLLTILKETPFPEQILKLGKEKLLCIIRKASKNRLGKEFAEKVYHLASITVGCTTKRSAYWLKIIDSIKQIEMFKSQISELDNELSDMFKSEQSLLQSIPGIGKVNSAAILSEIGDLKSLNNNNGQAIVALAGLDPKVKESGKYQGKRKISKRGSRYLRAAIYESVFVAVFTHSNKQNQFRMIYLKHKGRGKKHREALLAACNKMCHVIYSVLKYQNNYNEP

SEQ ID NO: 429965 - protein, 343 aa, unidentified
MEIRSVGIDLGKTTFHLVALGDNGKVLLKKKFTQRQLIAFTANLQTCLIGMEACSGAHFLGRTLRQQGHDVKLIPAQFVKPFVKSNKNDFIDAEAIAEAVDRENMRFVPIKTDDQLDLQALHRVRDRLIARRTSVINQLRAFLLERGLVFAKSPARLRERMPEILENAEEDLTPRMRNLLALLWNEWKDLEQQLVDLNQEVERIASSDAACTRLRQIPGIGPLVATAIVAAIGNGAAFRKGREFAAWMGLVPKQYSTGGKVKLSGISKRGNRYLRKILIHGARAMVLRCKRERIPMGAWMTALETRAPRNVLIVAAANKLARIAWAVLSSGQDYRAVQEPVAA

SEQ ID NO: 429966 - protein, 335 aa, unidentified
MSESTRPHVWCGIDIGKSKFCAAVANAKGTVQVIELDNRTSSFAKLLAWARRHAGEGTPVKFCMESTGDYGDNLALFLADSGVHVSVVNPAEVKRFGVYKGFLNKTDMADAKIIALYAADAAPKAWQFTDPARRELFRLIRRVTQLTKMEAMELNRKECPEAIGKTCMKSIEDHLAFIRKEKRALQAAIAAIIEADVQLKKAYELITSIPALGKGSANIILVDMPPVEAAASAKEWAAASGTNAVTRKSGTSLNTSRMSRKGRKSVRCTLWMPTLLGRKKMRELEDLYDRLRARGRNHKQALTACVHKMLMIVYGVLKNHRPYEPPQNNPPPEPT

SEQ ID NO: 429967 - protein, 310 aa, unidentified
MIMIGQNWIGCDVSKQTLDFFDAGRGRHCRIANEENAVAAFASQLRAGLDFVVMEATGSYDRLLRHKLADAGIAFSRHNPEHTHHFAKSAARRAKTDRLDAVMLADYGRLHTPAADPVPDRKRERLQALARRRDQLVEIRARQKKQLAEAFDDDVAADIEALIALLDQRIGALEAITRKAIDEAGTAADDLAIMISAPGVGNVTALTLIAHMPELGHRSPKAIAALAGLAPIDNASGKKKHRSSIAAGRSRVRRALYMAALASIKARSRFKAAYDAIAARSGSKKVAIIAIARRLLVSLNAMIRDRKHFA

SEQ ID NO: 429968 - protein, 349 aa, unidentified
MTIVEDRPVITGGVDTHADLHVAAALDPLGGLLGVQEFPATATGYAQLLDWLGGFGPIALVGVEGTGSYGAGLARHLAVAGIRVVEVDRADRQDRHRQGKSDPLDAVSAARAAQSGRASGAPKGRDGAVEAIRALMVAKRSARAERTQAINQARALIVTGPDELRARFAGHTPAQLVEAIAALRPRPGDVPGYATRVALRELGRRAQFLDAQLDRLDELIGPLVTARAPGLLRLHGVGPDTAALLLIAAGDHPERLRSESSWAHLCGAAPIPASSGKVSRHRLNRGGDRQASHALWRIVITRLSSRPGHPATRAYAERRTKEGLSKKEIIRCLKRYVAREVYHQLRGGA

SEQ ID NO: 429969 - protein, 340 aa, unidentified
MNITTLGIDLAKNNFSVVGMNEHGKVLLRKSLTRAKLLPFIAQCPPCLIGMEACSGAHYWGREFEKLGHRVGIIAAKFVEPFRKGCKNDNNDAEAICEVVSRPNIWFVPIKTPDQQAVLCIHRARQGLIRERTGLINQLRGLLSEFGLVMPKGRYTAQAHIPRILEDAENDLPHLARSIINDLWQRIQHANDQILTYDRDLARVVREDENAKRLMSIPGVGEQVASGIVASVPDPRLFKNSRQFAAWLGLVPRQYTTGGHIRLGRITKRGDKYLRMCLVHGARAVVANLRDKQDKVSCWARELIQRRGYLRAVVALAARNARLIWTLMVKQESYRAMPAQ

SEQ ID NO: 429970 - protein, 391 aa, unidentified
MLAMMDCCCGLDVHKDVIYACILKGSPDEEPVAIHAQFKAIQSDLQAMCLWLMEHECFNVAMESTGVYWRPVYEACEEHLDGLKCLMLVNAHHMRNLPGRKSDVKDAEWIATLFRHGLLKPSFVPERLIRNLREYLRLHRAFVEERSRYANRLEKFLQAHGFKLSSVLSSILGASGRRLLTTLSEKGVLSPIDVSDAIDRRVKTPMEEIRLAVNGKLDHSERAFLKILLDKIDALDNEINTIFSLMQELAKPYKIQLEQLDSIPGIDAIAALAILAEIGPTPHDSFDNPKKIVSWAGLSPRNDESAGKILSRKITKGNPYIKSLLCQVAWAAVRSRKSCFHAWFWIHQGKLGRKKAIIAVARKILVLIYKLLKSAEFYDPVKVNAPVQSPC

SEQ ID NO: 429971 - protein, 424 aa, unidentified
MNFKMQNKQNQLIERITDQHLVVGVDIAQHVHVARAVNYRGIVIGKPLSFENNEEGFTRLLNWIKELKHMKNLDTTIVGMEPTGHYWINLSKWLVKQNIDVVTVNPHHVKRNKENRDNTQSKSDKKDALVIADMVKNGYYAFVRSTSESFEKLRVLMANRDVIVKRLVSSINQINRWVDVVFPELRQVFKDVSCKGAIATLRLFPTPAEICSLQPQDIVTGWKSCMKRHSGHKKARSLIRLAKRSIGTKQALDAYKLHLEQLLEEYNLASSQLERVTQEVTNVLEQIPFVKQILAIKGISEISLAGILGEAGDLSGFAHGNALLRHAGLHLAEASSGKWKGQIVLSKRGRSRLRRYLFLATMSLVMNNPEFKALHSNNVKVKKIKKMKSIMKLCGKLARVLVGIARNGSVYKPEMVFPLEQLAA

SEQ ID NO: 429972 - protein, 309 aa, unidentified
MKEELVYLGVDIAKAYLDTAMGNEKSRFSNDALGHRQLINWIKQMPAKVQVICEPSGGYERALVRALVGAQLKISLVPANRVRQFARAAGILAKTDRIDAKLLCAFGEAMQPGTISASQLEQQHLRELESQRRHLTHLLVMEQNRAARMSDLCVCKMNRRLITQIKKQIEQLELLIQGQIKASPELSTKAEKLTAISGVGARTAALLLAQLPELGQLNRREVAALVGVAPFNRDSGRMRGKRAIYGGRKPVRHGLYMAALVAAHHNPILRNFYLRLRAAGKPAKLALTATMRKLLIVLNSALKTDLNYA

SEQ ID NO: 429973 - protein, 343 aa, unidentified
MKLHVLGIDLGKTVFHLVGLDSTGRVVIRKRCSRKQLLAFTANLEVKLIGMESCSGAHFLGRALREQGHEVRLMPAQYVKPYVQTNKSDYLDAEAIAEAVQRPRMRFVPIKTEEQLDLQALHRVRERWVMRRTAVVNQIRSLLLERGLTLPKGRSHLDQQLPRILEDAELNLSGSFRVLLAQLKLELEQLAARIEEMDRVIQQTAQENEACQRLTEIPGVGPVTATALIAAVGNGSTFQKGRNLAAWMGIVPGEYSTGGKQKLLGISKRGNKYLRRLFVQGARSVLQQRHKQAPGLSRWLAQLLGRTHQNVVVVALANKLVRMAWAVLCKNERYRAPVFAVTT

SEQ ID NO: 429974 - protein, 431 aa, unidentified
MNCNTQNAKIETINEKTLVVGIDVGSETHYARAFDWRGYEYSKKAFPFSNTEAGFVSFLEWMQDIAKDNGKEELMPGMEPTGHYGFDLGKFLQDKGIKPVLVNPYHVKQSKELDDNNPSKNDRKDPKVIAGLIKDGRFTYPYLPEGVYAELRSASNLRFQTQEELTRILNRIARWFSIYFPEYKDVYGKSDSKSGLMILEQAPLPADIRALGVDGVNKIWRDAKLRGVGMKRATKLVEAAGHSIGSREGLTTARMEIKNLLSDYERYSKRMEEVVELIDELVKEIPYVEKMLQIKGVGIKTISGLVAEIGDIRRFDNPKQIQKLAVYALVEDSSGKHQGETRISRRGRKKLRYLLFEASLSLVGKNEEFKELHYYYTHREENPLKKKQSLVAVACKFLRIAYKILTTGVDYDGAKMIRDIRRPQKQMLQAA

SEQ ID NO: 429975 - protein, 349 aa, unidentified
MILVGCDLHTRKQHVALLNTDTGELWDQELVHDGGAVERFYAALPPPVIVGIESTGYSLWFHALLQRLGHSLLVGEAAKIRAMVVRKTKTDRRDARHLRDLLKDNRFPRVWIPDPTTRDLRALIKHRLRLVRIRTMVKNGLHAIALNQRLALGSSLWSRQGLAQLQALVLLPHTRQRRDDSLELLQWLNGHIDALDLHVAAAAAADPDARRLMTHPGVGPLTALTTVLTLGPVARFPGSKHVVSYIGLAPAVNASADKYRLGHISKQGSALLRWVLGQAAPLATRSDAQLKHVYFAVLRRRGRPKAKVALARRLLVRLYVMLRDQIDYDEFCRRGCAQRPGLETARVPG

SEQ ID NO: 429976 - protein, 439 aa, unidentified
MKNMSKILFVGVDTHKLTHTAVIINCWGERLGEITIENKPSAFPLLLEEVQKHTRNTRKAIFGLEDCGGVGRALAVFLLQNKKEVKEVDSSLAEMERKALPIYHKDDSFDAFCVARVMVSRLESLRNANPQDFYWTINQLVGRRGALVETAMALKNQLHVQLAHNYPSYEKFFSEIDGKTALLFWEKYPSPAKLKDATLEELTTFVSEESHYFLSVGKASDIKYMVEKDGSTEIEDYQYIRDFLVESIVREIKFINTEIAKVEKEIEAIVNKLDYKLHTMNGIGPVMAAKLIAEIGDINRFPTPAKLAKYAGVAPITYSSGQRERQYKSRQGNRELYGIFHLLAVHQIIENRNTGEPRNPVFYEYHKKKISEGKTSGQAVVCIARRLVNIIWGMMKNKTEYRQPDFVEMTYTNQAKARKAEKKLKNQNPKTNIPKPKSK

SEQ ID NO: 429977 - protein, 347 aa, unidentified
MSSVTIGMDLGDKKHQMCVLDEAGSKVSEATIDNTAGAVRKYFRPYADALVAMETGSHSPWISRLLRSLGCRVLVGNSRKLRAIWNNPHKSDVRDAEMLARIARFDPQLLYPVEHRSESAHAHLELIKARDVLIRSRRSLINHVRGVVKAFGLRVPACSAESFALRAAPHLPPMTREALEPLLKTVQELTDRIRDYDRQVATLCRQPYTQSERLQQVSGVGPLTALAFVLTLEEADRFAQSRSVGAFLGLTPQRDQSGETDKQLHITHAGNGYLRQLLVTCSHYILGPFGPDCDLRRYGQRIATRGGKNAKKRAAVAVARKLAVLLHRLWKTGADYEPLRTTGSLPT

SEQ ID NO: 429978 - protein, 309 aa, unidentified
MQNPSFVAVDIGKDSLHIQTSSLAFETTSGPAGLRKLLAYLRKEEDPLVVCEATGGYERPLLEALAKAKIAYCLINPARLRAFAVSEGIKAKTDRIDARVILRFAQEKKLTPSLPLSPAQRLLADLLDRRSHLSDQIAREKNRLQKASKATATFIRRMIAFAQRQLQTLDRAIRLHLSKQPQLSAQARELISVQGVGEVTAWTILAYLPEIATLGRNQLVALAGVAPFNRDSCQTNRKRRILGGRAKVRRCLYMAAHTAATHNPVIRPYVQGLLARGKPYKCAIVAAMRKLLIHLQSKLKNLTNFPIAA

SEQ ID NO: 429979 - protein, 389 aa, unidentified
MFYVGIDISKFKHDCFIVTEAGEVVCDSFSIKNDSDGFTELLSVLDSLDPKENVRIGFESTGHYALNLKLFLEKAHYSFMEFNPVLLSKFNKSQSLRRTKTDAIDSISIARWLMTVDYKPYPIGFYHTYALKSLTRLRDSLVKQRSFYMVKITNVLDHVFPEFKPFFNNRFSKTAIYLLDNYGSAKSIANMNTRSYDALRSISRGKFSMQKFIKLKELAKNTVGCDHELFTCQLNSLLSLYKQLANEVESLESQIESLIVEIDPKTLSIPGIGPLSAAVIYAEYGDLSKFNSPAQMLSFAGLEPGYYQSGTSEHGGGMVKRGSSHLRYTLMNLCIPLIQYNMTFAEYYHKKRNEGKSHRVACSHLVKKLIRVIFTLEKNGIDFDPTKLR

SEQ ID NO: 429980 - protein, 338 aa, unidentified
MEFKRVSIDTSKHVFTIHGVDEEERPVLRREIRRAQVEPFFAKLAPTEVVLEACAGSHHWGRVLSDMGHRVKLIPPQYVKPYVKRSKNDRIDAEAIDEAASRPTMRTVPVKTADEQAATIIVKHRDLMVSQRTQAINALRGHAAEFGIVAAKGCANVTALLAVLSAEQAIPAIAKAMFEQMGQHVADLNAKIEALEKQLLEQHKANAVSKLLAAIPGVGPIIAVTMALTVNPANFKTGRHFAAWLGLTPREHSTGGKHRMGKISKAGNERLRTLLVVGAMAVIRFAKPGSKSASAWLLQLLERKPRKLAAVALANKMARIIWAMMARGETYRRQPVAA

SEQ ID NO: 429981 - protein, 344 aa, unidentified
MSSIDYIGFDIHKKMINFCAKAQDGTILEEGTIPARREALLAWARARPRPWIGAMEATLFTGWIYDLLKPLAQALKVAHPPMLKAIAVAKKKNDKVDARMIADLLRCNLLPECYMAPVAIRDLRRVLRYRNLVVREATRMKNRIAGLLMETGTAYNKERLHGKAYFSELLGSLQEVPGSVVELLKLSRGQLEFFAAIQRRLLKGLREHADLNQRVMRLQTIPGVGEILALSWALEVGEVKRFPSIGQAASYCGLTSAQHSSAGKEQREPISKQRNQHLQTILIEAAKLAPRYNPQLAAVHERELQHGNRNQATLAVARQLVAYLLAVDKSGKPFAMRASTQEAA

SEQ ID NO: 429982 - protein, 456 aa, unidentified
MQHYYLGIDVSKGYADFVILNDKKKPIEENFQLDDTFEGHCCLYERLLRFFEDHPDSTIYAALESTGGYEDNWFSALIKFQGTLNLKTARLNPLGVNANSKADLKRNVTDKISAQNVAEYMIAHPDKISYQQQDHLASLRKQWGFIKMLTKQSTQLLNQLEVLIYNANPELLVYYKDGTPGWFLRLLIHYPTASSLSKAKIVKVARIPYISPDRAKKLVGNAKKSVASATDKVTGKLIIATVKQILHLKQVIKAQTKLMAQECPVPEVDLLKSFIGIKDFSAIGLMLEIQTVERFLSVKKLASFFGVHPVYKVSGDGIGGFRMSKRGRKEPRQILFMVTLTAIQSSPLIRGIYQEHIQKGMEKMAAIGLCMHKTLRIIYGMLKNNSAFDPEIDRRNREKMVIHNSKVNKDKNRRYQAFDSNAPISRRQHGKREERKQSHSDNNTNNGIIAPAPLST

SEQ ID NO: 429983 - protein, 475 aa, unidentified
MNLKGKKTKNQVVTANIFEQQELLKKAEVIREKLTASTWHELETNGKFDKNAKLSFISDDMLILGCDVGSETHYLRAIDPRGRELSKSAYSFRNNCEGFQSAKEWAVELAAKNEKKQIVLGLEPTGHYWFCLATWMIANGISVVQVNPYAVKQTKEVEDNSQFKDDTKDPKLIANLVKDGNFGMPYLPEKVYAELRRLSMFREQLNEDRIRAINRMHREMKIYFPEYKEALGRVEGAFSLELLKQTPFPEEIQTLGEEGIRQIWHDAKLRGRGYSRVREIVGYAKTSVGMKDGAEASAMAVKWFVKEIRELDEKLAEIEKLMREKYQEIPYAKNILEISGIGENTLSGILAEMGDISRFDDVKEIQKLSGLGLVACSSGKHKGETKISHRGRKRLRYWLFQAAKSAVAHAEEFKELHVYYTTRADNPLKKMQSLIVIACKLLRIIYGILKNGTVYDPKKMLRDIRRPEKKEVIAA

SEQ ID NO: 429984 - protein, 402 aa, unidentified
MAYDCVIGMDVGKYFHHACVLDPQGRQVLSKRINQHEGSLRKLFGTYLADNASVLVVVDQPNNIGRLTVAVAQAMGADVRYLPGLAMRQLSRIHVGNSKTDVRDAYVIAHAGLNLPDALRSVDRVGEVFLQLKVLNGIDEDLARAYTRLINQMRSALVGTHPAFEHVLHGQMIHRKWILHLLAKYGGPTKIRRIGKARLAAFARGHRARNPEPVIDAMLAAIEGQSVTIAGAEYAELGVAMSAKDALAKLEHRKEIEAQVLELIQDIPQTEILLSMPGIGPRSAAQILMTVGDMSDFPDAAHLASYAGLSPRTNQSGTSIMSNSPNRAGNKKLKNALWQSSCASIRFHERSRQFYERKRKEGKRHNAAVVALARRRLNVLFAMMRSGELYRDISTVQEAAAA

SEQ ID NO: 429985 - protein, 389 aa, unidentified
MLLDHPTDGLTAIRTQFAAIFMSLELSRSNWLVTSLSPGKGEKMSKYSLTAGDVAGLMRLLADLRRKAEVRTGQSYPIITIQEAGLDGFWLHRVLQQQGVESHVVDPASIAVPRRRRRAKTDKIDGETLLRTLLAYKRGEPRVCAMVVAPSPEEEDRRRLCRERRTLIEERVRHGNRIKGLLFAQGISDYAPLRRDRRARLEALRTGDGRELPSHLKAQIGREFDRIELLLEQIKSVEAAQQALLAAARKPASEKAAPDPVTMLLALKGMGANFTTVLWSEAFYRSFSNRRQVAAYAGLAATPWQSGGIRHEQGVSKAGNPRLRTTMIQIAWLWIRHQPQSTLTRWFKERSHQGRKRAIVALARKLLVALWKYVTQGVLIEGAVMKQAA

SEQ ID NO: 429986 - protein, 366 aa, unidentified
MAITHVALDDSKRVIVAGILRADATQPELREIPNDPRQVRRLFQRLLQEAPVRACYEAGVSGYDLYRQLTALGVDCAVIAPALTPRKPGERVKTDRRDAAKLVRLFRAGELTAIHVPTEAEEGVRDLTRCRDDVRADVVRWRHRVLKLLARHGRVYQTGKNWSQAHWSWIRAQRFEDGALARTLDASLEALEQALRRRAELDRAIEGLADDPRYREAIGALRCFRGINTLSAMILVAEIVDFQRFRRPRALMAYLGLVPSEYSSGDRHRRGALTKAGNTHARRVLVEAAWHYRHRPALGDRLARHTSDQPPAVVAEAWRAQQRLHRRYRHLVGHGKRPTVAVAAVARELAGFIWAAMTQAPRVLAA
